United States Patent Application Publication US 2014/0057251 A1 - sequence listing, part 96

SEQ ID NO: 175409 - DNA, 1617 bp, Cannabis indica
acaaatttgaaaagttggcttaattagcatttgtcctaagtgtatgggtatatatgacttggtcttattttatattgaatatcatttttataaatatttatttattaaataatatactttttttatttttgctgaattataaataaatatacttatgtatggttttttggacttttttcattttggctcattttacaagttcatttaggtgcctccaagtggcagtcatttagagccttaatgattctgtcttagataatacactaagtttggtactaatttttaagtaatttgctaaataattattaatataaatatttaaatttaatttagtatctaaacatttaatgtgaaataaataattatgtcacagtatttaattaatttaggtcattaaaattttattttctatttaaaaattattttaaatatactaataaaagtataatacgtgaataataacttaatatttaaaggcgaaattctaaaaatataacttaagtattaaatttaaatatttatatacaattaaaaattaaatttaaatatactactaattaatcttaatttttttattttattttttcttgtctctcgtagagcgaccaattttttttttttttgcaaagactttttggtcctttgggaatatactcttattttttaaaatattgctcaaattcataacctcaaagtgttcatcattttctaaatcatggcaaaaactagattacaattgtttaattaattattatttgtattttacttgtgtccaaaatggagggttaaacagtcattttagaacaagtcaaaaggttgtgtttgggggacaaaacaagttccaatatttgtttttaattaagtcgtataaaaaaatagataatatataatatatatcttaaattaatcccacttgctcttagaaaattcaaaagacaattcaaggatatataaatcatctcatatcatcaccatcatcaacaacattccctttcttttctcctaattttctcagtcatatacacattttcttggaaaatataaattcacatttatggagatccaatttcaaagtagcatgatggcaaagaaaaaaggaagaataaacaagagaaatatgaatagttataataacaataagaagtttgttggagttagacaaagaccttctggaagatgggtagcggaaatcaaagatacaatacaaaaaattaggatgtggcttggtacctatgaaaccgccgaagaggctgctagggcttacgatgaagctgcttgtcttcttcgtggatccaacactcgtaccaacttcatcactcgtgtttctatggattctcctctcgcttctcgaatcaagaatctcctcaacaacaataagaaaaatagtaataatgagaacaacgatgctcaaccaaaacaacagaactttaatactagtactactgttactgccagtaatactagtactagtagttctacaataactagtactgtcaccagtactagttatgattcttctaatttctctagtgaagttcttcgagatcaagaacacgatattcgctcgaataatcatcaccatcacaataatttgtttgaggatgcatacaaaccgga

SEQ ID NO: 175410 - DNA, 601 bp, Cannabis indica
ctttattatttaccagttctttatttctttttctctctcatataaatcataaatgtttccagttttgttttctccatctaggattaccaaagtaagtaaacagcatattacaatgtgctcataatacaaattacttttatttattattatttattattattattattattattatttagctcaagctgctatatttgtgcgtgcatctaacgactttgcccttttttttacttaattattaacagaatctatctttgtctctttctttccttccttttggcgttggtttattggaattgatctttctctatcggtattggggccaaaaaactggaccaatgaatgtcattcatacagaaaacgaaaaaagatgccgcatagctgaatgttttgattatacaccaaatcattctataggttcaaaagcccaaaggccaaaaagcctgacacatgaatcctcaacgaaataacagcatgtcctcgattgtattaattattacactgtacctaaaatacaagaagagagaccaaaaggggtaccaactaccaaatgaaagttcagcattcactacacatcgtccaaggcctatttcatttgtat

SEQ ID NO: 175411 - DNA, 426 bp, Cannabis indica
gcagaccctacccggccattcccaggtacgagtgttggctttggccagtcaggcctacactcggttgttgtccttggctggccacacttgcattgggtagggtctggccacccattgctctttcatggccagccagacctacaaagggcaaggtctggccgcccgtgactcctcagttgactgatcttggttgtgcgttgataagaggtagatcataccgattgttggagtttggtggatctaggtatttgaagtgatcaatttcacttcttaaattgttgttttgggtgtttccacccgctcgcgatccttttcggttgaagattgacctttgggcgcctcgctcccctcctgggaggaagtgttatcctctggccgactaaggagtcttctgtagatggttggccagccaaaggctgtatgatg

SEQ ID NO: 175412 - DNA, 562 bp, Cannabis indica
caaattaaatacctagaccaaaaataagaacaaaagattacgaaacaattcaacactaattatcgcacgttatcataataactatataaaatattaaatggtatatatatatatatatatatatatatattttgtaacttgtatgtgtgtgtggggagcacaatgtttaggtacgtatacatagttgatgataatataattaagaaaaaaaaaaaaagcacctatatataaaaaatggcaggctgtagaagaaacacacctaactgtttatgataaatatataaataatagacataatttggtctaacgtctatggacttgccttaatactcgcctatcattaactattatctcttttctctcttctctcattttccaactcaatcataatcttcattttcatcatcacaatcttcatattcttaatcttcatcttcatcattataataatcctcattctcttttccacataccctttcatttcttttgcctgaatctctatcattattcctataccaagaataattacttaattatacatatttacatattatagatatac

SEQ ID NO: 175413 - DNA, 656 bp, Cannabis indica
tggggtgtcttcagacatccgcgcgcgttgctcggacaaaatcctgtccgaacacgcgtgtgaccgaggtgcactcggttccgcgcgcgcgtgaggatgcacagcatccttatctttttttcgaatcttcaaaaaatcataactaattcaaattaaatcgaaattgagttctgtaaaaaagtaacttgcttaattttttccatactatccaataaaaataattccagaaacaaaatttcaattatttttcacgaaaattcacaaacatcaatcaatcatcatataacactcaatacaacatgaaaccatccaaataacaaacaatcgttttaaagtccaaatttcttgcaagcaaatcaattaccatggctctgaggccagttgttggaatttattttaccaggatcttagatctactcacaagtatgttgtttaacaccctaaatatgaactttctaaaacgataaaataaacacatataaagttatacgtaaaaccttactattgatgcagcaagaattaatgtctccttccactcagatctcctaacccttgtacttcctttctgtagcagagtataatcaagatatgacgcctgaatcgtccttcttctttgtagtttgacttccttcacagttccttaccaatctatgtat

SEQ ID NO: 175414 - DNA, 804 bp, Cannabis indica
gaagcagcagcagcagagcagaatcggcggagtagaacagaggaacaacgaatcggtggtcacgaaggcagaggtcgggaatggagtaccattttccgacgacgtgatcggaattgtaatcggcagcgagggcatcaaatattcccgccatgtgagtagtagagtgaagtactgaagactggactgtattgagtgttgtgagcgtgacaagttgacccgcctatatgtgtgtttgtgtgtgtatttttgtcgtgttgtcttgtatactattttttttagttttgatagataaatggctttgaagtaaataccattaagggggctcagtggtgaacccgtttctaatacttcttgtaaatttaaacgagattcaatattgaatgggttggtcactgggtttctaggagactcgataaaataaggtgatgaaaattttataactgccctttcaaacaataaaagctgtcactttgtcaactacgtcattacccaattttggctgaaaaataaaaagtgtgatcaagtgctagttgcttgcaaaagtgtttgaacaatattcatattgaaggctcttcatgtctcatttcatgcctcaccaattttttatttattttttttaaattaatagtaataaaaaataaaaaaaaaaaaaaaagaaaaatgcaatatgtgatttggaaaggtaaaaacaatcaacaatatgaaccatgattatacatatataaacattattgaaagaaaaaaaaaacaaataagtgaaaaaggaagaacatttaaaataagtgggagctatgagattttaac

SEQ ID NO: 175415 - DNA, 623 bp, Cannabis indica
agagcactcacatcagcttctctactctttttcccaaaatatttcataataatacttattttttttttttattttacctcaaactttaactttacacatattatgaaaacggaaacaattaataatttacgattcagtttaccgaactaacaaatacacgacacaatcaagaaaaaatatttcaagagatctcaaaattcaagtaatgaattaagaagtaaaacaaaaaagaataacatcaagtttaacgagttcgagtcatgtacaatgctctacatctcgattggaacagcaaagatatgatatcagtgtttacaaggttataagaatcctcacaaactctcaaagattacgagaagaagtttctctcttatttagactctctctctcaaccttatactatcataatttccactcaaaaaaatcttatctgattcacacacagttacaaagatttatatctatttatagatttgtattgttgtcatatatattcatcaatcttcattctgagaagttcaattttagtagcgtggatttttgcaaacaccttgggtcgtttttaatttcaacatgtttcaggaattctgggtagtttgtatatagttctgtaagtgagctct

SEQ ID NO: 175416 - DNA, 607 bp, Cannabis indica
ttttttttttttttcacgcttttcacgattcaattaaaaagaaataatgtgcagtactaaaactaaaaattgaaatactaacaaaacaaccaaaacaaaataatacttgggctgcctcccagaagcgctgtgtttatcgtcatacagctagacgctgagccttgcacttcaaagtggcgccaggatcatggcggacttggcttggtcaaactgacctcccaagtagagctttaacctttgtccattgactttgaaagttgttggactttcaccttttaactccaccgctccataaggaaacaccttgaccaccgtaaatggtcctgaccatcttgatttcagctttccaggaaacagtttcagccttgaattgaagagtaacacttgctgtcctggttgaaactcttttcgtattagaccttgatcgtgccactttttagttctctctttgtatatctttgcgttttcataggcttcgttccgaaactcatctagctcattcagctgtaacagtcttttctcccctgcagcttttagttccatgttaagagtcttcatggcccaaaaagctctatgctctaactccaccggtaaatgacaaaccttt

SEQ ID NO: 175417 - DNA, 525 bp, Cannabis indica
gcccagcaaatgatcttgtccggctgtcagaatcaaacgcacccttaaaacgccgtcgtttcacccatattttcgttcacatccacttctttagccctgactgaagtgaaaaacaaaagaagaagaagagctcagctaatcaaagtcaaagaaagcaaagtaataagctttttccctcccagactgaaagagggagagagagagagagaaagcactttccttttcatctccagtcttcaaaagtacttattctaggtatgtattcctgttttatttgatatcatattttctttttcttccatgggtttgtttctgattgtttttttagtatctgaaggctcttctctttgaaggtttagtgtgctagtgtattgattttcatgggttttgaagttcgtttacaggtgggagaagttagggttgggatcttcttgttcttattttgatctgtctctttggaaatgtgtaattctctacataaagttgtagtctttagatctgtttcatttgattattacttgcttt

SEQ ID NO: 175418 - DNA, 720 bp, Cannabis indica
gttaagctatggctgaaaacagtttggacttcctatcaaaagtgccaagctgatcggggtggtgaatacaagccattcaagagatttttgtctgatcaggtcatcagttttctctcatccctgccctcacactcatgaacaaaatgggaggctgagagaaacaccgccatatcgttgaattggcttacgattctagcacagtctcggttagacttctcatattggtggtatgcatttcagtatgctactttcaccattaatcgtttacctaccccaattcttgatgatattagtccttttgagtgtctttttggtcaatcaccagattataccatcctcaaaccttttgggtgtgaatgtttccctcatctaagaccctataactctcataagatggatttcaggtctgagaagtgcatttttcttggttactcaccatatcacaaaagctacctttgtgaaagtgcacaaggtcgaatatacattgcaaggaatgtcaattttaatgagactcaatatcctggcactttgtctgcatctgcaccaagtcaggtatcattctcatctcatgcttttcctactgctacttttaataccactgctaataatcctattgttcctggtgtggtgcttcaacattccactgggccaacatgtgaccatatccctcctcccattgtcccagcaacaacacagcattcatcctcaccacctatctca

SEQ ID NO: 175419 - DNA, 1439 bp, Cannabis indica
acgattttttcgaatcgagaggcgaaatcacaaggcactccgtaccagttttggtgcaccagagtgatagataattaatagctacaatagaaaagaaaaatgttatacacaagggtattatagtatttcatataatattatgaatttgagggaatattggaaaatgaaaaatatttttgtacctgtataaataatgatcttcaacatgccatgcaaacatactatataacatgccaatgtatagcataggatctgttattccctaatttaaaaaaagaaaaaaataaagtgtataagaatgtgaaaatagtaatgataattataattataataataaaatgaataaaataagggtttttatttattttttattttttttttttttaccggaataactctgtccaataaacgaagtgtagaatttggaagcttggaaagattctgtgaatattaacaaagaaatataaatcaatgaaaatagactttttataacacttttaaaagaacatctgtgttataaaaaaagtgttataataaacctttaaattccatttgcttcttccaagattatcattaggattagatgaaaaagcacttccatcaatattgattccatactcaacaaaacaacccttttttccaattaacatttcatgccaaaaattcttttctataagaagagaattagaagactgaaatcgcctcttaacaaacactttgttagccatagtttcgaattctctataagtatattttctgaaaataaaaaaagaaacttgatcaaataatcatcacttaattcatcacaaaaaataatgtcaacatacaaaattaccttcctctcttaaaaaaggtgaacttgtccttagaatccttaattcgaagaggttgaacatttgtttcgaatttgaaccctttaatctcttttgagagtacaacattggcttcaacacaaggttttatgggagaaacaatcttacaaattcctaaaaaacttcaaaacaaatcggttagaaaatgacatcgaaaaagaagatgagaattattagaacataccatattttgaagcatgagatgaaatggtttggagatagtgaaatggatcatcaaattcctccattgttggatgatatataggacattttggaatattttctatccattgtaactcaaaatcatttatattattattattcttatttgagaagacatgttgatctgttaattacaaaaataatcaaaagttcattaaaacaatattaaaatatatatgtaggatttaatgaagttgaataaattagatgaaaaagactaacttgtgttctgtgaaggcattgtttttgagagaaaaatagtcgtatgaagattaagatattataatatgtttttcaattttttttgtttgtaactttttgtaattgaatttatatataaatata

SEQ ID NO: 175420 - DNA, 504 bp, Cannabis indica
agagagagagtggtttggtgagagtaggggataacacaaagaaaactttccctttttgttttcctacaaaattctaatttttaccaaacatagaaattagaggtaaaatcacaaaaatgccccaagggccaattaacatgcatactcacttccaacgacaaaatggtcatttcataccatttaatatccaaactaatttcagatgatcaaatttaaaataacatgccaacacttaatcacaaattgcatttcgggcccgaacccggtttcgcccgaaatacccggttgtgactataccgcaccaacctgtcaaaacacacctgaaaagataacacaggcatagtatataataatatagttctattaagcacgtaattaaattaaattcatcattttacccttctcgggtcataattactaaaattcccctggctcaccaacggggtcttaacatattaaaattcatatgaattcacatatattgaactatataataatataatt

SEQ ID NO: 175421 - DNA, 699 bp, Cannabis indica
gtatttattatcatgttgagcataaataaactagtgtaaatatatttatttgatatatttaaacggttatgaataaacgattattttatatattgttatatgtataatatttttagtaaatatgtatagtgtactatcaattattgtttcaagaaatatgtattatatatatttatgtatatactatttctatatcacgattatattgttataaataaagaaaaagaaaaggatgaatagaatctcattaataattattatcatatacataataacacactatatttggaggtacaaaaaaagtatttttcaagtctaaaaatggcattattaattaattataatgcaatatagctagctagataatgattcaatcaaaagattttgattatatatatcttgttattgttaatgatcaattaaacatattcatatgcatatgcctatataaaatctaaaattatatgaaagaaatcagacatatgggttccaccaaaagatctaattaataataataaaaaaattaatacaagaaattataaaagaaaaattatggaatggattgggtcacaacttcactcacaacttcacaagacacgtactaaggccaaaagaaaaaaaaaaaaaaaacttacacaagaaatatatatatatattttatattacacacactcatagattcctatcaattccctccac

SEQ ID NO: 175422 - DNA, 801 bp, Cannabis indica
aatggaatggaaaatttgtattactattccacacataaaggagtacacagtacaattgtatttataatagaggagacctattaagggacacatgtcactatataataaaagcaagaaagtaatacaattaaatacaaagggataatttcatggtttaacatttgtaaaattggtttgtatattattttttatcaagcaaagatgcctatcctcaccaataagattatatcaagtactacctagtgtataatgatagctcctaatctttattttaaagtttttgacttgaatttcatgcaatatcctatggagtacaagtgaaggtatggatgttcttgtcgaggaaggctatcaagcattacctaggggataacaaaagctactaggctttattatttcatgcaatatcctatggatggactccaattgaaggtacgcatgctatcattcgggttttctttgggtcattgcccgttatcaacattttctaatcttcaatcatttatattagcttcactaatcctgcaacatttctcaacttgtttttgtcagctttgatgcctattgtgtatttgccatctaggtattgacattgcatccgatgtatccaatttcttccacaattgcaatataactagagtaagattcaactactactaaaatctatatttatttttccttggataagtttttgcttctctcattttattattttttttgtgaccaaacccttgtgtttaatctttgcagttgctgttacacaagatgatgtcttcagggacttagacccccaaaataagt

SEQ ID NO: 175423 - DNA, 630 bp, Cannabis indica
ttttcctcttcctgggttgggttactttctatttgtgatacctgttttttcatgtaaaacgtgattttgtaaagctaaaaacttttttttttcttttttattttgattttgacatattttgcaaatgctttgccttgaaattatcttggtgtaactttgagttttatccctggtttggtgggctttaactttcgtagcttagttcttctaaatcaatgaatttctcatgtacttgtattgtatgttcattagtaactaagtagaatatcaatggtgtcacgcaaaactttttctttttgaactatatcagcttcttttcttgtttcagattttggctcctcggctaggataccttcctttgttggcttctcaaattaaaccccacttcagtagtacacttcctcctggtgttgacaccatttggtttgaatacagaggattgccactgaaatggtatagctaatttattgcattatatatacaaataaatatatatatatatatgtgtgtgtgcattatagtacattttaccactttggaacgtcaataatggaatacatcacagagatgaatcattgcaaataattattacaatagcagaaagagattacaatactttgggaacagaac

SEQ ID NO: 175424 - DNA, 1126 bp, Cannabis indica
acttacacttgatctgaagatcaagacaacagattgattaatttgcactagtttgttttatgttagtgcaagtgggagtttgtgggtttttgtccctaaataaaaccctttacaatctgattagttatcaatataagaaatttgaagtgatttatgtttgcatgaatttttacatgcttatggtttaatatgtttattatatttatacacagaatcagttaagtccagatcatatgtttattcacaattacagtattgtcaacacagtagaatgtgattgtgattatatgattcaaaagactaagtccctgtttcatcaatgttttggatttacactgatgtgataatcagcgatgatgtgtacttacacttggagtaagtgttatgttctttccaggacattggtaaagtatactagtttcgaatgtatggagtatacatttgactggaccaaaaaaaaaaaaaaacttaaaaaatgttattcatacgtatttctttctctctaattaaatttgttcttgttcatgtactaagaaaaattcaagaatattttgtatatcctatcaacacacactgatccttgtgtcttgtggttgatctaaaagatcgtgatgtgagacattactgttcctggatacaacttacgaaaaatgctcgaatatacttgatagttcatcaagaggtatttattatttttttttttttgttcttttcgttttataatttgatatttatgcatgtggaggatcctagggtgtggtacgatgataatcttattaaatacttctgttgtacaccaaatttagtactacaaaaactgataagtctatcatcaagccaacttttttggtaaatacttagctatcaccttctctaacttgtggatcggtttaaactttgagtccaaggaccttttaaagtaggggtgttcataaaatagttaattcaatccaattcgtatgatccaatctaatccagtccataaagtgcggatatctgtacttgtgcggattggattggattgaaaaatctaaaatttgcacttgtacgaattagatgttgattgacatgtaaagtaacctattcaatccaatccacacatagttatataaaactttaaaaaaat

SEQ ID NO: 175425 - DNA, 644 bp, Cannabis indica
gttatataaatatagactttcataagattaaaaaatttacacacactcataagcaaagctaaggactattagggggcggttgtctcatgagaaatttgattcgattctatgttattaagggtttaaacttaaattaattttttgacctttatataaatattatcaaattgtattgtatagtatagtggtaaatttatatgtaaaatttaaggagatcataagtgcaaaacttcatttactttatgcattatggaggatttgaacctaacaataaatttaaaatggcattatattaaaatttattttaacattattttttatttatattatattttattatagtcaattctataatttttaccaaatgttcaagtccacataatataagaataatactgtgatttttagtaccaccatgagtggcgccctgtgaatagttattaatttttatattcataattaaaagtaaaataactaagattcgatattatattgcacaattgcttataacatttcataaagggtgttaagcaccataaatttattataaaaatagataatcgtcctacttaaattttattttttgactttgccccaagtgatcagaagaaggttcaatgttctctattttttttttactattt

SEQ ID NO: 175426 - DNA, 658 bp, Cannabis indica
  modified_base (574)..(574): a, c, t, g, unknown or other
tggtttgtaaattttgcaacaaagtcaagctgataaagacaccatacaagagccatagaagacaacaaaacaggtaaaggaccaagcatccatagcatgaaaggaaagctaatgcaaagcatccgattgctgaccaatgccaaaacaaaccctttttcgaatactgtgttcgtaacgttcaaagaagaattagagaactcagaggaaacattgttcaccataaaattggcatcaattagagatccaatggccattgacccgaacaagaagcttgctgatagaaaaagtgacgatgatccgtacttcaaagagtagatcttacttgattgagatccaaaaattggatggatgcccaagagattagtaacgttgaaagcgttgtttagtagggccgccaaacatagtatcaccaaaatggctattgaggctgtgagtatggtctccattagagtgtttctcaagctttgaatcgccaacatactttttttgtcgtcgccctaaatgaaatattaatagatcaaaattatatgtaagtaaaattatgaattaattactcgggttttttttttttttntttttgctattttaacaaaattctacaataaaactcatattgcaactggcactacaacctaaataacaaacaaaaatcgtgtag

SEQ ID NO: 175427 - DNA, 537 bp, Cannabis indica
attcatataatttcacatatactgaactatataataatataattcctcaattattcataattattcaattagggttttgttaatctatttcttaatttcgggtattacaaactaggtactggaccagattttggtccaagatcatgtaccggctagggtctcggttagagaccattaactggccagggtttcgttaaagactatgtactggccagggtcacaaacataccctgtgtattggccaaaatctcaaacaaatcaaaatcctgcttttctaaaatttttgaatcatgttcttcgtgttcttcgagactcaaagagtcgagaatcaaaaaggagtttaaaactcgatcctttttataaaaaattcatacattatacatcctaaaactattaagcagagtataatgtaaaaaagactattctaaaacatgagaatcaaaaaatttcaaaaaagtttgaaaaaaagcttaaaagtcatcaatggaaaattacaaagaaaaaataaaaaagtagagatttaaagagttacccact

SEQ ID NO: 175428 - DNA, 1547 bp, Cannabis indica
tttaatagtatatgttggtgactgttttattttttgctaacaatttttgtaacagtgttactttgtatagctttatgtagattttatgagttccttgatatgcttaaggattgctttataatgttgggaagcatacgccttatgtgatattcaaattgattgttggtcaccataaagaagaaagctggaagtgttccttgttagtttagaattttctctcttagattgggatacagtagtatttgtgttttattatagataattaggtgctttagcggttaccttagaacgttttctatgctggctgatattgaattttggagttattgttactgttactaattgacattatcttgatcagaaaggttgcatttcttctaagtattgtaattttcatttctaaggacaatactttttcatctataggaggttattccatttgtaaattgggaggcaactgcatttagtagaccagtgcttgcagttttggtttttgcttctgtttccatttttcctagcctacttctaccatctacaccatcaatgtgggcggctggaatgacttttggttatgggtatgggtttttacttatcatatcagcatcagctgtcggcatatctcttcctttcttcattggttctcttttccatcataagctgcaggtgtgttccttgtgttgattctctcttgttcatacacaatgttctctcgttggcatcatctttatgtaactttcttctttgtttttttgcctattttgtagggttggttggaaaagtatccaaagaaagcttcaattctaagatcagctggtgaagggaattggtttcatcagttccgagctgtagcattgatcagggtttctccatttccgtacatcatctataattactgtgcagtggcatcaaatgttaaatatggtccatatctctttggatcgttggttggaatggtgcctgaaatttttgttaccatctacacgtatgataacttgtcctttaagcttcaagctccctctatgtttgtgattgcgtagacataccttatatgccgttttgcgtgtgactaattttttgcttatagaattctattatcttatcattcatgaatcatgacatcaatatcctaagtccatatctctgctaaacacatgtcgtgtggagaaacatatcatgttacacatattttatttgcacaaatgtaggatattgctttttgtagatgccatcattgaccatttttgacattacattcattaacatatgaataaataagtgttaggctctcttctcgtacaaatgagttcacataggtcagggcattcttatatattcttaaagaatatatatgtcgttttgtttttaatacgtgctttctctccaatttcatactataatttatacagttttcctattaaatttggaggcaaaattcacaatgcttaatcactgcacttatgttgtgggttgctcgcacttgatctaattagttttatctccttcctcattccttctgccgtggttgctatttttttttttaattgttt

SEQ ID NO: 175429 - DNA, 654 bp, Cannabis indica
ccacacacctaccggagtcaaatcagtctagggggtatatacactacaacatttttggtcattagcgacagattttttagcggccgaccctctccgccgctaataacaggggtattagcagcgaaccacaatgtccgccactaatagtggccgtttatttttttttaagaaaatattattagcggcgggctgtccgccgctaataaacgggcatgatttttcccgctcatacagtttgaatactattagcgggggcattagcagcgggccccgccgctaatagtaattttttttagaaaaaaattaaaactggaaatttaatactattagtccgtcgctaatggtattataaatacttcatccgaaccctttcccccattttccccttcttctcttcaaatctcaaaatttcatttccccccatttctccaccaccccaaccccttcgacagtgccaccaccccgacggagcagtcgacggagcggccattacggtaattttctgcagtttttgtaagttttagtttttatttttacaatttgtgaattatatagttttaagtattttaaattgtaatatatatatatatataatatatatttaatatacaaatctaatatatttctaggtttcaaattattttagtagatcta

SEQ ID NO: 175430 - DNA, 793 bp, Cannabis indica
aaaaaaaaaaaaatatagctattaatgattagaaaaaccacataaatttaattagtttttaaaaaataataattaaaccaggtcaacccgttgacccagccaacccgaacccgtggacccgtaaacccgcgacgccaaaacccacgaacccgtaaccatttaatttctaattaattttaatgatgtgatcgtgtttatgtgttgaattgaaactaatttaatttttcatattagtttgtcttttgacatggtcctttagtattttccttttaatttttcatattagtcttcgagtcttgtcttttggcatggattgtgtaactcaaaatcatcatggtgctatggtagaagtattcaagaagggaaagattggatgtgttcaacctaaaattgttgagataataggcattaaagaagtattgagttagattgcaactcatttgtgtgatagaatcatgttagaaatagataacttggtgtgtgtccaactgattcagaacgatgtttttacgccttcacaattttgtcttattgatcaagatgttcgaaatttccttttggctttatcttctgtaaatttgtgttttgtaaaacgatttacaaataaattgactcattgcttggcaagagactcttgtttatctacaaatcgtgtgcttcaaatggaggattattcctatgaagtgcgttctattattttgaaagaatttattaattaatagattttatttttattcaaaaaaaggaaaaaaaaaatagtggataagttatttgacagcataataataataat

SEQ ID NO: 175431 - DNA, 508 bp, Cannabis indica
ataacgtattatgaaatattagtattatgtaatattataatttagagaaagaaaataaagaagagatgagaattttctgagtgttttattccaataagtgatctcctatttatacacatacaagagtcaaatattaagaaactaagagaaagggaaactaagaaaaagggaatgttgattacattaatggaaataaataaaagatttggacatccacataattaatactatttataacaatataattattatatatagtttgaaatttgacttttatattttagatttgaaattaatgcattttttatttttattttaatttaacgaatataaattatggagttataagtttataacttacatgcttaatttaatatatatatataaaaaaactacataaaattatttactttttacaaaaataaataaattaacgagttgacccggccaacacgaacccgtagacctgcgaacgcgtgagcctgaaaacccacgaacccgaaccatt

SEQ ID NO: 175432 - DNA, 581 bp, Cannabis indica
ttgttttctagatatttcacatattatacgatgacaacacactcttttaattgttttttttgttggggttactttcacaacttaggaatctcccaagctttttcaaattaggggtcccatataaattggaattagcactagcagccaaaataatacaagacaataataattacaaaaatgtccaaattaaaaaaaaaaaaaaaaaaaagtcttatcactctttcttacacacgcaacgcaaactgattggttgaatattattaatccctacaaaatatttaaattgtaaaataaagattacctgcaatcttttttggagaccactcttttcatatctattgagtattgactatattataccaataatattcaaagtataccccacgtgccaattgtccaagtacccttttttatatacatattttaagtaaaaaaacaaataagaattatgggaagatattctcaataagtgataagcattaacctcaaattttaattacatacctcaaaaattgtggaaaggaattattataagggtatatgataatatatatattttatgagagagaataaaatatttt

SEQ ID NO: 175433 - DNA, 912 bp, Cannabis indica
atggccactcagcagcccatgtacaatcggatgacgaaaattacatgggaaatacctcctggtgaaattcaacaacacaatcagacaaaaatctacaaacacttctctgccttcactgctactcagaaactctcgatcatgatgcttggtcgctgatagtggtgcagcaaccacatcacatctgaaatcaaaaaaatgaacctcaaggaagagtataatggtaaggagaaagtcactgtggccaatgggaaccgacttcccattcatcacattggtttgggttccttacaaaccttgtctgcttcacctcttatattaaaagaaatcttacatgtacctagtattaccaaaaacttgctaagtatttctaagcttacttctgacaataacgtatgtgttgaatttctctctgatttgtgctttgtgaaggacaaggagaccgggcaagtagttctaaaggggaagcttaaggatggactttatcagtttgatgctcctacttcaacaacatcaatgtcatcaaaccgatccagctcatgtcccacatctttttctggtttagttgtgtctgctgtcgagtctaatgtaacaaagcctatggctaatcagtcgttatgttcaatcaaagataggtggcataggaggttaggccacccatctattcgtgtcttggatactgttttgcacaagatcaatgttaagaatcttaattccagtctaagtttttgtgatgcatgccagttaggaaagtctcactctcttccttttaaagttaatcctaaaagagctactgcccctcttgaacttgtgcatactgacatatggggaccatcccccactatgtccaacactaatttcagatattacattcactttatcgacgattttagtcgatacacctggatttatcct

SEQ ID NO: 175434 - DNA, 566 bp, Cannabis indica
taaaatacattaatatatagaagagtgttaaggaaattctctatcccactctctttttaatgtgataataaatgttatattttcagcgagagttatttttacttaataattagttatgatattctaatgttatttcaattgtaccattactacttctaatataattattctactaattttttgtttataaaagaatttgattacattttattcttattttcattcttaatcatctttttagcacgaatattcctaataatttttttaacaggaaaatgcaataccacgtcattttaagaatattgccacgtcattttagcgggacccactgtaatttccagtaagagaagagagaggtactagttttgttcatccaaccttctaattcttcttattcagaccacaactttctcatattcccaaatctaacccctaaacttcccattaatttcataacagtccctctcgtctctcttcttcttcttccatttccaatttccagagcaaaacccaaaactcaacacagtcttcttcctctgactctctctctctctctctctctctct

SEQ ID NO: 175435 - DNA, 771 bp, Cannabis indica
ggtaaatccacccacatataaggcattaaatggcaataaatgcccattcccaggtgtcaaaacgcttcaaaaaaataccacccacatgtaaacaaccataataagaaaaataagctgaaaatataaatccaaagagaaatccctacaagcccttaaacaataacgaaataaataaataaaaagattgttcctcaaacttgtccttaaacaataacgaaataaataaataagaagattgttccccaaacttgtcacacacgcataaataaaaaaaaaagaagaaaaaaggagggtattatgaaatttcttaaaataagggtagagaaaattccctcccatctctttaggctccgacggcatcctcgccctcgctgcattcatcagactccgaggaagaatccaccaaatattcatccttcttaaactcggaatatctcgcaaaaaactcgtccagatcccaggtagcagacttgccctccttaaactcggagtacagtttaaaggacgactgataactcccactaaagaacgccttcttgacttggcccgtcaggacttcgatctccttggccagggattccttctcaccaaccaaaaccttttgagcctgagcagacgcctttttggcttcggacaactttccactcaaggaagagagtttgtcctttaccgtctcggcctcagacgaaaggcatctgttcttgcacaagtggccttctccagattcaccgccgacagctagtctccagggaagccaccttgccacttgaa

SEQ ID NO: 175436 - DNA, 479 bp, Cannabis indica
aacaatcttttgaaaggtgtaccatatattttcatttacagtagaacctctatccaagaatacacttgggaccaagtaaattatattctaattgagaggttataactaaatagagttacactaaaaaaaattaaaaaactaaaaaatatcaatgtaataataataacaataaataatcattaatactatatcataataaaattattttagagtaaatataatgttcatactgttgggttttgtgccctaaataaaactcatttcaatataatcaaatttacttattaataaagatcagaaataacattttatgttgcatggttcacatgatttatttcatgattatatataatgtatgaattctattttaagtccagaaacgtatgtaagttagtttaagttaagtagttaatttaagttaggtttggtttcgtacgacgaccaacgtagggtaaggtaaattaaattaactttaactt

SEQ ID NO: 175437 - DNA, 1436 bp, Cannabis indica
atatggtgaatagacaacctgaggctgagggtatatcctttagacaatcagatgatggttcctttggttcttactctaaccaacatcggaatgagttgtttccatctgtttttaagggtcagggggtgttatcctaccatcatcaacagaacaaacgacgggttggatttccagtcaccgaacagtatgctcgtggaagatgatcagtttgcgggacattttcaggagcagtcacatccatcactgccagtggaacagaggcaaaagagagagaatgatgtttacgaacaacaacaacggaacctatctgccaacatgtttcctgatggaggtagattcttaatcccaaggcaagagcagttggcaccggtccatatgcatgattgggctgtcaatagagtcccgataccgccaccgcctatccagactaatttaaatgttggagttttacagaactggtttcctggtgagcatcgaggtcgtggtggatggaccatgtcaggtggttctagtgttcccagtcagagcatggggagtgtgagcggaggagatcagagtctgttcagcgtcctatctcagtgcaaccaaatccgttcaagcagcccatatcatcatcattcaatgccccactcgaaccaattcatcccatcaagaacctacgaaatgatgggaagggcaactcctgttataaacaatatcccaccgcaatcaagtcattcactcgactatatgagtgggcgtgaagctgccacttcgtccttgatccccgatgatatgggatggattggcttgccaccaccacatcagagctcgagtttacaagatccaatgggaaaaccatacttgagatcgtggaaccaataaagatgactcggagttagggacaacgatagggagaggaggaagacaaaatcgagcaagataggtttctgtacatacctaaacattgagccaaaatcaagagaggcaatgcaaaacgccactatgtatatatatcttagatggtaacagcatttgcgggtagtcccttactttttaggggttaggtttagatttttgctctgctttctttcatatatttcaaagttttgttgagaattttgtttgttcgtttttagtcttttattttcaactttggaggttatatataaacttctatgttaaacatagtttagggatctcttttgctgagttcaatttcatttatctattttacttatttttttgctggaataaaatggggattaggcgtcatttttccttcccaccataaattgtttcttattataggacacctactccatgtcctacttgtgttttcatcggcgccgagtcatgactcaatgcggataatattagaccattcccaagataatttttgccaaatttagttcaaaatatgcactaaactaaagttatatttagcataattttta

SEQ ID NO: 175438 - DNA, 1320 bp, Cannabis indica
cttttcattttaaaaatagaaaaccaaataagaaactaactaatgagtaactttttattcgaaatttaactcaaatgccatttgatacgatagattataaaaagtaatacaattggagtataaattaaagaaataccactactattttagcgtatcaaatttaagatctcaggtattattaaatctaaatgtatatcaaactcaatacatgattaaagtagtatttgattggaggtaataaaaagaaaatggaaaagaaacaattttttttctattcatttgtttcattacatattaaagtattaaaatgtcattctaatagaatagtctttattctactattttgataaaatgactattttattttgaaatggaagaaaagactattacaatatgcatgaagaaaaaaaaaataataatttttttatcaaattttttattcatttttaattttattccattctatttttgttcttattcttaatcttatttctattattgtatttttattcctcccaaacgctatttaaataaaaaatattaagaaattacatttataataattaaagagataaaatattattcttctagaaaacaaaaaaaaaacagtatattctaagtcccacatgtgcacctaaataaatgatatggttgttgtttcaatattagaaaatggtattaatttttttttcaaccgaagaaaattccatacaaaaatcaaaaataaagacaatacatataactgtcacgaaaatagtatcatattaatgatcaatattatacaataattaacaaaattgatattaatttaaacaaaagtaaaattataataaaaataaataaaagtataaatatttatagaaatacataaataattgaaatatctcctatattaaagccgtgcacacgacgccacatatttgcatatgatttatagtacttggttgttgccaactgttaatatttctaatttatattatattgaacaataataaaaatttcaaacgaaatattgtgtgctaagatttttttaaatattttatattatctgtttgagtactttttcttcttaaaacttttatgattattttcttgggataggttaaaactacctttttttattacacattaactaatataactttaaaataattttagggttatttgcggcaaaattccctaaagtggggaggtttttgcaactacccccaattctaaaatttttgcggtaaaactccctaaactcaagttctgttagcacttagccatttccgtccattttttagctgttaagtaccaggttggaatgtccacgcgtac

SEQ ID NO: 175439 - DNA, 501 bp, Cannabis indica
atcatgctcatgattgtatctcctttataacctcctggtggattgtcaatctaagtacaattttttatttttatttttattcgaatttcaatgttacatgttctattcattggcatcataaggaatcaatgattcattgcagctagttttttttggtgaaaagcggttgctgtgcaaccacagaataaaaaaaaagtgttataaccttctgttaaaacttacactatattgtctttaagtttaggaccaaagtgggaaggttcaaaatacgagggcccaatggggaattcgtatataatttaggggtcattaatgttccaaacgattcgattcttgtgttctttcttcttctttgtattattttctgcttacgtacttattgttagttgtttgtgagtcttaatagttgagaagagatcttgatagggttttatatcgatctaatgtggctttacattatggactcttaacttgtctatttattttatttgttattgtaac

SEQ ID NO: 175440 - DNA, 643 bp, Cannabis indica
ggtgtaaaggagagagaggttggacaaagatatataaaagtagatatatggccttaattcttgtcggatttgtgtcattgctaagagtgattttcggattatgaattttgtaaaaataaaaaataaaattaaaaaaaaaagtaaaaaagttatgatattattcgtttagtgtacgtgagagtgaatttcaaatctttgggaattaggccaactttcatacttttataacgtgaatctcatttgtaacgtcagtaaattaaagagcatgatttgtcattaaccaggacaaaggatacgctcttttctttaaacaaattaacttgtccaattttttttttttttaaaaaaaataaattgtccaagaattctctttttgtgatccaatgccaaaattttcctttttccacactattttagatgtggtttcatgtcatattttaaataaaattctatggttgataatagactttctaaaacttgtttgaacaatacaacataatcattaaccagtagaaaaaaacaaaaggtattttttttggtttgttaagtttttgggggttgaactattgatgtattactatattaggtatattttaacggattcattcactttctgaagccatgtcttaataaagggaacata

SEQ ID NO: 175441 - DNA, 590 bp, Cannabis indica
catcgttgtacaccagtgaatcaaccagaatgcaactgtgtatgacgtatatcattgttgaaaaaaatttcatttcatacctttttttggatttgagggggagctccagatctgttcaatacagatttacattgcttcaatctggattttcgaggctcgattgagtgattttgcacgataaaaaaccgaaatcaaatgtttaatttcagtttctccacggttttctggtttttttttttaattttctgtttagatccttggatttgttcgtttccaatcgaaattcgccggaatttatggttgttctacgctcgatctggtttcattctggttgcgtagcagactggatcgatggaggttccttcatcgtctccgttcgtgacgtgcggctgaaggtataggtcaggtggtatttttgtaatatattcaatgtgggctgtataaatgttgattgggccggcccacagtaattttgtaatattttaccctttttggaattttcctgtttttttcccaaaaaaagattatattttaaattttaaagagataataaatacgaatgagatatgtaattaattttaattatacac

SEQ ID NO: 175442 - DNA, 729 bp, Cannabis indica
  modified_base (575)..(575): a, c, t, g, unknown or other
cttgtcctcaccttgatcttttgttaccctttttcaaaacacagaaaagctgtttttgtgcccatcttgataattccggttacctgaaacataacatatgagtgcagtaagtaaggaaaggaatcaattaatcttgtaatcaaatatccatgccaacaataaggtaaggtataccttgtttttgagctaccaagagtgagctctagatcatcaactccacattcttcatggatcctctccccttgccatggcttaaccagccctgtcatgtgacctccaaatgcgaattcatcataaatgacctcagccattggaatatcagcattaagatcagaacctgcagcaatggcaggagagcatgtcccgctttgtccaggagtgcacatgcgggatccgccaccagccataacatcatccttagagccaaatgggttgggagcgacaagactgaatgtaggagaatgtggtcctccctgggggatccggatcccagaaaaccattctgggtcaacaatctgacgccctggacttggtggcatagaagatggctgaaaggaacagagctgcccacccgnggctgggcgggtcaaatttgcttcccagtctgtcttaattctgggtgttcgggcagttggggaactcgaatggaggagtgacaggtgcactgatggaaccgccatgggaatatagatgagagagcttggaggagaggcagatgaggatgccgat

SEQ ID NO: 175443 - DNA, 537 bp, Cannabis indica
gtaacctacccttacgttcgacctaactttactttaacgtaaaacgtaaccttttcgtttagtagttaacgttaaaaacctttaaaaacgtttaacgtactactaaacgaaaaaagtaactaaacccaaacccaactaatttttaatttttaaaattaaacttaacggtaacggactttagttttagttactttcgttttcgttactaagttagggtttttgggttttacgaaacgaaagtactacttactttccttcgtcgacgaaagagttaatatgcctatatccactgaaagtaatttcatctcattcgcagatggatgtacattcaggggtggatatgagttttcgttgtattcttaaaacgatcactctagattttaccttatgcaaaagaaatttgaaatgtttgaaaaatttcatgaatttctagcaatggtaagtggttaaagatcttgcgaactgataggggtggagaaaaagttagtagatatgcagttcaaagatcattaatttgattttgaattatatccaaac

SEQ ID NO: 175444 - DNA, 1042 bp, Cannabis indica
atccttagatgaactcaagttgataaattctaaaagaaattaacccaaggaaaatttgtttggataacaggaaaaggtgctccaagcctccaagtactaaagtaacaaaaataatcaaagatgtttctacgaggaaaaatcaataaaaataacgagacaaataaataaatacccatttctagtaaatttttttaaaaaaaaaattaaaaagatgaatgtattattgattttagaaaaaagaaaaagaaatatattaatatgagaggctgagagagatgattattttttaattgtcaaataatattaaaataaaaaataaagaattgaggttatattttagaaagatatgttaaatgaattggtgaaattatatttgtaattttttattttcttagaaatggagttgatttttaattaaggtgggacacaaaagaattggggaaggtgatttggatccaataattacaatataaatatttatggatgaatttttaattaatacatcttcaaaatattatatcattttagagtttaacattatatttggtagaggagagagaagaaccaagggaaagggtggaggaaagaaagaagggggtgataattttttttatttttttgcgggaaagatggaccggaccctctccctccaaacataaaaatttgattccattagaaagaattaaataaaaagacaaaataaaataatgtataataatattataaaggataatattgtaataattttaatatttaatttactatttatctttggaactttagacttaataccaaacaatataaagaagaacaattatattcttcatctttcctattctcatcatttctaaactcctcatctatcatactctactttctttttacttatattgcattaaggtagaaattcaagttttttttcaaaagaatactaagttcatcactaaagaaagaaagatggaaatcacaggaggaattccgtccctttgataaaaaccagcaacttggctattgactctagcctgatttgctaaaccatccg

SEQ ID NO: 175445 - DNA, 642 bp, Cannabis indica
tacaaaataaaaatccttaatctacggagattatccaccgattaatcgataattgaaatagcatttaaaacaataaatttaactagcaccttatctcttcatttttatctcaatttaattgcttgtccaaaaaaaaaatgtactgaataaatagaaacaaattgtgtagactgtagaccatcatccatatgtaacatagagatctcccttcatcaatatttttcctgaagtgtcagatttcacaccttttttagtgaaaattcaaattggtcaataatcttctctttgccaattcccatgtaattgaagtcaaatttatgtaaaatcaacttgcgaaggaaaaaaatctaattaaaatcgcaaataataaaggaaaaataaatgtaaatatcttatctgaagaaacattacctaaaggaggggcaattaggtgtgaatactttttgtagttcaaaagataaaaaaaaaaataataaataaagataaaaaataatacatacttttaatattattttaaattatatagttgagactgattatatatcttttttttttattttttgagagaaagggagcccactagacagaaagaagctcgaataagattacgagggtcatctccaatccagatggctacttcat

SEQ ID NO: 175446 - DNA, 641 bp, Cannabis indica
atacatatatatatttaattctatttttttctttctcacgttgtgaaaaaaatgcacacatagtaaaaacagaatatatcttgaaatattaataacaaaaaaattaaaaaaacaatatagaaaaatcttagagtgaaaataaaataaaattattatttaaaaaaaatataagaaaacgagattaaaaaaattaataaaaattaacagagaagaaatatatattaaaaaaaagtattaagtgtaaattttaaaataattttagttgatttattttatttgggtgtataaataaatttgtggagtataaatataaagttttttagtttattttagttctcctattttaaattgaacaaattaaattaattatcactatatatttttgtccaacatcaataaattactgatacaatacatacaattaaagtaaaatcaattttaactcaatatataaatatattagagcttattttcgtgtgtaattaatgactaaaactttaattagttcaataaatattaatttattattagaacataatgaaaataagggatttcttcatttttacatttcaaaataatttttttttttttgtatttttacgaaattctgcataataaaaactcctattgcaactagcgct

SEQ ID NO: 175447 - DNA, 557 bp, Cannabis indica
agtaattacaataacttaaataaaagtaacttaaaatcatatcataaaaataagactaattacatagtagcaaaaccacatactttcaccaagccgcgtctaaattcagaaaaggctgacaggcctagccaaaaaaaaaaaaaaaagctcaagcggctaaaatttaaaaaaaaaattaacaaacaatataaaatatttagagaactcataattataagtcttaaatttaatatatataggcaaacacttataatacttaatatcacgataaaatatcgttctataattaattaatgattttttttttaaataaaacaaataaatacaatattgaattatactaccctttaatattttaatttatatttatagatagatatttaatggaagggtcaaaagtgaaaagagcttggtcgtggtcggtacagtgtgagcacgtgtataattaggttgcaacggaccatatagagtagagttagagaggcccgtgccggtattgctagctaagcccacgccatgcccatctacatcgccattaggtaatggctttagtcagc

SEQ ID NO: 175448 - DNA, 514 bp, Cannabis indica
actgatgtgctgttggcacggctaacttctcacccaaggagcaacccccgaggactcacccgcagcacgagaccatcgacgccccgcaagaacatcattcgcaatatctgcagtagcctcttctaccgctgcatctccctcacgctcctgtgaaagagcatggttggacccagcgtcgtcctcagccacctcttccacctcacatggaatacaacctgtctgccttcagcttgtcacctgcccgaatcaacccacttttatgaggtgaggtaaggttagaaggtgatggcaaatcttcttgtcatagtctgccctgaaaaccttcagcaagccaaagaaatgcgcctcttgtgtaaagctggggggggggggtacatgccgctacaaagaaaaaataaggggttaaaggacattgtgagaagctcaatgttagacaattgatgaggatacaagtcgaggaatcacttacgtggcgataccgaaaaccgtcctgtactccatcttgctttgacac

SEQ ID NO: 175449 - DNA, 777 bp, Cannabis indica
aaagaaaaaaaaactacctaaaataaatgcatttaacaagaaaattatacattgttacaacaaaaaaaaaaaaaaaaagatgatacttatacaataattatatttgttgtttgcgtgccttactaagctgcttgtttaatttgtcgtttgattttaatgtgtgtattttaatgtgtgtaggccaaacttttgactaataaattaaagaaagcggaaattaaattctataccttttttatattgttctattttatttttatcatttttttttaaagtctatcatttttacttcttttttttaaatattgtattaattttactcctgtcacttcaagatactctccatgtcactctcttatgtcagggaattttaggtacaatacatataaaaagaggtatgtttcaattaaatataaaattagaagtaaatttgatcaattgattaataaaagtagtatttttcaacttagcccttaaagaaatattaaagcataccattaatttttagtaccacctaaatattttattgttattaatataattaagtattaaatctcactcaatttaatttaataactattataaaacatcgataaccatacaagacgacaagacgttacccaagatagcactgtaaaaatcttacttttagttacaacaaaacttgtaactaaaagtgaaaaaattgtgactaattataaatcatgattcctatgttgtgactaaaaggtccgtgactaaaagtattagtcacaaaacttacaatttgttgtgact

SEQ ID NO: 175450 - DNA, 741 bp, Cannabis indica
aaaggaaacttagaagtctagatatatattccttcttcagaccaggttgcagattgcctcactaaggctctatcaccatcaaggtttcagctgctgatttccaaactaggagtgacacaatcaccccagcgtttgagaggtggtgtcaagacttgaagtcctcacagcagctaatggtgtgctgcaatcacagagcatcacagcagggaattgtcatttacagctcagtagtacccaccgaatattctcctatgattttgtttaatgattttgcaatgattgtgcaaatccctatgatgatttttctgttatactgtaccaaattatatgctgccacttgtcaatataacagtggcatttgtttgtaaaaatcctctttaaaaggaatgaaatctctcagcataatttgagctgagttttattacatcatttattccctgatttctctctggctgtagggcttgatttgttgtgtattggactttagttttttgttaaattttttacaataatgatatttatgagccattgtcccacgaccaaattgtggggtttgtgcgtttcatgataatgtttctttatgtttcattctcatgtatttgatttataagttttttagccattgttaaaaattgtatatattttagattgataaataaagtaaaacgtccagtttcctttaacatgaaaagtctagcggttaagaagaatagcatttctaatgaaaataaacaaaatctt

SEQ ID NO: 175451 - DNA, 506 bp, Cannabis indica
aaaataaaaaagaaaaaaagaaaaaaaaagcaaaaagcaccgttcggttgagataataatgattttactacaatgttatgttccttacagttttcattaattctagaaagatatacttttaccataaagattccaatttctcacaaaagtgtttttaaactgtgcatatatgtttattatttttttaattctcatacgacttaaaattacttttaagaagctcttaaccaaaaaaaaaaaaaaaaatcaaaaacaaaaaatctggccactatcctagcactatatagggttggttttgtgatgtaataaattaattcaagtatatataggaataaataattaatattaaaagaatttgggtgatacgataattattaatactcacatatataataagttttggtgatagttgggtttcacttcattgttgctactttgattttgactctgatccagttgaagaataagatgtttgatccagctaaggtagatatggatgtttttgg

SEQ ID NO: 175452 - DNA, 1144 bp, Cannabis indica
aaaaagctcttttaccttgtcatcttctttcctgagaataatatcataatgcaatttcattaaatgaaaggggactgagatttgtatacatgacatgaagagcacaatatgtacctgaaaatgccttcagtttggacatagaactgtctctttatggtttccactacactgcttgtggttaaaaactgagaaaataagaccaaaaactaatcaagctttcatagaaaggacggttcacaaaacacaaacacaaaaaaaaggacatgcatactttggcctcaatgtttacatattgctcttcaagatctttgtttggatttaatgatttttgacttttatcatcttcaccaaatgataatttggatctgatagaagtcagtagagtattagtaagagatgtaaaaataaaaacgtaacaaatatttcaaagaggaaaaaaaaaggaaaattaactcttgatttatacttaagctctccacaatttccttaattcgagtgatcaatgaccccagcatttcctaataatataacataggtatatcataagaaagttgaagaaacatattgtattgtggtatagactagaattatgtttggaaaataagattggattgaataactttcttcatgtgttttctatcttatggattccccatctccatgtacattaaatggtcagaaaattacaactttgtatccaccttattttcaacaaatagtcaacttattcaatcttctatgtttttgatcttatatttcttaacgcaatccattcatacttttcaatgatgtcccaagtgtatggtaactcaccttatatattgaaagaagatgcatgaccaaactcacaaaacggtctccacatttctccaattcaacccttcaatatatgaacaacaatgttatctataaacaaggaacttaaggatatcaaaacagctctatttatttgttatcacaaaactttagattcacatacatgacttgcttctctttttgatctgtatatgaggtctggagaacccaggtttcatccagaaacttgatccaagtatcgacaatatcagcttcttctctgtatgaagcaatggattttgatagctcatcgtcctgttatcaacccattgaataatatagccaaaat

SEQ ID NO: 175453 - DNA, 975 bp, Cannabis indica
gttgactggtatatagacaaaaaaaataaatttaaaacagttgttattttaaacaataaaatatgttcctatatcacacaaattatttattaagtgttacataagtcttcgacctaatccatagggacaaatattaattttttatcctataaatattcctccctaaggattgaattggaaataagaacatgatgccatgtagtgcaatacaatgccatttttatttttatttttggttaaaatgtcaaaatctatgaaacagtaaagcttatacatatttaaaaacttgagaataagacatgacaatgcagacaactaattaattaattaattaatgggaaaagcctagattttctgatctttaattagggtttagtcataaagtttagtgaatagttattagttagttgcatgagctcacttcaaaaatcataatgaaagaaggtgattttgccttttcctaaacatgacttacattctatgctaatgctgtggtccttcatgggtgcaaattaagcaaagttttaactatatatgatcatattattattgttaattgaaaatgaagccaaaaagaaaaagaggtataatttagagtaaagaggtaaaaggaatatgcaaaaaataaaataaaaaataaacgtgatgaaattatatagtgatagtgtgatatcgactaagtgagcaataatacaagcaagaacaaacaatacatcaaacaaaagcaattgatgccattacagaaagagacactaagaaaactaaaccaaagataaggtcatcttttttttctttcccccctccttttatattttatcttcaaaataataacaataaggtaaaagaaagctttcctacaaacagaaagactctaataaaattttgtctgggaagaacaaagagaaaaagaaccaataatgtatttgggactctctaacagtttatttgcaacttgatctacagatggtacacaat

SEQ ID NO: 175454 - DNA, 520 bp, Cannabis indica
aatcataccaaactctttgtacttaaatttataaataaaaatatggactaatttaaaaaaaaatcatataacaaactaataaacttaaataaatttaagtaattttaagtcttcggataactattaagtaaatatataattaaacaataaataatgaactcggtaattattattaagtagataagtaaatatatgaatccatatatctatctattctatataaagtgtgcctatataacagaattcttggtttatgagaaattcatgggtgactttttatttatattaaaaataaaatagtttattattaaaaataaaatggtttatgagaaattcatgggtcactttttatttatatataataaaataaaaataaaataaatcccattaaatctaaaaaaaaaataaggttctagattttctattaattaccgtatttctaacccataaaataaatctcattaaatccatataaaaagaaaaaaaagagggttctagattttctttaattaccatattt

SEQ ID NO: 175455 - DNA, 591 bp, Cannabis indica
gcaatgccaagagttgccattagctgcacaagtgagcagtaaggagagtaaacaagagttacaaaatcaggagttgcccttgcctttgcctttgcaagggagcaataaattggagagtaatgaagcgaagaaactctgcgttagactatctccgcagttacttagacaacgccagggatcgccattagctccacaaacaatcagcagggaaattaagaaggacgaagctcagaaattgccacttaaaacatctcgagagttgcctttggctgtacaagagtgcaataaatccaacaggaatgaagctcagaagctttagtcttaaaccagcccgagagtttccattagctccacaagctagtagcagggaaattaagagtgacaaagctcagaaactaccacttaaaaggcctcgagagttgcctttggctgtacaaaagtgcaataaatccaagacgaatgaagctcagaaactctgccttaaaccatcccaagagttattagctccacaagcgagcaacagggaaattaagagggacgaagcacagaaactaccacttaaaaggtctcgagagttgcctttaactgtac

SEQ ID NO: 175456 - DNA, 626 bp, Cannabis indica
caaaattccagttctcccaccctaactttggcgccctttcttccatttccgaccattgtgctgtgtgcattgttccttctcgccctgtatcaattcatagtgcctagcaagtagaaccataaagctatcaaaagtaagtaaaaaggaaagaaaagtagtgtagaaccaccaaacagaagaactaaacgaaaaccaagccttcataaatctccatacaagaaaacctctaacttcatccatctcaccagacctgatggtattcctcaaaaaacaaactactcctcgcaaaagaccctcctcctcctccttcgtctcccctttccctcctcccaaaatccccaaatccaccgccactgccgatgctcccccaccaaacaacgccgctgaagtccccgtcaccgacaagatggtctcaattctcgccgaggctggttgtactctcatcaacccctccggccccccatgtcttccaaccgaccacaacaagctccgtcgccaccttcatcatgccttctcattttctgataatgcctctgctcttcgttccgattttctcgtaggcctttcgtcctacattcaatccccgaaaaatctccacaggtcagtttccttgcacattttttttt

SEQ ID NO: 175457 - DNA, 943 bp, Cannabis indica
tctctctctctctctcactcatttatcatgcgcgtgggggccactgtcttccccctctccatgctcaaatatcagccctcccgtacgaccatcagagctttggcttcttgacggggacgtttctaacttatcttttgctctccattcctttccatttaatccctcctctcttcactcttttattctttctctctcctcttattctctctacctctctatatgaatatctattcgatcgagtcaatactttcgtatccccttccaaaaaaatttcaaaagccacactacgcttcctttccccaaaagccctagcccacctctttctaaggtctacgcttattaactttgctcatcgctttctctctcaccaactaattggaaatttttttcccaagagggacctcaaataatagttgttatggatgatgaagacaaattgaaatccgatctaggaaccggaggaggaccagtgactcagtttgggagccagtcgagctggactcactttggaggcctagactcggacgacggagggtatttcatctctgccgctgatagagagaccagcttactgagcgagttcggttggaattttcacacggaggatgacgatcagctacgcggagctacagagcaagagcgggcttgggagttagagaggagaacaacggcagatttggcagagagcagtacggtcaccgaaagggcggctcggatcgggtcaacgacgtcaaataatccgtcggtgtcttcgagctctagcgaggatccgacagaaaagtctactggctccgatgaaaagccgccacccgatcagattccgtgagtggatttccatgatatcagatatgatccgtatgtggttcaatcgtaattaagttgattttctggggcaaaatgacaaagtcgttatttaacaaaaaaaagattaatgataattcag

SEQ ID NO: 175458 - DNA, 1038 bp, Cannabis indica
agaagtaatcgatcaattctttctttagaaatatgacccgatctatcgtgccataataataaggatgttatcttaatataagatttcttatccacaatattcacagcattgaaaaaggaagctaaggaagtcaatgataatttgaaaagaatatcagagtaaaaacagtttccaattattcggagtcaaacataatgtcaacactataattggcaaaaggaaaagaaaattattgtttaactaaaagcggaagcgaaactgaattactttaaaagtaggaatcaataaagtactgttcaaaacaatctgaacactaaactgtaattcaagaattaatgtgccaacataaataacgtcaactccaatataagtgtccactgtaagcattgactccctctcacttggctttctgagatcccttagcccctggttgtggttgcttcttttcatattttctttatcctttgttgggcttgagttgagaaacaaagtgagaagattcattcttctcattctattagcttgcttgtttcagctacacactgagaaataaggtcactaacactccatgttttattataagtgtttaggttgtcttgataaagctaaaagaggtaggaagttcatgaagaacttgaagaatggtgtaaaagtcaggaagaggaatattatgatctttcaacttggactgaacattaataattttcagaataaaatctcgcactcctttgatttatcatacttaatggttgtcatttcatccataagatgtccaacttcagcgatttcactagtgtgaaatagtttttttttttttttttctacttctttgtaaataatttctattagtcatttgttggtgttgggcaaaccaaccaaaaagagatgttcaggaattaaaacgtttactataagcaatgagactaagatgacttgaaattttcctaaatgtgcacgaagaaattttagggtcgaacaaattctgatattagaataagatcagtagatttttctttctcgaaggcacaagtccaaact

SEQ ID NO: 175459 - DNA, 532 bp, Cannabis indica
gaaaaaaataaaaaaaaaaaaaaaaaaaaaaaagacaagaattaaaaagaaaaaggaaaaaaaaattaataaaaaaaaattatttttatttttttattttcttgattttttttttaatattttttttttaaatattttataatttattttttttaaaaactaatattacgtggaccacaaaaattttgccacgtgtacacacttgtacacgtggacagccaccgtggcatttaactgtgattttttggacagaggtgtgcagaccaaaacggactagagttttaggagtttagccgccaaaaattcgatttttgtggttaagtgttacaaaccgtaaagttcagatagtttcaccgccaagatcccttaattataatatgtgcttcctattatcaaccaaatcccattatatatatctgtccatcttaattttgttttttttaataataaaatttggtggggtccattcatacgaaaactaacaccatttgctggctacagatcatgactattgtgctcttatataattata

SEQ ID NO: 175460 - DNA, 661 bp, Cannabis indica
ttaaatttatttttaatatagaatattgcagcccacgacaaactctcttgaatttcaagttagtgaacttgtgagcgagttatatacattattggccagttctgttttaagaataccatcaatgtccatcatatataattgattttctttttcgtttttttttttctttttgggtgtgattttctttgattacaatactgttgtaatggtattatttataatttaagtcattttttattgtttagatattctcactcgtcaatctatcgaaagataatagaataatagaatatatgagatgaattggttattctctttattaatttttgaaataaaataaaactcatttactttatctatgagagtcagtcatcttaattggtaccttattccaaattctacaaggcaaaataaataaaataaaaccgctactactcccaaattctaacattattaagcactactcgtgcccaattctaaataccaataataacttgatggtgttgatcaaacacgaggactttgaacattttactgtattatatttcttactataaatattatgatatgtttgaagattagggttagtatacagtacataatcctatctttgtcacgtgacaacattgattcattactcaatatgtatgttccgtcacgg

SEQ ID NO: 175461 - DNA, 594 bp, Cannabis indica
tttttttttatgtatctgcaaataaggaaatttcatacgcttgttttggtattctgtatatgttagtgagactaatttaaataaacgattcaaacatatgcaaatgtctaaattattgatcacagtggatgttggttcatgttggttatttttttttttttttttgaagcaactcatgttggaactttaaatgcagaggcttgtagagattatttaagcaatggctaaatcaagaacacaatattcaagtcaagattcatcattgtcgcctacttctgtaagatcgagggaatgggaggggccagcaagatggactgaatatttgggtccagaaatgacacccaagagctctaggagtaccagtcatgatgcccaggttcagagctccgtgggtcacataagggtttgaatatgcaatgggtagttcaacttacagaagttgctaaaggtcttatggctaaaatgtataggctaaatcaaatactggactacccagatcccgttggccatgtgttttcagaagtcattttggaaagcaggcgtgtcccaaaccatccaagactttgtgtattgctctcaaagagttccctgaac

SEQ ID NO: 175462 - DNA, 927 bp, Cannabis indica
  modified_base (853)..(853): a, c, t, g, unknown or other
atgtttttaaaatattttataaaaccaacaaaaatccttaaataaacatattttatatataagatataataattatatgtacttctttttatagattgtttgactagtaatgagaaaattaaaaagtggaaagtgtttgaacaagaaaatggtccaacacatgcagaattattggtcaacaagtattgtgttaatgaagagaacaacattactaatttttatttcatttcattttctttcccgtttttttttttaacttttttggggggtgggggtattagaatgtaatttcactccaacaaaaaaaattaatactaaaaatatatagtgagtaaagatagaatggaccaatagacactcattttataattgcttttttattattattaaactcattttatataattgttggtcctaaaattcttactagggtcacttgtcaaatattttgaaaatctttcacaattgcctgttttttataaaaattaattatttttagtgataattttttaataatgtattattttttttttaaaagtcacactaaaataattattattgtttttggctaaaatataatatttaaccacaaatcatcaataacatttacctttttaataatttattatgcattttagtcgcaacaatttttttttggtgataacataaatatcatgttgatatattttttgtgacaaatatgtttcacttgactgatcacaacaaaattttgtcgggacaaacgtcctacaagctctcaaatatatcaaccaatttaatttcccataaatcctacaagctctcaaataaatcacaataaataaatttaccgatcaatcaatttgcgagtagntaagaactatatttttatttggtgtcccccatttcacaagtttttgaggtttttttttagtagtacattagtag

SEQ ID NO: 175463 - DNA, 550 bp, Cannabis indica
gacacatatttctcaaaaatctaaataaaaataattacacattctaataataacactttttgtcaaattaaagcattttaattatattttccttaaacaaaataaaatgatcccaatcttctttactaactattgcggaagagacaatgaaacaggaaattgttttatttgattgaattgaattaaacattacagagaaaagagatgtatatatacagtttatagtcggtcaaagaagtccaaccgaaagataatggcaaccataactaacttaactgccaatcctaaagtcaacaaacaacctaaactaatataactgcctcaactaacttaacggatacaacaaggctaagcacagtataggcagaggaaaaatatagaatcagagtacatataaatcttgttaccccccccccccctcaatatggaccatatatgtcatgtatggccatcttggataatcgcaatagagagtagtggaaggaaggggtttcgtaaaggcatctggaagttgaaggttgttgctgacaggtatgagtcggatggtgga

SEQ ID NO: 175464 - DNA, 612 bp, Cannabis indica
gtatggtctataggctagtcgctagctaaaaagacagcctagagtacgtactcgtgtataagagttataaaatcttgtaagagaaaaactacaataaaaactttaaaaacagggacatttacacgttgtctcttaagaaaatttataaacacgaccaaccagcccttacagacgcagaaggccaccaatgcctctagactgagatgtccttctgctccacaaggtaaggttgcacacaaaggcctagtacaaaagtaccaaaacctaaggaaaagaaaaaataccttagtgattcttttaaccagggcgatagggtggatgaatttttccccgaagatagtggtctactgtagacctccagaggcgtcttgatgccgaatatgaaaaaactaaaagagaaaaggtagagacccgagagaacgacctgagaaatcatctaatgataaggtttgtggatgcgatcttccgaaaagggacaccaaaagactagacgaatagattgttgctcttaccaaattggtccgaaaataaggtggggccctttcaaactcgaaagacaaatatctggagtcgtgcgacaaactaatcattgaagccccacaatctgaaaac

SEQ ID NO: 175465 - DNA, 707 bp, Cannabis indica
ataataatagtatttttttttttgaaaggaaaaaaataatagtagtatagttgaacattttttgctgaaaagtagtacacttggagttttttttttttttgaaataacaagaggctgacgagcaacaaacggagaaaagcacaacacagcctaatggggttaagagaaccgcctagtcttcatctctcaacctgagagcaattttagcaagggagtgagccttgtcattgtgttgacgttggacatgcagcaaagttgcttcagggaaactggagaggaaggttcttatccgttgaacaagagaggataaagaagaattatcatgccaattaccattcaccttggtaatgaggttaagacaatctgagaagacaaaccggggctgtaaattagaagcaacacaccaattcaggccttcatagagagcttgagcttcagcaaagagtggggaagaagctccagacttgaaaatccttgctgaatgttgaacatgagaaagaccctgcataaaaaccattccaataccagtagcaggggcattagtattaagtgtagcatcaacaaaaagtgccgtagtagagggggtcaaaatatgatccacaacagcagagcaatgagttgtagtctgatgagagcctggggggaagaggttgggcctcctggtgtcctgcaaaaaacttgcaactgtatcttgaacattagcctga

SEQ ID NO: 175466 - DNA, 1211 bp, Cannabis indica
catgaatggctcgaatggttttttccctgaagaagtattaatagtctctttggaaaattgcttttctgaatcattgtgcaattcatctattcggatgtcaatgttgtcaaggctatcgtcgtagctccatctttttcttttagaagatttttcagagtccataccagaagagactgaagaagaatagtctgtcattattgatctcgaatcctctcgctcaccatatttcaataaagcacctaacaaattgatactttcaacaggaacattaaatttgtggagggcgtgaatcctgcgttcgtttgaccattccaggaactcaataagcatgcctcccgaagataaaattgcatgagcagtcaaaggattgactgaaggaaattttgtaagaaatgactctgcaagtgtttctgattcagtcattcttggatatacacctccagtggcatatccaatgcagctcattataatttcatcagtcaactcagatgaataggaacaaaagagctgcacgtcaattccaaggcttgctgctgcagcataaagtccatctgaggattccattacagtagaaaggaaactgttttctccctcaaagacctggcaaaggaaacaaatgggtcataaaatgttcaaagggggatacaatgatttgcacaagctactcaaactggttcaacgatatacgttccaccaaaggattaaagatgtcccaatattttttgtctcttacatgtcaaaataaagttgcaacttgcaagtatagaggccttattattcaattagtacatcgttaacccattaaatatggacagcaacaattatttactataaagccaccgcaagagagtctgttgttaatcttattaagacctttctatcttgtcaaccaatacaatgccttaagttcttataagcatcagtaggataaataatgaaaacagaaaaatagagacagttattgatattccaggaaattcgaatgagataagaataagcataacctaacgctacactatcatcatatttattccctaaaatttccaaacaaaacagatatcaaaatagatattaaacaaacaaattgactaccacatagttaaaacctgccatacatctattccccctccctcctaattcttgctcctatcatgtgtatcggattctttcaaaaaaaaaatgtgtatcgaattgggggcctatcacgtcct

SEQ ID NO: 175467 - DNA, 1168 bp, Cannabis indica
agatttggttatgcattttttgaaaaatatttttaatgagtttttcttattgtttctgtcaaatctaattgctttaatatctaaaatatacttcttatctttcgcagttttatctcgcacttaaactcgtcccctaaatcagatctggtgctacgaagagagaccctaaaacgtctttggagatccaacggcggtcaggatcactcctctaagggcatttcgaaacttcaacaaacgatatgagccgacagtgtaccaacagtcagaacttcaatatgaagtaattttttagattaatttgacagtgtatccagtttctcatttgtgttgcattatgcacatgaactgctggatatggatttgactaatgttagaatttagtttgtgattttttgtttctggttattatttattaatgtgatttctatgagttattgttttttattttctactgcacattgaaaaagaaagaagaaggggtgataaactgataatggtggaagaagaagacgatatacagttattttattttattgaatgattagtaatctatgttttaagagaaacttagttttaatctttattttttttaaaaaaaaaatatttaaacatatatatgtttaaaattttatagtatattttccatttttttatattaattttaaatatttaaataattttttattaaaaagtaaaagttaatacatttggaccaattagaagatgacaagtggatacttacctggctttaacggtcaagtacctacggaagttccagaactctaacagaaggtacttttaccgccaaaaatacgacttaagtatttatctgctactcggagtaaaacttaggtatttttaccgcaaattactctatttagtataaccaatgattgagatcaaatggagattaaaaacaaaataaactttaaataattaagaatgaatttgtaatttgaatattaaaaaaatattatgataactaacattaatttttttttttatttttaaggaagaataatatagattttttagaggaaaataacatagaaaatttaagagatttctacacctgatgccccttttcaacacttttttacttttctggcattactcggttttttaaatatttttaccttttaaatttttcaattttagtttttaaaaa

SEQ ID NO: 175468 - DNA, 834 bp, Cannabis indica
ctttggactaacatattattcacacaaaatactttataattgtcacacatttatcaccacaaacatacatgaaattcaaccatatattaacttacctttgggttagttaaaaaatttatgaatcacatacacacaattatcataatatttttattaaattaatcaatacaaaagagatcactttggtgatattttgtttcaattaatttaattaaaatattatatatccttaataaattttaaaccaaaatttgaattaattgttactgtattattattattattatttatatatttaataaaataataataacaatgatggcaaacaacagtcactgatccttatgcaaaaaattggcttcttgacttcgaattaggctatttatgataaaaccgaacaaataaaatacatggatgatttgactatataaaataaaagacttaaatttgtcttttccttcggagagagatatatatatacagtattacagtaatcaaacgattgattacacaaaacagttcaatcgcagcaatatatatacacaaaaaagaacttcaatcgcagatagatactatatatataacaacgattacgattgaacttcaatcgcagatagatactacatatataacaacgattacgattgaacttcaatcgcagatagatactatatatatagcatgatgcacaaaatattccaaatgcaaaaataataatttaatggaagatcaatgctaccataaattctcaagaactaatttaggaatgttcttgataccacatgttagaatactgtaaactctgaatatagctctaattaattcaagagaatc

SEQ ID NO: 175469 - DNA, 996 bp, Cannabis indica
ggtggggtcatgaactttggaaagcatagttaaattagttatgaatacgaatatttttagaaaaacataacatttcctatatctatagattaggagtataaaatcaatgtcataacctgaaacacccaattttggctacatttctggttccttggattctgaacaaaatccaagcaagcaaggcaatctcttggttggccatattttatgacaaaaaatctcctactaatcatcttcttttggatccctcatgtcatgttggacagtacttaaactgaaaatggttcaattcttcaaaattagccaccacaaaacatggtaaacagatttatttggattttagatagccacaaaagattacaattttaaactcccttaaaatagaccacagatattttagtattccaaataaatatttctaaagcatttgcttttcactaatagcttccatcaacgtctcataaagtaaccatggctaatgagaatgaggtacgttcaaatcaatcattcaatactagaaagattgtatcaaatatatattatgactttcttttgtttaattgctttttacaagaaaacagattattttttttcttctttgtttttgtttttaatttttatttttggggaagcaaagtagaatgaaaaatgatcttaaagactcattgttctgaaacacccaagaagataaatgatataaatttcagtcttgatcaagctttgtaaaattatcgatggatttgtgtttatatatatttatgatgtgcacttgttttattcctcttaaacaaccataaaatttcttactctatacgaatatgccatttatttgctgatgttatgaatatatgttccataacttactatagaaatctgaggtaggaacacatgaggttgtattggtcattattgaatacaattcttcacaagcatttatatgaaatgcttacatattcattgttttggatgtgaaatccatgaaggattcagatgttg

SEQ ID NO: 175470 - DNA, 1332 bp, Cannabis indica
gattgcgtgcacttgcgtagtatttaataaatttcagcaacaaacactgagttggaacgtgaggcagtcgcggctagggcaacacaggagaataatacccaaaatcaacctaatcctggagtgagaagaccacgaggcaaacctcccgactcacgaaccaggaggcaggagacagctcaggagaaccctcagaatgctcaggaagaacaacctagggaaactaaggttctccctgaaaacaagcaatcgggggaaactgagggtccccctaaaaatgaacaaccaaatgatcagccggaaccttctcatagatatgagagtagaaggcgactagaaaccaggaaacagaaaattcctcgtggaaacgagggaaatcctgggactcaacctggaacacatgggtcaccaacgaggcaccgccaacgttcttcccaaaacaatagggaaaggacacatacaaaccccagtagggggcacacaacgaaccacacccaatggagaagaacaggcgtgaagaggcgagtgttacctaggggcgcacaagaacccatagccgatcaacgcgaggaggagaaagtattcatcacaacaatgattgagaaagcacagacatgagtaagactgcaagtcactcaaggatgagatccatgagtaggacgaggtccataagtaggacaaagtccgtgagtagaatgaggtctgctagcaattataaccaaccagatttgcgagaacactttaaccagaaaaaatttgatcttcgccaacaactcggtccaaagcaaggggatccaatctaattgcaaatagatgagttggaggataagtttagaaggtatcaagtcggggagtaaggaaaaaaatctgcatatgactcagatgaggaactcgagccataccatccagatatcatgaatactctttttccccagggattcaaaaatccccacgtctcgtcatatgatgggaccactgatctgatctcgcatttgaacaagttcaatactataatgcgagctagcaatgttacaaacaatctatgttgtattttgtttcccacctcactagttggagcagcaagcagctggttcaataaatttactcatcactccatcacttcttgggaacagctgtctaaggacttcaaaaagcagttccaggccgctagggataggtgacccaaagcgtcctcactcaccaacataaagcaacagcctggcgagacgcttaaggcgtacataagtcattttagcacggctgctgcgagagtaagaaattggatgataatacctagcttattgcccttcatgtagggatcactactaatctctc

SEQ ID NO: 175471 - DNA, 628 bp, Cannabis indica
tccaagggaacgggctccggaggcccagaaccaatccgggcccgacctaggaaatctcctaagttggaaaaataataatccttggcatgatctccccttcatcagagatacttgtaggaatacatgatctcatacctaaaactctacatttatacatttttagatctgcatagctcatctgcctactctaagaggcaagcatttcggccttgatcttctctattgcctcattgctcccctatactgacccaagtatttcctttcactagtttcatcccagtgaattggaggtctgcactttctgccatacaacatctcatacagagttgtaaagaccacttagcttaaatttggaaattagcggataatcagggtttaattatggaaaatatttattaattttaaattattaatttatggtgatttattttaattcagaatgcattttatatgtcatatatagaaatttcataattttgcttattcggtgcccgacaacattggaacgcggtgtttggctattagactaacatcttagtattttagtgtagcggggcagtttatttggtcattgggattggtcgggattctagaatttccataaatgcccataaatggcctttttatg

SEQ ID NO: 175472 - DNA, 652 bp, Cannabis indica
catgcaagatacagctaagtccttctcatctttggccaaacaaatgctacaaactgaacaaggcagacgaagctcgtagtccccatttgagtccaactcatcatgagtcgaaatacatttcagttggcttttgtttgtttatttgtttcaaatactccgattctttggcatataacacttttcatgtaaatatcaaaaagggtgtgtgggtgtgctacaaacaatttgaaagaacaacatgtgttaaatcaagtatacgacaatagtttctttcataagttaatggtaagtccagtatttttctattagaaactgtaaagagcaaatatagagaaggaaacggtcataaggaaagaataactgattctaaatccattgacctgctgctaaaactagcctgcataccaaactctgacccaagtgaggaaaatgataacttaaaaaattgcaaatccaatcactcttaaaggtctatatttttctcagtaaatcagccaaaagagaggatatctgctctttcattgcatctctgttactctcagtgagtgtaaagattgttgcaccaggatgattcttcaatctagcaactgcagaaattcaatctcactatcattagcaaaatcattgcacatggcaaagaataaaagcatac

SEQ ID NO: 175473 - DNA, 678 bp, Cannabis indica
  modified_base (665)..(665): a, c, t, g, unknown or other
  modified_base (672)..(672): a, c, t, g, unknown or other
cctcttggactatatgaatgagcaaatatttaactcatagtaatttgaggtcatcaaagattccatttctatcacatcttaatccactttgcatcactatctagtgccctttaaaaggttaaatgtcttttaatcatacaaggctttgaaatatttgtcttatttattatactaaagatggaaggaagggggccactttggtaaaacggtactgtctcagtagtaattcctacgtcttcagtgttcgtagccatgtgcacccacaatttaggtaagcttcttccaaaatttctcttgcatcgtacagatcacagagataagggttgtgtggatagaaaatacagtaacgataaggaccaatataatagaatttgatacctcaaagcaccaaattattttctagcctttactataacagcagctccaattctaaagaggagtctcaatctcaagataacacaaattatttaactcgtggtttagtcctcaatggccttctacaactctggatattaccagaattcttctgatctaggtgagtatcatcaaacccccttatgcttataattctaatcattttataactgatcaggtggctcagtagcttactcttcgtacaaaagagccaagtatctataatctcttttgactataatatcctaacncctttanaactat

SEQ ID NO: 175474 - DNA, 698 bp, Cannabis indica
tgtttcgataaattcttatttatttcggcatacagaagaaaattaaattgttttcatgattatgattacgtacattatagttatttaagatcacttgtaaatttttagaatatttcgagtaggttataatgttaaaaatatgattttcatattttgttacatgcacaattatttttctattgtacgtgtagtaagttatgtctaacctaatttttggcacggtaaattgtttggaattttgtgaaaagaaataaatttaaataactacaacgtacactattacgaaaaaaataaaattatactaaaattttctaaatgtcaaaacaaatgaaggtaccataacaaaatgaccctttaggaggtattctataaatttcctatattatattgtataaatattaaatagaggtatgaagaggaactttcatttataatttgttggcatcctaaataatgataataattagaaaaaggaatataagatgaaaaatacaagtggtcctatttttcataataataataagaataataataataaaattattattaggtaagtaaaaaaaagaataaaaagattacttttttttgttaagacagaattttttaagtggtcaaacaaacaaaacaacccacaaacaagaaaaagctctgtcaaaacaaacaaaaacaatgggaatgatgattttctcttttttttt

SEQ ID NO: 175475 - DNA, 802 bp, Cannabis indica
agtattgcactatcaaattggagtaactgctgtggatcaatcagagataattgctatggatcaatcaggtacacatactcaattatcatatactactattgtgttctatgttatatacaaatagatcttgggttaattgttaatttatgtaacaacttatgctcagaatcgaacactacaaaaaattgctatttttagtgacaatcttttagtcacaacataaattttttgtgactaaatgtgacttttagtcacaacaaaatgttacttgtaactaaaatgtagtatttaattacaagttatcactaatttagttttagtcctaacaagtatattgtgactaaaaataaatttagtcacaataaatcgtaatttttgtaactattacttttagccacggaccttttagtcacaatagaaatcatgatttataattagtcacaattttttcatttttaatcataaattttattgtgactaaagtaaaaaaatttgtagtgaaagcctgcataattataagtattatacgttggcttgttaaatgctttgggaaatttagtttaagaaagccaattcatattatatattacacgtatatataccctaatttgtacaatcatatatagtctctctatttcttttatttttttgtaattataatgatactctctatatattaaagaattcaacgttattttttgagtaaaaaaaggtaaagagagagagagaaatattttaacacattaatctctaaattggatcaattgatcatcacggccctgctatatatgtatatatatat

SEQ ID NO: 175476 - DNA, 666 bp, Cannabis indica
aaaataaaacataaaacaggttaattactcttattattattaataagaggttaataccattttagattctaatgttttgtaaaaattacttatggaatcttttattttactaaatggtaaaatgaactttatattttgtaaaataatacaaataaaatcttaagcttaatttttaataatttttgtttttaatataattaaattgatgataatttctagcacgaataaataaaaaaaaatacaaatatttttgttataatacctttaaattaaattattattaaattttattttaataaaaaaaattaattaagaatactcttattttaaaaaatataatgtttaatttatcatcaaataaaacaaagaattcaactaataatttttatttaacaataataataattaatatataggaaaattggaaagattatctctccttcctttggtctttcagaaaaagaaagtcgcgtctttccacgcgtgtgtctcttattttgccgttcaacaaattaataaaagaaaataataatttataattttattaaagagagtcgggtctgtactctgtgtgagtgtgaggacgacttgggttgggcggctgctatcatgcgggcgtagtcaacaccaaagccaatcccaaacccaacgaaatattccaattat

SEQ ID NO: 175477 - DNA, 1259 bp, Cannabis indica
gttataataatgtatgttattaatagtaaaatgtacattaatcttctaattgaaaaaagttctattatctcatttcatatctaataatagctacacaactatatatttatagactttcacattctttgtaaattactaataagcaccaataatattttcatattctaatatttttcaaccttctcctcttggtggtaaaattaaaaataaaactaaaaataatcacaaacatataaggtaaatatctatatttttcttttttttttaaaaaaaaaaaaattattaatattctcccaagataggtttgttagagagatatgtggctaagatgatttttttaatttaaaaagagattattaatatttaaaagattgtttaattttttggtttaattattgggtttatttgttaacgggagatcaaacctaatcgttaaatttaacagaatattcttttatttttaagtatattctgttaaaccaagaaatgccgttagataggcacttttaatatataaagatatatatatatttgtatatgttaaaaattacaaatgtgatggggatcatgtgattgcttgttaaccttatcaaattttggttgaagtcattgtctcaacaaatgaaaacatcgttattatccgaaaatgttttcgttttttcctttagtgttatatataataaatatccaagtaattccaaaagttctttattttttaaaaaaaaggttaattccaaaagttcttatgtatgcattttttcttttttttttttttttgtttattttataaaaatgatccacggtaattaacctattaaatttttactcgtttaataaatttttattatcaaaaaaataataaataaattaaaaatttatacttgtttttttaaaaaaaaaatatggagagaatattatttctagttttgtcggcttaatagtaaagaaagttatagcaaatgaaattataatactatgtaagtaaatgtctatattttaaaatttgtaaagaaatgacctttttacactatttattatttatattattttttgtcacataaaaagttaataatttttttttatatttttttagaatttagaagcaaattacttaaagattatggtatatatattagttttattaaaatctttttattttaaagttatgtcaatttttttaattttttattgtagttattgtgcgttgttggtatataaattttgttgtacacagtaatggatctagaatttttactttg

SEQ ID NO: 175478 - DNA, 648 bp, Cannabis indica
atcattacataaatttaaatattatgatatatttatatatataatgcaggcgtggatcaggcacagacaaggtctgttcttaggttctttctcaaaatttaaataaatgccttttttttcttccgcccaaattttcccaaaatttaaaactcgggattagttatgtataatggataagtagcataataacaattatacctttaaaccttcagcagtacaatcagaaacttgccaaccatgatcacggtcagagaaagtccatgctcctttagaaatatgtcgaaaatggtctaaatgattaggaggattctctctaacttgagacatctttaaaaactcgtgtgctttctttagtacagctgcaatttccttattaatatttccagcaactagtgcttgaactgtgagactacaatcccatgtttgactaccaaaactctgcatatattgtatactaataagaatcattcataatggttcattaacattaattagattgaattattaaagcttagtaatattgcatgtactaacttgcatagtgagaccatcttccgctacccataaataatcatcaactcttggaatatgtttcttgaaatattctccatgagggtcttcggcccaacacgctagcattatatatat

SEQ ID NO: 175479 - DNA, 607 bp, Cannabis indica
tatacattaaaatttattaatatgaatttggttaattaatatgtcttcttggaatttattaatatttctgtccaattttttttttgttcattatgaatttggtcaggttggaaaaggaattgttcagcatgttggatttaaaaatctaacgttccacaacgtggaaaatccaatcataattgaccaacactactgttttgatccaaatggctgcccagacttggtaattttttttttaattttatttccttagggatacatgacaggcgggaaacttgcgggaagtactcttttatactcatctccattaacaattttaatctctatcccatttatttttcttaaaagacgggtcagaaaatctcttaatgaggtcgggaaaatataaaaataaaatttattttaaaaatttaaatgtattaaattatataaaaattacaatattacatattatttattatttaatatactaattaatataaaaacacaatttaaaaaattataaaaatacattaatatactaaaaaaatacaaacacctattataaaatataaaatattaataagttaaaatgggtccatttagattggagatcccttaatgagat

SEQ ID NO: 175480 - DNA, 723 bp, Cannabis indica
cgtgaatctcctatctgagcgaggcactcgaccgtgttttcagacagcgaatgtctgaattccgcgcacggttgggtcttcttgtctgagggtcgtggtgcgcatgagcaccaccctcgacacccaatggaccccgatttttaaattgccatatctctcacatttttaatcgtaattaagttctgtaaaaacaaaagttgcttaatttttcacaaggaatccaaataaaatattttcagaaagaaaataaaattattttcatggaaaaatttcgtaatacacattcaatcatcaaataatcacataaactaacatgaacacatccaaatcaacacacaaataatattcatcgttttaaatccatatttcatgaaagtaaatcattaccatggttctaaggccaattgttgggaatattttaccagaatctagattgctaacaagtatgttgaattaacatcctaaatatgaattctctaaaataatgaaattaaacacataagggtttaagaaaaccttacattaattgcaacgaaattatatgactccttctgttcaagatctctagcccttgattcctttctgtagcagagcattatcaagatctaaacctggatctctttctctcattcgggttgttaggattttatgccctaaataaaatccatttcaatctaattttatttgttatcaatataagattagaagtcatttatgtttaca

SEQ ID NO: 175481 - DNA, 978 bp, Cannabis indica
atacccagaccagtagagttttttaggtgtcaactaagccctctgatgggtgaaaatacaatatatatttactttgggccactgaggtgaggcctaattcacgaggtgaagattttccgtacaagtgaggaccatttgaggattccaagtgtcgtgcacagccacgtctatactgagaatgtcagagaatatggtattggacaaaaacgtgattttcttttggtagcgtgcgcactccgtgagtacaaagtagaggaaaaactctaacactctgggacctggtgtctagagggttttgcgtagggtgacgttcagaaaccttccaagtgccttttcaattgcccatatttggatagccccatgagggtatcaagactggtcctgatggactcttcgtcttcaagaccgaacaacacctcctggatcgagatgtccgaccttgttaggttggtgagctagaatcacatccgaatctagagttgtagtatgaattcgtaaacaagctagatatcatccttattgggcccagatttgggcctaccttgatggataataggctttagaattatacacatcatcactccgaaaataaggataaaaataagtcacaatataaatagaccccatccctgattatcacatcattgtaaatctaatgtactaataaatcatgggactaaatataattgaagcatataatcacaaatttttttcactatgaagattttactatgattttgaataattgtatgttctgaatttagtaaaatttagatattaaacatataatcatgtaaacataagcatgtgaataaagcaattgactaatttgaaagtgatttgtatttctatattaacaaataaatgagatcacatagattaggttttattaggacataaaatcctaacaataactactttaaatacaaacacagaacaattgagagaaagacacacacatgaaattaataaatgaag

SEQ ID NO: 175482 - DNA, 765 bp, Cannabis indica
gggaagctctagcaaccacaacctaccttataaatagaagttttagcgattgtgtacttacacagtatatagtatttttgaaaaaaaattcacctcacaataaaaaagtaaaaaactaaaaatttcaatatgtagtgtaaaaatttcaataaaatattatattttaagattttccgccagttttgattaatgaaggttagatattttttttctttattttttttctttattttttttcaacatttttcttatttttttgttttccccaccaaaatccaaaaaaaaaaaaaaattatctgaaaataaaaaaaaaattagcaaaacgagctttttttttttttcctatacaatttgtcttataagattttattaattcattttttatttttttttcccactaaaatccaaagaaaaaaaaacaaaataaagattagaaaaagaaaaaagaaaaagtagaaagagtcgtcgtcgcgtacgacagtactcagcaattccaaatccgattttattgaacttcaaactctctctctctcttcctcatcacctttctgatcatcatcgtgattttctagagagagaaagtcttcacattgtcaaaatagtgaccaaagcgcgtacttgttacttcctctcaatctcaatcccaatctcctccagatcttgatcaaaaacagcttcaatacttccaattctagatcgatcccattgctagggttcccaattccatctatctcccaatggcgaagccaaggcactatcgtttac

SEQ ID NO: 175483 - DNA, 1115 bp, Cannabis indica
tttttgttgacgaataaactttgcagtcaggaggcccaggatggtttcccctattaggaagaagggatagcttaatagctaataaaagtggagcagatgaacttccagctccatttgagacacttgatgcactcaaagacaagttctctcaacgaaacctcgactcaacagatttggttgcactttccggtaagtgtttcttattttctaattttaataatatttttatgtataaattaatatataattccaaacagaaacaaatagccataatattctcgtctttttctgttcaatatatttacgtcttttagccataatatttgaatggttttcatttggtcaattatttgagatttggttaccaaacattatgtgcatgtttgtttattatatattactattaatttataaaaggggtgattattgcccaactgttgtatttttttatagttctcatttagtaattaattatactaatgttatatataaattgagataaatatttgtaatagttataacgacagcaacatattattaactctaaacacaaaaaaattgtgtcagttctaaaacaaaataattagtgtaaagtaacaatatatattattgatgatgagctatattttagccataaattgtacgttatatgtcttatcgatctaatgttgctaaaaaaagtcaagaatttagggtccaattttatataaaaaaaaatcgtaataatttgtcaaaaataatattcttcatggacaattttttttatacataaaaaaaatccatatatacaggtgaggatcaatatgtaaatcattgtttataatgttaagtttgaatgctcttttggatgcatgcatgtatcagagttcgtataaaagatttaaactatatttctagaaatttgatgtatttatatatctataaaatattataggcgcccacacatttggacgtgccaagtgcgaaacattcagcttcagactatacaacttcaacaacacaaacaatcctgacccaaccctaagcccaaccctcttagcaacactaagacaactatgtcctcagggaggaaacggcagtgtcctcactaatctcgatcctgtcactccaaacac

SEQ ID NO: 175484 - DNA, 898 bp, Cannabis indica
acaactaagtgatatatttctttaaaaaaagatatttatataagttttaagattatcttttccattagtaatatcgattccatttttgatgtataactatacatccagcataagttactttagaatgccttagaaaagacataccagtatataagtttaagttaaacaaaatttttttattttatatcagtgtaaatcttgtgtactgataaattgtgagaccaataagtaaagcgacagcaaaaattctttaccaaaaaaaacataaataaataataattaattatacactaatataagcatatatacattttcatacatatatatacacataatatatatccatacacacatatatatatataggccatggattcaatccctcaccactttttttttcagaccggtcactcacttaatataactcatttatttagtaaatttagactttcaggaactaacttatatgtatgtggagcaatatattcacacagtgagtaataatttatatccagagtaaatattatatactcacatgctaatattttatagttaagttagacatcgtcttattatatactatcactacaataaaatttatcaatagccgcaatattattagcgataggaaaaatttgtccctaatagtggtagcattagcggcggaaccagaattcaccgctaattctacttatttatattttttttaaaaaaaaaactactaacggtagactctgccactaatagtattagcgacgagccccaccggtaataatattaaaaaataaaaaaataatcgttagaattattagcgacaggacattaatagcggtctcgctgctaataattgtatatatacccaaccccaactttcggtacctgtttcagtactttcttt

SEQ ID NO: 175485 - DNA, 741 bp, Cannabis indica
caaatggtagcaaaaaattggttaaaaccaggatcactcattccagtgaaaccattaatgttgaaatttttccaaagttatttcaagaggtatgccaccttctctatcagcattacctaattaagcaaaaataccaagtggattattattagttcatatgaatttaatgaaaagttatgatgacccatttacatatttacgttcaaagatacttatgttggtaaaattttataatttaaacttaggtagttaagtgcaaagtcatcttagactgggctccaaaattaaaaaataattaagtatatatacagcaaaatatagaagatataaatattgagagtttcttaggtgggggtattatttttgctcctactatagaggggttttatttttaatactttaaaaaattatattcaattttttttaatatatatatgacattattgtatattgtaactgtaatagctactattatgtctatttttgaaaattttaaatattttatcatgcaaaaaataatgtctaaattatatatagtcaataaaaatatatataggaaaggtcaaagtttgaattccatcaactacatgtgtattatacacaaaagacatgcatattattgtgacaatacatattttttaatgaaaaatggcttagctctcaaaatttgttctaggcctgagggacttatatggtcaactagtgtacccaatctactattcatgcataatcataaacaca

SEQ ID NO: 175486 - DNA, 705 bp, Cannabis indica
ttatcgatcactaaattaacagatggtttaacaataataactaagatattttattaaagaaacaaataaagttttaccatcattaatatatgttcaagtttaatatatatgaacttaaaactttacaataccaaatatgattttattaaatatttaaagtattaaatatgtgttacgatattttttttttgaatttacactcttaggatttgatttcataaccctccacatatgcactctccacttgagctaataatccacttgagttaaccttaagtaattcttagaatatataaaatattttgtactaaataaaaatattgcaaaaaaattaattaagtatactcgaatcgagattaaaaatataattaaaaaatatgaatattttttttaaaaaaaaattacttatatatatatatttatatatatatattgaagagtacaattgcccacccctaaaggaccatatagacagacatggaccacaatatttttcatcacttccaattatttccatcgatcaactatgaatttttatttttattatcacttgaattgtattaaactattaatgcacgcttcaatttataataccaactctctttgttgcattttgttttaataatttttatttaacactaaaaactaaaagaaaacttccaaatcatttttgtcatttggcctatgaaaaagaaatgaagtaat

SEQ ID NO: 175487 - DNA, 770 bp, Cannabis indica
atgatccaaacttatttaaagaaaattcaaacccatttatttaatgcgagtttcgagtcatgttatcgtatttgacccatttaccaataactatacatagttttttttttttttaacatatttacatttattttttatgcatttttagagtccattttagtatgtgttttagtagtttttatttgtttttgttcaagtttacgtttgttttctttttattttaagttttagtggccaaatatatcatgtgggttaaaatgagagaacatatgctaaatatataaattatatggatttagcatgaattttggaattgtaaaatacaatgggtgaaaaattctaagtttaggatgttcaacacgctccgtttgtgatcgaaaatatagtctgaaactttaagccaattttttactatgttctattcacttccaggaaaaactttatgaataaaagttttagatctctctttcatctttccgaaatatcttgaattggccaattcaaagttatatcaagagggtaatgaccaaaatactatcattcatcgcaataggaaatcagaaaaacaagagaatcacaactctctatccaatgccgcggatcttgcgaaaaaaatagaaaacttcctaaattttttctataaaatgagttggagctaggtttcctttatcatttaaacttggaggctaatttggagcatagaaggacagtttggagcagaagacactattggaggactccaaacagtgttctatctcctctatctttta

SEQ ID NO: 175488 - DNA, 749 bp, Cannabis indica
ctttattatgtatagtttgcttgtggaggaattacagaataatattttttctttccaatatatttatatatatcaatcaaattaaatacgtactaaattctctatgtgttatgtgtataatatatatacacaaatatattattcggactttatataaacacaacaatggaatctatctatagccttagagttatttgatttcgtgttacatatatattcaaaccctaggtatacgtacatgatgactcataaatattataataataatataataattaaaatcacaaattttcttcttttgaattttctttatgggtatttgttttttgaaagccctttatgcatggtattattgtttgattagcataaagatagaataattaatgtaacgtttcgtaatatattggagggaaaataattaatccaccctaaaccctttttttttttaaaaaaaaacgagataattataaacttataactattcactatatttgaaacataaaacttgcgcccaagaaaaaacataaaattaagacatgtaactgaatatttatcatgcatgaaatagtaataaattaaaaagtaaaaattcataaaaaattaaagagacagaagcaaaaacaatgatacaggtataagtgaaatttaacattgggttatttccttatttcttcgtataatttaatttaatatctattatatacagtgacggacaaccccactaacaaaaatattcttttaaaatttta

SEQ ID NO: 175489 - DNA, 625 bp, Cannabis indica
ttattattattattattttaaacggtaggtattaggtaagtatttgttaaaagccatagttaaatagaaaaattatgttatgttatgtcatgttatctttttttaaaaaagtaaaaaaaaaaagaaaaaattaaaaggtaaataaagtatgttcaatacatatatataacataacagttataatatatatatcaatattattttttaaaaaaagaaaaaaaagaatgtatactattattttttttactctgttgtgtaaaataatttatttgaataccaagattttgtgtttgtaatggatgtatatattaattgacttagaaataagtgaatattttactagatttcaaacacatttgtagtgataaatatgtgataattataaaatattttgtgtgagcaatattttgtgtgagcaatatgtgtcacctagcatgcatggtgttgttgaaagaagacataagattcttaaggatatggtaagaagcatgatcactcattctaccttactcgagtccttctatggagaagcattaaagacaacagcttacattctgaatagagtactaactaaaacagttgcaaagacaccttatgatctttggacaagtagaaagcctaatct

SEQ ID NO: 175490 - DNA, 1415 bp, Cannabis indica
ttttgaaagttgtatttttttttttatttttaaaaatttttgaaatttttttatccttacattttttttaaatcaattacaaaagttaaaaataattttatataaaaatttttttaaaaagtatttttaattttctaattaaaaaatataaaactgattaaaaaatgttacaaaatgcattttaattagtcaaagtaaaaaatataaaaaaaaaatatatatataaaaacctgagatgaaacacatgactccaagtcccctcatctcattaattatatagatattgtagtcttatatttagtattaaatttaaatttgaccttgtatataataaaatgtaatgaatatatctacattttttttatattggcagcaaaattatataaactatacaatttgtcacacttaacctcataaatcgatttttcgataataaaactacctaagcctcacttctagtatacatgccagagtgaaccctaatatacacatggtaaatttttaacaatccacataatattaattattaaaatattataaaaaaattaaacattaaaaaatcatttaaaaaataaataaaaataaaaataaaaattctaaaataaataaataattcttttccttcttcatctttctttttttttcttcgttattctccacccataccaccacatgtctacctgttgagaatcatggggttccatctcaaaaccaattggcaatgagtggagtagcccatgttcttatatatggctcaatactttcacatttaatccatgtgggacaatattctccaatatcccccctcaagatggtggctatttttgctcaccaatcttgaatcaccttatcataagtagtgccatttgctcgcttattttttttgttttgcggctgggagttccatttgctcgcttattcttgttcgcggctgggagtaccattttgctcgcttgcggctggctaactctttgataggtgtggatcgaaagcccgctagggatatggctctgataccatgttgagaatcatggggttccatctcaaaaccaattggcaatgagtggagtagcccatgttcttatatatggctcaatactttcacatttaatccatgtgggacaatattctccaatactacccaacgttattatcaccattaccacactatcaaccaccaaaaagtcaaaggtaccttatttttttagaaaaccgtaaaacaggagttcactatgaaaaccgaaaccaaaaccaaaacaatgaaactaggaggtccatgaggaatcacaccgaaggaaggaagaaagagaaaaatgtaaggctcaaaataacggaacaccacggacaagtggctggatgagagctcatcaaagcatcgccatgcgtgtgtgttcttgatcgatggtgttgatcga

SEQ ID NO: 175491 - DNA, 717 bp, Cannabis indica
ggagtggttaggaaaagttcaagcagaggtattagtttattataattattgtagttacaattgattattttgggtttttttgtatgtacctctatttagttataacctctaaattagaatatattttttatggtcccaaatatattcttgaatagaggttctactgtatctttaattacaatacttttaatctcaaatttatagaataattaaaataggtaaaataataatttttaaatcacaataggagacaaattttattgtgactatttatttatttatttatttatctatttgatgatcatcatccaattaattttcaaatctcccaccaatctaaattcgttatatagttcaacactatataactattgtgaaatactaaaaaataccagtggtatttagtattcttctatgtgtgattatcactattagtctaattaagtatcaggtcccatataatttaatgtaataatttttaagaaatatcgttagtcaatcgcaagcgacatgtctagaagtattaagcactatactggtatatccaataacaatgctcataactattgctcgtgtaccctttttttttggaagaaattgttcgtgtaccctactaaatccatattatctatttctgtctctttagtctagtttgaacagaaaaagaaaaaaatgcatgtaatcattctccattgtttgttataattaacacatctc

SEQ ID NO: 175492 - DNA, 578 bp, Cannabis indica
aaactatttttttctgtaaaaataaaaatttaataacttagaccaatcaaaaattgtcacgtgacaatttacttaacacttaaaaatcatgttcttccaaaatttctaaaattataacttatatattattaaatatttatttgcaatgaaaattaaattcaaatatttatacaataaattataaaaaaaaatgcctttttaatgaattttttattttttttttcatacaaaacagcatgccaacactggaacacgtgtcttgcattatttatcctgtcgtgttgtataacataacaaaagatatcatgattattatcatctttcttccattaaaaaatattatcatctatctttttcaattattttatgaaaaaaattattagtgttttaacttttaagaatggttaacgaaattttaaacatataatgttatttatttatttttgtttattattatttttttgtagaagacatataatgttatttacaaattcaatttcttcaaactttttttttttttttttggtctttttaatagtaagtcattgctatagttgagagtccaagatgaggcaagg

SEQ ID NO: 175493 - DNA, 560 bp, Cannabis indica
tgtgtaatttattagtagtagtataattcctttgaatgagaagttctaaagctaaatcttgtggaaaactagttgtcatctcgaaaggagtttcggaagactagcttattcatttagaagaagtctttaagaaaattaatcgtcctttaaaaataagttctgaaagacctttacaaaaaaaaaattcttggatagtttgtttcaattagctttgtgcttatctaacacgtccttttagaatacgcctcgtcagcttgtaacttacgtccaagaagcaggaatcagcatagtttatattcggagaactctttgccaaagttgatttgaaaatctcacttaaaaaaactagttaaactgattaaatcgtaaccgaattaattatttagtcgttacacccacagccttaaaactcatcagaaaaagctagagcttctagctgaaaaattacaattccttttgaaaaaataaaatcagacttagtaacataaacaaacattaaaacactacagaaaaaaaaatgctaaaatgaataagaatgatagtttttttaaaaaaaaaaa

SEQ ID NO: 175494 - DNA, 847 bp, Cannabis indica
atttttttttatcttgatcttgatcagatgatgatgatgatcttgaactgaaagcagagtttcccaaggccatgcaaaaccctagctcggactggctattattattattattagttatcttctgggtggctttgtggagaaatgaaaacggcgtcggatttgtctcgcctaagctaagggctaactccattttctttgactgtaataataataataataataataatattaagtagaaagaacaaagggaagaaaccagagaggggtttccttcttctttcttcttttttttcaaaaggttttggtggatatagctaagttggttgacgatgactaaaatgtttatggagaaaaaagaaggaaaatgaggactataaaaagaaggtgaagcaccctatgatcagctcagatctttttgacgtggaaaagaaaaaataaataaaaagtatatattataatataataataaacaaatcatgaagaccaccacaccctcttaaaatttcataatttattatttttttttttaaaaaaaaaaaaatctctttcgaggggtgctaataaagattgaccgacaaaatccaggttgacaaatgcacgtgaatctatttaattataccgcggtttatacatgagattgtattcaaacaacaaataaaataataattaaatacaaaacaaatttctttgattttatatgattactagattaaaatctctaaaaaaaattatttttatttgcaagataagaacgtatccacaaaatttaatatattgataatcttttggcgtaacgattattttttttggtgaatggagaaaaggaaatataactaatcatttaacg

SEQ ID NO: 175495 - DNA, 677 bp, Cannabis indica
cttgactctgctactgagtgtgagtcagaactagacaacccaataacttagagaaaagtagtccaatcatgcactcaacacccactccaaaactatatatcatatttaagtttgtctcagaactttagagctttcatcttggccctagaccagtccctaaatggaaggctgttgcactaaaggagatctgagccctaaatgggaaatggattattactaatttacctcctaaaaagaagactggaacataaatgcattttttcgatcaaacgaaaggtcgaggagagcatagataggttcaaagctcacttggtggctaaatgttttactcaaccttacggaattgactataaagagaattttgctcctgtagcctaagtaaacacaatttgagccatcttatcagttgcaagatctacgaaagatgtatataaggatgtcccaccaaattttgaaagcaaccactcaaagcacaatgtatttatacatcacaaatcctttcacggtatagactcaaacaatcgccatgagtttggtttgaaaggttttctagagtacttgaagtagatggttactcgcagtgtcaagctaaccataatatatttgttaaacacttagacgacattataattgctagtgatagtgtatattgatgatatagtagttactaaaaaatc

SEQ ID NO: 175496 - DNA, 322 bp, Cannabis indica
aattattcggatcgaaacagatttgacacggaaaagtaactcagcaggttgaatcagcagctaattcggatcagatcatagtcaaatcagatctcatgacttgatctatttacattcttattttctaatgctaaattttctaaaaatttaaaataatcttaaataattacaacgtaggcgattattaaaaaaaatattcaagtataatgtaaagaataaaatcaattttatcttacgtacctaaaagttttacacgatgtgatagtcatattggtttggaaacttgtaagtttcaatctggtgtagtttgcataggagtttg

SEQ ID NO: 175497 - DNA, 741 bp, Cannabis indica
caaaacaactacaaaaaaaaagtagaacactagtaaaacaccagtagaataccagtgaaaacttgacacagtatactgcagtatgaaacttataaaaaacacagtaaaaaagtaaaaaataccgcctgacagtatttttgtaaaaaaaaaagcaaaagttagtataccatgtaaatttctccttttttaaagccctcattgtagatgctaatttaaaactccaatgtatcactttgtaaattagtattcaaagaaagtcattttgtaaagtgaaaattaaaaaaaaaaaatgcaatagtcatttatattattagtgttgatgaagttttgtgttaactaatttcaaaattactcatgggttttatttataaattttgtgcaaaaaccatagtttttttttttttcaaaaaagttatattatggagaaattaaaaataaaataatataaaggtaactggtgaccctaaggaggtaactagttagggaaatttttatttttatggcttttaagacacaagttttaaaatattacttttttttttttttaaaaaaatattattttatgaattcttttttttttaaaaaaaattaaaaaatataggaaaaaaagtataagataactgagtaattggttacccattatgaggtgtttggtacgaggattttggttcttaatgagaatcaataccaagtgaaactcttacaccaaatactgaggtttcatatattttttttttaaaa

SEQ ID NO: 175498 - DNA, 732 bp, Cannabis indica
aggttagagaatatttcagacaaagaaatgaatttgcagctggctgccactcattttcttcatattttatttttatttttaatgattattacattacataaaatgatcatatcacattatccaaaattattatacgaataaaaaaaaatcacttcattttgggcgtcaatccacaactaacttctccaaaatagtatctgattcctttccttttggttgtcccatccaaatccaaatcaaataaatctcacccccttactaattaccttaccttattatacccattattactccaaacatgcaagtgtgtatgtactttctaagattcttgtcttttaagtttatatattttgaagaaagaataaaaagaacaatggtctcatattctcaacttttggaaaatgaaaatttggagttttaacaaaatggagcttaattaaatattgagtttacactataatttaatttaaaaattattataaaaaatcaacaactatttaaaaaaaggacacttataaataatattcaactggggtacctaataattatattctttgccaaataagattatttgttaagggtaattaaggagaaaaagaaaactagcacttcgataataattcctactattgttgttacaatggtttggatcccttgatgtgtgttgttttggctaaggggatggttgtgcgggcgtatttttaagtagctcttgtttttcaatcccttcat

SEQ ID NO: 175499 - DNA, 729 bp, Cannabis indica
gcatgccttctccgggaggcatgtctcggatgctgccttatatcacaaagacttagcaaataattcaagcattaagacgttctgatccacgtgtccctgtccggttggtccacgtatattgggcaaaatcaggggcaacacttacatatacacaaatataaatatatatactcacacgctatatacatattcatatatatatatatatatatacacgcaaatatatatatttatataaataaacataaatatatactaacacaaacaacatatacatattcatatatatactcaaaacaaaaaaaaaatatttttatacaaatttacatattcatatatacatattttgtatgaaatcccacaatatctctactctaaattagatttctcccaaattaacataaactaatttacaatattattcaatttcagaaaaatttaaaccaaaaaagaaaaaacaaaacacacacaaatttaaaatctaatctaactattaattttaattagttttttttttttttttgtaaatggactaattctaataattttaataacctaaatttacatataaatatatatattcataaaatatatctttatatatactcatacatatatatatactcatacacacaaacatatatatatatacatacacacatataattatataaataaataaaattttgcacaaacaatcacacacaactttatattttcaagacacat

SEQ ID NO: 175500 - DNA, 709 bp, Cannabis indica
atgtgtgacaaatatcaaattggtgtgaagaatctgtagcttgcatcattaacatcattgatggactcagggccggccctaggcataggcgggctaggcccgtgcctagagcccacactttccgggggcccaaaataaaaaataaaaaaaattattaagcttttctttaagtaaaatttaagtgtaatataagcaacaaatatttatagctaagttggttgaggtggaggacataatgcccaaggtcatgggttcaaatcccataaattttcagggccggccctgatggactcactattgactatactaactctgcaacttttaaccaaaactaaatttaaccgaataactcatggagaatgtctcgtccggagatggccatggccacatctccgacctcaagttgtattcaatctaacagggaagacattttcttcatcttcatggacatttgttattatgataaaattgaccgtttacaacttgacaaaaattgtcaaaaaaatttgtaaagtgcggcatttagtaatccataagtaactttaagaaaatagaggatccaaaataagagagagagccagccgaaaagaggaattaaaatacagagtagcaaaaccgaagcgagagcacaacaagaagctgaacttgttgaaatggaaatgatctcagtattctcagtattctcgtttgttgcattattattctgctg

SEQ ID NO: 175501 - DNA, 1134 bp, Cannabis indica
aatacccatcggttatggggaacccatcgggtatccattaaggtaaaataaaaaaaaatacattaatttaaaataattgaaaaaaataaattaaaccaatattctcactaatatttattatacattcataattcatagaagataaaagataaaactacttaaaaaaagcataacataatagaaaataaaaactaaatatgtctcaaagtttgaaaaaaaaacaaaaaaattatatatatctatatcggggtcggatatggtgcggatagtattatccccgccccgccccatccccgcttcgggtattgaaattgtccccaccaccgccccattaaccaccaagatggggaatccccaccccattaggggcggtcccgcggttacccatccccgcggtataaatttccatctctaattgtgacagtcagtagtctcgtgatccgtaaggggaaataccgggtaagctgtgcaatcccacatcgcctggggaaggtcatgtgtgatgattctgagactgtgtaggtatgggactacatagttgaagatggcttaaatggattgattggtactacctatatcaacaaggtgcatcttgttttttggtagcccatcacgaaagaacttcactgttaagcgtgcttgacctagagtaattttaggatgggtgacctcctaggaagttttcccagaaagcgtgcgagtgaggacaaagcacgctagaaatacacgtgttggtctgtggggtcagtcatcaatcctggaagcagccagagtggcgtactcgtgtataagagcaattatttcgcgggtgtaagggcccaatggaggcttgaagcgggaacgctacgttttcctgggttatccaaaaggtactaaaggttatagactatgggtacgaggaaaacctagtacgaaaactataaatagtaaggatgtgatttttaatgagaatatttttctatgtgttgctactaaccctaatgttgcagccctagtactaaccctgcatgtaactctatcaaattcgatctaaggcctactactcctagtgataaacaaaatacaaatcaagcaaagagcttagaagactatcagctggctaaagataaagttagaagagcacgtagatgttca

SEQ ID NO: 175502 - DNA, 854 bp, Cannabis indica
ggggataacttatgttttcttgctcatgcttcttattagcactatacatgtgtgagacatgtatcttgtctatccattgagcttgtttgcctgcatgcgcatttaggctaacttgctagcatggtgtgttatcaagtgccgcacgttctgcctacttgagagtttccaaatagctgacttgtgatagttggtatcagagccaagagaaagggaagcttggtaacacgtttacgatggtaagcaacacataaagaatttaagagcttgagaagcgcgtaggagaactggatggactagacgcgaaggtcaaggatctatcctctgaagcttgtaaattggggccaacaacgggacaacaataataactttccacgttagctcaagactatgcgaacttgttggctagggtaactgcaatcgagaagagagacgctgctaccgaaatatcacgtgcacctcagatggaggatcgcatcagagcattagaacaagaaacaacagacatgcaggttgctatcactgacctacaaaatgggcagatcgcattataagactccctcaatgatataatagaagattgtcatacgtctgtcacggctctttaggaagagtaagcgggaatgtcaactaagctaaatcttaccatgatagcggcaaagcgggcaaatatcgaagggcacggaggtatggagtatggccgtccgagagcatctgagcccaaatgctatggagggtcgagggagtgcgaaggagctccaaaactttctatttgacatggagcagtactttagggtcgtgcagacagactctaaagaagcaaaggtagcgggaatgggcagatcgcattatagact

SEQ ID NO: 175503 - DNA, 833 bp, Cannabis indica
cataaaaagcatgagaaccatcaaaaaatggtgcgaaaaccactcgtcatcaatcctaaatatcactattaaactctataatataatataataaaaactattaattaaaattagatacactattaaaattaaaaaattaaaatctcaaaataactattagtgtatataattacaattacatataaataaaatattttactaaaaaattaatgtaaattattttaacaaaaatatatatataaatggtatttatataattattaaataaaattaatatacggtatataataaaattattaatcaaaagattatatagaggatacaaaaggaaatagttaaaggccatgcgaaaaatcaataaacaagatgcgtaaatggctaaaatcaaagctgaaatcaagaatatttcagccataaagatacaataaatagtgcattcacacaataaatccagctataattatggctaggtagtaaaactatttaaatatggaaaacatacataattaaataaaattaaattaaaaatgaatctaaaaagtaaatgtcatatttattttaataaaagtagattttaaaaggtaaaaataaatcataattaacaacattaaacacagtttaatcaccaaaaatttgttacaagtgactaaaaatacacaaattatcactgttaggctaaaattagtctaaatttcgggtcatattttcggttagttttcactcttgtttctagttttagggctattttacgcttgatttcttttgttttcaggtccttgggcgtttaaagaaagtatgtacaagaattgaggacgcgtggtgaaagaatcgag

SEQ ID NO: 175504 - DNA, 666 bp, Cannabis indica
tttgatatagtaataatttgatttctattaattcactgcattatagctgggattattggacgtcaaataccggtgctcgatccgcatgagagaaacttaaaaagggatttagaagtatatactcccaccaatactaaaaaagaaagcagtgtaagatataaagaatatatatggaatagatttcaatgttacatatgtaaactatcatgttacgtttatctcatcacaaaatatatatagcatgaactggaaggaggtttttttttttttttaagcgtttatatattacaatcatgcataaattgagactcaaacccaggtgctctaccacacacaccctcaagaaaattcatgcttcataatttatacataaatgcattatggggtcacagccgcaggtcaggtataataatggaccttaaggtgtcaccgaagttactatgatgtggagagaaatagtaatagaggggtaaaaataaaaatatatgccatgatggaaagggtaatatgccttctctgagtctgacaactatacatctttccaatacgtcgtcgaccactttaattactttaattgtttatattaatgaattttggtcctttgctatattggtaattaagtactacaatacatatatcgctccttatgtgtaataataacactca

SEQ ID NO: 175505 - DNA, 694 bp, Cannabis indica
acataattgggaggcactcaactagcacaaaatgatcaaccaataacatacaaaatctctataaaagaaatcaacaacttgtgacatatatagctaacttaaaaactaggtaaaatattctcatctatatttatttttgtaggaacatgaaagtttgtcccaaatgtcactggtaaacttcaaaaaataaaaaatccaaatgacgatctagaaggaatgaaaaatgtgaagaactaattactactatgtttcattttttcaaatttcctattaaaagattactatgttttcttttcttgaaactttatagtatttcctttattcaaaatacttttatataaaacattaattcaatctagtataatattgaaagagtcaattttattcgctttatgctaagctaagtttaattttaattgctttaatttaatttaatttttatgcttgatcaatttaaattttcaataatgaagtcattgaactgaatttactggtgtaacatttagttttgaaagtgaatcaatcagcataagttcattattaataaaaaataaatatttaaaccaataaaaaaattactcactttttcattagaaggtgtttccttcatacatctttatttgattaaaattacaaaacaagcaactattatgttcttgaaataccatctatgacttgttgcaaaatatgtctt

SEQ ID NO: 175506 - DNA, 720 bp, Cannabis indica
atactacatcagcaattcaaatcgagattgcatgcaccgaataatgggcatcagtgaactgtactaacaaccgttaattaaagatttcataactttaatatgtttttgattattttattcatggctaagtgattttaactttccgtacaattcaatgttatattattttatgatataataagtatagattaaaatataaaaaatattatatattattatgtgtatggtaaataaatgtgtaacttatgatattaacctacacttttgcaacctacatagtaacttggagaggagttacaatttgttgtcacttgtaactcttgtgttgatcccacattattagtgtaataaaagagttgttacataatttaatttaagggattcaaatgttatgaaatatagttgttacaaactatattaatactcatttatatgatagaaatgaggtgttgtgtattttgaattctaagtgtgatcacctaaacactatataaaggagtctaatgtgctcatttggaaggagaagttttctatcaagaaagcacattgctagaaaatcctaaggcttgataattcccaagttatttcttaaagagttccattagggcccgtttggtacgcaggactggattggattagacaggctaatttgtccaatccagtatttgggcatgttagaagtctggataactaatccaactaacctcatccttctggaat

SEQ ID NO: 175507 - DNA, 572 bp, Cannabis indica
cccgctagactataaatatgaacatcaaaatagcacaaatagacacgtgaagcaccagagtataggaactgttgttaaaatgtagtgttaaaacaaaagaaaataaataagtaacaaaaactagtttaatagttttcagcatttctgataggaactcagaaaaagagcgctgccacaagatcaggggatcagtctagaaatgtgtgtaattagatggtggaaaataacatttcagaaataagatctacttatattaaactaaaacaagctttagtctaataatagtgccatgctcaccttacttgtttgttttttattcttttgattcgttttctgtttgttatatctttctttggagggcgggggagggattgaacccttgaccttctctacaagaggtgaggtgtggatcagcgaggctaatcctaagaccactctttctaggttatggttagtgacaacaactattagaccatggatattattactcgtagtggagcaaataaacatggtttcctttcatatcatataacatcaagtttattcataagatctactacagtgtttacttt

SEQ ID NO: 175508 - DNA, 599 bp, Cannabis indica
gctatggctgtatgtaaacaattaattaaaactaaataaataaacaagggcctagctgaggtgagctggggtagagtgccctttcatctcaaatatcttgttaatcgtggccaacactactacacatgggtcatggtgtagtgctggagtttgcgtgtatggccctactaattcagtgtaattagaaaaaagaactaacaagaaggggttctagatagttaccttctatatataaattcatacaaaagtatgtatttatttaagaacaactcgcatgtacattcatacaaaagtaatgactcaaaattacaaagtaatttaatcccatgtaagtgtttctctttaccaaaacacaactgaggcaacctagcttctttgcctcatgatgggatattctcactttttctctttgaatattacaaatgattcatattatagaaccacactattactatttagattacctaaaagaaaaacttcaatttacaaaagtgaaatttaaaattcactcttttcacacttggaaaaaagaaaaagaagaacacttctcaagtaattcttctactatgactacattgactactctgattaattacaac

SEQ ID NO: 175509 - DNA, 716 bp, Cannabis indica
gccatgaaaatcactggttgaattgagttttcagagaacaaaaagttgctaatttcttctcgtgatgatggtggtggtggtgattctgatgccatgatgaaaccagatttgttttgctcagaacctcagccatggaaaaaaaaaaattgaatctttcaccaaatttcaagctaaacaaacaaaatccctcaaacccagaaattgaaaatgaagaaaaagttttcttgttaagagagaaaagtggttctcaatttgcttttagctaaaaagcttcgtcattcagaagaaaaatggattagggaagaagaaagcagaatatatacaatacaatataatgtaggggtaatttcgtaattttgttattaagatgtttatgttgaacattttgagccgttggattaaaaagttattaattaatgggtttaaatcaaacggtgataaaattgtcaaattttgtggttttggacttgacctcttttttattttatctaaaaattattatttattttattttatccacaatcagatttgggaggaccattttatacggttggatagtaatacaggtgtaattattgacacgtggcactatgttggagttttatttgttttttgaggtgagaaaaatagttactttttttattaaaaaaataaaaaaaaaaataataattctttttggaaagaacaagtcaacccacattttaattttatagaca

SEQ ID NO: 175510 - DNA, 639 bp, Cannabis indica
caataaatttaaaaaataaaagattaccagagaggacaggttgaacactgttgagaagaatagtaaaggccaagaggagagagagtttattaacagcttcaaggacagctttgcttgaagagaatatcaaggcaatttcattgtggaaaatcataatcaaaacccaaaagaagagccctattactattgatgtcacaactgatactatggtcgcaaacttggcccctttcccatttccagctccgagctcatttgcaactcttaccctgaatttaatacataatgtatatatacattcaaaataattagaaaatttgttcaaacaaaataaaaaaaaaataatagaaaattgcaaatcaaaatattaaaaaaaccacagcctctcatttgaaaaaaattaatttaatcatgattattaaatgaaattaattaaaacataggaattttttttcatatttagtattatattatgttataaattcaaagcaattagaaatttgaatcaacatataaaattataacctaaaataattttattaatttaagacacaagaagaaggtttttagttttcttgaataattagttaatttatatggtatttaataatttacactatgttgtaagtatcataataataa

SEQ ID NO: 175511 - DNA, 707 bp, Cannabis indica
aattatgagcagtggcattcggtccataatgctggctgtgtcccagtaccagtagtgtgtgtgtgtcccttttagattttcttttctttacctaatctcaaaatatacacattttcaagtaattttaaagaactcaccactttctcacatgcaaagatacaccgttagattggatttgaatcaaactttttctgtaaagggtagttgtagtattaaaaatggggaaattagaaattgaagaagcatatagattataatatgtagtgtatgagggttttcacatgggccaacatatctaaaaatacaagatgaggagaggagaagagaggggaagggtggtcaggtcaatagtcaaacatctcggcaatcgtgcacgtgtgagctgtgctgatccttgctgctcgatgcgccaacacagctttctaaaaagcctagttggtgtggactgcatgtctttattaccttaccttatgctataatatgccaataccattttcacactattaacattttatgaattcattaatcaaaataaaaaaattaggaattcatgaatattgttaggtattattatagaacaaggggtaattggtggcatttatatattcaccagtttgttacggggagtattaggggtaagtaacgtccaatccaattcaattgaatagaactaatttgattcattccaattacaaaaaattggatat

SEQ ID NO: 175512 - DNA, 610 bp, Cannabis indica
aacatagagttcaagcatccattttcactatacaaaatttttcaccactaaagaaatcaagcaacaaacttaagacaacgagtatcattatgtatatagtttggcaaccacatgaacaaaagcgtacaacacacctcacacacgtatatttagcagcagaaccacaaaccgtacaataatgaggttgagctcggaatagtatctaaaaaaattgtctagttcattcaaaaaatatgcacactaatctataaacaacatgaattaaagatagaattaattgcgcatatcaacttcatttttaaaatattaacgaatttctctttgctcattttattgcctcaaataccgttaattgttatattatttttgaaatgtacatactcaaattaaaaactatttacccctagctattgttttttatgctttttcttttcctgtttttttctctcgcctagctagtagctaaaactttttttttttgtgtgtgtaaataaaggtgacagtattatatatatacacatatatatatatttttttttttctaaaattttaaaaagttttttctagctaaaccatttattattttgacttaaaaattacaccattataa

SEQ ID NO: 175513 - DNA, 826 bp, Cannabis indica
aacaataaataatgtgaaaggggagaaaaatgatatgtttgtatagataccaacagggagacagattaaatatatatatatatatttttatatacataataatcgatacaaatggctcaataaaaaagtttcattcatttattttagacttagttgaggactacgtgtgtactattacaaatgttattaataaataaatattagtaattagacttaattaaaaaccagttgaaactcctcaacattggtgtcacatattgtcttcttattctaatgttatattaattataattcttaaatatatatattagaagaataaaaattataagtagatgttgatatacttctagattgtttttttcttttcataattaagttgtgaaaagaacaaagacatattggtaaaggtgaaaatgtaaagtaaggcaagcaagctatctcagtgtaacgttgacttttcttttttttttttgggtctaaatctccagtctgattaattaagaataaaatattgtttgactaaatgtctcttttgttagatggatggttgatgaattgcagcacctgattttcaaggactttgaattttggcttcccttcaaaggagttttagccttgcaggctatcactagataaatataaagcaacaatttattatttatatatgaaagacaatttcttatttaaaacattttttaaattttttgttttagttggtacatttgtctaatatgagtagggtctttagtttgagtatggttaggacatgggttgacgtttttactgtttgggaaaggttggaaaaaggtcaacctggtcactatat

SEQ ID NO: 175514 - DNA, 731 bp, Cannabis indica
agttgtcattgtaattctcattaatgagttgtaagagtgtaatgagaatttataagattggagtaatgcccattacaatggaattccattacaaatgttagaaacacaaaccaaacattgtaatggtgacttactcactttgattccattacaatcttgattccaatcaaccaaacatgcttatatgggggaggttttatttgcacccaatacaatattattaaaaacatataaacttggctaatttttaaaaattacttttaatatttttttcttaatttttttttcacattattttatgttaatttaatacttattttaattttatttttataaattttttaactcatttatagatatatttttttaaaagaatttcatataaattttttgtcataatatttaaaatataatttatttttgtctgatatgtattttttaagaatatgaattgaaagaaaaaaaaatttagtacaattaaaaataaaatttttatataaaataaaaattattaaaataaagtatttatattattttgtgttttgtgtaggtaaactcacagtcacagttatacacgcaaaagcaatagctgttatggtggcactttattagtttttggggttgggtattccgcttagcactgttgaattgaactgtttagctatggtgtttgctttttctagaagattttttttttgtaatgatttaggatctgttttaaatgatattta

SEQ ID NO: 175515 - DNA, 590 bp, Cannabis indica
ttcccacaacttcaacctattaaaactcctttgctcatggcctccatatctgcctttccccctacaagctacagttgcagttgcacctccaaatccaagtttggtttctccaatggcaaacccaaacccctttccctcacacacgccttcatttctccaaaacccaccaacaccaacttcagtttcaatcttttccgccttccttttccctctctttctccacctccaacaatttgcaagatgagcgaatcaggtactctattattactgctaggtcttttcacaaacacttactgtgcatgttatgttttcaatgtggtgaggtttttgagcaattaagttaaagcatgtgattatgtatttttatggtttaattttccttttgaaaagtttaattccatcaatcgagaatgactgtaattgtaaaattaatgagatatggttttagatattatgtcacaactggagcttgggaaacctgaagacagaaggaaaccacataaacgagtgaatggaatattttggattttacttctgaatttgggagtgtatgctgctgatcatgtgtttcaggtagtcattatttatga

SEQ ID NO: 175516 - DNA, 865 bp, Cannabis indica
tttgatatttaattgcatcagcagcgatatgaaacttcatatggggtgctaggcaccatatgtgctctttactatattaataaatgccaataatttgcactatatatgtgtgttcatgtttatcattttgcttttatctcctagttcatatgttcttattatgcaactatttttctttccttaaatttccgattctcattgtgatgtgagccgaaaacagaaatgagtggaaaaaggcggtatccataacgagacacagtgcttacttttaccatttgatctgaaggttgatttctacttgaatgaatatagttaaagaaagttgaaagaagaattgtttgaatgtgtggtgtgtggatgaatactagctaatattgattatcacaacttgtttgagcatgtttggtttcatacactaaaagcaacaatataacactaataaatattaactaaaatattgcattctcttaattatgattatatcaaagtctttgttcttatctttagtataataattaagggagtaggtttaccaactatagcccaccactaatatattaattaattaattagctgataatttgtttgaacaaacatatgtactaaagctcttttcgattgcaaggttttcagcttctttgtctcaattaacacatgtaatgataatactaaacctctgtttttataatagaaacaaattggtttttgtgagttgttatgttttgtttttcattattctttttaatagaagatactccaattaagtatgatagttggtggcattcaaagaagtgttttgactaatagttttaacatttgaataaactaaattattgctatgccaactactctaatggtcgtattg

SEQ ID NO: 175517 - DNA, 622 bp, Cannabis indica
tttttaatttacttatttattttgatatcttcttataaataattatcacaaagaaaattatgctttatattttagttaagaatctctatatatatatataattttttatataaaaattatgagttttttatattaacataatatcatttcataatattaaatttaaaaatattacatataaattttctattaaaaagtaggagtgtttacataatttataattcgtggttccaaaccttaattaatttggaccaaatcatttgagatcggactaaataaattcggtgtgaatgatttggtcaatcaggaccatttagaattctttgattcaataacagttttagaaatctcctacatttttatttttgtaatttttttatagttattaatgaaataattctaaaaataattcagttccttaagatctataaacgtatgaatttaaatatctttaatgtctaatcaaataatttagtaacaaatattacaaacaatataatttaaatgcttttgctaaaagaataatttaggtattacgtaagtactacaaatctaacgctttaggtacttttgttgtaaatatttcttatttaattttatgatataactatctatgaaatag

SEQ ID NO: 175518 - DNA, 816 bp, Cannabis indica
aatgcagtctcaacaaaagttgggcgagcccctgttttttttagcaattatcagatgctctgaccacaaacttgcaaggtaacgtacttatatgtctcatatataaatatatatataactatttttctctttgtatacagagctagctaaatagatctagttaactacgtttatctgattgtctttggtatattttatccaaaaactcgacaaattcaaagacgattcgatgatgatatataggagaccaatatatatatatatatatataaatatattacgtacacataacacaccgaccaaaacaaaaaacacacagataataataaaacaataaaacaaataattcggaatcaaatcgttcaccaatcattcatgttctcgtttatttgaatatcagcaagtattctatggaatcaaacccaaataaggatcaaactattatatccagagtcactaagaatcaagtcatatatagaatgaaactcaagatttcaaatgtacaaataagattttgagattattattgtttttttttttcaaaagaaaaaaaaaaaaaaactaaaattaggcgcatgagaaaaaagaatgaaagaaaaaatacaaaataacctgaaaaatagttagggcgattttgtaggagcaatggagaaaagtcgagtcccgtggggaaggaggtcaaagcgccattccgatcgtgctttttcctttaaaaaaaatgggggatagatctgagagaagttgagtacacttctgacatataattttttattttattttatttattttttttttttgttttttagtttttactag

SEQ ID NO: 175519 - DNA, 660 bp, Cannabis indica
cttaatgcagctacctttccggtcaggctctgcacatctttatgtttcttgggggatggcatgttcaggagagcctggattttttccggatttgcctcaatccccctttggctgactatgaagcccaggaactttcctgatttgaccccaaaggtgcatttctttgggttgagcttcatgccgtatctccggacaacttcgaagcattcttctaagtcgcttgcatggctgttgcatgctttggatttgacgagcatgtcgtccacgtaaacctccatgtttcgccccaggaggcctttaaacatccggttaaccattctttgataggttgctccggcgtttttcagtccgaaaggcatgactaggtagcagtatacccccttatcggtcctgaagctagtgcactcctggtctgccgtatgcatttttatttgattgtacccagcataggcgtccatgaaggatagcagtttgaatccggaagtggcatctaccatctggtcgatcctgggcagcgggaagcagtcctttggacaagctttgtttagatcggtgaaatctatacaaactcgccaagttccgttcggcttgggcaccaggaccggattggccagccactccggatagtacacgtcgcggatcatgccgttagtcaaaagc

SEQ ID NO: 175520 - DNA, 755 bp, Cannabis indica
taataaaagaaaatattttataagacaactcaatataacataatatatatggcctatatgaataatatctaaataatttataaataatgtaggacatttagttctaatgtatttgagtaagaaattttatgtatcgttttgtttgtgtagttctttttcaaataaagtagaaaaatttcacaaaattttaaaaattgaatgaaaaaaatttaagatgccacttaaacatgttttgttctttcttttataataaatatagagatgtattttagtaaaaaaattactatttaaaattatttatagttatttcattaggtacaatattttggttgtgttaatatatacaagtattgttagggaaatttcatttaatatacttaaaaaaaattcctatttcaaaaaaaaaaccttcttaattattgtatacaatacaattctattaacttcccactttacccaaaatacccttattattttttttttcaaaactttaaaaaataaataaaataccacatccccatcatccaccccatcaaccaactcctccccttttctcatctttattaatggcttctctccatttttttttcgaaaaaaataaaaataaagccctcctgatcccttctctctagcttcgccgcctaaacccttgaggacgtccggccagccaactcgcaccagcccaaccaccgtgaagaacgccggccatccttcacgcctcattacaaccaccgcgccgcccctccttgacctcc

SEQ ID NO: 175521 - DNA, 1218 bp, Cannabis indica
ataaaaaaatttgattaaaaattattttaaataccaaaataaataaaaatgtatctgtatatcctttttgagtggttaggattttccaatatgatgtgacgttcgttaattttgtttatatttttgatgaagcttctcaataataaagtgttactttttaattaaatgaatcttaatcttgttgtaaagcaatctccatcgatctagtagtgtgggcctttatttagaatagtgttgtacatttcaattcaaatttaaaatttatgttaaatttaacataaaagaaaataagttgttatatttgacccactatataattatatccaatgcagaaaatgtaaaataagtaaaaaaaaattattaattattattaatgatcattcaatattttattaaaaaatatacaaaatcattatatattaactttattattatttttgaataaatctttattattattattattattattattattattattttgtcaagaatttttttattatttaaataatgatcttttattatttaaataatgatcttttattatttaaataataataatatgataataaagtatgtaataaagttttgtaaaagccaaagattcataatagcacaataataaataaaaaatgatatttaatggtatattttgtgtcaaaatatttaacacaatttttaacatgttaaaaatttgagacactttttaatacactattgaattgatattactaaaatagaataatactaatacacgatcttttttagcacttcattagagatgttttaaagaacattgctattagattccttcatgtgcctaatactatataggtgtggtacattataagtcattgacgatttctcatagtatttatttaagggatttttataaaattattggattttaggaaataatttaccatatataaggaaatttttacaaaaatactgtatttttataaaacaattgtaaaacactaaacgaaacaattaaaacaacaatgaaacaactaaaaacaacagtggaacaacagatgaaactcaaccgttaacacagtacacaatataaaaatatattttgaaaaaaatacagtctatttaaaaaaacttacacccaccattaaaaagaaaaaaatttaaaaatttacagtatataggataaaataccttatctaatcaaaagtagtgcaactcaataataaattacaataa

SEQ ID NO: 175522 - DNA, 598 bp, Cannabis indica
aaaaaaaaatagcattattagttaatcatagttgcatgatttcttgaaagtcacttttggtttgattgtattgattgctacagagagacaatgtcaggaaccagagagagcatttgattttgctgcttgctgacgctcatataaggctgcagcccaaggctgaaccacttaacaaggtataaattaattatcctacttcaattttgatgttatagcatctttctttctttgataaaattgttgtgttacttctccttttgtcctgtaaaactcatttttttttatatgcagcttgatgatcgagctgttgatatagttatgagcaagctttttaagaactataagacttggtgtaaatttttgggccgaaaacatagtttaaggtgagatataacagtttctatgtgcacttctctttttaacttttgaaatcagatttggttttatagtttagtttatccttaataaatgtcttgtaaatctgtgtaggcttcctcaaggtcagcaagagatacagcagaggaaaattctctacatgggtttatactttcttatcgtgggtgaagcagcaaatgtccgcttcatgccagtgtgttta

SEQ ID NO: 175523 - DNA, 1037 bp, Cannabis indica
tagaatcttaacaactcacagcactttaaaaattataatttaccaaacactcagctcagcttttttccacagttttgctacagctgttttttcccacagcacagctacagctgcttttccccacaacacagttgtgccaaactgaccctaagcctaatataaccccttagggttaagtgttgtatataaaaaagggtaatatgtgtttagtatgagttaagagagggtgtgtggtgaaaagaaaagggtttgctctcataggttctcttctaccaacttggtgattatccacattgaattgaaggttttggtgtcttagcaacaaatggagaataccaatatgggagatatgtgttttacatttgtgatgctctaaataaagtataaattttggttttaatgattatgaacaagtttaatgtatgtttggatagttcataatctatgtaaatgtttaacaattataactaaaaaagttttaaaaaatatatttttgctgtaaagttttaaaaaaaatatttgagggccaaggcctccatgaactcaacatagcttcttccctaattataaaatgtctaaaccattgacaccaaaaataaaaaaactcaaaaaagatggaaggaagaatgtattattgaataacatctactattaataaattctaaatacaactcgataatccaaccattaaatagtgttagtaaacgtaataaaagtaacattagctaaagtgtgggatacaacattaaaatctttaaaacaataaataaaaaaataaataaacatttataaaatcagtattttgacctttgtttgagtactttgacttgtgaattttggcttgcagaatatctctcattttaccttaaaaaaaaaaacaaatattatatgtaaaagtagttgggaaaatttacgattttaatcttgttgaatagaattgtccataataaagctttaattagaaatagaaaatagaacaataaaaaatagaagaaagggagatggacaactaagagtgagagagagtacaacactca

SEQ ID NO: 175524 - DNA, 1011 bp, Cannabis indica
tcctatggccacttgagctaacctcaagtggtttagtattttaggtataatatatataaaaatatgtatgtttcaattaaatataaaattaaagtaaatttaattaattgattaaaaaaaaatgttatttttcaacttatcctttttattgtaagaaatattagcttaagatagtcgcaagcaaaagtttttttttttttttttgctataaaaaaatttatttaaaaaaatcagaatgttataccacctaaaagtttatttaaatttactttaaggtggccttcataggtactcaaatttttaaaatttgaatgaaagaagttcttttactaacatttttttgatagttaaggttaatcttcaagagcattaaattttagattaaaatttatatgaattatgtgtactgtttttttaattgaaacatgtgaaattaaaaacttttgaaataaaatgtctacatagtaactaatatttgtatcttgaatttttaattttcttttgtttatattcaaaccattaattaagaattcttcttaaaatattttaatttaaatatgtacaataatacttactgtttctgactccgaacttaacataattaatagacgtttttttttatatttttttttattttgaattgaaaatactaataattattaaactgagaaataagccataagaataacaactaactcatgagatagaactctcctaaatagtaggatatggagaaaaacaagaaccaagtgcaatactgaaaaaatatttgtatgataatttgcatatttttgtaaagaaaagatttataattttataaaatgttagaaaaattatgggaaagttctacaatggaccccttaaaatggatatattgatatacccttgtatgttttagcacccgaaataattttttcgtcaaattttttctcatggtggtgtacgttatagttatttaagatatccggtaaaattttaaaaattttggaaaagtttaacatgccgaaaatt

SEQ ID NO: 175525 - DNA, 553 bp, Cannabis indica
tttttatactcatgcgatctgatagaataaataattatgattttaatgttttctttgagattttactcataactacatcattttattactccatattcaaaatcaaacgtcaacatatacattcacctcgatcaattttatatataaatattgaagatagagaatcaataataattaggaaagaaacataaatcagagtttgtgttttataaaatcaattaaataacagtcttaccccaaaaaattaaaactatacatgatgatatcatcacaatatggttatattaattgtatctagtcattacacaatataaattattacctaacaatcaaaaagttgtttatatatccgtccatgcggtaatttttgctcattaataataattactttttgttcatattctatactttattaataattattgctactttatatattttaacttttactaaactcgatcactccaatatatttacaaatttcatgtctctaatctatgtctttaatttgctctaacacatagttttcaaaagggaaaaagaagaagaagag

SEQ ID NO: 175526 - DNA, 560 bp, Cannabis indica
gacgaaatttctttttaggggggataattgtaatatccattatgtcgaaaagagaaattttgccaatttattagtgaagatgttatttttgttactaaagaaatttttatggttgccatgatattattatttaattaaattaattttgtgataaagactccttattaggataataatggtagtatcaattttgataaaggtagccttggaatttttttttccattaagatatatttagaactttccattaagaaaattttcattaaggatgataatgtgaatacgtgtgcttatatcattataataataataataacattaataagatgaagacgtggtcaatttccacgttttttgtgggctttgagtatatatttgaaatggtcattggaaatgaaagaaataagggtaatttagtaaaagacaaaaacccattactattaatctatttaagagaaaagtgttaacattgggaaccctagtttctctctcgactgccgtgcataagaaaagagaagaactagtgctctggtgtgattggtgttgatggtgtgattggt

SEQ ID NO: 175527 - DNA, 734 bp, Cannabis indica
catccttttctttttaaccctcagctaattttcacttgtgaaaaatatttccaacaagaatataattcaattgatcaggtgttttaataaataataatacaaagacatgttatatatatatatatatatatattctttttcttgctgaatagggaagacatgttagttaattcagctatccatgtattggtgttgattatttaggtttggtgtaatctttcttgcataacttcttgtttttccatctctataactaaagcttatgttctcacttttcattcaagagaattgaggcatagttctaagttattctctcactttcaaactcttacgtggtatcaagagcccacaagatctgaatcctcttttttttttatgctttccgttcttgcttctctcttcactgctcacatggctaccatattgacacaagccaatctatgtttctgcgcaaagtgctcaaacaataaaaaaacgcaggtagctatccttgctcaagctctcaattaatcattatgtgctttttaaagcaccaattgagaatgtcattcttgccagttgcatagaagactttctagatggcaataatccagcccttcctcaacacgaagaaggaactgatgccctcctcgattttcgtcacaagacaggttcatcctcaatttgattatccttcatcctttcaatcatgtcacaaataatgaagttcagcaattgcttctccagtttccact

SEQ ID NO: 175528 - DNA, 611 bp, Cannabis indica
ttttgttttggatttctagtgtgtatatttgttgctattagttaaagccgttgaatattcttaagttggtatttctggtttatgttaagtgtcattaatcttgttgtttcatgtttagatggaaaatttcaaaaccccttgtaggggtattgcaaatgatatcagaggaagagcttcatgttacaaacaagattggcttagtggtctttgttcaggaattgggtatttatacaaattcaaatcagttgttgacagtttaatgttttccactttgaattttaactcttattttgtactcacaggatcttggctccaacaacatacatcttctttgcttctgctcttcctgttattgcctttggtgagcaactgagtagagatacaggttggtcacctcactattctcatatcataagttttagaatacatatacatttatttggtgggatgtgttttctattttgtttctccattaaatgaaataaaagctgaacaccttctttttggggtgtagatggtagtttgagcacagttgaaactctggcttcaaccgcgatttgcggtatcattcactcaattttgggagggcagcctctattgatacttggagt

SEQ ID NO: 175529 - DNA, 616 bp, Cannabis indica
tattcaagatcacagtagcaatgcaaagtggacatacacaaaaaaaagaaaaatttaatgagaaaacagcttccaactaaaacgaaaaaaatacgggaaaaagataacgacaccttctcaagtcttgcaacttcttcaagtgtctgggaattcacaattgcagcctgcgaaagaataaaagtgacaattatggtaagatcattttaaattcatacaagcatatatatatatatacatataatacacacacacatgtacatatgttcattcctcaagaacagaagtaagcagaaagatagaacatcaacagttagaacctgaaaccacaaaaaactatggtatttgactatttgagctcccaaggatcaattcgtttctacttgtgagtagagcagggctttaacctaaagatcaaaacttattttaagaggacccagataatcacagagactaacataaaagaaaaattaataatgaaattggatttacagtattgatagtcaaggaaatacaccaaatacagataataggcttataagagtgctccctactcttcactagcgtttaaaatttatgtcattgacagtgcacacattacatctctcactggagatgg

SEQ ID NO: 175530 - DNA, 1609 bp, Cannabis indica
cttacagtgtggagtcattatgttctgatcaactacatcgtcacctctaatttccttgactatatcttcatgcttattattggaactggcccgagcaaaaatccacgtggcgttcatctgtttgttaatcatacatgctgcgtagtaggggatcctgccacgtttgctggacttctcagacttgattctcattctctctttgacaaacgtcaaacaatccatcaaactctctctcgctaaccctttcatgtcataagcctgggatcttctccacagactcttaccatgaggactcaccgcactagataaacacaaagctctggttgtgtcactaatggccaaatcaggttttctcagtagtaaataacactgagctctattgctatgaatcacaattctatcttttctcctctttaatggacacaagtacaaagctttcgaatatttcttcacagcgttttcaatatcccctgaccaaaaacataaatttccttcctttttgaattgtcccaccaaagtttttctctcactgatttcttcttcactcattatcttctctctctttcttctatcaaccttcatatcccatatctcctctaaagctttctccgccttcttactcttcaatctcaaatcaccatacttgattttatggtaatcctgcaaaagggtctgagtgattctctgtccaactttttgtcttccaccacagcttcgaagctcgaccaaatcaccaagacaaagaactgagctttcaaaaactttgtacctagtttctgggtctttaagaagaagcagaagagaatcaatggccatgatttgccaatcatccgaagacctcgatatattacatatggtctctataacatggtccaactctgctatactctgtctacccaatttggtttcacaaagagttttgatcaatccaatgccagatggcgagctcggattggctaaaccaccccacattccacaaagctccatcaagaatttcttgttacaaattatttccaaacacctttctctacaagcaatacaattaagaagataaagagaccaacactgaagttggctagcccatttctcagctttcttattctcaatctcataaccaccaatccccttggtaagaagattagaatgataattcaatcttttcttgtaacttataccaacaaacttgtcgtatacctcatcaatacaagtcaaagctatctccattgataattccacgacctctgtttcataccttgttgcaaaaatggcttcgaaggttctgtcatggctagcaatatgacccaaagcacgaaccgcaactcttttctcgacccaagtagtagtagtactagtagactttaaaatctcgattaagggcaaaacgacgccggatttgacagctttgtgggcaaagtgagccttgttgatggtgtaggaaccgataacgtgggctgcgtagtagggaatatagatgttctgaccggtgagtaaccatttgttgtcgttgagagctctttggatgagttttgccatgcattcgaaaattccgaggaggaaattcagggtcgttggttggttcatggctatgttccatagagtggtcaaagcg

SEQ ID NO: 175531 - DNA, 572 bp, Cannabis indica
tttttttatttattatttataaatacatgaatggaaagactttctcttctttgatgttgtgtaaatctaccagtgagtcagtgagtactactaaactagttggtgaagatggctcaaggagcaaataggaagatatctgcagcatcagctagagctcacaccagaagacctaacaacaacaacacttcttttcactttcctacaggtgggtttttcttcttcttctctctcgtccccttttatttatcaatttaaggaagttgaaatttaacgttgccatattagtctttattcttttcaactgttttggtactgaaaactatcatatttatttgtttgagattttcaattctctgttttttaatgatatttctcatttggtgtacgagaatagtctaaattttacattaatgatgtatatctaagtttacttttttatttgggtcttcttcttcattcgattcctttaaattgacaaactttatataagggccttggctccaacagcatcattgtacatgtggagttagagttgtaaaagagatttggatttttaggcaaaataaagatac

SEQ ID NO: 175532 - DNA, 506 bp, Cannabis indica
tgtttgaaacttgatttcggggattgaattggatttgataaaattccactcaatgattttcaatgtcttggaattcgaggaattcgagagcctagtttcctcccagaaagggttacaaccctactaaaatctcctcaccccacaaataaactctcttcccctattaattctaataccgccacgctctaatataaaccaactacctaacaccctgccgctactcactgctactgacttggcagtggctctcttggtcctccgagtagacttaggtgcttttagggaaggaggtcctctgttcaaattagaaatttgtaaaagcttttactttggtagaaaacatcatatggttaggttactaataaatgacagtgttactagagttgattatttgatgaaatgattgtaaaacagttaggaaagatgggatttgtctgtttgagaggcttttactgtctgattatgtccataagtttatcacttgattaaacaaaaaatgtggcctg

SEQ ID NO: 175533 - DNA, 677 bp, Cannabis indica
ggtcttctttggacgtacttttagagaaagaacactctaaaatattggtaacatttttcgagatacattgagaaacccacctaaccaggccttatgatcttgatatactttcataaaactaatacaattaaaaggaaagtaggtcattatcgctataaaggggccaaacctctaggggttgtttggtatgcggtaatgggagaagtgggaatgagaatctgaaagtttactatgtttggttaggtttttaatattttaatgttggctaagtgaaagtggtgggatttagtttggtcggcaagaaaaacccaatgaaaatgtggttttcactttccaatgctattggcagacacaaacttttgtatataaaaatatttaaaatatgaagtaatttccccaaattaaaaaatgatatatgaagttctttctttatttttatatattttattttataaaatatattatcaatttgtatataaatttactctttataattatttattattgttaattttttataaaattatatgaaaaataataaataaaattattttgaacacttagaaagaaaaaatattgaattattaattttacaaaaaaaaaaataattaactattgtaaaaaaaatagtacgcattccattctaatgtcaaccaaacacggtaatgttgcttttc

SEQ ID NO: 175534 - DNA, 840 bp, Cannabis indica
cagaaataataatagaaaaggaaaaaccttttcaatattacaagccaattaaaagaagggttttttatcctataacaaaaacaatggagaaaaatggggaaatgggtatgtaagagagactaattagtgtgaagaaaagattacatacaggcatgaaaccgtcgaattgggtggcctgaaccatctttccgaaacgaagaacttccttttcaatgggggacttacaagtcttgcatgaggatcttgatgacttagcatactccaccttccatggcttttggtcctcaagcttcgccattgttaaaagcttgaagctttagccctattatggctttgtaaacagtggcaatatagtattatataggtatcttctctacctggaaacacagaaaggagtgggtttttttctcaaacgaacctttagcttctcttataagctttttttatttattttattttattttttataatttatttttatttttattttattttaaaataaatagaatttgcaaatttttttgtccaaattttttagaaacatttaagtttaattttttgtcgataataatacatagttataattttaaaacttctgtaagtacttaatatttaacagcgagatacctacgaagttacagaaatataacatatgtattattaccgtcaaaaattaaaattaaaaatttaatttgtaaccgttttaaaataattcacttatgtgactataagttataggtataattgcagtataaatacttagaacatctctaatggtactctctattttatttttcaagttaaaaagctaaaatatgattatttttattattgtttgct

SEQ ID NO: 175535 - DNA, 995 bp, Cannabis indica
atttattaaaaaaacaaataaaatataaggttgaaattaggattaaatttatgactactagaataaggagatattgtcttttttaatttcaacatttacaaattgatgccatgtactgacatgtgtaaagagagtaattaaaaggagaaatactagaaatatatttcctactctattttgccgtctcttagataatgcttacataatccttagaaaaatggcattattcaaatattaatgttaataaaaaaaaaaaaaaaaaaatacaacgtcaaataacagagacaagttcaaaatagagtagaaagtgagtttagactaattgaagttgaaaatcataaatagaagtaactttgataaaattatattttttgtcatatattttgttgatttacacacgaaaaaaaattaaaatattttataaaactacaataaaagaaagattttacggtttatttatttacatatatataatgtgtaaaaaaatatataaattttcaaaattgaaaaaagattttttttatagctttttattaatttctggtagtttctaattttcaacaacaaaacaattgacattttccaataaaatttaaaaagaaaacataaatatcatatttttacaaactatgaagtccatcaaatatgatgggaatcatcaattgggccatcaaatggggccttctttaatctttactaatacattagtgggccgccaaagtttcttaagaaggcctattattgatgtctaatctccagaggttgtatagttgaggggaaagcattaattttagtaaaaagaaacactctctcagcatagtaaggcattgggacaatagaaaaagtgaaaatggatataacttttgaaacttttgtagccaaatcagggcactgaaataatatatgtattgagagtgttaacattaacattatcatcgtttcaagtgagaaaagaaatacccttgtttgttgcatttgggttggctggttgagtt

SEQ ID NO: 175536 - DNA, 641 bp, Cannabis indica
acgaacaacttgaagaacataaataaaacaactaagttgaacctaaccataccaggattaagatccatagacctaagatcaaccattgatactgacttagaaagatataacgataagtttatgatattattgttatttatactctgagagaggcaaatactaccactcactatttaactaagtacgctttaagcctaaatcaagaaactacttgggctgaaactcacaatttcaacctcaattatattctgtacctttgatgatttatttaatggatacctttatctttcaaaaaagaaaaaaaatagtttttgttataaaataatataaaatatataagaagaaaagaagaagaagatgaagaaaaaaaaagaaactgagtgagaatttctcagtgatttatttcaatggggtgaacccttatttatacaaaaatattactaaaagaatgagaaactaaatcaatgtaataaaggaaaatacaaccaagcattaattatgataattaatttggtgatttggacattcataaataatatttcataacactcccccttggatgtccataaaaaccgtctcattaaaaaccttgctgaaaaacttggtcaaaagaaaaggagtgcagtatgaattaactccca

SEQ ID NO: 175537 - DNA, 609 bp, Cannabis indica
tatttccaattgattatctagtatccttcaaaaaaaaaaaactttgattatctagtatgtttccattaataatcgtttaaaattcaaatttgctcttttttgttttctgaggagcaagtatattcttgattttacagtactttttgcctcttactgctgtttggttcattaatttttttttttttaatttttaatttttgaaagcatagtgtaatttaatacttctgttttaattcaaacaaataagacagcgaactatacttttatttctccatctcatgatattttgaacctctcaaatggcttttcttgtttggtgaaatggggagtgctgtgaagagcaaacaaaaatattatatgaatgctaagtgtccttggtaccctttgtggtctacttttatcgcaaggtcagtgatattatctcaaaatacccagtgatagaatagcataacaattctacatgaagcttaaatgcaagtttgcagtaactataaaggtattctttcctcacaatttgtagagcaacagacgaatctttggtgatggtaaaagtgaagaatggacgtcattgtcgtcaaccaagcaaaaattcatatatgaaaaactctc

SEQ ID NO: 175538 - DNA, 851 bp, Cannabis indica
  modified_base (63)..(63): a, c, t, g, unknown or other
gtcaattatatatagtttaagctatatgatgatcaatgcaaacttcaaaaaatttgagtttgngtcagaaacatcattagtagaaagacatataaatgaagaaaaaaaaatcaatgcactgaatgaattgttgaccaagatgcatacatatgtggtaagaacaaaaaaacttacacactagcatcagtcagtcagtcacacaacacaaactggctaatgaagtggtaaagaggaaattacaagaattcatgcttttactatactacactctacaagatcaccaacattcttttatccatgagcaacatagatatttctagtagttgatctctctaaatggggatcttctgtcagaatttgcttcaagtttcttcactgcaatgggactattcacattctcactctgatagccagagtgttcatcctcagtagagggcattgttgcctccaaaagatccattagttgtttgtctgaactggagatctcactaatcttctcactcaacccctcaatcaatcccaataagttttccctttctgatgataagttagtgacctcttcaagtaagtttcttctctcactcttgagctcttcaatcaaagcatctgactctttcatctttgtcttgaatctaaaactcaagtccttgatttccaactcttttgcctccaattctgcttctacttcgaatgcttgcttcttcaaaacatacatggagttttgctgcagttccaatttctggtctacattatggataccatcctcaagctcagcaaccataagcttcttctcttcaatttctactgcagccataatctgggcagcagttattttctcccatgcttcatgt

SEQ ID NO: 175539 - DNA, 1067 bp, Cannabis indica
tgatagtctcatttggtgaaaaaggagggtgtgaacataatgatcagtgtgattatgatacactattgatccaattcagttcttgaaagaatttgagaataggaattttttgatatcaaagaaaggattacaaattttccaagcttttagagacacttggatatctccctgagtaaattttactctaaacaatacaatttaattcttattccttacaattaatcagcccctctatttatactaactcacctctaactgtttctttaactaaccctcttgactattaccatagctcacttaagacattccatctcagccattaagagtttgacaactcagcttctataatcctagtcaattttactggttagactaatattaaggcgcaactgattacatggtacttgattatgaatgagaatttatatgaataagcctcaagaccttatggaaaattgattgttgaaatcctcctaatatccaactattagttgttcacaattccttgtggaaaacctcttgatgtactctgcagatttcattgtgcttgttcaactcgatataatatttgttatgttttccagtttttttgttctttctttctcctgataagaaacataattttttaagttcagaaataatgtgaggaggaaaagtacactactagattgtgctctactctagaacatatatgttttttcttttacaaactttttcgtattattttgcctttgtttagttttttcaattctcttttgtaattagcttgaaatatttttttttttctattcttccccatcatatttgttcaaacacttctttccatattgtaactagtcttctatactatgtatttcattaaccctgagatatttcttcaaacacaaatcttacaagtgatagaacacacatttaacatgatctgtaacttgcaggctttggcagcagcatcaaagactgttgattgtcgcaagaatgttcatagtttgcatgtatattttcttcttgttggggattttgatagtaagtaattatcaatggtctttctcatggttactgttgtatat

SEQ ID NO: 175540 - DNA, 904 bp, Cannabis indica
cctaaaagctaaaaatatgttggctcttattttctgaccctaaccctagtttagactctctttgtcaaacaaaatagaaaataaataagagcactcttcatattcgaatttctctctttttctccttgaatttttcgaagcctatagagattgagtaattgtccacacaattcaaggcaatactcaagatagtatgaaagattgtgtagtttttattaacggaaagagaatccaagttcagaccttgatcatattctgcaacagaaaggatcaagagttagatatctgaacggaaaaaatcatatcattctgtttaaggttttttacaacttttatgtgtttatttcgttgttttagagaattaatatttaagatgttaaattataagatattagattatagtattattataaattaaaaaattacaaaacttaaaaataatttttcccttgttatttttgtaatttatttttaaatttttttttttaaaaaaaaaagtaaatttactcatatatccgagtgttgtattattgtacgggacgttccacaattgtgaagatcgaactcatacgccagccgttggattaaatttgatgaaggtttctttcggtgtcgtcgtcttcgtacttcgccactcgtcgtgttgcctctctacaaatcacctctcatttcaaatccatctctgaaacttctcgtcgtttaaggttcggactcctcttctacaggtacggttgttaacttccttcattccctctcgtactcgcattttataattatacatctatatctgttctttttaaaatcgacttctttttttttttcttttggaaattcaaacagtaaaattaggtagttcatttggattatacaagctttttgattattctgtactgttctgaattca

SEQ ID NO: 175541 - DNA, 712 bp, Cannabis indica
gagattctaatgaagcaactagagggatttgaggttgagggaaaagaggatcatgtgtgcttggttaagaagtctctatctggactaaagcaatcaccaaggcaatggtacataaggttttatgagtatattatcaaatcaggtttcaaaaggtgggactgtgatagttgtgtctacatcaagagttctaaggtaaagttaacattttacttattactctatgttaatgatatgttgattgcaagaaagtacatggaagatatcaacaaagtgaaatagaagctttacacagaatttgaaatgaaaaatcttagaccaaccaagaaaattcttgaaattaagatctacagagacagaaagtctaaagagctagttctgtctcaggcagggtacatctcaaagttgctaaacatatttggttttcaagatgccaaacctataagcacaccattagttcaacatttcaaattgtccaacatgcaatcacccttaacaaaagatgaatcccagtacatggagaaggtaccaaacacaagttgggtaggtagtattatgtatgttatgatttttactcggccagacctgtgttatgcaatgagtatggtcagtaggtttatgcataacccatgaattgagaattggaaggctatcaaatggatgatgaggtatctaaaggggacatctacttttgggcctaaagtatcatttagag

SEQ ID NO: 175542 - DNA, 773 bp, Cannabis indica
tttttcctttattatctttttgggattttctttctttcttgcttttctttctgaaggcttgcatgtgaagcaagtttgagttgaaattatgaacgtgatcggtctaattagatctccatttttgctacttttttctcctctcagaaacccgtgaacttgagcttcgttttttttctgatagatcagggttcttctatggcctacattgttgattttacttcatattgtttcgaattttatggacttctagtcgatgttaatcgatagcagtggcttcttcttctaaaactgaatattaagagaccctttcttgggagtgggtattcaagccaaaatggaggatgtatggttgtttaagcaaggttggaaatggctgcagtcacagaagcatatatactctcgtgctcggacatgggcctaccatggccgagataaagtttcgattattatggagaggcattggccgatggtttgcagtggatttgcgaggcttgggaggtttttatgcttcttgcttctttactggaagaactgcgttataaggggatttcattcgtttgtaggattaggttctgcggcattactactcattatgtggagttgctttctcagtttgacctccatgacttgcttggtttatgttcttcttagtatggtgagtttcattcttgttatttgattttgattttcttccctgggtctttttttcttttctttcttttttttttttttttctttttcctattttttggtttctaccttaatttgtataa

SEQ ID NO: 175543 - DNA, 1830 bp, Cannabis indica
ataggctcacacaagcaaactgatttggatgggccccattatcctaatttttatccacctgatgtggcataaagttttttaaacacgtgaggtaaattgaaatatcaagaactttgttttaagtactgtaaattattgagatttttttaaaaattttacaagaatgatattgtaactataacaaataccactatgaaaaatattcgaaaattttcaaaatgtggtttcaggcataaaagttaaattaaaaaattataataggagagtgtaattaatattctttatcctaatctaccaaaaaaagaaaaacaaaatgatatccttttatcatttaattgagaaagacaaaaaaaaaaattgtaaattaagtaactaaatcaaacaaattaaagcaccttaaccaaaaaaaaatcccaacaaaagcagaaaaaaaaaaaattactaaaaggaattttttttttacaaaatcaataaatagtaatgaatatagttgtctactgtttttagaatatttctatattttaatatattccaaatgtgggttgtatttgattactatatattcaagtttcaacctcaaacaaataaaaaaaacataaaatttacaagaaaccaaatataataatattaatctatattagtctttttgtagtttctttctgctgatataatggaaggtggtaataagtacttgagtatgaaaatagtgggaatattatcagtaactttgatggtgatgatgattgcaacaagtgaagctggaaaacttaatattattataattccagtggatcaatgtgagcttccagtatgcattgaaaagtgtaaggagtttcctggtgtaatcaaggctatttgccagagtaaaactatgtgtgtgtgttatcgtccagagtcaaattttaagggtccacccgtaccatcttcccgccaatacattcatttctaattgtctctaataatgaattgagagaagctttcattgttatatctatgtactcttccttacatgaataagaagcagttaatgcaatacatattgtctcatgaaattttcattagtattgtttacttaattattaatatattaagtatggcttgacttctatatacttaattattcctccatatctgacctataatcaaagagaaattttcttaaatcaaatgttaaaacagttacagttgaagagtggatcgtaaatattttaataagaaaattgtgataatgaaatcttggaaggctgcttcgccgaaacccatcaacaatcatggtgatgggaagagtggacaacaccctctccgccgctggacgcagaggcaccgtcagctccgaccgtcctagatccagttggtcggttgccggtaggagctgctgctggtcggagggcagagcttcccctttgccggtatagagtttgcctttggacttcttcatcttctccgacaatggtagcctctatgagtttgttttgcgcagcgatcatagacacttaaaatcttcttctacgatggtacaaatcagctaaccaataagttttctctgttcaatctttttatttgaattttaaatgttaatttagtcagtatatttatgtattattacatatccacgggttttgttctctcataacaaaccaaaatgtatattttacttatgtgtgtgtgtgaatgtatctgagatggtttgttagatggcgaaattttataagttacatattgtctatcaattttgcagtattatatcatatgtcattttataataattattaatataaatagataataactctcatctaaattattgattcttttttagggaaaaaaaac

SEQ ID NO: 175544 - DNA, 833 bp, Cannabis indica
agtcatagtctgatattctgcttcggctgacgaacgagagacggtggattactttttggatttccaagagattaatgatctatcaagaaagacacaataactagaaacaaaccttgtagtgtcactacatgaagtccaatcgacatctaaaaagatttgaagatgaaaatctacattgaacatgttagtttcggcataagcacacactactacaaaatgagctattcccaacggtttaaaaaagggtcaattatggaaactgttgggaaaagtaagtggaagttttttctatcgatttagcactaaactaaaaaaactgttaggatagctattgccaacagtaaacagattttttttaaaagaaaataatttattccaacggttattatctgttgggaatactaagtatacctaacggcttataaatgtggagaatacttagtatatccaacagttaataactgttgagaaaagatgtattttatacctaattaataatattaattattggctgaattaattattggctgaattaattaaaaaaaatattattggcttaaaaatttgggacaaccctcgttcgaatattggaccccaagaggctgaaaatttctgatcaataccctaaatctcgtctctctcagctcttgacaatttcctgtgacgatactcttgccgacgattatctgccgacgacttctcctttcttctcaactcccaacggtagtagctttcttctcagttcctggcaatccctgcctgaagatttcccaagtcgaagcctatgggagcccaagccgagatcctttcttggcagctcctttttgagttct

SEQ ID NO: 175545 - DNA, 792 bp, Cannabis indica
tctatctttattgcttgtagctttaccgggagtgtcttcgaagagctaagtatattggtcacagggtaatttctttcttcaaaattggttaataatattcatatatgtatgtctaattctgtattgagtaagtttggtatcctttgttaatgatctctcactagtttattaatgattcattcataaattactaagaaaatgcagaacaatcatgctaaccagatagctttctagtatttattcatgtcgaaattagctaatgtagatcttcattagagaaaactaagatcgcgtttggttagaagtaataaaatggaacagaattttcattccctttcttggttgaattttaaagtattgtaatgtcataccaatagatgacctttccactatgataaaacttttatcaaatctttttatgcattttaaatttgttccattcttattttattcttattctgtaaacattcagcttgtggtttaaactaattgattttcattattgaaaaacaaaaatggagaaagggtaatattcaaatggctgtaaaaataacaactttagagtaatatatgtttgattggattttttaaggtaatgtggatctgattagctgaacaatgcagatctattcctagtacaagaatgttgagtatttgaggccaagctcttctgttaaaaaaaaatttgtcctttgggtacttgcatttatcagttttaattataaattgatatactttcttcttttatttgtaactagaaatcgaagtcttcattgaactcatgaatgcagc

SEQ ID NO: 175546 - DNA, 898 bp, Cannabis indica
taaaaaatcgctaactatttatagaataacactttcttgtaatattaaagactataaatgcctcgtagcaattctcattttggtagtggttgtggtgaatggtgatggtattttttagtaccctttcatagaaatgaagtcttataccttccccatacgagtactctaggaagggagaaagaaacttgcaagaaacccatttaatgactacttcccaatacaatattacacacagaaatatctctaggcctatagggtccaaaacataaagaaaaacaaacaaaagggataaaattgtaaataaaatagaatgaaaacagtgtcaaaagtccaacaaatcaaaaatcacaatcataaataatgacaggtgtcacgacattattggggtaatgataaaatcacaagaggcttattacctttcacacactggataagccttccttcgtggacctctctctgtctctctctctttttcagttttgaaactttcactccaaaattttcttttttattttccataatgccaataattttcccagaagatttccaactctgaatccctctctctctgattcttcttcttcttgtttttagtttcttgggtgcgagtttaaaatcaaatggcttctcttacttccctatccttctcagcgattagccaatgttctgagagaagagccgtggtatcgtcgtctcgaaatttagcttcgaattctgagttgttcagatgccgcaccagcttttcctgccaatttgtaggttttcgagcttcaaactcgacttctcgcatggttatcaattgcatgtcttctactacaggttggcttttctcatgccatttctattttctgagggtgaactcacgggcatggtccttgctccatgtttgttaatgtca

SEQ ID NO: 175547 - DNA, 652 bp, Cannabis indica
acatcatttagaagtaatacaataatataattattccaaaagtattgaaacccataaagttccttttccaaaacaccaatttcaaaacaacctaaggtcggccacatttacatcttctgaaaccaaacctcgacactcactactctactttgagtttacactaacctacaacacgaaacaattaagtaaaagagaatgattagtaagtcaatcttactagtaggaaacacaaaaaatgacagatttcaaccacaacaccaacaatcattcaaattatcaaactagggtttggatatctctccaaccctaacaaatacttggaaatgctaaaacgtacaaattacacatcacgcacacacataatagtcattcaacattcataaatttaaaaggtcataccataaacattaagattactaaccagtacatgacaccattaatactttcaacatttcacccttatgctaataccataatatataaaccatttatcacaacacgatttttctcaaaatcaacctttcacaatcataataaaattcattaacaatatatatactagtggtgattatttttcaagccctcggtaccccattacacggttagacatcaaaggtgatatctccacgacgaccattttgtctttccaatt

SEQ ID NO: 175548 - DNA, 521 bp, Cannabis indica
gtttctctttccagctcacaaacttcgcaaaactctgaaattgtgggcaaaaatttattcaaatggtccctagtaggcagattgttattacaaatctgccagaagataaatctatgcttaaggacaacaagtttatgccaaactgctttagcataatcaacccccgaggcattgattaaagactagtagaaatgtttggatcgaaatatacctcccctaacatcatgttcaaggaaaatctcatcagttttcttccttagcttcaaaagcttcttgaagtaccagctcatttcttgcttgattggagtattcaacagacatcgatccttgagataaatggaattgacccatctcacccgtaaatagaattgttttatagttattttcatgttgtttgttaaattattttatagttattttttagtttttaattattttacaaaaaaaaaatatttttgtaaaattaaaactttaaaaactagtaatttttgtaaaaatttagtttagtgtaaaaatgtaaa

SEQ ID NO: 175549 - DNA, 654 bp, Cannabis indica
tgttcatcaatatactcacactgtataaattaaatcactcgaccacaccgcataaaaaaatatgatttgaaattttttacggtgccgttgcagtttgtatttttgccaaatcatgcggtgcagtacggtttgcagttcaaatcgtaccgcactatatattataaagttaccaatctttacaatatgaattttatgttttttttcataaaataaatatataatatatgtgtatattattttattttttaaagaaaatttaataaaataatttgatgattattatacatgttatgatggtaaaattttaataaggttattttggtttgtattgttaaaacaatattagtttgatttttaaatttttcataataatatttgataatgatgatagtgtaaatcgcttaaaccgcacaacactacaccgcattttcgtggtgtgatttttgcggtttgaaaaattataaaaactgcatatgcagtttgattttaaaaaaagactacaacccgtcccacccaatcgcatataaaaattaatgtaagtttatttaggttcatttaaataatgaaaacttatagagaaatattataaatttgaaattaattaatgatatacatgtaatttgtgatcaagttgtaataagttgcactgacttt

SEQ ID NO: 175550 - DNA, 697 bp, Cannabis indica
tatgggggctaaaaatatacgcatacaccacactttttagctcttcattggagatgttaatatctacattatccttattttactttctaatttaaaatttttaacttacttttttttccaatttattacataacttttgtaagtttttttttttacttgtttgtgcaccgcttaggtgaaattttcttatagtccttacttttttgtattttctcaaattaaataagattatcttatagtaatttgttgctttattttatttgttaccatttattaatatttttgtatctttttttaaacctctacacttttttccctaatttttctcaaaaaatctctcttttttttactccatttctcttttaaaatatatattttaaatttttttaattatttttttctcttgtgtattttactttttttttaatttttcatcttatttttttaattagtaaatatataataatgtagaaaatatatatataatattaatcttttttgtgttgttatttttttttcttcataaattttgttaatattattgtttaatttttcttctaatgcttaataatagataattgtatagcaactcacatgagcataaatttaaatagcaaattgatgaacttaggttcaataataagtgaatatataccacattgtcattatttaaacataattgatgaaagtaagatat

SEQ ID NO: 175551 - DNA, 702 bp, Cannabis indica
ctacgggttttacctcggccataagtgagactcctgaataaattttgcgaggaagttgtctaagacaaagtgacttactgtctacttttttacaaaaaaaaaaaaaaaaaaaaaggataaaaaaccccactttaacgtcaaatgctagtatttatagtatccacaaatttcaaattcatagttctctaaagaatgcaagacaatggtgacaacagagccaggatattgaacaacataaaccaagtaaccaacacgactatggatatgggatattgacacaaatgaatcaaaatgttcaatataagtttagctatctccaaagaacagggactcgatataatcatatcagaaaagacatatttcagcattgcataaaaaaaatctagttctttgcaagctaatgaaatatgataaatattcgaaatattgatactattaacaatccaaatgccaagaaatgaaaaccaataagggcgtgtttgctaataaggaatacaaatggaaataagtaaaatgtttttcgcttatacttcaacatttatgacacaatatttaaacgaatccctttcataaagaagaaaaatatacgaacgaaaacaataactaaaatgaataataaaaagaaaaaaagttggataaggtgaggaactgttatacctgaatatgtgaggggcgttgaaaattaagtttcctaagacattc

SEQ ID NO: 175552 - DNA, 1265 bp, Cannabis indica
catgttagagaagtgagtgatgttttggaagtcaacttaaagaacaaagagtatctcacgggagcttacgattggaatgggtggtgaggcaaatgattctattagggacacaaaaaatacttacagcactccaaccacatccaaatttgaagagcctccagatagacggttatcaaggtacgaaattgccggagtgggtagtagatccactgtactctaatttggaagtagtttctctaagaggtcataattgttgtttgtctttagtatcatttcagcacctgagttcattgaaaaagcttcatattattcgcggaatccatatatctaatgaattttgcaataattcttcgcataattcatttccagttttagaagagataggtctcttaagcattacttcatttgattggtcgtctatcaatgcaaattatcaaaatggtgacattttcccctgtttgaagaaatttactttatttttctgtgacggcctaaaagtggcattacctatgggtaattttccatctttggaagagatcgagattgagttttgtaatgaattggtgactgtatttccatccagtactgatattgatgttgcatatccctcccttagaagtttgaaaatagagatgtgttcaaggttggagtcagtttccgaaatgggattactgcccgtttctttgaaaagtctacacattaaatcatgcaatacagtgatagaaagtcatatgcaatggaatttgcagagactctcaaagttgactgaattaagacttgactattatagtggagtggtggattcatttcccgaggaagggctgctcccacctagtttgagacatcttatcatcgctaactttgataagcttacaactctaaacgccaatggttttcaccacctcacctcacttgaagagttgtatctttggaagttggaaaagttagagtgcttgccaataggacttccccagagtctatttatttgagtataaaagattgtcgtctgttaattccaaggtgcaagagagaaacaggagaagattggctcaacattcaacacatacctcaaatacgtaatgatggtcatgtaagtttacaaaagtggtaactgaaagtctttatatttttagttgtacttagtttcctttcccttaagattttctctcatgttcctttgtcttttcctaaaaaaaatcaaataattttccaagacgtaggaatgaatataactcataacttttgaatctctttattcacctcct

SEQ ID NO: 175553 - DNA, 810 bp, Cannabis indica
tatctcgtgtacgtataatatgttatacttctataattatagcatatcaagaaaattgattatttatggagatccttcatgatcaccactcttgaatcataaatacgtaatacgttcattgaaaataatcaaccaaaaaaaaaaaaaagaccatgtttaaattaaatccaaaagatcaatatggaaaaaaatatatatttctaatctaaaaccatctcttattttgcacaatatatgttacaaatattaatatatacagtacggtaccacttatgcactcagacatactcatatatatgggtagtgcatggatatatatatatttatatatatatatatatattccagcgaaaaaaaaagagtatatataatttaggtttggggattaatttgtaagtgagatattcatcattaatatcaggatataattaaaaggaaagaaaatttgcaaaaaaaatctgattattctacttacaataatattgtgtagctaataagaagtaagatatatatatatattagcttataaaaacaaaaagaaaaacagaagttattataaattaagtactctaattaacacatcttaattagtagctacacgcacaacgaataactgatcttctatgtataaataattatatataagtatataactgtatgaggtgatcatcatttgatgatagatcgatctgagttagatcacgccattgcttcaaatgattacgtacgtgccatatatatatatatatatatatttaactacatgatcacctatattatacatatatatcatcatcatcatagaaatgt

SEQ ID NO: 175554 - DNA, 595 bp, Cannabis indica
aaaaaattatgattcaatttttttttttttagaacaaatgattctaaaattatttttgagtgataaaaagtttgggataaaaatcctacctatatatatactcttaaatatactatgtctaatcatattacattgtggagagtagtcaaacataaatatatagctaattaatttttattatatgtatattcttacaccattaagtgaaagttaatatgagaaatggaaacattaattgttttgactttaattaagaatatcaacgccaaaaaaaaagtaggagaatattatgaaatggcacatatatattatatatttccatccataaaaatcttcatataattccaaaaataaaaaaaattaaaaaaaaaaatacttacaataaaattatttatatatttacacaatatgcttcctatactaattttattataatcaagcttattcacatcacaataaacaaatctaacttttagtctagtaaaaaaatcataaaaattaaagaatgttatcttaatgataaaaataataatttagtgtatgtacgactaatatattttaatcttaactaattatataatataaatatctataa

SEQ ID NO: 175555 - DNA, 888 bp, Cannabis indica
gtggggaaacttgacttttgtgaatcatgcattttgggaaaacaccatagactaaaattcaaaacaggtatacacaaaactaaacaccctctagaatatgtgcattctgacttatggggtcctgaaaagactctaacacatggaggtaatgcctattttatgtctatagtggatgatcactctaggaaagtttggatttttctacttaaaaataaaaatgatgcatttagtagatttgttcaatggaaaaccttgatggaaaatatcacagattacaaactgaaaaatcttagaactgacaatggtttggagttttgtaatgatatttttgacagctattgcaaggaagtgggggttcaaagacatagaactgtcagactcactcctcagcaaaatggagttgctgaaagaatgaataggactttgatggacaaagtcagatgcttgttactacaatctggacttgctaaaacattctggggtgaagctgtgatgacagcagcttatgtaatcaataggtgtccagccagtgctattgattacaagacaccagaggaagtgtggtcaggaaaacctccagatttgtcaaatctgagagtctttggctgtgcagcttatgcacaccaaagtgtgggaaagttagagccaagagctctaaaatgcatattcttaggctatccagaaggcactaagggatacaggttgtgggtaaaaatctaaacctggtcttaaaaactattaacagtagagatgttatatttaaggaagatgaaatttcctgtgttactaacagtttatctagtgcagaatactctttacagcctaacaatccaggtaaaaaagttgattaaccaagttctgagtcaagctcaaacacctaagtctaaa

SEQ ID NO: 175556 - DNA, 943 bp, Cannabis indica
tattttcccaccaaccaaacacttctctcttttcccttctaaatcaacaatacaaagaaaagcaaaaaatggagagtctttcgatcagagcagagagtttgctttctctctcccaccataatcccaattccagaaactcggtcttcgattcttcactcagacatcgtcgaattcggctctttccccccaaagaccggttggaatttagggtttcttgtggtattaaggaaacccggaaaatagaagagagccagaagaaggtcgatggaattctcactgggcttcgtgttgatgaagtggatgtggaccttggtggtccggtttccggttctggggttcggaatgaagaagtgggtttcagtggcaattggcctccttggaagaacatgccccaaagatataagcttattggtacaacttcgttggcctttgttatctgtaacatggataaggtactaacttttgtgcatatttttttctttctttgttgtgatttttctacttttgtttcatttttcttggatcaaatgagtttattaaataagttaatgaagtgggtgttttttttttttttttgttgatgagcaggtgaacttgagtattgcaattattccaatgtcgcatcagtttggttggagttcgtcagtggctggcttggtgcagtcgtcgttcttttggggctatgcattgagtcaattgccaggcgggtggcttgccaagatatttggtgggaggtttgtatatcatgctacctcacaaatactaaaacttattacactaatgttcaatcatgaagtgtcaatttctatgagtcatctattgcagaaagtatagcactactttattatgtatgttctatacagggcttcttagctcttgaggctttgtaagctggtagtggtagttttcgaacatgttaaactgatagtcctcttagtcaaca

SEQ ID NO: 175557 - DNA, 721 bp, Cannabis indica
atttccctcccatttggcaattttccctgcaaatagggctcaaatttgtataaaaaatatatattttatcatttaatcgatattgaagaaataatgtagttaccttataaacagaaccaaatcctccttgacctagtttgtttgttgaactgaagttgtttgtcacatataaaatgctggcgaaatcaaaactaggtagctcggagggatcttgttgtgatgaaaattgaagggtatctcttgaattgtcacttgactgcatcaagtcaatgtggtctgtggtcttcataatgtttcctattttgttttaaacattgttttttgggtcagtaaactaaatgctattgttactaataggaatctatattgtgatatggagagaattaaagagaaattgccaacaacaaagagagaagaaaggaatcttatgttgttagtacaggaattaactaacataacttctatatttcctataaacttgctcatcttcggaatattttgccaatggccatttgtatctacaagatgaggcaaatcaaatgtatgcacgtgtttgccttaagagaaagaaatagcattttgtgcatctttcttaccttttcttctatctctacgtcgtttcagatataataatatgacaactattatcccaacagtagaaagagttgcaagacagatgataatcctctcaactttatgtcctccaactaaataattattc

SEQ ID NO: 175558 - DNA, 568 bp, Cannabis indica
  modified_base (57)..(57): a, c, t, g, unknown or other
cttgcgaaaaacaatatgcatttcttctgtgtgaagaatatagctgcagttcttccnggttgctgaacaaaatcactttgatccaaaaagaactgatgggtaaaatttaggtaagttgacactggtgtagaatgtacagaaaagtaaggcatgttgataactaataatacaaaatgtggaataaaagacatactttaaacgtaaacccaaattaacaagagaaaaaacaatatatgaatgatcgtaccaagcatgtatctttggcaaaaacttgttcttttttctttggtaatctttctcattcatgttaacctgtgaagaaaatacagaattaaatatcggaggatgtataattttttattcagataaggtatctttcagattaaatactagatttatttgtatgactgattcttaacctaaccatcaaaaaaaaaaaaaaagactgattcttaacctattttttttaaagtcaaattagtcccaattttatctaataaacaccattaatttctctcaaaaaattaagtgacaactattaaaacaatatctctttctctctcacatc

SEQ ID NO: 175559 - DNA, 653 bp, Cannabis indica
cttcaccttgcttaatctctttcggttcaactgctgattgaggctcttctaccctctcacttttatgaatcagttcatgagtttgctccatttgtttgctctcctctttgactgagtttacctcatgagaaacatcatcatctgattcattgcaagataatttagcaggcctttttccagtgcgtgcacatgttcttcgaactttattgggtcctgctcttgctttattaatatgtgaacttttcttatcatcttccatcatttgtttgttctcttctttcaatatgttttcttcatgagaaacactatctgattcattaccagatattttagcaggcttatttccaatatgtggtcgtgttcttcgagctttcttaggtactggtttccttttatctatgcttttgccagcaaatcttccacgtttcctactagattcaagtgttgtcaagacttcagtgtttttcggggcatcattgtcgtctctcctatcaatttcatcttctttagaggaacatgacaaagcctgattctccacaggatccaactccaaatccatgtcatattcgcttgtgagagaaccaagaaaaaaaagaaaatcaatattagtcaggaattacaagaaaaaaaaaaagtaagtagctatcactaac

SEQ ID NO: 175560 - DNA, 777 bp, Cannabis indica
gtgtaataatttaaaattaagattacaagtataataaaatttaaattatgaaattatatgtgtataattttaaattataaaaagttttgctataaaattttaaataatttaagtataaaaaaataaattgctaaaagatccttatatagtaataaattgcaaaaaattaattaataattataatttaatttaattttaaaatataattaatcttaattaaagttttataaggaaataaatgattaggttactttcaggttacaagttatttattatttatttttatttaatttccaaattaatcacaaccatttaatagtaatccaatggcttaaaaaaaatgtaaccatgatggttacaataaaaatgtaaccattgaaacctctatatatctacttatctatatcaataattttaatcttttcatattaattacaaaaaaatactcaatactattcaattattacttttaacacaaatatattatttctaattaaaaaaaatatatataacaattataataatataataatttcaggtttatattttacttcattccccacttataatataatttgatgcgcttatactaatttattggtatttatatatatattagcaaaaagttacgtgcgaggcacgtatactaaattttatgctagtttttttttctacaatattaaaatgtgatacaattaaaaattttaaaaaatataatattattagttattaggttcaatatcattaccctgtgttgcattttaaaggaaaaaatat

SEQ ID NO: 175561 - DNA, 626 bp, Cannabis indica
caaccatgctcgtcatcgacatatatcgacataccatcgacatcaatcgacaattaaaacggtgcacattaaatgttaataaattttacatacgttcccaacaacccttccaactgaaacgttgcatgtcagacacgtgtcctatcgacaacatatcgacatgaagtcgacatgtcgtcgacaaatgtgttagcagtgacactaaattggcatgttgtcgataagatgtcgacatagtatcgacattctgtcgacaaatacgccatttcatgcgttttccctgtacagttacgcatttaatgaccattaaattttcatacattcccaacatttttactgctctataaaagcaaagggaaatcttattcataagtgctcttgtattctacctatctcttactcttaaaaatttctcttattctcttaagtttgaaatatggccccaagaaagaacggcaaattccccatcctaactcctgaggagctgaagcaggagcctgatgttggcatagttactcctgcaatgcagaaagttttggacgccgctcgagctttcgaaagagagcgaaacggtaacgagttcaggttcatgcaacttgaaagagaattttgcaaaactggtgtat

SEQ ID NO: 175562 - DNA, 827 bp, Cannabis indica
atcgtgcactgtagtcacggcatttatatatatatttaattaatatttatattattatatttatgaaattaaaaatttattttagaaaattttataatacatttttttaaaagtgatgtattcctatttgttttggcacctaatatatttttttagttattttttatatagtcgtgtacattataattatttaagacattttacaaaactttaaaaaatttagaaaaatttaacttaccgaaaattattagttaaatataacaattgtggtatttttgttaattaatatgatattaattttttttattttattagaaaattaatataataataaagaatatttttttagtgtaatttttggtgttgtggttagagttgaaatttttttttgacaccaaatttgaagataatgtaacaccaaatttagtgtatttttggagatgttctaataaaattatatatcatgtcaacaaaagtacaatagaaaatagaacttaaacattattttaagaaaataatataccgtataataaaatatacatataccaataataaaaaaacattactaatatatatgtgtaagctatagtaaccaaattatatactatataaaaatatatataccatgaaaataaaattatataatattgtaaaaccattttttattattaattattatataaaaaataataatgataataaagagaatgactcgttcagcaacaaaaaaaaaaaaattaattaataaataatattttctcacttttctcttcactaacatttaacttcccagcactcacctatccattctctaatcaatatatcgc

SEQ ID NO: 175563 - DNA, 724 bp, Cannabis indica
tcattttcatcaaatctcaagttatataattatagagaactgctactgctactgtaggaccaagtgaaattaacctataccatagggtacttttttttaaccaatcaaaattttaaaaaggactaaatgcatgtagcctatagttgacaaatgtatcagattatttaatatgtaattatattttgttttttccaaaatgattgaagaaaggacctccactctcaagttctcatgttgtttacagagagagcgagccctaacatttcttaaatcatcttgactattcttagattaaagataaattagagaacttccaatcaacgaaaaggtgtctcgattgaaagacctttatttaacaaaatagttaataattgtattaaaataatatattttataattgatattttaaataaaaaaaattagtaattacactctcattttttatgactagaattaaataatatacttggaagttggaaccccttactttcaattacacaaatattctataattatataattacctcatattaaaaaaaaaatatgctaatgatatatatttgcactcaaaaattacatgtaaattttacagtattagctttttctaaattcaatcacatttatataaactagaactcattattttaatatgagtaccaattacttagaaattaaatacatgcataatcaattaactaattacatatatttatttattttaact

SEQ ID NO: 175564 - DNA, 783 bp, Cannabis indica
ctctcccctctaccaaacatagtgttaatcttttggtatccaaaatttggtaaataagttgaaatttgttatattctgcttgatagactcgggttgatctttgtctttcttatgcaagaaagaaaatccaaaagctaaagaagatttaggacttcatgtgttgtactggaatgataaattcatactgcgtctgcgtaggcttgctttcgggcaagccatggatctgcatgtatggtaatagtagtgctatctttgtaatgcttgttcaatcctagacttgtatttcaactggtttatcgcttttgtttatatcttagctttcttggtaacttacacattggattattctagttgttttgactctgttgagccgcttctgaggatcaatatctttacatttgacagggtcgaaatccttgtctaacacaagatgaagagctagcgacaaacgaacgaggcaattggtagtttttcattttttattgggagctttttgttaatgatctatgtctgttattctccatagactactaaggagacctcatcttcttcttcctatgtgggttcattttggattaactctgtagtatagagtttaggtagttgaagttggttgtttgtacagagtttttttttgtagatttagccgtttttttaatgtgcctgccatgtaggtcttcggggttggatgctcggggcgattgtgaacaaccacccatctcttttttgtatgacttgcccttttgaagggctaaaacatgtttggttgattctatctagttc

SEQ ID NO: 175565 - DNA, 625 bp, Cannabis indica
atatatttatatatatatatgaagtaatgtgtggtcacaatactttaatttatttttggattgcaaattaatgtctaagtgagcttttttacaatataatttgtacgcagtagtttgtgttataaaaggtactgctctttaaaatagtaaatgttaatccagatatatacagtatatttatgcatatttggttgcacttattattattttaaaataattaattaataacaaaaagtcataatataatttagagcattggtattgggtactggcctcttcttttgcgattggctaataatacaagctattatattaaattatacaaaacctgatacttaattagactaatagagatattaacttgaggaggatgcttgactccacaggtcatttttaacatttctctataatttaattaacgtaataatacaaaacaaaagaaattaatcaataatacctgtttgagagagtagcatattgtcatcacctccaatatgccatgcaaaatagccacgtaaccccattttttctttaatatacctaactttagtctcaatactttgcgtatcgtcaaacccgatccacgtggacccaaagtaacagtagtcgttgaccacagacgagt

SEQ ID NO: 175566 - DNA, 568 bp, Cannabis indica
agttaactgggtgtaatccgaacttgacctctaacttttgattttttttttaaagtttcgggccaagtaaatttgtcaaataggtgagtttttgaatcaaaatattcagcctttaacttaaaagtacaaaataacaatacacttggtcttgtacacttgcttttgtgtaattatcatttcaacttttataaatatacacaattcaataaaaatattattattaattgttgttatcgcaaaagtgatttattttataaaaaaactgttacatgaaagggtaaagggactaattagtaattgttagtattgtctagttagtataaatatgtaatactattttacaaatgggggatcaatgaatgaaatgagagaaaattaaaattattcctattggagtttggcactgactcgaagagtgcaatttgatacaattgataattgtatcattggtgctttcattgagagaatctcagagagagatttcagtgagagatcggcactatgactgataaagagcttgttgaattcgttagatccatgatgagttctatggaattgcgtatggagc

SEQ ID NO: 175567 - DNA, 674 bp, Cannabis indica
aaaaacagatgttccaaatttaggcgaaagctctataattgcatgtaaccaacctatcattccccacttcattggggaaggattttgagccattgataagttgaaacgtgtaagaaattgggtagagaggtctaaaaaagacaattgtattgctcaataatgttatggttctttcattgtcgtttatcttttccatgattataacgttggtattttatttcaaaatagaaaattgtgaacaaaattgtgccattggtcctcaagtcagtgaaccatttcttattggctacaattgtttcttaatcttataatgattgtgttagcagcattaacatcatgtgataccattccgaaagtagattggaactataatatgttgatgaataaaataataaaaaaaaaaaggccaaatccctccatttgattcatttttctttggctactaaagataaagctcttgtaaaaggaaccaaactttaagcgatagcaaccaaccatgtaaatggatccacaagcataaaaaaggaaatagcttagccgtttgacaaactttttttactggtttagctaacttcaataaactttttactttttttttggttcatgtatcagtgtttgttatgcaacacatttgttttgtatctactttctatctttagttatatcgaatcggt

SEQ ID NO: 175568 - DNA, 766 bp, Cannabis indica
tgcctaataatgaatcgattactcagtctatatatattaaccccaatttttactttcaaactttgaaaactccaccaaaattttgacgagagaccaagttgacaagttgtagcagccaaagccaccataaaaatttctcaaggggttcaatctcttcaaagggtcgcacgtagtcctttgatggtgatttttataaatatatataaatacatatttgcaggcccttaaaatatataataatttgaactcatgaccttgataatatggcattcacctcgagtaattaaactataaatatttattattttaatacacttaaagtttagttaaataaattaataaaagtctaataaaaattttatttttattttgagccctaaaaaagtgtgggctctaaacataagcctagcccgcctatactgcatatttgttacttattgttttcatttgagtgatttccctttcatgtgttatctttatactaagataatgtgtgtacgatcaattttatatggatagtattcaactaccaaaatgtgtaaaatgaaaaataaaaattaaataagcatatatatatgttatataaaaatatataatattgtgtctaataatggctgatccatggtatgctatatataatggaataaggttatgaattaactagcctttctttgctatgaaaaggcatgcctaatgcagccttttgactttggattatggctttaagaggaatgaaaaagtaaggttataaattgctaattttgca

SEQ ID NO: 175569 - DNA, 965 bp, Cannabis indica
cattaactttgatttttcttttgttgtatgtataataataacaaggcaataatgtgaccaaacgtagttggcattattcacaagtgtggtctatgaatcttcgtagcaagagtaatggaccaccctatagctatatatataatatattctaaataacaataacaacaatgatatgcatacaaaatatttaacatttactgttcttattagctaatgatgttttttccacttccagattttaaggttctaatatattttgataataatcaaagtgtctctttattaccaatcattaattaatttgatcagacagaaaagcttgtcccagcaacttttagttgttttgacatttttacaagtacactaactcagaattaaacagaatctcttttgtcaaatttatgaaatcaaaaatcaaagaaaaattacagcataatcaaaaaggggagtcaaaaaaataaaatataaaacccaaaaaaaataaaaataaaaaatctgtactttgatctctctcatcctctggaaagtccttctggtactgtatcatgttcttcacataatccaactttgtcaacattgacagtgtttctagaatgaaactgagattgtttacagtgagcaatagctccctgaatcgagttctcaatctcagaatgcttaacactcccacatctcttcaactgttttaattcttgattattacaaatgttagaagaagaaaaagaagatgaaccagaggaagatgatgatgtagatgatgctgatgatgatgaagaagaagaagatgaactggacttgtatgttgaatatcttaaaaaagccaaagagaatgatcttctatggcgaccaccaccatctacttgatcagtgttactaatctttgccttcttttctttctcagtttgcccaaatgagacgactgatctcttctctgctatgtctttcgaagctgtggatgattcgtt

SEQ ID NO: 175570 - DNA, 603 bp, Cannabis indica
gcattttaaattttattttatttcattctcattcttatttttacattttcatataagaatttgtagttaatttgtgcttatgaaattgtcttatatatcttaatgtatgtcaatttattaatctacaaataatcttaggttgctctcaaattctcaaagttgttgtaatatcgttatcacaaatcaaattaaactctaatatttaatcaacaaagacagatcgaactttatatataaataaatatgttatgtgtctgattttagggtcttaatctatacaatatattacaataattgtacttaaatatgcgtctaaatttatagcattgacaaattaatctatgttctcaacctcatgtctatggatgtttgtgttatctataaatgtacttccttgcatttcaaatttacatttatgatatcccaaatcaagctatatatataatatataattatgtatatatatgttatgtagtttgacatttgatttctagtactcttatttatgtttatatttaatattgaaaaaaaattattagcaaatactacaccttttcagtacattttttatttatttgggtatgtaggagaacattaattgta

SEQ ID NO: 175571 - DNA, 686 bp, Cannabis indica
gattcccccttcaaatattactacattcaaattttgttttttgaatttttcatattagtaaaaaattatttgtaattttttaattatacgcgcgtagcgctgaggtgacgctaccacctaaactcaaaaagtatcacataagcagtcttttggccacgtgtaactaaagggccaaaactctagaaaacactactacaaaaaatacttataatgtccatttttcatgtccaacaaaatttttattggacataaaaaagttttggagagttttctagtctagcaaaattggactagaaaaaaattttattatgtccaacaatattggactagaaaaattgtagtgaatgtgatatatatatatgtatattattttaaaaacaaattgctctattttcatgtccaactctattggactaggaaaatattttagaaattttgtagtctaacaaagttggacttgaaaaatattttaaaattttctagtctaacataattggactagaaaaaatattttaaattttttttaaatctattcatactagacgtgaaattcttaaaaaaaaattaaaaataaaaattaataatgaaagtatttatatagaaaaactaaattattaattattgtcattttcttctccctgatatttctctctctacatctctctcaattccatttgccactccca

SEQ ID NO: 175572 - DNA, 694 bp, Cannabis indica
ctattttaccctaccaataaacacttaagctagtttgaaacctaggtgtactttggtcattactaactactccaattaaactgacaatactagaatactaatctggttcccatggtcaccgaattcgaaaatatttattttaaaaatggtatatataatacccacatgatccgataacatcttcataattaataaataactcttcatttattcatttactcaaaaattactaattaactcataattagtttaagtaagattataatcccactttaatgttcatataattatatatttagtaaaatatgtccaataaatataatttatatttttggaatattacactaataatattgacgttttttttttttttttttaattaaaataactacatattatttcataaattagtataagattaattaattcataaattttttatagctaattttgcagtcattacatatatgcaaaaaatttacatgacgtattagattagaattcaccatattgcaaaaaatagtaccaattaagtgttagataaaataaatttattagtaaatactattttagaccatgtgtttagcaaaaaattaccaattagactttttattttgttaaatgacaaaatggacattatattttcttaaaatggtaaaaataggacccctgaactaatttttttgtcaaaata

SEQ ID NO: 175573 - DNA, 633 bp, Cannabis indica
atcatgattattatcatgatcaaaatggttgaaagaaaatagagatgaataatcatgatcatcatgatcttgattattattggcaaattgttgatcatgatgaagaagatgatcttgatcaatattatcccatggaaaagatctagttatgaattcaagattctggtcaagatcaaacaaatcagagaaataaatccatattaattttgataataataatggaatttttagtttagagatatagagaggtttttaaaaagttttggagatgagggagtgaatatatataggacaaaaattaaatgaggagttggagagtaattaagttaaaaaataaaaaaatagaattaaagacacatgaaaaagaagattaattaattaagagttaattaattaaagataagattacctaggaaagagggagattatcagcttatgcagctaataatggaaacatgtacatgtgtttattgccacttgccagagtgttatcatatatagctacattaattatatatatatatatagtatagtagtgattttttaataattaattaattatgtatattatttgtataatacgtgcagatgggtttaatacaattattattattattattatttagttattat

SEQ ID NO: 175574 - DNA, 516 bp, Cannabis indica
atatttgttgatgtatgtaaataacattttcttagagttttgtcaatcatggattgatttagcctggaaagtatcgacgacctagttggcccttttgtctttagttttttgtaacctttagttattctgattatatgggtgatatgtccattttgatatgcttgagtatattagttttccaaagattaaggtccctattgttaaacaatgatgatgttatttctatataacgttgcagctaggtcaggacattgaggaagatcctagactaaaggtcatgaagaaagaatggtttgaaggcaaggactgtcttgacgtcggctgcaataatggaattataaccattcagattggtacttattcactaaatttatttactcctttccttgaattataaaggatactagccaatgagttaaatgtgaaataaagggtcttaacaatttttctttttatctttagccaaaaagtttcattgccaaagcattcttggagtagacattgattcaagttaag

SEQ ID NO: 175575 - DNA, 704 bp, Cannabis indica
aatacttgtagcttcagttggatactgacaaaggcatcaggttgatactagcctctagatcacatagagttttcattttcacgaacccttatcaagcatggaatattaaaactccagatctttaagcttggtggagttcctttgcaggattgcactgcactcctcagtaagtggctaccatttcaaattcttccaaattcttttcttggataaatatctttcatgaacattcaattagttggtatttgttccaaggcctccgtgaatggaacattgatgtccagcttcttcaatatttcaagaattttgaaaaattatttgtccatcttattcttgcggagcctttgaggataagtaatttttatatggtgctcagtgcttataggcaatgtagcttcaatacccgacaggttatcagtaacttgcttcttatctatttcagcctatgcctgtcgatcctacttctctttagctacttgttgctcaacccttgtcccctcatattcttttccacttctcaagaaattttcttgacactgttcttttggtttaacctttgcagtactaggaaaattatcttattaattttaattttggttggccatatgagcagttaactgtcccacttgattctctaaggttttaatggaagctctagtctccatcatgaattggagcaatagatctacttgaatgttagatac

SEQ ID NO: 175576 - DNA, 728 bp, Cannabis indica
atttttagagtgtgtcgagccacatggagtgaggtggtggtgtggcctagggtttggttttctcgtggtttagggaagaaatcacttactatgtcactcttgtaccgacaaaaaagtctcgaggaatgtatgattttggagaatagtttggtcggatggtgttcatagggttagaagtcctttggttgtttgtgtaaacacaattacaagtcttgatgatggtattgctcataatgattatcaactaagtggctttattactagctaggggttttattttttgcttgtctttgaatttaatgtttgtaatattagatataagggacatgattattgttaaccttttatataataatgtcattatatttaataacacttgagtatattttcttatgtcccttattattattctgttggtcattaaaaaattatatgtattttacttaataataaagaaaattcacatgtgtaatatattaaaatttatcaaaattttaggaatctaacatactctatatccactttataattaaagtaaataaaagaaaaagtgactaaattagaggcacatttttgactttacttaactacatccaataatatatatattattttaagaaaaaataattttaaaaaaaattgttgcaattaatactaatttggtttggcacatattttgtgggggaaaaaaaatacttgaactggttttcatgatgaattaagagtca

SEQ ID NO: 175577 - DNA, 1097 bp, Cannabis indica
ataataaaattcaatataatacaatacaatgcgacttaatacgacgttctaaacaagccctaaatataacatcccagtaagtaaagatgaagcaataaatttctaaaaaagaaagaataaataaaataaataattttttttttttaaaaaaaaaaaaagtttagagaggaagatgtgattgcaggtcacgtggttgtgttcagagaggcacatggtgtttcttaatttatttatttgaatattccatcttaatattgacttctcagttcatgtgggacccatctattaaccaattaactaacttctctctcttcttcaatgcacttccaccgtccctactctactctaatttcttttcttttttctttaaagaaaatacccaaatttactacaaccacccattttcaattttctttttaatttatgtgagtctgaacattgaatttcacctatacaaaaaaaaaaaaaaaaatagtagatattgggctggtggcattactttatttctctttttaaagtataggttttttctaaaaaaaataaaataaaaggattttcattaaacaagggaaggtctatgtttctaaagcatagctaccttgagttttgtatcacctttatccaaactaattaggccattctagcaataatttaagtgtcaattaaatattaatttttatataatttaatataataatttttattaaaaacatcactaattaattatagaaagatacatttaaaacattacataaaattaatagagaaatgctaaagggcactagtggtgcctagcaccttcctatgtgtcaatatcgctattggtacactaagtatcggatcccatataatttaatataatagtttttagggagtatcgctagccaatcgcaacgcgacatgtcgcaaaggtgctaggcaccactggtgcctaatagcaatgctcaaattatactatactttttattcacaacataaattttaagataaaatataacttttactcacacaaaagttacttgtgactaaaaatataatatttagatataagttttactaatttagttttagtcataacaagtgctgtgctaaaaaac

SEQ ID NO: 175578 - DNA, 905 bp, Cannabis indica
aatacaccccataattaaaaaaatataaacttaaataatttttaaaaattattcttgatatattttttaaaattttttcttcaaattattttatgttaatttcaatacttattttgagttcattttcataattttttctaactcatgtatatacatttttattttatttaaaaaaaattcatataattttttattttaatttttttgtcataatatttaaaatataatttatttttgtttgataggtatattttttaagaatatgaattgaaagaaaaaagttaaaaaaacttagtacaattaaagatataaattttatataaaataaaaattataaaaatggggtgtgtttaaaaatttttggggtgcaaataaaatttctcttaatttataccctcttttatttgttatatcccgattatacccttatgtaatgaaaaaaactttctcacctgcctaaacagtacccttatgtaaaggtataatcggtaattgacttataaaagagagtacatttcaattaaatttaaaataagattatttttggttaactgatgaaaaaagagtatattttaacttaccccctttatttacacatttttctctataattgcttcttcttcttcttttacttcttttttttataactaagaaactaattttgtataatttaggggtgtacataaatcgattcaattcaattatgactaattgattcaattcaattatgactgatcgattcaattataactaactaaatgttagataaggtatccaaaaattcaatatatctattagtggcggagctagcctaacattttagtaggtagcaaaaaaaaaaaatttgaagcattaataaaaaatacaatttttattagaaaaaaatacaaatttttaatgagaat

SEQ ID NO: 175579 - DNA, 743 bp, Cannabis indica
agaggcattcctagacctccgagttttttggtagatctatggatgagttggagttggccaaaggaaacaagaggaagaaggcctcgggtagcttgatccgaagaagactttgtggatgagagccaaggtcaggtttgcttctttggggttgataaaccggagtaaaagatgttttagggaagtaagtggtgtgaaccaaagcattgagtccgatagtagggatgaggggattgaccaaagtaagaaggcgagattgatcactcaagccttacgttcggaggagagcgcctttgactcagctaatgattcggaggctttgacccgtggggttttgggagttggagaccatgtgatgggggcctctcgaggggagagccaagtagttatcacagaatcggccccggcacggctagggggtttggaaaaagtggagtcatctgcgatttcagatgctagaactcctttaattctgaataaactggacaatgatgtgaggagaattgctcaggatttttctatggccgaggaggcgggccgaaccatgccccccaaagccccatgaaggtcctttccctagtccgcggcaaagaaagctcttcgagctttggttcatagagaagattcggatgttctgtttcttatggagactaaggttaatagtttgcgtatgaatggtatttggcgcgatttgggttttggaggtgcggcggtctcggatgcttttggttcggctggtggtactt

SEQ ID NO: 175580 - DNA, 749 bp, Cannabis indica
cttatcccgaaacgttcccatccccaacaaatcactgactacaggcccattagtctttgctcgaccctttacaaaatcatttctagggtgttagtgaatcgtctcaaacctattcttagccgtatcatctcccctacccaaagcgcctttctcccgggtagactcatatcagataatattatcattgcgcaggagattacccatgccttagctcaccgcaaaacgggtcgaactggatggatgggtctcaagctggacatggctaaagcctttgatagagtcgaatggggttttcttcagaaagtcatggaaaaatttaaatttccctatcgctttatcagccttgtgatgacatgcatctctacggttagcttctccttttccatcaaccagcagatattgggatcagttaagccttcccggggtatccgtcaaggggatccgctttccccttatctctttctgctttgttcagaaggtttgtatgccctcattgcccaacacactttgaactctcgttctcataaccaaggtcttggccaaaaaattgctcgaaccgctccaatcatttcacatcttttctttgctgatgacagtctcttttcagccaagcaactcctctgcggctgaacaatcagagaggtgctacatgattacagtcttgcctccggaaagatggtcaatttcgacaaatcctctctctatttctcaccctaatccaactgaagacatcaagcaccaaatcacta

SEQ ID NO: 175581 - DNA, 594 bp, Cannabis indica
acaaaagcttgtccttgttttttgtattcacctataacggttgatttggttctttgaataaagaattgttgtaattttaactttaaaaaaaaaaaaaaaaaaaagaattttaaaccttgcttacaacttacaactatactttcattttaatataattatgtattaacttatattctattaagtttagtgtatttcgctttagcctcatttaaattgactaaatcgtaaagatatttgtggtataaatacttaatatttttgtttcattcacttatatacaatattttttttttctaacgaataaaatacctgaagttacatgttcgtatcactactagtccgttaaatcctatccaaacagaagttatttgtggcataaatcctattcaatctaaggcgacgtttggtaatactgttattttttaatttttttatatcacaaaagtgaaagtgaaattttgttttttgaaaaacaaaatgtatagctactttcttctcttaattttaaaaacaaaaagacataagtgtgctatatatatttatttaagtgacgaataagataattgggtgagagaaagtgggtcgggttagcac

SEQ ID NO: 175582 - DNA, 1038 bp, Cannabis indica
gtagtaccgaacgtgagcaggtgtaagaagttccatgacacttgcaagaacctgatgatagatacaagaattgaaattggtggtgaggaacagagcactcgagtttctccaagatctggtagctgggctgaggaggttgagaaagctgatttccagtcaagtgcaaaggagatatggagcaaattcaattggaaaaccggtgatgattgataaggttactcaagagcgatctatggtgaagtttgttcatgtccttgttgaaattgagatttcagacgatccaccaaagattatatgcttcattaatgaaagaaaacagttggttgagcagtcggttgagtatgagtggctcccaactaaatgctcggcttgtgctaatttgggacatactgttgctaattgcagtaaagagaagaaaattatagggaagaagaaacaaagtgttgaaaaagaaaaagtgctagacaagcaaaaagctgatatcaatcaagataaagatccagggaagatggctgatcttaggacagttgttaatgactctagactagatcagggagataaagtagtgcaaaagcaatcaggaagtgatgaaatagatagagctgagaatgacagtaattggattacccccaaaagaagagggctgagacagagtgaaggtttaaaaaacctggaagatcctataattgccagaaggaataatggatatgaagtgctgcaggctgctgcagtagatgaggttttggttactaaactctaatctttttgatggatgcttgtaatatgttagggtggaatgtgagaggtttgaataaaaaggataagcaacttgctattcttgatgtgtttagattgaataaaattggttttatagctttatttgaaaccaagattaacattagaaaatatttgatattatggagaataattttcctacttaaaatttctattctggtaatgtggttgctgggagaattctgcttctctggcagaagaattatgtccaggtgaatgtcattagtgaggacaaccagcttg

SEQ ID NO: 175583 - DNA, 751 bp, Cannabis indica
accggatctttaagaaccttcaacagcttgtgttgagccaatagagccctaatcttcttcctccaaatacgataatcacctgaaccatcaaacttatctatatcaaccttcatggaactcataattgtatatgtataaagttatttcaaagaaattatatagataatgagtttagaaaaatcctggtgttgttctttgcaatcttggttttgtgtgtttgaattcttgctggtatgaatgtgaatcttgatgctttcttgatgatttctttatgctttctttatgctttcttgattaatctttgctgcagattgtgccttgtttggctctgataccactgtaggaatttttattcctaactaatccctacacacagcaaagtagtagtcaaaagcaaggtcaaattagacctttacccagtcaaaccacctttttgactccctgccattaaatcaaacgacatcccctatttccaatttatacaagtcgtatgtatatcaatctgaaaccctaaagacacacatatatatattctcttttggcatttaaacacatacggcacaagcaaaataaaccctagcagatctccttctttgttcttctctctgaagaatacagagacatcaaccagaaaaataaacccagaaaaactcaaccccctaccccagatccaaaacacccccaaaaccttaatcccttaaacccgacgcaccttctcgttgttcttcactgaagaacacgaagaacacca

SEQ ID NO: 175584 - DNA, 809 bp, Cannabis indica
atactccggctgctggtcatactccagcctgtaccgacgtgacagggttggatggttcgaagccaacatacataactaatgtaatctaacaggcttcctacatgcacgctaaacatgtaatctacatatgcatactgttatactaatcttacctggattccgaattcaggtgtgccggtcaacctgactggaactgaagctgagcggcggattactggctcctaaaccataaaaatcacaacgctataagtgacacgctaaatcacttcccggggacttaaactaggaactaaaagtttccctatcgataaaaagcatggcaataacccctaaaaacccaaaaaaaaccgaaacgggaaaacgtaaacgggttacgttcgaaaaataacccccacctccggaacggtaccggcggtcccgaaccccggaaacgttaccggtttccgttcgggtaaaaggtaacttcgaacccgtacccataccggaacgttaccggtacgtgctcaccgaacgtacgttcctcgcaggcagcaaccaaaaattcacatatcttgaccaattcgaacccaattgatcccaaactttccagacctgctctataggtcccaaagaacatatccaaggcatcaaacctacccagaaaccacagatacaaaatttgccattaaagctcaagctttgagttctaaactcaaacttgagcaaatccctctatcatgcattcaaactagctagaatctacttaaaccaacataattaagcctctgcaaacaactaaaaacatccagcaaccatacagcaacaaatca

SEQ ID NO: 175585 - DNA, 722 bp, Cannabis indica
tacgaaaatcccggggtttatgctatttttcggaaactaaagttagtctcgtcaagctaaaaacagaggagttccctcactacgaaaggtgatggacgagttcaggctctttttaaatcatttcttcagtgaggggttccaaacctcgcacgtatatgggtcagtctcctatccttgccgctgttgacctctctcctgtccagccacagagcagttcgcagacaggatctttctcaggcttgcagacctacagtctcctctcgtctcctttctttcattcagcgactgggtcgccatgaaagatcttggtgattcttcatttcttcttgggaatcgaagccaaacgtacactgctctagtcttgactcagactaaataaaccttggatctgcttactcgcactcatatgcaagactccaagccgtgtcccacaccccttgcgtctggctcaaagctctctgcatacgatggtgctcctctctctgatgcaacagaatatcgtagtattgttggcgcccttcagtacctccctctcaccagacctgacatttgctatgccgtcaatcaagtttgtcagttcatgcacgctctcaccaccgtacatcctccaggctgtagccatcttacggtatcctgaacgggttctcttggccttggcctaaccatcactccgggccgttaaccaccttctttgcattctccgatgccgactgggctggctg

SEQ ID NO: 175586 - DNA, 1052 bp, Cannabis indica
ttggtgttgggagttcaaatgtgaattttgcaacattatggctgagttgagttcgctttacaagtttaaagtccttgaaattttcaggatccaagcagcctaataacacaatatgatgttaaagaccatttgcagaggcaaacaaaaatcttattgaagcaacaaaggtcaaatttttctaagcaattttctaaatgagagatagattagtttcatcctagaaccaaatgcatgtgttatcaaatgagaaaaaagaaactatatcattgtttcattcattgatgtagaaaattaagagaatctcaagaacattaattcttatataattgaattagaagcaaaatatcaaaaacccataaacaaaaatcagcaaaaaaacaatcataacaaaagtcaacaatggagattagagagtgaacctttaggcttcctagaagaaaagaggaaaacagcaccaatcccaatagcaacaaaagctacagcagcacccacaaggagatgagaatccactgactgtaaaaactccattgattcaaagaccaaatcttgaaatgggtaatgaagaaaatagtccaattgggttgtggaaatagtgggttttcctcggtttctccacactaagtagctgaggagagtggtagtggtaatgggttaggtgaaagaccttacctttaatgtgaaaaagccatgaaagaatcgaacaaagaaaaggggatctggtctagctacctaactacaacgaaggcgtgttcttcaactaatggtatcattttctgaaaattacatttatatccttttttcttcttttttgctcatattttctagacttacaaaacttctatttatttggatttcaaaattttgtatgaagaaaactatttttattagattttcttaaaatatatttatacttagtaaatttttacaagaatttgtgatgtttgtcttaataatatttttttttctaactaaaaaagagatcacgtggtacagatttttttctcactttttcggtagttttgataatctcgaagaccacgagtcaattataa

SEQ ID NO: 175587 - DNA, 907 bp, Cannabis indica
ctatagattgccattagaaagaaaatgcttcagcatcttactaaagtaagttgcttgcattagagtaagtaattaccaggtataccacaagccataggtttagataaactcaaacctataatactaggaacaggaagttttgttaagtccattgaatagacttattaacgaaaatttccttttatgtccttgtaatagaaaactttaggttactccatgtgaatggattaaaccatagttctattggcttttcttcttagtttcttatcttgacaatccattacttgtttaaactcacaatggattttaatcactagtgtcttccaagtcataagaaggtgagttcctagaaactctcccactacgacaaggtaccgtgaattatgtctaagaaaactaaatggtattaacctctttggttgttgttaagaacaacaacgagggacggcgtaggggtagggtactactactactaattagttcgtaaactaaaaagtaaagtagtagtaagtaaacgaaaccttttacggttttaaggtaactaacgaaaaaaagtaaaaaattacttccctttacctttttagttcgtactttaattttttactttacgacgttaacgttacgtacgtttttttttcttagaaaagtagtatttgttgaaacaaacactttcttatctaatgactatgggatggtccacccctaatcacttagaatagctaacaaacatgcaaaccttggttaacagttctagcttttcttaagattacgattaggtcatccatgaatctagtaatggtttacactaagtacccaaccattccatcattctgaaattttcctatcactagggtatatccctagaaggacttaggcaacgactagtaactaatcatcaatatgcaaa

SEQ ID NO: 175588 - DNA, 686 bp, Cannabis indica
gttgcttgcattagagtaagtaattaccaggtataccacaagccataggtttagataaactcaaacctataatactaggaacaggaagttttgttaagtccattgaatagacttattaacgaaaatttccttttatgtccttgtaatagaaaactttaggttattccatgtgaatggattaaaccatagttctattggctttcttcttagtttcttatcttgacaatccattacttgtttaaactcacaatggattttaatcactagtgtctcccaagtcataagaaggtgagttcctagaaactctcccactacgacaaggtaccgtgaattatgtctaagaaaactaaatggtattgatctcttcggttgtgacaagacaacagaggcagtagggtagggtactactactactaattagtttagtttaaagtaaagtagtagtaagtaaacgaaacctttacggttttaaggtaactaacgaaagtaaaattaaaattacttccttttacctttttagtttcgtacctttacgttttttcgtttttacgaacgttaacgtttacgtactttacttttttacgttaaaaggtaaaaaggttagttttagtttttggtttaacgaaaaaccaaaacctttacctttttactttacttactttagttacgaaactaagggtagggta

SEQ ID NO: 175589 - DNA, 704 bp, Cannabis indica
gccataggtttagataaactcaaacctataatactaggaacaggaagttttgttaagtccattgaatagacttataaacgaaaatttccttttatgtccttgtaatagaaaactttaggttactccatgtgaatggattaaaccatagttctattggcttttcttcttagtttcttatcttgacaatccattacttgtttaaactcacaatggattttaatcactagtgtcttccaagtcataagaaggtgagttcctagaaactctcccactacgacaaggtaccgtgaattatgtctaagaaaactaaatggtattaacctctttggttgtgacaagacaacagaggcagtggggatcactactactaattagttcgtaaactaaaaactaaactagtagtaagtaaacgaaaccttttacggttttaaggtaactaacgaaaaagtaaaaattaaaattacttccttttaccttttttactttcgtaccttttaactttttttacttttacgaacgttaacgtttacgtacttttacttttttacgttaaaaaggtaaaaaggttaagttttagttttttaaacgtttaaaaaaccaaaacctttacctttttactttacttactttagttacgtaacttagggtagggtaggttccggtacccccctaaaccccttaactaccttaacgttaaagtaagt

SEQ ID NO: 175590 - DNA, 653 bp, Cannabis indica
ttagctaaagcaaaaaaggctaacctttaatacgcctaataacatggctcctactagttttgacctaattcatttagatatttggggtccttttcacaaaaccagcattgaaggttatcgatattttcttactattgttgatgatcacactaaatttacttgggtttatatgcttacaaataaatttgatgtcaactattattataccacaattttatgctcatatactcaatcaattttccatttctattacaggcatacaatgtgataatgcaaaagaactaaacttatcatgtttttttactactaaaggcattgttccttatcattcttgtgtagaaagaccacaacaaaattctgtttgttgaacgcaagcatcaacatatactgaatgttgctcgctctcttgcttttcaatcttttttatcccttgggtattggagttactttattaataccgctgtttacttactaaatcgcacaccatttgttttacttaaccttaagtcttcttttgagttgttgtataactagttgccctcttatgatcatctccgcacttttggttgccttgcatatgcttccactttggacagctcacgtcattttccctaagatctcaggcgtgtgcattcattggatacccggttggt

SEQ ID NO: 175591 - DNA, 701 bp, Cannabis indica
cccctgttagagctggaagaatgtagtccctcagactacgaccatttgcttgattttcaacggcacctccataattaccattgttgcctccagtgttaccgccattagtattctcagccatgatttcttctgttttagcagttgctgaaactctttcttgcctcttgtttcttctgtttcttctacaagtcttctcaatttcaagatcaaccggcagtattacactttgtccttgacgtcgcatgcaccccgaatgcctgaaataagacaatctaaaagaaacagattagcaataagcacgaaaaattaaccaaagtagaatttaatctaattttttataatatcaatttttaaacaatttctcgacaacagcggcaaaaacttgttacgaaaattatgaacaatacgtaagtgcacgtaatcaagtagtaaactcacacgagtgaggtcgaaccacaaggaattgaactgaataccactaacttagactatgattctatttggtagataaataattttgatagattttaaaataaagaaaaacaagaaaattaaataaagcaataaaagtgtttaatcaaggatgaaaaattaggaaaaagaatcctgttgtttcgtttacccaattgttaatgcctaattgctatcattttcttgatgtgaatgacagattataaaaataaacctaactcttttcagta

SEQ ID NO: 175592 - DNA, 1277 bp, Cannabis indica
agttgcaaaagtgagaggcttgtttccttattccatggccggccactatgcttcctatttctcattttatttttcatttttaaatgccaagtaattcaaccttaaccctatgtggtattctataaatagaaggtaaaggcttcaggttttacacacacattactgtattatttctttcacacaaacactctgaagccgccactttccctctctttcttctctgtttttcgaaattcctttgagtgatgagtagtgcccacacacatcaagtggtacctcaatcatagtatgtaagactatggaaaatcagcaccaacaagaaggagagaaagagatccagattcagatcttgattatgctctgctacagaaaggaatcaagggctagagatctgaatggaaggagtcattatattccgctgcacccaatgtaaggttttcttaaactcttatgtgtttatttcattgttttagaattcatattaggatgttaatcaaacatacttggtagtaaatctagatcctggtaaaatatttccaacaactggcaccagagccatggtaatgatttactttcatgtaatatgaattaaaacgatgttttatatgttttgtgttgatttggatggtttcatgttggtttatgtgcttatgtgatgaatgtttgtgttgtacgaattttttccatgaaaaatattttttctatttttgaaaatattttatttggattccttgtgaaaaattaagcaattttgttttttacggaactcgattccgataaaaattgaaaaagttatgaattttggaaaatcgggattcaaggctgtcgagtggtgcatcaattgcgaattttgtgggtttttttttccaaaaatccaatttttatgggattgtttcccaaaatcatttttccaattttagatttttccaatttgaaatatttctctttttccaatatttccaatttagaatatttctaattttaaatatttccttggtaagatttaaaaatttgttaacttatttattatttatatattatttaattataagaacagatattttgatatttaacatattttaaattaaaagataattttgtctttttatttaaaatattatattaaaattatcttatatgacaaattaaataattaataaacttgaaattaacatagatatttttatagatacacttaccataatattttcaaattcaaaatttgttattttgttaaatatttaattatttataaattataagtttaaaaatgatat

SEQ ID NO: 175593 - DNA, 710 bp, Cannabis indica
agtgtatctgtaagtatccataaagttgggcattcccaatgaatataccatgggtaatgcatggtcaaatccctaggtgctgtagggtttttatgtggaatgtccttattgccttttgactgatgtgactcttcacagtgtagccgtcgctagacttaaatgatcattactgtgcagctgttggttggaggttgtgccgtcagactttattgcgtgtagcagtcccaacacgcttcctcccatgcggcatttaatgcgacttgattgctcaggagaaacctgacacctcgcggagatgccttagcgttactcgagcttccgggagcatatggagttccatatgccttctccgggagctacgtcctggacgctaccttatggcataaagacttagcaaatattgtaaattgcttgatccacgtgtccttatctggttggtccacgtatattgggcaaaatcaggggcaacagatactttaaataattacaatattaacaataataaaaaattaaactaaaaaattttcacaaataccaaaacaaataaaaatacatcaatagattcttgaaaaaaggtgtattataaactaattcaatcaatatatatacttaataattattataaattaagatatattcgtacaacaccacttatttgaggttcagctcaatttgtaggtacacatgacagttaacaattggatgcttta

SEQ ID NO: 175594 - DNA, 600 bp, Cannabis indica
atatccaagtagtgattctgattctgattgctcttctttttcaccatcatcatattgacattcagtagcatgagggagtgaattcccatctttatatgtggaaacatttctcatatatctgcaggaggtaaaaatatattacatcaaaaacagaaaaaaaatgaaaaataacagtagaatgcttaacattgtaccactattaggagtgaggagtgttataaagttgcacaaaccctccacgatcattgataagtgcatctaattgagggtacaaaatttcaaggccaagatagatcaagaccatgctaaagaaaacgtcaaattgtagtaatttgagatagaactggaatgcatgtgatatcatatggtaatgttcagtcatccactgatgctaaaaatctactagcacaatgagaaagaatgggctgagttggaatcccattctaactaaggattccttttttttttttttggccatagtgaacgaaaaccattcacttgcagaagcacagcaaacgcaagattaattccaattccatttatcatggaaatatcccgaggaacttgtgtgcatgggcgtgtgtgtgtgagagagagaga

SEQ ID NO: 175595 - DNA, 902 bp, Cannabis indica
gtttattagtagtttttttatgtagacaaaaagacaataataaataaataaataatactaaaaaaaatggacatttttgactacaaaatgttgaaagtggagatattttactaacataatcatattgattttaggtcattttactataatttttccaatatttattttgtaattttttacatgagatttttgttatagttataatatcttttacagtaaatttttcaaaaatttttaaatagttttttcgtattaaaaatatgttgaaggttttttgaacatgtatggtaaactagaataccaagattatgttataagtactgctatctaaattttgtccacctgacgtatcatgtttacgtggtcaaaagcagaagacatgtggagaacagctcatcactaacctgcaaggttagtgttgtgcaccttctaacttaccagattactattagtgcctgcagccttccaactgccaggactatatgttgtcactacaagaaatattgcttttgcaccggcaaaagtatactatatgccccgacatacttttaccgacacataattgcgcagcaaaagatgtcagctattgttggtcggtgaaggaggttttcccgacacaattcaccattaagttggtaaaacatgctttaccagcaagaataagcgccgaaaaatgtgtacactagaataaacaaaggccctaatcttccaatagtcagcataacaaaacttttaccgacgtattaatgcgctgataaaagtgtcgggcgctttttgactgattggcacgaagggttttactagcgtaacattgctctggtaaaacattttcacgccaagatatttttggcccgtattaccttttatctgcacagtaatgagcccgcaaaaaggtaaacaaa

SEQ ID NO: 175596 - DNA, 675 bp, Cannabis indica
agcatgggaataggaaaatgaaatccaacttgtgtttggtattgtttttttaatttttttaccggggtgcttggtttgtcatggcttaagatgacattgatttgggggtaatgtctactccttccaatttttgggtttaatattactcgaatagacaaaatactactgtatttttttaacgtgagctgtactaaattttattaaaatattgcatataattttatctatatatacaattatatgacattggaataagtgaatgatatttaaaaataaaatgtatggaataaaaaatgaaaatcattatacttccatatatatttaattgaactttttctttttttgaatgaaaaaattcttccgctgaaatatatataatttttgatgattatttaataataaataatttttttataaaatatcaaaactttagtaagtagtttttatacacaaccaaacaaattaatcttgcattcctatgctttaatattcccgtttttaatgtccaagaaatgctaaactgattcccatcaagtcaaactttgtaacaaacgatcccttaatgctttgctttaattattttctatacaagttgcatgcttggcaccctgggaacctagaagctaaaaagtggctgatgaatggaaaagtgccatgtggcacatgcatggagag

SEQ ID NO: 175597 - DNA, 1441 bp, Cannabis indica
  modified_base (42)..(42): a, c, t, g, unknown or other
tccaatcaacagaagagattaggcttagatctggtgactacnctgctaacagaaaaggattaacaagggttagagatctgagtggaggagtcatttaatccgctgcaactattgtaaggtttctcatacctttatgttgttatttcattgtttagaaattcatattaggatgttaaaaacatacttgttagtaaatctagatcttggtaaaataaattccaacatcaacttgcccaagtatgtagtttagcttggagttttatgagtatagcttcacaattagagaatttctactttgttggtctaagtttcacccccaaatatttcatagggaaggaaccttcctgaaatggtagcaactcaagcatggtctgttttgaactactttgcacccccataaagtagaaaaattatttgctcttgtttgcaacaaggcccaagctgcaactgaactcctgaaaggctgccgctatacatttcatagagggatcatttcctttacagaaaactataagatcatccgcaaagcacaaaatttacaagagtaagactttttacacatcggatgatacctgaactcattattcttagtgtggaagtggagcaatcatgtcaaatattccatggccaagacaaagaggaaaggagagatggggtatccttgtttaagtccctttgcaccattgaattttccttggatcttaccattcaatactaatgaataagatgtaccctaaacacacaccatgagccattgtacaaactaagatgaaagtgataggcttttagcagtctttataaaaattcccaatcaatggtgtcatatgctttactcatattaatcttgagtaaacatctacaggacatgagatgcctctgataaccctttaacagatcccccagaatcataatattatgagcaagcgatatacttttaacaaatactccttgatttgcattcactaataatggtaacaccttagcgaatctagtgcaaagcatcttagatatgcatttataaagtgtgttgtagcttgcaataggccggtaatcaatagcactactaggattatcattcttaggtataagagtgcggcattcatctcattaggaactcgaccttgtttgaagaatttcaagacagctgcagaaatctcccctccaactcactcgacatgaccttaaaaactttgaaccatatccatctagccacgggcttttcaggttagggaattaaggcttttttgacatctttaacctgaaacggtcttaaaagaagcaattattagtctaaggtaagctgaggaccttcccttataggatccaaagtcaaattttgtgaaactgaactcagactcctcatgaacttcctaaaatgagacaaaaagtggtcaactacaatgtaaaaaatttaccactttaacctacaccaaacaaaata

SEQ ID NO: 175598 - DNA, 576 bp, Cannabis indica
aaaaaaaaaaaaagaaaactctgactttagtttaaacttatgaatctgatggttcaccaaactttattaaatgtttcattgactcttttttttctcaattttcattttacttctactgcacttgaactaaaaatataattaaaacaaagaattcagtgcaaatagtatcatacctgatttccaaacccaattccaacaccaagcaagattctacccacaagtagcattgccatgttgatagcaaaggcatttagaacagcaccaataaagaagctgattccgccgcatattatgctagcccgccgcccatagtttctggtgactggagacgcaaccagtgtcgccaccaaaccagctaggtaaagagaagaggtgaatgctgaaagtttttggctgttgtacttacagtagttattttcatgagctgatttcttgcttttgtacacttctttgaagaagtgggaaagaaatccatccattgatgtaactcctcctgtatcatattattcattctatagtcacacatttttctaatccaaattgaatatcctaacttctctttattctctttgaaat

SEQ ID NO: 175599 - DNA, 510 bp, Cannabis indica
gtgagacggtgtggtaattgtcttttagatgactcaggaatatcctcaactaacgattggtttggtatattaaccgagagatcctgcaactctacatctgaagttgtttgttgatctgaattacccctcatatccaagcattcatcactagaatctaattcatttagttctatgttttcatgcaaggtgtcaccacttgtatctaattccacactttcatcagattttttttccatatcaagccttacctcttctgcatctgtcacaaggttgtattcaaaagtttgaatttcttcaagatactccccctgaaattcaacctcagagtaatacattacatcttcatggaaaacaacatccatagtgataaacatgcgtcgagtagggggatgataacatctatacccttttcgatgcaatgcatatccaacaaacacacatttcaaggctcgaggcattaacttacttcgttgatctttgggaaggtgaacatatgcaacgcaaccaaag

SEQ ID NO: 175600 - DNA, 834 bp, Cannabis indica
ataagctgaatactatcgatcatcgctggaagaaattgaaaacgaaaaactgccaaaatcaacaaagttttgaaaaaaggaaatcacttgtaaggccacggccttgcaagcaaggccacgaccttgtaggttttgggaaaacttgaaattttgtattataaaaaaggggctgatggcaagctttgtacaccattcgaaattttagaaaattgtgagtgtagattgagggcaaggagcaaaaggcatcattggaggattggaggactctaaagagtgttctatcttctctatctctatcttttatgtttttaattggatttctattattttagaatatcttctagtatctaatttctttttaaggattattatgtgaatcacttgaatttattttatgttttttagtggtaatgctcccttcatttctatttgcaaatttaaaatgtcagtaaaatttgactataaaatgtcaattggatatgccactatttacatgtatatatatgtcatgtttttattactccaattaattttggttatttaaatatcataaaaaaataaatttaaactgtggtaatcttagttgatatttaatgatcaaatgtaaaaagaagcaaaaaagataatactatcacaaaaataaagataaaaattaaaaaattaagtgtataaaattaaaataaattactcttatattattaattattaaaataagagtctcttctaaaaactgttatttaatataaaaattgatcaaattaataattttgtaaaatataggattgaaaataatattcacctttaattaattagaaaaaagaatgtaatctcttc

SEQ ID NO: 175601 - DNA, 1273 bp, Cannabis indica
tcgtaaatattttgtgtttttaggtatttattcaataatccctataatttgaaaaaaaaaaaaaaatggggaccacattaatggactgggttggaacatgatatgacaaggataacacaattgagtagtttaattaggcaaaccagatgctaataaagcctaaaaacgtgcagatgtagtggaagtggtagaagtactcttcaaattatatattgtttgaccaaacgaaaaataaatgcaaactttgctattgtttatgggcacaatattcactctcattcaaagcaataattataatactctatacctccccaaccccataatccatatatgtataatatagaataattcatggaaagtcaaattcagcgtatggagttataacggactattaactgctactctagtcaattaaattcatttggtcataattgatcttcttttatagagtaaattgcggcaaaaatacctaagttttattctgagtagcagataagtgcttaagtcttatttttagcggtaaaaataccttccgttactaatgtagaatttccgtaagtacctcaccgtttacagccacataatgtgccacatgtcaccttgtaattggaccacatcatttaaaaaaatacagtcaacaattcttttttaaaaaaattaccaagtcacctaaatattgccacattactaaataaaaacgaattaatttatatttttattaaactaaaaaaaataaatcatatatcattttcttcgtcttcgtcgtcgtcttcttcatcttctttttttcttttttttttttttttttttgttcaggaactacattcttttcttctagtctcttcatcttctttgtatctagccacaaaattagtctctttcactcttcaatactcttctagatcttgcaatggtagaatcccctttagaaacctttattcctcaagaatctcaatcatctacgatagaactccttcgggttgctgacgatctccgctcttgcacgcaggtcttcgcttgccatttttccccctccaagatgattttttctgaaacccttaatttcaattttgttatgtaacgatttgggtttgggggtaaatatagaaacaaacattggagttattagggttcttgagctaaatttgggcctcttgtaaatgtgtaccgaaggcttgttgtcgcctgaggaggaggagttgccatcgccgatacactccatgtcgagattatcaacaaccattgacacgctctgctcctcaactctcccccg

SEQ ID NO: 175602 - DNA, 585 bp, Cannabis indica
cagcgacggtctggtagttgccgcctatgcccaacctcattccgggggaggctcggtcccaaccttggaagcaaaatctctcctttcagcgcttcagtggtgtatcaacgagcatttcttagtccaagaggtggaaacagattgcaaagccattactgatgctctctctggccataaagaagatatgtcggtttttggtgacatcattaaacaaatcaagaatactttatcttttttcccagctgctcggctctgccacattaatcgtgatgccaacatcctggccgataaactagctcaccgagctcttgggttagatgaagcagccgtttggattggagacgacccctgcaatttatttgattttctgtcttcctagtgggctcctttctttacaaaaaaaaaaaaaaaaaaaaattttcaaaggacaaagatctacagctattaaaaagtgaaatagtgagtgttttgaaaaatgaacatgaatagaacataatcacaaaataaattacacatttatcgtacattttgataaaatttaagggtagtgaaattcagaatgtcctaaaatctgtattttctcct

SEQ ID NO: 175603 - DNA, 640 bp, Cannabis indica
aaataaaaaaaaaaaaatactttgctttcttttgaaaattacctaaatatagttgttgaattcaagtggatcacttactgagcttaaaactctattagcacactattttatcatatgtgttgataatcaaagtagtactttatttgtggctaatccagtatttcatacttgatcgaaatatattgaaatcgaaaaacatcaaattttggctaagtagttgtttattcattatgttcctgctattgatcaagtagcggttgctctcactaagcctttgcctaccgattgtttcaactattttaaatctaaacttcaaatgattgctacctcttttcgtttgagagaatatttaattaattagttagttaaccaattgtcagttagttgttaagatagttaattcattttcttgattcagttatgtaaatgtaatcctgatattgtttgctctctctctaataagtgaattaagtttttgctaagatgatccactattggcttttctctcaaatcatgcaaagcatgatttagtcatttacagaacacaagtgtcatttattaatttgagaaagtaaaaaaatgtattactatttcttttttctttatataatattatcttttctattttatttttcaaaat

SEQ ID NO: 175604 - DNA, 500 bp, Cannabis indica
gaaatatgtgttatcctcatcatcaacagtgagtgacgataaatagcatgaattagatttagatgatgtatggtcattcatggaggcaaagcacatggactggaagtggaaataattagtttgcctagaaggtacttatatggcattttctggcagagaactataattgcaaaagcatctaatttttattgactaaaatctagaaataaacattgatgggacatagtagtgtcatgaactattccgtctgtgccttggtcgtggatagttatatacaactaggattttgctttttctataaccggccccatgatagtaatagaagtcaaagaaacagtagtgagaattttttaaaattttttatttttttttctttaatatccttcactttaacaagaaaagttgcaaacaaatactcatactgtgaggtccatgttttcggccaaaaagttcaccaaagatgtcaaaatagagcactttctagctcaacaaacagagta

SEQ ID NO: 175605 - DNA, 716 bp, Cannabis indica
aaacctaaactttgatctttaattgcatgttttagtttactaggtttttttgttatttattgacttgaatatgttgtgtatacccgaattaggtactctagaaggtttggttatgtttggtgaagttttgagcaagaaatgagattttttaggtgaactggtgcaaaccagggaaccagttttacacgtacttgtaaaacctttggcagcgttccctaagtctttcatttactcaattcttgtccattccgtgccataattgggtgattccctacctcctcaatgagaataatccatagagagtataacagaacctagggttgtaggttcagatttccccgattagggtttttgatcatgtgatttacccggtttcattatgtgattagggcatccatctagcacgagactttctgttcaagtcagccggcacacttgaatcttgaaagaaggtaagaactgtgtataatgtgtgatatcaatatttgagtgtatgtatatgttatgtgtattagaaatattttaacaggatctagatttactaccatgtatgtttcattaacatcctaatatgaattgtaaaacaatgaaataaacacatataaagtttaggaaacattacattgggtgcagcggaatataatgactctccgttcagatctctagcccttgattcctttctgtagcagaacataatcaagatctgaaacctggat

SEQ ID NO: 175606 - DNA, 519 bp, Cannabis indica
gatgagccttcaagtcttgctcaggcaaatgctttgcaaaatacaatgtcttgtttttaatcttacttgattattatgctttcatacttctagtgcttttctcttaaccatgttgcttttatctcgtgcagatccgggctcctaccccacctccatcactgcatccggaaccaaaagatgcaaggagatgctcacccattacatgaatcggtcggtccctgaagtgaatgagctgctggtcggagctgacaacgagccttccctagagctgttgatgggaggagtcctgaaggagtttacgagggtgagtctttcccgacagtttcctttaatcctcctttacttgactcagattctaacgttttcctctgtgcagactggtttgaagttggcttacacttattctcgaactaagtctgctgcctccaagaatgctgccatagtccaacaccataagggcggaagtggacgtggccaaggaaggacgctgatgaagaccatggttcaacttggagccgt

SEQ ID NO: 175607 - DNA, 658 bp, Cannabis indica
gctcactcactcactcactcttccttttctgctctccctctctcttttccacttcttctacagtaggttgcgttggttttgaaggaagaaagaagagagagagagagagattagaggaagaggatgaggaggaaggagaggaaagagaaagagagagaaagaagcagaagtgttgaacgataaaggtttagagagagaaagaaatggaaaaaggtaacaaaggaaaatatatagttttttaaaaaataatagaaaaaaaaaaagtgaaagaagaagaaactggttaatgtactcagaattgaacaagcaattaacttttgccacgtgtatcagaactattttctttttttttttttagaaaacttaacagtggtgggatattatttttctctgtttgtggatttctagctaggagccagctttatttgtttatgctaacgaattgagttagtgtttttaccaatttttaacgcaaagaagaaatagaaaattgatgaagaaaaaaaaaaagtggtgagataattcttatgtgaaagaattgaataaaatgttttgaatgcagaacttagataagtgttatattaaaatgtacaattttttcagaaatttatagcaatacatttaaataatttattttacacttctataaaataaaacc

SEQ ID NO: 175608 - DNA, 756 bp, Cannabis indica
gttgtttgataattgaaggtgccaatagagcagcagatggatgcgattgattggctccatgcccaagaccagcttcttccttgctgttttttctctggtcgaagcccaaacgaaagttacaatctttttattgaaaatagcaaaaacaatcaaaatagttgtaactctaacttggtgagtgttgccggagtgggttccgctgtctttttcagacatcttcatcctttttcatataacgactggaaatccataaagaggtatgttcctcattagtatatattatcacattatattataaggacgagattataataaatgactttgaaattatagtattatatgaggaaatattgtcatttcaaaataaaaaaaaatgattttttatactatttaatatttatattattttttgtcatataaaaaaatttataatttatttttatttttgaaataaaaataaattattaaagattataatatatctatattagttttattaatttttttattttattttaaagttgtgttgtatttttttttaattttttattgagttgttggtatataaattttgtttacattatatttctattttaatgtatatacatataattttattggtcatggtacatatatttaattatcttttgtatatattttagggtacttttttatttttactactttaaaatagtttttttttcgtcattttttaggtaattctacatagaaatcaactagcgctgcaaccacttt

SEQ ID NO: 175609 - DNA, 567 bp, Cannabis indica
cctcattttggttttgaagtgcacctaagaattttacaattgtgtaacggagatgaataaagatagaaaaaaaaatgtaaagaatgttttacaattgtgatcagtctcagtcatcaagtatattattactaatcttaacattcaaccttctaagccaaatagaatgaagaatcatatgatacatgtcgtatctcttaggaggatcattcaccacaaaatgtctttgtaccatcttcactcccttaagcaatctcaaatacctttcctcagagattcccaacaagatgttcttcagctctggtatttcactcacagacacttgaacagagaacgtctcccaatccaaaacatcgctgaaaggcagcacataacgctgagagattaacacagggacgcattccgcatagattgcttctactattctcggactcgccacctcgtgcccactggggcatatgcagtacctgctttcttcagcttttcctcgtagaatgccttgaggcagagactcgtacacttgcaactcttcgtctttcgtctttccaatgctgcagcatgccggtctag

SEQ ID NO: 175610 - DNA, 765 bp, Cannabis indica
cccacaacttcatgcaaaaggcctctttgagccaatgcataagtgctcttatgagcttctttcatgcagtcaatgatctatcaatcacccaaaaccatgaattcgccctctggcttctgctcgtgtcgactcttcgacactgtgtcacaagtccatctcctaaaatcaactctgcatcctctgacgactcactaaatttttacaaacttgataacacgaagtcttactcttaagacttgaagtaatcctaatccgctatctcccatcggtatatgctctctgaaccatttatcttacagtgtcccatacaacaccagtattcccataaacacaaaacacgcccataacatgccacaaactagctcagtcttgatctcagcctatgcctatgcatattatctatatgcagcttccaggaaacatgtaagttgttatcccgaaattggcactctgacgtggcatcacaagaatggtaacacgtggcatcaacttagagcacctggtcggatcaacatgctgagcaggatgccttgttggcatgtccatgatggaatactcaacgagccgtgcagaatgagcaacacttagcgaattcagccaagcacttcgtgagtcaccagctcaatccctataacttagggatcaaacttgcgtggatacgacatacacacgacttccactattagtgtatacggcctcaaatcccacgatcctagcattcaacaatgatcccactaatctttgtgtttatgcgctttgtaacgt

SEQ ID NO: 175611 - DNA, 733 bp, Cannabis indica
ttgaaaatattccattttaagttaatatttgaaaagatattaacttaaaaaatatctaaagaatcttaataaccaatgcctaaaattcctcaacttaattttcaaaatttgctaactacttttaaaaatttaatgttattttataaattaaatattcaataaaaataaaaaagataaataaatatctttttcagattttatgatttaatttaaataaataaaataacaaaatttaaaagttagcaaaatatcttacttctatttaaaattacatgattatagttatcttattttaaatttaaataaggtcaaattattaaaaaaaatatttaatttaaaatttaaaatctgaccttaaatttaaaaataagataagatataatcaaatttaaaaataagatagataattaagcaaaaaagatagatatttactattttcaaattcaaattacactaatatcatgaattaatttaaaaaaaattaattaatttaattatgatatttagaattgaattaggaatagtaaatgtctaaatacaaaactacacaaaaaatcggaagttaaatccatgaaatagcatgaaaaatcgaaagaaaaacgaaaaaattagcgagctgtacggacagtatgcattgcatactgtccgtgcgcgcaaaagggagtgcttgggcgaggaaactcagcgcaggaggctgctagcagcctatccgcgcacaaaagctcggtttcag

SEQ ID NO: 175612 - DNA, 790 bp, Cannabis indica
gtgctaccccgcttgctggaggaatattgtccactagattatggtgaaacagcaatgaaaagctgctcttcacacagttcttcaaggtatgttttttatttttcaatcaaatttgggctgctatcatgtgtgtttacattcgcttcactgctggccttcaattcttaatatcagtccgtcatactgcttttgtagtattatgattatctgaatcatccttggactttttaaattgaacaaaatgtttagtgaggaatcatgaaatcttgaattcatgtttattttattgtttctgtttcacgttaacatctaggtctgatttgcctgtatcccaatttgttttatgagatacgaattcctttatgatgggactgttgttctacaaaggctcagattgtgctctttgagataaacaagcatgattgttaaattgaccagttggtgctttttcttttcttcctagatatttaattcaagacaactggcattgaaactaatagcaaatgtaacatatgggtatactgctgccggatttagtggccgaatgccttgtgcagagcttgcagacagcattgttcagtgtggtcgaagtaccttagaaaaggctatatcctatgtaaatgcacaggaaaaatggaaggctgaagtcatttatggtgacactgacaggtaaccccttttctagtttacaaatggggtaaagacaagagccattctcaaggattttcctttggaatttcctcttgtttctttattctgtgggctgtggcaggtcatcattgggaatagt

SEQ ID NO: 175613 - DNA, 651 bp, Cannabis indica
ttacaaaactgctaataagtaaacgtaaaatttcattagatattaatgtctaatggtattatagtatttaacaacaatactcaatatttccttttttttgttggtccaccatagttgtgatgtttttggtaaaattttagtgtgagaggatgaaaatgagttgtgctaacgtgtgtacaccttgtgccacccctttggcttggagagtattgttatgagacatttatattgtttagtatggtgaaatgttgctttataattgcttaaatgttgttttataattagttattgaattttataatatttattaaagtagaataagtagtacttgatattgagttccacataccataaacattctcagagcagactcggctctgggcataggcggattaggactgtgtctagggcccacttagcccagggccaagaaaatatttatcttttaaaattatacagtttttttaataattttaaaaatattattttaataatttttttaatgaccactaaatttcagaactgcgctctgagaggactatggaaaggaaggcatgatgatgatgcgcctctaccacgtgcgcgggatacaaatatagaatacgtggtacgccgaaaccacacgggttggcacgggccagcgcgcgcacc

SEQ ID NO: 175614 - DNA, 550 bp, Cannabis indica
agataggacaacaagtccgtataggctgaattccagaatatagttgatctagggctagggctattcattcttttacagactaaacgtggattactgggcctaatttttgtcatctgcataatggtatctttcattcctaatagaatgaattgacccctcattgcgcttgtactgatgatttttgtttgctattgtgcctttctctgatttatgtagagagtggcaggctttctcgtaatgtttgtgtttcctttcctgtatttcaacatctttcttctttgtacaccttctgtttgtgttactctttatcatatataatacaagtaatgatactaagacgggtagctcaaatagtttcctacaagttcaggttagagtccctcccgggtacgtacatagaaattgctctaattttctggtccctaaatattgtagggttaggcggggatcctagtctcaaaaaaatatgttttgcttaaaaaggaaaaagaaaagagaactcggcagtggaagtttgggagaaaactaaattctgggtagcaacttggac

SEQ ID NO: 175615 - DNA, 1383 bp, Cannabis indica
tgcaaataccaatgacaattaccattgtactatgtgtacttcgaaaaggagttcaaagatgaaagtggtctacagaagcataaacgttcaacacatctcgatgtgttctaaaagaagagatgtaaatgcggatatgttcttgatccacacaattgccaccctgattaggtgagtttaattcattattcaagaactataaattttaatgaattctttgtgttgcttcatatgtacaactaattatgctaattggatgattttaaatttatcaatcacccacctaaaaaaataaataaagttaattttgagacaaactaaagtgaaaaaattaagatctatatataacctaaaagtataaactcactatggtttttaaacatgtgggactttttcaaaagaactaaaagtataaaaaatgttgaaaaagagaaaatgaaatgaaaaaattagaaaaatctaccacttagaaaatatagattattagagggaaatttcatttaatatacataaaaaaaactcctattttaaaaaataccctctaaaatattttgtacaatagtaatctattaacttcttctttttccaaaaatacccttattatttatttattttcaaaacctaaataaactcaaaaacaatctctctctctctctagccgcccctctcaatttcttcttcgcctccccaagtcgaccagccatcccccaaccgtaccccagccatcccccagcctcggcccccagccgacccccagccgcgtccccacctcgcccagccgcgtccctaccttccccagccgcttttcctctctcgcaacaagcttttggagcctttgctttcggagtcgtagcgtacttcttcgccggtgcaaaagaagatttggcagatgacatcgtgaaggagcccttgaccttcaagatatttttcagtagcaagaaggtattgttaataaaaagtttatttttagctttttttggagttaatttagagagattatatattatttatgttgaaatacattttattttgatgaatttttcttaatttatagtcggttttatatggtggttatggtgttttccgatgtagtgtggtggtggcggttatgtatgttctcgattatttaacgacagatcctcgataggttatcgacaagatgttaaaaaaagtttgtttttgtttttttttgtggttaatttagagagattatatattataagtgttgaaatgcactttattttgatgaatttttcttaatttatgatccgttttatatggttcttgataggttctcgaaagtattaattcatgtttggtgagtgtttactgattatcgatgggttcgcgacaggattttccataggattttagtatttttttatc

SEQ ID NO: 175616 - DNA, 802 bp, Cannabis indica
gctattggaaagaaaatgcttcagcatcttactaaagtaagttgcttgcattagagtaagtaattaccaggtataccacaagccataggtttagataaactcaaacctataatactaggaacaggaagttttgttaagtccattgaatagacttattaacgaaaatttcctttcatgtccttgtaatagaaaactttaggttactccatgtgaatggatcaaaccataattgtaatgaccgctctagtaatgtggattagtaaaggcaattagcactaatttttattattttattattatttgtgaattaatttaattgtggaccccaatatttagaaataaatattagagttataatttctcaattccggagattttattaaactctaggggtattatttagcttatatgtgaaatatgttaattttgtaatttttgctcggcgacaacggaaaatgcgatggatggctagattgatcacatgggtaagtttagaaccctatttcatagtggggaatattttagagaaaataaattatcgggattgagcggggttatggaatttgaccattttacccctagctttgaaataccctagttttaagtctaagggcattttagtcatttgatttatttgaggttaggtggctggttattttggtgacacctagcacccctttttctcagccaagataagttaaaatattgcttaacttaattaaaaagaagaaagaaaagaaattggaaaattagaaaattggtgagaagttctttcttctctctctctctcttcgaaggcagc

SEQ ID NO: 175617 - DNA, 721 bp, Cannabis indica
ggttaggactgtataagcagaccaatacagacaaataataacctgctatatataatacgcgtttttcctcgtacattacacttctatggataaacttcattttatctaattaatttaaatgattattattacagcgaatggcctaagattaagtagtactactgtctaattgcttttatcattaatattaatcctctcaaatgtcttgttattttttttttcttaatttttattttcttgtataagtctcgaatatattttgtatgatgtctaggagtgattggtggcgagatttggggtgtagctagccgccgcaatctcgtaatatacaattcaaatatatacatattcttttatcatgtgtttgtttatgtttttaagctatacttcctccactccacttaacattatttttttaatctaacaggttattctttctttttattttatattagaatagatatgtgtaatatatataaagcttagatgataattaatgccaagtgagtccattagtataaatttcaacagttattatataataatcattaggcattggttggctttcgttacgtatgaacgaatcttcatgcaaacgtgcttccctagctagtttcaaaaaattaaaaccctttaacattaaggtacaatgccccaaaactttgtttttgttcattttctcaaattttaacatggaaattagtgtatacaaatttctctg

SEQ ID NO: 175618 - DNA, 649 bp, Cannabis indica
aaagctttatgatccgttttgttcaatgagtttattattattttttatttgggtagtttattgaaattacttcataaaccaacgacattcatgattctatagcattatctttaatctagcttattttttatttaatgaattgtaatatcatatatttaatttttaaactattagacttttttgttgtttattttttatcaagaagaagaatattcatgattaatcaaacagacagattatacatctcttctagtttgcttatgactaagcaaagaaactctaacttcaaaagtacttcttatctgttatagtccaaaacaatttttttttttttatcgtatagacaactatttctattagcccaaatatgatagacgattcttgccaatagaatgaatctatacttaagagccgaaagtctacaccaaattgcattcctaatattgagtaaacttcaactgaaaataaaacaacaggaataatattactgaataaaatttttgggttagagtcatggactaggtccctctctttaagatgttcgtagcactgcccaggaaagtgcaagcactcaaaaattatcagtcatccccatgataaaatagcctagtcgaaataccactatatcggagctctactgcacgctaag

SEQ ID NO: 175619 - DNA, 886 bp, Cannabis indica
gcatgacatattggggtgcatgatatcatcatcaaagtagttatgtgctaaaaccaatattagaaattaaaaagcagacacttatacttaaaatttcaaaataccatttgtacggttggggtgtttctgttgactttattattaggggtattataattaaaagaaaaagaatattattagaatatttcattagtttttgaataaattatgaataattttcagtgctgaaaatatcctttagtaagttttagagtaaatttattttgtatttttcgcaaaaaaaaaaaaaaattaataattatataaaaaaaaattgaacttaaacttttttagtatgtatcacaaataaaaataacaactataaaattacttatatatattaatagataaatataaaaattctaaacctggtccactatgatgatgcttacataagatcttattccttacttgaatattccatactactttgaagattgatagtgtggccatcttcaccactatacaatatcaagaaagattagaaagtaaccttgtttgaaattctctacttttccctatttttatgctaatgctaaattaaatgctgacataaaagaaaaagtgaatttgataaattatcttatgggaattgcaatctaatgaaattattctaaattcattcccattagatataattctacaaaactaatgaattcagtactcattttatatcataattgttaggaaattaaattattcctattcacaatgtaatgatgaataagaacttaaactagccaagtaaataaatgtgttgaaataataatgctattgatagaacattagaaaattctaaaggttggtacgcaaaaaattacctacattctcaagtagcgctcataac

SEQ ID NO: 175620 - DNA, 624 bp, Cannabis indica
atatatacatatatataaatacaattcccttagctattttgagctttttattcgttagtatctaaatataccttgtctcttttggaaatgtaggggaacatatttatgttatctaaatctttgttgttgttttggtcggaaaggaagtcattttttttttaaatttaaattttatataaatatttgctcaatcgaagagagaaaaaataataaagaattaataattatcatgcatgatatatatatatatttaatggtcggaaaggaaggttttttttttttttaattatagatatttggaagtatatatgtactcatgcatgtgttatatatatatatatatagttagaatatcatcatgtatacatttaattctccaacgagtatcgaatgctgatacatatttatatttatatatatatatagccactaaaattagttttgcatcccaaaagcaaatgagataggaaccaaaccaagccaaataatcatgtaaatagattatatattaatttaactatattcatataacaaagtaaatatatggcccacttcatatcataatataatacatatatctcacttatccaaatccatctgtataagaatatcatatatgtatat

SEQ ID NO: 175621 - DNA, 1147 bp, Cannabis indica
catgaaacccactcatgatactgttgaaatttgcagtgctgctcaattctgtattgcatgagtaaaattgtatctagtcaatgtcgttttggaaccctgcaattatggaactgttttaaggatggtaagacgcggagacataaaaacaacagcaagaatttagactcagattttacctaacattaaattaacggaactcgtcatgatactcatagtcatcttcatcgtcgttgaaaatagcactgtagaaaacataagggttctcaatcatctctgtcaaagtcaggcgcccatctttatcagtatctgcctgcaaaacacacagaaaaaagaaaaattaatcttcacgctcactgtgaagttattgacaagtaataacatgcaaaaccagcatacaaaattggatacctgagttaacacgtaatctgcttgctgttttgcataataacgttctgatggatgtagcttcccaataacaggtagcaactctatgtctgacacatatctaagaagaagaaaaagccgaaagtaaataatagtgccaatggattcccaggattagaattattatcagtttcaaaagatatcagaatatgtacccatcaccatctttgtcaagttgagcaaacaatactttagctggggcctccattgaatcatcatcggaatgatgtgtaacgttatgactttcgtcgtcatagtttctcaccatatcaaagagcccgtggaaaaattctttgaagttaacctttccatctttatcagtatctctttctctgagcaagcaaagacagatttaacacagttagtcagggaaaagcgacaaataaagcacaatcgcaaactaattatcaccaaaaagaatcacaactctaaagtaattgtgaaaataacagtaagaacacaaaacttgagggaaaaatcactaccatatccaagtaagacagaattcctaaaatcccaataactaaccaatcattttgtgcataccataatctaattgacaactaaaatatgatttagagtcacaaagtagtcagtacagaaatttcaaagaaattgattaatactccattcacctacttgaaacgatatccctctaacacttgagcagacttgacattggatgcaacaatcaacatgaaaa

SEQ ID NO: 175622 - DNA, 1623 bp, Cannabis indica
ggtttttggggggggggtggttttagtctggccattcaatgtttctcttgtggaactttaaagtgaattggaaagttaaacatgccaatgaagaagttattcattgcggctttgttttattctgaacttcacaatcacattcacacatttagaaaaactgtctgggacaattggatgtgcttatttgcaaattgtagattgtcaaagttctttgattcaaaagagcatgtgtcatgtcaatgcaagcattactttttcgtgttaattttgaatatatccatattactgtagcagccacttgatttatggagaagttttttttttaatctttttcaggtgtgtttggggatacgatgccttaattgtttgtctacgctagaaaagtgtattaaagcttttttagtttcagaaaacacaagttttcaaagttgcaacaacagttttgccttttgttagtttaaatgcttggctccaaggtgtttttgacatataagcgtaggaggctgacaggtaatagtcatgccccaggaaaagggtgccataattcagtatcggttgaaaatgagattcttggacaaagtctggatttgtatgatgaactgatgggtaagcacacctcagaagatcaaaaggaaagttctgaggtgagatttcataaatttgattgataattatgttattctaaagcattttttttagattgtctaatgatttgttttactctttatttctcaaagcatatttgtgaggggataagcttatgctctacttgtatcaataaacaagattcttcagcatcttcaccagtacaagtgtcaagcttacttgaggctaagatacacattgaagaatctaatgctgcagagaaaactttaagttctgataaacttctgatgaagagttctgatgagagtatccccaaaagggaaggaggtgtaccctcttccgcagaggattgtttgcggaataagacatgtcacactcaaatgaattcatcttctgatgttattgctgacatttcaggcgataatcgatgcgttgaaggaagattagcttcttacttgatgggtactactgctaatacgagtacgaattctgctggagtaaaatcatctcttgaagtaaaaagcagctttgaaactcatgataccctattaaagtcagagacatcaagcttggaaattgctgattcagttgataaagacatgttaatttcaagtaatggttcagcagaaaaagccctgtcgatggctccattgcttactttcagtcgaagatgtaaaagaaagaggaaggacagtcctgatactcacgggaatttcttgctggaggatagaaagcattcagtggccagcaagtgcagtaattctgcgtccggtgatacttcaagtaaagcagctcataggaaaggctgctctatagaccactcgtcagaactgaagcctccagcaagtgtcaatgatactagtgatttggtttgccaaactgagaacaaagtaggttgtattaatatgtctcccattcttagttaatagttattaggaatctgttttatttttatgtaagatgcttttagtgatctttgaaatttgttttgcatcattgtcacatctctctctctct

SEQ ID NO: 175623 - DNA, 507 bp, Cannabis indica
gcatcaaattatctgacacttctgccactggcttgaatgagaggattaaagggaaatcttggttgaaaacgaatttggggttcaaaagtccttcagaaactgcttatcctaattcagtatggggttctttagtgagagctttacacattcctacaattgatgaactctactatggtgacgagctttcccaatatcttagtgaactgagtacaactggagtggcggttgatactgctagtataactgagaagattgctactaagtttaagattctttcaagttcctcaaaattgggacctgatatggtgctatcaatgttaaagtgttttaaagaagagaggcaaactttgttttcaggatgctccgaagtgaggtgtttgtttactgagaaatggttaaaaacacaccacggttacaaggctcccaaccaatcaattatttcagcacgactggggagcagtctcgccttttattgatcttcctctaatcgacgtatgggttctatgc

SEQ ID NO: 175624 - DNA, 579 bp, Cannabis indica
actgaacctttatgttttcaattaataaaggactgttgggaagcaaactgggccatggatatccaatccaaaatccatgtgtgtagtgaaatcttggcaacatggggaaaggaagtaactggaaattttgggagtcgcattaaaagttgcaagaacgagttaaagcaattgagaaacaagagagatagtgctttggttgaaaagtttcaggcggtgaagaagattttgtctccattcttgatcaacgtgaaattttttggagacaacggtcgaagcaactttggcttaatgcgagtgatcaaaatagtaaattttttcatgccgatgacagtgctcgtaagcgtacaaaccatattcataaacttaaagatcatcgaggtgagtgggtagattgagataatggtttgtctgatcttataacagtttattttcaagagctttttagcacttctcattctgattgggctgaagtaatcagttgcattccctttctatcacgcacgaggacaatatggaacttcttaaacctgtgacggaggacgaggtgaaaaaaggcaagtatttcagatgcatccgaat

SEQ ID NO: 175625 - DNA, 834 bp, Cannabis indica
gtcttgatcctagtctaggtctgagttagggttcgaatttgggtctcaggtctggatctaggttcgagtcttggtttgagactgggtctgggtctaagtcttgggttcaatcccggtctggttttaggtcgatccggttcgaattctggttctgattcggtgtcctggtttgggtccgggtttgtgtcgggcttcaagtcctaggtccgtatcccgatcttaattcgagtgtgggtttaagctcgggtcccagatccgggtctaggtccgagtctgggtctgggtctgggtctaagtctgggtctgggtttaggtctgggtccgagtcttgggttccaatctctgtctaggtctaggtctgggtccgagtctcgggttccgatcccagcctgggtctaggttggggtccgagctgggttcgagtccaattccaggtttgggtttaggtctaagttacggtcctgagtttgggtccctttttgggttcaagttttggtataggttctttcctggtctgtgtcaaagtgtcaatatgttcgggtttggatccgggtccaggtcatggtcccgatctaggtcctagttgtcgagtcttagtcaggatatgggtctgggtcctggcttgggtccaagtcttagtctggatctgggtcctagtccgagttcagttccaaggtcccatgtcttggtctgggtccaggtcacggttagggttttggtctgattctagtcccatgttcgggtcttgctctaagtcttggtctgatttcggttccgattcttattcttggtctaggtccgggtcaggttctgagtcctgtccgagtccgtgtc

SEQ ID NO: 175626 - DNA, 669 bp, Cannabis indica
atatgggttttccttgactatcaactacataatcatagcatattaatgtcttacattttgtgggtcatattgattggtaaatttcgttttcaaattgtattcttgttgtagtttgctgttccaaccatcgtttttgattttgcagacaccaatctcactttttggtctctagacaacaaatagaggtggggaatctattatcctttcctttttaagcaaattgtctgctatgggcattcatgaatgaatgacataaaatggtacattcagacacaagtttaaagaaacttgaaagatcatagacaattatttccttctttattggctgtccgattttgcaaagcccgtttggggctaacttttcacctgacttccaaaactaccaattcatctactcttcaaaagctaactgtctctcgaagttggatatgattcaagcctttgttatcattttacaagaaaaagagtgccaatgcatcctcctttacctctcaatatgactgcagcccatgtggcctttatgatgctatcgcctatcgatacactgcttgcgtgtcgtgttggtatttaatcattagcttggtgattgatttaaacttttcattaaatattgtataattagtcttagaagatgcagattaatttgtttgacattatgcattaatgtga

SEQ ID NO: 175627 - DNA, 2317 bp, Cannabis indica
acctttccataatcctcaattacagttcctttagtaatctcccagagctttactgatccagcagtatcctatcaaaatcatacaagcatatcatatacagataataacaataaaaaacagaaccattctaactagatttaacaggttctttatcatcacaatttatctcgattacctttgtcaagacatgtctcctattattcaaaatctcatgatgcacaactgcaggagttccaggaattgtaagaagtggttctttataaactggaacctgtaagcgttgatgaaaattaagtatttcaatggcaaaagaaccagagaacctatctcatagaccaaaaccacatcggcaacaacaagagatccagtaaatgcaatcttttataacatgatttcctaggtacttacagggctagatccttctaatgacacccttgcccttgagaaagacaagtttccagctaaaaatgagccacctttctggaaaactttttgagggttatttccttcagcaggccaccgagtaactgaagaatctgtgctagcaacccatatgctatcatcatgcaaagccaattgcaaaataggctgctccccagtgcaaagtagaagactctctctcgttgacaagtcagtcaagtataactgaggatataaagagaatgagcatcaaaaacatgagcagcattaaagaaaaatcaatgactgataaagataagccggagcactaaaagctgggttatacaacaaggaaggatacatgtactcacagaaaagtctctgccaccactatatacatgactaaacgttggggtactagcaagagcccaaacagaatctgtgtgcacagcataggaatgcacacatcgctgttgaccaagatcccatagtctgcaggagaaaaaagaatggtaatcaaaatacataattacccaattgtttttcatataacccaaacagattcatacaagcttatgatggaaacactagggattactaggaagctgggaagacatacctgatcattgaatcagaggatcctgacaagcaatatctgaaacaaaatttaaataaataaaacatcaacaaatttatttttattgtagatgaacaaaaaggcaatatacacatgcaatacaatcatgtgccagagttgttggcaatgtgaatgttgctgtgaaagcaggaaatcatagatcaagaaaaaacacgcaattcagttaaaagagaaattggtgcgagtttaatatacagtgtgatatataaatgtaatgtgcaagttcattacactaattcagtatagcacatctcttaggataagaaagttctttagagatttgaaaaacaaaacacacacaagtaaacttaatataatgagtaaaactaatgctctgagagattattgaccaaaaaggaatataatgttcaggacacagtattcaattgtttacagaaaaccatttaagttaacgcaacaagcaaaacaacaaacctgccagaagaatccagaatcaaagccctgatgttatctgtatgtcctctaagtttcatagtctttgaaccacttcttgggtcccaaacacgtacaacctgggccagtagaggtactagataaagttaaatgcattttaagaatattcatacacataattaaaataaattagtcacaaaccaaattcccagtggtagtagagtgcaattttgctcataacataccttctctgtgccaccagagacaagaagtgatccactatcattcattgccaatgcataaactgactccttatggcctttggctgctgttggaacatatccatgtgattgtgtagaatggacagatatattgttgcttgagttgatagtacgtagacttgtaattggtagtgggtgcccagaaccattaataccatttgaagaatcatcttccattgcttcgcctgacctggaaactggagaaagtgcagcttcgatatcccatatgaacacctcccctccaagtcccccagaggcaacagcattgctctaaaatgcatgacactatacaaggatcagaaaatggcatttataaagtacagattctagatatcatgctatcaaacaacaaaggacacttatatgacaggatccctctgcctgacaagaacctatatatggaggaaatttcaacaaaagaaattacattttttcctgctgaagcaagacaagtaatgtagtcagagtgctgacgcagagtcctggtacaagttccatcagacaagccattccaggtctggtgcagtaagaacaacagatacataaaaatacaacaaataataat

SEQ ID NO: 175628 - DNA, 749 bp, Cannabis indica
gtgtttagtacttttgcgacatgttgcgttgctattagctagcgatactccctaaaaactattatattaaattatatgggacccgatatttagtttgaccaataacgatattgacacataggaaggtgctagacaccactggtgccgtttagtatttctcggggaagtgactatcacctcgccgactacaaaagtgaagattaatatattaagaataataactgatgtatatatattatacattttcatattgatctgatcatttatatatttatatggtataatacatattatgtgtctccattttcatatatagtatttgtgggtttctgtatgtgacttggcaacagctactcataatatttatatatatacactcatatatttaatcagattatcattacggttttgtaatcacatatatatacataaaatctatcaagaattttacagcagtttcaaaacttaatattgcacatatatatatatataatatatattaccaagcaaaatatatcatatgggtcataataaataaaatttaaaatattcataagtatattaatattatttcatctgaaatcagaaatatatttcaacatgaaatttaccctttcagttatgtgcaaatgatatacataattataatcatttcaactaagagcataataagaatgtatgtatatacataccatttatatatcccatatatattaagaaggcagtagtagaatttgtatacgatatat

SEQ ID NO: 175629 - DNA, 701 bp, Cannabis indica
gaaaataatgtgagagaaagtgataaaaaactgacaaaaaaatgtttacaaaaaacaattttttgctcttattttttttttaaaatgtaaacaatacccatgattgtagagaataatatttatttctataaacgaaaagaaaaagattttagcattaatggaaaataggatcatcatatctcctgccataggtaggattctatgtagagaccattaacatatatgaaattcattttcctcatatttgtaaatctcagtatactccctttctgtactaattataccagggaaacttattgaaagtaaattgcttgccattgggaaatctttttaattgttatgtgttttttgttgaggaagttaggagagttaaaacttggggaactgctagatacacctcctcctggtctggatgaagctattgcaatctcaaaggtagaaatatctcccctagtttcgcttgcaactatcacatctttaaatatttataaatttgtatgttttcccactttcttaattgttcaagtctctttccaggtgatcaatttcttgattcaccagaataaagcatgtttactcgaatagtttttgatactgcgcctacggtaagtatttagtcatgaactgtccttgttgcttgaactttcagaattttaacttgatgacttgtcttaaacagggtcacacattgcgtacttttg

SEQ ID NO: 175630 - DNA, 1154 bp, Cannabis indica
gtttttatttttcaatgctcctaatatatataatgcaaactacaaaaatgatgatttgagtctctaacatttgtcaattttaaattatttattttgtggttaatttagtttaaaataatttctttttcttaattaaatctttcacatattttaaaaaataattgtacttgtaattaatatatagatattaatataataataataataataattcaattcaataatgttacttaatattttaacatattaaaattataacattttatttttttatagaatattaatatattgattaattaatatttttttcttttaatatattaaatataaattttattttttataacataaataaaaaatttctaaataactgcacaaagcgcggtatcattgcctagttaattatataatttaaaattccccatctatatcctacatgaaatttaagccctcaatatattgtcaaatagcgccaaccacaatcaaataaacacattcctctgtccaatactcatagatcacgaccatgagaaaatttggcaaatattattcctaaattaatccaaaataccaaatacaatcctaacctacaacaaaatcacaaaaaaagttccaatttcatccctacacctctctgtcacaatgaaaaattccaacaaagctaaaaaaattccagcaacattaaaagattcaagatttatcaagttaaagataaatttatcacatactcctataaaaaaaaaaacataatattcttccttgaacaagaaacttgtcttatcttgatggaaaaaccttgaaatttttttaccttaattagtgttttcttccttttgatcgttgagatcagtgattgaaagagtaagagacggactaaccacacaaagattatcggaaaatataaatgagtttcaaaagaaattaagaggaatagaatgtgaaaaattagagaaacaaaaatagttaataccattgaaggagttcagacgagagagagttcaaacgtcatccttgtcgtcatcattggagagagagaatgggccgaccatccttatcaaggaagagacaatatgatctctcttccttgtcgagggagagagagaatgattcgtcgtccttgtcatcaccgtcgacggagacgatgttggattatc

SEQ ID NO: 175631 - DNA, 702 bp, Cannabis indica
actatagttttctttggtatctctcactccttctgttgttgaatatttcttgctgtattgtcctttgttcccttcttttccttctgcttacttttatcttgatgttgttgctgttatctgtcttcattttcacaatttcatcatgtctgcaggttgctttggtgtggccatacttggagcagtgagcacacttaggaggtaaccattcacactccacaatctgatcttggagttgcccaaactcattaaaataaggaatgaatcagggtggagcgtttgtgacttccatttctaccagaattctggcgtattgtagacgagttcgatccttggtgtgttggtccaccatgacaggctttccaattgtgctaaccagagcacttagacttttggtaccccaatattgaagccctaggtcatgtaatctggtccacaatggaacagtgcgaaccagattcattgtgtttaaattcgcagaccaaggacggactataaccggttttcgatcaaatttaaccactcctgcctccactacctgatctcgagttgcttcatcattaaaccgcaccatgattaatcccatttacagtttactaacctgaataactcaaagatggccccagacccttttaacaaagccttcgaatatgtaatgggtagattagctccctataccttgcatataattgctaattctagcaa

SEQ ID NO: 175632 - DNA, 584 bp, Cannabis indica
aaagcatgtagaaatggataaaatttcatcaaagaaaagatagagtaaggcctgattttcatgattatgttccaaccgaagagtaagtagtagacattattaccaaggtattattcaaaaagcaatttgattttttggatagcaagctggctatggcagacatctttaaaccagctcgagggggagtgtcggagaaaatcaaactattttaggaagttttttgattctagaatgattgtttaaagctgtaaaataattgatttgtgtactattttatttattatacgaaagtggttattagtgtgagttgacattaaagtagaaagattattgtattgttttagggcaaccttatacgtatcctttacaatgaaataatatatcagaaaattcccctacttttgactactattcacatccaatttaattgtaattggatatctaacattttgtaattggactagattggtctaatgcaattggattggtttggatcccgtccacccccacctttagctgttgagaagtagagctttgggattatcctagtgttgatatcgcgctcagtttttgacagagggcac

SEQ ID NO: 175633 - DNA, 726 bp, Cannabis indica
acttacttatcaatcatcttaatttatatgatgacatttctcattgaattagtctatgcaacttgagaattgagatactagaatttgacatattggtaaatgccaaatgaaacaattgtatggtggaaatcattgaatttgttgtttgattgtagttaggagtgaattgggtttgagattatagtttgaattagattatacattgacttgaaagtccctctggattctgtaacttaagttggtatagtgaactgattgggtttgtaaaatatattgggtggattggttattgtaatctctagcaagaatcccaagtttggaactttctgttcttctcatattgaaagaaacgatctgaatgtcttggtgagggtgttaatctatcatttgcaagattgttttcccaagaaattttccaatttgggatagttgctttcctcatgtttagataatgttataatcaaatcacaactcttgatatgaacagggcacaccgttctcttaggccttgatggaatttgatatcttttccttgtcaagctgtgatacaatttctggaattcagaaacatagatgttggtgattttaagcaagtatcaatactctgtttttttggcttagtgttcagaatcgttgtgcttaatagccgttattcctatttaggctctgctgtattatgaatgctagtatgtttcgtaatggattaacgaatttcagcagtttact

SEQ ID NO: 175634 - DNA, 869 bp, Cannabis indica
attaacaacccgtcaattgtagaaaacttattattcccaaccactaatagcaatttgatggcgagtcatcgaataacaaagaagaaccaacaacgaaataaaacaaaataaaaccatgtcacacagataaaactaaaacacttaaaaccatgtcacaaagacaagattgtaagaaactcaaaaccatatcacaaagagaagactaaaacactcaaaaccatgtcataaagacaaaactaatcatagtagcggaaatcgaatcacaatagcaaaacacaaccctgatcaagccgcacttatgtcttgagaaggtttgcgggcctagctaaaaaaaagacaacctccaataaatataaatttaagaacaaaaaactctaaagaatatgaattgttaaattcattgatttgtcccctttcaattcttaaaattcttgtcatgagatttttttggacaaaaatagtacattacaaaaaaaaaaaaccattacatgaggaaagacaaattctctagatcaggcctaacattaggtataagggctatgttcaaaaatatggaaaaaattattaaggttatgccactaaatatgacattatctaaccaaatcaaactaaaaatatgattttttttttttttaaaaaaaactatataaacattgaaagaaaatccgaattcaagattcataaaaataaaaacttaattaaattaccataaaaatattaaaattccctttatatttacaataaaactatagtgatcgccgaagttgtcactcataccgaaaaagtcaccggagtttactgccggcaccggaaaagtcgttggagtagctttgggtgccgaaaaaaacgccagagttgctgccggcgcc

SEQ ID NO: 175635 - DNA, 852 bp, Cannabis indica
gcaaaagaaacagaatctaacaaaaagagcataattatgcaactgttatattttaagaagaattttaacaagctgcatattttaagggacaaaatcaagtaatatcgaaaatttaaaaggtaaaaatactatttttttttgtttgtgttttaggtgtataaacaacttttttagctaagaataagatatttaggagtgagctactttatacacaacttactttaaaatttatagttgaccccttcattttaatttcttctttttggcacccctaaagttcaattctaactccatttttaaagatattattcatattttcataagaatacatcataaattttgtgttgttaaaaaagaaaaaacatcacaatttttataactattgcaatatcctgttgatttaatttttataatttttttaacttatagaattaaaaaaatacttataagagtatttagataaaagataaaaaattatttttaaaaaaacagaatttatagcttttttgaaaagaattttgagaaactattttttaaaattaatataatttataaattacttacaattttttttaataatatctaaacaaaaatattttttattataagagtaaaaattataagtgaaagcttaacaaatgtggaaacttatcttatgaattctattaattaaaaaaaaaaagaaaaaaaaaaaaagaagggtaaagtaatcccccccaaaaaaaaaagaaaaaaagtgtaaaattttattttaagacacatgacgcgattttaactcaatctaaaatgggagagtagagtggaggaagcaaaatagtgtgcattgaaacttgtttactactccccaagaaa

SEQ ID NO: 175636 - DNA, 801 bp, Cannabis indica
atctgagaagccgcatagatgaagtgaagaatctgtggagtagaaaattcctttgccaggtgaaccttttaagtaacgaaggagatgatgaagggctgtcaaatgtggtgtccgagggcatgacatgaactgactgagggtgttgatagcaaacgtaatatctggccgtgagagagttaagtagagaaggcgaccaataagttgttgataattggaaggattatcgaggatgtctccttcagtgtcatctaatcgttgtcttggatccataggagctttagcaggcttgctgctagtgtacccggtgtcatgaagaagttgtagggtgtactttcattgggacaaaaagagacctgtcttggctcgggcaatttcaaacccaaggaaatacttgaggggacccaaagttttgagtctaaatctggcctgtagggagtcttgtagagcttgaagaatgtcaatgttggggccagctatgatgatatcgtctacatagacgagaagagcaataaaggtattctgcgatccttttgtgaaaagtgtgtagtcagcttgggattgagtgaatccttcttgcaagagggcgttagtgagcttgttataccattgccgtgaggattggcgaaggccataaattgatttgtgtagcttgcaaacaaggttgttccctgtgcagaggatggaattttaagaccttgtgggatttgcatataaaccttctcttctaaaatctccatttgaaaacgcgttgtgatgtcgagttgtaatacgtgccattatttgatggtgacaatggaaagg

SEQ ID NO: 175637 - DNA, 566 bp, Cannabis indica
attagctaggttacaataggttacaataggttacaagttattttctatttaatttctaattcaattacaatcattcaataataattaaatggctaaaaataaatgtaaccatcatagttacatatattttatgtaaccattaaaacctgttccaagtatatatattagtaatttaattatattgtacagatattgatatataatgttaaccaaattttatatatatatatgcagcttaagattagttttctcattatttattatgtgaaattaggaaaaaaaactctttatttatttatttgtaagtattattattattattgatttttttaaaaaaaaattaatggctgaaaactattattattatttgttaaattaaaaattatatttttcacattataagtaattaaagtgttaagaaatatatggagagaatttaaaaaaaaaataaagaaaaaaaagtctaataattacaattttactttgtttatttttcctaaacatattttactgtgtattaatatagaagacacatgttggaaattatattgattggatgtgttcaa

SEQ ID NO: 175638 - DNA, 862 bp, Cannabis indica
tgagcaagccagttgggctctggctctttgtttccaatagtattcttccttgtagagaagagcctccaaacgagattggaggtctttgatttttctcaccgtaatattatcccaatttggtgctatttcctggcttgctcaagattctttctcaaggcgaattatgcgctttttaaactagaaattcttctgtggttccaatcatttaagtgagtagcgcagttagcttgagtagcaacaaggcgaggaatgacttccaggttactagaagagcaattccaggctgattccagggtcttagtctaatttggttctgaaagccaaacattttcaaaaaaggaccgctttttactcggatcagggattggagtggtagtgctattggtaacaagctcaagaacacggtggtcagaaccaaagaaacctaggtgagagaggagagcatcagggaaaagattagaccaagaggggttaataatgccccaatcaatgtgctcttggatgtttttcagggaggccacattattattccaagtcagaagggggccttttggatcaagcgggctaaaattaaaagagtctagaaaacgtttgaaatcagaagaaggacctctgtcagggtttcccccatgcttatcatccaagttaaggaaagcattaaaatccccgatgacaagccaaggatccatgggattattgttcccaattcgatttaagattttccacgtatgaggcctttgagcaacaaagggcgaaccataaaaacaagtaagatgaaaagagacattatcggtaggtatcgaaacataacaatcaaaatgactaatagattgcgaaagtaaagttaaaattacatcattgt

SEQ ID NO: 175639 - DNA, 715 bp, Cannabis indica
  modified_base (545)..(545): a, c, t, g, unknown or other
aatgagaataaacggacctctactattgaattaccaaaataacattggtctcaaaattgctttaaatttaacaaatccaaaactacacaccttcaacattttgattgttcacgtttttgacaattgtgacaaaaactaactttgaaacaatgggcgtaagtggtggagtagccgatactggttgttctttgttcttttgagtggtttcttcataacctcaacctaaaaaagcagcaaaaaaatttcttatacaaccaatctaaccaaaatacttcaagggggtagaggttagaaattaacacggctataataattaacaaaaaaaaaaattacttaatacccataattaacaaaatattgtacttaatactcacaataaaacatatactcaaatccaatgcaataaaaagattagggtttttttttttttttttacattttttacattttcaaaacagtttttttttttagtatttttacgaattttacatagacccatattacaattagcgctgtaacttaaattgcaacaaaaaatcgtaacngaaacccctattgcaactagcgctgcaaaccactttagaaactcaaactgtaaatttgaaaaaaaaaacttaaaaaaataaacatatggagtaattactcctaaaaaaaactccctctttcaaaattcattttagactcaaaaaaaaaaaactacttatctacacattta

SEQ ID NO: 175640 - DNA, 635 bp, Cannabis indica
gtactaacagtgtaaatgcccattaacatttcttaattttagggttaaaaaaagggaaaaacttgcttggagcgcagaacaatagagcgggaaataataaacggaaatcctataaagcgtgctggctgcagaaggcactcaagtagagatcaacttacagagaataaagaagaagatggctacattgatgcaaagctctcagccatgggtcgagaaatagtacactctctttcatcttcattttgtaaattttcgtttttttttttggtttttggtttttggtttttaatttcaatttcgttgttactagtcgacctaagcaagtaaaagacgtggctcaccaggatgaggtggtccgggtcctcaccaacaccctcgaaaccactaatgtaaattcattaatcttcaatcggtttggtttaaagaaacccatattgttcaaaaatcaattttttggtttttttcctttgggttttccagtgtccccacatgctcttctatggccctcccggcaccggtaaaacgaccaccgctctagccattgctcaccagctttttgggtaattatctgctatgaacgtctgcctttgaatttatatatcacgtttcgcttttgctttactggttactgaact

SEQ ID NO: 175641 - DNA, 828 bp, Cannabis indica
actacttctagcttctatagtggcccttccactttggtgtagttgtagtttgtattggtactgaatgaacatatcaaacaaaggcgagcagtataagcccttcttcggcctgggaaaagcagcgaactctagaagctagggcgttgttcacctttggacacgaacactattccgttctcagcggaaacccgccttagagattgaacgtcgacttatcttattgccgttcaatctaaggcagcgctgatagcttgtagtgaacagcccccttatgaaaccaaccgaaagcagcctttggtacttaattaaggtttggaacccttgcaactatgatagaaagccgtttgcttgttgccaaacccttcgcctttcttttgaatcaaagtaggtcgcgttgtattttagtcggtcgggggaagcgaagcttctacgacagccctcgtcttgcttctggcaaagcgtctactttgcttctctcgcgcttgcttgcgcgaaggcgaaaagtcctttttttcgctaggtccaaaagcttccgtcaaagcgaaagatctgatccaacagaaatcccgcatattgagcgcagctgatatgcggctacggctaggcgatcatatcatgccataataaaattttatgtgtataaagagatcccctagatatacagatagaatagatgttcatggatagacagacattccattgattctgagttttggggctgaaaaagctcgtcgatccaaatgaatcattcttctggtctctcttcgccccccgcccgaaacctaacccaccagcacagcgcccacttcgcttcgcgcgcgggaaggc

SEQ ID NO: 175642 - DNA, 628 bp, Cannabis indica
atatccaccaagcatcacattaacattttttttttccattttccttggaagatttttttctttcgatcaattataggtgtagttgtagaaaagaatataaaaccaagagagagagatagaaagaaatagaagaaggtttaggaaataggaagaggcagaggaagttaagagtgaaaaagaaaagaaacttctcaaagaagctgccacgtgtgatgctcccaaccatgaaatccaaattcgtggtggcacaaggtgtacgtggcagttcctcaagagaaatatcaaaacaaagaatcaaataaaaattaataaaaattacacgtacctttattttaagaaatatgtagtaccaagtgggccccttcaccaccttggtcgatcatcaccaccacaccatgtgacaaaacttaaaaaatcaaatacggtggctcatatttggccacgtgtactgtaagaaaccattgcccaatcacggcccacacctacacctctgtcttctccagatatttttctttctcaaaacttggtttcgcggctgtgatacagagcttaacattttgtaattttctttgttttttttattaactaaaatagagaataaatctgctttttgagttttgttttcgaa

SEQ ID NO: 175643 - DNA, 678 bp, Cannabis indica
caatccttggacgtttattaaggccttcaaggccaaagttaaaaattaactaggtgagaagattacagttatcaagtttacctgtagaggtaaacactattgtagatatgacagatcaagtaaacaacctccatgaccttttgccatattcctagagaaatgcagaattgtcttgcaatacataatgccaaggcaaccttggatgaatggtgatgctgggagataaaatagaatgcttaaggacatggtaagaagcatgattaatcatttttctttacctgaatcactttggaattggcacttaagactgcagtctatattttaaatagagtaactagcaaattggtagataataaacccctagaagaactatggacatggaaaaagtctagtattaaacacttacatatttagggttgtccaattgaggtaaggcaattttaggccacatgaaaacaaactagactaaagaataattaactactattttgttgggtatctagaaaggtcaaggggtttaaagttttgagatccctcaaccaagtcctttttcgagacaggaaatgcgagacttctcgaggatgttctgtttgaggaggaagataaagtaaggaaatgttgtttttttaagtagaaataaattttctacgaaatatgttcttgacaatgatcaaccta

SEQ ID NO: 175644 - DNA, 529 bp, Cannabis indica
ctctctctctctcttcttttctttttttttttttgttttttttttttttttttatatcagaaaagagaatatatgaaaaccacaaaaatgacctccaagagtttaaaacaccaaaaatattagcatgactaggggtgtttatctaattcaatccgcattattttgttcatagtgcatttgatctgtactaagtgtgaattttaaattttgaatccaattcaattcgcgtaatagtttaaatttaatccaatttaatccgtaaaagtgcagatcatatcagttattttggattgattatttttttaatattaaattatttaattttatcaaattatatatattttttcatataacgaacaagaaaataaaataaattattgttattttatgtcttcaacaataatttaaaataaataaaataacaaataacaaattcaaatgatgaaaaaaaattgcatgtataaagaaaaaattattttaaattgtacgttgaaaaaaaattatacataacaatggaacatacatttga

SEQ ID NO: 175645 - DNA, 1059 bp, Cannabis indica
  modified_base (1008)..(1008): a, c, t, g, unknown or other
ttctattgctggtttactttaatgtttctagctttatatgcttgctgttttatttttgaaaataattaagtattaaaattttgtatctgttttattgtttttcacacctttatttatttaaaaaaatcgttatttcgccatttgttactatgatatgttattgtttagctgtttggcataaatcgtgataaatattagtttaattttttttttttttcggatattagtagttttttctactattatttttgataaatatagtagttgtagttgagaaatttggatgacaatgttaatttggtgtttatttggattagcatgtgtatgattacatctatacataatcccattatatatattatagtattttttttattaataaaaaaataatagcaccgatactacactcgtataagattgtcctaaatctttctatgattttaaatcactatttctaaatgtatatataagcattatgtcaataatttataaatgttaagaaataaaaagaatggccattatcaaacagctgttcaatatttgtttttttttaaataaaataaaatcaaacagctgtttattaattagtgaatgaagctccacaattttcttattttaataaacgctagttactatttttctgaaacgaagttgtaattacaattgtataatgattcttcttaattcacaagtaaataattttgggaaacaaaaaagaaaattggtgaacagaagcagcctaattatgacctattgaataaaagtaaataccgaaaataaccctaataaagttattatgtccatgatgccgttaaagatgatatgacatacatacatacatacatcaaatccctcatcccaacaacccaactcggtccttgggcctatataagacaaccgcaacctctttttcctctctccaatacaactcttcatttgaacagtcttctttacatctcatatcatatcctattctatcagtatcaaatctaatctcctttctctacnctcatgggcgagttgtaaccctcactgaactccattcactcctttcaattc

SEQ ID NO: 175646 - DNA, 777 bp, Cannabis indica
cctattatatatgaatggatccaggttaattgattctggtttgccttcagaaaatttattagctgctattttagtttttcatccaaattttttcccgagaaacacaaatttagtaagattttctagatctaaaaaaacttcctccaattcctcgattggtttcaactggttctttgcgtcttgaatttgaggatttagatcctcatcctgtttcttgccttcctctattatgactaccattaactgatggtcgacttttctattttattgttctatatgatagcattcacgagccagtagttggtcacctcacactacacctacacctgccggtgtctgaaatttcaaagataggtgtttaattaatctaactgcccctagtccaattagtgcaggccgacccaacagttgttggaatttattttaccaggatcttagatctactcacaagtatgttgattaacaacctaaatatgaactttctaaaacgataataagtaaacacatataaagtatgagaaaccttacattgggtgcagcggaataatatgtctccttccactcagatctctaacccttgaatcctttctgttgcagagtattatcaagatctgagtccgaatgtccttctcttggatttggatccttcacaatcttccaaactatgattgaggtactgtttgctgtgtgtgggcactactctttcactaggtatttcgaaattggaagagcaagagaagagaaaataggttcggctatagagagaaaagggaaagg

SEQ ID NO: 175647 - DNA, 561 bp, Cannabis indica
tgaatacaggtcattcacaccacatttagaacaaatgggagttattcataggaattcttgtcctaccacccatgaacaaaatggtcttgcaaaaagaaaacacagacacattgttgaacatggtcttgctcttctgtctcaagccaatttacctttaaagttttgggatgaggcttttagaaccactgtttacctacacaataggctccctaccccacttcttggtcacaagtctcctctagaagtcctattcaacaccaaacccgattacacttactttaggacttttgggtgcacttgttacccaaatataagaccttacaatagacataagctatagtttaggtctgcaccttgtactttccttggctatagcctaaaccacaaagggtacaaatgtcttgatgccacagggagactctacatctcaagggatgtcatctttgatgaacactccttcccttactcctcatccaaccaacctcaagtctctcctttaatttctgagtctgtttactatcctagttgtcacattcccactgtttcacctattactcaacc

SEQ ID NO: 175648 - DNA, 552 bp, Cannabis indica
ataaatatcaataaatatcatatggttgagaaagtaccataagatgtgggtgcaacaaaattagaataaaattgttgtacataatagttatacataacgcttccagaacaatgagttatctttttcttcgtctaggcttcaacctttaattgtttttcatttttcaaagccttcaattgccttttattgctttattctattttgttaagagtctttcattcattcattgtctaatggattaagcaagaaaatcccaaatcacaatcttgcattatatagaaaaattactaaccaggttgttactctagttaatacaaaacactaaaatgatatggcaagttattagtcatatttcgttgtattgcacaacaattaatcttgaatattaaatttgaaatgttatttcaatgaaccaagaacataaaagaaaacaaagtaaaatgcagagaaaacataatgaacacaatgaagttatactggtttggaactgagggtcctacttccatttttagagctcttccactagcttgaatcaacaaatacaatcagtgt

SEQ ID NO: 175649 - DNA, 631 bp, Cannabis indica
tggaaccatcaggaagagtaaggccccggatgtaattattgcgttttcgattagaagctttttgttggaaaaaacgggtgttcttatctccagcacgaagccaagcaacccttgatctttgcttccaatagatttcatcttttaggagaagtcgattaagctcagattggaggtgagatatctgttggttatcaaggggagttgagtgattgttgtttaacaaccggtcaagttcagcttgagtgcgtgaaatttggagcctaagggagggttgggaagatcgccaggccttaatagtggagaggcaagaagattgtttgttgagaaaatgctgcaaaggaagggggaaggggaggaatgattgcaccaagagtcacggaccatatttgggaaggaggggtcatcgagtaggtagttctcaagatggaaacgagagtggtgatgatttctgaaagaagtgtcttccagttggagtttgaggactctgtgatcagaaccataaaagcccaaatgagtgagagaggcatggaaggaaagagtctcagtgaaggagaaatgtgcaccgagtcaaggcgttcagtgtgcgcgtggcgcgaggtgaatttcgttccgtgtgtaggagggggttaaa

SEQ ID NO: 175650 - DNA, 627 bp, Cannabis indica
cggaagtcttgttctaaaacttgagtatgtttttgtttagtactttttttatttaaaataaaaaacggaagatgacttcatacattaatcaacattacaaggaggactgttatcaaaaaaaaacattacaaggagcaagtcacacaccattacgtgaccagcacagggaaatcaactccaattttcatagcactaacattcatagacaatgcataattagctaaacaatttgtcacttgattttgcatctttaccaatatgagctaaatgagtgactctcagttcctacaacaactggcgaatttcttgcactagcccatttgtgtctctacagttctccaccgtggaaatgagtttcgcactgttgtcgagcaaaatttcgcaacaccaaaaatgaataatcacgataaaaataaaagaaaaaaaaataaatgaacaactgcgagtattcaacctaaaacggcgagtactcgaactgggaacgtaaatgcttggtaaaaactggaaatattaaggagacaaaggaatatagtggttcagtcagatcacggtctgcttagtctactgttgcaagagtttcgtagttatcatttcatggtggatcactcatttatatacaaagcaagt

SEQ ID NO: 175651 - DNA, 774 bp, Cannabis indica
ccatgtgcatacaaacaaaagacatgaaaatggcaagaggtgaaaaaagaatgtagggaaaaaaaagaatccttgttagtggtttggccatgagacatatggtgcttcttttgtgtaatgtgaatttcctttcattagtttatttatctccctgaattagatttccatttagaaaaataattacccttttgatttagtaactgtgagttggtaaaaaatataatgaaatttggaatttggccgcaaaataactgttttatgatgctctttattccgcctcttcgttgaagtttctacctttttaaaattggaaactagtcattctaattatattggattccttctaattactttaactaattctctttgcagttttaatattgatcaacacgattattccgtacgcttgagatctgcgaagaagtttttgaaagatggtgacaaggttaataaaactctttttaactgtcagcatttgcctacacacattatctcgtctcttgttttattttgcatgtatagttaaatctttatagtaatttctgcaggttaaagttatagttaacttgaaaggtcgtgaaaatgatttccgaaatattgctatcgagcttatcaaacgtttccagaatgatgttggggaggtgtgtatttatcatctttatttttgttttttttgaatagttgtcatcttaatttttaatattcactacaaacaacatacaataattttcttgcaaatttatggtactgtcaaatctcttagattctagaaag

SEQ ID NO: 175652 - DNA, 626 bp, Cannabis indica
ggataaaatcagaacagccctatatttacctaaataacaaatgcaatctccaaaccagcaatgaaataagcaaacatcaatttgaaaccaatattcggtataaagcttagcgcgaatcttcatgtgtatacttgacaaaatcagttaattatcaaacaatttaccacttggacctggactttcaagtgtttgatatccccttcccctgtctcctccattagttggtggaaaaatttgcatattagctgatggcactgtagcaaccaaaaaaaaaacaaaaaataacgcaggaatatgttagagagaaatagacctagattgaggataacttgtacctaaggaaagactcagtgagtttttattcatcaaaaaaaataaataaataaataaatcgattccatttttaacacaattcttgtacaaaattacctaaaccaagaggagcaacaaaacataaaaaaacatgcataaagaaaagtaaaacataataattcagtggccataatcaaaaaattctcccatcaatccaaaataacattccataactaattattaaggaaccaaagaaaaaaaaaaacaacccccttgaactatcaaaaggtgataacattatttccccttgaagc

SEQ ID NO: 175653 - DNA, 812 bp, Cannabis indica
catatcaatcatatatgcttcatcttgtatgtctaatattcttacacaaaatatctccaattttataactcagcaaattcaagattaagatgtgtaactctatcatttacacacattaaaaatatttaattttataggagttacaagaattaaaaatatctagatttatacttttcaaagaaatgttacattttgacaaataataatattttcacacattaatatatctgttacattttatttaatccatattcataaaacttattatatagataattattactaaaatatattccatatgcatgcaagaattttattatgatctaataatattactctacatttgcttcggcttctctttcttgcaacatcttaagcccaacatacctgctcaaattaatcaaacacaaacacaaaaagacttatgagaaagattatatttgttgttttctattaattaatttgattcaaatataatttaactaacttaccggcctaacatcatgacagtggcttgaggattggttccgggagagacacgaaaagtagaaccatccacaacacgaagcgagttaacccccataactcgaaaatcaccatccacaactttcccgaccgtgcatccaccatggtaatgccatatggttgtcacactgcttcgacaaaattcttccattgccgactcatctgattgattcgtcggcaaagaaggcccaaaatacataaaatttctctcttcattagaatcaaccatcttaaatcgttccatggcattggtttctaacatctcgcccaatcttcctcaccccact

SEQ ID NO: 175654 - DNA, 1266 bp, Cannabis indica
gacatctccataatagggttctagggttctcctaaaataactttgttcctataatgtgtaagcccttgcaaataggtcccacagcactgtatcatatcataagagtataaaacatttagcttggctatgttctactctcctttgaagacctcatgaaaagttctttaataagaagaatctgattgattcttgcatacttgcctaccttcttgtcgtcatacattcgacgggcatgaagagcaccaagcataagtaaggtagccacagttgcaccaggcaccaaaaaagagtcacctgcacaaacaccatgaaatccacaatggttttatacaataacagaaaaatgacacaattcaatggcaagacttcttacttccaaccacataggggctaggttgggattcctcttactgctcgttgttataaattctttaattacttataccaaacaaaattgtattaataaaaaaaataaaataaaaaaatagaggacaaggacttctaaaagacaaaaaagaaaaagcataaacacgaactcaaacaaagaaggaacagaaaaaaagctaaacgccaacatgaggcaaaggaattccagcttggcttttacagctcctcactgagataatacagtaattccaaacacgctttaaattcgattagttcaaaatttcctacctaaaaagcagctttctgaaacaaactgtaagtaaagcagttctcaagtaattggcctgaaattcaatcactttttttttttaattttgatatctagcttttagcttttgatccccttttagccagtataaacataatattcaagcagcatagtattacaaaaattggcccataatttgttttccaactctacctacacttgactatttagtctaatataattcaagagacaagtcttatacttcgtgtttattgagtattcaatttccaaaactttccacattatgcccatatgtatgagttttaattcttttcacttcacaaaagaagacgattacttctacaacaaagtgtgtcaataagtgttagaatttgggataagatgaatgaggttccatctcaaaatcaattggtaatgggaggagtagcctattcatctatgacaactctaataataaggtacaaaagaaatggaaaacacaagcaaaatgtaaactaataaactttcgaattcgttttctcgcacaatcactattttttttttttttgtgctgaaatcgtcacaatcactattgttttagtaattcttct

SEQ ID NO: 175655 - DNA, 718 bp, Cannabis indica
actgttgctcgacaatttataggcccctaaataacgttattcgtaaagctgataagtgacacgctaaatcactttttggggacttaaaattgaaactaaaagtttttctatcgatggataacatggcaatatgctaaatatcgcaaaaacaagaaaaactagggtttcctaaactaccccaatcggaagtctaatccaatgggtttcctggggaccgatcgaaattctggttcctacaggtcccactgaaccgatcatccggttcaatgcgggaaacacaaaaaacatcacaaacaagccaattcgaccccaaatgatctaaaaccttctaaacctcctaattacatcacaataaatagaattcatgcaataaaatcaagaatcaaccacagaaacacaaatcaccattaaagaccaaagtttgagctctaaagctcaaaccttgtccaaacacaattccaagccaccaaacaactccaaatcaactcaaataacactaactcaactacagaatacaaattcaaacacccttcaatatcataaaaccctagacctaaaatcatgcaaggaaaactaacatgaatttaagaaaaacaaaaagatatgagctaaggaaaagtaccttagattgaaaccaacaagatcctactagcactctgaattaggctgaagaacccttgaatggttgttggattctagtgtgagagagagagagaga

SEQ ID NO: 175656 - DNA, 722 bp, Cannabis indica
gatttgcaagataagagagttgactaccaaactagagcaagacatctaggtgtaagcatatgagaattcgtggatttagaaagccctttctatgagctagacaatgagtcaacatttgtccaactatttaggtccatgatccctcactccagtctctagatgagaggattcctttctatcgacacctgattcctttgtctcagacacccatacgatggaagaaagggtttcttttgagggattgatatatgttcataattggacttcttgctagcaggctccactcttaactgcataagaaatcgaacctgaatctaagattgtgtcagtttaatactgcatgtccgccagccaataagtgcttggcctcgagcattgattaagtgatagaagaggcaactcaatcactcagatgtggggaacatcagccgttagagtatcgctttcatacgacgagagtcattgattcaaatccaataattggtaaaactgttgagcccctacttttgcaagcatgaacttgcagcaaggggtcaactgaatgaccaaagcatcagttgcttactctaacccacaatttgaacaatatttaaaaattatatctcattttttatatattaaaatcacgtttggttggagctaataaaataaaatataaaaaaaaattgtctagttatatttttaaatgttggaataatgtttctattattttagtagaatga

SEQ ID NO: 175657 - DNA, 747 bp, Cannabis indica
attaaaaaaagtagaagaagaaaaatggagagaaatgaagagatgaaaaattatagaagagaaaatgagaaaagtgggtggtgactggtgagggtggatgaagaaagagagagagcgaggtagttttgaaaatattaaaagaaggaaaagcatattttgagagagatatgatatattatgtgatatattttttatatgagatgacatatgaagaatgaaaactcaactttttttctattcttcatgtgacagttttttctattcttcatgtgacaacataactaaagaaaagtcccacatattgccacaatcaattttatactaatgattcatcttatatccaaaataactctctcataatatcttgaaacacttcttatgctctctctttccctcttctctcgtctctttcactattaaacctccaatggcacccattaagtcacaaaaaatgttcacatttccttaaaaatacctactctaacaagaaaataaaagttgttgaaggatataccctgatttttgttgtttgtaatcttcgaggaaagtactttttggataagtcattttctttaaaatttattgatgggatttttttttgtttgtcattatatttttgtgttttcaaacaaatttgtgcttgtctttgtgggttcaattgatttttgcatatatttttttatctgcatttcttctaacactttaaggtattttgtgcgatttagtttaatgggtttgataataatt

SEQ ID NO: 175658 - DNA, 857 bp, Cannabis indica
gatagttgagtaatgttgaacacattcacagttgtatataaatttattttaatacatagttaatgtggttacctaataattaatatcaattacacattaatatatataattttgaactcttaattaaattaactttaattttgtataattaaaagaaaaaattgtaatattaaatttgaaactatgtgtagagtccataggctccttacctctaaacttttcaactaggatattaataaataatgacacaattgataaaaagtaaagtttaggtgcttctaattaaggtctacctaaaaaataggtgtattcttacactcttcacaaaaaatatatataccttatgtataaatataatataagaatgtatatattatttatatatatttaggatatatcttgcaaattatcacatttttttatcacacatacatataaagactcacatagaataaagtatttcaattataaatttataattattcaaaaaattttaaaatataataaataattataatgtacatgctatatttataacaagaaaagtatcctattatataatagcattgtaagtattattaatgttcaacccaaaaacaatatttccgtaaattcttaactattttgatacttaaaaaagtttcttaacatatttaatttcttttcgtaatcgtgtatgttataattttaaaaattaagttaccaatctacggtgaaaaaccataaacaaacatgtagatttttttttgaacaacaaccaaacatcaagatttaattacacaacaactaacataaacaattcaaaccaataaagattgaaaactaataaattaaaaaatgataaacaccaaaatttt

SEQ ID NO: 175659 - DNA, 877 bp, Cannabis indica
atttttggggttttgaaaaaaaagtatagtttttttatagtgtaaatttttggtataataataaattttttaattatttaagcatataaattcaaatttcccttttataattaaaaatttcaatctgtaaaattataaataaaatataaaagaacaatatttttaaaaatttaccataaattaaattagaatagtattgattaatattattagatatattattgtatcgttgttactcttatctaattttaaaatattttaattatttcttattaaaaaaatattagtttctttatttcaaaaatttatatcaatttaaatttgaaatgtctcgttatcttttattaatttgcaactttttttttttttgagatgatattaatttacacctttgaaaatataaaattcaatacaataattgaattctcttttttttttaaaaaaaaaaattagatagaataattgaaatttaagtaactaaattttgggaaactatatacatttcattttagaccccaaaaaaaaaaaaaaaccttaagagataaaaccaatgagatatttcgtgatcaagaaaattctattaaatttgaatttaaatttatgtcggttaatttgaaaataggtgagtggcgcctataaatatagattaataaaccctttttttaacccttaaaccattaattactagagaaagaaagagattgtatttgtattaaacattaatatgaattctgagagtgagaacaccattattcatcaaattagtagctttactaattcagtttagagttgaccaaattatcaacctaaataaccctaacattaacgttaattataaggacattaccactgttcaattccacttcagcttcaccta

SEQ ID NO: 175660 - DNA, 517 bp, Cannabis indica
taagatcgtataaatgacaatttatataaataaaaagtaatttattttatttattttattatatataaataaaaagtgacccatgaatttctcataaactattttatttttattaataaaccattttatttttaatataaataaaaagtcacccatgaatttctcataaactaagaattctgttatatagacacactttatatagaatagatatatatttttttttgaagaaaaaataactttagcttataattaataaccactcggttgatattatgtttaaattatataattacaattatgatttattttaaatgtatatataattatgatttgttttaattatatattgatttttgttcatcctcgcctaattatagaccatgcttcaatacctctatctattcttctcctaattctctaattttttactttttattacctttttttaaaaaaaaacttcaattaagctaataataataataataataataataataataataaaataaaaaac

SEQ ID NO: 175661 - DNA, 682 bp, Cannabis indica
tttttagtctatacttgggttgttgcatgtcctcctattgtgtcattttcttccacattttgtgcatttgatttgtgtctttgtctcccaactaggtcttgttcttttcttctttggccttcccgctttcacactttcaagtggtggcaatatttcattatccttgatttcttgtggaatgtcccaactgctttgatttcttactggatatacagttgcttcataggtttccagccagttctttgtgttgtaataatctgaacagtaattttgtgggtcaagatacatctctttcatcactgctaaggcatgcgcacatgacatttcatttatttgaaacctattgcatgtactggttgttctcatcccaatgtccattgctttgaactagtacaagtattgatgccattttgcctgcaattcaacaatatgcccattaaattgtatttttcatgtaggaaaacatttaaacaacaataattaaacaataaatcaacttttttttttaaaaatgtaaatattttttttttcaaaccaggttttaaaattactaaaaggctcttaagataaacatttttttttttttttgttattattaacattaaaccaacaatttctatttatttgaatatatatgaaactttattttttatttgttgtttaattcatgaataatggaaac

SEQ ID NO: 175662 - DNA, 772 bp, Cannabis indica
gataacagtacataaatgacagacgcactactgatgacaagttcattcttaaaatcaaagttcacatgaacacataccgcatctaatctgctccacattgtaaactatgtactcgttatacaataaagcaaccctgcaataagaatataaatcagatcagttcaatccaagagaagaaagctcttgaaagatctacacatttatcggcaattgaccaattccaactcttaaaaatacagtatcatgtgaagaatgatgaaaaaataatgatgcttagtacctcatggtgtggattgcttttggctttccttcaggaactaaaacaccattgtctagacgccgagcttttgagagatctggagcagttcgcccaacgccttttgtgctgccatatcaagcagaatatataatccgtcaaagtgcgaagaagagatgttctcgtaatataatccgtaataactgtaaaataagcatgagacagaatatgtaagcaatccaagaaaaaaaaattgataaacaaaccttagctttccctctggcagcttatcagcatcatatttagcagttctaagctcggccatgtcaccaagtgcaaccttgaaaatttcacagtccacaaccatgagaaaatggaaaagatggacaaatatgatggtcaaacaggaactaaaaacataggaaaattatgtaatatataatgtgatgtaaaatttgtttgctcccacttaaaaaacttaaatatggtagatttatgatatattgtagtctaatc

SEQ ID NO: 175663 - DNA, 605 bp, Cannabis indica
aattcgcactttttgagaacatgtcagcaaagtaaaccccctttccgaacatgtaaccagttacaggtgcttcgggtggagcaatgcgcaaacctagaatgtcaaaattcatgttttaattagaaacttttcagcaggtaatgaaaatacaccatgcatagttatacaaacacaagagacaacaaaacagagtatatttaagagtataagagtaacagtaaataaaataaaggatcaccttgggataaaattccagtccaatttgtgagcctggaaccatgccataataacattctatttttggtacttgcaaactgtgtgcaagagggaaaaagagagaacacttaaatcagcttaaatttaaaaatagtaaggacaatacaggtaattttatatcacttaaattgtgcaagataaacaaattaccttactgaaacggtcaacttcgtcatctcttgataccctgaacaagtggacaatatctactgtataatttgaatgtgttttttgcatgagtgttctgcatatactttgcaatctgaagccattggaaacaagattagggaactaaacatttagaaatagagcaagcaatataaattttt

SEQ ID NO: 175664 - DNA, 641 bp, Cannabis indica
gacaaaatgctataaatccaaaaagtctgtctttcataataatttcatcttgcaagttggcaaattacttagttaatagatgttatatatatagagaaacaaatcaatgagatgaaaaactaattaaacccattttcgatgactaacacaaaactaactcataaattaataattaattagcaccatattaatttatcgatagacataaacatttacttatatatatatatatatacacataactatatgatagatatctacacatattaggactagggcaagttactttatacgttacatgaagagaataattatgagttcataatatcaaaaaagttttaaggcaaatactctagagtgaaattcttatttatataatctatatatagataatgtttcagtttgtaaaacctaatatatatagatgctaatatatagctcttggaaaataaaacttttaatttccttgaagataaaagaaaaagaaaaaaaaacgggtaaaaaagtaaatacttcatatatgcgtccctcggatttttccctagtagtcttcggtaggtccagccatgacagccaattaaaaaactaaaaaataaaaaaattaactattatatatacttttcgttacgtatagaactcat

SEQ ID NO: 175665 - DNA, 703 bp, Cannabis indica
tttggaggaaaaattagagatgaagaacaatttaataaaaatgagatatggagatgaagcacgaaagaatcaatatcaataatagaaataaaaattacaaaagttacactctaacctcaccaatattactactctagtttactaatttttgtcactaaaataagtaaactaaaataataaaagaaaagtaacaaaatgacaaagtgtattttcagtctaaaaatctgatatcattacacttgctttggggtctttttatagagaaaatctgatggtagttgtgatataatcatgtatgtagtgggcaagttggcacaaatggtgagataattaagcataagtgggaacttggattagtggaaatcgtggcttggacaagcttgttcaccacgctactaatatttgggaatagagtaggcccaccaaaagagcatgttgatacgtgggcagttttattagtttcctttggtctgactgtcactttggcaagttaatgaagctttcattgacttcaacttagtacatattatgtactgggaaggaagaccacgtttatggtaattggagttgggcaagagcttccttgacatgtaattggcccaaattgaagtcttactttggcccaaataatagtaaagaagattaatgatatggagttggacattaggctttagaataagtgacccatgatgagactttaatt

SEQ ID NO: 175666 - DNA, 501 bp, Cannabis indica
aagctgtccggccttctacaggtcataagctgtacgaccttttacattggtcatcctaccatgatcttgtcaatacttgtgtatctatgtctttgctcttaacttagaagttgtatggaatgtacatgtctggttgtaatggtttctcccacgtgtctgctggttttggccacgtagaggtgacacgccaagtgaaaaaaaaaatggcataaaattttttaatttatgttttaattttgaaattttcacaatattttatttattaataatagctcaacaaatatatagaataaaattaataaataattaaaaaaatatatctaaattgcatgaaaacaaatatttaaaatctctgcacaaagagcagcagttgtgttgcctaattaaaaatataagaaacatcaaaattttatgtggcaaaaatgtgttaaaacattatcactctacaaattgtaaaatgagaatatttacctacatagtactatattttttttttttttt

SEQ ID NO: 175667 - DNA, 526 bp, Cannabis indica
tggcttcttgatggctgcacaataatattatctaccatctggagaagtagtctagtgttactttcaataaatgtattaaggtatctgactgcataactttttatgactttcttcgtgttgttttatacaatacttatgcatttgaatgaatcacagtgcagaagtatcacgtattagccctatagactctggtttttcatggaatcttcttgcattggatggaaataacgttgttgcaggtatcatcaaatgctgatatttataactaccgagtgtattagttgtgtacataggtgagcttatacttgcacttgttttgactttgcagtttctagcagtccagtagatgttcctcaaatcaagtatgggtatcttactgataatgctacatggaattggttagatgtatcaagccccatagttaaatgccccgagaaggtcagtttattttgcttgcttttattttttttttttcgtttttccattcctgagataatgccaattacttaaaaccaaacaatcaaat

SEQ ID NO: 175668 - DNA, 661 bp, Cannabis indica
cgactttaacgaacagatttaagaacacaaataatgcaactgaactagaacctaaccatctcaggattgagatcatttgatctaggatcaactaggttgtgacagtcagtagtcccgtgatccgtaaggggaaacaccgggtaagctgtgcaatcccacaccgcctggggaaggtcaagtgggatgattctgagactgtgtaggtatgggactacacagttgaagagagcttaaatggattgattggtactacctatatcaacaaggtgcatcttgtttttcggtagcccatctcgaaagaactccacagttaagcgtgcttggcctggagtaatttaaggatgggtgacctcctgggaagttttcccaggaagcgtgcgagtggaggacaagcgacgcgtaacgaaactacgttgttggtttcggttcgttagggtaccgggaccgtacgtactactaactaacctaccggaaagggaacgacgaccgaccgaaggtagggtcgggtaccgttaccgttcggttagttaaacgtaaaggaccgaccttacttacttaccgtttccggggttggggttaaggtaaacccggaaccctaaggtagggacggttcgttaaggggggaaacgggggggttaaccttaacgtaaaggttgggtaa

SEQ ID NO: 175669 - DNA, 1161 bp, Cannabis indica
ctgttgatagcttccatggaacttgatcaattgtgtagcagcctcattgatatttggggcatctgttaatatctcctcgttaagaggatatcttatgaaattactttgttctttgaatatttcaactttactacgcttaggctcggttacagtctctggctttgccggctgcatggacaaaaaatcatcaataatcacaatcttttctcattaaaatacattcattacataaatattctcaaatttgttccttttttctcttctacacatttcagctccagaaatccattaatactaaccacagtctctctccatgccatagaattagatacacataatagcaaaagaaagtagattgaccacccaaacaataaaatgatagaatttatactttcataaaaacaaatgaaaaaaatgggatttttgatacacaaacacgagctctttcaaacctaacaaaacgaaagcaaagcaacataagtttctttgcttggcctcttgccataataacagagcaatatgtttgaaaaaaaaaaaaaaaacccaacacagaagaagagaaagagagaaagagatcaaaacgaaccgtagaaacggctctgatgagcgtacggttcgaagccgaaaagacatgaacgggtctagtatgaaagctcaaagcgaaagagttagcggacttaagtctctgaaagctcccaatctgacccttgggatcgttgaacacgggagtattcgtagctccaaacgacgtcgtcataacccaccaagttcgagtttttctctcaaagctttctcttttttcagctctcaaaaactatgcaggaaaaccctaaataaggattttttgcaggatcttatggaggaaaaaagaaataaaaggagctgaagtgagtgaagcagaaaagatttgcaatggatgaatgatattgatggtggcgatgagacgagagcacttcaaaattatatatatttttacatgtaaaaaaattatggtatatttgctctcatgtgcctgacacacgagagagttattaaggaaaaataaaatcctctcacacgcgcaacatgtacgcgctgcagaaagtgttcccttcatcattgctggggctatttaataattagaaaagagattgaattttgtttagtaagatattaatttat

SEQ ID NO: 175670 - DNA, 924 bp, Cannabis indica
ttttcattcgtttattttgttgtttgtaactctatttgtacgtgtatgtgtatatattctattattattgatgaccttcaattagtttcttgcatattcttatcttctaagaatattttatttggtttttatatgatgaagtgtgtatacttttttaatcgcttgaagtagatattttgttactgttgttgttgtttttattttcttaggtcaatatatgacatttttcatcatagttttgaaattattaataataaaaaatactttattattgtgtgtttgagacatggagaaaaatatttagaacatttagaaaatgagatgaggtatatataaatatatatattaaaatatattttttggtaatttatatttttaatttatatcctatcctaacaataataaataataatattttggtaaaaaaaatataaaagtaacataataattaatgttaagatagaaaaaaaaaatagataactaaaaaaaaaattggtaaaaaaatttttttaaaacttatagctcatcctttgaaaaaaaatatatataattacaaccataataactacattataataaaaaaaaataataatatatatatatgtaacatataagaatatcaatcattaacataaattaatgagccatatttcattataatagaaatttattattaatatatgtgcattcgtaaaaagaaaagtactttataaaaaatattatttaaataaaatgtattttagagaccgaaacataaatttatttttaactatatattttttgaaaaaaaaatattagtgaccaataaaaattatctttgatattataatttcgttttactattttatttgtttaattaatatatgtaagtactacaatatatataatgtgcgtaaatactatttgccttaataccatttcact

SEQ ID NO: 175671 - DNA, 875 bp, Cannabis indica
ggtactatttatagtcacactttgctctccaaaatggtattttcgtgtgttatttagtggagaaaatggctttaaaagttgatgaaatggtgttatgggcatcaggtggagtggggactgccaagggggtccgtgtcttcagctgttgttaggagtgattggccacgttttgtaattgaaatgagatatgttttgttgatgacatgtgatgaatgaagattaagattgtaagcccaattgtctcaagcccatttaaacttatcaccatgttaatgaatctccaacgtaagccatttgaaatgaagaaatggatatggcttgggccaattcatttggattcacaattgtacttttcacctcttcttattcactcataattctcataattctatcatttatacaccaaatctgaaaaataacataaaatctttataaattaaatatttctatttaaaataatttaataattaaaaacatgaaaataattaattaaattaattttatgtctacaattaaagacttaaaatgtacaaatttagagtcttaatcactatttctatgaatttaagtcacccaaaaattagcaatgaaaaaaatagaaaaaaaaaaaataccttagacattgccaccagtgattctacgccagttgattcttcagtcggtcggtacgacagtcgaggctgcatggacggttggggcagtgggcggtgggtgatatgtgttgagggttgggacggtttgggtgggcggtgaagagatgccgagagagagagagagagagagagagagagagagagagagagagagagagagagagagagagagagagagagagagagagagagagagagagagagagagagagagagagagag

SEQ ID NO: 175672 - DNA, 504 bp, Cannabis indica
cgatccagtcattgctattccgacctttttcccaagtgaaagggtaaccaacaagaggcaaatctatcaaattacagtctcccaaagcttgattgaatccatctattaaacggtcaggatacttcttacctcctttcttctccaaaagcgaacccaagttgttcatgtctcccataaggcaccaagggagattacaatcatttttaagagagcgaaataaattccaggtcaagtatctcagctcccgcttaggctcgccataaatgcctgtaaaccgccaaggaagaaacccctgaagctcaactatggcgtccacatggttgaaagagaagccttgtattaccacctccttgacatctctccataataacgccagacccccactatgaccacgagcatcaacaacaaaacaaccttcgtatcccaaatggactctgatgacaattccatagctagttttattacataacgtttcacataaaaataacaaattgggcttctttt

SEQ ID NO: 175673 - DNA, 853 bp, Cannabis indica
aaggcaacgtaaataagagaccacgttgcatggtaagcatttgaatacgtggacggtcctgccttaaaaccaagtaaagtaaggatgtttatccttctcaaatgtcacttcccatttagctggactttatcatcatataaaaattcttctgtgtcacatgcaaataatttgatatgttattgtgaaaacaaattatagcacgatccacattaccttattttgattggaatttccaatttagattattagttgcaagaaagtgaccaaatgataataccactttccaaaactagaaagattcattttcaaccacaaccaaattcaaatcaagaaacatataacaccgatcgaagaaagagaggggtcataataacagtgccctctcactacactaaactacacacccatcaattcattgttcaaaaaaaaaaaaaaaaacaaaaaaaacaaacaaacccatcaacatgctctaaactagaataaataataagtaaaatttagtattgtgatttatatattttatattgtgtatatttaaatttaataaatataaataacgtatacatatgataaataattttagtgcaataatattttcacctcacatatctatatagcctatagggtcaaaacccaattgctgcaattaattctttttaagtaaaataaataaaagtttgaagttttgaacttttgtgacatattgaattttaaaatattttaccactcaaccaacaactttaactaatataaattgaccagataaatatttgtataaaggctaaaattacttagacacaagtccaaaaggttagagtggtgctaattcgagtgactcaattatcctatctat

SEQ ID NO: 175674 - DNA, 910 bp, Cannabis indica
ataatatctctgaatatgaattcttagacaaaatccctcgaccctttgcccagtaagtatgaatcactatttatagggctataagcttggagaggaagtatttcccttctagttacaattgatataagcggaaagattgcataataataaatacagaatacaccaatcgtgggattcggacaacttgccatatctctgtaatctgatcccaaagttatagggatttctttgatgactcacgatgcgaaagttgaatttgctaagtattggcattttgcgcggaatgctcactattcggtttagaggacttgttcgagcaagtgtgtgagatgccccgttcgacctatgttttacgagcaggtatccagagtcgattccacgtgtccccatcgtgtgatgccacgtcagaatgcaaaaatttggttaacatttgccccccaagtctgtacgagacttccgaagttgtgtgtagacttcatcccaactgtctttgcatttggatgggtgacacgtgtcaggtgtgtttgttcgcgattcgatgtgaggctgactaggcgtctcttcggttttcagctaatgaatgctctgacgcaattaatgcttcaaaatccaattttctctcaccaacgtttgacaaatacacttaattgctttttgatttccaatatttgcttttggggggaaccgaggaatctgatgtttctgaaatgattactctttttttgctgtttttgcctataagtatcgttgatcatcgttcacaaaactcattttcacctaacctctttgttaagcaagttcagagcaaaaagagagcttttaagcttcaagtttgctgaaaaaatttcacaaaaatttttcgttcagctttgcgtaaattgaatccagcgttgatccttgagtaagttct

SEQ ID NO: 175675 - DNA, 789 bp, Cannabis indica
ataatgacaatatgatgaaatgttactatattttgcaacgaggaaatgttgtcgaacacaaaagtaatcaaaagagtttgaataataaggtatgagatcgtgacaaagacggagggcgaaacaattagaagtatctagcaattcggtacagtaagaacacgatattgaatgattccaatgtttaaagttatacaactcatcaaagcatggtcgaatatcatctgattgatacacgcaaatatgttgtttataccattcatccataattattccttcactacacctcatcaatatgctcaaccacaaactcaacacaataattgatgatgaatattgcttcatcgtgaaaattattaatatcaaagaaaatatagttttatttagcaggtcgatctaaagttttttttgctgaaagaatgatttatgtttttatatagatttttatctattaaataagataagaaatatctattagatatctatcactgtaaaattttaaatgttttataattagttttaagtttttttttaaaaaaaaaaaaacaaaatgaatgataaaatatacaacaataacttttatttatttatcttttttatggagatttacagttctgagtatattttattagaaaagtagtgtttattttgggaaaaagtcatagcattttttttaattggtcatattataaacgtttaaattaaatggatataattaaaatgctgaaatttttaagtaattaagtccagaacatatcaatttgttaatggttatagtgttgtcaactaagt

SEQ ID NO: 175676 - DNA, 566 bp, Cannabis indica
gttatagtctcatcctaactcctatatactaaatgcctatctaattatgacaaccctgacaccattaaaaagaaggaaagaaattggaaaacagctaaataaatcgtatccctgtaaaaaaaaaaaagacctagaatgccaatgtagaacagagggaatcacttgagaaaaatcaaacaaccatatgaagtttcaatcgggcttctctggatttaagtagagaactcaatttggatcacagcttaacagaatcaaatcagaatattagcatattttcgaaaccactaacttatgttcttcttacttcttcttcttcttcttctaaactatttttcagaacaaaacacaggttgatttaactgcttttaacactgtactacaaaccatagaagcaaacataaacagagtagaaatcaaagaaaaaaaagctactgtaaaaataaatgaaaagggcgtacctgtgagggcaataatggtttgggggtaatgaaggcatacagaattcctcctctcggatcagtagcaaacgaggttagagtacccgctgaagagagagagagagagag

SEQ ID NO: 175677 - DNA, 683 bp, Cannabis indica
taataataataataatatctaggtttacgtacacaaggctcattataataggattcttctaaaaacaaattacaatttttgctatctatttaattaaaaaaaaatacagtttgtattttgtaaatgtctcctataaaaaagggttagtgatgaggacgtgcgaaactaacatggaagggataaagttgactaattatataaataaagaataaagaataacgtatcatcgcattataattacattgatttatatattataataacattttttttattaatattatatatatatatatccaaataaaagagagtcttggatgttttaattaacaacgatgaattaataatagagaccttttccaatggatctgaaaagctcctccaaagatcaacaacgtcaaaagctccaaatattctttgttccaaaacgagatgttcgttatatcttagctttattcatcctaataatctcttcattcgttatttcaaggctcgttaatctcacaacccctttcgatcgaggcttcttcatcttttttctttccaataataataataattccaaaaacgcgtcgtcgtgtgattattcgtatgggagatgggtttgggatgagactcgtattctcgactcctacaacgagagctgccactttctcgaccccggatttcgttgccgccaaaat

SEQ ID NO: 175678 - DNA, 645 bp, Cannabis indica
tatttagtgctacataatgggtttgtacaaatccaaacatgaccggtaccaaaacattttaatgcacatattttgttcttatttattatctctcttattttctctatccattaatcatacttaaattattaatatattatcatttcaaaaagaaatttattaatatagtattattattattattattattattataagacaataataatagtatcattttattagttaataatattttataataattattaaattaatattacgataggccatttttaaatggtgttagacattacttataatttttacatctctattattaaacaactcaacataaattatactctaaattttgagcaagagagatatagagactgttctaaccaaaaaaaacaaaaaggaatagagacgaattgaccaaagctgtatttgagacatggtgatagagtgcgtcaaatgttgtaatttaggcaattccaaccaactatgaaacttatttaatttgctgtaataaaaggggaaaaaaatcattacatgttatattatgttatattggatggtacaatttaagtatagaacattttcacttttagactctttgtcaaggtcacatattcactataactctttggtcgtataatacat

SEQ ID NO: 175679 - DNA, 683 bp, Cannabis indica
gttggagtttggaaccacagattgcaaattatataaacacccctaataaatataatagtatgtttattgtgatataaattttaactatatgaaataattgtatgtgagaaatttagcaacttttagtcacgctattaaagacaaattttttagttaccataagctatattttagtcaatagatctccaataataaagatgctctacaattatcaaaaaattaaaggcatgctactaactaatattattgaaaaaaaagggtaaaatccatgttataaaggcaaatttagaagatagacgaaataatattcatccattaaaaaaaacaaaaacttacatgaatgaaaaaagggtacgtctactctatccactaatgtaatgtgtacccattaaggagaagtatggatcattgactaatgattaaggtccaagctaaatccaaaaagaaacatgatatggtttggactcgttttgtctaaccaaatccgctctgtgagaaatttaacatgaagatttgatcagaatattggcatatagcttcattggggttcgtgtttcctcacaagattgggataatgatatgacttgacttgaaattgttggagtgctaaacactgtggatggatgagatgagaggctcaccatatgatgataaaaattagttacatcttagaaaaggaatag

SEQ ID NO: 175680 - DNA, 541 bp, Cannabis indica
aggggggataattgtaaagaaagattaacttttaatttggaaatagcatataataggatttattatgaaatttgcatattacttatgaattatcagtttacggagatttatttgaattcagaatgcattttacatgtcatatatggaatttcatatttttgcatgttttgtgcccatcagcattggaacacagtgtttgactattagaatcacagtttagtatttttaatatagcagggcaatatagttagacattgagaatgtcgggattagtcgaaatttttgaaatgaccattttacccctagacctttttgttgattaagcttgtggggaagggtattttagtcaatttgcactaggttatggtggctgaactttagagtggcagctggccactacttgcttaattaatctaagtttaattttgatttttagaaaattaagaaaatagaaagaaaaaggaatttgagagaaaaccatcttctctctttctcttgttcgaaaccctaaggactagcaacaatttgagtattttcttgc

SEQ ID NO: 175681 - DNA, 507 bp, Cannabis indica
gcacatatttgggcagacgctcaccactaggatactattttagtttactgacaaaaataatattaaacattgttcattgaccatatagacaatatgtcaagtttacgccttaaaaaagaactatgggtaagttattcacacgtgtacatacttattgttatttccgcaagtttctttcttgatgcagaagctaatctacgtatattattatatgtgaacagaacatttagctttcaagttattttcgggtgtttttatattgttaattaaagcaacttatggagaccgtagtttatcgagaaaatattttgagtagcatggctgactttttttttttttttttagaaaatttatatgcaacttggcaacaacaatttaggattctaatttttctttttttctgatttttttgactttattttatttttatatgttagatattatttgtataaactgaaacatatatcattatgtataaagtgcggaattaataaaacatatatacac

SEQ ID NO: 175682 - DNA, 580 bp, Cannabis indica
aaaaaatataataaaaacaataaaagttgaaagaaaagggcaatcttattgcaacctacttaaattggtacaaacaaacctttatatactatattgaaaataaatcacttcccatttataatattattacctttaatttatttcattggataccttgccagtttgtgcatgaattatgaccttttttcttatttatccctcaagtacttgaataaatttaatttttgttgggagcatgtagggactttgaacatgaaaaccaatagagaagaatttttattttataattaactataaagaaggatcttaaatcttgacctcaaataccaatataactttgaccattctacactttttatataaagtggctaattgttaatgaacatctcatggtgttggtcatgtgggatatattaatttggggagctcaagttttcttatagtttttttcttttgtatctttttattacattaaattggtgaaaataattatttagctcatgttgcatgggtttttttttttttcagatcatccattcaattgaaagtttgtcctaagagatcttttgttagcatattt

SEQ ID NO: 175683 - DNA, 566 bp, Cannabis indica
aaaaaaacagttaatggttactatcatttattttttcatagtacgaaagtatactttttaacaaaaaaaaattataactttacaaaaaaagaaaaaatgaaaagaaaatataatatgatcatttattggcttggtgacaagacaacacagcgtagttagttttttcactttttattttaatactacagaatcagatcatttacacacaaaaaaaatagctactaatatatacccaaaaaaaaattaacaaattaatttttttcacttttagtgactttaatttttttattttttttttttaaatatagatgtgatatgtataatgtatgatagaataatatatagtaaaaaagggagaaataggacccttttatgtgttaatattgttattggtttaattaagtatcacgttctatataatttaatgtaataacttttaaagaatatcactaatcaatcgcaagacgacacgtctagaaaatacttgagagtacttaatagctgctcaaaaagaggtatgaggttaccttggccacaacagcatcagcagaaggaacttgttgaaa

SEQ ID NO: 175684 - DNA, 1367 bp, Cannabis indica
gaatgaggtaagtaataatggtgaacattccttttcgtagagaaagaagtggaacagtaatttaaatattcagcttattcaaaaaaacaaattaacaataatttaaataaatcctaattcaaattcatatttaaacatgttaaaagaaaattcatatttaaacaaaaaaaaatataacagaaatatctaagtggaacagttcagtagataaatattatttaattatataaagataggcacttttaatatataaagatatttgacaaatatagtatatacaatacacataaataaataattatatagatatatattggctaactgaagacaaaggacgaaacgacaatgcttgtaaaaagatacaataacaaaaacaaacgacaagtcatatggacaaagcaaatgacatacacatttacttaaaacttttttattgttttcttttcttatatgttgaagttattatctagtattaatatttatttatatatacatatatgtaactcagttttttttatataattatgtcatattcgattaaattgtatagtggagatatgccaattttataattagatatttgccctatataacaacgcccatattttagtaattgattaactaatataaaattcttgaaatatcgcctaggtctctttctaggttttctttagtctgtcgccgctgcttgttttgtgcttcttctctgactatgactcactggcctttctttaggcatggtttggccatggtcgagggggatattgttgatggtgcaccagaggggagacgttctatggcggatcaacacctattgtcatggttttttttgttagagattttattacaatggaagataaattaagatattacaactctattataatataatacaaaggactaacaaagagattaaataaatgttacaacacataatatacaatatatatattatatatataagaaaggtagaagagataaaaaggttatctaatattatataacacatatatattatatgaagaaatatatatatactcactcacaaacttgagtgtagattagtggggatcactatgacttgataaaggtattacacctttgtccaaaagcttatttcccctatctctaagtactaagggaactctctaagaaatagctttgggaattatcaagccttagggttttctagcaaagtgctttcttgatagaaaacttctcctcaatatgagcatcttagacctctttatgtagtgtttaggatatcaccatttgaaattcaaattcataagtcataacctccatggatgttatgaactcaaataaagagatataactcatgcacatcataactcctataaagatgt

SEQ ID NO: 175685 - DNA, 519 bp, Cannabis indica
atatttttttagatagaaaataactcactaaattttaagacgacttgtggaattttttttttttaataaaatataaaatttagagcaaggagtggaacatggccaacttattttttttttattgtttttaaggtaaataattttgtaaaaatatggctttaattatctcaataaagttattttatattaaaaattacaaaatatgagaaaatagtatatatccttacctatttttttttttcatatttttcaacattttcttgattttttttataaagtaactttttttttaaaaaaaatcatatttttatataaattatataaaaactcataaattttttaattacttatttacgagatatacagaggtgtaatattgttattaatattattattatagtataattaaatattaaaatcttatatttttaattcaacaattattattacaaaccgataattattggcaagacttgtgctaatgttttcatatatacaaaatataaaataaaaaataaa

SEQ ID NO: 175686 - DNA, 531 bp, Cannabis indica
actatgttaatacatatagggctcgtttggaacgccgtattaggtcgtattgtattgtattgtattatattaaattgtattttatgcaatatttttatataaaactatatgtggtaataacttttatagacacctaaatatataatattttagtataaattaaagtttaatatagtattatataaaaatatgatatataatccaattcaatataatacaatacaatacaatacgacctaatacggcgttccaaacgagcccatagtgattaaattaatgtatataggtaatgttatgtgaaatacatatatgttaaagttttttatttaattttttttttaatttttgaaatacgatttgagattttgatctttaaggatattattttttaattattgcggctatatttgtatgctcttcgaatgtaattatatatatgtattttatatataataaaaattcaaatacgatatcgtgataaatcgttgcatgtccaataaaacaaaattgtctcttatttaatttaaagtt

SEQ ID NO: 175687 - DNA, 749 bp, Cannabis indica
aattttaaattatacacgtggcggcgctgatgtaaaaactgactaagttatagatatgtcattattttatttgtcacgtatgataaaatttgatagaatagtcaatttacaacattatgaatagttgagagactatttttaacgggttaaaaaattcagagagcacaataattcatagttcgtagttcgggaactaaaattctaaatagccatataattatatgccattgtcataaaaaaaaaaatacaatgtatttattgattattatgcatgtaatattgtataggtacgtagtgaaatacattgactacaatctactcaaaaatatatgtgggtattacctatatatggtgcactcttaatgggtattacccatgaattggtaaaattagaaaattttaagtttttatccttaatttttctatctaattaaaattaaaaaatctctcacttttatatcatatgggctaagattgtcctataagtaaaaaaaaataaaaaaattagcaagaaaaataagaaaagaaaagttgagtttgagttaaatattttgtatgaacatatttttgatatagtgtaaaaagagatattttttgatatttttttaattaagtagttaaattaagcatagaaattcaaatttgtgatttcattattcgttattagatttaaaatttgatagtttgatatttttaaaaattaatatttatatgtaaatttgtttagtaactattcataagtactactt

SEQ ID NO: 175688 - DNA, 519 bp, Cannabis indica
gatgaaaagcaaatttactaaaagattaaaaatatattttcactttttaatataataaaaaaaaaaaaattgcattattttctagccctctattaaaaatgctattaatatgaatatttgaaaagaaaaaaatactaaaggtatgagttttagtgcccatatcactagtaacatattgaatacataatctttacaatttagtttaataataattataaaaattcgctataactttcttgccttatgattggtaaagtaaaaataagtgtgtttggtattagagaaaaaaaaaaataaggatatgactcaccaaaatttatcaatctaagtagagaggaaataatcttcttgctcctatgcatgaatcgaaagcttggtatggtaaaatttggagtaagcttataccctaaacatagatttatagaatgattgattgcaggccaaccttgaaataatataatgaatcataggaaagaaaaattaggcctttatttagaagaaaatatgatattttttaaa

SEQ ID NO: 175689 - DNA, 562 bp, Cannabis indica
ttgacaaataataaaagagaaattcgtaatttttatgcttaacttagctaacttaaattaaaaaaaataaaaaaaaatctttttttacattatatacaaaaatatgtttatatacaaaatatttaagtcaaactctaattttttttgtacttaaaaaacttttttttttaattttttctttcagtggaacaacccctacccatataatccaaaaagagaaatttttctaatttaattaaaaaattaagcataaaaacttgtacttttttttttatatcattactagaatatatgtataatgcaataaaaaattaattgtcctattggttttttttatttttttttttaaaaaaaaagaataaaaatagaattattatatcttttttaatatataatttttattatcttttaattgacttttttttaacaaattatttactttacctttttgaaatagttttaatttacttaaataaatactaattaaatatgtaggttatttcttttaagatcttataaatataaccttataaatttgtgtatgaaaattattatgttgtga

SEQ ID NO: 175690 - DNA, 986 bp, Cannabis indica
ctttatgatgttttcttgccttgccctaccccatctttgggagggacctggaggcctcctcctcaggattggataaattaaactgtgatgtcagggtgggcttagaaagcatgtgcatagcggtggtagctagaaaccatctgggaaatgtggttcggattcaaacggctcggttagactttgcggatgtattatgtggagaagcagcgacttgttgatcagctgttccgttggtgcttgagcaaggtttcaagtttgttttggtggagagtgactcgagaatagttatcaatgctctcaatgggacggaatctcattgggcaattaagttcaatgtctctttttgttctaagtcttctccatcttttatttgttgtaattttgtgtatgttagtagaacttgtaattttgctgcccataatgtggctaattgggcttttattcacaagttgtatagtactattccggttgcttcggttccggtggaccttttatgtaatgaccgagaggtctagcttatttaattaatggtacgaacacgcttattttcaaaaaaaaaaagaaaaaaacgaaacagaacatgaaagcaagcaaaagataactaattttaatttaattcagacaagctgaaggtgatttaggctttcaaactttggactttcttcaccttcaacacatcgaaacccttttatctattagtctccgccatacatcgacgtaaaccatccgccgatgaaccttttggctcttcctttccttccccgtctctattcggacaacaattacaaaaaccaaacccatattaaattttgctgggaaaaactaactttaaataagcaaaagctaaaaaaattatttcatttttaaaaggaaaagagtagctaacctttaagttctaaaagatataggttcgtttggtacgaggtattacaaccttattgtaattgtatagtattatattgaattgtatttcatggaatattttt

SEQ ID NO: 175691 - DNA, 672 bp, Cannabis indica
gtaggtggtggaaaaaataggtggacgaggttgatagaaattgatgggtgaaggatgaatttggatggttctggtgcgagtaagaatgattcgggcagaagttatcttggatttgggaagttataaattggctaggttggcttgaagggggctaagttgggttgcagtatgttgtctattcaaactgacatcatagatgagtaacaaagaatagaacctcttcaattagaagttttataggttaagcttgaataggagacacaaaggcattatacttagatcctattccattgaataggtaaatgtgatggtcttgaagagacacagggcctccaatagaggcaagaacattgtataacgattttaatttttgtaaataagccaaggtagacatcccttcttcttaagattttgcaaagtggtttgtacctccaacttttgagcgaaggaagcagtagtatatgtttgctctagtgatacccaaatttgtgcagcagtgctaaacccaacaatttggcctagaatgatatcaaatagagaggcgtagagccaccccttgatcaaccagttgtatatgtgctaatgggtgaacattaggttgatttgagatgaggaaacatcagtatacagaggagggcatggcaattgaaccgtcaatgtaaccttcaaggc

SEQ ID NO: 175692 - DNA, 872 bp, Cannabis indica
aacacctttcttttttttttcttcttttttttttaataccaaaaataacagatgatctcgttacaattatttatttaaaaaaatatttattgttcagaggtccaaatatattcttcatttttaatatatattttttttttgataaaacgtatttaattattgggatgtttaatatttatatttgaaagaccgacgaaatcaaaacaattcaaaatcagaacaaataaatattcaagtgtttcaataaattcataaacaaataaatcataacaattcaaaatctcaaatcaagaaaattaaaagtttagatttataatttttacaaatatgaaaaacttaaatagatctatctaccattgttgttgtcgttgcttagttactgaattcttaaacaaaaactactataacttatataaaactaatatttacgtggctcgccacgtaactctcatctagtataatattgtatacatataaataatatcagttcaaatatcaaaatatcagtttaaatgagatttgttttatttttattttattattttattatatataaataatattttattattttattaaatataaataaaaagtcacacccataaatttttcataaaccaaaaattcagttatataggcacactttatatagaatagaatatagagttggctatttttttctttttttaattgaaaaaaaattgaagcaagataatattttaatataagaggagctagtaataaaatttagaaggcttatatatgttatgtaatcactatcagtgaatagtgataggtgttttttgttcaagaaattacaaaacgagaaaacaaatatattatttaaaatacaaataaaagatcagtggcgg

SEQ ID NO: 175693 - DNA, 604 bp, Cannabis indica
caatctctttactcttaaggaaaggtgtaccagaatccaacattcattatttctcaatctcatatctgtaagtgttttgagttgagtctttttttacataccgaaaagctgtaagttttatcgagtttaaaactcacaatgctgtgaaaaaccaggcacctcaaggaattcatgtggtctgcaaaagattcccaagaattaagattgtgacatctgagattgaaagtggtttgaacggagattatcgtgtcataccgggcatgggcgagtttggagaccgatatttcggaactgatgatgatgactggcaagaagtgactcactcaacttaaaaacataatgatagtaataataataataataattaataataataaaaaaagaaagaaaaaaaaaagatctccatacttatatgtcttttatttttgtccactccaatcatcctcttatccgaaaatcagctaaacttgcttttgacttatatataattctgctggcttctctacttttataagagttgtaaattttgttcgacttcccttggcagattcttgctcttttatataatcctataaatatatatctatacaatatatacttcttc

SEQ ID NO: 175694 - DNA, 881 bp, Cannabis indica
attgagggggcttttatttgtactctacaaaatttataaaggcactctattttttatattttaatttcatataaaatatatatttttaatttataataattttttaatttttttcctttctcattttcttaaaatacattttataaaatataaataaatatattttaaaaattaagactagaaaaaaaataaaagatatgaaattttaataaaataaaatacaataaaaaaaattatacaatatgaaaataaaattaaaataattactaaaattaacaaaatatataataaattaataatgcagtaaatatgcttgttattcatgtttttgaatagctacttgtaggggtgagcatccgatccaattaaacttttttcctcatccaatccaattagtaattggatttagaaaattatcatcccatctaatcgaattagatttcaaaatccaatccaattactaattggattggattgattttttaattggatatccaattacacacctaaattttaatattaacataaaaatatgaagaaaaatacgtaaaaattaaatattacattttatttaagtttaatattctataaacataccatctttccaatgtaattaccaatatccttaaccactattactgacttaaagccagaaattatgtcgtgcaattgaacccaaaaatttaatcgattaagagtgatcaattttgggttttctccacttttcgacctttcacaaactagcgatatccgatcaaaagtccatggactgccttcgatcactccatcgatatccatttcatggtagaattgaaaaaggaatcgatgtggatcaagttctttcacaaataaactcctaacaggtctctacagtgatgtca

SEQ ID NO: 175695 - DNA, 661 bp, Cannabis indica
agatccaagatgattcaattgatgttgatagcaggaagtattcgacgggctctcctgcaaaaaaacaaaagacaaatattcaaaaggtacactgattgtcttttcaatttttctttgatatgtcttttgtattccttgtatttgggttgttcatgggggagcatatgacaaatgatttggcagtactacttaggctcaaaattgttccacatgattgtctgaacaaatttatattagatttatatttcacgtttgccatctgcatctgaatttagtttcttaaaaagcgatttaaatgtacactgctttgtttgtattgcacattttaatgagttattgttaagaatagcatttttaaagtatcaaatcaaagggttgcttgcatgccaaccacttcactctcgagttcaaaaccatcttgacaagtaaaaaaactccactttgtattaaaaagtattttaaataacttttttgaaaattcttttctatttctagtctcaaaaacatagaacatgcaaactcttgctcgccatgatggttaactgcatgaacaatctcttcctatgagctatgacatctttgaacaaattgcttccgataactttttggatttgaattaacttgtcagttttaacctaccaatcagattacgggtaatgat

SEQ ID NO: 175696 - DNA, 543 bp, Cannabis indica
tcggtttttttatatttttataatggtcggtcggttttcggattagaaccataaaaaccgaaaaccgaattttggatttttttgtgtaaaaaaccgaccaaaccgaccgttgctcacccctactgttatatggctcttgccgatggttcctcatggcactttttgggtttttatggtgctcccaatgcctctcaaagatttcttaattaggaattactaaagaaactcaaagacacagctccattattgccttggattgtcatgggagttttaatgaaactttttcccattcggataaatctggtggtccaccaaaacctgaacaccaaatcgatgcttttcgaaatgttgttgatctttgtggcttaagagaaataaactttgaaggtgaaagattcacgcggcataacaaaattgtcaatggtgttaatgtcaaagagagattggattatggtttcattaactcctactggtctacagtcatctccgaaccaactattaaacatttagactttttccaatcggatcatagagcacttcaaa

SEQ ID NO: 175697 - DNA, 1304 bp, Cannabis indica
aataaaaaaaaaaatagctttgagacaaaacgaaattttatatgtatttttcttaacaagaagtcttatttgcattatttggtcactagatcaagttaccatcaagttgataaaatcggctattggaggtgaaataatttttttttttattttaagcgtttatatattacaaccatattttatttggaactcgaaattaggatctccaatatgcacacacccaccccacctatgaccagttgagctaggctcaagtatttattggaggtgaaataactcgtgattatatttgtattttttttgtctcatttaagggatatctcaaacctcacattgaagtgagagatttcataacaccacttattcttattattattattttacgagttaaataattaattttaaaaaaatatatatttttatttttattttttaacattataattcggtggaattgtttttccttgttatcgtcgtgaataaaactggattgaataatttttcttttcttctttctttctagaataataaatctcatttttttcaatttcaacccgttgcaaccctggcaggtcttctttttattttttcttagtctgacgaaaatacccctgttacaacccataattctattttgcaaatataaatttaatccaaaaaaaactgtcaaacaaaataatcatggcggttatattctcctaagatatattaacgttgcaagcattatcattactactaattaatggattcaatttcatttatgaaaagttcttatttcattaattaaatatttaactgtaacaacaataataattaattgacagaatataaatcattatatatgcaaaaataaataaataagtaaaacaattaatgctaaagggaacaacggcgagggagttgggttgaattggggcgtgaccgttaagcggtggagatcgtggtcgggaccagaaatctaaaaccaaaccccattgagccaactaggataggactacactactcctccgaaggaacctcgtttagcttcgggacgtcgagcctctgcctcgacggtggaccccaccatgaatcagattgccaccgtggctttgtctaaggggcccgacccatcgttgagcctgcaacggtcggctttttgtaacaagtaaatgagctcggcctggtcccactcccaacaccaggcccaaccttgtattgcattcgttgagttttgtactcggccgagtggtgaggtgagatttattcggggttggagagtcagaatctggtgtagtcaggcacacgtatagcttagccagtca

SEQ ID NO: 175698 - DNA, 515 bp, Cannabis indica
ctatatgcttacttctcttgtggctccgaggttccttactgttggctatagctccagtgttatcacaaagcaggactagaggcctttccattccaggaactacaccaagactggtgaagaacttcctaagccagacaacctctttagctgcttcagccgcagctatgtattctgcctccatggtagaatccgaaatcgcagtttgtttagcacttctccaaaccactgctccacccccaagagtaaacaccatcccagatgtagatttcctgtcttcaagacatccctggaaatctgagtctgtatagcctaaggggattcaaagcaccacccctaccgttaggtacggtacttaaactaactaaattaacttcctttcgtttacgttaccttttaacgtttaaagttttactttaaactaaaaattaactttaaaccttaaacgacgacttaccttaacctaagttacccggttacccccgttccggtaggtttagtttacgtacgtagtaacc

SEQ ID NO: 175699 - DNA, 405 bp, Cannabis indica
cctatcgctgattataccatgtcagtctaaatccagtgttctgacaaatcagggaatcaacttttgaacatataataaagattatattccactgtgctgacaacactataatctttaaccaactcatatgttctggacttaaaaagaattcatacattatatacacatataatcatgaaataaatcatgtgaaccatgcaacataaaatgttatttctgatctttattaataagtaaatctgattatatgaaatgagttttatttaggggcataaaaaccccaacaaaaccctccctacgtcgactaactaataaactaaaaaaacgtaaaaggtcgacttactttaactaaaattaactacttaaacttaaacccttaccgttagtaattaacctaaacctaac

SEQ ID NO: 175700 - DNA, 671 bp, Cannabis indica
gaaatgagtcaagcattaacacaggtacacaatgcaattcttatacatttgtatttaccattgttacgtagtttgattgatacatagaaagaatgatgcccagctattattattattatggttaatttgtgaggaaactatcttatatatttttgggacaaaactacttaagtttccattctgttttgctctgtactcctgtccaaaaatcacagttaagtaccacagtggactgcccaagtgcacacacttgtacacgtgacaaatttttagtggcccacgtaatattaattttacaaataataatttaaaattataagaataaaaaaaattatatttttttcttttattttcttttattttctttttccttttcttttttcttttcttcttctccttaactgaaaaaccctagcacccaactcccctctcacacaatctctcacagtgcacaatgccgactttctccgaccaccccatcctagacgagccacagaactgaactccaaaacctaaaaaatcctaactccggcgaccaccacgaagagagagagagagagagagagagagagagagagagagagagagagagagagagagagagagagagagagagagagagagagagagagagagagagagagagagagagagagagagagagagagaga

SEQ ID NO: 175701 - DNA, 1020 bp, Cannabis indica
catcataactatcatttttttttggttttcaacaagactttcatcatggtgtttgaatcaaatcttgcttcttattggaataatgtttctcgcagagtcatttatgaaagaaattgggagtcagtatggtattgtctctggatctcgagacaattctctttacaatgcaatatgggtagcgcaggcactgttgcgcaaagggttagactgtgccttctatttttccctcctcccccttatagctctatgaccttctaatatttagaggaaaattgaaacaaaaagatcttgcttatacttcatagtcatgacttacaatgataaacactaccaatattttcaggtctgctaagacagctgacaagcggatacttttgtttaccaatgaagatgatccttttggaagtttaaagggagctgtgaagatggacatggtcaatacgacattgcagagagctaaagtgtgttttgcatgaaattacttgaatgattttgtgaatacagatttatttttcatataataagtattttatttattatttacaattacttttaatttgtaatatttttgacgtttacttctaaaaggatgcacaagatcttggcatctcaattgaagttctacccctgagtcggcctgaggaggaattcaacatttctctgttctatgctgtatgactatatcttactatcatattttccttgggtcacttacaggtggttagataaagatacttgacacttttagtctatatgtttcaggacttaattggactggaaggtgatgagctagctcagtttatgccttcggcaggagaaaggtatgccttaacttttggatgcgtgtttgattcattttcatgtggatggatagtatgaatgaattattttctttattttggtggttctgtagctctttttaaaagttgtgaatactttggtacataatgacattaacttagtaataagtctagtgttaatttacaattcaaatgggactgagatcctaaataacagtaa

SEQ ID NO: 175702 - DNA, 1382 bp, Cannabis indica
attccatattaaatttaaaacagacgatacacaacttcccgggccaaaactgaacctgaaggaaacccggaaaattcccctgcaagcaaccggtcgaccggttctggtacaccagaaccaaccggtcgaccggttccggcagaccagattcccttgggttctttccttcaaattcgacccaaaactcctccaaacctaaccaaactttccagaacagtataatatcataaatatagcatatcccaagctgcaaattacagtagttcaatctctagctcaaattcacatgctcaagtgaagaaaactaagttcctttagcttcctcattcacaaatcaatcccaacagccatgaattcaattaaaacatacacaattagacttaattcaactagaatatcacactcaaacctcaactaaatctacagccctgaaaacttacaagaattatcaaaacctagccttagaacctaggatttcaccaacaaaacataaggaggaacttacctcaagatctaggttagcttggggattaagtttagctctgaaatagaaggttgctgaagagaaatagtccccctcatggctggttccagctgctcgaaggaagaggaggaggaagagcttgaaaaaaaatgaagttacttaactcacaagtaacttaaataggaagagaaaagtttcttttctttgtttgtttttgttttttttttaaaagctacagccccctaaataaaataaaagaggtaactaaaattaccctcaaaaactaaataatctccaaaataacctagggacatattggtaattttgctaattccattaaaccgacattctaatatttctaacctagtccgaaatattcccaaaataattcttccattaatgtcgtgacattactaaccacatcgctaaatttccacaattgctgggcccgaaaatattttatttcgttaaataaattctcaataattatcccaagtaagatcataatcttacttcgtttccaaaataattacatatttaataaaatatgtctatttaaacattatttattttccgggatattacatatggtatctacgatacccacatattccagtacaatctccgtaattaataaattacgctttattattcattaattcatatttccctaatcaactcatgattagtttaagtaggattataatcctactctaatacccacttaatcacatatttaataaaatatggccaaataaatatcaatataattctcgggatattacaattatcccctccttatagaaatttcgtcctcgaaatttattcaaacaactcgagacacagctctcgcaactgtgccttcatctttcaaattgcctctcaatcttattgttct

SEQ ID NO: 175703 - DNA, 682 bp, Cannabis indica
tgtgtttcgaactttatggtgtttgattcggatcagaaaagagtttggttgctctttgttggtcaatatagaatgcaagaaatgacaaggtatgtaacaataagttgtccagtgcagaaagtatagtgtttttggctaaaacttaccttaatcaatggctagctgctcatagttccaatgttatttacccgagtcctggttttattctaggcgacggggctgagcagtggcagccaccacacggaaatagtattaaggttaatattgacgacgctataattgccgaaacaaatcagtttggggttggttttgtggttcgaaatgcataagggatgttcattgaaggagttaccaagctatttaatggctcgactacaccagattttgtggaagcttgggtgttaaggaagctttaagctggatcaagagaaatcaaccttgccaagctatccttgaaatcgattgcttagtggttattcaagccttgcgtagttcaattgaaatgatttccatgttcggtcaagtggttgatgattgtaaggttttattgaaagaacttcaacatgtttctgtcttttttatcaggcgatcaactaataaggtggctcataactttgctagagctactttattttatcctgattgcagtttcaatttggggtctatcccagttgatttgcta

SEQ ID NO: 175704 - DNA, 600 bp, Cannabis indica
ttttaaattttcatcagtttttgaatttagagtatttttgtaattttgttaatttttagtaatagactaccaataaagataatttcctttaagagattagtgtgagattagatggaaaaattataggtattaaatatgttatgaaaaaaatttaagtaagaaaaatatgtggataggaaaaaattatcgtattaaaatagctctgttgaaaaatctattgacacccaattagcaaaggacaggatagcaaaagaagtttaggaccatcttgcaaaatagtgttagatgaaaactaatattacaactattgaacaaaacgatatgagcattcaagaattatattctataatgacagatctctgggattaattaacactcaccgaatcagaagagctacatgcttttgcaccatatattgttcgtagagagaaacaatgattggttcaatttttaatggctcttcgtagtgatttggagagacattgtggttctatatattgcatcgttctccgcttccttcgattggttcaatagttagtgaattgataacagaagaaattcgtctcaagtctcagttagggaaagacattctctcaacac

SEQ ID NO: 175705 - DNA, 716 bp, Cannabis indica
tacacgctgctttacattttaaattttctgcatctaacaatgaagccgagtatgaggctttaatcgcaggcttgaagctcgctctcgagatgagaatagaatacttacaggctttcagcgactcccaaatcatcgtatgctaggtgaatggagaagatctggccagaggcgggcgcttggcaaagtatctcgccatagtatgcgagctattgcagaaattcaagaaagtagtcgtatcccgagtaccgcgtgctcataactcacacgcagacccattggcccgcttggcctcaactagggaagctgaattactcgatgtaatcaatgttgacgtattggctcactcgacagtaagtcgcgaagaagtgatggaaatagatgttgccaaagaagtcacctggatgactccaataatcgcctacttggagaaggatatcttgcccgatgacaaaatggaagcgagaaaactgcggtagcgggctgccgaatatgtcatttataatggaagattatatcgcagaagcttcagtcagccgctacttaaatgtattgacgggtaagattgcgactacatactccgcaaggtgcacgggggtatctgagggaagcatactattgataattcccttgccctaaaaatcattcgacaggggtattactggcctaccctgcggcagacgctttcaactttgcaagatatgcgacaaatgtctgcg

SEQ ID NO: 175706 - DNA, 612 bp, Cannabis indica
attgtcatatgttttgttcacatgtttgcttacatgattataagtttaatatataagaactattaaatcttaatcatatatttattcacaattatagtaatgtcatcacagtagaaaataattgtgatcatatgcttcaaacttatttagtcccgagatatatcagtgcattgaatttacactgatgtgataatcgccaatgtgatttacttacactaaggcaagtgaaatatcttttccatgacattagtaaagtaaatgtgtatcggatgtatagggtacatcaaactggaccgatattaacaataaaatattataaacctattgttgtacctattctaagtcgatatcacttagttgatcatagatcaaatgatctcaatcttgagatgggtaagctttaagctaattgtactactttagttatttgacttgtttgttaccagtttacccatcggtctagctcatacttacatcatgagaactcggtagttcaattaaatgggagtattaatcatagatatggacatttatagcttctatatttttatctaaaagtgaaataatgatttcctttagtttttgctaaatacataaatgatagagcgttta

SEQ ID NO: 175707 - DNA, 547 bp, Cannabis indica
ctttttaaccgtaattactcctagattaatctcagtcgtcagattaaataactcattcatctgacgactgccgtacatcacggattacaatccatgaaagtataataacgggacaaaatcatatccctatatatatatagaggatcttcggccactttttttgacgtatctgaggcatgatcttccaagttctatattttgaagacaaaactccagctagctaatattgttttctgctactatattatataataatatttcagtatataattttaatttagaccaaacatatctgacatatataatatctttcattagtacaaatggtacactgtatctactttttatatataaatatatgtatttatatgatatatgtagttgcaaaagaatgagtgtagtcgcttactaaatcgttttaattatgtttcaacaatatgcaaattggtaaaataacaataatggagttgatttattatttataattaaatagctagtagctctattaatttggtaattcgattcatgtcatgtggctaagaattaa

SEQ ID NO: 175708 - DNA, 661 bp, Cannabis indica
ctcacaaactcgaaaccctagcagagcaagttctctttgagaacttgctcgattctagatctgaaacccagattcacacccacacacaaccatagcttagattagatgagagaaaaatgaaaaacaaggagagaaaacaccagaatttgtttcagagttcacccaaatctgggctacgtctctgtcaagctcttctcagagatagaagcttgatatccactatcacaaggttggtttacaaactttggagcttcctgtcacagaaatcgaccaggtaagctcgatttctttctttacactttgtgtttttgttgttttctttctatttgttctcgatctaactctctgctttgtcttctttgtgcatgtacttcttcttcgagcttctcaccatgagatctgggttctcatggttggatcttggagctgaagacacaaactagggtttattccttctctctctctctctatttctttctgatctgtattctgtgttgtagatctaggtttatttgctttgatttgtgtatttataatgttgtagagtcggttgatcaaagccttaggagttagttacaacttcagttgtaactaactactaagtcttgatccactagaggcgaagccaccctaggatcgagtcttacttgctttatttcta

SEQ ID NO: 175709 - DNA, 519 bp, Cannabis indica
gccatggtggaggcacgcatcggacctcgtctccctccgcgcattgattaggccgctcgagattaacccagtacaaccaggatttcacccacttctccttttttttttctttatatatatttgtttatatacagctattttgagacaatatttatatagctgtttttatttagaggggagacaatttctaaggcctgtccccgggccatttgtatatattttgacctgccctttagggctaggatatttatacgtgatcttttttgatgcacatatttctctttttgacctgtcctttggatcaggatttttatacttatgcttttttatttttgtgcatactctttttgacctgccctttgggtcaggatattttacttagtttgttttctgtctgtccgtgcggtataccctagtacccccctgagtggcatagaaactttgtttttaaggcactcagttttattcaacatgtggaggatgtatacatttagacggtacgaaactactttaactaaa

SEQ ID NO: 175710 - DNA, 767 bp, Cannabis indica
gtggactttttagaaaaatcaaaaaatgaaaaagataaaatagggcaaagataaacgttacaacttacaaacaaataccaaaggttcctagacgaaaagacgtaatagaaaataaaaaatctaatggccaaccagtaagaaagtgggttgacaccacaccatatttttggaagtttttattagggtgtaatataacaacaggataagcctcagatgcaatatttgtgttgacatgtattttaaatgttttttttaaaaaaatatatcatatatttcaatttttttttcataaacaaaactaataaaactgtcaatagtacattactttattttactcttttggaagaaattggttacatggaattaacggaatgtgacccaaaagaccttacaaacttttatatttctttattttgaataattggatgactaccttagaatttgagttttttttttttttttttttttttttgtaagagaagcatacatatattaaattaaaatcagttagacctcgtggtcattacaaaatataatatcgggcatagaggaaagtagcacagagccaaacttttgatggaaaaagcccacttagccacattatgggccataaaattacattgtctacgaacaaattgaaacgtacaaccaataaaagagggggaggtgtttttacaaaaagagacatagttattaagctcccaacaggactccttcccattaagaacgttgatcaccaccctcgaatcactctccaccatgagaaa

SEQ ID NO: 175711 - DNA, 758 bp, Cannabis indica
  modified_base (732)..(732): a, c, t, g, unknown or other
attgcgtacaattctctgattacttccgagaagtgagctccttcagagcacagtcattagtaatttttaattttactgaacacagtcttttttgaaactttaacacaatatttttaaaaacttgataaactaaaaatgtaaaaaaaaaaaaatatgacagtaaagctgtaaaaataacaaaaaaaaaagaggtatttttgtaacaacccctttatagtttatgtttgctcgtgtttttagtttgatttttttaattttaccaccttgaggagtgttgtgataaattcaacacccaagtatacatattattttagctttgatatttaataaatgtaagttactgataagtgatcgcatatattgacgaataaatgaaatatgatttgattattaaagttttgtttggtacaaaaaatatgaattgtgctaaattacaacaaacacaaaaaaaattcttaagacgcgcacaggaaggtccgcccaatgtaaaaaaaagtcaaacagacaaaacaaaagaaaagttaaatcgcaagtgactgagagtcataagtctgctcaatgacttgaggggcttaatggcttaaagtcagggcttaatggcttcccggctagacagcacgaaagtaagcaagtaaaagtaagctcaagcaaatatttaaggaaagaaatcatgattaaagtcagggcttaatggcttcccggcaaccatttgtcttaaaagtaattcaaggntaaaagcctcttggccagcatatgtc

SEQ ID NO: 175712 - DNA, 835 bp, Cannabis indica
aaagggttaagaagcttggatcaaacctgtaatggtacggacatacagaaaatcaaagctaaacctcatgaaactattcacaaacatttggtatgcaaataaacgaacttgaaactttaataacataaaggagtatatataaactttactactgaatttatgctctatatgacaaataatgtgaaacaacataggtatagatacaaaactaattataagatcataattagctagcatcactggcctaatattacaagaaaaagatatactttattagtacataacctttccttttcaattcttaattatcacaaagtagaaacaacaacacaagaaaactcacctcatacaatatgcaaaatttatttagtaaagacaaggtttacatccttaatgattctctgtttaaaaaagttttcggattttttttttctattatatctatttgatgcaggatgcacatgcaataaaataagttaaaatgcataagtacaattctttctcattcagcttgaatttcatataaaccttagagattagaatctaatgcaagtattgatcaagcttaaagaatatttaggctcaatttaagccaacgggaataaaataaatgtgtagttgttttatgtaaatgagaatgagtagaacagagcagtccaatgatagaggttcagattatagcataaaaaaaatattaaattacatttttttaaaagaataatttacatcaagagctggtttatctattcacagcattttcttgtaaagtgatgagaatataatatttttattatgtaaaatcttgccatgagatagtctttctccaatgagaata

SEQ ID NO: 175713 - DNA, 931 bp, Cannabis indica
attcaattttaattaggttagactaatataattaacctaatacaattatttaaataaggcaaatgggccttcacaattggggtggttcatgtgagggagggctgggttcagtatgtcgtacccacttctattggccccctaactctcacacaaggcccaaaagagaggaatttaacctttaaataaataattgttattcattgaataagcccaattctaattgggcctaaataaaattacttatgtgaaattttattttagcaacctagtccatttaattaataaaacttaaatgggcttcctatatgcatctaagcccaaaagcaaacatataggctcacacaggtcaaatgatttggatgggccctatcatgttactaggtttacacagatgaaagaaattgcaaaatttacctgttacaaattatttataataagtagtactacttagttacgaacttaaggttaaggtaaattagtagttaaaaatttaaactacgaagtactacttggttaggtacttcgttcgtaaccaaaacgttaaaagtttaactactaagtacgaactttaaagtttaagtactacaaactaaaaaaattaagtttaggttttaaagttaaaaaaagttttgaataaacaatataaataaacaaacattgtccatgtaacagatgtgaatcaagatattaatataattaaattattattcttaaactaaccaaataaaggaaactaattttaaaatatctaggtttatttgaatcaaattaaattaaatatctaataagatcaatgatttaaaaggaaagaatctccaatatcactttcagatcttataatttaataaaataaaccaattttaaaatagatttggttaaataataattaccataattatatgtcaaaatatctcaaattaagcaatattca

SEQ ID NO: 175714 - DNA, 748 bp, Cannabis indica
atcaataatctatctatcaacatgccaaataaataattatagataatgcaaaaaattaattctcattaacaatgcaatctagaaggagataatgtttcttttaatatcttttacaaacatattacatttgaatttggataataattctaatattagagaattataaacaatttgaatccatcagcactaaatttgtttagtttagtctttaaatgattttctccaaattgattatgttttagtttagaaataccaattcagattgtatgaacaattgtatttgttgagaatcatggagtttcaactcaaaatcaattgacaatgaatggagtagcacatgttcttatataactcaattttttaccattttctgtaggataatatccacaacattattaaatattatatgtaatattctaattatttgtaatgaaggaatattgtggttgttacaattatatattttcactattggctaatatttgttaatgggattagtaacatcaaagtgacacatgttatttttttttcttttccaacaaagggttaaagaaaattcaagtttggcatggtgtggtggtgtgtgaatgatcttaccttttcatgttgtttttctctttgatttgattctctcaaagttgaatatcttttttgtccaaatgtgtacatttaaagaaggtttaatatatatgtttaaaacaagagggaatctcatggaaaccctaaaaacctttttcacttaaatatt

SEQ ID NO: 175715 - DNA, 503 bp, Cannabis indica
aactgtaatataagtaattatatagccattgtgtacatttatgtaattatgaatgatttttgtatttacttgccctataaaaaaataattttagataaatttatgtgagtgatattgtaattttttcattaatattgaaaatcataaaatatagttattatattcgggaaatttgaatttccatacttacaaaaccccattatttttttccttaaatacatacttactaaaattggtaatatatgacaattttactaattttccaaaactaaaccctcccatttgaattcctactctcagccgactctctctctctctcaactcaccaacacccaacgccacccatcaaccccaaacggtcacccacgctcaaccccaaccccaaacggtcaccgacgctcaacccacggaacccgaagcaaaccccaaccccagccccctctctctcttcgtctctctcaaactgaaaaaaaaaaaaaaaactccagtggtccgatggtcgg

SEQ ID NO: 175716 - DNA, 1091 bp, Cannabis indica
ataagtattgctatttggcaacttgaagtgtctaatattacaggatgttacaatttataattagttaacaattttcatattatttattaaattaaaataaaatatattgaatcaagtattaaaatataccaataacttggtgcttagcaccttcaaatgcctcataacaattttcttcttatatatataaatatatatataactgtcactcggggtactttcagttggatttgatggtcacagtgtacacaatagctaaatcgatggttgaaaatttttaaataatttactctataatactataaaaaaattaaaaaatattctattttttgaaataaaagttgaaaagaggctataaatacaataaagattttagttagcactcctgattaagacatatacagcgtattaatgaatatccccacagatgtaattaataattagtctagcatttaagcaaatcatcttagccattttccctaattagtagtactaataaatatagatagagcttttttatatatatatatatttcatttaagaaaatataaaaataaagataatggaaaaaaataacaagaaaataaacagatcaatctctaccaattataaccatgttgaacatttctaaatgtgtaatttaaatagataaacatgtaaacgtttttttttaatgtatcaatatacattacttaatattaaaaatatttctaggtctttatttttttcttaaaaaaaatagacaatgaaagaaacaaaatattaagagacgcgcgcagaactaataataatgcgataatggtgttgatgtaaatgattgtggcttcacgtggtggacgagtatattgcacaataataaacacaagtcccacaattcatatgtagcagcagaaatcactacttaatacttatcatataataatgatgctatggaaaataaatataacattgttatgacttacagtagtccatatatacatgatgtgtactttgttcagtaaagaaaaaataattcttgtatcaatgttcttctatgaaaaagcaattttttatttattcatatataacaaataatgacagcaactacttat

SEQ ID NO: 175717 - DNA, 772 bp, Cannabis indica
gcctcattttgatcttttgtatctcctgccttggcattaggattagtaaagtgaaggccaaacttgtttcgagtgagtaccatgattaatgagtgtaatttttggaaggtatcactgcttcttttagctctcaatgaaagtaccaaaacgtttaccgagatttttgaaaactaattataataaattagtacagaagaaataaataattcaaaaaaagaaataagaacaacacacaaaatttttacatggttaagatgttaacgagccttagaccacgagtcgatattattatgtatttaagctagaaaagcttatggtaatacaatgagcataagttctctatttttgtctgagcatgtattgctagagaattcaacccttaatttgaaggatttgttgggtatttatagtgttatgagaattatacttacttttcctttttttttctctaatggagagtttacatgaaaatacataaagttgggcaattctcgtaaggccagcccatgaagggatcgatgtgctaactaggcaagttggatacgattgagttgttaatatagtgtcctataattgtgggcaattaattatagattaattgcttgatctttatttaggtagtttccctatttagcttgatatgtcgagatttgaggagcatttacttcattatcctatgcgcttggataaaaagggaaatcagactagtcttccaacgaatatgctgtctggcccttcgacatcacgatactaggggccagtttggcacagc

SEQ ID NO: 175718 - DNA, 766 bp, Cannabis indica
atatatatatatatatgactatgaccacgtgtgtacacacggacatgcatattagcatatatataaatattcttatgcatcatctacaatcaaaagtcataatccactttagcaaaaaataaaaataataataataataataaataaaaaggaaaaatcatcccctatcaattaattataatttataacgtatatttttatcaagtgtataaactatgaatacaaatacagtatgcttctttaaaaataagaataaaaaaataaaatgaataaagtaatactgaaaaactattccaacacatttaaaacaagtgatgaaatacaaagggctgcaactgccaacagccacgcccacctgcaccacggccccagaagcttcaaagaaacgacaaaattataatttaatataaacataaaatacttcaaacgacacacatcttaacctcccatctatgactatgacttatattatgtcacatgatcacatctcatatatatataaatagatctgaccagttaagaaacatgtatccaatcaaagccattgtattcactcaataatccaataaacatgtcgagaaacctaatcaatgacagacactgatttggcactattggattcaataagccaatatcttctacaagatgatttcaatttgtctaaacgtgagctgtagtttcaatgtcggtagtagtatatctagtcctccaccacctcccatccacgaccgggggcatcaactgatcatggctgctctctagaggt

SEQ ID NO: 175719 - DNA, 618 bp, Cannabis indica
aattaactaccaaacactctaatataatttaataattattataaaattgtgtaagacattcttgcaatcttctttaaacatgtattcaaacattagatcctctaatatataaatattttgttatatttgcaaaaaaatattttttttttgtttgagtatctggtaaagattaaaataacaaaagataacaaaagttaaatagtatgtgagtagaattgttaggagagttgaatctcctagccattggaccttagatgaagaacataacagtaaagaagaaacagagaggaaagatacagagaaagattgagaaaggagagtgaaagattgattcattactgggaaagatcagtacaatatatactcatcaaagatgagtgaagaccaaacaagaatctgttacaactgaaaagcaatcctaacagccgaaaactaaaaacagttgagaaccaacttaacagaaaataacagacttgtaactgaattcccttaacaagaatatataaatattgtgttatattttacctaatttttttttttttttttttaggtttgggttaactaataaatattaaaataacaaagataggtatttttctatttaagaaagttcaattg

SEQ ID NO: 175720 - DNA, 558 bp, Cannabis indica
tctaactatattaaagagaggtagctagttaccttctatctcatatacagtaactaaaagactttgaatgcagaaacaggagttaagttgattaacatgatttactaagtaagctaattaatggttaacggtagagatttacaaaattatatttatatattaaaaaagcgatgaaatgaaatttgacataattgcagtatgcttgagatgctttattagcactataagatgatgctgagaattgtgactaattaaatcattcattatccagaattttgagatggctaacagaggaagaagagcgagtggatgaatgtcatctaccaaaaattcaacacttgattgtagagatgtcccgtaagcaattaataaatcattatctcttttactttaattaattaatctaccctcaaaatatatagttatatatatttgtggtcattaactttctcatcgtcacaaaataatattatattgcagctgtaactgacattgacaccagtggcatccatgctttggaggaattatacaagaaccttcagaagagagaaattcagg

SEQ ID NO: 175721 - DNA, 509 bp, Cannabis indica
tacaataaaaataatatagaaaaattaactcaaaataaatttaactaattagaaaattaataaaaaaaaatatgtaataaaatgtcataaattcattataatattatgaatagttttgtttaaaaaaatgatagatgaatcaacacttaaaatttttaaaatagaatcaaatgattaaaatacatttctaataaaacaataataatattaaggagttcttacattaaattttaattctttttttatatttttaatgtggggtggaattttttacaaaaatactgtgttttttttttaaatactgtgtatagtgttaagttttttcatggttgttctatagttataatttttagttcttccactattgttttaattgttcagttttattgttttatgattattttataaaaaaataatatttttgtaaaaaattctgtgtgacagtaatatattttagatttttctaaggtggagaatataaaatatatcccatttgtagggtatttaat

SEQ ID NO: 175722 - DNA, 704 bp, Cannabis indica
acagttgctttagcgaataatgacttgtctttggagctagttttggggggagtcttgaaggagcgtttatgagtaagtcctttttaacacttttctttcatttctctttgactagttcaggttttaatgctatttccacgtagactggtgtgaagatggcttactcctattcccaagctaaatcagccgctgtcaagaaccttgccacttccaacacaatgcggagggacgtggacttggccaaaaaggatgccaaagatgtatgggcccaacttgagactatgcagacgaaacttggtgaggtcaataagaaactccttgctgaccatggaactagaggagatgccgtcaactgagcaactcgaggtagataattcttctttgtctcgggacattgctagtctccaagatgaaagggagggtcttcggactcttctttgcaggttagaagatgagcttaaggataaaaagaccatggaaaaggagcttgagactgaagctaagagccaaaagtctgaggtggagaagctcggggagaaggtgaatgccttagagactgatggtcttgaaatttttttatgacttctggaaggctaaccgtaaggcaaattttgaatatcttggcacttccaaagcatgtttctcgactattgcatggctcaggtagccaatgaaaatcccgaggtgactacttccaccttttc

SEQ ID NO: 175723 - DNA, 548 bp, Cannabis indica
tcctataaggtgaatgtacattatttccaaggcctataacaactgatacgagccatgtagatatgagacaatttctaaaatgtacaacacagtacctgcatctgaaccagaagttctgtcttgactcgtcgggatgcttcactctcattgccttgacctcgttgaccacataaagaatctatttcatctatgaaaattattgaaggagcactatcacgagccatttggaaaagatttgaaactagcttttcactttcccccatccattttgagacaaggtctgatgaagatacactgcaggaacatcgcggtgcttgtcagtgactgaatggatctgttaaccttgtgcataaaaacttgaaaaaaatgaaaaaaaaaaaaaaaactaaatatagttttgggtttgcaagaaatctgtattgcaaacaaatcaaaatcttatggccttagtagtctggacattttgagtgtgttatgtgtagtacagtacagacataatatatcataaacaataaacatatataattgatatgcaatggccactttaa

SEQ ID NO: 175724 - DNA, 773 bp, Cannabis indica
gaatggtggaggcccacttcaagccaataaagatctttttttgaatgggtttggtgacaaggcccaatccactaattctctcggccaaagaaaaccaacagggacagatggtaatgaattgatgaaggaggatgggcttggggtcgtgcgtgatggtgatgaacaaagtgctttggctcatttctttgaagcccaagaacaattactttatgatttaaagcattttgagaaattagatttgtatgagataaagaatatcgggggcgatattggtgtgttgactacatcagaaactaatggaagaacaacaccttttaagaaaagaaagtttgaaggctctgctttgttgtgctcaagacctcataaattacaccgaaagtccccgggtgtagtccgtgattttccttgggaccctgtgcgaccggaccttgaatcaaaagcggtggaggaagatccttctaaggaaagctccaactccccgagctacactgatggtattatgaagaaccctctggttggttcatttgtgattgaagactctgattcctatgtgtcagttcactctagtcccctgtgaggagaatgtcatatctcctccacaggagtcatgagaggtattgcttggaactgtagagggttggggcaggtacctctacgagtttgcgagcgtgaagtccctgatcagatcgcgctctcctgtcttttgtctttctaactaagctaaaagtggatgcaactcccctggtacatattctaaagaatctccattttta

SEQ ID NO: 175725 - DNA, 754 bp, Cannabis indica
agtttctgcaacctccaaattagtaatccatctattaattttcaaaaacaatgttattgacataagtaagaagagagacataattagtttcaacttactgcaccaaggttcagggtaaaccatagtgacgtcaagattattaattctcaaagcagcaccaagctcaagaccaatgtatcctcctccaacaataacagctgtaccattcttttttgctttaattgcttctacaagcgtatcagcatcatcgatttctctcaagtagaaaatatttttggcatcagctccttgaactttaaaatctgtcaatttaataacctacagaaataataaaagattttaaatatcattgaaaacaaattttgaggatgatcaaaatagaatttggataatacttacagtagaaccagttgcaataacaagaatctgatacttgaacgtttccccagctgcgcttacaagagttttcccagcaagatctgctttgactatttcggtgctaaggatcaattcgatacctgtaaatatagttggattttcatgagtaaagaatgctttcaacattatcagaacaaaaaagtgattgtacaattattaagaaggataaatgacctttctcctttgtaccactcaggaagcaatctttctcctccacttccaacacacacatggaaacccggtagtcttgcaggagctgcaaaaattgaatcaaagctttagacacaatatcagagaaaaaagacaataaacaaaa

SEQ ID NO: 175726 - DNA, 727 bp, Cannabis indica
atcatattattataactaacaaaatcttaatatttttatagtacaataaaataaatttataagttactaaacacccaccaaaattttattctatagctcaattagatttgctttttcctcacaattacaactacaacgattttttctcacaatacataccaaactagtccttagtttgttaatgcttaaaaaggtgaaccacaaatatttctttagtttttcaatcctggcttattgttctcgaattttatgtaactagacaagttattgtggttggccattttcgtggtcaatagcagtcacgaccctgtgttaaggtgggctaggcccacagatcccaaaacttagcaatttttttagaattatcatttaatatcatgatttaaggggtcagaatttgtttttttgtctgggcccaattttatattatatatctcttaacattaatttgaaaagtttgttaatgctcagctcaggtgatttggggaagagcccaagttatttgaagaagacttgaagctatgttgttgggtcatgtgagaaaagtgagttgggccacttgattgaaagatgaacccttagactgttggacacgggccttatatgtttttttaggaaaatttttatggtatactaacttttgacatttttttacaaaaatactgccaggaagtatttttacttttttactgtgtttttttttataagtttcatactgtagtatact

SEQ ID NO: 175727 - DNA, 608 bp, Cannabis indica
gaaagtatcaagcaaagctgttgaagtcagatatatacctaccgaagaacaaatagcagacatcctgactaagtccctgccgatcactgccttccattacctcaaagacaagctgacagtgtgccaagcaccacagcacagcttgaggggcatgttgaaatgaaaggccctacaacagcccaacccgaagagaaaagcccagaaattgatgaggcctaattattgtaatcagccacaatcataggacaatgaaagaatattcaccaaatcaattatgtggtcccaagagaatatttttctgttattacggtgaccaataggaatgcttgttctagtacattcctgtgtgtatttatttcccctttgaattcatttgtaaatgagctgagagaatcaatacaaaatcaatatacagagcaatttactcctcctttttactctggttagctttgagtgtaagttcttcttatgaaaatccatttaaccaatttaaactaatagaaatctagctcattagactaaatatgaatattattaactctaaaaaatttaaactatttatcattatattatatggtgtactcttcactaaaatcatattagcatta

SEQ ID NO: 175728 - DNA, 349 bp, Cannabis indica
actattttcaaaactcactttctctctctataaccagagagaaaagaaaacaccagatttaaatcacaatctagagagagaaagagaaaccaaacaacaaacaaagcattctctctctgattagagtgtttgtttgtggattggattttggagttggaagatttttcgaaccctaactatttttggatcccgaggtgcatttggatgtgagagactgtgaatcgttcagatcggagatggcggagttttccggcgaagttggaggaggagatggagttgggggagagtttattagcggcattgggacagtgccggcggcgaacagtactccgactccaccgccgccgct

SEQ ID NO: 175729 - DNA, 686 bp, Cannabis indica
atataaaataaaaagtcttttattatatatgtattagcataaaaatagtgaataatatttaatttgtctcaattatcaattactagtagtactttactcattttacaataaaattggataaaatgtcatgaaaaaaattatattattataaaattatttttaaaaagtattataaataattaatatttagatataaaaatatctttcatctttctacattattaattagaaaattacaaaaaaaaaaatgaattattataaaataaaataaaaagttttattatgtatatgtattagcgtaaaaataataaataatatttaatttgtctcaatgatcaattattttcaaaataaagtatggttttgtaatataaatttgtagtattattattattgtatcatttacattttatagtatattaataaaaagagtcctattttaaattgctcatagtttagagttaatatttgcatgctaattaatgttaaaaaacaaattaatattttgcaaccattttataattcatggagaactttttaaaaaaaaaataagaatttttttatttttatattttagctagagctaatttttttttacattttttaacgaaataagttaacatagaaatccacaaagtaatctaaatcataatctcaaatctacataacaaccaccgaagcaatcc

SEQ ID NO: 175730 - DNA, 871 bp, Cannabis indica
aaatctacataacaaccatcgaagcaatctaaaccatgtaaaattaaaaaaaaaataaaaaatagtatatgtgataattcttcaataaaattaacaaatacaaacaactttatgagagtcatagtatatagttcgaatgggaaaaaaatcttatttattttaataattttattaaagaataattatatataaatattagtacttatattttaaatattttgagaaattataatttaattaaatttttatatatataacgatttgtaacaatttgactagcttatgtcttcttatgtttggttccatatattggctccaaaaccctaggtcctttcccaacatttagtgtcctatggattattaatccgtaacatgcacttagttacgatgataaatattaatattaattaaggttctaatccaaatgaaacaaaacactacacacgttaacattctttcaaaatttgactaacaagagaattagtatgaaccaccaattgccaaccttgtttatccaagattaaagttcctaaactacgaaaacccatacccctatttttcttgtgatttgtatagtatattgatatataaatatagaatattaatatagtaatattaaaatataaatataagaaaaatataagaaaaatatttataaatttttttataatttagagaaatttttgtaataataaagtacaaaacttttacaaaggtattaattagttcatgggagcatattttaattatttagttcaaaatattaattggaattagggctgtaaacgggtgaagaattacgcgagtagtgctttcgtgtctttgttcccgttaaagtatatttttaatatctatcttacttgtttttcta

SEQ ID NO: 175731 - DNA, 713 bp, Cannabis indica
ctatcacttcagaccaaaactcctttggcattcttttacttttgagcatgtcgcgagccatgttaagtatggttcaattcttcctctctgccactccattttcttgggggatcttggcactattaatggataatgaattccatgatcttcatagtatttgttgaacttatttgatgtaaactctcctcctcggtcagatctcatggctttaataggaagaccacttttctttttcaactggagctttggatttcttgaaattctcaaacacttatgatttctcctttaagaaatgagactatacttttcttgaaaaatcatcaataaagaggaggatgtatttactcttaccaaatgagtttgggttaattagcccacaaacatcagtatatatgagctcaagcagttttgtggctcttgatagtgactcctttggaaaacttcttcaggaatgctttccaagcaaacatccatcacaaagttgatttggttggttgatgcatggaaggcctctcaccatctccttcttctctaagagtttaagctcgccaaaattgagatgtccaaagtgtagatgccaaaaccatgatgactcgttgatattatatataaatatatattaataaaaatgagtaattattctactaatttttactttattcttataagaaaataaattagtattgttcaaattaatatatgataattcttaa

SEQ ID NO: 175732 - DNA, 538 bp, Cannabis indica
tcgccacccttcgtcgccagccccctagaccgggagcacactaccccgtcggccttccattcaccaaaaacccactactccgccgtagtcacacaatccataataagatccacccaacgcccaggaaagccaaacttacccataatcgcccgtaaaaagcaccactccaccctatcatacgccttactcatatctaatttcaaggccataaacccccgaacaccattattcttcttaaagagagaatgcaacaactcaaatcccaccataacattatcatgaatagctacacatatccaattttgatcaacctttgatcatagttttttgagaaatgttaaaaggtcgtttttgtaatgtataatattattgttaatgtaatttaatattagacacaatatatcatataatattattactggtattaaacgtcacttattttactttaataaatactataaaaaattattaactaattataatgcgacatttcattgtagtgctaagtaccatagcaatgctctataatttctttggt

SEQ ID NO: 175733 - DNA, 669 bp, Cannabis indica
tattagtgtaatttaatattagacacaatatatcatataatattattactggtattaaacgtcactttaatttactttaataaatactaataaaaaattattaactaattataatgcgacatttcattgtagtgctaagtaccataacaatactctataatttctttggtaaattcataaacccttttgtcttaccaaaataaaataaattactttcatataatcttcataattatcttataatttttaaaaatttataaaataccacatgtatactatattgtatataatttaaaatgttacataatcgatataatttataaataatataaattggtaataaaatactatgttttttattctaaattttaaaagattaatttgaatttttgtttactgaactttgacatgtactaaattttgttctctgaatttttcagatcgttaaaaattattccaaaatattgagattgttgaattaaaagaattttgtctaattttactaaataaaatctaacatggataaaaattagggaatacaatttgtactttagaaaatttaagaggcatgcttttttagatatcaaagtacattcagaggacaaaatttagtacatagattatattactaaaattgaatgaaattggacagaagtccttaaatctaat

SEQ ID NO: 175734 - DNA, 564 bp, Cannabis indica
ctccactgccgtaccatcacaccttactgccattctcctcaactactcaaatggatttactatatgattatgatattattaaaaattgttacaatttttacaatgctcaattaagtctaatttttttttttacacatttatagaaaactttactttaatttttttaagataattgtaaaatatttttagaattttctaaatatgaaaaatagaatagaataaaagcattttttttgaaaattttaatctaaaattttctaattatacatgcttaaaaatatgtagaagtgtatggataaaatccatagaaaaatctaaagaaaataattttaacttcaaatgcttgaaaggcagcaactataaataggcataagagttctaaattgtaatacaacaccaaaaagccaaagctaaatcaataaaagcttactgcttctttacacacaattctcttttcaaaactaaactattctcatatactaaatcaataactaatcatcatcactattaccataataaccattaaactcttatttatcatatccacttattcaaatctaaact

SEQ ID NO: 175735 - DNA, 553 bp, Cannabis indica
acttttattagaaattattgatttattatcgatttcactattattaattttaatccaagagatctatcaagttaactataattaatttaaaaaaaattaattaattagtttctaaaaattattaatatatttaataagatcaatcatcaagttaactatagttaatttaatttttatcatttaaattaattatctatatgtatataaagaagaagtatgaggcggtgacgtggcagtctaaaatcactctaaaattatttttctcttccctccttaattctcttaattttaatattttattaaagcataaatctacaaattggtattttactattatttaataatttttctacaaaaaaacataaatctataaattactattttactattattttaataatttttctataaaaaacaatcaatctatctataactaattaatattaaataaaaaaactaaaatatctacttagagctctatatgtataaccattgtatatataaatatatatatagggacacgattttgtctcgttagtctactttagggggt

SEQ ID NO: 175736 - DNA, 577 bp, Cannabis indica
agtgctaaaattatctttttttctcaatttgttttttaggagcggcgctacaacgccacacttttggcgccacaaaccattttttcgtccctcttttactattttgatctttgctcggtaaatcatgcataacttttgcgttcagactccaaataagattatttaacatattttgaaactctaggaacaagctctatcattttgagtttcataagatccttgagaaaatgaaaaaaaaaatattgtcaaaaattggttcaaatatctcaattcatcacaaaattgtattttaagcacaaacctactcacttattaaacacatcaaatctatacaaaactttacgaaatcaatattaattcatcaaataattgactaagaattagtgaacaaatacccatcacatccccaaacttaaactattgcttgtcctcaaacataaaaaagaataaaactaaaactaaattttaaaaaaaaataaaaaactagcaagttattagacgacaaaacaaagaggtaatttatctcaaacaccaaaactctctttcaattatttaacatgcacttcaaacaaaggac

SEQ ID NO: 175737 - DNA, 638 bp, Cannabis indica
tccagatgaggtctaatacaacatatatattatttaattgttaattagtaattttcacacactattaagaagggatttttacacttggtatctttttttttcctattttttttacatttttatctttattcggttatttaaacatttttaaaaaaattatttttcaatattatattttaaaaagtttgataattacacaaatacctatgcatgcttatgtcataggttttctccaatattacactccatctcttccaccttcttctctttcatctccaatattacactccatctcttccaccttcttctctttcattcatttttttttaatttttcttttattttctgttagtttttttttttccataacccactatcatcccctgtgaagccctaacccacggatttcaacctcccatctatgctacgatcctaaaatgggtttgaaagacattgcaaagaagggaatgggtgatgctgcagagccatctggttctaaaaaaagatttttccagctaagattgaatcttgtaaggcaaagagaaccaaatcttcgagatttgtcaaggatgtaagttgggttgttttttgattttttttttagttttttccttgttgttttgtttttcgtttgtctg

SEQ ID NO: 175738 - DNA, 856 bp, Cannabis indica
aaaataaaaaaaacaataaaaattagtcttcccactcccaaaaccttaaaaataaaacaagtgtccccacctgtgtaataaaattaaatgagagaaaatgatccagagcagctaggactacgggtccatagctctaccacggccatcattagcaggtggatcatcatcattacccctaggtggttgatatggtcgtcggagctcatcagtgcatgcctttagtttacgcttgtgaacctttagaatctcacctttctcacttttaatacttacaaggccacaaggaagtaactctttgaatttaaaaggatctttccatcttgagataacgttacttgtcaaagatttaaattttgaatgaatcaccaacacttgtttccctattaaaaactcctcctttagtttctttttatctcgaggcttctttgtcttttcattatgattagtctctctattatcttcattggaattacaagactcaaccatattgcatgtattctcagtatcggcttgattagaagacttataaatatcaaacttaatttcttcatcattaacactcaaggttaagtggcctcttcgaacatctataagtgcaccaccagttgctaagaaagggcgcccaagaatcaatggcatatccttgtcttcttccatgtctagtaccacaaaatcagctggaaatactaacttatccactttaattagaacatcttctattattcttcttggataagtgaatgatcgatccaccaattgtaataaaaattgttgtaggctttacttcaccaatacccaactttttgaaataccaaaagtggcagtaaatttatactagtcccaagatcacataaag

SEQ ID NO: 175739 - DNA, 929 bp, Cannabis indica
aattataatatagtatgaatataataagcctgtgacaataacaattccacacaagatcaggctatgtttattttaatccattagcaataaaaattaaggttataaatatatatatatatatatatttatatatatgtttattaaggcttgtatgcaacttgcaaagagacttgtttcaaacaaaaagtgtatgcatccaaagttgatgcaataatagtacttttatttttcttttttatcataattttcttaaagtatattgtcaataacttttttttgttcttctttagtcttggtgaataaacaagtgacatagaagcaaattaaatgtcatcttcaagctctcattcaccatgtgctgcatgcaagtttttaagaaggaaatgcactttagagtgtgtatttgcaccatacttccctcctgatcaaccacaaaagtttgcatgtgtccataaggtttatggcgcgagtaatgtggccaagatcctcaacgagctcgcggtagctcaccgcgaggaagctgtggtctccctagcctacgaggcacaagctcgtatacgtgatccagtctacggttgtgtaggtttcatctctgtcctacacaaccgcctcaaacaagtccagaccgagcttcactcggccaggaaagagcttgaggcctacattggccctcaagcaatgatgataccatcctatagcctctccccaatgccacccatgttgggaattcccacaaatattcccaatatgggccggcaacaccaacagttcatgattcaagatccaaccaataataataataatcatcatttgcaacatccaatttttgttgacaacaatgctgctcatcaacaacatcaaatgaggttcaacaatataatggctttgatcacatgggagtgactgcttcaattggagacataggagtt

SEQ ID NO: 175740 - DNA, 813 bp, Cannabis indica
gtaaattatagtatttttagctcataaactttgacaataataaaattgtatctcctctgaaaaatataagtaattcatttttttaaatttctcaaatttattcaccattcactggtaagtggatctgacattctttaatccaaatggcatgaccttgtagcagtagatttgtttgttagtctagaaattattgtgctcttgatcagccacatgcctttttatttggttgtagccaaagtatacatccatgaaagttaagagctgatatcccaaggtagcatcaaacatttgatcaatgcacagaagtggaaaatagtcttttggaaaagctttgttaagatctttgaaatctatacacaatctctatttccctttaggctttggtacttgaaccggattggcaagccatatgggatacaaagctttcctgaggaagtcaatgtttctcaacttgtctacttctatttttactgctttttaccttgctggatttggaggtctttgtttttactagactagttccgcaataagatctacgtctagtgcattcaaaataacatggggactaatgtcggttatatcaatattaatcttggctaacacgtcactgtttgccatgaccgtggaaataatctttttccatcactaccggagacaggttcttccctactcggataaccttggtgggatctccgtcatctatgcatacttttccacttcctccattggttctatgacacgttctatgcaaatttgtggatcaagctcatcttccaagcaaaccccttgtgattgctgagaagatgttccaga

SEQ ID NO: 175741 - DNA, 658 bp, Cannabis indica
caaagtaagcaaaaatatcgccaaatccttctgtacttctctttgtatctatctatctatatatgatgaagtttttgtcctataggataaggggaactacggacggtgcaaacaatcggatgaatttactctcacttgttacaagtggtgtgaacattgatgaggtcaatggccctggtgaggatattcttggagtagttgaaagttggttggatgatgaaacacacaacccagatgtgcctgctgtatcacaccagaggggtctcacaccttttgtttttgttcctttcgaagaggtaagcttgtccctccctcattagtttttagccccaagaatgagctagtttgaaagtattttggtgtttgctttgctgcgcatggtgtaggtggagacttcggttttgaatcttcccgtggacaagatggattattttgtacctggctgattactcgaacaatgaggctattatttgtaaagttgtaattacatatgaaactattagtttctttgttccaaaaggttgaaatagttgcctgaaatattggctcgtgttgtaatgcactgtttgctgtacgtacaataggagttggtgtaataattataagaaacgaaattggatagctgaattgtgtattctatgatgtaataatagatgga

SEQ ID NO: 175742 - DNA, 1164 bp, Cannabis indica
ccatcattaattacatctccatatatactaacaacacagagatattataccttactaatagaaatccaaagtagaatataatgtaaatctctttccaaaatagtgtatagaaattaaacaaaagaaatccttggtaatagctcccagataactctctatttctgtcttaaagattcattaatttataattaatgtgtgtatatatatgtaagtatatgtatacaaactgaattatccctttttaaaatattagacattccaataagctacagcaggtgttggttttgctaggaaattaataatctcatcatcaatggagtattggtggtttggttctatgaagaatggtttattatctataatggtattggtaatcttatcagccatgcaactagtttcttcgagagatcaaaggtttcatgatgacatcaatcatagtaatattggccagaacaactgtgacttttttgatgggagttgggtaatggataactcatcatattctcctctttacaatgaaaatagctgccccttcattggtttcaattgcctgaaaaatggtagaccagataaagactacctcaaatatatatggaaacccaacgcttgttatcttccaaggtatatatatatatacacatacatatacatactctcttgtcttaagttttaatatgagttatttaatgcatgcatggtaatggtaaaaaatctcttgttcaaacccattttctaaaagggtgcgacatggattttagctcattaatttcagtgtatatgtggtactgtaatttctgagtatctttctttctttctttttttcggaaaatcagagaagtttattgattacaaataacacttctacaagatatggttacaaagttttagaaaaaacttccaccactcattatcttttctactcaaattctattagtattcaacgagttcaatttagtagggaacaaacactattaacaatctgagtatttgtgtatcatttcttttaggaattatattttttttaatatttattggaatttgaaattaatgttttttttttcattgagtgaaatttcattataatttatttaattttgggtaatttaatattcgtaatgattattacttcaggtttaacggtgggagatatgttgtaagagatac

SEQ ID NO: 175743 - DNA, 824 bp, Cannabis indica
atgtgcattgattaccggagtaaacaattgactatgaagataagtatcctttacctaggatcgatgacttgttcaatcaactttaggggaaaacggttttttctaagattgatctctaatcaggctatcatcagttgagaatccaagacgacgacattccaaagactgctttccgcactaggtatatgaatttcttgttatgtcttttggactaactaatgctctggtagattttatggatataatgaatagggtattcaaggatttcctcaatgtatgtgttatagtatctatcgacaacatccttgtgaactgtaaatcagaagtggagcatgagcaacatctctggttggttctgcagcgattacaagagcataaactatatgccaagtttcaaaagtgtgaatttaggttatcccaggtgtctttccttggacacattggaagtaaggatgggatcaaggccgatcctcgaaaggttgaatatgtcaaggattggacaataccaaagatagttacaaaagtcagaagcttttttggtttggctggttattatggttggtttgttgagggattttctaagatctcaacacctttaattgaattcagtagaaagaatcggcagtatttgtggacagataagtgtgaaacaagcttttaagagcttaagtagttgttgattgcagctccggtgttagccccaccatcttattaagagaagttcgtggtttactgtgatgcatccaaacaaggtctggggtgtgtgttgatgtaagccgatcgggtcatcgcttatgcctcccattagttaaaggagtatcaat

SEQ ID NO: 175744 - DNA, 836 bp, Cannabis indica
tttgctcaacaattgaaggaatgagattacaaattgaacacagatgtagctcttgatacaaagatgttttgtactagtctgggtgttgtagttaggaattggaaaggtcgaattgttgcaagattatctatccctaaagttggtgcctcctcacctctatatgtaaaggcccaagctctctttgaggctcttaggtggtgcttagcaattaaccttcatatcactcatattgagtctgactgtttacagttagtttcaaaggtcatacataagtaaaagagcaagtcaactctttctggtcttgttactctgattcgagaatccttatcaaaatttccaaatgtatctctttaccaaattttgagaaatgataatgggaatgcccataataatactagagacgtattacgactagataatgatttagtttggagagtttaattctcttctctagcttgtaactataactctatttgtagcatttctcttgtctttaagttagttatagttacttcaaaaaaaaaaaaaaaaaaaaaaaaaaaacgtaaaaggactccacctgacgtgatccctagagatgcaaccattttaaatttggtccgcactttaaccactctaagatttattcaatctaattggaagattgctattgaattagcgctgtaaaaaattatattaaaaagggtaccacaccatgacatgtcgtttatgacacttttattattgtaataagaagcaacaaggccaaaactgacattaaattatcacacaattatgtgatttttataacagtaagaagacatgctaaccacgtgtattttcagaaaaaataaaaa

SEQ ID NO: 175745 - DNA, 691 bp, Cannabis indica
tttttttcaacaaagtttttaataagacaacctttatgaacatctaaggggagtgttattaaatattattataattatccaaattaatacattaattagtaccacaaatgctttattatatttccttttattttattgtttagtttcctatcattttagttatatttttgtataaatagagggtttaacccattagaataaactgctaaaaattctcaattaatctctcattttttttttctttatcttctcttttttcctatttttattttattttatattatttataacagctggttaaattttttctcccttatatacacttaaaaagaaaaggaaagaaaaaaaaagtcttatgttggctaaatgagaagggtgtagtattgatgaaaatatatataatatataaataatagataaaattaatagggaaatttgattttttatgcttacaattggttaaaatagtttttctaaacaaataataactaatattgtaaaaaatgacaatttattgatattcctaaaataacccccacatttactactcaccccactttactaccactcggccaccccaactcgggccgaccactcggaccgacccactcgggccgacccactcggacccactcggaccgacccactcggacgtaccactcggtaccgaaactctgctacctattttttt

SEQ ID NO: 175746 - DNA, 792 bp, Cannabis indica
ctaattgatgttgttcatcatacagctgcatctaagtgaagtaatttcaccacagaatatagatagtgtatattctgacacgtgtagatgcttagtgttaagaccgaactagacgtccccacatcgactatctagaaacaaagatctattgtatttatactccaatctctgatcttcagtgcacgaccttacttgaacaggatctgttctataggctcgtacctctgtttccttgagttctaaggagacaggaaaccaaacctggtggatgaatcatgaccgttcgatcagagcgtgattaacggccagatcttcttcggattatcacggctgtagaggatcgttctcagctggttcactagctggggtggtcgaacggttgtctgacaggttcccttttattttttcttgcattgttttggctagtctagtctggtgtatcagtattgttgtgtacatatataaatacatatatattttttggattgtagtgtttcttaatataaggatgattttgggcattgcgaaagagttgccaaaaaatgggaacaacaagttgaagaagacaaaaatgaacaacataattagttctacttgggtaacaagatctttagttcttctctctctctctctcacctaaaatcatctcaaaatgaacaacaaaattaaatttgttatgaagtttataagttctacttgagtaataagaacaactaaatgatctagttacaaaaaaaaaaaaaatactttcatttaagtcaatctcaattctccacgtgtcattttaggcat

SEQ ID NO: 175747 - DNA, 723 bp, Cannabis indica
ggggatgactctacgttgggggattgagaactatgtacgtcattgcaagctcctctctacttttatgactaattgtaaatttttcttacattgactaaaaactgtaactacgcggcccataatgtggccaaatgggcgtttgccaacaatattacaggtattgtagagatatggtatttgtagagatatctactatacctattaatatattttgtaatgaccatgaggtctaacttcaattttatttataaacgcatttttacaaaaaaaaaactctcctttttacttttttttttttaaaaatatcactactccccatcaaagtttggagctaaatacgacaaatcgttttatatggacttgtcgtttaatatcgatacgtaatactctttctctgtaaccttctccaacttcttctccctccaaaagccctcgagtttgagaaagtgtgaaaccctaactggactttcgatcactcggccatgtcgtcgaccttattggaagtgactaggtcagctcatgaggaggtggagcggctcgagcgcctcatagtgaaggaactccagaccgacccatccagcaacaaggaccgcttgtttcagagccaccgtgtccaccatatgatcgacactatcaccgtcacaactgaaaaactggtaaaccctcggatttcactataaaatgcattcattttcttataattctccaatcttaagccatgtg

SEQ ID NO: 175748 - DNA, 693 bp, Cannabis indica
tgagcaataaaaactatgaagtgttgactgagtagctgctttggaaaaaaaaaaaaaattaacaatgattgtgtcatgtgtttgttccaatgtatgcagattcgtgaataccacaggaggcatccagctgcacgcgttgttgatcctaatgaggactttgaagcgcttctgaaggaggaaccattaattgaattcagtggggaggtattatcttctttcattttccgttaatttcctaacaaaattctataaagtaaagatatgtatccgttttgaatcatatttgagcatataaatgaattgtgtactcaccaaattacatctgatgcctgcttgagtgagtgcatcttattaagtgtttattttggttgtaatatgagttgatatttttttgttttcaggaagctttcggacgatatcttgatttgcacgaattatataatcagtatatcaattccaaatttggagatcatattgattactctacttaccttgatgttttttcacaaccacataaaattcctcggaagctgaagttgacaaggtagcctactatggtagtttttgttttttggtcccttagtagtttggtttcttacattaaatttgtaaatgtttgtacttttggtcgctacaggcaatcaaaggatacatgaaaaatctactggagtacctgacatatttttttccagc

SEQ ID NO: 175749 - DNA, 861 bp, Cannabis indica
tagttaagtgtggtcacaattcgcaaactcaaccaagtaagggcattagtcttttactttgaaagcccaaataaagactaatttacatataaaaaaattaaaaaaaattacatcatataaaaatacttcaacacagaaaaaaatctatttttataaaaaatatacctcttcagtaaaaataataagcaaattttttgttgttttatagtttatttataataatattataattatcataaatttatttttttaatcatgttttattattttatagcttattttgttactttttagttatttttttatttttttgctaaacaaaatatatttttataattttaaaactttacaaacatacttttataattaaaaattttaaaacataaaatcataaaatcataaataatatatatatagggacaggatttggtcccgttatgccaaaacagggaatacaatccgtgattgtactgtagccgttggattaaattggggcatgatctaatggctggggttaaagtaggggtatttagggggggaaaaatggtaaccggttggttttttgtattttaaattaattaatttttgaaaaactgacaccgattggcgattgacgtgtgaggtgtgacgtttgatgtacgggtgacagttagcaattttgaaaagtcactaaatagtgggttcgtggggtatttagggcacatttggttcttcttcacacttcttcagatttcgttcttcttcttcttctcatttccttcttcttcttcttcttcttcactatttccttgttcttcttcttcttcttcttcttcttcacatttccttcttcttcttcttcacagttccttcttcttgttc

SEQ ID NO: 175750 - DNA, 1041 bp, Cannabis indica
aagcgagatacggtcatgataattgttttgaatgtagttaaattataagtaagatacgtgctaacaatgattttaaatgtaatggcgattgcaagtaatatacaatacttaattttaaatattctcaataattacatattttaaacttttaaatttaatttattttatcattttatattttttataatatttgttcattaataactcaacatatacaataaaattaataaatacttaaaaaaaacggcttttttatttttacactttaaaatgggtttttcttacatttttacagaattctacatagaaactcctattgcaactagcactgcaacctaaattgcaacaaaaaatcgtatagaaacccctattgcaactagcgctgcaaccattttagaaactcaaaccgtaaatttaaaaaaaaagttaaaaaaatagtatatcgaataatttctctcgaaaaaatctaaactacgaaccaaaaataaatatttaaaattgccgcacgaagagcgactatgttacttagtttaaaaaatagtagaatttacacttaagatgagattttgaaagttttttacttaaatatagcatatttaattatctcaaaatatatatatatatatatatatatatgagtatgctcttaattggtattacccatgtatgggtattttattcttgaccattggatcaaatatctaatggttgatatttataattattaattaaatattaaaaattaatatttcctattttgttattctctatattcttaaaatagataaaactattaatagaaataaaaattataaatggaattattatttaaaaataaaggaaaatttacatctcaacacgttttgttaaattaatgacaatattaacgtcaatttttaaattattgtatattaatgtattgtattatcctttttttattgtaattaatatattggtacatgcttaacataatcaattttctacatgtctaacctatttgggtatgcgtgcacccatttttcaatttttttgtctttttgg

SEQ ID NO: 175751 - DNA, 670 bp, Cannabis indica
atcaacgctgataaggtgtctatttatgtacgtgactcaaccagaacgcagatacctaatatgaggcccattagcccactttagaatgataaaatgcatctcaagcctgtgagcttgtgcaagaatataaacaggcaactcgcagcatagaagtcacatacgttgttgtatttagtgaaatagatttttaactgttctttcatttattcttttatgtttattataatttaatgataatatttaatgtaaaacaatttcataactgattgagttctgtgtaactaaaatgaccttgctttgtatataaagggatgatccaacatgaataaactaagacaaaaatcctttgcaacagtggactaagcagaccgtgatctgactaaaccactatacatctttgtcttcattatttttactgctttttctattatctgggcagtctcattcaaatactttgtattttaagttgagtactcgctactattttattaaatatatattgtttattttctatttagtgttgtctaaattcctccgacaatatttgacaccgtctgtggaaagtctcttttgattttggatggctgcaaaccagacaaacggaaacaacaacactggatctttcaatgttaaaatggtgaatgtcccactcccaggtgatggaactaat

SEQ ID NO: 175752 - DNA, 668 bp, Cannabis indica
cctgtaaggcttggacttcttccgtttggtaggagatcgcatctctgccaaggattttatttttgcaggattagctttaattcctcgttgatttaccataaagctgaggaattttcctgagcccactccaaaaacacatttgagggggttgagtcacattatgtattgttgtaagattttgaacatggcctcaaggtgagtgacatggtcctacgcatgttgagaatttacaagcatatcatcaacatacatctctatcgcctcgccaattaaatctgcaaacatcatgttcacaagcctctgatacgtcgctcctgcgtttatcaaaccaaagggcattaccttataacaatacaaacctcgatctgtaatgaaagaggtatgctcctagtctggctcatacatcagaatctggttgtatcccaaatatacatccatgaagctacgaagctcatgacttgcagtagcatcaacaagtttgtcaatgctaggtaaaagaaaattgtccttaggacatgctttgtttaaatcaatgaaattgatgcatgtgcgccatgagccatttggcttgggcactagtacgagatttgctaaccagtttgggtagaatgactcccttatgaagcaacatgtcaaaaggtgatccacttcctctttaagcgcttggt

SEQ ID NO: 175753 - DNA, 819 bp, Cannabis indica
attgcattaccgtgttcccaaaatgtacgtatcaccctgatacaaaactaggcttaactaacaaatcaaagaacacgaataacactcttgaaattgagcctaaccatatcaggatttcgatcatgtgatctaggatcaacaggtgatattgaattgaatagatattacggtaaattttaacatatctaatcaaagttcaatatcggtcccttccgatgtatactccatacatccgatactggtaaactttgccaatgtcctggaaaggacataacacttttccaaggtgtaagaatacctatcgctgattataccatgtcagtctaaatccagtgttctgacaaatcagggaataaacttttgaacatataataaagattatattccactgtgctgacaacactataatctttaaccaactcatatgttctggacttaaaaagaattcatacattatatacctataatcatgaaataaatcatgtgaaccatgcaacataaaatgttatttctgatctttattaataagtaaatctgattatatgaaatgagttttatttagggcataaaacccaacaccgtctcggtcaaccacttgaagcctggctaagagaagtaaaaataccccgacctgccttgcttggggatagacttcaggtcgaagaaccaagcgacctcgtggggagaaggagcatcccatccctgagaagcctagaggacgaagagagcggacaaatacttaatgccctagggagtaatctaggccgggcagaggccgaagaagtctgccacatcccgaaagtaattatgcaagggcat

SEQ ID NO: 175754 - DNA, 871 bp, Cannabis indica
ggaaagaagggggttgctgggtttagttcgagaaagggcagaatagtaattttgagaatggatggaggagaagacgagaaaaggagagattgcaaagacccctgaccaagacgactctttctctcttattctctctcaccgttttcccattgcttctgaatgtaccagaacacaggcccaacccaactctcttcagttgggcttccacacatactttagggggacataaaaccttgggactattttacagatatacaaaaaaaggtttacaaaaatacggttataccgaattttaaatatttttatattttttatgattttatttacaaaaaaatatagtcttttaatgtacttttatgttgtacacctgttaatttttattttatttgtatgttattttttgttgttgtttaaatattatttttttattacttctatgtaatttttttattattttcgtattatttttatagaaacccgtaaaattgtaaaaaaaatctttaaatataaaaatataaaattttacaaaaaatagtattttatataagtattactaagaccttttaagatttttttagacttttcctttttcattgttcatttttaggatagtttagatcaatttgtgctccaagataaaaaatttagttccatgttgttttttaacaagacggcgaagggcatgagtattgaattacacccggttggtaatatgattaaaatcaatgtcaatgtaatgttaggccttagggtaattaataaagagggtaattaggtaattgtaattagagtgttgagattgtataaataggagagtaatagaagggtttgaggggggaagtgagtttagttaagtgagcttatagctctt

SEQ ID NO: 175755 - DNA, 723 bp, Cannabis indica
gtttaatatcggtcccttctgatgcatactccatgcatccaacctgagctttactttaaccaatgctccggaaagaacatagcatttctccaaatgcaattaaactctattgtagattatcatatcagtaaaaccctgtgtctgataaatctaggaaactttattcacatagtcatgtttactttccaatgtgttgacaacacaataaacaggatcaagcatgtgtgaagggtttcagatgaatttatacattatgtacacataatcatgaaataagtcatgtgaaccatgcaacattaaagttaattctgatctatattaataagtaaatctgattatattgaaatgagttttatttagggcataaaacccaacaggatcatcttagactcaattactaaggcaatcaacaagtccaatgttgtacaattgaccacataatgccacatttgtatatttctccaaggccaccacaagaccctaactacggtccaaagagggagaaaattggttgtctgcttggagccgtggccttggccgaccagggttccaggtgttgggttttatgccctaaataaaactatttacaatctgaattagttatcaatataagaaatttgaagtgactgatgtttgcatgaattctacatgctaatggtttaaatatgtttattacatttacacacagaatcagttaaatccagatcatatgtttattcacaa

SEQ ID NO: 175756 - DNA, 968 bp, Cannabis indica
gtgggagcgagaaagtgagaacgtgagccgataagggaaaagaagcacctagacagagattgatatcggatctcaacttctccattaatctttatttcaatgcgcttttacgtccgtgaattaattaatacaaacaaatatatatttgagaagttctatttgcaccccatttttacgataaatacaacacattattaaaattaaaaaaaaaataaggaaaattactttatatatttattttataaattattttttcaaatttacgcttcaaatttacggaaacggtttagaaactggttaaaattccgtaaaaaaaaactgttttgaaagtgtaaaaatgaaaaagacccaaaaaaaaatataaacttaaataaattttaaaatttactttaaatattttttaaattttttcctcacattattttatgttaatttcaatacttattttgatttcatttttataattttttctaactcgtgtatacatatagttttatttttttctaagaaaatttcatataattttttatttaatttttttatcataatatttaaaatataatttatttttatttgataggtatattttttaagaatatgaattgaaaaaaaaaagttaaaaaaaaattagtataattgaagatataaattttatataaaataaaaaattattaaaattgagtgtctttcaaaaattttgggtgtaaataaaattttcctatatattttttaaaacttatctattataccctttaaaagaaatgcacattattttagtatttgaaatatattatgaatcagtttggcacagttgtagttgtgctgtgagaaaaaacagttgtagctgcgttgtggggaaaattagctgtagcagaactgtagaaaaaaagctgagctcagttgagtgttttaatattagggccttgacccatgtcttattataggtagtagtgacgaggtaacaagtc

SEQ ID NO: 175757 - DNA, 504 bp, Cannabis indica
atatatatattttttaaaatacagaatggacaagtacacacaacattaagaaaaacaaattatttttttaaaaaaaaaatctaataagggattggtggaatattttttgaattattctgaggaaagttgtgcagagaatttgagatgaaaggaaaaagtaaaaaagcgtgagtggcacgcgttgaaggtcaaatggagacaacaaatgaagttattttttttttttgcagaagagcgtgcccagaatctaatctacacaaagaatcccaatttatttatttattttttaaaaaaataaaattagataaagcatccatactccatagcctcgatgtccgaggtttttattttctattatttatttatttatttattagttcttttttttgagaatgttttgtctttcccagtttcgaggcgcgtgtaacacggtctttgttgttactgtttaacatgtgggtcccacttctcgttccttctttatcttacttgtctcacgtggcc

SEQ ID NO: 175758 - DNA, 613 bp, Cannabis indica
ttcatctatagcaattaccacaatttgataatgcaatactattatctaagtcttcctttttagatctctaaatcagaagcaatttattaatttgattatcaaaagtatacaattgtgatgagacaatatgtatttatagaattaggaaggggacttagttacataatcctagttggattgggtctgctcatcaaaggcttcggtcaactaaaaaagttcacacttttgtttcacctagactttacacacagatatgctaagcccattaactagtgatcaccaatattatgggctaatacagcaaagaattattcaatcaacctaagttttaataaaaccaataaaatctaatgtaagtctaaataaaaagtctaacaaaactttaatttatactaaaactaggtaacaaagccgcgctttgtgcggttgttaattttttttaaaagtataaacctatacataattttttattgttgttgttttttgttatttcgagaaaatttgataaatatgatatgagattaaaaaaaaaaatacttatgataaagtaacaattctatataaagtacataaattaattattagagaatttcttatgaaatattaaatgtat

SEQ ID NO: 175759 - DNA, 782 bp, Cannabis indica
atcattattttggttgattgttagtaaaataaaattcttacttgctcattataaaaaaattatccatatggtgcgatttagtatagatttcatatgtttaaaattaataatttaaatatgtaaaactttatatattagtaaccatttatctattttataattaaataataaaaaaattgatgatttgataattatggtaataacataagtatcagtttcaagaaaattaagaagtgaaaatagaaagaaccaataaacattaagaaaagaagtaatttaaaattaaagtctaaaatatatgtacgaggctagctaactgttgtataggatcagtatctacgctttgatgcaattaatacagctttgagaagaggaatctattaatatctaatcaccacatgattctgctatgccaaagaaaaaaaaaatgaacccaagaatcatatttcttaattatatatggtggttaagattaatcatttaagaatatatataaaatttaggggacgtggaaaagacatgaagtattatatatcataactttatttattaatgaaaaagtgttaggttagaattaccttatgactttaaaagtaatcatgaaaatatgttttttttttttaatatgaaagtatgatcataatgatcaagtcattctttttttaattttttttttgtaacaattgttttgagttcatttattttttttttttaaaattagtttctttttgtagtctattatactaatcatggacatacataactataagtacggtgttttt

SEQ ID NO: 175760 - DNA, 701 bp, Cannabis indica
tatatcacaacccatatacacattatcctctatatcaattcttccaccagcgagctactatcttgtcaccaccataagcataccatacaaattaaaactattaatgaatttttctctattaaaattgattaaataatgcgtgtatacatataaatactaagtgttagtttttaaaagtgtttttatatatatatatatgaagatattgaaaaagaatatgtcgataattaatttaaaattttaaggataaatcaagctaacattgtcaaaaaaatggagatgaggatggatattagcattagagcttggaaattaattgatattgttttggattgaagagagagtattatagggacattaactgtaaaaatatgcagaaaagataaattattaagaaggtaaaaatgaaaagtggaaattatattgtatatttattttattttattttatttattttaatttttactattatttctataattttaaagatatatcaactttcataaatgatgtctctattatactatttaggttaatataaattatgtgctagacttaagtggtgggtgaatgtatatggagcaacccactcacaaaagtagatacttttaaataaaatataatataaaaatatttttaattaatggatacagaaaaaagggataattgcgacaaaagttctcaaaaatttaggattgatg

SEQ ID NO: 175761 - DNA, 559 bp, Cannabis indica
cttgagcttgagctcgacacactccgccagactgcctcagagaataaggaattgaaaacttcaatcgagtgccttcaggatgagcttactggtgagaaagatgctcgtgccaaggaacaacagtcacgcactgccaagtctaaaactttggaagatgccctaatggcaaaaactgatgaatgtgaggccttgtcttgagacatggccgagtctgataatttctttaatgacgttttcttcaacttttggcgacataacaaggaggtcgactttagctacatgtccagttttatgatgggtatgttagcctactattgtgactacgaagagaaggaaacgcaccagaggaaggaggcgccactgacccaggccgactcatatctcaaccttgagggctttgttattggccccagctcctctggtgacctatttgatgatcccctttgatgcttttactttattatggttgtatcttgacattggagtactttacgagaatttatgactgtctggcagtctttattcccatgactttatatttttgagacattcatgtgtt

SEQ ID NO: 175762 - DNA, 755 bp, Cannabis indica
actgtgttatcaaagttaggctaatatatacaaactccaccggaagctgactggaaggtagtaattaaagtggattatctttttgtgatttctcttgcactttatcaaatagtttgcatttacatttgttactctctccatacgtgtttctgtgatgttgactaggttggtgaccccaccgatgattctcattaccttgggctattgtgttttcttgactactgcatacttaatttcccaaagttctaacaataccatgtgtcacacatgagcttaacttatgagtcttgcctttcttaattactacagagattacttgccaattaacaaaaaaaaaaaaataataattacttttagtgataattttttagtcataacataaaacttttgtgactaaatgtgaattttagacacaacaaaaagttatttgtgagtaaaacatattatttaaatacaagttatacaaatttaattttagtcacaacaaatattgtaactaaaaactcatttataaatcacaacaaatcttaatttttgtgattaatatattaataactactaatttttttattcataatataaaaataataatttataattggtcaaaattttttttttacgtaattttagtcacaagtaatgttgtgattaaaagtaaaaaaaaaaaattgtaatgtccatgggttcagtcattacttagtgagatggggctatcatccacttcttctcttaccatttagtgtgataatttgatc

SEQ ID NO: 175763 - DNA, 608 bp, Cannabis indica
tctcatatatacttttaaacaaatattaatactataatagtcaaaacaaggagtaattaacatcttaattagaattaaatatcccacaaaatatatatttatatataatataatattttaagaatttttaaatcaaaactcaactaaaataaaatacatttatttatggtaaaaataattaatttaataaaatttaattatggttttaaaaagtaatggataatgaatgcaaaaagacattataaattaataactttatgtaaaacaaaataatacattttaagtgaaaaacaatagtaagaagatctaaaatattacacaaaattataaatggtaagaaaaaattaaatgataatgtaaaaataaatttcctttaatgtaatttaatgagtttcataaatcttttcctaaaaaagtatcatatataataatcaatatcaaataagataatgaaaataaaactgaaatcaatcacgagataaaattggcacagccattaaactacaatcaaattcttaaattaaatatataattaaaaataaaagtcaaaaacctattaagtaaaattagccttatacaacctactatatatatattataaaaatagt

SEQ ID NO: 175764 - DNA, 695 bp, Cannabis indica
cattagtgcattctttgttgcatgtgtgatttaaaggaatttgttttgttccgtcgttttgtggtaattttgatttgtttttgtaagaagaagaggtgtatgaaacagaacctcttgtacatggctttattgtaacaaacaatcttacttgtgtatcataaaagcccccttttgcacctggaagcttagttagaatagtcggcgatatgaagattatttctaacaatgaattattagtggtgaatatccgtttcaatcatgtgataattaaattgacttgttttgtcatgtacttggttttccttttccacccacaagcttatttagttagcacacttgggaactgaagattgttttaagctattaatttctattgagaacacaaaatttaagtttattgtaatttattttgtagattagaatagtatgtttgtcctagagttgtatgtctttaattaaagtcaaggatatcttgatgtgcgttgttacttataatgcattagtaaagcagtctaatcttgtatgggaatatgggattgtaagaaagtgggtctaaacttgggctttggtacccaactctcgcacatgatgctcaatgtaggaagggtaatgggatttaaaggtagagggactaaacttgggctttggtgcccgaactagcacatgatgctcaacatgggaaaggtatggtccgt

SEQ ID NO: 175765 - DNA, 1033 bp, Cannabis indica
aatattaattggtcaaacatattttataatgtcacgttattttatctaatattatactatttatttcacaaaatattataacatgatgcccacaatttagaaacacaataatcttcttttaaattcaatcttcgagttatgaaaaagaaacttttttttcccttctttctaaagtcttcattctaagtgattggacatattattatttataatatttctcttaacaacactttgattggaagggagtaattataaagtacaatccaataagagagaaagagagatgcacataacagatagataatttttttttttaatttttttttttaatgtaatgaaaaataataaaagatatagagttctactactattaaacttccatcacgtgtagtgtatatatctatgatttaaactagtttgcctgtgttataactttcaagtgcattaaagtgatcaaaataaaactataaatttatttatttttcagtacaataaaattaataaaataaattattttttctaagacccatcaacatcttgtatcttccttatatgttcttctgcccattgtgcttttctttccatcaagtccctctgtttttggtatattacttttttagaactttgccaactcattacagagatttctctttgaaataaattttcaggttcttctttttaggtacatatgattctaagatctttatgttcgtttttataatatggtcaaattatatatattattcttcacaaacaatatagattctataacctaagttacaacgttctacaatttcattcgactagcctaatcattcagttcttttttctttcaaagcaaaaaaaaaaataataataataattcaaaacttcacatatgattatttatagagaaaaatggggaaaaattcacagtcatgagtaaaaccctttgtgccgccttgcatttcgctcaattgtcacggattaaattttattttatttaaaaataaaatatagttttttaaaatatattataattgactgacattgg

SEQ ID NO: 175766 - DNA, 764 bp, Cannabis indica
ccatttaattataatatttacaataaaatttatttattttttttacaaaaattaaacttcttttgacacaaattaaaattctcttcttataattaaattttaaataattaattatttttaaatgatatttaattattttgttacaattatatgaactaagtatgaggcctcaagctaatcaatcgataacaagtgcagtctattttttttactaaaaaatccttcaacttatttcaattttttactttttaaatatttaaataaaaaattaaataattaagtgtaataatttaaaattaagattacaagtataataaaatttaaattatgaaattatatgtgtataattttaattataaaaagttttgctataaaattttaaataatttaagtaataaaaaaataaattgactaaaagatctttatatagtaataaattgtaaaaaattaattaataattataattaatttaattttaaaatataattaatcttaattaaagttttataaagaaataaatgattagcttactttcaggttacaagttaattattatttatttttatttaattttcaaattaatcacaaccatttaatagtaatccaatgaacttaaaaaaatacaataaaaatataaccattgaaatctcttccatttatatatttatatatacatatattttttttggcagtttttttttacagtcatatatatcttgatatatataaaaatcatatctttgacataaatatatatatatata

SEQ ID NO: 175767 - DNA, 847 bp, Cannabis indica
gtttgttggaacaacatttcatatttttcaatacagagtaaactataatcaaacataatgatatgcaccaataaacctataagtttattttttgtatgttggaacaacaattcattttttatttcaaacacatataaaataacaaactaattagtctatttttttttcaagtctagacatcaaatcgggatgcatacaaagtacatgagcgtaacatgcatgtcttacatagtaaacctgtataacaatatatgcacttgttgaatatgatgaaatgccttgctcacatctaataagtttatttggaatttatagttatactatgcctatactcagggccggccctgaaaatatatgggcccaagacgaattatattttggggccctaaaaaatatataaaaaaataatcaaaagaagagtgttatgggattagaacccatgacagacattatgccatccacctcaaccaactaagctatgaatatttgttgcttataatacacttaaattttacttaaataaaagcctaaataaattttttattttttttattttcggcccccggaaagtgtgggccctaggcgcgggcctagcccgcctatgcctagggccggccctgcctatactcatacatgcaaaataaaccaatcacctaaagaaaaccgtaaatacccataaactctctcaaacccaaatatcagaccccaagtaaaaaagatgactaataagaaaaaaaaattatttacaagctacatatatactcatatatcgaatttataaactttaattttttaaaaattattaatttttgaaattttactaaagctatattatatattatatata

SEQ ID NO: 175768 - DNA, 624 bp, Cannabis indica
cccgacattgcagacagaccacaaagcagacgagtgctctgcttggacactctgtcatgagcctaaagtacatcctggcatcaagaagaggcttaagcaccaaagcttgggaaccacgatcactttcacagaaagagatgatactcaagtcagttcctacacaagaccccctaatcatcactgcacaaatcgagaatatgactatggtaagatgcatggtgggcaatgatttggcaccctgcagtcaagtgatgtatggcttctttagcaaggacatcacacctgtggggtatatcagattacccctcactgttggagaaaatccaaccaccagaactctgatggcatagttcgtcgtaattgacattccctctactttcaaggccatggtaggtcaacctgccctatacgacctgaggcggtaacatccatctaccacctcttcttgaaattctcaacaaggtatggggtaggatatttaagggaagaccaacaatctgctcgtaactgttacaacttggccttgtccaaaaccaagaaaaagaatatgcctgccaagagctctgaaaagagcatagtgaagggcaatgaagtccagccgaaagtggggatgcagacatagat

SEQ ID NO: 175769 - DNA, 706 bp, Cannabis indica
ctgataaataagtagaagaggcgtttgttgttctcgaccaatactaccattaatcgcggcgattaactcaagagatagcggcggtggtggatttggccctgcaaccacacctcgaggattcgatcttgtaactgcattacttggtattttaatcttccttggtttcttgttactcttatgatgatcacttgatgatgatgatgatgatgatatttctctcttattatgatgagtacctaattgatcacttgatgaagatgatggtgatgatgatatttttctcttattattatcattatatccatattcagttattagaagttgataacatacgtctactagagcattaaacttgatcattgttactttctttcttttaattaatttcttgctagaaaaaactcaagaaaattaattaattgaagccttgagtctactaaatatatataaaggaaggttttagttagatttctagttaaattaggatcaaaaagattttctaaatttgaaaagaaaaaagaatttataattgtattaggattatacgacaccacactatatttatatattccaataataataataataataataataaattttttaattattatttttaattatctaattatcttttttagttgtatatttagtagcgttctgttcaaataaattagatattaaaatgtaaatttgagtttgaata

SEQ ID NO: 175770 - DNA, 628 bp, Cannabis indica
tactttgccgttaagtgctaagttaatggtcatgtggcagtctctgattgattcagattaataaatctttattttttatttaaatatataagaaaattaaaaaatgttgaaaatctcataaacaaattatttaaaattaaaactaaaattaaaataatagtaaacaaaactaaaaatcttaactcagaaaattttgaaccccaactcagctatgtccatgatcaatcaatccttttccttaaccccttcctaaattgttcaacgtggacttgtagtaacatcaatcacaggccagaatttcaccattcatcagcttccatcacaacgaaatcaaaatgaaattaaacaaaacctagaaaaacccaatacaaacctaaaaaagaatacaaaataacccaatacaaaacctagaaaagaatacaaaattcctacaaaattttgccatgttgaacaaagaaaacccaatacaaaatacatccaggtaaaaaccaaaaaccgagtacaaagcttaattattcaaacaaaataaatgttacaaagtttaatcctatttatggaccatcgctcttcttcttggctgaccaacggagctacgatttcatcattttcttgcatttttctagcagcc

SEQ ID NO: 175771 - DNA, 997 bp, Cannabis indica
cctttacattccaattgtggatgatgatgaaaagtgtcttcatatagaccaaaatatgaagaacatatcacttgttttgcgaataattaccaatttttcatatattttacatgttatttttcggcttagaagtgccctaaaatactcaaagacacatcaagtatccattctcatagggtttccatggtcttatcttctaattaatgttttgtccattcttcctattcctcaggtatataaatatatctaaactttatcgttttttttttggattatttcatatatatatatatatatataataaaattaataaaaaaaaaataataataaatttaaatattttaccgtttttaagtatttatttactagatgatacagttttttgatgtttcatgttattttatgtccattcttcctattttgttgttattttgttattttattatttgtatgttattttgatgttaatttcttattacttttatatgggttttcttgttcttttcgtattattttataaaacactaaaaatataatatattgaattcatatataaaataaagaatgaattaactgctctgctagggctctgcgattccgatctcatatcggtggctatggcaggtcgtgggcgtccgaggaaggtagcgcaggggtcgagcaaacctagaaatgctgtcaaaaattcaaagaagggaggaaagaaggagattgatgaaacggttcatgctggtttgatggagaggattgctgaaattgaagctttagagcttacggatgaggaacttgcgattgacgatgtccctgttcttcagggatggttttcaacctctctctccgaagtcgtctctggatgcgattaggagacaagaggatgttcgaagtgacttctccactttatgcaagctaacagccgatgcaatagtgcacttgcagtaggtaagattcatccctctgttttgcgatctgcatctgttgttagaaatttggagaattc

SEQ ID NO: 175772 - DNA, 729 bp, Cannabis indica
aataaactacgtctaagggggccaatagaaaaagattctttgcaatttctgtccacaagcctagtcaaattgactttggaacatacatgtattcaacaagaccctatggcagtactggaacagctaccaaatttaaagctcctacagttgcattctttttcttatattggttccaaattggtttgctctgccaatggctttcctaaactagagactcttcggctttgtcacttgcaaagactgaaggagtgggaaatagagaaagattccatgcaatgcctgaagagattagagcttgaacaacttctgaaactgaagatgattcctgatggcttgaaattcattactactcttaggcaattagatgttatagaaatgacacagatttttgaagaaaggattaaagtgagtgaaggacttgaaggggaagattacaacaaagtgcgccacattccctccatctcaactagaagactttattaagaatagctgcaactttattctcatcattaaattgttgctcagtctcatctcaactcaaaccagtatcataatataaattacaatgctatcttttctttaaatagagctatccttatccaacgcattcaagttattattattattattattattattattattattattattattattattattattattattattattattatttcccctactctttttattattgtattaatcatagcttttgta

SEQ ID NO: 175773 - DNA, 562 bp, Cannabis indica
ttctggattacattgaaatagagttttatttagggcataaaacccaacaagaatatgcataacattaatcgaccaaaagctacatgaaatagaaaacaattcaaaacaagaaaatcaatcaattatgacaaccaattcaaacacaaaccaatcactcaaaagcaaaagctattcttccccggtacatttcccaatcaaacagatcacattagcatgtttcacacaatgaagtttcaaagtaaggaagtcaaacttcacctcctaaaataattcaaccacaaatagagtattgatcctgagtcagagattaaaattaatagcttattaagctaacaatgaacatacacacccatataaaaaaaacagatgaagagggcatcgacaaagctttgttctagtattagtgctttagtgttgaagttcagtcagatgggtataacttatttgtcccaatagccattgcataagcaggttagataaaatttgacctaggtagactatacatacatacatcatgtatgtagcatttaaacaaataaatacactcaaaacccagatagta

SEQ ID NO: 175774 - DNA, 751 bp, Cannabis indica
  modified_base (720)..(720): a, c, t, g, unknown or other
cccagccggaagtgtggtcgacgaggacgtcggaccccgtaagggggggtgattgtgacagtcagtagtcccgtgatccgtaaggggaaacaccgggtaagctgtgcaatcccacatcgcctggggaaggtcaagtgggatgattctgagactgtgtaggtatgggactacacagttgaagagagcttaaatggattgattggtactacctatatcaacaaggtgcatcttgtttttcggtagcccatcacgaaagaactccacagttaagcgtgcttggcctggagcaatttcaaggatgggtgacctcctgggaagttttcccaggaagcgtgtgagtgaggacaaagcacgctggaaacactcgtgttggtctgtagggtcagtcatcagtccaggaagcagccaaagtgacgtacttgtcaaaaaaaaagtgacgtacttgtgtataagagccattcattccgtgggtgtaagggtccaatggaggcttgaagcggggatgttacagtcatgatgcccccaaaattgtaataaaaaaaaaacaaaaactaattctttttcattgcattttatccctattttcttcaaaatttgtagtatggtcccccctaattttacttttcttttggccccatctaatacaaaaattacttcatatgaatcgtatttaaaaaatcaacctatatgtatctatgtgcaattattttttgtctcccnctaattattaaagacatctatatacatatat

SEQ ID NO: 175775 - DNA, 1038 bp, Cannabis indica
attatagtcgtactcaggcttccaactataatcatcagaacttttgtgattaaaccaaggatcttcctcttcacaactccactcatataagggattatagttgtactcaggcttccaactataatcatcaagactattctgatagaaagagttgtaggattgttcttccatgtcatcataaagatgtgcaaaagatggcgtatgttcacaaggacgtggtcgatgagactcgtaccaagccttccactttttggaactatcactcttataaaaagaatagtattggaaagcttcctccccgtcactaaattctggttcgataaaattactagtaccttcagtagcactagaattttcatttaatgaagcaagatataatggatacaaatattcaaatcggcgatgatcttcttcattcatatttttttttaattagtataaagttcaaatatgtaataatttaagggtatatacatgagatattcccaggccaattgggaaggttgccaaggtaccgcttcgtcccacactttactagaactccccgaggttgctagaaagtgtagagggtactctaccacaaacctttaaagccaatctttcttagacagaataatctcaatttttaccgctttcatcattacacaatcgttctcaacactaatttttttttttttaaaaagtattttataaactaaaatttatgtaattttttttttaaaaaactaaaagataaaagtctataactaacctaaaaataaaaataaaataagggtctaatgctagaagcaaaagtgtaccaaaaaaaaaaaaaagcaaataaaaattgacaaacttatagctaaaagagaactatgataaatcaaaaaactaatgaagcaaatttaattgatctctcttcttttttttttttctaaaaacaaaattctaaatatttatatatatatactctagcaaaaagataaaaaaaattaacactaacgaaaggaggaaaaaaaagaaaggttgattacaattttttttttttttaaaaaaacc

SEQ ID NO: 175776 - DNA, 517 bp, Cannabis indica
ttaatatagaattttcgtaagtgtaaaaagccgggttattgtagatttttacaattgagtatttgaattgaagaattaaattattaactacaacaaagacaaaatttcaaaattgaatttgtttgaaattttttaaagtaagggtattgtagtattcaatttcagtaagtactaaattttttttataatttttgaaattaatagaaataattattaaagcaaaacagactagaattcaattggtctaatttgggatcgtaagagaaattttgaccttatccatcttaaaaagatatcaagataaaaaacaaatactctaaaataaaaaatactctaaaataatagggatccggtccttagatttatttatggtcctcaaggagccgtatgaggtgaaaatctcatgtacggttctggaatagcgatgggaacagtgatggtatcatcgactataattatctaatagttcaagtacagttgatatagttgaggcccaatcaaaatatggtttttgggg

SEQ ID NO: 175777 - DNA, 651 bp, Cannabis indica
taatattttctttttcagtctttaattggactggagtagagaaagtggctaaagtggcaacagaaactgaatacgaacaatgtcgaacaagttcagcaacagtattaagctccacaagaagcccatttgtgtatactctgaacaccactggtgtccaatatttcatttcctctgatggaagccattgccgaaatgggcagaagctgaagctaaaagttgatgaggagtacaatcatgttgacaacagaagaacacctccaactccaccaactccacctacacctcctactcctcctactcgtcctggacacccaactcctcctactcctccaactcctcccactcctccaaccccgcctactcctccggcgccttgatcgcggccgctatgttcacctctttcccaagtttgtttacagcagtaatgtttgtcctactagtattttattacttcttgatgttgtcgattaaactactgcatatctcatcgtagcttgtgtttgtttctcgctgattattttctctgcttgtgtttcatcaccgtatgtacctgtgtttgaaggtcttattgtgatatgtactaaataaaaccatttacccaaaaaattgtgctgtattgaaaaaaaaaaaggtctaattagatttttaccg

SEQ ID NO: 175778 - DNA, 674 bp, Cannabis indica
agagaatgttcttggtgagttttttctcttcttgctcttttgcaaccaagattctcgaccccattaaatgagctttgagggggtatttatagtgttttggtggggtaatccctagaattgttcttacacatgtgtctgtaagtatccataaagttgggcatttccgatgaatataccatgggtgatgcatggtcaaatccctaggtgctgtagggtttttatggagaatgtcctttttgccttgtgattgacgtgactcttcgcagagtagccgtcgctagacttaaatgatcattactgtagcgctgctgtttgggggttgtgccgtcagactttattgcgtgttacagtcccaacacgcttcctcccatgcagcattaaatgcgacttgattgctcgggagagacctgacatatcccggagagccttcacgctatactagcttcctggagtaccttgtactccgggtgcctcctccgggacccatgctaacagcgcttcctggtggcgcacaaagacttagcaaatctttccaagttatctgatccacgtgtcccctctcgactggtccacgtattttgggcgaattctggagcaacatttaccccccaagccttgtttacttagtaaaaataaaaacctaaacggacgttcgtttcgtaacgtaggttcgt

SEQ ID NO: 175779 - DNA, 843 bp, Cannabis indica
gtttccttatatttataaaacgtgatttttcttttaatgttatatatgtagacttatacttattaggaaaataaataataacttcttatattgaaatattaattgttttttaaaggtctattttcaaaatctatacccttttgaaatgttatttaattcctttttttattctaaaatttattaatgtaataaattataattatacatataaaaataaaaaaaattacataatagactaaaaataaaaaatatatacataaaatacgtcaacatggaaaaattttatttttatgctttgaacatttttgtttacaaaaatacattttcagtaaaaataataaaccgtttgtttagttgttttatagttgtattataattctcatttggttgtttttctgtatttttggtcactttaattttttgttgtttttcagttattttcttactttttactagaaaaatgtatttttgtagttttaaaactttgaaaccatatttttattaatgaaaactgtaagtagtaaaattataaataaaacattaaaaaaaagaatatttataaaatttacctaaaaaatagtttataatttatttaataatatatcgcacaaaacaatgttttaaacaataacaccaaacaataaaaaaaattacactatatacctcttttaacttgatgcttttaatttttaccttctattttaaaatctatatatttaccttttttttctaatcattctaccaattttacccctatcactttacgataatttttatttttttctaatcaaagttttgtccccaactttcccacaaatctacacatccatttacaaagaacac

SEQ ID NO: 175780 - DNA, 524 bp, Cannabis indica
caataaaaaaaataatttctcaaattatgttatgttattttatggaattatgtgccaaattatgctaactttctaaaaaaaaaaagtatcccaactccacaagtaaaataaaaataggaaaataagccaaatattacattttcaaaatcagaattacatagcttacaggtacaaagtcatgacataaaaaaaagtttccaccattacgtcacaatttagcttcagtaaaagttttcgataagacaataaccactgatcaatgtattgttgatccactggaaaagagtttattcaatcttcagtgaaaagcattttcttttagttgaaatctcattcagctgatggttctcattcgtagacaaattaccttatttatatttatggttcttgcttcaactttggtattttgcttaaatgaaaacaggtcggtaaccctcagattaaaatgtttttcagttttatttatatattaaaagataaaattcattaactaattaaacgattaactgttacaaaaacaacac

SEQ ID NO: 175781 - DNA, 566 bp, Cannabis indica
tattgactaatttatgagtattgagtcttctatttttattttattcttcatactaatttacttaccactattattatttgtattgtttgtatgtagtaagtttgtttttatttattgatgactaaattctataatttatttacaacttcttcatagattattattataataaactactaagtaaatttattttctattgttttatacaaattaatttgttcaatttctccataactaatttattaaagtaattttgtttaaataaaaggatcttatgatctgataggggtggagaaaagttaagaaaactatgcagttcaacgatcttttatatctaatgaactctggatagtattcaactccacataaactctatcacactaagagaatcatgatctttacaacctttaggggtggatcataatctctatatacttaggggtggaggttatccatagtaccctatatgtatattcttaggggtggagtctattccacaattccctatgaaacacatatcttgtttaaacatggaagtaatataatgagtcagctattgtcaatat

SEQ ID NO: 175782 - DNA, 688 bp, Cannabis indica
ttcagtcgccaacgaaaaaattagcataagaattatgccggtcaaactctgataccataattttaggtcttgtttgaattcatgaaaataatttaacaaatttcatatacattatatacattttttaatttatttttttttttaaaatgagaatttctttatttttcttgaaatttaactttgagattttttaattctttcatatataattcgaaatccaaaatccaagtcctaggagtttttttttttttttttcaattctttatttatttaaagaaagagatgatttaattcttttagaagtagaatgattagcaagcctctcatataaaaataaataaaaacctgcaagaaataggtcaacctaacatctgacttgaagaaaaaagacactaatccccattcgccttggttaattatatttaattttaatgagatcctagtagcataatttagatcacccaggtcgttatcggtctcttatttatcttattaatttttaataagatatatttgaaaaatgttattaaatattaataatccatccctaaaacgtagagaatttattaattaatatcagttacactacttagccatttatttaaccaaagctgcactaaacgtagaagacggttaaagtcataaaacgacaacgggaagtgtgaacatgactaataaccatatggaa

SEQ ID NO: 175783 - DNA, 506 bp, Cannabis indica
cttctgcaatctcagctttgtttttactgatttgtgtttatttcacaccccatctgtctgctcaatggatgatctaacctcttctctatctgctgctctcaacctaacagaaactgagtgtactatccaaactctacatgaccacactcctgcaaacacccctgaaaccgagcctcaacatgttcctcttttcttgttgctaaagttcacactgtcaagtcctacaaccggaagaactttatcgaaaaaatgacaaagaattggaatcatatttctcggaatccggtgattattaccgagcgccctcatggcctcttccttgttgagtttggttgtgagggagataggcgtcgggttttgttgcaacaaccttggacctatctcaaccaagctatccttatggatatcccgaactctctggatgttctaaatggggatagtttgctcaaaattcctctttgggttcaagtattcaacactccctttctcaaacgctccgaagagtt

SEQ ID NO: 175784 - DNA, 661 bp, Cannabis indica
aacataatatatcactgagttgatgaaatttacatagcagctctattcacttttgataaccaattaaatataggatgtttatttatttttgctcttgaaattatatgtatatagttacaatgcttacgaaatatgattcactttacatgacttaatataaacttattatatttataattggattaaagttaagtatttagatgattgtaatatctactctgatttttgttttggaaaaatataagcaaatatgaaaaaaaaaaatggaacaccataggtcagttgtgcgggaatcgacttgcaatgcaaaacctcataggtcggttaaataaccggcctcccatgttgtacgttataggtctcccatgttgcacatcaaaagtcggttaggcgccaaccgacttcccatgttttacatggtaagtcactgcatggaaggtcggttcccaactaacttatgaatgtttagaggtcggtttttaactgaattctcatgtcatttttgtagtagtatatgtttggtattttataagacattacttatttttggtaaattagttactctaaaatattgttttgattaaataattgaggcttacgcctcaatttacgcctcaatgcgcgacttacgccttgcctcatgaaaaaaaacgaacgctat

SEQ ID NO: 175785 - DNA, 547 bp, Cannabis indica
taatgtaacactaaagtagttataacttgtcttacgcgttgtggtcatttgaaaagcctcattcattacccatgtccaagtgtcaactaactactatatctcatcgactcctacacccacctatcccttattaaatgctctcacctctctttctttgtaggtttcgaaactatattattgttaaatgatgctagcattgtggtagagaagagaaatgtaaggaaagaaaagtgaagataagagataattttgagttgtttgaggtaaatatggaatgaaagtattggtataatttagtatttaaaaaataagataatattatatttactcaaatataaatgatttttttttatatatatttttatgatttttaaagtattaagtttaaaaaatatatgttttttctcaaaaaagttattttataaaaaatagttaaaagaaatatgaagaaaaagaataacgtaaggtatctagttacctcttatagtactccattaaaaatgttgttgtattattatttatgtaaatcaatataagtctcattttc

SEQ ID NO: 175786 - DNA, 738 bp, Cannabis indica
ccccctagtggcatttatgtaaagacaagtttttaactaacttggggtttctcttatcttaaatgccttgtactttgtccttcgaacttaatatatttgtgtttgcttgtatctttattcacaatgtaaacaactatattttgatcaaatgcaaagtacttttgggtcttttcattgctcataattttcctatttaagtagttaataatctactagacttttgatttacaaacagacatcaattctgcctcgctatgacagttatagtctgtcttaaacaaacttgaatatacttttaatgatttaatcactttgtacatttttgattgcttgtatgaatagttatattatctatccattcaataggtttaagtacttttatcaagacatctcgatgtctcgtttaatacattcctatcttgtgtgaaccgttaatatttagctttgtacgcaagttatgagttatatctcatttataacttttgattttcctttctcgtcagacaggtttaaaccaaaaagatatgatggtttgatccttttctcgtcagaaaggtttgatcaaaaaactttaaaaaaaatttaaagttatggatttgcattataacatgtatttccagatgaattccggttaatcatacacaaattccccttaagtaattttaaagagtaaggctttgtaattacttaagcaaatgaaatgattctctttattcataactgaagttaaaatattac

SEQ ID NO: 175787 - DNA, 752 bp, Cannabis indica
ttccctttttcttagtttcttaatatctcactcttgtatttgtataaataggagttcaccccattggaataaacaactcagaaattctcattcactttctctttctctcttcatcttcttcttctttcttctcatctactttatattattttatattattttataacagaaatgacatttttcaactaatacatatatctatgtaacagagaataaagaaaatgttattcttttttaaagattgtgatttaaatttaaatgcatatctattttttttcttttcaattaatctattatattatattaaatgtgacttattttttttttttttaaaaacattgagattcaaaattaaacttactccacatagctaggggtgttcataaaaatctaatccaatccgcacaatccaattcgcaatctgaagatattctcacttgtgtagattgtattagaaaatctaaaatttgtacttgtgatgtgaggattggatgttgattgatatgtaaaagtaatccatttaatctaattcatacatatttatatatattttaaaaaattatatatacaattaatattttaatataaaaataattatttaaaaatataatacatattatacaaatagatttcaaaatataatatatcaaatgtatatttcactcttatttataagaaaattataaatctaaaacaatattttaaacatttttttttatactaaatagatgttaagtgtcaagtcacgtatg

SEQ ID NO: 175788 - DNA, 672 bp, Cannabis indica
tgtgatgtggctccttctctatggagcaagttatggaatagaaaattttagagcgccacaagaccatgtggtggatcattctgtctaatgtgcttcctattcgtaagatttttgggcaacatatgacaattgaagacacttcttgtcctatttacggaggaaacgaggaaactatggaccatttattactgaattgcaatttagcgtgcaaaaattggcgttcgtccccttggggccttattcccatcaatgactctagtacaagaatgtgggattgggtaagtttttatggaaccttaactcaagaggagctaatgttaatgagatctttgtctatgcatccatcattgttgatacaatctcgagggcatgaaaaacgacaagatacacaataataatgtacttagcatattgtactatattgactctaataaacattgttatgtagattatgcctcaattgttctccctctgaatgtcgtgcatgctgtgtttgggtgggatctccctcccattgagtggattaagatcaactgtgatgcaagaagagggagggagaccatgtgtatgttaggagtggcttatgaccatttgggtgcttttgtgtgggtagctgtcaacaattttcctttctctgctcccctcatcactgaagcagttgcctgtcttctt

SEQ ID NO: 175789 - DNA, 726 bp, Cannabis indica
ataatatttgggtttaaagtttaactaattcttcacggcaccagtgacatgttttgtataatatatggtttcaaactacagagagttatcatgtgctatataaccatatatcacaaaaactaatcacagtcccatagccagagaatatgactaacaattggctgactaaagctccaaatgccacaaaattttgtgatttctttacagagagctttgaataaatactaaaaaaaatgctatttaggagtaaaatagctgcagtgcaagcattctatcatgctgtataataatattcacaatttctaaaactacaccactgatccagcttgtagagagaaatctgcaccacggtcagtggactgcatctcggggaaaagccggactcgcataaaaccagcgtgatttccggtctacagcataaaatttagtggtggattcccaagcattctgatctatagaaaggcttggttcatgtgtgtgtggtgtcaaaccatgaagttgaaagttggccaaaatttgtttttggcaattaaatggagtgatcttgcaggcttaataattcatgatgtactagtactaaactccaactttccttgcaggatttcctttatttctttttctttttttttttttgtaatctcaggagtcgcgtcaggccagactattctttgatttttgttttccccagaatagcctctgagattgaagagtgtttttcttgatctt

SEQ ID NO: 175790 - DNA, 694 bp, Cannabis indica
ttcgacggaggatagcattagttgcatctgaagatgtaactgggacgaggacgacttcgatgaagaatccccattctcaaaggagattcaagcgaagcctctacccatgaacttcaaagaacccaacatgttgccttacgaaggcatagccgacccaaagtaccagatggaggctttcaacaaaataatgaagatgaagagagtcacaagaaaagcaaggtgccagtactttgcagtgacgctcagaggtgcagtgtataaatagttcaaatagttggcacctgggtctatcacatcttggaaacagttcgtggatgaattcttagcccaacaccatgcgtcacgagactacaccatccctagaacttgcttggaaacattaaacaaggaaaagttgaaagcctcaagagctacatctagcgctttgacgctgaagcagctaaggtggggagactgactaagaatgaacacaagatggccatcaccgcggtcgttcatctaaaaagcaagttgtggaataacatgcttaagaaggtagaagaattctacgaaagggccaagaaatacatctgggttgaggacagacgcgagaatctcacaatagggaagagtgaccctaatggattggctaacccctgcacgcatgaagaccatgaaggaaaaagaatttgataggggcatgagtgaccaaaac

SEQ ID NO: 175791 - DNA, 843 bp, Cannabis indica
gtatacttagcaagaataagaatcgtctaattattttcaagaaagatagagttagtttgacaaggataaaaattaaaaaacacaacaaaaaataaaaagactagtaaaaggtttcaatatatgatttggctttttttcttcagaaaaagaagtttgtacacaaaatatatgaatatttataagaaaaatatcatagaaagggaatcattttggcttgtcttaatgtcggaatctagggctccaaaccctatagaatagagttgccttttagtctttttatttcttttgaaggtaaccttttagggctcaaaagtcatggtcttcaattatcagtgacaaaatattaatcctctttttcttctccttttgatcttaaagtcaatatacaagaatcatagcaatttatacacaaatttgtggttcaacattcataaaacatatttcttttttttttttcctaaacacaaatttaaatataataaaaactagttatatataaaatcttcttcataataattgatcgaagaaacatttatttttacctaagagagcaaaatggattcattactataatattgtatattagatcatatgtatcctatgcaaaatttaaaatttatgctatatttgataaaaatatatatatgctatattcaactcactttaataaattataatagtaaataaaaaaataaaatttaattgtgaatttgacccattattagaataatttatattcttatataatgtgttgttgtattaaaatatatcatattttactataatactactaaaatatatactaattaatattatattctctatgtaattcggcttaccaac

SEQ ID NO: 175792 - DNA, 734 bp, Cannabis indica
cagatgcatcaacatccaacaaatgtcaattaaattcccaagaaacacccaataagcatccaaagtagtttcacgatggaaacccaaaaactcatacaccaaaaagaaaactgttcatcactaattcgagacagaatcattgaaattatatgcttcagagactaaaacagggttgataaaaaccataaaaaatctacattcaccgaaaacataaaaacgaaccaagaatcaaatttaaagaaaagaacccttaccataactttgcagggtttgatcgtccttcaagatgcgacctttgtagatcaacctctgctgatcagcaggaacgtcacaattctgagccaacaatgctttgaatgattcaaccgttgattcaaggctcgtcctcagcgtaaacttggtgccattcgaacagcgaacgttgaccgccactgattctcctccttcaccaccagaagaatcaccgccactgaccttaggatcgcttgaatcaccctcggcacccataatatcttccctttctttatatatataaattactatcaagtagatcgatcgaattcaggaaccagacgaaaccctaaccctaatctctaaaagagattacaaaatcaaaagaaaagacccaaaagagcgataagtatctttgtataacacgagggaggagaaggagaacaaagaaattgtgttttggtattaatcaaatgaattttaaaaatattgaaatgaatttt

SEQ ID NO: 175793 - DNA, 721 bp, Cannabis indica
gtatgaagtaattgattgccatattactattgtgtgtgaaaaggaatgttgcatgatgaatatttgaacaaaaaaaatactagatggtaacgaaactatttaatcaacccatacttgaacttcaaactgaaagttaaccaaaaaaatgtttgtagcagacttatatggctaaattgctcatgggcttattcagacaagactaactgaagaaaacttgtttagaaatgtaaccgctatttaagagacgtggaaaaagaacgatcaaaaaccaaacagaataaaatatgctctagaaaaacacaagttgggtgtatattgtttcacacaaataattgaaaaaatggggaaacagcagttggttggggtcgtctctagactgttcagtgtcttacctcagatagatagaaaacctttccaaaaagagcttgaacagctagttttctcttgaaacccttttcagtgtagcctgacaaatccatcacaacaggacctggagttcataaacaagctatcagcacattgaattacagagcccaaactatatccagttttgtctagaggcctggggacaataaaaggaataaaaaatcagacagcactgctttaccaagaatcataaatttagagcagcaatcaaaccgataaagaatgaaagattgaaggtacaacaagacatggtggaaagtaaaacaggaaactaagcattaatactcataaataa

SEQ ID NO: 175794 - DNA, 621 bp, Cannabis indica
gttaccattttccttcaaaaaaatagagttagtttggtagttaatagtaactaacttttttttttttttttgtagggaaatagttaatagtaactaactttccattaaaaaaataatttaattttgagtggaactctcaacttccacaaacggtttaataagaattcaatcttcatcgtatttgaaactttaacactcttattaaattgacattatatttaacattattcgaataataccaacaaaattaacttaacatcctcaaacaccctcctaataaaatccatgtcccaactaccattaccaagtttcaaatcaatgagataatatttctagaggtcgaacttatcgaaaattttaaaattattggcctataatgcttaaaaattattcatttctcccaatacttcttagttcacaccaaaaaggcattagacatttaagtgttaacttccaaaatgttgccattaaaaaagtaggcagccctaagaacttcaaaaaatttaccaactatgcctaaacaatacgattttgattttctttgttaacaatttatgtacatatttacttaagattaataagaatagattgtatggtattaattcttcatacaattattta

SEQ ID NO: 175795 - DNA, 2091 bp, Cannabis indica
taatgttgatcatgaccttgcttgtccagtagatcagatagttccagtggcacagatagtgaaagtatcagtggtggaagtagccgtgacaatcgtaaaaatggccgtctctcattggagaaaaagggtaataaaccaacttaagacttgcattttaattggtttcattaatttatattgtcacattgacaaatcaacttaaaacttggttgatttggattcacagatgtggaaatttctcgaggagctagagacactgatgtagaacggcataggagttctgagatgaagactaataaggggacttcatcccaagaggagggtgaattatctccgaaacttgtaaacaatgcggaggctaaaattgatactcgacattctgactcaaatcagtcaaggtttctttcactggcttattgccttatttgtttttgtcatgaaatttttttgctgcatattggatactttactggagtggcaaccatgtacatctggagttttgaagctgagtttggatattactttgatttgcagaagtccatctcccaaaagaaggttaagagggagccctgtgagaagtcctagctcgagtcctaaaagaaaccctcgtgatagccctgttagaaattttggtagggagaatagaatatcttcaaggagtcccattcgcaaagcccctgaacataatgctccaaatcttgtccagggcttaacaagaagcccgtctcctaatggcaatccaaagcgtgttagaaaaggccgtgggtttactgaccgctactcatatgcacgtcgctatcgaactccttccccagatcgttcgcctcgtggttatcgttatggaggactaaatttacctagaagaaatgataggtaacttcagcattttgttttgataattaaaatggtattattaaaacatttatgcagttaatatttttatttatgctttcctcatcttggaaggtattcaagctacagacgttatcctgaaagatcaccaccacataggcgtaaccgaagtccaattagaggggagagccctcccaggttcactttctttctcaaagaatataatgaaactctatcagacttgcttttttcattgcacttgaatctttgatagtccaatgatgctgcttcttgatgttttggcatttaatatgaattgttatacttctgcatattttcatttgtttattgttctcatatgttccctataggcatcgaggtcgcagaagtcgaagtaggagcatttctcgtagtccagggcgcagtcataggcgttacagggatcgtagccgtagtcctatccgtagtcctagtccctcagacaagcgaccccttgttagtgagagacttaaatctcgtctgggtccccggattgatcatcaacgctccccaattaagagtagcaggaggtcaaggtccaggtccaggtctgggagcaaagaaccatctgtttccaggtctccaaatccctcaccgccaaggcgtcgtaatagaacaccggcatctttcagcaagtcaagatcaagctctccaccaggacaaaggggattggtttcatatggagatcttagtccagatacaaggtagtttgcactggcatttttgggcatgaagagaggcaatagttttttcgtttaccgaaggatggaatcacccttctcaaaaggactgacctaccttttcagtcaaatccatctcaacgcaaatattgcagggcaagacgagatcgtccctgtatttggctttgaatctgtgatatgcgtgattaaaacagcgactgatattagtagaatatttatggatatgtttggctacaaaaacttggttgaatatgatgtaggagctcaaaataacccagtgagtatgagttgattatttcgatctgaccctttttttcaaataggtttgataagaacgaatacctgaaaattttatgtcattatttattcccaaaaagaaaaaaaaattgtcattttttggtcacttataaaaatgctattttgcacaaaagcaatgttaataaaatcctttttttttttttagaaaaagaaatagaaaccaagatcagtatcataaaaa

SEQ ID NO: 175796 - DNA, 629 bp, Cannabis indica
caacaaactaaaaaaaaaaaaaaaaaagttagttaaaggtaatttttaactattttttttcagtatatttagattttatttacataaaatatgtattttttattgattttttgttatttgtatattatttttttttcatatgaatgtttgttattttttgtattttataaaatactgtaaaaatatataaaaaaattaaaaatataaagtataaaaaattattagttttctaccactattatttttgtttaataccaagtaattaaaacatgtcatttatgatataattcgattatttattatatttatatgctttgatgtatgaatacacttacttattttttttattttgtatatgaaacaaataatgttcttactgtgtaagagaaattctcataaattatatgctaaaaacaaaaacaatataaaataaacaaactactacattcatttatgaatattattaatacaattttaaagtaatcatacatatagaaaaataataccatatgtaattatagttattgattatatgtctagtacatgtattgatttctttaagctatttcagatcgacacaaaggacaaaatttgcttgtttgtagccatttaacaatacattcttcatg

SEQ ID NO: 175797 - DNA, 574 bp, Cannabis indica
catcatataagacaaaattatgagactataattctatgcaaacttttcacttcatcttcattcttaaaaaaatacagaagtttttccaatgcatattttgtaggttagtatgttgttgtccttccttgtccaatgaaatttaaaaatctgctaatgtttccattttggaatttggaatgtttgtttgtagtgaaatttgactacctctgctaaatttttacagttaaaaacagcaaacatgtagacataatatctataaatacatgtcaccttatgccccttatctaatatctagttaattcacgtcattcattttcttgtcttgttaggtagttgttttctctagctaacaagacaagaaaatgaaccagaagcttgaatattctattagtattttacaccggctggaactaaaattagcatcgaccctccaacacttagtttcacagaagtgaaccagaagcttgaatattctattagattttttccctgaagacaagcctgggatcattgacaagggcttttctcaaggatatttgagatggggtttctgctaagtactctgttagaagcc

SEQ ID NO: 175798 - DNA, 597 bp, Cannabis indica
actaccaaagcttgggccatcctgcccacacttcaaccagagaaccaaaagaccaaaatagagatgctcttctttctacctagattgtctaatgcctgaggtgaacgagaaacttattagggctgaggagatgccagtagagctactggtcagtggaatcttaaaggaggttacctaggtaagtgttttgtcttaggattatttttgtatatatttttccgcatacaagttttaactttattttaccgtgcaggttaatatgaagttggcatacactaattcttgagcaaagtgtacagctctaaaggccaccacgaccaccaatgaattgaagaagtcactagaagatgcttagaaagtggttgagaaaaagatccatcattttggcgatgtgaacaagaaacttattgctacgaacaagctcattgatgaacttaggcaagagaaaaaggacatgccatccacgaccaaactcgaggaggatcctgaggcggtgtccaaggaggtgcaaactctaaaggactagcaaaaaactcttcgtaccttgctttaaagctaggaagccaagattacactgctgatcagggagaaggctac

SEQ ID NO: 175799 - DNA, 493 bp, Cannabis indica
aatacagctaagtatggagcttgaattttctgtacaatatagtagtaatgaaagcttaggtatatgcagctcaattatttgagagagaaagagagagaaaacccacttgtaatgagtaggagaaattgatagaaagaagactttggttctagttctgtcaatgttggcatcaacccatttggcccatgttctcagccctttctccaaagcagccacacgatccatatcttggtagaattttcctcctgattccatgtagtcccacctgcacaatataccataccataaatccaagctaccaaacaagttatcatatgaacaacatatacatatataacatgttatatttacccaaaacatattaacatattattctattccttctggactccaccaaacaaatcctcactacactcacataaatagcttcataataaaaaaaggtaaggataggataaaggcagtaaaaatttgaccttttgtcttcttcacc

SEQ ID NO: 175800 - DNA, 661 bp, Cannabis indica
gcagccacacgatccatatcttggtagaattttcctcctgattccatgtagtcccacctgcacaatataccataccataaatccaagctaccaaacaagttatcatatgaacaacatatacatatataacatgttatatttacccaaaacatattaacatattattctattccttctggactccaccaaacaaatcctcactacactcacataaatagcttcataataaaaaaaggtaaggataggataaaggcagtaaaaatttgaccttttgtcttcttcaccttgggacatgtttttgactcaatgttatacataaaaagaaattacttttctttaggctcacatttttagggaaatttaaatattgaaaatttgaaacacaatactaatttatttcctaccctattatgacaaattattatttgtgtcttctataattttttataacattaatttttcacacattagaaatttagaaagcccccctttcaaaaaaaaaaaaataaagaaagaaacttagaactcaattgagttgattagaactaataaaagcaatacaatgacttttggttataaaataaaaatgaaatgggaatggagaatagtaataagaataggaatagaatgactatttagtaaagactacagaataaagatt

SEQ ID NO: 175801 - DNA, 715 bp, Cannabis indica
tttgttgggggcaatctggtctcttggaagagtaagaaacaaaatgttgtatctagatccagtgctgaatcagaatatagagctatggcccagtccgtgtgtgaggtaatatggatttatcagcttttgactgaattcgggtttaagacttctattccagcaaaattatggtgtgataatcaagctgctcttcatattgcctcgaatcccgtattccacgagcgaactaagcacattgagatcgattgtcattttgttcgtgagaaaattcaacaaggtctgatctccacaggatatgtgaaaaccggagaacaactaggagatatttttacaaaagctttgaatggggtgcggatagactatctttgtaacaagctgggcatgattaacatctatgctccagcttgagggggagtgttagagtattagctgtatattaggtgtaaaagaattagggtaacttgtatttagtagtttcctattttgttggtagtttcctatttcctagtctcctagctttgtatataaatatgtactattctatgaaatatacacacaattcgattcactattttctacaattcttttacatttgttactactactttcataataactcatatatatacacacgtgaagggtctaaatacattacatttattttccttttttttttattttaaactttatattcttaatattagaacttaatgct

SEQ ID NO: 175802 - DNA, 1341 bp, Cannabis indica
gatagactaggaattgcagctgagcacggatatttcataaggtataatgatatctttcttgcccttcatctttgttttttagacttagcccgtaaggcgttttctctagtgtaccgaggttttttcttatcttttgtttgttttgtgtaggtcaagcggaacatcggagtgggagactagtcctgttgttgctgatcttgattggaaagaaattgttgaacctgttatgacattgtacacagaggctaccgatggatctactattgaggttaaagagagtgcattggtatggcatcatcaagatgcagaccctgatttcggttcctgtcaagcaaaagaattgttggatcatctcgaaaatgtactctctaatgaaccagttgttgttaagaggggtcagcacattgttgaagttaagccacaggtatatattctcttctctctcttaacaaaagcacacacacaactatgtgaaatttatagctaatcacaactatgaaatttatagctaattgcatttaacatacagggggtaagcaaaggtttggttgccgaaaaggttcttttgagaatggttgaagaggggacggcaccagattttgttatgtgcattggagatgatagatctgatgaagacatgttcgaaagcatactaagcacggtctctagtccatccttgcctgcgcctcccgagatctttgcctgcactgttgggagaaagccaagcaaagcaaaatattatctagatgatgcaaccgacgttgtaaagttgctagaaggcctagcaactgcttcagtcccgaagccacgacatctagctcaaatccaggtttctttcgagagtgccctttgttgaaaaaggtagatttcactagcagcttttgatacaaacaggaaccattgtttttgttatataagaagtgggggttccctttttctgagaaatccagatgatgttttcgaatgacgattaatcttaaaatgcgatgcatgacagagcttgctgatcactaatctgattggtccttgttgggatgaactgtgcatttcagtgcaatattaacaagaccatgaaagttgaccattcttgtatttgtatatggtgacatcaaaatctttgtattgacgggtgtgccctgtaaaagagttgtcttggggaatcagtttttacacaaaagtccttaattaatggctgtttatggtcaggccctcactataacttgtatgatcaatgttcttttcataatagaaaatgtcagtttgttctaatgttgtatctctattcatgctaacttactattattggctatttttctactttagtctaatttttttgggtta

SEQ ID NO: 175803 - DNA, 907 bp, Cannabis indica
cattgactggtttatttttaggttgttgttttgcttttaaaataaaacaatattgtcaaatgatgcataagtagtgattacatctacagcatttaatttattatcttaaatgatgacaaacttcatcattttgactcagaattatgtaatattaccctttgcaggtgaaactttctggatcaattagcagtcaatatttgacagccttgcttatggcagctcccttggctcttggagatgttgaaattgagataattgataaattgatctcggttccctatgttgatatgactttaaagttgatggcacgttttggggttactgttgaacacagtgatagctgggatcgatttttagtcaaaggaggtcaaaagtacaagtaggtttcttctgaatatagttgatagtattgttacattacatctggttatgtcaaagagtaataaattgaaaaattaaaatctgtcagatctcctggaaatgcttatgttgaaggtgatgcttcaagtgctagttacttcctagctggtgctgcagtcactggtggtactgtcaccgtagaaggttgtgggactagtagtttacaggtattttgcttagaccttgaaatctcttattcttgtacttgtgtttacatagaatctaagattaagtgtatttacatacattaactggtgtttcataaagggagacgttaaatttgctgaagttcttgagaaaatgggtgctaaagttagctggacagagaacagtgtcactgtcactggaccaccacgagattctgtaaaaagtaaacacttgaaagccattgatgtcaacatgaacaaaatgcctgatgttgccatgactcttgctgtagttgctctttttgctgatggccccactgctataagagatggtatgtttt

SEQ ID NO: 175804 - DNA, 735 bp, Cannabis indica
cgaaaccaaaaaaaaaaaaaatcatttagaaatggtaagtaaaccacagatgtacaaatctgaaatttgtgacatttatgttgaaaccttccactggcactgcaataatattatcaaataccaaaacttagtcgccctacctctggtctctcatcagctccaaggtttttaagcaatgagaaaactgagaaaagcaacttgtcatgttgaacaaaggaagcttggtccaacacattgagtgatttttcttcgggtttttgaacatccatttgctctgaaacagagtgcccatctggtataccattataaaagaaaaacattaggaaagaaaattatgtacacaaaacatttacaacagtaatctgcaataacaagaattcctatacctgtttccgtttcttccatggatccatgtgtaatgccctttgcaataaagtcagttgtagtccacaaaagacctatggctgtcaagcttatgttaagctctgtcttttgagcactgtaagctccagtcacatctacacagctgcaatatttgagtgtaataatggaatcagaccaacaattatttgaagccgtagttctaggtcttttttaatatatatccataaattgccttgtatcaattaaaaatgtaaagaaaatggtaattctaggtttccatgttccgagtaaagaaattattaactattactcatcaatgtttgtaaacatatatgtactttagacatcatt

SEQ ID NO: 175805 - DNA, 663 bp, Cannabis indica
ttattagctatatagagtgggtacctctttcagaaatctcaaaaaagagaagcattaacatgtaaaatagaaaagaaaatataaaataaacaccaatgcagacatttccatggcaggtgaagtaaccttcaaaataaatgcatatgtatgttagaaaagcttcccgtgtattaatcatacctttccatcttggaaaatgaatgcagatgcttcaatataagctactgcttgatacctaacatcaaaagtaatatcaattaattgatgcatagcatattcctcgcagctttcaaccactgttaaaaagagatatcttttcttacccaaggttaagaaggccagcaacagtgctgatgcttatatcaaaatccactttgggttgtatgatgaaatttccttctcttatgggcttagcaatggtaattccacaagaagcagaatcaggtttccgcagttttgaaaaaaatagagaccatgagtatagcaatgaaatacacaagggttttcagtacaaacctcccttatcaatagtgcaaatcttccctcacatattctaacacgtatacaatcactttcggtcaactgtccattagtaggaattccaggaagcttaaaatataaatcaataaaattctgaacagagctgcagaactttgcaggatc

SEQ ID NO: 175806 - DNA, 577 bp, Cannabis indica
tagcaatgctcttgttttaatattattatactagtgcaacactcaaaatgtttcctttaaccctctcatttttgtaggcatgctgtattgaatacataatcctagagagtgataatttgtcttcactatttccaagtgcacaactaaacattggtgggttcctaataggcgcacgccttctctttgcattgatcacaactcttgctgttctccctacagtatggcttcgagacctcactgttctaagctacatttctggtaagtcaaactctaacaaaaagtcaacaaactaatatattaaccttactttagaaaacaatcttaatcatgcaatttctgtgatcagctggcggagttgtggcatcagtaatggtagtactatgcttgttttgggttggtacagtcgacggaatcggtttcgtgaacaaagggacagcacttaaccttggaactcttcctgtggcaattggtctttatggctattgttactcaggacatgcagtttttccaaacatatatacttcaatgcaaaaaagaagccaattccctttagttctcttgacctggtaacactata

SEQ ID NO: 175807 - DNA, 767 bp, Cannabis indica
atatattttaattatatttatgctatttgtttattttttatgtgttaaagttgtaatacttgattattttgtgtattttattttcgtgattattttattacttatgatattttttatgatattttttatgtgttaaagttgtaatgatttatattttatgatattttttatttatattttattacttagtagtgttgttttaatttttgcaaatttttagtcgcgttaaatttataaggataatatctttatagagcatttaaaccaaaataaatggtgatatttagtttatatacatttttttatatgttcaagttaatattaaaattatcaggcgtataattgaatatctaattgaaaaactaatccaatttaattaataatcgaattggattagattggaatgaattttgaggtctaacttgattagattttgagatctaattagataagattggatgatgattttctaaattcaattactaattagattgaatccaattatgagaaaaatattgaattgaatgtttaagtgatatatcatcatctaattaattattatgtgatttgtcaattaataaaaatttatttgtgccaatctttttttttaagaaaaaaaaaagtaatttgttataatattttaaagggtatttgcctgttttagtaggactgcaatcagttttttcttaaagtaaggagtcagttttttcttacagtcctactaaacattacgatgcatgaatccgtttttaatgttatgttcataa

SEQ ID NO: 175808 - DNA, 564 bp, Cannabis indica
gtcccagactgtttgtttctttaggtacaaccctaggattcaccttaggggttggctttcagaagagcacctgattgagctaggttccctatccttatgcctttggcttccctcgggctgagaaggtcattcccccgtcctttcatgcacagatggcacaacggttgggtacacatgaatgcctacattttccatcgtctttttcaggacgatcaatatttcttgcattcttttgttttgttctttcttttcttctaacttagtctcatggttagcagcttattgcctcaatgccactagttttgtacagatatcttcgtcatacgtttcaaaatcatcttttgtacactcacggtcgttggtatctccttttccttcaacatccatcggagaagtcacatcttcttcttctagtccctttgggtcgttatgttggggtggtggatgtgaagtgtttcttgttaaataccattatatcacgagacttcttatgatttcatcttttaaaaagcttcctacaactctcaataaaaacactaaaatgtcgaccgaagttttcggcaa

SEQ ID NO: 175809 - DNA, 1064 bp, Cannabis indica
tttatatataattaatcttaattaaagttttataaggaaataaatgattaggttactttcaggttacaagttatttttttatttattttttatttaatttccaaattaatcacaaccattaaatagtaatccaatggcttaaaaaaaatgtaaccatgatggttacaataaaaatgtaaccattgaaacctcttccatatatatatataactgattactcacaaaatcatagtgagtgttaagatcttaaaaaaaattatatatgaaaattcaaaatatatagtttagaaaaaaatcaactcattcagttaaattaaaaaatagattttttacatacattagaaaaattcatggaaaaaattaataaattaataaaagatataaggatgttggcagcaaaactacttaagctctatgattagtgacacataactatataaatcattttttttttttttggtggtaaaaccctctaaatctcacttctcctagctatttacctcttccattcaaatggctctattaagtgtcacggtggacatgccacagtgtacacgagtctacacgtggcaaatttttagtggggatattagcggtaaaactacttgaactccatgattagtgacagttaaccacataaattgattttttggtggtaaaaccctccgaatctcacttctgtcaactatttacccctttcgttcaaaaggctctgttaagtgctctgcgactggaacaaccagatctcccattcccctgttcctttttcttcttctgcgataaacccaacagaccatgatgaacccagggatgaatcaatgaacccaacgaacctttccaactgcggtggtatcaacgaagagttgtaggagagggagaattagatccaacgaggtcgaggtgagaaagagaaacttcaaagaaggattaggtcttggggcttagattatgataatcaagagtctaatggcgatgatctcatgcttagtgaccaaattcatcaaatcactccaccacatgttgatgtcaccgttggggatgatatcatatcatctcgcgatgat

SEQ ID NO: 175810 - DNA, 899 bp, Cannabis indica
gaagtcctagtttcatatggaagagtatttttgaaacacaagatttgatcaagagaggggctcggcgggtggtggtccaggcacaaatgttagtgttcagtttgatccttggcttgcagatgactccaacccgtgggttacttctacggttgagggtatggcgacttggacggttgacaatccttatggtggtgggtgatcgaggtttgggatattgaggtgatttcggatattttcaatgatcgagataaggagagtatcctaaagaccaccattgatcaggagactccttttgacacttggtattggcatatggatctccatggcatttatactgtaaaggaggcttatcgattgatgcaccatgcagaggtcactaatattagtgattttgagatcaagatttggaaaattgcatggaaacttcaggttccacccaaagtgcaccaacttatgtggcgtgctttgtctggttgtttggctactaaggttcaacttaataccaaacacattcctctcgaccagatctgtcctatgtgtaaccaaatgtctgagactattattcatcttctggtgcaatgtccctttgcaaggtcttgttggcatctttcggccttaacctggagcaatgtgcctatggagacgttttgggattggtttagtcggactctggtacaacattcgactgcagcccaagaagaactgctaatgattatttgggggatctggtatgcccgtaatgagttggtttggcgagacaaatcgatgtcagcagcggaggttattctattggcaagagtagtccttaatcaatggagaaatgctcaaaaaaggagaatgggttctctacttgtaccttcggagtcaagtatggaattggagcattgggtgaaaccggt

SEQ ID NO: 175811 - DNA, 606 bp, Cannabis indica
gatgttctaggcacaacagtgacgcacatacgacgacgacgacagtgataggcctaagagcttggacgcacgaacatcatcgacttcacctcctatgcgtctcaccctctcccttcttcaatcttatctctgcgcttgttggagcttgaagctttgttatctgatggaccttgaagcttttctcacagcatttggggtggcttggtcattagaacaaaaagccaaaagtgtagtcatgattcaagttccccaaaataaacggaacaaaacccctctctcatatctcatatgatgaagcctttttcctggatggcgacccaaccccacactgtacaatttgtatctaaatgctatgttttagttcacaaatactttttggttgtaattaaaagtcacgtttagtcaaaaaaaaatttatgttgtgactaaaagttagtcactaaatagtagcagctttttgttagtgagaagaagaagagtaaaaaaataatttttaaaattaacttttcctaattttaataatatttaaataaataaaatagatgttgagtaatgaaatcatgctactgtacacagcatgacatatctatatggcacttaataacc

SEQ ID NO: 175812 - DNA, 752 bp, Cannabis indica
tttacaatgctttgatagttaagggtcgagatactgttgatcaacaaattaatgtgacttgtgaagtacagcaattattaggaaataatcgagttagagctgtagctatgagtgctacagatggtctaatgagaggaatggatgtgattgacacaggagctcctttaagtgttccagtcggcggagcgacactaggacgaattttcaacgtacttggggagcccattgataatttaggtccggtagatactcgcacaacatctcctattcatagatctgcacctgcctttatacaattagatacaaaattatcgatttttgaaacaggaattaaagtagtagatcttttagccccttatcgccgtggaggaaaaataggactcttcgggggtgctggagtaggtaaaacagtactcattatggaattgatcaacaacattgccaaagctcatgggggcgtatccgtatttggcggagtaggtgaacgtacccgtgaaggaaatgatctttacatggaaatgaaagaatctggcgtaattaatgaacaaatattgccgaatcaaaagtggctctagtctatggtcagatgaatgaaccaccaggggctcgtatgagagttggtttaactgctctaactatggcggagtatttccgagatgttaatgaacaagacgtacttctatttattgacaatatctttcgttttgtccaaagcaggatccgaagtatccgccttattaggcagaatgcct

SEQ ID NO: 175813 - DNA, 805 bp, Cannabis indica
acctgctgtaaattcattagttgtgcccacttgatacccactactcacagtatagcagccatccggggtgtaatgccatatcatatcatcattttgggttgtagaacaaggggctatacctaaaatcattggaatatcatccggatgaaagcactcttttactctttgtgtgttccaatgaccattttcgtctttgaggatgttgaccgtggccccttgggggacttgagcaggggtacgtagagagaaagttgaagggcgagggagccatttgtccttattgatgcgaatgtctcttccagaaataaccctccaacaaattcctttttcaataattttccttccccataagatacttctccacatataagaaccgaacccaccaactttagcttccaagaagtttgaattagtatagtagcacgcctttagcactctagcaagcattgagtgagggttattgatgatcttccacccttgtttggctaataaagattggttgaactgttctaaattcttaaatcccattccccccttttcctttggcttgcaaagcttgttccaattcccccaatggattttttgtttagcatccgaagacccccaccaaaatcgggccatcattgcatggatatccttaattagctccttaggaaggcggaaacaactcatgacgtaagttgggatgcttgaatgatggcttttaacaaatttccctccggcttgagaaaataagctagcttcacccttgaagtttggttctattttggtacgattgtcttcaaaaacttcttcttttcttccc

SEQ ID NO: 175814 - DNA, 1179 bp, Cannabis indica
tgaaccaaataaaatattcaggaagcataataataaataaatcatagttcgaaagacaaaaatactaaatagccttattatgtatatgaattttttttatagagaatttcacacatagcactatttcacctaaattactttttatactaactttttttcatatgtttttctttattctcacattattaaaaagtaaataaaaataaatatattttaaattaaatttataatattattataaaaattgtaattggtaatcggataatttgaaatgtgaattattgttaattctattaatatatggttcacttcactatattataattatatcatagatgtatgtgaatttggtaatgaaaaagaagataagataataagaaaaatattaccacacacactcaatttggatcataaataattgttgtttgtttaaaataattaggtagtactatatattaatctgttgcatatatatatccatattaaccactcattactccatcactcactttctatagtagctttctatatatacttacaaatcatatgagatttaaatttgaaaatgcattttttgggtaggcttgatgcgggtccgatgcatcatgatgaaaaaattgaattgggttgaagacaaaggcccgatatagggcccgatggccatctcgatggtcagcccgatggccagcccgatggtcagtcaatttttttggaaaaagaggaagagagagggacggttgggaaaaatgggaggggtttttggggtttaggaaaagttatcccattttacaaattatacatagtattagtttaagagaccaatttatgagtttattaagcatggaaattcaaatttctcttccagaaatattcagcatatgtacccagtttatatttatatatatatattattaaaaatttcggtagtatactatctcttaaagagatgttctaggtagacttcctaattattttagtatataattaaaaaaaaaaattagtttaatttgtttttttttcataatctagtatgttactactatataagattatttgtaaatttttttaaaaatttcaaataatttaccgtgtgaaaattaagattcaaaaaaacactaaataaatatatcatcgttttaatataatttatacaaatgttagttttattaatttatatat

SEQ ID NO: 175815 - DNA, 564 bp, Cannabis indica
gtttgtactattccatgcatggccttccttcttgtcttgtcctgtacactaatgtaccttttgttgtatttgttcttattataagaacccattaataatatgttagtataatttcataaattgatatatagtatgtttttacagtgtccttgcaatgtaattttatttgttttgttattaaaaaaaaaaattaattcaatctgtagttataattgattaaggtattctgtacattttttaaaaattctaaataatttataattttaaaaataatacacaaataatctattttatacgcgtataaaataaaataattatacatgtaacaaacaacgtaaactttatttttagtgtgttattttttaaaattttacaagatatcttatataattataatatacacgatcataaaataaaatagactaaaaatttttctcagtaacatagagatatgtcagtgcaccacatttaaaaggttagcattttaaaattttcttttttagtctcttccaaactagtactaagttctttttagtttagcttcatttttgggagatttatata

SEQ ID NO: 175816 - DNA, 621 bp, Cannabis indica
gtataacaacaaataatttcatcactaaaaaaaaatttctaaacaatatactacgaaacgtaaatgaacgtactcggtacgtgaaattttgtactcggtacgtgatattatgtacactaattttactaaacatcacgcagaaataagtaatgtacacggtactctatataatgtacttaattaccatcccacatatacatatgatcttatgaatgaaggaaaataccaaaatagccttaatccgacaacatggacccactgcctaaagtattttcgtaccatcaactgccaggaacagtgaagactgatgtacctttttgtactctaactaacacaaacagtaccattttgtactttttccgtacctaattattttataattaaaaaaataaactcccaaccggtaaccacacctacaacaaccggttaccacttacatttcaaaaattaaaaaacatttaaaagtacggtggggccccctcgccgtacacggatccaatccgtcgtttgtcatatatggcgacaaatacggctgcctatattatattattagtattattattattgtctaattaaattaacttatattattatatagattgtatatataatttaaattaa

SEQ ID NO: 175817 - DNA, 691 bp, Cannabis indica
agtagtatattttaagaatacgacctgatagttggccgattcaagggtgggacagcaggggcccacgcccaaggcccccacctaggcctaaaaattatttaacaaaaagctccaaatttgtttcataaaaatatatattttgtacttttactattatttattaaaaatatattcattttactaaaaaaaatgcttaaaaaaaaaaacaaaaaaaactcatttatatatttttgcccaagcctccaattaactttagacggacttgatattatcaaatgttcaggagacaaaaatattattagaaaaatttgcaacaaaaattcttaaggtgacgtttggtaacacttttattttctaattttttaattataaaatgaaagtaaaatttttgtttttaaaaattttgcttttgaaaaataaaaatacgttttgtaaccacttttatttttcaattttaaaaacagaaaacaaaagtgtgttctgtaaaatttattttcattttaattttttgattttatttacgtcgggtctaggtccggagttggatttgggttcaagttagaggtcgggtttagcgccagggccgtggggggatttgggattgaagtccaagatattgattaagaaaaaaaaaactgtttaaaaaaatattgaaagtgattttttttgtttttaaaattttgattctcaa

SEQ ID NO: 175818 - DNA, 726 bp, Cannabis indica
atgcatatacatatatttaaaagtattgttattggacattatagtcatcaatatcttctgtagatagcgtcgtatgattggtaagcaatattctttaaaagttatttttttaaattatatgaaacctgatacttaattacattaatagcagtatgacaccgagaaaggtattaggcactaatagtaccttttaacatttctctatatttaattatcgatatgatttattattaattaatttagagatttttttaaaatataaagagatcatcttgataaagatgtagtccatttacttcactttgccctcaaatttcacaaacacatcaaaagcatatattatatatttgaagtagtaaaataaataaaatttaatctaaattaataaataaatttttactttttattagaaaaaatggttcaatattaataatgtctagaaattaaataccattcacttgacttattattaaataatcaatcaatatatatatataaaggaatgtttaaagagtggtgaagtggcaagtttataagctttttttggctaatcctaattatctcaatttttgtgatttaattagatttttattctatttttctcatttaattcgctctaactttttaaatctctcatttaattttgtcactaattgtaacgcattacttcccaactaattctcttaaaaattctcctagagttttctttcattccataactgaaac

SEQ ID NO: 175819 - DNA, 655 bp, Cannabis indica
acactcaataaccttcgagttcaggacaggcaaagcaccaggaagacccatgcaaactgggcaaacgctggtgtttggtggagaaccatagttgtatggacaactgcaaaaggctttggtgagagtagagagctggacatgagtttctatccctataactgcttcatagtctttggagattttatcaatggctctagcattaggatgagatgaaactttgatttgagcaggaggcttctcttgtgtggctgattgggcttgtgtgcttttcattgtgcaaaacaagatcctattttttcttctgaacaatgctgttgttgtatggtagcagaaagggagcatttgaatgctcctgaaaatagcggaagtcatattcaattgtttgtatataatactaagttgtacaagtcctctgcaaagccattaacacaagacataagaaagctcggttttatgaaattcaaggctgaattcaatacaaatgagtaaaaaaacgaaagcccacataatacaatcaatcaaagcacaaaactttaaaccatttagcccacacagaattgcttcacatttaatgcaaaggtaacttattgtcactatgagaataattggagggaagttattgtcactatgagaattgcttagaaacaccataaat

SEQ ID NO: 175820 - DNA, 741 bp, Cannabis indica
tatcacatatttttcaaatgaggcccaataaatttcttcctaaggcccaatatatctctgagcaactacaataaaacaaagtctatagtatataattacatcaccttgcctatatcctaatctcaaatacttattaattttttgggttttttttttaattttaattattttatttttcttgaatattatttattgcatgtgcagggttcaagtttttgaacacaagttgttgcccaacaaataatattgggcaatgtataccaaatgggaaagtttgtgaaaagagagaattatatgtgttttgggatgatattcacccaactcaagctgtcaatggattcactgcaaatagatcctataatgcttttcttccttctgatacttatcccattgatattaaacaacttgttgctttacaactctaattacttaattaattaaattaatacatatataattaaggtgtatgcatgtcaattatacaatcaataaaatattgagaaagaaaataaggttgatcatttgtatttaagggattcagacattatcgatctttgtacttttggttttgagctaagacaggttaggctcatacttagatctcacccaacttcaggactcaaaaatattatgtactatattaaattgtatggaaaaaatggtagttttagataattttgtgaagtatagagaagagttattgaatgagataattatatataacactaaatttagtaaaaa

SEQ ID NO: 175821 - DNA, 639 bp, Cannabis indica
ttaaaagtaaaattggagaaaattacacttcatacctcttttaactttatacccatcttttttaaaatgtattatatttacttctttttttttttaatcattctaccaattttacccctactacttcacgataagttttcattcttctctaatgaaatttttacctcaactttcccacaaacctacacattcatctacaaagaacataaatatattatgtttgaaattatgtcttaattatgtgagtgtgtgaagataatttgggtacaatactcataaaaagaagtatatttgaattaaattttatttaagagtaaatttgattaatgtataaaaaaagagtatttttcaacatctcccaagaaatttagtaattggtggctaaaactccattttgagacattgtaaaaattaagggaatctttttttttgtctatatttacagtcacatttttttttttcattttttcttgtactaagttttcaaaaataatgtgttaaacttttaaaattataaaattactatttttcagtaaaataaaaaaataattaaaacatctaaaaaaacaactctagatgaacaacttaacaaataatatgaaaggacaaaaaataactacaaaacaacataaaaataac

SEQ ID NO: 175822 - DNA, 1258 bp, Cannabis indica
atttttagacaaatgctatcttcaattatcaataatttagagattgatttttaattttctttttatcttacacccatttaagtaatgtttctttaagtattggaacatcaatttttaatttatttttggattaacttaagaacatatttaaatcatcaagctttcttaaacactaatatattgcattcggtattcacttttaattgacaacattataaactataatatttagatacacataataataatctcacctaataactaataatattttttctttaatttttaattgtatcactttcaactaacataaaaaaaaactagcataaaatttagtatacgtgccttgcacgtagctttttgctagtatatatatatatgtactagttggatgcccccacaccttaaccaaccaatactatatgagtttcttcaacatggaatgatatactgccggcctttaacttctatcatatatatgattagcttttctttgattttttttcttcttttaattatattattctttttttattttccaagtttgatgttgatgatgcttggaaggctctcttttgagtttaatttagagttgttaaccaaattaagttgtatgattgttcttcgagtgacgttgcaaaatatataagagccatgtttaggatggtttattatttatctattgatccaatcttatgaaatcgttaattatatgtcattgtttacgtaagtgccatatactaaattaaattactaggattaggctatattatttttatagaacatattatgaaatagatagaagagctataatattccttttcattcggaaaattttgttcttattaattaggaataataataccaaaaacgcttatgtttaatatatattatcaaaatcatttaatatgaatattattgggattattttacaaatacaacaaaaataaataaaaaaaaattaacaaaaatacgatttcacaaaatgctaaattatttttatgtatttttttgtattttatttacagaaaatacggtctttttatgttgtacacttgtttaattttttgttatttgtatattattttttgttgttgttttgatgttattttcttgttacttttatgttgttttcgtgttgtattttataggaaaaccgtaaaaatgtaaaaaaaaaaaaaaattctataaacgtaaaaatgtaatttttttacaaaagatgatactttatgtaattatcccaatattattaggaaat

SEQ ID NO: 175823 - DNA, 627 bp, Cannabis indica
ggttagggggttagagtgcctacttccacagctgccattcatgctcttacgagctaccaactttcactgtagagcagccaacccttgaaacagcaagtttcgggaaaggtagtttgaattatgtggatattgctgaaactcgtagggtatcgttcggcctgacggttccatgagcttgctggacgaaccatatcaattcgtaccggtgtgaactccaacccagtacgaccgaaggcagtggtcttttactttgttagtgcaaggttgcctcccgaaacaaactaagttttcggatgctacaaatagacgaggtaattaaagttgggtttatagcaaatataggaaaggttattaattgaatggtggggatattattcgagtaacatttgacataatggttgagggatcttctggtggaggacttgggctggctggaattatcactgatctttgtgagaaacatggggtaccgcagtactcatatgataccaaggcgccgccacaacgcagtattaacttgtccactgttcttcgcttcaaacctcctcatcctcatggtcaaccgccagttcagagaggtcctccggcaagagaagaagaggaacgtgaggacatcgaaccaccacg

SEQ ID NO: 175824 - DNA, 673 bp, Cannabis indica
atcaaattcaaatttcataaattgtttctttagtacctttatatcaagtcttgctataacttatctacacataatatcacaatatcataaatcatggagttacatcattgatttttggtatagacaaaaaaacaatcaaataattataagaagctgacaaattctactaattaaaaatctcttatttttaataaactataataattatggttgattaatattgataatccctttctttcttattcttttcacatgaaaggaagttttagctatatgtcatgaaaataaaatatttttccattttttatttctataagtatgcttgtgatattaatttagaaattattacacaacatattaaattttttaattttttttttaattataggatggattttttttttttaaaaatactatatattgtgttaaattttgtatattgttttactattatattttagttgttctactattatttttaattgttctatttaatgttttacagttattttataaaaaattgtatttttataaaaatttcaatataacaataaaattataaatttttattcaaaatttaatatttttgtgaaaaaaaaaaagatcagaaatttcaaaatcaagtggttagaaagtaactgccaatagttggtgttttaaaaagaaaaaaaaa

SEQ ID NO: 175825 - DNA, 676 bp, Cannabis indica
atgattgcttttgaaataatgcaaacagttaaaagacatgttaaacagatacaaatgaatgtaaagcaggtctaaatgttaccatttaaaacaatagaagaaagagaatggtttcagtcattgtaatagttttttttttttttaagatctcaagttgagatgctagtaggttgtaaatgatttgtttgagctatacaatttcctgattcataaaaaaaaataaataagaaatacaacataaaaatgtaatatccagtacaagtatattatttttggtatattattgtgtgttttgatatgttattgttgcattaaataaaatatgaatattattagtatttgctaagtacaattatatagttaattagattaagtattaatttatattaattatattagagaataagttattagtaaatagttgtattattaagtgatatttgttatacatgtaataggaatatagataaaaattagtatactattttatacgtataggtttattaaataaataagactagtggtatttataataggaatatatatatattttgtataagcttgataataaaatatatatatatttataaaggctatagtaatagatgaatagagagagggtcacgtgagagtgagagaagaatgaggaagttagtttaggatatttgacttagtt

SEQ ID NO: 175826 - DNA, 665 bp, Cannabis indica
taaattgatatctaactgtgagagcttgtgatcaaaccttcaatggctactagacttatatagcagacctcagttcaattcatcatcagaatcaaagttgtgtcttttcctcaatgattccaatacttgttgaggattatcaactctggaagtgttttctttctcacaagatttgagtttaggtacacttttagcagttaaaggaggtgacactattcctttgtttagttccttgagcacagaccgagctgtggcggcagctgttgcatctgccattgctgatgcaagctttccattatcttgaacttgtttaccatctccaacttgaacaggatcaggtgaacgaaagctacaactcgcgtttttattgttggcaacagcctcagcagctgttaacttggtcttccctgcttcatacttttgcatatcatacatgatctctttctgaagttgtttatcagcaactaatatttcatcaatctcgtttttgtaatccttgagaagaacacggaggcattccatgagcgaacctataagtggactgtttctgctttccaatagcctcttcaactctatgaagatgggaatcatgttctggataagaccctttttgactgcttgtgttatggcccttcctctagctgcagcagcagcagatgctgaac

SEQ ID NO: 175827 - DNA, 1106 bp, Cannabis indica
  modified_base (720)..(720): a, c, t, g, unknown or other
agaggtttttttttattttttttcttattgaactggttggtgggatagcaaactggtcttgagagtcacacatgggtcaacctcggaagaacttgagaaagaatctttgtagctaaacaagcaatacttgttgttgattcaattcagaataatatctccttctgtgtctgttactgaaattggagagagccccacaatgaaagagaggatgtccatctcagtttattttcttcttcttcttcatcttcttttttttttcgtggctgtcatggtcaatagaaagtgagaggtatagtgtgggacctttgcctctcattactctctttctccttcctatttttcatttcatatgcttaattatcttggctatagtgtcccatcatctttggtaacttgtcatttaaaacattccaatttttgtaatatttttaactcttgagtttggggccctttcgtgaatattttaattccaacgtcgtaaattgaattttatttttgcaggattatcaaattagtctttacatgattgctaaaaaagtcttgggcaaagctgaagcaaggaggtttgtcggcttgaggaggcacataagatggttgaaagggatattgcaacgaatttcaaacaattctgcatgtttatttcggctactaattttgactaattgtaacaggttggtggtttagcagttctgtaaagaatcactacttttttttgacctntaaaaaaaaaaacttgaatgtaacaaagtgttcgaaaccaatgcacacacaacttgttaatctaatgcaacatatatgtaatatgtactaaacgcccctttaactctttattaaaagggtaaaaaaacaaaacttttaagaaattcactttggctagagtgatctggttctggctggtgaaacatttaaatccattttgacattttatttttcttcatcaatgacacataacacagttgagaaaaagataggaagaaatagggtgaggtgtgaggattatatgtatatgcatgacaaaataacgtggagagttattggttggtcatcatttaattccttatagtagcaaagagaaaaactcccaagtttggtaaatactatcatac

SEQ ID NO: 175828 - DNA, 511 bp, Cannabis indica
ttaaaggtaaattaattaagctatagagttctataattatttgcattcataactcttcaattctcatttaatttgaggaatcatgtatattatcatttattttttatttttttgcttaactaggaatcatgtatttttttttttttttttgaatagaagtgttctttattaactcgagcaatcgctcgttaaaatagacatgaagtccataggaacactgttaatagggaacatacgttcagcaagagaaatagagtgtcgggcaacaaaatgcgcggcacaattcgcagaacgcttaacaaaaaataaagcaacattagacaaactttttaacatatttttgcactcatcaacaataaaaccgaaaccagaagcaattatttcagcactccgaattgcctctacacagaccaagctgtctgactcgatgatggcctgggtgttgctgttgcgcttcaaccaacttaaagcctcctttatccccataatttcagctagctcggcagtaact

SEQ ID NO: 175829 - DNA, 886 bp, Cannabis indica
cggtcttcgataggcacttcaactgggcaaatatggtggtgtggctgccatggtgcgactgggtgatagagagagggagagagagagagagtgaggttggtgcggctatgtgagatatttaggttaagtttttcttttaagtttggaatttttaattgggtctgaagtccattgtatattatatatataacaaaaattaatcttttgcttcggtggataacagccgctaaactttttaacctctgtttataacggaagctaaatttatgtcttcttttactgaagcaaaatgtaaaagataatttttattttttactttttccttggttcctcctttagcgtcactgtagtagctgacgctaattattttcttttaggttcagttatcagctgaagtataaaatctctacctatttttgtctcggtcagctattttggtaagacgcgttgactgacgaaaattgggcattttgtagtagtgtatatatattgttcacatatttttcttgttaatggatctaaaatgattgtaagcgagcaagatgaacacaagttaatatcgatcacaaataaaccggtttatggaaaaggaatttaataaagatgaactcgaggattttatagatgttcacccccttttggcgataataaactaatccacttgagttgttattggtctcaatgcttgaggaaagttctccagaattatcttctctaagaattcaatcctcaagtaagttttttaaaatgagaaagtgagagttcatgagaatgagttggattcctttacaattgatatcacatttatatagattttcatctaggactctgttaaggtttaaaatctcttaaccccaagacgtacattcccctaactatgatcgag

SEQ ID NO: 175830 - DNA, 1032 bp, Cannabis indica
aaattgtttgatattaatttttactcaatttttgtagagacaatatttatttagggcccgtttggtacgtaggactggatgatttttttttaattttaattttattaatatattttaaattttataagaatttaaatgaaagaattatcacacatttatttataaatattttataaaaaacttattcattaaaatgagtgaaaatatataattttaaattattatacaaaagttttaaaaatttaaaatattagtaattaaacaataattacttaaattgattccaagaaaacaatatgacaataaaattatatatttatataaatatttttaaaatttaatatttatattaaattggtgattaaattagtgtttaacataaataattttatattattcaagtatttttattttactattttaattatttattaaataaaaaatatgagaaattattttatcatatatttatgagatatacttgattatataggatatattattttttttataatttaattatttattattatatattttaattttaatttaatattatatatttttattttaatttaagtttttaatttaaaagaatataaataaaataatccagtctattcttaaaccaaacacaagattactttcaacataatctaatcttgtccagtctaatctaatctttttcagtctaatccagaccaatcctgcataccaaatgagtccttattatcttattacttgtttgtcgattgtatacacgtatacatttacattgctatattttatgcaacactttccttgccggtacctatactattgagaagccgtgagctaaaaagacttaataaaaaaagggtagtttttttttttattattatttttactatttttaaaattttttttttttgtatttttacggaattttacatagaaacccttatagcaaccactacaacattaaggagcaatagcggcgggcccctcagccgctattggtccacaatctggccgctaaagggcaatagcggc

SEQ ID NO: 175831 - DNA, 626 bp, Cannabis indica
atttactttaattattatagattgaataacaatttggcaggctacctagtactcaaccttaccaacattctttaattagttagaaaatttcatattattaatccatcagattaaattagaaaataagattacagttaagaagtgctttcacatgtttgtttttggttttttttttttttagatagaatgaaaatttcattaagcacttgtcaaagtagtcaaaaaagacttacacaaactctcacatcatctaaagagatcgccaatttaacgagttttagagagatcgaaaaagagaaatgctaaagggcacctccaccttcatatatgtcaatatcgctatttggtgcaactaagtatcgggtctcatatataatttaatataataacttttagagaggattgctagccaatcacaacgcgacatgtcgagaaggtgttaggcaccactagtgtctaatagcaatgctcatagaaaaaatgtccattttttttagagtattaactcccaattaagaaccgagacaagatacatatattgaatgtaatatataaatatttagagcatgtaaacatatactaattagggtttcacaaaacactagttgtattaattattattttta

SEQ ID NO: 175832 - DNA, 822 bp, Cannabis indica
ataataataataataataattagtatttttgtcccctgaacttttgacactacctaatctattctcctaaaatatacggcttcttaaaaattctccataaaatataacagttacataattatgtcccttctgttaggttttgttccttttaccattaaaacttagcaattttaccctctaaactttgaccaatacaaaattttttccccttttattaaaaaaaattaattttaaaaattataatattctattaattttaaaaaaaaattaataaaaacctcataaaaaaattaaattaattaacaaaatattaagtttacttgcaaaacttaaattattcctaaataaaatatttttaaattttattttatttataaacacgtatcttaataaataacaccaaaattattaaaaataccattaaataatttaaacaaattaattttttttgtaaaaaaaaaaaacaaacttatttatatttataaattcatattttaaaaaataaaggaaaataattaaaaattacaataaaaatataaaattaattttaaaaaaatttaagaaattaaactaaaaaaataattgtatttactcaaacaaatttagattttggtagaaaaaaataaaacttaaatctgttccgtaaaattagttttcacaaaattaaaatttaatatatattttttatatcaaatgaatttttaataataataaataattttaaatcgcttaattagttttaaaattttaaattttcttaattcatttcaaaatagaattttttttaagtatctaaattaatttttaagtatttactaaaaa

SEQ ID NO: 175833 - DNA, 816 bp, Cannabis indica
gccaagctcccaatctctattgttgaatcaaattgtaagagtgttgtggataaaattaataatttttattgtaataattctgttcttagtgatattatcaaatgtattaagataccattgttgttcagtccaaacctgcttataactcatgttccaagggagtataacaaattagctcataattatgctaaagcagctttagggttaaataatgagtgtgttcgaatggttccttaccttccattttagcctaagcgttttgtagtcttgatctcttcttagtaaagttcaggtttctttttctacaaaaaaaaaaaaatctttatttttaaaaaataaaatgtattctataaccgcatttatttttaaattttaaaaataaaagtgtgttgtgtaaattttatttttattttcatttgttgattctatttaagtcgggtccagatctggatctgaagccgggattaaggctaggtccaggtccgggtccagggtagaccacgattctggggcggggtacaggtcgggatcagagtcaaggtcggggtcaggaaggacgaggttgaggtccaaataggactaagcattggtcggtttggtcgatttttccctcataaaaatccaactttccatttttcggtctagattggttcaatccaaaaccgaccgaccatttaaaaccatcctaaattgactaaattgaactgcggttcggtcggttcaaactgccaaaacatttttttttgctgtaatattttcatcacactataatgaaaaacaagtcaatcataccacacactacaaatccaaaacctc

SEQ ID NO: 175834 - DNA, 1089 bp, Cannabis indica
ggaagcggaaaagtacagcaaagcacttttgggacgactgacgcggggccatggatgcttaaaaaagcatggtgtttgtgtccatcgcacttgtagctggtgcagctgttatgtacccaaaatgttcaatcttgggacctaaagaaccgtttcggaagtgtttggtttcccatagtaaattttggttttacttctcgagagagaggtccagctggtgagtgacggacccaccaccactatgaggagggtccagcatagaccggtaaggctaggaaaatccatacaaactatgggtagaggataaagtttcagtcttttacataatccagttggccaggaaatccatcaaacaatgtgtagaggataaagtttcagtcttttacataatccagttggccgtttagtgaatttaagtacagaagcggagaaactgaggggtttggtaacttgtttttcagcatatcaagtcagttttagactcagacccaaaataaaaggatcagttgaagactaacttgtcttcctttcatagtggactatataattgttttttttccttggttgggtcttggttctttagttctttgtttgtttgaaacagaaaataaaaactaaaaaaaaattaacagctcgctacgtatgtaacattgctaaactggcttgaaccatgaaggaagatggaaatgataagtgtgctttggtgtgcttattcacctgtattctctttttctattctaaattaatgttcgtgggcaatttttaactttctcaagaatatgtgaaattccacaaaataaccttaatttatcggataattataattatacaatattttcatagtttcttaccaatataactttatatccattcaaaaagtttttattttaatttaaatttttttctgctttatgttttttctactacttcctttctctctcattttcactagcaataacctctttctttccatgaaaaattctctggccagcttagtggtggtggtttcgctactagtaggggtgttcacaaagtatctgatttaatccaatccgcacgatccaatccaatccaatccgcaaaatgcagata

SEQ ID NO: 175835 - DNA, 580 bp, Cannabis indica
aagatgatgaatcatgctttttatgagagatcatatcatgctgattcttacatatagttatatatttcacttaattaagacaagcatgacattggagtttctccatcttgtgcagcaaacaccaaaagagcatgataatattcttgtgtaagtgtttcaatgacaatgcccatgttattatttaaaataattcaagaacgaaaatgatggccatttcactaaataatatttaattttcacaaaataattaaaatatttgcataatattccatgattagtgtcacaaagtaaccacccaaaagcctttttttgtttgtatacacgtaattctatttcaataggttatgatctaactggcagagggaagtgggcaagtgtggtggatcccacccattttttaatttttttttggacacacttttttaaattattttattttagaatgaaaatagatttcttttccttatttcgtttctttaatgattttgttataatataacaaagagtaacttttttttttccaaagcactaccagttcattaagcagacgaaaagatgggaaccacaaggggaattctct

SEQ ID NO: 175836 - DNA, 704 bp, Cannabis indica
cttttcccttccactccctgaggtttataactaattattaggaaattttcaatgattgaagttctgtcccaaaaaaaaaaaaatatattttctttttcacttttcttaataaattaatacaaaattaagaagaatatactatatgcatatgctattaaagttcatcattaattagtcttaaccaatcaattttttaaattcaaaatatgtctccataatttacagggtattgaaataagtgaaaggctatcaacaatggaaatagcagttaatttggtgacatatttgactggaacaatgcatttgcctagttcaacttcagccaatattgtaacagacttttatgggcacatgttttctgttgtgcttgcttggaggctttttggctgattccttccttggaagtatacaagacaattgcaatatttgctactatacaaactctagtgagcactctatgccattttttcctcaacacaaaatttatctccctgttccttttggtacatataggattattgaatattgctaagaagcaacaccaacacaacttgacatggcatatggtattattgtgcaatttagtatcagatcccgatccccagatatcataattcaaaatataataaaaataccaagtagacgttagaaactatagtactctatagtaatcttaacttaagtcaaatcattaataactatac

SEQ ID NO: 175837 - DNA, 712 bp, Cannabis indica
ttttattatgcttttattcgttggtttataacaactcacagtggtgattttttttttttttgaaagaagtggtgattcttttgaaacactagaaaattagtggttattaattctgtcttatgttactatacagttagttgttatcatatatatatatgaaagagataattattaattagttgcttttatcaatttattatcatatttcgttaccctttttcacatttattaaaacaatgtctcgagctgtccttattttcctcactgcaaatgcataatataattctaattttgagtcaattttgttggatttagtttttctttggtggtagccataataaataaataagtatatatatatataaccacttaggtttttgagaagttaaggcaaaaataaaacccataattaattggtattttcagtattattaccagttgtactggtggtaataatgaatgctccattgagttttcttggatcccttgttgtggctttgttcatttcctcctatacaaaagcagcagctctaggtttaatattataattaagtttcatgttgaagtttctttaatctaaagttatatattgacacttttttttttatgtgtgattaatttcaaaatgaagatgatttgaatatcaagagatctgattttccaaagtgaattttctttttggagctgctacttcagcccaacaagtatgtat

SEQ ID NO: 175838 - DNA, 520 bp, Cannabis indica
ctaaaaaaagcccaaaatatttactcaagaaaacgacatgtcgtataaatactcgttttttttttttttttttaaggtatgtcgtataaatactcttaagagctaaaaaagcataaaatatttacccaagaaaacgacatgtcgtatatatctctaaagggctaaaaagcctaaaacccccttaaaccttggtcggagggtctccgtcgtccaaagtccaaacctttgggggaaaatcgttgttctaattagggtttggatttggggccaattatgactgaagattcgaaacatccattggatacagtcgaatcaccaccccaaagaccttcaaagttggctaggaccagcgaagaagacgacctagaactagaagaagacgaagtagaagggggagaagaagagtttggtcctgatccccaatccatgacccaaaaccctagaaccaatattcagaggtatttgattgcaattgagtacattgggactcgcttctctggatctcagcagcaacccaaat

SEQ ID NO: 175839 - DNA, 547 bp, Cannabis indica
tttctgtaaataaaatcaaaaaaactgtacaaataattaaaatttcatgaaaccgtatttttataattttttttgttgtttttatatttttgtgaaataatcctttcagttaagactcaaattaggcatctctttaaaaactcaaattgcacattaattatgtagttgaattaattacacatttgtaaaaaaaaatgtgtaagtgtaactttagtgtctcattcattattcttttttgttgttgttgctgttgagagaagaggaaatcattggttctacagacattcagagagaacaaatgggcaaccatttttcatgaaagcaatccaacccattatcagttggctctgtctgagagcaaaaccattcattattcaagatagtaaaaacaatttaatctaaactaaatatgttagtttttatatattatctcactacaaactatattataaattattttaatatagaaacaacctatttagatacaagttacaatgatatttttttaaaagactattcctttagaactttatattaaccatctaac

SEQ ID NO: 175840 - DNA, 1051 bp, Cannabis indica
gattctaaagtagtttctctggtggtttctatgtgtgttgttatacgattttttgttgcgatttaggttgcagctctaattgcaatagggatttctatgtaaaattctgtaaaaatatatatataaaaaattgttttgaagtttaaaaataaaaagcctctaataattaatacaatatattactttatttaaacataatgtcatttattatttaatacaatacagccttggcttaccaaacaagctctaaatctgatattgtactgtacaattagtttttttttttgggatgtcatcagacccagcgttctaaggtaagttttctatagatttacgtttctatctatgtgttgtttacaaaaaattgtaatatttagtattttcatctactgtacattattatatatcttaggggtctttcttttttctagatataacattgtataatattatatatagagagatttatccctctcttttttgcttccttttctttttttcttttcttttgtaaagggactttctttcttcttttaaatttcttaattttactataaatttctcaattatcaattattttctttttaacctttgtacaatgacatggttttggaatcataggatatatttttttaattgatttatcaattgtcatttcctaaaatatctattttatgtgaaggactataacttatattttgttttaaaaaagttatataaaaaatatttaaatttgaaatttgatatataatttttttatcattagatgtcatttaacaaaataaaatttgtagctattacataaacgtgacattgaagcactaagaatctcctcgtttaaatcattagatagcacaagtctatttttttttctttaaattattgtcgtacgtcctagctttcgtagctatacatagcctttttctttcttatctactctacaatcatggaatataatgcttaaatgcttaattatatattttttttcctttttcccttgacttatcacataatctgcaatctcctttgatctttattaacaagttgttca

SEQ ID NO: 175841 - DNA, 648 bp, Cannabis indica
ggattttgtgttaaaccattattgatttctatttattattttgtagtatcctgtataaccatgatgaattccatgttatcactcttgaccgaaaataagctaaatggatctaactttccaaaatggaatgagaacattaatattgctctcataggagaaagtgccttgtttgtgttaactgagccgtctccagaagtgccgggggacaatgcatccaaagctgtgaaagaaaagtatgagcgttggcagaaagcaaatgacaaagctctatacttcatgctttccagcatggttgacacccttaaaactcggttttctaaaaccgaaaaggctgctgaagttatgacgaagttaactgagctattcggtagggcatctcttcagtctcgctttgacgcgactaagaaatacatcaatgcacggatggaaccccatcaaaacgtgcgtgatcatgttctcctcatggcaagttatttccaagaagcccaggatcatggtgctgaaatggatcacactactcaaagtaaagtaccgtacttacttcgtaacgtaaagtttggtttacgtacctacctactactttttagtttttcccgtacccttaactaactactaaacttaaaatttagttcgtactagtaagtaaaa

SEQ ID NO: 175842 - DNA, 709 bp, Cannabis indica
agctactacagcagatcgtttaataaaaataacctcaacggtacacaactcagcaagcaaattttacaactttgaatgacttgaccaaacaaagaaatcatatgtgtagaactacggaatgcttgtaccaccccaagactatcactctttaaaaaatattattagacaatcgtaaaataaaatatttagaaagtactaactaaatagtactggtatccaataacaatattcaatcattaatcaagctgatctttttgtccacgtacgtttgttcttctagacactcttagaaagtatatataaatattaattataaaaatgtatttaataataataacaataataaatatggatgatgatgatgatcatgataaacgctcaagattgttccacgtggatgcatggtatttagtagcataataatggtggacttattagtcaaacaacggtgtttccctttgccggaattattgaaaggtttgtctccaaaaattcaaagtgttttacctataaaacacaacgagaggccaagaaacaggttcgagttcttttcagtttcataagaactccatgtgctatccttaacacgtggctattacttacatgtctagtacttataataaaatggtaataataattgatgtgacctgtccaaattaaatgttctattggaattatattaatattaggtcattggctatatatttct

SEQ ID NO: 175843 - DNA, 562 bp, Cannabis indica
ttgatccgggaattacagctgattgatcccaagcttgagatgggagctttactggtcgaatttcagagcttcccctgtatgctgtagatttggacagatttccattctcaaaacaaatggaacgtcatctttccttttgtgagacaagaaatgttggtaaggttggtttcggaccatagcccggtggtgatcgattcaaatcctccaaaatggggacctggaccctttaggtttgataatcattggctggagcacaagttgttttccaagtgttttgaaagttggtggaaggaggaaagtattgacgggtggccaagcacaaagtttatgaagaaactaaaaatactttaagggaaggtgaaggagtggagtaaatacacttatggacaaaataaggccacaaagaatgcgctggaaggaagattgggggtgttagacagattagaaggaacctcgtcttggagtcaatctttgcatgatgaaagaaggaaattaaaagaggaatggcagcggttaaattttgaagaagaaagaggtatctggctgcagtctaaatgcaaat

SEQ ID NO: 175844 - DNA, 1376 bp, Cannabis indica
ttttttttttttttttaaaaaaaaaaataaataaataacaaaaacgaaaagaacaacaaaatcttgcatattgatattaagtcacctaagtaatcttcaacactcaagcttgtgataccaattgttttaaacagcagaaaagcacctgagaagttttaaaagtaaacaaaaacagttggattttgaagtaacatcagttaatactgcatggtacttttaagagcgcaagcttgacaaaacaaactagttaagtgtttgagtctaaagatcataccaaatgatattatgcagaaggatattatggtaccgaacacaccaaacaacaatatcgttgagaaattcctaaagaattgcttcttcttgacctggaaactgaaacatgattgtgaaattgtttagcagaaaagtgattaacagttcaaccttgattacttcttttaaaggatctccagatcctaactcaaatttcatcgaattgcaggattaatgagttctgctaattcgaaatgatatcatagttgacctccaactatggagtattaactacacacacaagaaatcactcagagaaacgaaaaagagtacccagcattgaaaatgattggaggaagcaaatagagaaagaacaagtcctcgctgaatactaacaaacgtgaactctctgacttcctcaccaacagcaccactcctccagtgcacaaaccctaaattttaaccgcatacataaaaaatccatcaaataatcaaaataagccagcaaagcagagcaaggttttggattgaaatcacataaaaacaccaattttgaacacaccaaaagaagagcagtaatggattcgttaagccagcgattctgctcgagaagatggccaatgatgatacagacacaaagaagggcgaagaagatggtgagtgcaataatggtgctgctgctcaaataagaggatgaagacaactgatgaagtggcggtatgggtatggctccgagtaacgtcattgctgctgtttactggaattgtcagtaataggctgtaatgaagatataaatgaattcatgaatggaatttctgatgagttagtttgaagattgaaaatttcattttcaagatttttgtgggtgaatttggagggaagaatggtagttgacaccggttcggacttcggacactccacaactatacttgaaatactaatttcgtacgtcatttagcgccacgcgtctttctttcaaaatatacaacttaattggtgtttggatggaagtaatgaatgaaatggaaaaagaatgaaagaatttttatttcattctattattttggtttttttttttttttatttttttttgttttttttagagaattaaatgtcttttaata

SEQ ID NO: 175845 - DNA, 771 bp, Cannabis indica
aaatctagccatccatcgcattttccgttgtcgccgaacaaaaattacaaaaataacatattacacatataagctagataatacccctagagtttaataaaatctccggaatcgagaaattataactctaatatttatttctaaatattggggtccacaattaaattaattcacaaataataataaaataatacaaattagtgctaattgcctttactaatccatatactaaagcggtcattacaaaagttatgggatgcgactctgctgctgctttgtggaaagctcctgaaaatctttatggagctcactcgaaatctcagatggatgatactcatacactgattcaaacaactagaaaaaggttcaacatcaatggaagattatctgaagcaaaagaaggcttggtctgattctctcgccttagttggtgagccatacctaggaaatcagcttatatctaacgtcacttttggctttgatatcgagtatctacccattgtgcttcagatcgaagcccgatcctcaacaacctggcaagagctccaaggaattcttcttgccttcgacaacaagatggaaaggcttcagaacctaagcatcaacaacagcaacaaatctgcttagtccaccaacacaccaaatgctaatttggcaaatcggttgtttcccaacaatagagggtgaggcagtaactcttaatctaatcaaggaaattatcatcaaaatcaaaaccagacaggaggaggtcgaggcaactataatcgtgga

SEQ ID NO: 175846 - DNA, 773 bp, Cannabis indica
tttgctaataaagtttccattcctaaaaaaaaatactaaagacaaactaacaaaagttatttggggctatttccataaatatgaaaaaataaagactaatttacataaatatggcaacaatatttaatgccaccaaatatggcattcaaaacaaagaagttaataaatatgggagataatatgtctattaccataaaaaaaaattaaaaatttcagattttttcttttgaatttagaaactaaccaaaaaaatcaagtaaaacctctctctacaccattttcttttctctctgtgccatttatgcgatttatctctctctcacttccatcaacctcacagcactgatgaatctcttctccaccgatcgatctcacaacaccaatcacaaataattgatctcatcatctccatcaaaatctggcaattatgacgtccatctcccacagcaacaattgatgacttaaaaaagagaaattcatgttcaaaacacaaagtaaggaagattcaacacaacaaaagaagaaattcacatcatcctacctactcaaattaaaatattagatattaaaaaaatgtcataaaattcttcaaatttaaaagtatcatattaaaatgaataaatttttaaaagccatattttatgtaattttacatgaatttgaattatgatataaatctgttaagaaaagaaaataaaagaagttttactatttgagtggtattgatgattcaatattaaatctaaagctaattagtaattttcgacatgcag

SEQ ID NO: 175847 - DNA, 677 bp, Cannabis indica
atcctatattttatgggagatgctaaaagacactagtagtgtctaatatctttaatgtgttaatattactattaatgtaattaaatattagattttatataatttaatttaatgatttttaaaaaatattactaaccatgtttagaagttgttaaatattattgctacccaatagtaataatcaatttttatcactattcttagtattctatgaattttaaactccttttatatcaaatttgacctaaaaatttgacaattagtttgttcacttttctaaaaattgttaactccttttataccaaatttgaccttagaatttgacactttgtttattcacttttcaaaaaattagttccatgaatatgctaaattttactcttgctaagaattgtttagttagcagcaaaaaaaaaccttttatgttttatcttttattcatataactcatttatttttatttttttaattaatatcccttcaattttgttagcaaatttgaaacatcaattaaatttcacctttcaatactaattaggattgccacttatacacagatgtatatatatgacactaaaattttgaagctaataaaaacatgttatttatacacaagtgtacatagtaatgattcagttagtatttaaaagtcggataacaatttaactagtacctca

SEQ ID NO: 175848 - DNA, 938 bp, Cannabis indica
gtgtgtacacgtggacagtccactgtggcacttaacggtgatttttggacggaggtgtgcagagcaaaacggaagtggagttcaggtagtttagccgccaaaatttgagttttggtggttaactgtcacaaacccaaaagtttggggggtttagccgccaatatcccaaaataaaataagtaaaatcgattatgaaataagtgctacccattttaatataatagtatttgttctcccaaaaaaaaaaatgctagccattttggtgcctagtaccaatactcaacattatttgtaatttgcggcataaatacttaagtttatcttttggttacagtttaatacctaagttaaaattttgacagtaaaaatacattcggttacattttcagaagttctataagtaccctgctgttctcagacatactgaatgccaaataacaaggcacatcattcaaaataatgccacatcattttattaagtgcccacgtgtagaatattttagtctaaaataattatttttttaactaacaaatatatttttttttgtaaagaaaaaaaataataataaaatatatatatatatttgttataaaaaaatatatatatattttagactaaaatattataaatcattataaatctataccctaaaatctgaattgtaaaataattgaaacaaaaacaaacattaaattaaatcattatgaactctatcacattattgttgttgtcttttaatttattttttgttgataatcatatgacataaaaataaaaaataaaaataagttgtgttccgcatatgttttctatataaggattataaaaataaaaggcacattaaaacaaataataattaattgatgaacattatattaagtgatgatttattacatgtgtatatatataaatataaaatgagttctgacaatattat

SEQ ID NO: 175849 - DNA, 1417 bp, Cannabis indica
atacttgtaatcttaattttaaattattacacttaattatttaattttttatttaaatatttaaaaagtaaaaaatgaaataagttgaaggattttttagaaaaaaaaatggctgcacttgttatcgattgattagcttgaggcctcatacttagttcatataattgtaacaaaataattaaatatcatttaaaaataattaattatttaaaaatttattataagaagagaattttaatttgtgtcaaaagaagtttaatttttgtaaaaaaaataaattttattgtaaatattataattaaatggcttaattattaaaataattaaagtaaggatttaaatataaatattaattgctaaaagaggtcttgttaaatatttaattaattattttaagaaaatagttaattataattaattaattctaaaaaaggaatgtctacctattagtaacctgctattacaggtcaaagaaaaatgtaaccatatggttacaataaaaatgtaaccattgaatagtcacccatatatatatatactagtagaacgctacgtgcgaggcacgtatactaagttttatgctaggtgtgtcttgatttatttaaaaataatacaataaataattaaagaaaaaatattattaattattattatgagattattaatatgtatattcaattaatataaataattattgttaataattaaaagtaaatactgaatacaatatatgaatgttaataatctaattgcagtttgttttaagttaatccaaaattaaaccaaaaattaatgttcaaaaaataaagcatacaatttaaatttgagttaaataaaaaaaagatattaaaatttaatctctaaattgttgataggtgaagataacacatgtgtaaaagttgtaaaaaagaaaaataaggatactcttaatggttgagttttaattttcttttgcgagacaacagtgtaatatttgtattttgcactgttcattctagctggatctgcttaataaagttattatttttcatgtaagatggtaagatatagtgtaaataattaatttaataaataaaatctacttatgatagtcaagtacatttattctatttatttaaaactatatctgtacagtaaagtgtattatttaggcagcaggacatgaaagtatttttttcatgatatgtgcaaacatcacagcattgacgatttttgtaatgtcatcaagttcaacatatactataccactggaaaatagataataaaaattaattatacatgtataactaagcatgacaatcaaagatgatggctgagaaatcgctagggaatggaaagcaaaagctaaagaaaataattgaatattcaatctagtatcatagagcacagaagcaaacaaaaaagaaaaaaaaaagat

SEQ ID NO: 175850 - DNA, 609 bp, Cannabis indica
gatttttatcagctgtagcaaagaaataaacttcatagaatttgaaaaatgaatctgaagaaataggtatgcctagatactttattctatggataaaagatctaattgatagaggaagcaccgtaaagatcaattcgcgaggttttgggccgatacaataagaactgcttatttatgtcatgatatgacataaaagttaggaatcaacttatgtaatagagtggatcccctaaggtattgagcagcggtgtagcatcagatcccaaagatagtaagccttttccttcttataattttaagaattataaaggaaagtctttttcaaggattctatataaatttatatatgaaaccgagatagttacctttttataaaactctaatgatagtggaaatgcctatactttatgaaggtgggagaaaagagaaaactgattaaattattgactaaattagtaagcaaaattcaagtttgaaactcataacctctttcttttggtttaactctagaaaaaaaaaaactagggagtaaataccactgaaaaatacccacttcaatttgataaagggacgaccaaaagaaacttgactgctgagccgtatgaggtc

SEQ ID NO: 175851 - DNA, 904 bp, Cannabis indica
aatattaaaaaaaaagaaagaaagaaagaaagaaaaagaaacaccaaataatatatatatatatatataatagtacggatgttctagtagacctttaatttactagttggatattgagaagaatttctaaatttttttcatgaccaaatgtatatatgttattgtatttagggtcacctacaattttttaaaatttgaataatttatagtgttaaaaataattttttttgaaaaaaattacaatagatagagaggctttaaaaaaaaattaattaatgttaaataatcattatattatgtctaccttttctttatatatctatgattctatagtacatacatgcatgcatgcataatatgatcaagaaaactgaaaaatatacattaataaaatgaaaaaaaggaaaattaagtgaaacactcttattatttaatcatcatgatcatcaccagtgttggaattaaattaaccaagaaaatttgaagaactaattacatgattatcaaaattaattaatgaataagagtactgctccaaacattatcaatacgtaagaacaatttattcctttgaagctgcattgccgtgagatccaagcaaacgtgtatataaaattccatccatcaacaaatacaactccttcataatctcttcaactctttccttatcagttttttgacatgttcaactaaactcgaaacctcttcagtgctgatcaacctcgaaggaagaagattaagagaacacaaagaaacttccatcaaaagcacgacgaaaaacaacttatcatcacattttttctcgaaattcctaaaaatatcattctgataaccaataataataacaaataatatctcattattgttagaagattcccaacttttagcgaatctcataccaagt

SEQ ID NO: 175852 - DNA, 1111 bp, Cannabis indica
actaattgatatttaatactaagattctctcaaaattttaatatcgaaataaaaactaaatcacattaaagtagcaataacagaaatcacattaatataattaaataaaaatagcaataacagaaatcacattaaagtagcaataaaaccaaaaccgtccataaatgtattttaaaatctaatttaaatatagaaatattaatgtaaattattatacaaatataatccaaaataaattactatttaaatcaatgcacttataaaaacaaaattaacatttaaagttgactaatatattcataaaagtatagagtaaaataaaatttcaaaactaaaataaaattatttatgagatggtaatataaagtcaaaaataaatcagaaaacaataaatcaaaaaatgtaatttaatgctcatactacatagatattaaaaatccttataaaattatgtagaaattcttaaaaattaaattaaattttcaaaaatgtagtatatggaaagaaattgaagtaatcatattgcaattaataaatattattacattataaattatattgatgataataaagtaattatcaattattacaaaaatattaaaattaaaaactaatacacttgtaacttacacttcgtacattgtgatgatcataaaatagccaccattaatgaatgcaccgccattatcatttcgttcactgtcgttgccacttccgatcacggtaagatgaacaacaattacataactaatctgtgcacaggttaaatataacaaaacaagcccaaatgaaacatgacagaacaaaaaataactcaaatctatgttatgatatacaaaagagatgagaaaactgaaaaaaaatctcaaaaaaaaaataaataaaaaagaaaatagctcatctaataatacaatacattatatgaatacatacatatacttctcctaacaaatttgtaataataataataataataataataataataataataataataataataataataataataaatcgatcttttaaaaacaaaagtaaatgaaatcaatccaaccttaccgacctccgtccatagcgccttcagtcaacgtcacggtagattcgc

SEQ ID NO: 175853 - DNA, 997 bp, Cannabis indica
aaaaattgaggaggggcaaactgacccccaccatgcccccccttctctctgcctctgccaccagtcgactttctattatcaacacaaaatgcccagttagcaacaaagtacccattccgaaaggtagatattacatgagagaaatagagaccatcaaatatagttcctttgagatatctcaataaccgtttacatttcccaataaattaaggtaggagcatgaataaactagttcaacttgtttataataaaagtcacatcaagcctggtgagagtaagatattgtaatgctcccatggtacttctatgaagagtcttatcttcaaatggttctttttcatgtaaagacaattttgttgctaagctagttggatttgggaagttcttagcccctttcatgttcaattttacaagaagatttgtaacgtactttgtttgaaaaaggtacattctagtggcatccataaaaattttcactccaaaggaaatattgaacatgatctaagtcctttgaagttgcagacaaattgtgttttgagatgagagaggttggtttttttaataaaagaataaatatgaaaatttaaggaatacaagcaattgttgatatatttaatttttgtagggagtgatgttaatagtgagttttataacactttttttaatcatttttttaatgaaaatattttcttatgttttataaaactgtatttatttttaaatttttttaaaaaagaattaaaattttgtaaaaagcctacttttaaaatttatttaaatatttttttctttttaattataatttatttgtattttgttataataatttgcgacataaatacttaggtttaatttatagttgcaaataaatacttaccgtttaatttttgaacaataataaataagttataattctaaaacttataggtacttgcctatttagtgtcaggtaaattattagtggcaattcctgattggtcaaagtcactaattttta

SEQ ID NO: 175854 - DNA, 531 bp, Cannabis indica
agagacagagagggagagagaaaaggaaaaaaaaaggaaagattgagagaaagataatagagaaaagggtattgtgaaagaatagtagaaagagctggaattattaaattttagagagtaagttggagagagaacaaaactcttatctttctcaattcttcttcttcttcatcattcacatacttttttttatacctactacaaaaggagatgagtaatgagagggaagagagcatttatttagaaagagtgtataggagaagattttgtaagaattttatcattagttttaatttaaaaaaattatcacaagtgacaagaccacccatcactttcacaattaatttttataaaaaaattgtcataagtaacaagacaacctatcacttttattattagattttatataaaaaaaaattatgtagcatctgactatattttaagtatgatgaaaaagataaataaatttggtatttggtaacatgtagcatagaagaaaataaactcaatgttactgacgtgacaattgaa

SEQ ID NO: 175855 - DNA, 1098 bp, Cannabis indica
attaaaattcattatatttgcctcttaaaatttcttatctttcaatttcattggttgaatttttttttttctaaataagttttaatgtatatatgaaaagacatatatgttactattttttcagttgcttggtattaatagttagtattaaataaaaaaaagtattaacaaaagtctaacaaaattaaaaaaatgagagagcaagaaaattttaaaaaaatttaatgagaccgctacgtcacaggcataatagcattatatttatatagatagataatgaatataaaaatttaaataatgtatgcatgcttttattacaattattattactaattttgctatttttatttaattaatgagtataaatttggtattagactattaagttagtattaaaaaaaattaaattaaaaatactacaaaataaaaaaatacacttttattatataatgcatatatataatataatgttgtaatgcttagaattggaaatatatttttttaattatgaggaagaagtttatactaaaattgtaatttgtatccaacaatacttttttttttcttttattgtaattgtacttaaataccaaataatagtaggaacgattatcggtaccaagaaaaaaaaacattttatagttattaagtatatattataggttccctaaaaaaaaatacaatatcacagatttaatattaattaagggagatgaaaaaaggaaaaaaaataattaaaaaaaattaaaatacatataagtaaaataaaaaaaaaaatactagaaaaaaaactaattttttcctaccatgctctacttcgtccctcaactgccccgctctgaatgtggccttttcacactccgccctcaccttgcgtccaagctttttgaatcggggttggttagtcatcgacccaaaaattcttcttcttcttagttttgttttgttaaaaaaaatgatcattttaatgcatttacaaactactatgtgagagacctttctaactttttttctctcatcaaaaatattattttaatagcctaaaataaagatagagaaatcattccaatactatagatcatgtagatatataactat

SEQ ID NO: 175856 - DNA, 1257 bp, Cannabis indica
tattataatactttttccttggttcctatagtttattataatattctcttgttctgccaatatataagattcttttcaatattatttgtacaaatttttttatgatctttcgtacgttcaatttatattatatatataattttttattataataagctgtaattaagatctgtaaatttaatgaaaaagattagtctgccagtaaaccacatgtgtaactagatcgccaaacactacttatatgtatatatcatggccatggagggatgtaataaatataatataacttttatagtataaaaataagacaaatatgatgaactaatcacatctttagcttgattataccttcctactaaaaataattgaattttatatatataaatatatatatatatatataaaatataaaatacttataatgctgaaattatagagccaacaaacaagagtactatgcttaaagagcattaattattaagaaatcaaaacatgcacaataatttctttataatttcttataacacaacatcttcaacaacataaattaattaacaacaaaagataaattaacatactacattatttcattgcaacaattattgttatcattttcccatctatagatgatgatattaaggaacataagcaataggaaccaagcttaaaggcttcattcttttgagtgtagtaccaaaagattcactcatatccaaatcttcatgtcttattccattattaggcaatttccaatcaaaatggtaaagcaacaatgcaagtggatactcaacatttatgagaccaaacgccatacctgcacacattctccttccagcgccaaatggaatatactcgaaatcattacccttataattagaatcgataatatcaatagagctatcgacaaacctttcgggtataaaactctcggcttcactccaataatttgggtctcttccaatcgcccatacattaactaaagttccagttttcgcaggtatcacataaccatttatttcgcatttttcttgactttctcttggaattacaaaggtgaaggtggatgtaatctcatggtctctttcacaactatttttagatatttcatgtcattaatacctttttcatcagttgaacctagctttgttaaacacttctctaacctctcttgtgcctttttcaatatatttggattttttcatcatttctgccattgcccaattctattactgttgatgatgtgtcaattccagctgc

SEQ ID NO: 175857 - DNA, 605 bp, Cannabis indica
tctttagatgtttctcaaatttaattagtggccggatttacctcattttaaactccaatatccatcttgtgatttttttttttagtcttatcaatgcatttattctttttcttccaaataaataaagcttgataataatttaaacatttaaaacgtgattaacaataaaattctttcttgaattgtttaaaaaaattcccttctatatcatggaaaatttgtctttctttgactgatccagcaaattaattaattactgcataaatgtatttatattagcaaatattagatctcatgatcagatctctctaggctattcaaatagtgcatatatatataaatggaatctacgtatgattatatataaattctcaatctcataatcataacatctttgaaaccaaaatatattgatgccatttctatacattaggcctttcaaacatttttgtgtggtacacttcacttgacatccgccgcaatacaagaaaatttaggagagagaaacaaaatatataatatatttaggagatttttaatttttacatttttaaaatattttttttttgtatttttattggaaatttttacataaaaactcctaa

SEQ ID NO: 175858 - DNA, 1167 bp, Cannabis indica
atatatacatgagttgtagaaaaaattatgaaaataaaatcaaaataagaattaaaattaacataaaataatgtgagaaaaaaatttaaaaaaatatcaagagtaatttttaaaaattatttaagtttatatttttctaataatggggtgtatttataatttggtggggtgcaaataaaagtctccatacataaattaatatatattttgtattacatttttacccttgcatttatcaacaagttcctcctctcctctatataatttgatgagttgatgaattacatacagatacataagtcaaaaaaaaaaacaaagcctctctcttttctctcacttataactaacaaaagatgaatttgattatgggtgagggtgaattagtgagctgtagggagcttgttgaagctcaagagcttatatataactgttcactcagccacataaagcccatgtcattaaaatgtgccattgaattaggcatcccagatatcatccacaaccatggccaaccaattacactatccaaactcatttcttcacttcctatacacccttcaaaagctcattgcattcatcgcctcatgcgaatccttgtccattttggcttcttcacaactcaattattacttccacaacaacaagaagagacatactctctcacacttgcttctaagcttttcttaaaagattgtcctattaaggccacaccattttttcttgtccaactcaacccgcttttgcttaagccgtggcattttctaagcacttggttacaaaaaggggaagatgatgatgatcatccaagtaccccatttgagatggcgaatggtataaacttttgggatggcgtaggtaatgatccaatggttaagtacatgtttacggaagccatggccactgactcttatctaatgtcgaaagtgattgtagaagaaggtaaagaggtgtttgaagggttgagttcgttggtcgatgtgggtggtggcacaggtattatggccaacgccatagttgaagccttcactaacattaaatgcactgtacttgatcttccatatatcgttgctgatttgaagggaacacacaacttgaactttgttgaaggagatatgttcaagaaaataccctctgcaaatgctgttttactcaaggtaattactaatt

SEQ ID NO: 175859 - DNA, 807 bp, Cannabis indica
ggcggtggcgagatctgatgataagcttaatgaggctagatcaggacccgggtcttacccagatgaagcttttgagctctttgctgatgttgatgcttttgtcttggatgagctcttgaacaccttaaaaaggtaaggtttttctttgtgcctcttcttcgagaaagtcattgttgtcaatttgattttgctagatagatgttggtgagtgatgaggttttcgaccgcatttgatgttgctacaggtagatctgagtaaaaaaaaattggggaagaacaatggatgaatttgaattggggttagaaattttttgggttcaggagcaatggatgaatttgaatgtatattaaatgtgtttaattttattttaagtatgtaatttagttttttaatacattatgtttaattgtaatataatttttatattttttaatgatttttttaatattaaaatactttttaaatgtttaaattaattttttaaataaaatatataaattaaatgacgtggactaatcaaagaatgacacgtggccactaacctggcacataacggccaggtacctacggaagttccacactagtgacggaaggtatttttaccgccaaaaatacgacttagatatttatctgctactcggcataaaacttaggtatttatgccgcaaattactctttaaaatacaatatacaattagctaatatttttcaaaaactgattttggattttttttattttttacttaaagaaacaaaatcttcactattccatattgttgatgttgaaaaatagacaatttgtaata

SEQ ID NO: 175860 - DNA, 698 bp, Cannabis indica
aaaaaaaaaaaaaaataggttttagtgaatgaagatgcacataacgaaagataattgcaaactttaagaattaaacttctcttgcatgatgagagtttgacactgggtcaaccatagctaaaatgtatgtttcttttttctttttgaaagcagctaaaatatgtatttcgatgaataagggaaaataaaagttcatgggagaattgcgcctattaacaaccatcacagcaaaacataaattaagattgaaaaataatcaaaattaccttaaaattggatatgtaggagtggtaaatccaccataggaggacgtaaaaaagaaatttggaaaggaaaaccctagaagtggagattgagacaggaggtaggaagtgaataaagcgacgtcgtataaggatccctttgaccaaaacgatgaagaagaaaagtaaaacaaagagtaggagagaaaatctggggaaggcaagaaattgtgtttctgaagtctgaacgactcaccaacgatgttcttcgtgattgatttgccttgttgttaccacctgtggaactatccactgtctgagacacgtgtcccatatccttcatacttttctgcttctttggatccttgattttgatttgtccacgcagctagaatacagtgcacccgctcacattggaataatatacagatagcgcagctgcaccctggaatgaat

SEQ ID NO: 175861 - DNA, 777 bp, Cannabis indica
tttaacatttctcaaaagaattatgagtaatgctaaatacatattcaaattatacacacactaattacaatgatgtgtattaaatgttagtactttaaggttatatttgatgagagggagggagaataagatggatgaagaggttaagaagaagtagattagatagagagaattgttaatcttcttagggttgtttgatatttaatttaaggtggaaataatgaaaaaaaaataattaataaaattacaaaattatcaatttaaatataaaaatttattattcttctaaaggtatttattgtgttatgcaaattatattttgcctttttataccattttcttaaatttggagtactattattttcgtaaatgaaaatatattattattattaatgtgttatgattatatctatttgaaattaaattttgatacgaataaagttgtatacacacatatgaaagattcaattagttggataaatattgatgttccaggaactcctcgttcataatttagaagtccacaaatacactcttgaagagttatagatcatatattgtcatagataatatacagtgacattttaaaattgataacaataatcttataagatatattatcaccaaaataattataaattatatgtgcatgagggagagacatattcatgttgcacttttttttcttagctcaagttttgtcccactagattttcccgacaaggtttttaacgagacaactttcaaataattatgaatatgatatatattgcactc

SEQ ID NO: 175862 - DNA, 856 bp, Cannabis indica
actattttttttttatataaatatatgtgagattattatttctacctacaattttttttaatatatattgtttactaaattttttaaaaaccgattataaacaaataaaacttaaaaaaaaataataaagaataaaacaaaaaaattacgtggttaaaatattaataggtcttaatcgaatcaatattaatattagttgaaaaaactttaatgtattacacataaaattattttgaatatatatatattaagaatgtgaaatttaaggcatgcatgcagccgaattttataatgaaaatgtgagaaagttttgttttttatttgactaattaattaattaattaattattagggcaaagagtgggctatagcatgctcaacttttttatttcgtttcaactttagacattattattcttaatatattattaattatggcttttggatttattttaaaaataaataaataatttgcgctgccttgttcggtggttttttttttttttttttgtaatattactactttcttcaattttttaattaattaaatcagaaaataataacttttttaattgccacccaacaaactttcaaaatattattattttgaaagaaaattatattaaccaccaacacatagaataggtaagtcactcttagggagatcacgagcattagaataatatccccattttcatctagaagatactttagtattaaaactcatcttactaaataatgagcaaaaaaaaattagcatctctacacttaaatattattattaaaaaaccacacattattgtacatagtgtatattaattttaagtccaacgtattattattattattaatatta

SEQ ID NO: 175863 - DNA, 653 bp, Cannabis indica
gttacaatattatattatatttctacaacgaaataacattaatttttagaatagcctaaaataatagtgtttttttttcaaaacaacctaaaaataatggtctatgagaagaaaaaaaaaaactataaaatatatttaaaaatcagaatttttaaaaacgtaaattttagtatggacaaatgcaagccaattgctactcccattgctcaatatttcaaactatcagcatctcagtctttaaacaatgaaattaagagaatcaagatgatcagaatcccatatgccaactgcattaggagtcttatgtactccatggtgtgcaccagacctaatttgacacatgccacgagtgttgttagcggatacatctcaaattcaggtacagaacactaggaagcattcaaatagatcatgcggtatgtgaaatgtacattaaacacaagtattgtgttcaatagtgaataccaacacaaataagaagttactcgctatgttgactcagactttgctgcaaatatagacactagaaggagttgtacagggtatgtgttcactgtgttaggagattgtgtaagctggaagtctaacctgtagaaagttgttgcattgtcttccacagaatcaaaatatatggctgcaattgaggctatcaa

SEQ ID NO: 175864 - DNA, 1102 bp, Cannabis indica
tggaagtaattgaggggttccagttacactctctaattttcatggccccctatgagaattgaatgtaattacactgtgtaattactaaaaactttccatattaaacattagctactaaaaaatattatttttccatgtaattattaactattttgccaaacaagatattaggaattcatatgtaattaccacctcatatccaaacacaccttatattttaaaatataatgtaattactaaaccaacctaataattaccctacttaataattacacagttactttcaaatacacccttatagttacttttgattctaattaattattgaatggtttctttattatcttttttaagcaataaaaggttgagcggtgggcttcattggagtcctgggcaagcaataaatttatgaaagaaggtacgaacaagataaagggactctttttcacatgacttatttggctcatacagataaaagctcattttctgtctctacttctttggcatctatatcacaacccttaattatttatatatttaaaactaaatatcacttaaaatattttgaaaaatgttatactttatactttattttttgggacttttatacaaaaaccttaattttttctacatttttatggatattttattcttacagatttttgcttatatttattcaaaaaaataatgttgttttttgcgttaccttataacagtaatatgaaaacaacaaaaaaataacagtctgtatatttacctcttgtcattttagtatttatgaaaatatcttaaatttttttagcagctaaaagtgtttctacaataaaccccatcaaaataggtgtactgatacaattcctaactgttttggtatctataagaattttttagtctaaattttttcatagtcgtgtacgttatagttatttaagacatcctgcaaaattttaagaaatttggaataatttacaatatcgaaatcaatattttaaccttctatttcacacgcgtataaaataaaaaaactatgcgtgcaacaaactctttgaacactgtttttgacgtgttaaatattttcaaattttttaaaattttgtcagat

SEQ ID NO: 175865 - DNA, 581 bp, Cannabis indica
tgtcttaagataaagatgtatcgaattgttctgatctgaccaacttttttttgcctaactcttccaaacattctacaagtttgaaaaaaaaaaaaaagaagatacatatagtgattttgagttatgcttggtgttggtgagatatataatattatcttttttatttattattaaatcaaagttataataatataaacaattagttgttctttgctatttcagaaaaaaaaaaaaaagaaaaataagttgttattggtaggtaagcctatgaattagtcatatttgagcgacgcggattccattagaacccttctattctatactaactcaggagaatacattatttactacttgaaataagtagtaaatggtcattatacaactttgaattggaggcagtgaaaaggtccactctttttttctgaaatcgtccactattatacattggaaaataaaaatttaatgagtattgataagaataatttttaatactcactcctctgttttatatcaaatttacacggacgaaattttaaaataataatacaaacaactcctctcttttagttctctctctctct

SEQ ID NO: 175866 - DNA, 854 bp, Cannabis indica
atatcttaattgaattagatgtaatgatcaataaattcatccgtttaattcaatatctacataatagaaaaattctatcaataattttttctatttgggagttgacgaacaatcaaaattactattagtctttattagtgtcaaatagaaatggggcgtggccaagtggtaaggcaacgggttttggtcccgctattcggaggttcgaatccttccgtcccagagcatattcgtctgcacacccaacccattatgtgatgatattattacatacttaaaccatacttcactcatattatatcttatatttagtattatatactattttttttttatcagaataaaggttactttttgaacaaccttctgtttaagagtagattattttcagagtctaatattgaaaaaatggaattcttagtcttaattagtcctctctgaaaatgaaaattgagttcaaataacacgcaaatgcaaatggaatacaattcaattcattttggatctctaaatattttaaaatagtaaatattataggtataatagaatttcgttcagtaacaattgtttagtctatctgatacattcaggatcccatattatttcgattctgcttttttcaattagtataaaaaaaacctaaaaagaaattggattttttttatctatattaaagttacttgacgatgccaaaaataacttactttcttcgtgttattttcttctttttaatttcaaaataatttttgatttgagtttattttttcaactcttttttaactatttaaatgaaatttgaaataaaaaatcgttttaaatatatgtatttggtatgtattttggagtgaaatttg

SEQ ID NO: 175867 - DNA, 739 bp, Cannabis indica
attaatgtagattgttttatatataaatttttaactttaaaaataattagaaaaaataaaaaaaaaatgaacaaatatgaagaaaattaagaatagatgaaaaaaactcatatagagtgccacctaaacttgttgatgctttcctttatattatatatatatatagatattttattacacccaaaaaatatgatatatgtatagtaattttgtaaacctatataattgattaatctttaacaattcaaaatatatgcatacatatttatattgcaaaaaagtatatacatatagctatatttatatatctatctatatatttatatatataattatacaattctaatgttaggatagataatgtaatcctttaacttttcaaagagctaatttttctattctctcatttttttctcaaatttttattcattttctaattattttaattaattatctgttaattcatatttacattaatatttacattgattttatgataaataaagcttttggcattcttcaaaagaaaaaaaactattcaataaattcatgttataattacaaaatttattttaagagacctttggttatacctcctcatatttccatataatatatatagatgagttgaagatataaaaatacaaacactttgacacatatatgaagatgggaagggaaaagaattttaagaagaggattaaaaagattggaacaaattgccatggatgatcatata

SEQ ID NO: 175868 - DNA, 663 bp, Cannabis indica
ataattatggaatcctaaatttcttaatgtttaccgagactttcagaaactaatatattagagcttaagaaaggaataaaacagtaaataatagataaataattttttacgtagtttgggcgttaacaatccctagtccacgagtcaattgtattggccctttaggcaaatatttgaataacacaagtatttatagtaattatcaatcaagtaattaacatgtcatcaattacctacaaaaataggacatggttttgacaactagcatcatgatgtgacattcacattagtatacacaagactctatgggacaggcttcaccagataagcccaaaatttatattatatttttaaactttttattagaggaaaaggataactaatatgacctctataatctataaatatttaacaaaccctacatgcaaagggttaaaaattcgtgattcacttgctcgtgcaaaaacagagtgttcatactttattgtaatcccttgaaattttctagcctctctcaataatattgactcatggactaagactcgtcaacgctccaaccacgtaaaatccttagagtgttcgtatttttattttctttcaatttatatttctttgcctctgatatttaattattggtttccgaaaaatctcagtaacagtgag

SEQ ID NO: 175869 - DNA, 865 bp, Cannabis indica
ccagggacaggagaggttactccgttcgaaaacacggcagagggcgttatcgagaaggtgatccccttaccggcctttggagaagacggcgacttctcaggctacatcttccaaccacaattctgaacttccagctacgttgcatggtgattctgacatcagtactctgtcccccaaaccttctcggactacaaacaagatggatagaggtgctacttcccagccccatcacaagaatggcaattttcctgaagcaagcaagaacagtctgcaggctccctctgccacggttagtgatccctattcggaaaaccctacagaaatagccgttagtaatagtgagaatttcacactaaaaagcaattttaatgtggggaattttttcaactctatccttgggcctcaggcccaacctttggattggccttcccctgaatgctgggccagagcttttgggcctttacttggagctgcaacaattgacaaattccttagagagccttctcttttcaatcctattcttgatattgaagatttcaagacttttgaaaatgataatgggccgacaaagagaaaggtcgtggatggtttttttatggtgcctggtgttctctcaacccacgaaggggctagctctcatatagaaaatatcccaactgggactaagtctcagaatccagtggaattaggagatgatcctattccattctcaccaggatctcctgatagtaaatgtcccaagagaaaaagaggaagaccaaggaagaatcaagaaccccctgtatcaccatcgcctacttcaaaaaagagaggaaaacccgagacctctaaatcgtggactgggggccactcccagaagctttaa

SEQ ID NO: 175870 - DNA, 1273 bp, Cannabis indica
cagtatgttgtttcaagggatcggatttctattctgtaatctatattggggaacctcgtcccctagcaattgcattttgcatactttttattattataaattcattatgacttatgacaaagattctcttattttctaatgtattccccagtattaaataaataaataaaacaaaagcactaaggaacctgatccaaccaaaacaatcagacaaggcatcctccattacaaatagactgaacatataaatatttatataatacaagataaagaataaagaaagaagaaaaacaatgccaatttgtgcaggtttgtgattacaacaggcaaaccagccctgcagtgccctaacattaaaactacagtactaagatatagacttttatgcatcctaaaactacagtaggaagccaaaataatttattttgccaaatgataaaatgcagatagctaattgtttaatagtagttttacaattacgaacataatcatagaacaccataatacacctagatgtgacctaacattaaagaaaataaacctgggttgaaaattaagaaggtacctttcttaaagtgggtgaggattaacaggcgatccattatccaattcattgaattcccctgatagttttactttgtcaagatggacaaataaagccaacagaatctgattgcatttcagaatcaagagtattatgattaaattctaccccacaccaagacacatgcagtaagctgatgtcttcgagttccagtcatgtttacatcactcctcagattcaaaatgaacagaggaaccaaacgcaccttcaatctcaacagtaccttccaattctattggcacctcctgcaaggaagaatcttggtcaccagtaaaactgtactgcaaaggctctatttcttccagcctcagctcttcaaatcccgttacacttgcttgtctctgtccaacatggaaaaaaaattacctccagtcaaccaacagaaaagctattggaaatgccaacactatcaagagagaataattattttatgatgaaaaaggtcaacgaaaaacagaagggaaaaaaatgcatgtagagattacagtcctcttaattcacatataacagctctccaggcactactgcggtaatatgaaacaaaatactaacagtaggagttttatctatttgtaccttatctgacgtttcattcaatgaggaaaaacaaggtaatggttgaggcatggatgttgaagactcggaaacctcaaggtgcagttcctttcc

SEQ ID NO: 175871 - DNA, 680 bp, Cannabis indica
aggagataaatgtaagaaagaaaaaaagatagcgtgtaagtaaatacatgaagacagagaaaaaaaaaacaaaataaaaggataagttaaaagtgtagaagtaaaacaataacagcgtgcgtatatacttgtccaaataaaataaaaaaacaagggtatatttcacaaattaaatcattagcgttagttatgatatttatttaaaattttagtctttcagcgtaaatttctcttattattatttaataagtgggttgatttggataattcagctaataaataaataaaagttaatattattatttaaaaaatgagttgatgtgcgttcaataaaaagaccttgttttttttttaattgccaaactaaacatagggacaatcttcatacaataaatgcttaaaagaaagttattattattattataaacaaatgtgtttacataataatattaaatcaatacaaccatttttttaatgtataataacaaatctataaataaaataaacaataaatagtttcatgcctggtattatgacaaaattagccccatttttctactcaactcactcactcactcattctgtacaattagatttgggttgcaatgcaattgcatttatatcaatctaaattaagtactgcaaattttgctcaaactcaaatggtaagccagccagcc

SEQ ID NO: 175872 - DNA, 815 bp, Cannabis indica
atatcaggggtacaccatggcatgtccactatggcacgttaactaagtgtttttggaacgggagggtaaatagcataacagaagtgaggtttaggtagtttagctgccaaaaaatcgattgatagtggttaaagtgtcacaaatcgtaaaattcaaatagttttatcgccaatatcccttttataaatattaaatttaaaatttatatttagatttatctaaattagtaattgtaattaaatatatatatatatattaaaataaatagattaaaataagtatcaaaagaaaatacaaatccttaaaataatgagctgatattcaatctccattgttggtcatacatggttaatttgttttcaatgagatgctagacttcatcccccttatggatggttattcgttgaagcatttaacactgttaacgatctcaaaagataggtattttgtaagttttcgtctctattagactctcccctacggtgactacttagagataaatttatgaagtatgaaacaatggtggaagctcataaaataagaacaaccttgactctcgcctaccgggacaacgttagattcttattttgatcgaataaaaggttgctagaatggtgtccattttagatgagctgactactctattcaatgaatgattacgttcactctcacctaccgggacattgtatcagtttgttgaaaaccttggaaattatttaaaaatgtgtttgttttgtattttcacatgtctttatttgctaaatgcttaataatttcttgattgtgtgtgaatttatattgaaccatgttttttc

SEQ ID NO: 175873 - DNA, 930 bp, Cannabis indica
  modified_base (806)..(806): a, c, t, g, unknown or other
ttccctttacttcattagaaagtaacctcaaaagataagggtatatggtccaaaaataaagcccttaataatcttgacattccaaatatctaactatgtagccccgctaattctaagatattcaaacatatctaagtaactctattagccaaatcatcgcattctgctattactaggcacaagctatgaaaattataaaattttacatataacataaataatgcacctaacatttaaatatatctctgtaattgagaaaatacttttctaaggcctatttctggcaataagccctaatttctacaatgagataatcataaattaatagtttaatccttagttatctggtaattcccatgatctatccatgcggtcattacattcttattttataaaattcttcattattttagtattataaatactagtctaagttgtcatctttagggatgattcaactagatgtttcatttacaaaatacttatcttacgagatctaacactattatgttgtttaagggatggcaatctattggggattgtcccattaaaaataagaaactaagctagaccaacaacgaagattcaaaatttatacaatataatcaataatagaaaataatttaggttcaatataaaatttttagaaatttgtaaacattagacatgtaaaaatacaaaacaaacatatctcaaatattttaaaagatttttcaactagatcatatgtgtgtcccattaaggcgagagtcaaaatatatatatatatatattagttatttcgcttcatttaaaattggatactntttttagcaaccttttattcgtatcaaaattgaaatctgtacgttgtcctattttaggtgtagtagtcaaagggttcatttcttatttttattgagatttctactatttatttctatactttta

SEQ ID NO: 175874 - DNA, 917 bp, Cannabis indica
tgatgtaaatttgtcacaaacaaaaagtgatttaaaattagatcacattatagcatatgcaaaatttgcatcacaataaattctctacttttataatttactattatgcaattttgatattttattattaaattttaattaacatgctcatttgcattaaatgatcgatattattataattagtttattattaaattttatatttatctttatattattattttatattttaataaattattaaaaaaatattaaatttacattaatatttataattatttattgaaactacaaataaaaattgatataaaaatatcacaaaattattttataccgaatataactcaactactatatttctcacgaaggacgaaaaataatgatgtgccaaatatacttcttagttgttacccccttaattgaggggatatatattttgcttatttttacgggaggtctctaaactatatgggttttggtaagttagtccacaaattttattttttggcaaattattcctcaaattatatatgttttggcaagtttatccctaaattttatttttttttttgataaattggtccacgcacttttattttattagcaacattaagtttccactttaatatattgatattttttattattttttatttattttacttactttaatttatttttttttttttgaaattaatttcattttttaaaaaaaaaatttaatacttttgacaaaataattttatttaatatattttatttatttgttttatttttttaagttatttcatataatatttaaatttttttacctaaaatatttaaaacatactttatttcatatatgttattaataagaaaacagagagtaaacacttgcagaccccatataatgcctagaaaaaaattctagcctc

SEQ ID NO: 175875 - DNA, 709 bp, Cannabis indica
ttagcccttaatatttctgaaatcttaaacctcacttataaagaggttgtcgttcatgatcttgaagatgatacgtaggggggttaacctgaataacaaacccatctgtcttattttttcgaatcctttcccctagaaccatcaaacccgaatggtttgaacatgccatgaggaatgcttgggttactcgagcacctctgactttttcaaactatggctcgggaatgttcatggtggagtttcagtgtgaaggagacatgagaagagttcttgagcgacagccctggcactttgatcactgcttggttacttgtgctaacccagctggccttgatactcttcttcccaatcaacttagatattcaccattttggattcaagtccactctatcccttttggtcaaaaatctttgaagcttgctaagctaattggggatgaggtgggtgatttcttggaagttgataaacttactctcttgaaagtttctggccttttcctctggattcgtgttcttattgacgtatctaaatctattactcgaggtatccttgtggacttcaaaagtattcatcgtgagaagtggctaaatttcaaatatgaaaactttcccaatatctgctatcattgtggaatgttcgatcacacaacttctaagtgtatcacctatcttaagaaatgtgatgatcattctttcccatcatctcttcc

SEQ ID NO: 175876 - DNA, 593 bp, Cannabis indica
gtatgatccttgtcattaccattttctatttagaagcatacttatttttattcttgaataatttttttttttttttggacttcagttgagaaacataaatagcaaattcaatcttctcattttttagcttatttttttcagctacacactgagaaattaggtcatcgacgatttatgctttattataagtgtaggttgtcttgaaaaggctaaaagggacacgaagtgcattaagaacacgatgaataatgtaagaatcagaaagaggaatcatatgacctttcaatttgggttgaacattcataatttttaaaataaaatctctcactctttttgattcatcatacttaattgttttcattttatccataagatgtccagcttcagtattttcacggccagtgtcatatagtttccatacaacacgaaaaaacttttggcatttaatttgtagtgtctgtcaaaccagctaataatagatgttcaagaatggatctcttcataaaaatgagacgcctatacctgttataggcaacggttttaaactatcggaaatgtaaaaaaaaaaatacaattgcagaaaaaattttccc

SEQ ID NO: 175877 - DNA, 1052 bp, Cannabis indica
gtgagataggacaaactgacagggtttgcttgcatgcgcttctgttccagagcaagtcttgtacctcctacttacgacttgtacaccaatagaaggatgatacttcaacaatgtattggcttctgcagcagcttgacatgccagctctctggtggggcatattacaagcacaaaaattggggggatcttttggtcacggccaataggagttgactttacaacaacttcaattgatggaagctgagagagtaagcagagaaggaagaaaataagatacttcatgattagtagactgataacttggatatacaaaaaataaatagagaaagcaaaatccagataaacctaaaggacattttctgattttcacataattgatatgtacaaataagagagagtatgagagccaaggaattaaaagacacttttcatgttttaagtttcttctaaatttttcattgactttttttttttaattttttttaaaactacatgatatagaaagtttaggattgattcaagatgccaaagactcaaagatggaaattgttgtggagcaagttctactattaaactctatcaaaacaagccaactttaactcactgagttttgcatatgaagcaagttctactgataaactctatcaaacaagccaactatcaccatccccccccacacacacacacaataaaataaaaaaaaaaagtagtcttaccaaaaggactacagtttttccggtgcctgttttagccttggcaagaacatccttacctagaaaacagaataaaatagaagataatcactttcagaacctggacatcaacaacaatacagatacataaagttagatgaaatgaagacactgatacacctatcattcacaagttactaagtgtagaacaaagatgatcaatgcaataacatgttggcaaggcattcaatatttaaatgtgcaagctggtatcctcgatgcttgatcatgaacgaaacttatactaacaattatcgtaactagaaacaaacctttgagtataagtggaagagttgcctc

SEQ ID NO: 175878 - DNA, 592 bp, Cannabis indica
ttttggtattttttcctgtactcacctttctttgtttgaaatttcaggatcgactgtgtttcttgttgtatcgtacgatggtgtttggtgtgttgagggttataattgggtttataaagccgaaggcagtttgacattgacagttagaactgacataaccctacaacaaatgcaccaaattttatatgaagagttggaggttgatcctttggcatataatttaaaattggagattttttccttgtacatgaagggacaaatggtttcgccagaggttattaagaaagaacgccaactgagaacgttcttagagatgagggcaacaatatcaaacacagaagttatgccattattcgtgaccaaggtgagaaaagttgggaattcgaagcctacgccggctacaaatcctctctcttggagtgtggtagggtctttcgttcccgaaatagatgttgggattggtgtgaatgtggaggtttcgacaaatgtagatcaacatcaagaagcggcaggatttgatcagtttaaggagttcgatactaccttctacaataacgatcctattgtagatttgaatatggacgatgaacat

SEQ ID NO: 175879 - DNA, 546 bp, Cannabis indica
gatttccaaacattactaagagagttgaaacttaaaagcttcaattactactgctatttcttttgaaatcagatttttttttaaatattactaaaaataaatataatattatataattataattttaaaatatatatataattaagtagaatggattgaatcagttactttttaaggttcaaataatattcaatccgcacaagtacggattttagtattttccaattcatttcaatccgcgtaagtgcagatatccacattttgcagattgaattaaattggatcgtgcagattgaatcggatcaaatactttatggatattcctagaaaagagtaaataatacaattacaagttttgaagacatatccaataaaacttgtattttgatccttttgtttgagacgtacgagctgaaaatttcatatacagttcttagacggggagtttctttggcttacctatctcattaaaatatataattggttcgaagaatgtcttgaaattcaagcatttgcgaatgatataattagtaaataaaacttgtc

SEQ ID NO: 175880 - DNA, 747 bp, Cannabis indica
tagacacgaaaaaatatgaatttgagcacaagacaagacttgcatgaacccgagaggtatgagtacaaccagacacggaaaaatataaacttggacacaacacgacacaacaaagcccaaaaaaacacaacatgtaagtacaaataaaatagtcaagaagatacaacataacaagaacaaaaaggcattttaggatgcattaaaaaactttgtaatttaaaaataataataataacatatttatcaattataaataagttaaagtaataataaacttaaacataatattgaatattgtaattctataattacaattattaaaacaaatataaaactaaaactaaaactataactatattaatttatttgtaaaatgcaatttaaaaatttaagtatctagaagtaaatattcaatttctattaactttaataattttttgtaaaatattattaaaatttataaaaataattgaagttataaaaaacaaatataatttagtaattagcttattaattataaaaaaaaagtgaaaaactttagcacaaatttgagtccggatataaaaacagactaacatgtttaagaaaaacgaagtcaatccaaataaaacactacaatagaaataatcaaagtctatccttttaaaaatgttaacacgcacgatacgatccatattttaaaaaaactacacacgaaaatatataagtcaaaccaacacgacacatacatgaatttacaacactata

SEQ ID NO: 175881 - DNA, 716 bp, Cannabis indica
ataaataaaaagtgacccatgaatttctcataaactattttatttttaataataaaccattttattttaatataaataaaaagtcacccatgaatttctcacaaaccaaaaattctgttatataggcacactttatatagaatagatatatcattttttttttatcaagaagaggaaacttcattaatcactaacaaaaagccaaaacaatacaaacagaggctccacacaagctgcccaacagaaaattaaagattacattttaatctaacaagaattttttttcatctagagataactttctattatttacatagtataatctgtaaactatagtttgttttatctctttaactatagctacaatattttttaagtagccttcaaaaagatatttgttagaccaaatacaataaacacatgctgccagcgtagctattgtaatagcaacaaccactcttgaagtcccgctagccagccatgtgacccagttcccatagtccctaggcctggcagaaaatcccagccacaaaaagatctcgtatgtaactttcctagataagttacactcggaaaataagtgggtatgactttcacttaagagcccacaaacaacacaaaaagagtctccaagggagtgcaaaccgaacgtagttgattcctagtaagcaaattagagtttaaagacttgacgtataacataaatctatgtttag

SEQ ID NO: 175882 - DNA, 1176 bp, Cannabis indica
ttgtaaaccctttctgctaagtgtccaagtctgttgtgccatagtatagctttagcatcttcaggactttgtaaaatgttgttctgtccaacagtgttgttgcttctagctataggttccccaatcatgtagtataggccttctttcttaactcctttgatgatagtcatagatcctttgcatattttcatttgtccatctttgatcttgctttctatttttaaatcatcaagcacacttagtgaaattaggtttctagataaatcaggtacaaatcttaccccagttagtgatctagtgaccccatcatgcatcttaaatgccactgttcctgcccctttaatttcacagctttggtcattccctagaatcacttttcccttagttgaatccctgaaatcagtcaaaatagatctgttattagtcatatgaaatgtacaacctgagtcaagtatccaatcatctttaaaagatgatcctgcaacataaacttccccattttcataacagtcactaaaatttgcattttggtgatctgttttattcttagggtttctggattctgaattgtaatcagttctttgtccattaaacttgttctttctgtttttgttcaagaaatagcaatctttcttgaaatgtccaggtttcccacagttgtaacatccttctgtgtcttgtggccctttagaatttgatctgcctttgttctgtcctctgtttggacccctgctatggctttgactcctcccttttccatgccaaggcttcttctgagtagatctgcctctactcagatttagttcaccattagagccaccatttctttctgacttcatctctaagtccttagattttaaggcagagataacctcatcaagagtgattgaggttcttccatacttaattgctgttttaacttctctgtaagtttctggcaatgagttaagtatgatgatggcttgattttcatcactgagagcctcattctcccctgagtttgcaagctcaatgtgcattctcaagaattcatcaagattttgatctaaggacttggattggttcatcttgaacccaaaaatcctttccttgagataaatcttgttgtcaaagatttctgctgaaattgctcttctagctttttccaaatctttgatggagtctcttctttactct

SEQ ID NO: 175883 - DNA, 791 bp, Cannabis indica
gattaagagtatgaacttgaaaaaacaccacaaaatcaaattaaaagaaataaaaatttaccttatatgtgctaacatgcaagttcacaacatttcaagagcaattgagattcacaagaaatataatcaaatctttaaaccaatatactgagtttgagtctgagtctgagttgagttcctttctttttagtttttgcttctttttgttaaatggtaaaatcttcaattttattggaaaaaccattatgcaaaatcctactggtttaaatgtttataacacatatacaaaatcaacactttagaaagccaagaatagataactctgttcatagctgatattgaacaatatgatcagctagttcaaaagaaaataaaaatctcattcttatgcattgtaatcaaactcatcattagtacaaagcaactaaaatatgactttttcattaatagataatgtttctaaaaacggcgaaatccacaacaaggcatccttcaactctgaatctttctcggtttgctgacaatgagtaataactctgagatgcttccaattaaggaaggtataacggtgtatcttcttcaaatcttctggccatatgagaacagattaagagtatgaacttgaataaacaccacaaaatcaaattaaatgaagtaagaaatatataacaacacctcattttgtgtcatagcctgagtgattctcgtcatcattagttacaatttttccattttatcgaattaaatgactattgagatgctgaaatcgacacaacctttataataaaagt

SEQ ID NO: 175884 - DNA, 830 bp, Cannabis indica
gttgtagttcatgaatgattatttacatcagacttatatttaataatactttcctccagtggggatttggatgaatatgtttatatgactatacctcaagggtataggtactaagggggagttaccatgcaattcggtttgcaagctaaacaaatctatatatggattgaagtaaccttcaagacatagtttgagaagtttctagtgctcttgaagaagaaggttccaaccattctgcaacagatctttccttcttcatcaaacactttaaggattatttcatagtattgttggtgtatgctgatgatgtgattcttgttagcaacaacttgagtgagctagagacattaaatgtaaggttgaatagtagatttaagctaaaagatttagaaaaattaaaatattttcttcgtctagaagtagcaagatcatatcaagtgattttcgtgccaaagaccttatgctcttcaagtctttgaagatctaggatacttagattgcaaacctgtacccacacctatggaagcttacttggagctaagtcaagatattaaaaatgatgctctagctaatacaaccttgtacacaaaaataattgggaagttacattatatccccattactagaccagatttatgcattgtagtaaacaaattaagtcattttttggggacaccacgaatgactcatatggttgttgtacaaagggttttacaatatgtgaaaagaacatctggacaagggttgttgttctctgcaaagacaaagatcaagcaagaagcttacactgagtctgactaggctgcttgtctaaatacaaggagatcaat

SEQ ID NO: 175885 - DNA, 800 bp, Cannabis indica
aattaaatatatttttaatacaaaataatttattagagaatcttttaattgaaatagttttttttttaaagttaagttgaactgtagtttttttttttctttcaaaaagaaaaatgattattagctctcacttaagatgattttaggatgttcataacatagccgatctaatccaatttgcatgatccaattcaatccaattcgtaaagtgcggatatctgcacttgtgcgtattagattggattgaaaaattcgaaatctccacttgtgcggattgaatgttgattgacatgtaaaaattactgatcaaatccaatccacacatatttaataaaaaaaataaaaaaaaattctatatacaaatatcattttaaggtaaagaaatgaatatttttttaatttaatacatacaataaaattgtatttcagaacttaattgatcaaatgtatattccattcttatatataatttttttctacattcaatttaaaaccaaattaaacgttcttttttatacatacaacttttcttcctttgaatttgttatttgttattatagtttgttgtttgtgacataaaataacaataatttattttattttgttactagttatgtaaagaaaattattttttttcataaatattaaataatttaatattaaaaagtaattaatctaaaataattgatctaatccccatttgcggatttgattggatttgagctatgtgcggaattgattagatctaaaaaaaaataaaaaactcacttaatgcgaatcggatgcactataagtaaaat

SEQ ID NO: 175886 - DNA, 573 bp, Cannabis indica
ttagggttataatttattaattcctgaaattttattaaactctagtaattcttaaattataaaacttaaaatgctataaacttaattttttttataatattacataatttgtatattatttatattaaaataataattataatattttttgtttaatattgggttgcaaagtttcatgattatatctctatgaatttttttaataaaattccaataataataataataataataataataataataataataataataataaagaatattttgctcagatttaatcaaaacaattggaaaaataaaaagatcattcaatttagcattttcttagatacaatataatattttagtccaatactacaatataaaactgcaacaaccaaaaaatctcattacacatagaaataattagtacagtccaaacacaagatctgtgtacaataaatctactcacaaatgattatcaaactcaaataatgaaattgtggtaaacaaaatgtaccctttagcttttatactccaaaaataagttttaaaatattaattaaatagtaagcttgaaaatgagac

SEQ ID NO: 175887 - DNA, 1030 bp, Cannabis indica
ttaatctcaacaatttacccatctcgggtcataattaccaaaatgcccctggctcaccaacggggtctttaacatgttaaatttcatataatttcacatatattgaactatataataatataattcctcaattaactcacaattatctaattagggttttgctaatcctttccttaattctgggtattacagctttagtttgttatttccagctgttcattgttgtaacagattgtatataatcagttgttcactcataatgaataaggcttttctttcagtcttcttctttcttcatctttcgttctctttcttcttcttccttgttttcctttctctggttttctccatggctagatacaacactagatctaacacacattaatagaatttatatgaacatgatcacaaaattatatatgctctgttcatgtgattcgatcatcttctttttctacatctaccatatatgtcaataagcatgtcaataaattaaactcaaacattgtaatgtcaacattcaccaaaactcatctcatatttccaaacaaaataataataaaaatctcacaattcaagtccatattaagattaaaccgctccatgaagcaacgcaatttttcattttttttttgtaaaaaataaaccgtgcatcccaagctaaacaagttctaagtttctgccttagaaaattccaaactgttgtagaatatcaataagattattttatatatatggattatttttcaaataagtctttgataaataagattaaaaatgacaatgatctgccacctgcagtacagaaacagggaaggatctctctttttaaggataccatacatagagatatttgactttaagccaatcattttcacttacatcattcaagttgtaaatgaatactctaatatgaaaatttattgtcattttaaaagtaactagtactactctaaatcatgatttgattcaaatagctccatgagactataagatcctttgaggctgagctttccactccatgcttgct

SEQ ID NO: 175888 - DNA, 722 bp, Cannabis indica
aaatctcaatgaaaatagaaagtgaagtgtcataaaattcatcaccccaatatataaatagtgtgctaaaccttaaaaaaaaaaaaagattgtgatcaattgggaaggtcaattttggtggaatcataattgttataataaaatgaaaattattatattcagaatatataaatgaataaatgatattcccttgtttgtttgatccaatcaaattcactaacaactaaattcactattctctagcttcaattggtggaataatgattccgtataaaaatgattgattccttataagtttaaaaattaaaccaaccaataaaataagaatggcctagcctattattttattcttaataacacagtccacaaaatcaacctaacattaaacaaaaaagaggtttaaattaattagatatagattacacaataaagagagttacttgttgtaacattttgctccacatgtaaagcccttagccctataaatacaagtacctcactattaaactagccacaaaatagccttacataataaaatggtcccatattatgaaaaagggactcattcatttgattatgaccccatttcttgagtacccttttcatatataatgtaaaaaaaaaaaaaattaagatagaaatataataacaataagaacagatagtcttttcttaggaaccaaatggaccatttctatacaaattggatttatatatattaa

SEQ ID NO: 175889 - DNA, 872 bp, Cannabis indica
aatcgtattaccaaccgagtgtaattcaatactcatgcccttcgccgtactgtttaaaaaaacaacaatggaaaccaaagtttttttacactttggaagcaacaaaattgaatctaaaactataccctaaaaaatgaaacaatgaaaaaaggaaaagcctaaaaaaaatcttaaaaggtcttagggatacttatatataatactattttttgtaaaaatttacatttttatatttaaagattttttttttttacagttttacaggtttctataaaaataacacgaaaatgataagatgattacataaaagtaatagattaataatatccaaacaactacaaaaaataacatataaataaaataaaaattaacaggtgtacaacataaaaatacattaaaagactatattttttgtaaataaaatcataaaaatataaaaatatttaaaattcggtataaccgtattttgtaaactgtttttgtgtgtttgtaaaatagtcccaaggttttttagaggaaattacactctataccctttttatattgtcctcttttatttttaccctattttttaaagtctatcacttttacctctttttttaaacattgtaccaattttgcacctgttacttcaagatactctccatgtgactctcttatgtcaggatattttgggtacaatatatataaaaagaggtatgtttcaaataaatataaaattagaggcaaatttggttaattgattaataaaagaagcatttttcaacttacccatggtttgatgcctaaagtgcgtgtgaagcccaactgaagagagttggttgggcctgtgttctggtacattcagaagcaatgggaaaacgctgagagag

SEQ ID NO: 175890 - DNA, 1066 bp, Cannabis indica
atctaatatggatgaaagttcacgtgtcataatttattatatgttaaaatttgagagacataatttgatagatattaaaatttggagcatgatttagtacataaataattactgaattagtaaaattgaataaaattaaataaaattctttaaattcaacaatcaatagttcaaaaaaaaatttaacggcaaaaaaaattcacaaacataatttagtacatattaagattgaatgaaaaaaaaaaaaaaaattctaattagtttttttttttttccggttaaagaatgacacatataatatattccatattaaatccttatataatttaggctcaatgaggcgtcttcactaaattaatcaattatacattttaaaatgttgtcctcttcacttgtaatcttacagttaggtatatgtcaaatttagaaacgagtttaatatgatcatataagtatataatctactatactatagtattcttcaatttttatacgcaaaagagtatcctaaactagaaaccttagcttaaaaggatcaattatattatgattaaaatggtcaaatcgccaaaaataagttatttaactcaaagaacaagttatcttcaatattgagagtcaaacttgttgtgattgttgtctttgaagacttggctatattttatctgaccaaagtagtatttttttttttatatatatataaaaattagatatatagaaatgagagaaaaaagtttcaaaaacttggctatagaaggattcaatattaccaagaaatatggtactggtgaaagtagggatggacacggaacgaaaaattaacggggagtgctctcccattctcattttcgttaaaagatttaatctcaattcccgcttatttttcatcaatggggcaagaaatctcttaataaaaaaataaagtttataataaaaatttaaatatataaaaatattaaattacataaaattaaaatattacacattaaatagtatttaataaactaattattattcaaaacataacttaaatttataaaaataatactaatatactaaaaaatat

SEQ ID NO: 175891 - DNA, 716 bp, Cannabis indica
tatatgtgtatatatataatgctattttattatatatacatatcaatatatataacatttagtaaagagattagttagattcggtttcttgaaaatttatcgggggccagcgccatcccaccctatcaagtgcttccgtcgctgatcatagtctcatatctcttaagtcttctaataaattaaaaggtaaataaagaacaaactaaaagtcaaggaaaaaatatatttacacttataatctacaataatcaccagttcaatatctttattaaatctttataatttaagcacatgatatataattttaatcatgggtgataattatcaatgatatatatattgtatataccttaaaaataaaaaagaaactatatatatttatatcggggtcagatatagtgcagagaatagtattattcctgcccctgctccattcccgtttcaggtattaaaattatctcctatcaccactccattaactatcaagatgaagaatccccaccctattaaaagtgggtctccacgattacccttcccaacggtataaattttgatttcttgctattaaatgaagaaataaccttccccaaaatgatgaaaaaatgaataaagaatagagacttctatataatatcacatcgagtacagaaaagaaaataattaatgaagcatatggaataaatgcagccccatttattggaattaatatagctaac

SEQ ID NO: 175892 - DNA, 693 bp, Cannabis indica
ctactttcgggggcctttactgtttagattaaccattccctccttactgatatagcattttaggatgtgggagcgttttgtattttggattgtttgtatagtgttcatgtgaatttttttttaccttttctagctagatggtctctgcattgcattgtgtattggatttattttgtttaagatgtaattgaggaatattttggagtatgtccttttgaaattattatttatatctatcccatttattttcatctattgttattattattattattcttttttggggtgtttctaatctctagtttaagtactttggttattatgattatttatcaatgtgaactgttatgataaatacaatttttcattattattattattattatgttattttatatatggtatgttttacttacctttcatttcttctactattagtttgaaattttacataattgctaaaaaaagttaaaagaatgattatgttaatttagaagaaaaattgatgataatttgttacaaatttattaatggggttaaatatcagttgtgccactaataagaaaagttgtgattcttcttcctatgtaggtagagatatattcttaattataaaagattatttggatatttcttttaaatattatcctagacttgttaatagtgttgtctattttcgccaagtttgttttc

SEQ ID NO: 175893 - DNA, 598 bp, Cannabis indica
caaatcatcaccataggcagaaatcacagtagggaaacaacctttctaatgtccagacatttgatcaatgaaagtcagcttatggacgtaattgtctgtgagtactcgggacaaaacaaaaacatggtttgaaagtggtatcgaggttggcacatcatcatctgaaagagcaaaaatagtactctcctcttctgttagtggcagtgtggtattcaacgcattcatcaggggatccataaaagaagaaaagaaaatgtaggaaaaagagagggagatgaagaaaattttgaaatagttaggtacaaaaaaaaaaaagttagttaaaatgacataactgtaacacacccattaagtgcacccccttatctttttttttaaaaaaaaaaaaaaattgggaaaaagcgatttaaaacaaaattatttaccgaaaaacttgtactaaaactattttaggtgcaaaaattatgagggtttatttataaaatgagtgtaattttaaataaatatatgacgtgattaatttaatatgaattttgtgtgtccacactttttcgtgcaagactatagtcaatcatatatttttatgggtaaatactat

SEQ ID NO: 175894 - DNA, 650 bp, Cannabis indica
gattacaatagtaggggagaggcgaacacggtaaaactaacaaaaactaattggaaaacataggtgcaaccatgaaacagagggaaaagaagaaaaaaatgtaggaaaagagagggagatgaagaaattttgaaatagctaggtacaaaaaaaagttagttaaatgacataactgtaacacacccattaagggcacccccttatctttttttaaaaaaaaaaaaattgggagcaagcgatttaaaacaaaattatttacagaaaacctgtactaaactattttaggtgcaaaattatgagggtttatttataaatgagtgtaattttaaataagtatatgacgtgattaatttaatatgaattttgcgtgtccacacttttcgtgcaagactatagtcaatcatatatttttatggataaatactattttgaacattttatttagttaaatgataaattaaatatttcttttaaatagtacaaaatagtacactgtaccacttttttatcaaataaatcttactaattatccgatctggaggtaataacaatactagttacattttctgcatctatttttgttagaattatctttctagttaattatatttttttaaaaaagttttagtctaaaaattgagctcgggcac

SEQ ID NO: 175895 - DNA, 632 bp, Cannabis indica
taaattttcaaaaatttattggcggactttaattacctcacgtatgattatttctaaaatagacaaaaatgctttttttttttttaaataaaaaattaattttgatattgaaaattttgttcaattaagtattttttttataccaaatatgagaatacattgtttttttcttttctaatttctatttatatacatacttttttcattctcaccaaaattcaacttctagagcatcatcatcaggagtagtggcttggctccatactctgattgttgtgggattgttgtgggattgttgagaggttcaatataatctctttgacttttaatgaattcaagataagttgagtttagacatattcaatatctcttattacttaagtcgtttcgttgcattagagtcctcgtaacaagtcatgtaattataagagcatgtgatgaaaatattctaagaatgaatagggaattctatttttttgataattttttttgataatattttaatggaattattactttttattattttataaaattaatttatatttgacaaatacaaattataagatattattaaaataataaaatacttactataatagagaacacggttagaacagcaataaaaataa

SEQ ID NO: 175896 - DNA, 721 bp, Cannabis indica
aattcatgctcctcttctgattgagagtacacgaggatttcgtcgataaatctgtttttcggtagcccatctcgaaagaactccacagttaagcgtgcttggcttggagcaatttcaggatgggtgacctcctgggaagttttcccaggatgcgtgcgagtgaggacaaagcacgctgaaaacactcgtgttggtctgtagggtcagtcatcaatccgggaagcagccagagtgacgtactcgtgtataagagccatttattccgtgggtgtaaggacccaatggaggcttgaagcggggacgttacaaattagctacatatatagaatcagttataataatatatatttagttagttaattaataatattaattatttgaaatttcgtgatattttaaaatcaaaacttatttgaaattgaagagtgtataacaactttttctcaaaattagtttattttattttaaatatacttattttgctcaaccaatcgagcatgagtgcatagatagaatattttggggtcatcaattaatttttgaattcgatttgtttcaaaaacaaacaataattaaaagatctttaaatcatacatatatcactacaaacatgataaccttatgtaattgtaaagtagtaaaaatagaaaaaattaaaaaaaaaaaaacaacttaattacatgataactttatgttattttttgactaaaatataatattt

SEQ ID NO: 175897 - DNA, 716 bp, Cannabis indica
cataacacttttgacactctattaaaaatgctcttacgtctcattgcctttaggtgttgcccatagttttagggtgagcatctccaatgatggttgctcattaattagaatagtttcgactttcgtcatatgtgtaatattgtctaatttttaagactacttttatgtataaatgtgtagagtgttacttaatatagactacaactacatgactttcttcttctttttttctttctatgagaaaatgttactttttttttagaaaaaagttacttttttgttaccaaaaaaattattaatttaatgtgattggatcatgggaacaatttttagagttgtcaaccacactaaatatgttctctaaatacactccttaattaaaatagggagtgcgataaaaaaaatgagctccactattaaaaaaattgttctctataatagagaataaataaagagctctaaatgttctctaaatgtagagttttgtttaattgttttgctaaattttttagtattaattttaatcaagaacactatttttttttattatttcattaaattaattaattcatattaataaattcaaattataaaatattattaaaataatcaaatggtaattaaagtagagagtatatatggttacaacaaaaataataaaaatagctctctactttaactttttagctattttagttaaaatgtgggccaaaaat

SEQ ID NO: 175898 - DNA, 602 bp, Cannabis indica
tacttaaggtatatggaacttttgtagacatatttggttggtcacatgaaattttttattagtccatgttatttatttatttaaaaatttatatatatatatataaaccattaagagaatgatcacgtagatattaactttaagtttaaacttagttatttgtaaccggtagttaaatttatgtatttaactatatccaaaatttaaagagtaatattgttatggagtatcaaagtggctagtacttcaatgacatgacttcttataattggttactagttttctataatttttattaaattaaaataagtgggactgaatgttaaatttcactaataacaatattacatttcataaggttactagacatgttaagactaatcaaacagttagttgttaagtctgttactgtttgagttagttagcagttagtttgtttgtttgttatctgttatggctttcagttggttgttatgatttctgttttgttattctgcaatctctcttgtatataaggctgtacattgtttagattcaatgagataattctttcctttctccattctttctctgctcctttctctgctctttcttcttccttc

SEQ ID NO: 175899 - DNA, 537 bp, Cannabis indica
gtataaaattgggtatatttatatataaaaatctgtttatatatatatttgtgtatatacaaatgggtatttgagttttgatttttttaattttttttatctgtgtatatatatcataatctgtgtatataattattatatatattgtattgtatttattttataaaatataaatactttatattatatatattgtatataatatattgtatagtatatatattgtatatattaatttgtaggccaatgattccaacccgcttttctacttgcggtttgagttactcttttttttaaaaaaaaattacgctcatgttttttaattgattaaattttatgtaatgtatttatgctaaaagttctgataacttgtacttgttattgtacatagtgataatgttccataacttttatggtccatattaaattaaacaaaaaataattgaaggacttaagatgtaaaatttccaccatacggcacacttgcaaatgcatacaagtaatggtaaactaacattgcacaataaatatactaaa

SEQ ID NO: 175900 - DNA, 652 bp, Cannabis indica
agaaaaaatgatagcatatctgagcaaaatacatgatctgctcgcacaattcaaaagcaacagcctcagacaaattccaagaaaagaaaatacaacggcagatgcgttagcccgattggcgagcaacaatataagtgacaaggcaaacctggtccctatccagttccttgaaaagcctagcatcactggcacggaagaaatcgaaatgatcgacacatctccaaactggatgacgccaataacaacctatctcaactttggggaactcccagatgaccgaaatgaagctcggaaaatgagaagaaaggcagcacggtacatcatagtagggatgcacatttggactcgcacactcgaaaaacccaaacacccgccccgacccgctgccaaaaaaccgaccaccgaaaaacccgtatagtcgggtcgggttgaactcgaaaaagcctaaaacgggttcggttcgggtgtggataagcagctttatttggtcggttgtaccgaaccgtacttaattttttgtaaaaaataatatataatacagtattacattctagaaaaaaactaattacattattacaaagtctaaaacgtacgcaatattaagcttaagtattactatacattaattaagttagttgtattgtaaattact

SEQ ID NO: 175901 - DNA, 762 bp, Cannabis indica
acgagtgacaaggtgagcgtcgggtgtttggggattttggtctttacccatggtagggaacctatggacagtgcgactatcttggctagagagcctcgatgcttgaatgcactcatggatgcttgcgagcatgactcggcgggagttgttcgagagacggaagtgtgcacgaggcatacggtcgcgcgaaaaatgagctcattgttactcggatggttgaaaggctgaccttggcttagagaagtcaaggtgccgcacgggtgttccgctccctgaaaaggtgagcccgtgacactatgcatcaacaaattattacccaatattttatgtgcttacttaatcacgcaaattattagtaatattaatatatgtacataaaacggtatcatgtatagtattgagtgtacacgtattattactctatcaatgttagtgaattagttgtccgttttaagaaaactggcgttgtcttaagcattattttttgaagtaagatctatattaattaataaattgtttaaaataatccagtaaaaatattattctaatattccatttcaaaaaataataataataataataataggtaataacaataatgataatattattctatttctaattcctttggtccttggaaaattgcgaaattcaattcaaaaggcacaaacacaagtccataccagccagaaattaaaaacaaaacaaaaaattcctgtgtgtgtgggggaaactttccctttccccttttcttttctcaat

SEQ ID NO: 175902 - DNA, 669 bp, Cannabis indica
ttgttgtatttttgatagtttaattatttagtaatagtctaaaccgcaaaaatcgcataaaccgcaccgtattgcatcattttttgtggttttttagttttgcgatacgggtatggtttgggaaattgaaaaaactgtatgtgccaattgatttgaaaaaatagtcaaaaactacgccatccgcaccgcgaacactaataaatcttacatatttttgttttttcgtataggtaaataattgtttaaattttattttggatatggtaaattatatcaaatttgatgggtaaataaatacaagaaaaaaaattacactatttttttttatcacaaaacaagtagtgaatctatcagaaggagtatactcatgaatttcctatataaataattagtaaatgacgtcacctcatgaaactttatattatagtatacagataaatatgatgaactatatatataattatatgattacatagtactttagataaaccgttaaaatttactacgtaaaacgcaatgcatggagctgcatgctcggacacattaattaccgtcctctcaaattccattttccgtaaatgtttttccacaaaaaactaattaaaaaaaaagatatcactgtccactcaaaaccttttttttgtaaagaaaaaataatgtatattttat

SEQ ID NO: 175903 - DNA, 665 bp, Cannabis indica
acattagaattttattagtttattttaagtaaaatagcaaaataaaacaaaaaaaattaggtgaaacgggtgcataacatgattttagtatgcaaagtttagccctttctctaatttttttcatttattttggtccttaaattattgttttattttattggtcttgaaaaatttaaatatataaattataaaattacataaaaattaaaatatattacacaacatttattagttaacaaactaattatcacacaaaacataacttaaaaaaattataaaaaatatactaatgtactacaaaaatacaaacacataatgtcaaatataaaatattaataaaaagatagttaatatataaacacttaaattaatgtaaatgtatatttatttaacttttcaatttaatttttatttatgcttattagatataatttatacttaatttaattatattaataataaaaaaatatatataaattatgctaaaagacgaaattttaacgctggaaaacaccaagaccctatggcgtcggttttttcatatcaaccgatgccaaagggtaccgtactggcgtcagttttttctataataaccgactccactaggtaccctttggtcatcggttgttatgtaaaaatacgatgccataggtacccgtttggcg

SEQ ID NO: 175904 - DNA, 625 bp, Cannabis indica
gatgcaatcatggaattcgccagaattaagaaaattcgatgcatcaggcgaaaaactaaataaattcatataaaggaaatcaagaattattttcttttctatgaaaaataaacaaattctcaaaggatttaatcccttgaaaagcacacaaaacatcagatccaaaccctaccctaaccttcgaatatatttaagaatctaaaacattgaaaagtagaaacaaaacaatctacagaaacttaaaaagaaagaaaaaggagaaagagcatacccaggaagagaagaaagagtacgcagttgtggtggtagaatgaatcgaaaaatataggagtaatttttgggatatgaaaatagcaaaaaccggaatgaaaagggagaagatgataggaaaattgatcacaccaaatagatttttgtgaataagctgagctgagctgttttgttgtgttttaggtctctttcatctttaactcgctatatatatattcgcaaacgcggtacgctatttaaaatttaattaatataaaaaattagaaacacctcttcggagttgggcctaattctagaaaagctgaaccgtcttcgcacgtgccacacgtgcaggattttcatcgagcgtcagatc

SEQ ID NO: 175905 - DNA, 789 bp, Cannabis indica
gaccttcagcaaatctagcagcagccaacatacctggaaaatcaacaacaaatccgaatcgaggaagaggaaatcatggggattactctggaaaccgtggtggttcatccaacaacagaggaggttaccaaggtcgaggaagaggaaggtccaacaactcaaaaccaacctgccaagtttgttgcaggtatggtcattcagctataatctactacaatagatacgatgaatcttacattggacatgaccctaaaacaaagcaaaaccagcaaagtggaggcagtcacagttcattcatagcctcatctaaaatcgtggatactgatcaatggtatactgacagtggagccagcaaccatgtcacttcctcatcaaacaatgtcaatcaaaaaatggagtatggtggtaaggatcatctaactgttggagatggtagtcaagtgactatatctcacattggcagcagtaaattaaaaaccaacactgctagtgatttggttttaaaacagctgctacttgtccctaaaattgctaagaatttaattagtgtgtctaaactaactgctgataacaatgtgttcattgaatttcactctaattcttgttttgtgaaggacaaggcaacaaggagggtgctgcttcaagggacacttaaaaatgggttgtatcagcttcaaccaccagtttcaaagtccaaccatcatcattctgttctctctgtcaaaaacaatcaaaatcagtgtagtatgttcactggtgtttctattttgcaaaatgaaagtgtagctc

SEQ ID NO: 175906 - DNA, 835 bp, Cannabis indica
aaatatattaataatgttgatctataaaaaagatatcaattcaaccatatatgatagatatatatgttataataagaaagaatcaggtatacctataagggttcattttccttggtgtaaccaagcatttcattcaccaaaagttgacgctcctcagcagcaccgaaagataagcacttcttaacaacattagaagcaaatttctgctgactcatccgtacaattcggccagcaagttggcgtataattgctgtcctccctagtggtttacaagttaacatagattttatatacattactaaagatatatacacataatttcaaactgaaaattataaattaatcacataataacatacaatagtataagctaaatacaaacccccaaaatcagtttctatcaaacaaataaaaattgagattggttatacacagtttatattaatccaagatgaattgattttaactaagaattaaaaaaaaaaaacccaagaactagcagctagtatgaacacatttcaaacaaaagagacctaaaaaattagatccagtgacgagattcaaacacttagaaccaagtattagattcaaacaattttcacaatcaaagagagagaaacagagaaaaaaataccgattgaacgcgcgagacaaatcaccggaggccatttggccctacgattgcacgagttcgcctgaggagcagaggtgttgaggtcgattggtgtttgcacgagagaaaatggccaaagtttggccttttgtcgcacaagagaaagaaggagtagatagcggttgaacaattagggttttcaattttgagtgatgatggaga

SEQ ID NO: 175907 - DNA, 756 bp, Cannabis indica
aaaaaaaaaaaaacaaagaaagtccatttaattgttacaattgttatggaattttatttgccacaccttattttaatgaattttatttgttataaaacatatactttttatttatactattatttttgggaattatctcatatataattttttaatttttaaaaaatttatagtttgagttattctagtagtttgtatagtagtttctatgtgggttgttatatgtattttggttgcgatttaggttgtgtggaattctgtaaaaataataaaaaaaaaaactattttaattatattaaaataaaaaatcatataaaattatattaaaaaataaaaaatatatattaatgttgtaaaagaaagtatgaaaataaaatttaaataattattgatattaataaaaattaattaaaaaataaaaaaagaaagaaaaatagaaaaaaaattaaaagtagatgttttaaaattaattattattttttttattattggggtactagcaaatattaagagtgatgttttaaaatagattaaccacacattaatctatttttggctgggaaaaagattacagaaagaaggggagagctaggacataggcttgtttataggaatgtgagaggtttgagtaagataggctcagagagagacaagaccagcctcataaaccactttctctacatccccaaaaacggctggttgcttgtgatgtgttcctatgcaaaaatctttcttcacttccccctaaacacaatg

SEQ ID NO: 175908 - DNA, 611 bp, Cannabis indica
aaattattgtttgttattgttaaccaatcgcactcgtttttctcatctctcctcatatataggtaacccccgcaaataaagctcccaaattatcgaaggatgaagactcttacggcctcagccctaacgataaagaacacaagtcagatatcgaggacaataatgatgaagcaggttcagattttgaaaatgtgaaagaaggatacaacaaaggatacgacaatgggattcatgattggaacatggaagaagatggttacgagtttggctatgaagaagatgagttttgaaaattttgaatccctttcccaactagccaactctagccttggtgatgataacatattctttgtactttgtacttacagttttagtaattgttagaagaaaataaattgttatatttgctctctcctttgttgtgcttgtaaaaagaagaggttaacaattttgaaaataggttattatatattacaagtttcttttctcataaaataaagtcattacaagtttatgatttttaagttttttggtaaaagaaattgcaaaaccaagggtcaagtatcatgcaaaaaaaaaaaaaaaagaacaaaaaagaaagggaaaggggt

SEQ ID NO: 175909 - DNA, 1456 bp, Cannabis indica
aacgatattagaaattcatatgtaattaccacctcatatccaaacacacattgcattttaaaatatagtgtaattactaaagtctgtaattaccctacctaataattacacagttacttccaaacacaccctaagtgaatatgattatgacatgatttacttatattttttcaaaaaacaaccttgtttccatatgtatttttgtaaactttttaaggaaattatcttatatactattttttttaacgtttttttttttaatttacggtttgggtttctaaagtggttgcagcactagttgcagtaggggtttctatacgattttttgttgcaatttaagttgcagcgttgattgcaatataggtctctatgtaaaatttcgtaaaaatgtaaaaaaaaaaaaaacctattttgaagtgtaaaaatgaaaaaggctcaactttttattatttttagatatttacgaaaatatccctaaaaatggtataggagatccaaagtcgaaatattctagtccattagaaatgactaaagacttatctcgagggtctccatatgagctaggagccaggtgactagcggagctgaactttgctgatgtcatcaatgaacgagaataaaccttactgacatcatcaattagcacgattatttttaaatggattagagcaggaaatttaatttcgggcaccaggtagaaacttggtaagaaccaaatcagttaatttaaaaaaaaaaaaaaaaaacaaaatcttaaaaaaaaaactaagcaatatgatatagagaaaatgagaacagtatctaaaaataatgatgtaaaattctaattaggattgtatatcaatcgatttagtcatattataacatattttaactaactctatgtatattgatgacaaaatatctaattataatttgtaattaataaaaataatataagttaaaactcacacatgattttgacatcagataaacttcttagactaatttttttttttttttagaaaattagactctataacctttttatattgatttcttttatttttatcttttttaaagtcctattatttttactttttttttaaactatttacctaattttacccctcgtcacctcaatatactagggaaatttgtattttttattgcttacatttgattaaaaaaaatttactaacaaataataactaatatttgtaggatatgacaacttttatgatatctctaaaataccttcatttatatcaccccactttacaccatcgaaccacccatcgggccaccccactcgggctacccactcggaccacccactcggaccacctatcggactaccatcggaccagatttgctactaatttttttattgtttttgttacatacaaaagtaagcatcaagtgaccatcggactaccatcggacaccatcggactaccaatttttttttttttta

SEQ ID NO: 175910 - DNA, 509 bp, Cannabis indica
tagagagtaatgtttgccttctagctattctgattgctaaatctagtaaaatctagtttccatcataaataaaaaatatgaataaacttaaaaataaaaatagttgagaataagattagttccttctgctgccaacataagacaaggtggagatttgtttcttctcaacatggaagctcatcttgactctcaacaaaaattaccaaacactcgtatagatcttgactctcaacaaaattataaaataatatccatatagatcttcttaatttttaaaacgaaagaaagaaaagatatgccattcaaccaactgatattgttaatttttaggcaacaaaattaaagcaatacccatatatagatctttcatttctttaagaagaaaagaaaaaaaatctgccattcaaacaacacaacgtagggatgaagagtacaaatgagcatggaatctacaaaatcaattcgaaaagaaagatgaagctcacctcagaatatgtacgagttcggga

SEQ ID NO: 175911 - DNA, 755 bp, Cannabis indica
atataattatggcaaaagctataccaagaagtggttcacgtaagaatagacatacgggttcacgtaaaaatgcacgtagaataccaaagggagttattcatgttcaagcaagtttcaacaatactattgtaactgttaccgatgtacgggggcgggtaatttcttggtcctccgccggtacttgtggattcaagggtacaagaagagggacaccatttgccgctcaaaccgcagcaggaaatgctattcggacagtagtagatcaaggtatgcaacaagcagaagtcatgataaaaggcccgggtctcggaagagatgcggcattaagggctattcgtagaagtggtatactattaagtttcatacgagatgtaacccctatgccacataatggctgtaggccccctaaaaaaaggcgtgtgtaaaaataaacattgaagatatttcaaaagaaataaataattcaatgatttgatcaaataatatcactatgggtcaagagaaagtaatagtatctactcggccactacagtggaaatgtgttgaatcaagagcagacagtaagcgtctttattatggacgctttattctggctccacttatgagaggccaagccgatacaataggcattgtaatgcgaagagctttgcttggagaaatgaaaggacatgtatcacacgcgcaaaatccgataaaatacccccatgaatattctaaaccaagtaggtattcaagaaatccgtacatgaaaattt

SEQ ID NO: 175912 - DNA, 1301 bp, Cannabis indica
gcttcgaattaagttcagggatgctagaaagataactaccacgtgtaattatagagaggcgcaacaaaatatttgaaacttgttggcgtagtataaagttagattgggtagtccatactgtatgctttgtacactaagccgagttttcttgagtgacattgtaagctgcaagaggcacatttattgaaaaggaagcttgttggcatgggagtggaagtattgcaggggccgttagattcttgttagtcacgatagtggtcgagagttgatgaccaagatggttcaaaattggatagacatggagtgctttaattcctacgtatgtctgtcaagagaaatgcacatggagaccaagtggcagatgtcgtaatcgctagagaatgattgtacttggaggcattgcatgtgacttttatttgatccagatggaaaacgtcaagatagtcgagtgggaggtgttggcttgtaaaagcgccaatgggcataagtcacacaaaggcattgatagacatgcagagttgtgaaatgaatgcattaaagaaaccaacatgtctaaaaagactgaacgcaaatgtttagatgatgctagagtttgagtggaggccaaatggctgtgctagtgggacttagtagtcatgtgagtctgcaaaggtcaagaggggtgctagagtttgcatgaaggtcagaggattgcatcattggaacatagtacatcgagggagccaaaaagggcatgatgctagagcgaatcagttggatggttgagtggacaatgcatgcatatagaaattgacaggagtgatatatgagatagctgactcaagagtcacattctgcgggatgcacttttagagggcatggtgtgcatgaagagttgggcagtcagacattcccatgtgggcatattgttgaggacgctaataaatgaagtgggggaaagaccctcacgattcactcagcagactaggtattcattacaagcatcaagatatttatcatggagatggattgttgttaaggatgtaatgtcaagaagacttgggacacaagcagtgccaattatctaaggtgaaagtcaacaggactcgagtactaagataacaccatggaaatgttggcctaatgtcaaggggcgaagagtcaaaatgactgaggcattagttcaacaccttcatcaaagtgacatttggaatggagggactgtatatgagtatgcggttaacttacgagctatgccatgagatgtattcctctaagagaaaagttattcccaagttgaagtgggggagcccactaattca

SEQ ID NO: 175913 - DNA, 534 bp, Cannabis indica
ttttttttttttatcttaatgatttttcatacttttatttgtacccatggccattacattaattattgagaatgttttgaaaaattccaactgtaagaattgatcatgactagaaggacatgaaaaagacacatcaattttatttttagtgctataaaatatgatcatatttcactgtatgtcatcctcatcttgttttattaatttgaaggcattaatgtttcaggttatgcatatgcatggatatcatctacagctagggagctcatttagtaagatttaagagctctgcagtacaagcagttggattatatgtattgcaaaacaaaattaagtgattgaaatacttcttttaagaaataaaagaaatgataaaaattaaggtggtttttggttggaaggaatgaaaacataaaaatagatataaaaatgagaataaaaatgaaataaaattaaaatacataaaaaaatagataaaaaatcacttaactttttttaccatctatgtcattgaaatagtttttctttctattt

SEQ ID NO: 175914 - DNA, 574 bp, Cannabis indica
gtaagttcatatgtattttatgtgcaggcaaagtgtgaacaagaatcagaaagctgttcctaattccaaaactttctctcttctagataagacatgtgaattaatcagaaattttccggagtatcttgatgtagtagtgagtgttgcccgaaaaaccgatggcagacattgggcagatttgttctcagctgccggaagatcaactgagtatttctctaattctatccttttatgtacttctgtgttttaatggcttcaaggcatatctgcaaagtacttaaataggtgctcagaagttatgtttctatgaaattgcttaaaagttgaaaaaagaaagtatgttatttgtgaaaaagggggtaggagtgctggatctgaattttgatctcaggtcatgtgcttctaatgttcgtcagaatatgtgcacatttagtcaatgatataaaatagttttagcattgtctgtaagtgacaaaagaacaaacttttgcgaaatgtaggaataagtcatttgtagctgatcatagtataggtaacataattacctccaaatacttgagggcccattattgtt

SEQ ID NO: 175915 - DNA, 1413 bp, Cannabis indica
ttctgatttacaaatagtatttcggagaagattacctgctgcactgctggcaaaaccgacgttccacaccacctactatgacccttggagatttggaatggttttcacaaattctatgcttcctatggtaatctttagcagatgaaagatccaggttacaaccttcaacttggcagcgaggtggggaaaggttagcctggcagctggacttatttctcttcactgttgcagcagatggcgacacttcagaatgggaagagtgtttgacattattttctgaacaaatgtctttgaagtacatcctcttccccaactttagactgagcaacgcttcaccagaaccagtggaaatatcaggtgtcggggaagatccatgttgttgagctttgtttgcttcatttttactcatcaactcgtttgaaaaaggttcaaaaccatcaagagtgaatttggatgtcttgctttccccaattgaagaagaattgatggaagccgaaatagagctccttgatgaagcatgccccaaatcagagccagaacctgcactccccccaccatccccaggtgaatggagagatccagagctaattcctcgatctccttcgaaattgcagcctgttaattgtagcttctttggattttcagttgcctttgtgtcgaattcaaaaaggttctccaagtcccacaacaaggaaggtttcgaattccactccatggctgataaaagaagttggataaattgatttcacctactattctccaaaaaactgaaaagcaaacttcttgtcagtcagatgctgcaaacattaactctgactttttttattttttttatgcaataacaacataatggagcacagaggttatgaaacaacaaagaaataataatgagaatacaatatgtaaaaatattaaggaattggcaaagtaccttaaaattcacaatatgtaatcaatggccatatctggttcagaggaaaaacataaataggaggcaaataccaaataccagttcagatctgccccaattcacaactcaagctatggagacgaaggccaagaaatgtaataagaaaattgatcaacaaagcatcatcccattggaagattcctcggaagcccataaatattgccttaaccatccccttgtgaaactgctctcagaatcgaaagttgtaaaataccctttagaagagaattcaccaagctcaaaagatacctctacaaaaacacctctttgcttgatgatagccaaacacttaaaaagctggttacataaatcccaaggtccacaaaatgggttatacatatctctgccattactttctcactccggtacctaacaagtcccatcattcgcagaaaacacaatcaaactcaagccccagtaaacgatggcaggcgtttcccatt

SEQ ID NO: 175916 - DNA, 532 bp, Cannabis indica
ggtggttaattgaagggcaattaagcaaatgggatttagcaaaaagatgataggaaagtatgagatcagtcggactatcggagaaggtacatttgccaaggttaagctgggtgtagatagcactactggggagtatgttgcactcaaggtcattgataaactcatggtccaaaacactaatctaatgcaccaggcatgtaatttgttttattatagtaatatatccatatattgtcaacaataaacaaatgaatagtattaatgtatatgtatgtatgtaaataaatttattaggtgcaaagagaaataagaacaatgaaaattctacatcaccccaacattgtacgtatacatgaggtatgtatatgtaataatcaacttaagtgtttgcctattctttactattattttctagtttggtttcgttaaacaggttataggcacaaagaacaaaaatctatatcgtcatggaatatcgtccccggtggacaactctcggacaagatggtgagaaggttttcgaaagcttttc

SEQ ID NO: 175917 - DNA, 561 bp, Cannabis indica
aatacatctagtaattagaaagtattaaatccaattaaaatcaatggctcacactttagttttcatgtcatgctaagagagatgcatttcactacctagctatcatgtatcacttaattagatgttatattattattgatataattaaattattaagtattttaattataaattttgttgggactaaaagtaaaaatttttgtaatgtgtatatatatataaatagatatatatataactaggattttttaatttttttttaaaaaaaaagtaagttagcagaaagctgcatgtgcatgtgtgatgtgttgtcgatactaattatatagttaaattagcgatacacactgatatatacttgtaataaatgatacatatatatatgcccataaattaggataagatgaatatcattaattatacaaatgagaggattaaattaagagatctagagatagagaaagatgatgatgatgttaattaacaacattaataattgatgatttgaaaaaaaaaaaatagtgagagagagagagagagagagagagagagagagagagt

SEQ ID NO: 175918 - DNA, 814 bp, Cannabis indica
taaatataaatatatatgagtacggaaaacttatatgaatgttatatgcactttttgtccaactccaccatgtgatgttttttttcatttttcatttctataaatattttatatatttatatatttaatttgttgttgttgtttttgattgaaataataataattttacatgaaaatgacatatatataatccaatcaagccagcatgtatgtgatcttcaacctccaacaatggaggaccctagattgtctggttttgtttggatacacatcaaaataatatatggtataattgggcttctatttttatttgcagatattataaactcaattaatattggatttctcttaattaattattattaatataatataaaagaatgtcactcatgagttgtttggcaaaacaaatatgagtgagactcgctcagtcaactccctcttctatattaattcccaccattaatatctaattatgtccataattattgcttttataatcatatacatatttatataaatttattataataataactctcttaaaattatactccaatgtagtaagattagttttattaagcgatcagttaataaagtagcatatgagttagctcgtacttcttgttttttgtctggttgtaatgttgctaacattgagaggtttttagtgagattttaggcttatggttgtgagtgagtgtttctatacatattcttcttctacctttttatgtatatagtgtaattgttgtaacatttatttaatctttttgctgctcattgtattatagcatctccaatgagagatgta

SEQ ID NO: 175919 - DNA, 758 bp, Cannabis indica
ggaaccatccaccaggagacagagattggtagataattgggggacctgcaccgatctggggattccaaggggcgattgagccaaacaaacttgatcaggatccaattcgaaaaatctcctcccaacttccaaccgaaccatatcaatactctgaagagcttccttggaatgaaagatatgagttctttgcttccaaatacaatccataataacacccgcatatacaagcatccttcttctgagagaaggggacaaagaagaacaaaggttgcttaaaaacatgttgatgctatcccctggtattgaatcaactctaaccgacaaagggccagaaaaccaaattgcagtcgcaaaagggcagcgaacaaacagatgaatggcattttcagggaccgaagtgcacacaggacaaacattaatagagttgaacttatcagcagtagggagaatctttagacaggttcgccaaagcatcatgctcactcttggatgaattttcgaatcccaaatccatttccagatggggtttctttccccgaatctggcctcttgatcagcccagtaagctccttttacagaaaaggtaccaacagtcgaatttttccaaatgagtatatcaccctcattacctcttggtgatttgaatcttagcaatttggtctcccacatcagacccaaagaggaaatgcaaatagccaatgttccaacatttgtttctgcggtacatcaaatcaaccacacatttaatactaggtgcc

SEQ ID NO: 175920 - DNA, 702 bp, Cannabis indica
tataaataatcagattccacagtattgaggagaagtctcagcttaaaaaaccaaccaacattaggggtgggcaacattcaatccaatctaattgaaccgatcaaatccaatccaattacaattggattggattagatgactaaaagttaaattctaatttgattggatcgattattggatgtcaatctacaaaataccaattaaaaatcaatcaaatccaattacatttatatatatatatataattaaaaattagttatatttatttatataataaaaatataatatgtatcaattatatttttattgtattttatttttgtgttaaatttgtaacagttgattgttttatatatttattttcatgatgttttgttttattttattacttgaaaatgttgttgttttaattatttaaaacttttagttgcattacattgtaatgatgctatgtttatggagtattaaacttaaataaaattgatataattggattgtattttgaggtctaattggattggattgaatgataattttttaaatacaattattaattaaattggattgaataaagaaaaaaaaaattaaattggatgggatgcacacgtaaacccaaccgtatttaccgtattaattaaaatctaaaagatgaaaacttatcaatatgtgactcgcaatgcggtgaacaatatatgtctccat

SEQ ID NO: 175921 - DNA, 674 bp, Cannabis indica
attttatatattttagtttaattataaaaaatagtgaattggtcatcaatagtgccacatatactattatatattaagagtattgttaatttagtggtgttcaatattttttataagtagtactttctcattgactagagatattcgtgaaaaaaaaaaaatttgtatataaatctgatacttaattatactaataatagtataatattaaaaatagtactagcacaaataatacattttagtaattcttatatacactacaaaaacaactacgtttagtgacaactttttaatcataatataatttttttgtgattaaatgtaaatttagtcataacaaaaaattacttgtaactaaaatatagtatttagctacaagttgtcactgatttagctttagccacaacaagtatcgtgattaaaaatacatttatttacaataaaatgtaatttttgtgactaagacttttaaccgcaaatttttcagtcacatatagaaaaataatttataattagtgacaatttttttttttcaagtttgatattaaccattaatgctacgacttgattatagcaatgcctaaccattaaccaatcaactttcatgtaaattatacctaaaatctcccacggccacagtattgtatcttaatcaattacattgactaacttaa

SEQ ID NO: 175922 - DNA, 770 bp, Cannabis indica
aaatgaaccttgaataataggtctgcaatgtatttgctttgagaaagatacaaccctgcaaatttcctatgcatttctactccaagaaaataatgaacttagctaatgtgtgtgagagagaaagaattgttgagaactgcaattatagcttatgaattagaatagagttaagtcatattaagatatcatctacatagacaagtagaatgaccaagttggtaccagtaccatatatgatagggatgtatcagctcgagaaacagtgaaactccaactgaacaatatttttttgagtttatcattccaagttctaggagctttttttaagccaaagatagctttgtttaacttgcaaatatatgtagggtgattatgatcttcaaaacttgttggatgtgtcagatagacagtctcttgaagatttccattaagaaaaacatttgatacatccaattttttagttctcattgataagacactacaagagtgagaactagcctcatagtcactgtttgatcacaagactaaaagtttcttcaaattaatccctggttgttgaagataacttttagcaactagtttagatttacacttgtccacagttctatctgcattaagcttgactctacaaacacttattatcaattagatccatatgaaattcataaggaactaaggtctatgtactattggatatgaagagcaacaaaatctttgttcatagaggcattccgtacgtagagatctctttaactatttttggttctcta

SEQ ID NO: 175923 - DNA, 867 bp, Cannabis indica
ccatttcaccctatggccggccacctcttttgtgtttcccaattattattttcaattttaattgccatgtaattgctaatcaaagcctagcaaaaataggaaagtggtggatcacactaaataaggcagttaattgattacacagtaattaaggaaactgttttatttggaaagttgtgctctcccttctccctatataaagcaaccctttgttctcttctcttgtatgcaataagccacgaaattcaagagagaaaatttcgaaatccttgtgagatgagtagtgcccacacacatcaagtggtatctcaatcatagtatgtaagactatggaaattctgcatcaaagaaggagaaaagaagatccaggttcagatcttggtgatgctctgctacagaaaggaatcaagggctagagatctgaacggaaggagtcatattattccgctgcacccactgtaaggttttctaactttatatgtgtttattttcattgttttagaattcatattaggttgttaatccaacatacttgttagtaaatctagatcctggtaaaataatttccaacaactggcaccagagccatggtaatgatttactttcatgtaatatgaattaaaacgatgatttgcatgtttctgtgttgatttggatggtttcatgttggtttatgtgttatttgatgaatgtatgtgttgtacgtaaatttttccatgaaatattattttttttaattttttagtaaaattattttattttggtatttccttgttgaaaaaatttaagctaaatttttgttttttacggtaactcgattccgataaaaattgagaaagttatgaatttttgtaattttggtatgca

SEQ ID NO: 175924 - DNA, 866 bp, Cannabis indica
aaagtatgataccataacctcttgcaccccactttcccaatcaattacttggccaaactcattctgaatagtacgaatatgattgttgcgttttttggtttttacagtagcattatttggaattttagtccccctctttcagccatagttgtttcgacctttgtctccaaaagacctccttctgagtaagaatttcaaataaacgcttcttctcttcttgatacatttgaatggagtactcatctcgtttgcccttcaaagctttaataatttttttactggcagcaatatgtttttggaagttgccagtgaaatttttaccccattcaccgaaaattctggaacggtgagagattttctcagttataggatgatcagtagtcgatagccatgcatcttccacgagtgtatgacatatgggttcacgaaatcaggcattttcaaacttgaatttccttggcactgttacagcagtatgcaacatcaagtcaaggagcaaaggacagtgatcgaaagtggaaacctctatatttttacaagtttagcatcttgaaaatttgtcatacttattattatttttatttttttttaactttgatttccgctaatttattttaaatagtataaataaaataccatattattttgaaacaataatcctgactgctgagacgcgccattcaatttgttttccaaatcatgtttaattaatttaatttttttgagtaattacgtttaattaatttataaaacttcaaaagaatatttacagaattttaacagtatttcaatcttaaaaaccaacttttttttgtggctaaaataccattttttccccaatactaaatgtgaagtccgcttttaat

SEQ ID NO: 175925 - DNA, 1299 bp, Cannabis indica
ctgctccaatcttggtatgaacaatcaagctgtaaagctgcccaagaagctgtccagaagtacagaagaatttgatataaggtgaaagaaatgtagactcgtgcatttgaaatattgtgcatgacatgtagattgttaaattctcttgcttagcaggttactatgaatgaagcttgcactttttgttgttcccaagagttaatgaactatgcgaagtatttgatattctgagttttgtactaaatcatgagtgtgaccttttttcccatccccaatttgcaggaggagccctatatctattgcagcagctgttatctacatcataactcagctctcagatgataagaagcctcttaaaggttcaaatatcctcactcttgttaatcaaaattgaaaatggatagaattctcttgtactgatttaaatctttgaaagatgggtagtcatgaatcatttgatagtttctgtttcaagtgattacattgttaaaatgtaatataaactatcttgggtagttcttagttttctcaatatatagtttttgcaagtaaagggaattcgggtgccataacaaacatattgttgcaagcaactgcctagcaaatttatgcatttgatttgagaaatgtgcatgcagatatctctgttgctaccggggtggccgaaggaacaatcagaaattcgtacaaagatctgtaccctcatgtatcgaagattataccgaactggtatgccaaggaagaggatctcaagaacctctgcagcccttgaatgatgtaatagagagctcgaagaagaggcgggaaatatacagatgactctgaatagtttttgagagttgaactgtttttgattgtagtgaaacgttcaacatacagtggccaaatatttttatcttactgtttttttttttcatagtaatttacagctgaaaattttattatctgcttaaaactagcaacaataattcaatatatttctatttttttatttgatgcaccaaattttaatatgactgcatatgcttttcacttctctaaaaaccatcttctgtacacttttgatagattagattgcttgtatgaagagcactttaagtcatcactttcacttgtgatatttacatgtagcctgtttatgttgaaactttcaactctccaactgtcttgatagacattctaattttagtaaaagttagatattctatatcatattttgctaattaaattagatccaataataatcaaatatggctccaaattttaggaagacaaaactcaagtgtcataattttggag

SEQ ID NO: 175926 - DNA, 706 bp, Cannabis indica
gaatatatagaaagactaattcacgtgaagcaaatcgattagtgagcagaaagaggatcaaaggtcctgaattggttgaatagcattcaataagactccaactcgccatagaagcatactatgcccagaaaaaagcaattgattaaacactcaaatcccatcaagggaagttgatttgttaggaggccatcttaaaacaaattgatactttggttggacatcgtaagcaacaagcttcttcttagagattcaagcaatgttcggaatggataaaaggggacatggctaagtttcgaaaatatctggctgatgtagcattgagctaatttgagattaaatagaattcatgtcaataagcaggctggttggtgttgtcgtgacaatcttatagcacattgacatttgggttagcattagcatatatttaaaagttcaagcaatgtccagaatgaataataagtgcaagtggataatggtagaaattatttggctgaactaacattgagctagtcggagatcaaatgactggtataataatcaaagaatcccatcacttagtagggaagatggttgggtggccaactacagggtccaaagccaggaagaggaagtaatttccctcaaaataatattcctggcttaagaaggtaattgtatctatgaggcatatagctaaacacatagctataaacttaaaaggataaaa

SEQ ID NO: 175927 - DNA, 597 bp, Cannabis indica
tcgcggttcttttgttttatgttcaatcttctctatcagatatcttctgtgagagacatatctagaagcagcatagatgatttgactagaaattcaggcggtcgacgtcttttgagtcttaatctcactgatgggattacggagattaaagctattgagtattcacatgtcccatcgattcctgatgatgttgttcctggtactaaggtatttgtttttggtctgagctcgcgtaacctgctagtctagtgaatttgtgtatgttttatctttcctttcttggaacaaccaggtgggtctatgtgtgtgtttcttgttttctccctacattgatttataatacaagtgatattgttttgcttaaattatgcatagtaatggtataaatatgcactgttgggacctgataagttgggttggcaggagattagagattgacattataattttctccatataagatggctttcaaagataattatcgaagtttgagactgtatcgtagactttggatgaagagagtgattttaggaaaaaaaaaatggtgagtttgttttgctttgacattatttgttgatgatatgaatataggagctc

SEQ ID NO: 175928 - DNA, 497 bp, Cannabis indica
acggtttgcgctaggggaaagtattaaacgacacatccaaatgtcttggaaaaatacttaaacccaacacgtgggtaggaattttaactactcacgtaagcaataaaaatgtacataaaatgacaagttcattataaagtgcttaaaatgggatcgtttccaatgattgcgagatgaaattaatgatggttcgcagattccggaatgagcaaatctgctcgcaagtaaagtacgaaattaactacttaacgtcgagagaaaggacaatcaatggaaacccctaataaactttatgcctatgatagtttatattgtgaataaaatgcaagtaaacatccgcataataaagttcatacttaaaagtgcgaggcattaaaaaagcaaagttggccgtccaaccttgcaaatatatctttaacaaaaaagtaccactaagggaaaaaccattgtctcagccaaagggccaatttcctaaaaaaaaaaaaaagataaataaa

SEQ ID NO: 175929 - DNA, 693 bp, Cannabis indica
cgacatcaattatataatcgacactattggtatgtacacttacaattatttattctcaattgagtgaccactcatcaacgtcgatataaagtaattaaattatagagaatactacatataattatttttaatttttttctaaatttataagtttaggttacttcgatagattctatgtagtattttagttacgatttaaattgtcttacgttaattactatgagagtatatgtaatttccgtaaatatatatataaataaactattttgaagtaagaaataaaaaactccttaaaaccaattgttttgatgaataatgaaacactcatttaattaattacacattttagtgtttactgtaagtgtataaaaggaggtgtcaaacattagttctaaattagtataaattcatttaatcaattaagaatatttccctattaaaatatgattaattaataaattactaaattgaatgaaattagcatattaaatctttttttgtttcttgaatgtgtaaagtgtgttcccttatttgtagtttccaaaaatactcataaataaattaaaaaatctatataaaaaaaaaaacatttacatattttttttagtagtaaaaatagtggccaagtgctctattaacaagtctataaaatctcaaagtagctgaccagttcaaattaaaggtcaccaaatt

SEQ ID NO: 175930 - DNA, 793 bp, Cannabis indica
aactataaaacttgaacaagcatagtgtttgataaatcatgagtcaaaaaagtacataagagtagaaatttgttgctcagcttatgagaaacaatttgtattgaaggtatcaaaagatccagatcagaggaaccaacatacaatctcattcttcaagtctacctgttttccaaaaccacttgtatgggaacctccattattaggaacttagataatggctggtattcaagtacacatcgctaatggagcattaaatgaaaacttcaactaatgaattgaagttaacatattggaacaatcatttgccttaaatgggcaatgtcaaacaatcagcttagtgaaagtagtataaacaagaaaaagcaaggacttaccgattccttgtttcgggttaggtttatcagcaggaggcttctgagaaggcagattgattggagcttcagtaacctcgtacctgactctaaagggttcgtctggggaatcttcttcaatggagaaaaaaaaaacaaataaaatggggggagcaaacgaagaagaatccaatcaaaataaaatgtcaaatcacttttccttgcacttgaacgccttcatttaatgactctagtttaatgtataaaaatattttcggagtgatataacctcccattttaatatctttctcaacctcagttcccaaaaatatatgccggagtattttttttttttcatgacagtgtttcgtagttacaacaacttttctgttaaattttttaatttttttaaatagtttacagtaacgacaacaaaaattttg

SEQ ID NO: 175931 - DNA, 878 bp, Cannabis indica
cttttaatatataaagatatttggattattcttagcaaaatggataaaatttgactaactatatgattaatatttcatacaaaatagattcaaattaatcataaaacaccttagaataaaaaagtaatcataaaagtaaaaaaaataagctaatttaaactaattaattatatattaaaaattacacatatcaaattatgattgctaaaaaatttaggctatacaattttgttagtcctaaaaaatgacataatttaacttttttttttttttagaaaaagcaagtaatataatttgacaaactatatagttattatattctacaaaagggaataaaaaccaaaattagtaatttactttttcaaatctcttcaaaaactttaaagaaaatgagaaaataataaaattaataaaagatacgaagtaacattaaaatgaacggaaaagaaaaattaaaaaaaaataaaaaaaaacattaattaaaatgaatattagaacagaaaaaatggaaaatattttatttgtgtattgaattaaattaaacttacaataggagaacctgcaatataggcagaacaaaggacttgaaccaagaaacctaaaccaatgaactaactaactgaatatctaacataacaaactttaataggccccttcaagatagagtgtaaaaaattttgatacaatttcattgaagtgagttggaaataggagtttggttaatatatcggctaagttggttttagaagggacatggttcattttgatgctaccattggtgactttttctttgacaatgtggcaatcaatttccacatgttttgttctttcgtggtgcattggattttctgcattgtgtatagcagctgaattgtcac

SEQ ID NO: 175932 - DNA, 688 bp, Cannabis indica
taaatgtatatatgtgcgcgcgtgtttttatttactctttgtattgttttgttgaaatttttgtgctcttatattatatacacggattgaacaaaaaatcaactatagaattaattgttaaatgtgaaagttaaattatgctcggttaatttttgtgaaatatgaactttgaagaaaaatttgattgtaaatatattttcttttgaatactgtttattgtgatctgtctagtaatatggctcaggaagaaagtaacaaatttgtcaaattttgaggaaatagacaatggaaaataacaagaggaggataataagattgctttgcttgcaattttggttgagcaagcttatagttctgttttaaattggaagtagtaatatggtatatattctgtgcttcttagatagtttacctatcaattaaggactaaaatggctttcatgttaattcttgagatatcccataatttagacaaaattgacatggcttatagagttttggtagatcattaacactctattttgccatagctgttggctcttgtcctagtacaaaagatcttaattgctcttttttttaatcttaccgttgaggtcacatatcttaaacctttagattagatgtggctgtgcattttatttatatgcttatttatataggtattcaaatttattgtcctttcccatcc

SEQ ID NO: 175933 - DNA, 517 bp, Cannabis indica
gatacttaattgcacctatagcaatatgaaacactaggcacctatagttaacgtcattgttgattgactacttgctacaggctctgaaaagcatggagagcgccattgtttcgtctcccttgggcctaaatcctagggtggatggtgagcggctgattgcagttattcctccgtaagcactcgtttggccttagttgatctgatcatgtcattagttacatagctctttttttagctggtgcaattttgtagtacttgtttcatttaagctacatgtgtactcaattgattaagtgctctttttctttcattttttaatgaccagattgacaaaagagcatattcaggtaacacaactgacaacaccatattcctctcaacttttttgttaacttttctccctcattttttgaattttctcactatttcttcaggctgtgtgtaaagtggttatgaagtcttgtgaagatgcccgacaaagtataagaagggctcgtcaaaaggtagagtaataaat

SEQ ID NO: 175934 - DNA, 1271 bp, Cannabis indica
gatttaattaaatatcaaaaattaagttgtaaccacttaatttgaagatatctttttaagttaatatttgaaaagatattaacctaaaaaatatctaaaatattccattttaagttaatatttgaaaagatattaacttaaaaaatatcttaagaatctttaataactaatgcctaggattcctcaacttgatttaaaatttaaatcaaatattcaaatttaagttagataagaaaaatcagttgatacaactaatttataacttaaataggaatatttaattaaataagctccagaaagaatctagttagttaaaattctatatttaattaaatacaagaaaaatacaaatagtttgtctagaaataatatctaaaactaaaagtgtttttcttaaaattaactttaaaatattaaaatgaaaataaattttcatatattttaaaagttaattatgttgctaattcaattttattaggtcaaactaatataattaacctagtacagttattcaaatcaggcaaatgggccttcacaattggggtagttcatgtgagggggtgctgggttcagtatgtcgtacccacttctatggctcccaactctcacacaaggcccaaaagagaggaatttaaccttaaaataaataactgttattaattgaataggtccaatggacctaaataaaatctatcatggtgtgacattttatttagcaacaacctatatgcatctatattaaaataaaataaacatataggctcacacaggcacactttggatggatcctatcatgttgctaggtcatacacagatgaaagaagattgtaaaatttacctgttacaaattattaacttgaccaagggagccatcagatcattagatctggcaaaaagtaaccatggctatttgcaatcaagtaataataggttttgaaaacttacacacaagctaaaaccacatactcctgcaacaaggttagctggatagttggaagtaggatttatttaattttaaataaataatttcgaaaaataaataattaaataaataaaataaatatttattttgaaaaataaaataaataataatattaatttatttttcgaaaaataaaaataaaatttaaatttcgaaaaaaaaaattaaaaaaatttatttaatttcgaaattaaaaaaaaatatttaaaattaaacctacaattttgaaaaattaggtttcaaccaacctaaatatcatttcaaaaatttgctaactacttttaaaaat

SEQ ID NO: 175935 - DNA, 1343 bp, Cannabis indica
  modified_base (747)..(747): a, c, t, g, unknown or other
aatataatttattgtattaacttttaaagaatatcgctaatcaataacaaagcgatatgtgtagaaaataataggcgcactactatacttaataagaagctctacaacaaatacgtctcttttaacaattctctctatatgaatataattacaaaatatattattattttatactcccacatgctcaccagtgaccaccaattattaaccctatcatattcataccccatcccagtgtaactttgtctaattatatatacccctctttatatatcactacctctaattctctccattattaattgttattattattataatctttatatggctctgacgtctactactccgcagctttgtgccgaacaccatcgccgccgttagggggctgacttggccgaagcctatctaccttagtagtaccgccactatttcgttagcactttaaactcatcatcatgctcctaatttattaattattagtatgaaaaatttttctcaagtttaattttactaattttcaactctacatcactctcacaaatatatattattgatttttttgttaggaggcgtgctgaatccagaaaagctcctatcaccaagggcggcggccaaagaactaacggcggtgggggagtagtggtagtgggaaggccgctggtgatactgatcaaaactctcgcaacatgaataatattgaaggattagaacctaatgatgatacaagaagattaaatgtaaacnttataaataaggattagaaggagttaatctatcgctctgcatatatatcatataaatatatgtaatggtttcttattattatggttttctctcatcaaataaagtatattctacttttcaattaaaaaaaagtattattattctactttttcttgtggagatgatgatcaagttaaattctttgtcattttcgttctcttctactttgttggaccactcattagtataatattgaccaatttaagcctaagtttacccgaattaatttattttcaggcacttttccaaaaagtatcacactagctaatacagtaggaaaaaattatattcaagacaacacttactccctcttttgatgtgagtttggattgatacccaagagttttgtcttcttctttcaaacaaaaagtctcttagagcatccatgcacaatagccacatgcatagtagtgttgtaaattggtacaaactcaaaagacacaagtatgacccactataacagaaatggtttttctcgatatttttaaataattgtttaaagtattcttgtcggtttctataaccatcgtctatacgactgtcgcaaaacgggtaaa

SEQ ID NO: 175936 - DNA, 548 bp, Cannabis indica
tagtatctaacacttagttcactgctacaaatatcagaattcgcggcggtcctaaaaataatttttttctgggaccatttaaaaccgtcgggaaaaatttagtattcccaacggtttaaaatcgtagtaaacaaaatgagcgacattttttaataaaatataattttttaataaacccttacaggcgacggtttaatcattgacttttatgcacgtcccacacttctaaagttcactctttgctctcaatcctacttaatatctcatagtattatatattttattaattttaaaagtttgataattttttaattaataataataaaaaagtaattagtaatcaaatgatgtaatagtatgaaatatgggcgcaacatataaattacattattagtaggttttaacaaacctattaataattttcattaaaaaaaacttattaataatatatatttttgttattatatttgagtaatttccttattattattattattattattattattattattattattattattatttttaaaaaataaacttct

SEQ ID NO: 175937 - DNA, 630 bp, Cannabis indica
tttgtgatttaaatattaaaaaacaaaagtgttaccaaacagcacctaaattttttttcttattttgtttgttgctttgtaattcaatttatgcgaagaaatcaaagtgttacaccactcacaccgattaataataaccaaccaacacctactgcagctgatgcacaaccacgggctgttcatgactattgcttacttgtggtgaatgaaaatctgactggtatttcgaatccagtcattgctactaataattttaaaatatatcatgctttaatcaatatggtgcaacaaaatcaatttggtgagttggcccgtaaaatttagtttttacaaaaattaatttttttaatataaatttttttatatctaagtggatttttttaataagaaataattaattattaaatcgcttaactagatttaaaattttgatttctttctttaattttattaaccattccaaataattttttaagatctaaattaattttttaatatttaccaaaaaatattgaatctttcttatttttatttggaggaggtagaatttgatatcaaagtttagggggcaatgttgcgaatttataaaaatatgtcagtatttaagcggaataatgtgacgaaacctag

SEQ ID NO: 175938 - DNA, 2043 bp, Cannabis indica
tttttttgcagaagcgctccacagagtgcaggaacatagtatttaccatatattgcaagttcattcttgtcaagattagctctagaaggccagatcctcctctcttgaataggaatccacctgcggctttgtgtgcctccgatgcaagcttgaaggggtcggtaatatggagtttcaacatcatgacctctactgcataaagcagggccagaaccaggtttcctacaaaaacaagaaagttgattgctcagaaccagctcctgttctaactctaacagaccaagaaagcaccaacttatattaccaaataaactattcttgaatagtaaaagaattttgagcaaaatgtcttaccgtgcactataacacttctttttacttgtcttcttccacacaacagtttcatcttgttgaggcaacatctcccaacagagactttctgcaaaatcatgaacaaagttccaccttttttgattctctttgttatgaaggtatgtttgaacattggttagtggtgatgtccaaacaaagtatccaccgggctttagaactctatcaacttcaatcaggagcataccatctgcgtcaacataatacaaacttattcttccttcatttcttatgaacaaaaacagaccaaactcttatcaactcattatatgttttatcgaatgtccccaaagggactatcaacttattatatgtgctgatatacattccgatggaaattatatattttgtgtgcgcgtgtgtttattgggtatttggcaagaaacatcactttgttgtgctcggtttttataaaagtaccttttttatcccaatcaataccacatcgtgcacaatgcagcatatcaaacgagagagatggatatggcagctgctttgaggtgagagatccaaccattgcaggaagacctctttcaagagttagctgaacttgactgcctgaagcctcatagtttgcaatgcatatagttaagagctgtttagaaaagagatgtgctccaaagctaccatagccacaccctatatcaagaacagttcttacctgcaagaattagatcaacatataaaagtgattaagcatttgatgtatactgcaaacatgtctcaatcgaaaagtacaattcccttaccccagcttcaatgaagttagattcatttctcagaccaatcatttctgcaatttgatgcgagtaatcttcaacgccatcaaacatgggtgaggctgaacggaaagaaatctgctctttatccaacaacatcattctaaaagcaaaagaagtgaggcgttagagaatgatcaggtcagcacagactaaaaaaagctgttgataagagaatgtctgctacctcttggtcaagcttccagaggaaagtacttcctcagcggtaattttcacatttgccaaccaaatgatatctcttccagtaggccacctaagagggatcttataatttacaggtggaagaaccaaacaattttgcttcatcccacgcatgcaattccgtgggtactcctggccatcagataaaggtaacgcgccgctctctgagacattattgttgtagcatggaacatgattttcaaactcctgaggacaaaattccatgtctttcaccctagcagaaccaagagagagctccccgatatcccacaggtctgaaacgagttgttcttggagtctcctataaccaacaaatatttgtcctcttgaagacgttgaaatggataatgtccaccaaaatgatccggaaagtgcaacaagtataatgaatgctaaactgagcttcagaagtagcattgctaatttgtgtcggtttcttggagagagaggatcagaagcaaagccattttcattactcccatatttggaaggagaattctctgggaaaagtacccggatgggcagcttcatcccaaaagcactctgatcagatgaacctcttctatccaaatcatccttttccgatttatctttcatttgagaatcactgaaatcattgctccctccagagcctcgtaccccagaagatatg

SEQ ID NO: 175939 - DNA, 665 bp, Cannabis indica
aaaacctaaaacctttttcctttactacttcgttggttagttagtaccgtaaccgtacgaaccaaactagtagtaaggtaacccggaaccctacctaaaccgtaaaggttggtccgtccgttggttggtaggaccgtaccttagttggtttaagtttttttaaattttttaatttaagtaagtagtcgactaattaaggtttaaaggtttaagtttggttcgtaaaacttaaaaaaatttaaaaattactactaagttttttaggttttttagtaagtaaagtttaaattttttaaggtttacccggaccctaattaagttttttaggggtttttccgggtacctttacttaacttaaaatttaaaactaaacgttaggttttcgttacttttaaagtgttttaaaaaagttttaaacctttcccttcctttttcgggttttccgggttccgtttggttggtaggaaggttaggggttaggggaccgacctaagtaaaggtaagggttacggggtaccgaactaactaacgaaccgaaccgaccaccccaccccccccccccccccatgaaaccacccccaattgtgaaggcccatttgcctgatttgaataattgtactaggttaattaaattagtttaaccttataaaattgattagaaacat

SEQ ID NO: 175940 - DNA, 867 bp, Cannabis indica
gtggtgttggtatgaattactatgtttcataatttaataattttttgtacaaattatttttttaatgcattatttagaataatgctaatttatatataggttaattggaatttttactccctaaactttaacatgtaccaaatcatgttccgtgaacgtttttagtcaataaaaattcctcatgtactattaagattgttggatttaagtacatttatccagtttaattcaaatttacttattttgtgattgtccatgtactaaatcatgtttcttagactttgatatctaccaaattatacctcttaatctttgacatgtactaaatcaagccctctaaacttttatctatgttagactttccttactaaaattaaaaaaaaaatccttaaatctaacaatctcaatagttcaggagaaatttttaacgaccttaaaagttcaagatgtaaaatcctaattagccatatatataactaaaaggtatacattattggaaaagtctacaatgcacccattaaagaagtgttttagtagactccctttctcttttaatatataaaagatttttttagtttttttttattatcgtgtatattataattaaccagaacaatctataattttttaaaaatttctaaataacttacaatgtcaaaataaaatttatatatttatagaagtagtaagtaattagttaaattttattttcggccaaaattttttaaaatttacatcacttaaataattacaatgtatgtaattatgaaaaaaccaactaaaaggttttaaaaaaaacccaaagacagataatgagtataccaaaccaccctttaacgaaatctaaatctagtactataaattttc

SEQ ID NO: 175941 - DNA, 862 bp, Cannabis indica
  modified_base (798)..(798): a, c, t, g, unknown or other
tatcgataattccattttggccagaaaatcataccctccaccaccatctaatgtctcaaacaaatacgaattcaatgagcttctgattgggggagggttaagtgggcggtggcgaatggcgatggtggttgagagaagtcgaggaggaggaagagaaaaagatttgggtaggtgagatttgggggttgttggattaagttttgggtagatgaggaggttcggtggtggaggagaagaggttcagtggtggtggttggtggtctgcctgagtttgagggaaagagagtgaggaagagaaagagacaaagagagaaggaaaatgaaaggggggcattttaggtagaaattgaaaacaatagcattaaattgtataaattaattatgagtctaaattttgttaaaaggtatttttttaagcattaaaaatgaaatttccctttatttcttagaatattaattaattaattattgtgatgaactttaataattaagaaaattaattatgtgcaatgaattaaataatctcagttaggctttgcagtgtgggaaccacctcatggtcgttatgtaccaatacccttggaagaactatgtcaaagtgagcggcaccgttagacactgcgccttcactgtcatggcccttaatggctgcattctttctaagatacatgtcagctagctagagctatatatgcctctattccactcatctttcacactaataatcttcattattatcatcaatttaatgttagtagtgttgtgagaaagagaaggaggagatttagatgaaaaagngacttagaaaaaattaaaaaagaaaaagagttaaaaacttgacttagtcaacaaaatgggaaaa

SEQ ID NO: 175942 - DNA, 678 bp, Cannabis indica
tcaccccaagacgcattggtcttataagatactaattttattgcatatttgggagttgtgggagcgtagtgagtgagtgtcaattgggtgagtatttgccaattttcttttctcttttctaaacattgaggacaatgttgttctttaagtttgggggggagtggttctcacctttattgttatcttgctatctagctagttatgccatttctatttatttatataagtttattaccaaaaaaaaaaattgtacttagaaattgtcccccctttacttaaaaaaaaaaaaaaaaaagagagagagagagatcaaagtcaaaaataagtttgggggtgccaaaaaaaatatatatgtatatatatatatattagtaaagaattaaagctagtggcaagagttatatgtggtttgtggggtttcttaagggaaaaatttattgtgcattgcttaggtcctataaagatcaatgtgtttagggtggttcgaaccgaaactaattttccttatcttaccttcaccctagcctatcattacaagcttggcaaagtcctattgatccttggagtggtgtgtgtctacattagtggagaggaagttgttaggtaacctatggaggcatcatttgaacttgaggaccaatgtttagtttacatgttagttgatcgaaattgtttagg

SEQ ID NO: 175943 - DNA, 824 bp, Cannabis indica
cttggatccaaaatagaggcaatatactccaacaagttatccttctcaatattgccccaatacttgttaaacttcaattgcatgctcgctgccattttacttatcaactcatctttactagccttcatatcattgagctcaacttgaacttgcaaaatctcttgaaagaaaagatttgatgtcacgtacaatgacccactaaacttcaaagtgagttcataaaaagatttgagaaagttaacaaatacttcagcattgctccaatcactagcttctggtgggccatcaagtttctctccattaactctttcttcttcaaaatacttaatgtagtatgcatccccttccatatacttaaaaacactcttgaacttcaatgctgcttctagcatcatgtatgtggagttccatcttgtcaccacatccaaacagagcaaggcttttgattcaacatttgcatccgtacaagcttctctaaatcgcttcaaccgagcaggagaagatctcacatacctcaccgcattccttatgctagatatggcgtaagacatatcttttaaaccatcactaacaaccaaatttaaaaatgtgcacaacaacgcatatggaacatctctccacccaaaactaaagctttatctttttcttttaaatattcctttacctttctcaaagctacatcatttgacgaggcattatcaactgtgatagagaaaagttgagtaataccccattgattgagacaattgattagttcttttgccaccatatcacctttgtggctaggaacttgaatgaaactgatgattcttttttgcatcttc

SEQ ID NO: 175944 - DNA, 549 bp, Cannabis indica
aattatttcaagtcgattacgcagtaaggtgggctaagcccatgtttaggacccacctaaatacaaggccgaaaactattatacattatatgaatatataggaaaaaatatgataatttgtaaaattttgtgaaatagactcgctaatacccaaatccactcttacctagactaaatctatacctaagacagctatctttctcatacaaaaatattatttgttttcaaattgtaaaaagataatattatttcgtttatataataatattgtataataaaatatcttattttactctcgtaaatttagggtaaatatgttacatgtttgtcgaaatataagactagtaatttattttgagacaatgtcttagcaaacatctaataacatgtatgatatgaatttagtatgtgaaattgcatatgattctcttaactaaaacaattgttttaataacattttattgttgctattattttctagggtttgttatgcttgtatttcaactatttttgtaccctccaattgagaggatttttggacctgtacac

SEQ ID NO: 175945 - DNA, 672 bp, Cannabis indica
agagattgtcttgtcttaaccattttcctgtctccactcgacatagtcatctagaattggtgacggctaaattttagtccataataaatactacattttttaattactattatgtcactcattaatacgtgaggtctaattttccgatctatctaacgctttattttcaaaaaaaaatttaactcattaatgctatttattaattaatgaaaaagattttatattaataagatattaaaataataaatataaattaattattttgtatatttttaattagcattcacggtaatattgacttttgtatctaatttacaccaaaaattagactaaatatacttattaaagataatctaatatatatcttgtgtgaaacttgacgtaatatttaacatccatcaaatttaacaaaatatttaacatacattctattaaaaacacaaattttattaaatacgatagcactaaactactattataacactaaattagagagaatcttagagcatgtttggtattgttttctgttttttgttttaaaaaattgtttttagaaatgagaacaaaaatagtttttgaagtttttaaaacacaagtcacgtttggttagtgatttttaaaagtcaatattggccaaaagtgaattgctttttaaaacagaaaacaacattc

SEQ ID NO: 175946 - DNA, 749 bp, Cannabis indica
ggcccaagatacgcatttgatgcccctataatttggtatgatctgttttaaaattatgttattttaattcattagttaattaaaaaatttgttacataaagagtaattaaattcttacctttctaacattgtagtaatttatgggggaactttgtggccacgtatagggtctaaatggataatttttcctggtacaacgatctctaccatccaatgcgcacaaaaaaattaatattgggatgtatgtaagatagtataaaaataaattcaagttataatatagaaaacaattagcactaaaaaattaaatagtgtttacccgatattctaggaaataaagaacatttggtggttgttattcatcgatgataaccaaagggccaatcatttgacgcattctcaaaagacacattttgttcttcattgttgataccattcactacgagatgctctgggtcgcaaatcatttatgctctctcagatgtgccttcattaaattgttaaatattagtgttttataataatctcactagaatttgatatataaggttaattagattaaagaagtgcatacatcatcaaaaaagtattccttggttgtcgatgaagtcacacaatgccacctgctgcaaatcttctccagataacgtgatatgggtacaaggtgctatgaaacctcaggctacccaaattgggattatataacatttttctttgtctcttagaaattcatcaactatctctttaag

SEQ ID NO: 175947 - DNA, 512 bp, Cannabis indica
tatatatatatatatatatatataataaaaagtacttttgtacatcagagcagaattaactcgactcatacgtatagattttttccaagaatcatcaccaagaccaagcagaatattatataaataacttatttctctttgttacaataaaatctcatatcttaattatataacaaagatgtatataaagaaaatgaacaatcaattaccagagaaaaaaaaaaatacaagatttgaatgaatacatgcagtttttattatcactacactaatgccaaattgctatacaatagaaagtacattatatgaaaaagttagaaattaagtacccaattgtgatatttgcatattactcgcataggcatacccttctgggggtcctgttaattgcacattcaagtttgaattcttgtggcgtggtggtaattccctagaagaagaagaagaagaagaagaagatagttgcagtcgtactaggttgttcttgtctgtactggtaagttcctactatt

SEQ ID NO: 175948 - DNA, 860 bp, Cannabis indica
gtgtgagtttttatcttagttgctttatgcaaccaatttttttgttgtctcaaatttttaactagttcatagatataatcagtttctttaaattatatttgagttattgtgtgttattatttgtgttttttatattgttatggaaccagttcttttcatatttatgcctcaatattttttagaattgatccccactttttttttaaaaaaaaaagattataaccggttttatgaagtattatctgttatgagatattttgttgtgaaactagttttgtttttaagatgttttagtgttttaagaaatgatttcctctttatttttaattgtaatctctttgagttattgcgttgtttgtattcattatgttatataaccggttctattttagttataattggtttgaattatatcgtgttatttgtttttattcattataacactgctatagaacaagttctactttaattataacttgtttgagttattttgtgttatttatttttattcattatgttacaaaactagttatatttcaattataacatgttttagttatttatttttattcattatgttataaaattggttctttttttaattttatctgagacatctacttctggtgacttttctagtgactttttcggtgatttttccgacagtattaactttttcatccacttgttcaataccagtgacttttcagtgacttgtccgacgtcggtgactatttcggcgaaacataatattatttaacaaatatggaatttttaccctttttttttacgaaaatatggcataaaacctatataaatgtaaaaaaaaaaattagaaaaaaactcataatcccatggta

SEQ ID NO: 175949 - DNA, 613 bp, Cannabis indica
gtaatgtatcttgatttttcttctattgtaataatatctctaacatgaacttataactttaatacgatggatgaattttctatcacgatgtatacttaactcataaaagaatgtgatatgagataaagagattacacaccaatccataaagataaagacgttagactagagagtaattgtgggtgacacttttagggtttagagataattgtatcgatcaattgtattcccaatcttatgatacgtattatgtatatgtcacatatataataatttaaagtttataaattaatccaataaaataaaaatatatcattctttatttgaaattcaaattataaaatatttatagctgaataactacaattagttatatctttatttacttaatttttaatttttaaatatcttatcctataaaaatattaaattaaataactaaaagataaatttatttattttaattaatcttattttataaaataatcataacaaatatgatgacaattatatgtcaccaacacgtgtgagacaatgtcgtgtggtcatatttcaatgcacaaaagtaatttctcaattttatattaaatataagatttattatttattttac

SEQ ID NO: 175950 - DNA, 950 bp, Cannabis indica
atgatagagaaatggtaggttgtttcttagatttccaggagatgagagattgcccaaggaagacacaatatcgtgaaattgatctttgagtgttgaggcaagctccccaatcggcatcaataaaggcctgaaaatgaggtgttggacaagatgcatagaaaaaaaaagtccttgttcaggagagcttttgaggtactgtaggactcgagttgcaacatgtaagtgtggtttccttcgtgattgaaggaattggctaagtttgttgactgcaaagcttatgtcaggtcttgtgattgtgaggtagagaagtttgctgattaagcttccgtattgagttggattttggaagagttggccatcatcattgccaagctttgtgttggcttccataggagttgatgttggttttgatccaaggcagcctgagtcttttaataattagagagtgaagggtctttgggtgatagatatgcctttggggcatcttataatttcgagtccaagtgtaagctgccaagatcttttagtttgaattgtgcatcaagggaagagatgaaggtgttcaatgatgcaatttgtagtggcaactatgatataatcaacctaaatgagtaaggccgaaaaattgtcaggttgatgtctaataaatagagagtggtcatttttgtgacagtgtgaaaccttactgtagtaaggtagtgcttagttaggcataccattatctagaggcttgtttcaagccatataagcttttctgtaatttgttgactggattctttggtattactccttttggagtgtagccttgaggtagtttcatgtaaacatcctcatgtaattttccatggaggaaggcattgttgatatccatgtgatgtagatgccagtttttaatggcagcaagggcaaatgagtttgagagtattgaatttaaccgacaggggtatatg

SEQ ID NO: 175951 - DNA, 695 bp, Cannabis indica
actttattcttaaataattaaataaatgttaattaatttcaacttatcttgaccaataaaaaaataagacaaaactatttctttcacccaaaaagactattttaccctataaacactttggcctaaaataaattcctatgtgcattttagtcataactaactaatccattgattccacaacttaattctaaactaattaggtataattccaatttcaaataatccatcttatattgtcatgacatccttgaccactccatcgagtttccacagccgcaacacccaaaaatattttattttggaaatggtatctatgatacccccatagtccgataaaatctctgtaattaataaattacactttaattattcctttaatcgcatttcactaattaattcgtaattagtttaagcaggattataatcctactctaatacccacttgatcacatatttaataaaatatgcccacttaattatcataataattttctaggatattacacgccttttccctactttctggcaatgtttttatttgaaggtatgctactatgggtgtcatccatattgggtggatgtccaccatgtttattccttttgagatagggatgctcagttctttagagaatgagcgtgtgcttagttttccttgattaccaaggcattgctgggcagtcgagtgagtgcattag

SEQ ID NO: 175952 - DNA, 717 bp, Cannabis indica
gatccgaatataaaccatatgcctaaagctcagtcattacttgctagggttctactaataggtttctgaaattcagctaagcctaaattaccaaaaattaaactcatacaagaactcaaagccacaaaatcggaaatgtaaaattcttaaacacttaacgagaaaaatcccaaaccaattagtttctcttaaaattattcacacatgtgtacatcaaattctaaataatcaaaagaacgaagaaaaatcgaaaagagaaaaaaaaaaatcaacaaagaaaaccagtaatcagatccgagactctaaatttaaaaggaagaaggagaaaaagaaaacctttccaatctttgaagtggcggtaagaggttcggcggcgtcgttttccttgttatcagagtgaagagaagatactttatcagatacagaggtacaacccatgtctaagcagccaagatccatggcagaaaactggaacttgcttgcttccacgaaaaagatgaagcgaatattgagggaattgaaaatgaagttgaaatttgaaagtgaaaattaaatgtttaatcggaatttgggggaaaaatcaattgtattgatttgataatgtatatattttgcaagtggtctcttgttattgttattgtatcggtttttttttttttgaatggtaagtactaagtagccgttacaagtctcgtccctgtttgcctccaacggtcc

SEQ ID NO: 175953 - DNA, 896 bp, Cannabis indica
ttctgatccccataggtattactgtacagttatcctttgagagaggaggatctttcaaagggtacctgataggactaggtactttttctttctgcctttggttttcttgagggcgtgagggaccttctcttgcatcgctaaatgtgggtggcacaactatgggatctacattgaggcctgtcatggccatgtcttgcttcatggaagctaaggcttcttgcatccacctattcatttctttttattcatctaactcaacatcatgcttagtaacttgttgccttagtgacacaagcttagtgtattcatcctcctcgtagcgtttagggtcgtcttcagcccttgagtactcaggatcattggtgtcaccttcttcgccctctaatcgagaggctacttcttcctttgggcgctcttgataatcaggtgtctagggaggtcattggttgtttcttgtcaataccattgcgacacaaggtttatttttgatgaaagattcctacaactctcaatgaaagtaccaaaatattgattgagattttcgacaacttttaaatcttgtattaaaaaaattaactatgagttgaaaagagtatttttatgcggtttagttgttaattaactatagtccatgagtcacttttattgatgagtaatatttgtattacttgagggtacattctctcttacaatttcagagttctatctttttttctctgtttttcaatcctcatttcctcttcattctctttgtatttatggccaagagttgggatatcttaggcgcgtgtcatcctccctttacctctaggctctcatggcctttctataggtgtaagaaatgatgttgttgcatttaaatgtgctaagctttgaagtaggagtttggtgagaca

SEQ ID NO: 175954 - DNA, 601 bp, Cannabis indica
tacaactgtctaataatgatctaacgactagaagtaaatataatcatcatagttatatatttaaagtaactattaaaattttctttaaatatatatatatatttaaaaaatacatatacaatagatattttaatgtaaaaaatagtaatttaaagatctaacacatatgatacaaatatatttcaaaacttagtagattaacgactcatttgatccaatatgttgtattgtgttggattgcattgtattgtattgatattatttatgtttgatattgacttgtattaatagtcgtgtaaaattatattatttttaccacaaatttatattttattcttatttatatagaaagcataatctaaaataaattaaacatttatttatacatatacaaattttttcttttccttcaagtttatgtaatttaagaaaagtaaactacagaagaagataaaaaatttaagtgtataaaaattaaacacgagaggttttcaaaaaaaaaaaatagaaaattaaatgtataaaaattaaacataagaggggttctcttatttaaattctataaaagtttgttgtatagtttttcatccctaaaatatat

SEQ ID NO: 175955 - DNA, 605 bp, Cannabis indica
gttacagtgttttcagtctattgtctaattgaacactttgaacacttattttcatttcagattttcttgaagtgggactctgacccacagacagttcttatattgacaaaaccaaattcaacttctgtgaaacttatgtgttcagaaatggtcatgtgtgttttgtaggctatgattcatgagttgattggtattcaagataataaagtagagttaagagcaataggcaaactccttaaggatcaacaggatgagtactttttcttacaggaggttgtgctatcatcagaacaagattcatttttcaaatcttacatgtatgaaaattttggagatattgagatgaacattaagcgattagtggatgaattcaacaagtttcaaaaagtaaccaaaatatcccgacaataggtttgtacgaggaaatttgaataataatctcatttaatatatatatatatatacaaacattttttcagtaagtttctgtgacaagaaactcttttgaactcatgaatggttcttaacctgatttggtttttttttttaataacaaattaacaaatttcattcctacggctcatacaaattttcataaaaaagaa

SEQ ID NO: 175956 - DNA, 530 bp, Cannabis indica
tcccaaaaattacaagtcaagataagtatagtcattaccaaatgaactagcttatttggcctatgtatatatatagaattctaatagaatacactgatctcatataatttaacgcaacacgtttaaggttattagacaccactggtacctaatagcaatgctcatatatatattacatgaaatacaatgttgaagttgaagagtacaatatatagcttcaattattataccactaacttaccttgataacttttgggccattttttcaggtgccaaccatggacaattgcgttgactggggcttctgcaattgcctgtagctggctgatcttacactcagtattagtcactgtagttgtatcattactgatatgcgcatggtggtacatatttttgtactcttatccaaaggtacatacatagtctattttgcttgctttccccctctcttgtcctataccttaatgaaatttgcgatgtattcattgaagatttcattattgtgttaggcatacgaggacatgattgct

SEQ ID NO: 175957 - DNA, 898 bp, Cannabis indica
attcaaattttacttggtgagaaagtgggtcctacattaataagtttaggttggtggcaatcaaagcatgcaaaacacatggtgagtaatatgtggtccacggtccaccatgatttttcagtagtaaataaatattcctgaatggtcccatcaagattttattatttatgaatataattatcttatttttagttggtcccacgtctaacatgagaattggtgtgagtttttttttagggtaaatactattttggatcctttcctttataaaagttaccaattggatcttgtgttttgttaaatgacaaaatggaccttatattttctaaaatagtacaaataagaccttgaattgattttttgtcaaaataaagtttaattataatccgatctaaaagtgctatgataaaactgtttatattttttgtatctgttcgtattgtcttcaagttggttgtattaaaaaaaaaattgtcaaaaattaagctcagggtcttatttttactattttagaaaatacaaggtctattttgtcatttaacaaaatatagatccaaactgtaacttttacaaaacacagggtccaaaataatattaacctttttatttatgagattaaatgctatttgttgtgaactacttgaggatagtttcggttgttgtggttcctggaaccaaaaaaaaaaaggggtttttttcaataatatacttaaaattgattttatttgcaaaaatactttcaacaaatttatttgcacaaataccgatgtgtcacgtcagcattaataccgaaattcaaaattattaccaaaaatgaaaaaaacttgaaaattctcgctttcagaaatttcagcgtttttcaagttttaaaaagtaactttttagttgcttttgatgt

SEQ ID NO: 175958 - DNA, 1363 bp, Cannabis indica
ttctttctgctgacaaggaagtgtaataatctacgtgtaagaacaactactgctctctgccatggatttgtaaagaagttaacactgaaaattttacaatagattcgttaaggatcaattatataatatgatgagaccacatatctcgacaatttttttttccttttgagaacctggtagtttcttagttaaaataaaagcttcatgaacgatcaggttctgtttcttcttggaaatatattttttttttaaaaaaaaaaaaaattaaagaattggaacaaaacttatcatatttcaaattgcatagaagtgtctataaacgtaagaacgcataaatttgtgatgattatttattataggctggttgtaaacagatttgagtggtttttttttttttttggtaagaggatttgagtggttttttagttattatcttttcaagaagaaaatttccaatgtgtagctatatgtacttgtttaagatatattttaataaaataagaatttcgtatgtaagcctccgtagcatagtggtagtgcgttcgcttcgtaagcgaaaggtcgcgagttcgatcctcgccgggggcttcctctcaattttgttttacgatagatatagaaaacagaaaaaattgtacttgacgttaagcaaaacataataaataaatggaaaatttacaattaaacacgttttctcaatttaatatcaataataacgtggatatttattattgagagtactgttattttgtaccgttttttattttaaacaatttcaaaaagcttgttggagcatgctaaagtgattgctgacgtcatagtcagttttcaagtcaagcctatcaaagtgtgtagtcatgatttttcaaattttgaatcattatatttttttttgacaaaaaaaaggtttgtaaacctccttttacaatctgccttattcatctacaaaaatcagtatacattgtatttacttttttttttaagttcttaactatggtgaaagctcgttcttctctttctctatctgtgtcgtctaaggcaataaatttgaagaaaaaaataaaagaaatactatctgagggtagtgatagtggagcgttcaatgtttcgacaaaaaagaaagaagaacaataatggatctaagaatggaaaatgtgcggattgaccttcgaaaaagataaaacaagtggtagaagaagatgaaattgtgtatgatattgatgattaagagattaaagttctaggtagtattatggtatctataatttttttagtttatttttgtttatctggttatttagatggttcgatagtttacagtttgctatgaatttaaatttttgttcatagtttatttaggatt

SEQ ID NO: 175959 - DNA, 830 bp, Cannabis indica
ataaggaaaatatcatatttttccaatcctatggtttctacccctgtggtggaagaagttataatttaaaaaaaaaaagaaaaaaatattacttgttgaaacaatcagttttactttaaaaatatgggtccggtcggacacgtttcatgaatcgtattataaatatatgggtcagtccattttacaaaaataggttggtgttacgaaaattatgaacaatacgcaagtgcacgtaatcaagtagtaaactcacacaagtgaggtcgaaccacagggaattgaactgaataccactaaattagacttatgattctatttggtagataaataattttgatagattttgaaataaagaaaaacaagaaaattaaagaaagcaataaaggtgtttaatcaaggatgagaaattagggaaaagaatcctgttgatttaattacccagctgttaatgctaattactattctctttctcaatgtgaatgacagattataaaaataaacctaactcttttcagatcttttaggtcctaaatcacatgttatctaatcatctctgagatagattaacatataatcagcattaagcaataatctaaatgtcacaaaggctatgcaaatactttcgtttcacatcaaaacctagtttatccaattttagcattcccaattctcacttttcagattttgaattaggatcatagaacatgtagaaggtgatcaatcttaaacatgtaattaaacacaaatatggataaattcacaatcaagaaaggagaaatagcaattatcattaaccaaaagtaatttcaatcaacattcatcatctcccc

SEQ ID NO: 175960 - DNA, 634 bp, Cannabis indica
gttaaattttaaataaataaataaaaatactaaaaaagaattcagatttagatgtgttttttagtcaattggaattgactttcatagactcaaaataataataataaaataaaatagtaagacaaatggtaatagtggaattgtattgtcattttttcaaccaatacattgcttaatatgaaaacactaattaatatgattttgattttaacatatgaatatgagtatagagttgaaaataatctcaataaaaagaataaattaaaaaaaaaaaagtaagtaaattaactgttaatacttaaatttaaacttttagtattacaaataaatatttaagtttaactttttagtagtaataatacttaagttatatttatagaacttctatacgtaagtaaatagtcaagttattattcacgtgtcattttcttattagtgtatttgaattaattttactataaaaataaaaatttaaatgacttagattaattaaaaattagtcatagtcattgacttaacacttaatgttaagtatatatagatgttttagaaatataacttaagtattttacctttaaaatttatacttaaatatttatctgtaatcaagaataaacttaaatacttataccgt

SEQ ID NO: 175961 - DNA, 1211 bp, Cannabis indica
gtatttctaactaaatcctcatagtaaattcttattttttttctttttataatttatattgactaataataaacaaaaaaaaataattactaactaaatcgcataaccatcctcaccaacaaaatcattacaatattatgatttattttaattattgttaatattattttattttaattattcaaaaaatcatatgaagtactttttttttcaaaaatatcttaataattaaatattttattaagaacaatccaaaaaaaagtacataaattattttatcaaatatctatttcagattcaaattttgattactgatgattcaaaaaataaaataaaaataatctaacaaaatgtaaactactttattaaatatctatttcagattcaaaattttatttattgataattttaaaaacaaaattcaaataaaaaaaatatatgatatttcatatttaccacttatttgggttttagttcactatatttattctttcttaatatttaaaattttaattttaattaataattttttattatagcatcttcatcttacatttccattttattaattgagtattttatagtgaatttataaatttctcatttgttaaaattaacttttttttggtttaaattctttcaatttttaatcttttgttcctataatatttagcgatatttcttctttggaatagacaatatttttaatctttatgttgagttttgattttccacattttttttttgtgtttttttttttagatcttcccatttttgaataatttctcaatttttactttttttttttatggaaaaaatttctttttatatgaatatatcaatgtttagtttaaatacagctatgccagctaattatttaagaaaaggaatataaataaataaaaatggcatttgcaatgatagttagagttcggaaaaaaaattaaaaaaaagtttagaaaagcatagttcgaaaaaaaaaatattctatttattattctaattgttacttttttttttgtattatttttctcattttacattataattattattattgtacacattaagagtctatgctcattgtactcaaaaaaataaaataaaatctaatcctcagattagaagacacggttcataaataacctaacaataataaagtcattatagtcgagggcatatttataaaattaattgagtaaattattatt

SEQ ID NO: 175962 - DNA, 678 bp, Cannabis indica
agattttccaccgtgtttttccaattgctcgttgtttttcgtctcctcgtttgatatctcactaggtttaaacaatatttctccagaaagagatggaattgaaggcataaagaacggagccttttcgggtttctttggtggttcgattggtttgtttctaacctgaaaattacagaaggaaaaaaataagaaaccaaacttggtgaattcaatattcgaaatatgtgacaatgttgaatgatgtgagtaactaccttaataatgtctaaattaatcaaactctgccactgacttttaggcaaaagagaaagagtaacaagatctgggatttgatgatcgagaatacgaaagggggcgatcgaatccttagtttgcggggcattcactgttggcttttcagaatcatcatcatcttcagattcttttgctgaagagacagatggtaacttgactctcacaatctccttcccactggcataggaatcaacattggtagcaccagagaacattgattgatttaccctgaaaaaaattctcagaaaaataaactattcgaaattgaactatagttaacaatattgtttttgttaatagacacacgcgaaaagcttaccatagataaaccccattttgatcaacatgggttgttgcaaaaatatccatatttggtgatagagc

SEQ ID NO: 175963 - DNA, 880 bp, Cannabis indica
aaaaaagaaagaaaagaaaaagtgtctctttttactataggcaaatggcatatattgtaccttaaccctgcaactaacgtatttactttctaaaagcttggatataccataaccacccaagttcctcctcttcctttcgttaatccctaggcctttttctatttaagtggatatactgtgtgggggaaaagaactttggtcaccccacttcaaaattattgacattattttgggctacctgatttagaaaagaagaaaaatgaaaccctttttataatatagttaaaagccttaacttcattaatgtgctatgcgatgcatcaataatttttctctttgtataatggcttttatttaatttctttataatcaggtaatctgaaccagagaagacagtttaatatcaggttcttggccattcaagattatgttaatgaatatatatatatgcaattatctattggcttaaaaggtattaaatttgtaacaaaacgctatctgtttatagatatgtatgaggagaatatgcacagaaatttataaagggtgtaatcaagtgcatagaagactcagaattttgtgtttttttttttcatattttttttccaaagtttccaattgagcatcttttctataaccgttgacatttaccatctttaatttttcttcttttcttttctttttcttttattgttctttaacttcactttactgtaataactatattttctagaagtaatttattttactttggaccaccaccacactgagcacaaaacacacacaccatcaatcagtttgcctttctactcatgcttacaacaaattttacaacttctctaccccatctttagaaaaaggctctaatcaagttcctttg

SEQ ID NO: 175964 - DNA, 1296 bp, Cannabis indica
attgcattagtaccatttttattattattttttaactattaatcttagaagtttacgtattttccttaagccataaaaaaataagtacatcaatattacatatttctaagggtacatcattctactcaattagtggtattgtataataattattaaattatattatgtggaatttaatatttaattatacaaataataatataatatctctgcatcatcataaaatttagtattcggtgaatagttaataattttatataacaatgattaattcaaaatatatgaaatttaataattaattacgattaaatattaatcattataacatctatagtataagttacaagggtaaaattatagtacatttaggaatattttagtaaactcctatcaattttagcattgtagagaattttttaatttaactttttttattaatcacataaattgtatttatttaaaatcacttataaatttttaaaaaaatttaaataatttaaatttaaaaaataaaagtgtactatagaaattttcctaagttatatatcactataatttttagcatttttttttttttttgtaattaagcatttatatattacagtgtataatttgacattcgaatttagaacttccaacacagttgtattttttatggctacttgaactagcctcaagtagtttggaaccctgtcgaattattgagaaatgataacgtatacttaccccgtttaatattcagggataaaaaattattctcatacttccccattctctacttaggcaagaaatttccatcccaataaaagcgggtactcaccacaggtagaatttccatagctaatggggagctacttcgtttttttttattgaaaacttaatagtaattacctggaattataattcatgtacttttctatatagagagtgattatatatctcccctaaaaagattccatctgtggggattttagatagcgagtaatatattgtaacatttggacaacattttaaaattgagaagtagttgattatttccttgtattgttttttaaaggaaaatttcattttttttatgcaattctagaacgtaacttttttgtattcaacatcaaataaatcaaaagcacgattcacatcaaccaaacaaaattgtggttaaaggcctgaccttatttctttttttgttcttgttagcaagttctgttctcggttctagctagtgtgtcttgtgtcccttgctttggtggttctgtgtgcctctttgggttttcttgggggtctgatcagtgtttt

SEQ ID NO: 175965 - DNA, 995 bp, Cannabis indica
aatttaatatttaatatacaaataataatataatatctctgcatcatcataaaatttagtattcggtgaatagttaataattttatataacaatgattaattcaaaatatatgaaatttaataattaattacgattaaatattaatcattataacatctatagtataagttacaaggtaaaattatagtacatttaggaatattttagtaaactcctatcaattttagcattgtagagaattttttaatttaactttttttataatcacataaattgtatttatttaaaatcacttataaatttttaaaaaaatttaaataatttaaatttaaaaaataaagtgtactatagaaattttcctaagttatatatcactataatttttagcatttttttttttttttgaattaagcatttatatattacagtgtataatttggctataatttggcattcgaacagtacctccacgacacaggcaccttcttataaccacttgagctaaccaaaattgagttttttctttttttttttttttaagaaaacttagtttaagaataacatggccgtagagtagtagtactgtatctatttaatttttttttttaaaaaaaaaaagaaaactatctatactaaaatctttggtccaacgtgtttgtcacctaacacctcaaattaatttaatcaataaaaaacatgaacatgtgatagtgagatgtagggccagcgcgtggatgcactgcaatatcaaacgcgtggagagaactacatcgctggatgtcaagatcacgctttacgagtcacgatacggaatgaacggatccgaaaattgagttattaagtttatttatcgtctcgttatatcgtacctttggttcagatgacgtggtatgttgctattggctatctcgtcatcctgacgattcccccaccgaatatataaaaatatttggtattatcctagttgggcttcgctagatgggtcacctttgtt

SEQ ID NO: 175966 - DNA, 624 bp, Cannabis indica
tatatatatagtttttatttttatttttaatgtatatataatataataaatagtttttagattatttgttttatttacattttaattttttttatttattttaaattattaattttttttttctattttaccttgatggaggaccccataggttcctattcccctttatcttgaatttgctggttattagacgaggatggagcggagatgggggcataaacaagtagtgagaattggaacaaaattgcattcctcgtatatatattaaccgcccaattgctatctctactcttatatctatttattatttttttgttggaaagagaatacttatatttaatttatataagattattatgagtagtactacgagtaaaatcttcgatcaaccattttgatttagttagcaaccatgttattattttttaacttgtgtccccaaaaaattaggggaacttacatatatagtaaaatgggctaaagattacatgtatactataatacgcaaaaaattacttttatactgtgttgttcttaaaatctttcttttatactgtatggaggctaaaacgaagtggaaggcttcattctcaaaacctattgtcaaaaaatgccaaaacagcc

SEQ ID NO: 175967 - DNA, 595 bp, Cannabis indica
atgatttcaaaataggatatatataatataatgtgtaatacatacacattgccttaattttttttttttttaaaaaaacttatcattgcattttttttttttttaaaaaaaaagtatcaaaaaataaactaaatatatgtatccacatttacaaagcaacacacatacaacaataaaaaaaatggcatgaataaactaaaaatatacacaataaaaatacggatgaataaaaaaactgtttagcaaaaaatattttgaaaccacttaaaaacaacaaaaaatgacacaaaaataacaaacaaatgtacatatatacagctaaaaacaattctggaataaactaaaatatataccataaaaattgcacataagctaaacaacaattgtacaataaaaaaatgcataaaaaatacaaaacaactataaaacaacaatagaacacctaaataacaacataaaaataactacagtagaacatttatctaagaatacacttggcaccaagaaattttatctaatagagaagttatactaaatggagttatactgaaaaaaaaaaaatcaaaacaccaaaaatatcaatttacaacaatat

SEQ ID NO: 175968 - DNA, 729 bp, Cannabis indica
aaccaaaacacaaaaaataaaaaattaatcaataaataggaaaaacttcattcatggaaaacaatcaaaaaaaccagtacttttggcacaagctattgcgtatctggagaatttttagcattttaacattgctgtcaaactagtaagtgtagcactcaaaccaaaccagcagattctacttcgtggcaaccggagaacaaattaaaaatgaatgtcgatgcggctattcttcaaggagtaaaaattgatattggtgtaatttattcgtgattccaatggacatgttttagctacaatgtcaaaaccagcactaggaaattttaagtcccaggaaatggaggctaaagcaatgttcggtcttcgttgggctgagcaattaaattgcatcttcaactagactatgtgattgtttgatgcttgtcaatgcgttaaatggaagaacatcacaatatatattctggatttatgatttggtattcaagtatgtttcacattatttatttcatattagacggtgctaactaaccagcttattatggattaattggttaagcaagctttattattggatagtaattgtatttagttagaagatatgccttttactattttttatgtcgttgtaaatgaattttaatttataataacagatttttttaaaaaagtaaggtatatatgtgaactaaatatgcaacagatattaggattagtttgttatatttcgtgatt

SEQ ID NO: 175969 - DNA, 577 bp, Cannabis indica
ttgatgactgccctacaaagtaatacgagtgtttccagcatactttgtcctcattcgcatgcttcttgggaaaacttctcaggaggtcaccgatctttaaattttcttaagttaagcacacttaactatggtagcccattacgaaagaattccatagttaagcgtggatgacctggaataatttcaggatgagtgacctcgtggaaataatttgttgatatagcattaacataaatgtataaacttgactttaaatttattccaataatataataaatttgtatttataatcaacataatcaatcatgatgtctaaaaaatatgatgctctgcaaataatattttagagtaagaacacacaaaaataaataaaaaaaagttaacaactttttatagtcatcaatatatttttaatcttgaatagcttaaaataaaatcaattgtatcattataaaacacttattttgattttttttactatgtaacaatagccacatgcaaaatctaataaagtcatagtaatttttagtgacaagtttttagttacaacataatttttttcgtgactaaatgtgac

SEQ ID NO: 175970 - DNA, 572 bp, Cannabis indica
gttcctttctctacatcatgacactactcaaacaaaaactagtggtactactactactacagtactactttcaaataaacgtaagtctccatcgccggcgccggcatcgacggttgaggaagacagtcatgaattagggttgtcactgaggctacaatcgagcactacaagtactactactcagaataagggagaacataataataagaaagatcaagaagagatgctcgatcatggtggttttacaagttataataacagcaccagcaacaacaacaacaacaacacgttattggcaatgcaaaacaagttgcttcaaagaactagtagtagtgctgatcataatcatcataataatcaacaccaaattgctgggataactaaccacgtcaccaatggtaacccacctaacagaaaggctagggtttctgtaagagcaagatgtgaagctgccacagtgagttttttattgttattattagctaattatgttaatattgtgttttgatcttaaaatttaaattatttcctatgcatgtgaaagaactaattgtacttttaattaactaata

SEQ ID NO: 175971 - DNA, 1029 bp, Cannabis indica
atataattacaatatttgtctacatacatatacaatacaatataatacatatacatatatatacaattacaaaatacgaatacatacataaaacatttaataaaacacaaaatacatacatacatactattaaaatttagttttttaccttattattgaaatccaactaccaataaaaaattcggccaccatgcacaaccacaagaatacaatattaacaatataaataaaaccctaaaaaatattacaaaataaaaaataaagtaatttacatcaataaaatttttagagattaaaattatatcgtaatagacgttaagattcaatgatttctccaccaaaatcggcggtcggagctacaaccactacaaccaccacctctaagctcagtttaccctaaaaaaccaaacaaaagatgaaaaactccagagatatgtttttgggtatgaaaaatgcaagatttaatagaatgggtaaaatggatgaaaaatgaagaaatggaaggaagaaggggtggttgggcgagggttttgtgggtttaagaggaagaagggttgctagttattttggggtttgagaaagacgatagctgaagagggttatataaagacatatggcaacggttattacaaaataatcgacgccatatgtgtttttttcattgaaattaaaaaaatcaacctacgaagtcggtcattacaaaataattgactccatagggtttttcattaaaattagaaaaaattatacacctacggagttagctataaaacattatcgctcgccgcaccaggaagcttactacccaaaaagttcctacatgcgccttaacatggtccagataatgtcgaggcacgctcccaaaaatttagatttttagtatttcataaattggaaacgggccacgacatgggttttatcatgtcacggcccgcatgcttaaaattgacttgattaggatttttgaaccctagttcaaaattcaaggggttttccattaggcaactttggaggcaaaaaaattagggt

SEQ ID NO: 175972 - DNA, 798 bp, Cannabis indica
  modified_base (722)..(722): a, c, t, g, unknown or other
aaaatacggtttcacggaattttaaatatttttacgatttttttgattttatttacataaaatacggtctttttatgttgaaattttgttcatttgttgttaattttttgttatatgtatgttatttttttgttgttattttgatgttacttttatgttgttttcttgttaattttatgttgttttcgtgttattttttgaaaaaccgtaaaaatgtaaaaaaaaaaacattctttgaacgtaaaaatataaatattttacaaaaaatggtgcattatgtaattattcctataaattttcatggttttttacaaaaatattagattttagatgaaaatttataattttactcacattaatttttttacaaaaatactattctttttataaaacaaacgtaaaacaacaaaagagaacaattaaaaataacagtggaataactaaaaaataatagtagaacaatagtgaaaatttaacatagtacgcagtatttttaaaaaaaattccgtcccataataaaaaagaaaaaaagcaaaaaattttgtggtataaaaaccccattttttattgcacctcttaaaacaaaaagattggtaattggtataccaacctaattctaaatttttctttttcttaatataataatatgtatttgaactagggatatatacggagcgcaaacattagcgggaagtgctccctcattttatttccgctaaagnttttaatcccatcccccgcatatttctcattgtggatgggggtggaaaaatctcctaacggggacggggacgaagt

SEQ ID NO: 175973 - DNA, 705 bp, Cannabis indica
gattgggctgggcttacattttccattttgtaccaagtgggctgttcttgaatccaaacattcgacccaccctatttctgagaaatttacatctctcttttttttttatatatatatactaggtgagtttacacgtgcaattacgtgttaaactgttcatttgattttttttatttttatgtataattaattgtgataaaatataaaatatgaaattaagatttaatattttaaaataaagtaaaaactgtaaatatatattatattatacaataataattacaagctaattaaagctaagcattttaagtacatataatagtatcctatataagatgcttattatttaatatattttacattgtatttataatatttgtacataatttatatatttatttatagtattttgtagatacttcaagtatcattagtagtatttgaaatgctcgactcagcatcactttcgagcagtgagataatgttgtatttggtttgacttccgccactatatgcatccgctcttgcttttaagtaaataaaaaatttactcgttgtaaaaatccttgcaaccgataatatgttttgatcctgttattaacaacatcattgagaaagatagtaatattaatatatgctaatgaagtgaatgagtttaagtagtagaatttacatttgagatgtgaataagctcttgtgcggtac

SEQ ID NO: 175974 - DNA, 542 bp, Cannabis indica
gtagaggccgcccagcagtgatactctaaattagcaccaagaaaattcagttcttggaactcttttatgttaaagtttcacgcatagttctgctcttctaggcaacttaagcctataaatacgacccacacttaagcttttaggaggatcgagaatacgaagatcttacgatttagattgagagttagagaaagaaagagaatgagaggtagagagagagaggtactgagaaaagagaagattgaggttgggttttgtatgaaaatcttctgcagatgaagaagattcttgggtaagagtatgagagttgaaacactttgagagaactcaacagagaagtggtgttccagaattggagtagagccatagatcacatcgatctataggatttgaactagtatatatcttagtgttgatttctttattttctacattttgtttgttttttttttggttttacctactctattcatccctatttttgtctgattattattcgagatatattaaccttgtcagtgctaattgtttgattgtttaaa

SEQ ID NO: 175975 - DNA, 784 bp, Cannabis indica
acactaataatgtgtgatcaacacatgagttacaagtgacaacaaattgtaactcctctccaagttacaacatgtaggttacaaaagtgtaggttataaaatcataggttacacatttatttaccatacacttaatatatattattcacatatatttatcacattttaatctactttattattatattataaaataatataacaactatatatatatatttcctggtaaaatatattgtgatatattatatatttattgaaactgccttattccaggaaaggattgaatataaaatatgacattattaagctaatgtcaaaagaatgactagatgtgtatatatatattatgtataaatttattttaattttgttggttgtttactaaaccggtttcagccaggttgaggtaacatatagcataggtttttcatacatttgttttgtaatcacaattaaaattataattaaatagaacaaataaaagtgctttgtttgtttctactcataaaacgacaagagtagtcgtttttaagtaagaaaagctgataaattaacctatattattagtagttattttcaagatacgtagtatttgctttgtccttcgataagggttaaaataaataatcaagtattttatacaaaataatgtattgcttatgccttctgctattgtgatcactttcactgaaaattacactattaatatggtttcctgggtgaattcaggaaattttgtttcagcaaaaattagaagggaaagtaaatataaaaattaatt

SEQ ID NO: 175976 - DNA, 566 bp, Cannabis indica
atgtcgatacccagaaaggactcaaatctgaacatttgagctacccctagtcaaatggttacttcttagacatgggtttaatctgtttctgataataatttacctgatacaccgagtttaaggcaagtaaagaagattcctgggatataattccacttgcatggtgaagaagtaggcttctcagccatggaagtgcacataccaagactgcacccctgagttgagtaataaaagcagttaaattattatgaccaaataggctgttatattatgcaagtgatacttgataagggataatatgagagacggccattatatttaaaatcatttaagagtagaacgtaggttaagttcttacttcgactgaataatagatatgagagattgtaatagcttcaaaacatctgatggattcaactgtgagattgattttgttataacctgaaatcagagattgtgttatgagtatttacaaggcaataatttgataacaaccactaatgttaattagcctaagacatgaagagatagataccttctcatcttgggtaaataagcaatccaac

SEQ ID NO: 175977 - DNA, 1037 bp, Cannabis indica
attaggaatcattattctacacatttttcctctaatctttgtttttcttccctacgatgatatgtatgagtttatatgtgctgtcagatcccattaacacactgcactttaaagacatcatattatgtgtttctggcatgaattgtgttctctgtgttcaaaaaatatatgtattatatttttatatttatatgttttatattttcttgtgataagttcaagtctaaatgttctgcaggatgatgctcatatcttttgcagagagtcccaggtgagttgaattgaaatagcgtatcaagaatcatttataagctttgtggtgctcatttttattttacttgtttgtttctcttttcagataaaggaagaagtgaggggtgttttagaatttatcaagtattgttacaatatttttggcttcactttcgatttgaagctatcaacggtatgttatcttatccttgagtgaactatgtggacttattcatatatccatttttacagcaaatactggttaggaatgtggtttgctcccacaacaaggttttaggttggagtccctcttgggtacccacatagcaatcgttatattttcttaatctccaaagataaaccactaataccttcctcgttggcatgcactggggaaacactctagcaaacattgtaggtttatgtggtcatcttaaattcaaaaaaaaaaaaaaaagaaaaaaaagagaaatatagtttgccatttccactaccctgcatcttcctcttctcttttttccactattaactttttccacctgtgcccgggattctattgtcttggctggaataaaatcaaagtgctagaatcattctatattcaatgttcttatatttgttttgattttaaaaaaccagtatacacaatatctgtattgttttctgctatagaggccagagaaatacctgggagaattggctacatgggagaaagccgaggctgctcttacagaagcacttaatgagtttggcaagccttggcaggtagttcctctctctctctc

SEQ ID NO: 175978 - DNA, 414 bp, Cannabis indica
aatatttttttttcaatatttttttcatggaggtgtttgttatacttataacatcatctctgtaaatttttgaaaaatttcgaatagtttatagtgccgaaaaatacatttagtaataacgttttagttataacatatttttttatgactaaatgtaacttttaatcataaaaaaaatatttatgactaaaatatagctcttagatataaattgtcgccaatttagttttagtcacaacaagtattgtgactgaaaatacatttagtcacaataaattataatttttatcactaatacttttagccacaaactttttagttacatacaaaaataataatttatatattaattataattttttaatttaagtaattggaagccaattcaatttaagttgtccgtatagataaatg

SEQ ID NO: 175979 - DNA, 804 bp, Cannabis indica
aatttaataattaataatcaatacatatgaagggaaatataatagaagtccattactaattttttttttttaaaaaaaaaaaaaaatatatcacaatctaactttattcatgtcatctgttcaaatgataatagaattaaattgagttttactaacaaaaataacacaaaagagtgaagaataaaataaacaaaatggaagagtatgaattactgtaaattctatttgtacatatattgtgccttacttgcagaaatacattgtaatgaccgctttagtaaattggattagaaaaggaaattagcactaatttctgttattttataattatttatgaattaattatttatggaccccaatatttagaaataaatattagagttataatttctcaattttggagattttattaaactctaggggtattatttagcttatatgtgaaatatgcaatttttgtaatttttgcttggcgacaacggaaaatgcgatggatggctagtttgatcacatgggtaagtttagaaccttatttcttagtggaaaatattttagagaaaataaattatcgagttcgaccgggttatggaatttgaccattttacccctagcttttgaaaaaccttagttttgggttaaagggtaattttgtcttttggtttagtttggtttaggtggctgccttattattttacacctagccaagtaatattcagcatgagttaattggggaaagtccttttcatttgaggaaaaattagaaaattagaaaatagagttatctcttgaactctctctctcttt

SEQ ID NO: 175980 - DNA, 883 bp, Cannabis indica
cgtttatttatctctctacaagtaacaacttcaggtcctctaatataaaaatgaaagtattttttattttattttttaattaaaaaattaaagcaagtaaaaagttcaaaaattttaaaatagaattcatgtatgatgtatgagtaatattcattaaaagtgtaatggggcaattaattatttgtaaagtgtgagagtttatcttaagtaccatctccatacaattataagataaagttttaatacagaaatatgttagataattacacttaactattacaaattcaataccatagtcatatctataatcaaatacgatatttttcgttttcgtaataaaactcttttaaaatcttaattttaactactaaaaacacactgttatacatagagaaacataacaagttattttttattctttttaaatgaagaatatatataatatttcaatttttataaaacaacaaaaattgatcagaagttagagcttatataagttctaagttcttaatgtaccttttcctacaaaaaaaaaaaaaaaaaacgttcttaatgtacctttgttgctttaataatatagtatcaattctaaattctatgcttttttcacttgtttattgtattgcatttgacttgtgtatatttgtagtaaaaacattaaaattgattttggaccaattattctcaaataaataatttagttttataaagataaataataatttactttacatttaaaaaaaaaaagttttttttttcttttactaaaaaaaaaaaaaattaatttaatttatttttatataaaaatactagttattgttcatttttagagtaggaaggttgggccggtgcccaaggctttcagcccaagccttaaaggtct

SEQ ID NO: 175981 - DNA, 829 bp, Cannabis indica
aacaaaatttgacaatatttctccaatgcaatatctaatgcaataggagtaaattaactattttttataaaataatgtattaaaaaagtcaatacatgcattaattttttattaaaagtgcataaaaacttaaaatgttaaaagacgtactaataaatatcaaaagagtaatatttattgaggtataaaatttaggagcatttttattggacactaatggtgcctagcactcttaagacgtgttgctttgcgattggctaacgatactccataaaagctattatattaaactatacgagactcgatactaaattagaccaataactatattgacacgtagagtgtgcttggcaccactggtaccttttagcatttctcaaaatttagcttatgatatattttatattaaatttgacacaactttaaatcatattatataccactattggaatttaattttatgaacatggactaaaaaaattacattccattggagatgctctaatctcaatgtcgaaaaattttacttactttttgtctatttcgacatctatgataatttttagtttaattttttttttcataatcacatagattatagttcttcaagataatttgtaaaattttgaaaaaaaaaataaaattaaacgtgctgaaaataaggttcaattagtttgttgcatgcgtaactcttttatttcatatgcgtataaaatagattgtttaagcattattttctatatagtaattatttcatgtttctaaaaaattatacatgatattttaataatcataacgtaaacgattataaaaaaaattgaaattaaat

SEQ ID NO: 175982 - DNA, 520 bp, Cannabis indica
actattgctatcatgttttcttaactttttattaccattagatcaataatcaagggttagaaaagtatccctactatacgggacaaaaccaaggtctctaaccatagacatttcctatatagatataaagaaaattgaaaaattgaaaatttatatttataaatctaaataaaaaattaaaagtgaaagaattaaggaaagaattagatagatataccataaactgtcatatactaaactactactttttagtgtgtttacgtattcgagatttcgtaaaggaagttcaagttgaattgtcaaggtcaggtgtcaactcttttggtttggcagactataataatgctcagtgacatatttgaattcattactcctattggtgctattagggttagatatgtttgaaaaatttataaaaggcaataataaagctattttaaggagaatttgtagtaaaataaaaaaaaaaaaatcaaaaaagtgagaaaattaagaataaaatttaaagaataaaaaaaat

SEQ ID NO: 175983 - DNA, 1102 bp, Cannabis indica
acatgattgttgcaaaaagagtcaagattgttgctaggagcttgggtctcttggagattgaggatttagttttaggagatacatgtatcaaaatttattagtttctttcacgaatattttgtttcttatactaccatggatgtaaacttgtaatggcactctttattactttgaataagaatattttttattgtaataataattttttattaatagaaagaaaaaatattattgtaaatcatgtaaaaagtagtattatgaaaattaaaagaataatgacgattttaatcttatgaactagataaaatgatacacaaaaagagagtataatagtaatatatttaataatgcttacattgtaagtgacaaaacatattatgaatgctaaagtaataataatattttaatcttataaaagtaataacataatacacaataagtattattgtagattattcgataatactttcactataagttaaaaaatgtattatgaaaataaataaagataatgcttatttaaatatattaatgtattaaaataatacttaaaaagtattataaaagagttttcaataatactttagtgtaagtcctaaaatatattataaaaaatgcatgacttttaataacataactttccttaatacattaaaagtatgatggtaaggtttttataataccttttttgtattatagaaagctttatttcctgtagtggatattactaaatacttgtctgtggtctcccatgattacatctaatgagcatttgtgatcctggacatacttcctcactttgcatgttgttgtattcttgaattttgatgctctcagtaaccagttacagttatcatcaatacatgtaacaagatactctcttggttctgatctctttgttttgaatagaaagttgtgcaatatagcataaaagcatagttcacatttcaacatctttttatctttgtaaatttgcccttctttaattttgaaaacgctatgatcagttattatctctttctcttcttcatcccttttcttcttgtgttcttatgttttctcaattataaaatcagcaacattgtcagctacttgaaatatg

SEQ ID NO: 175984 - DNA, 1370 bp, Cannabis indica
gaatctgatgtaaacttaaaaaaaagagttttttagaaaaatataactaattaatgataaaaacgtcatctataaaaagtattagacatgagcacccgtactgtacccaataataatgctcttaccaactagtgcatgtataatagcaatgctcttatcatattcactaaaattataccaaaaataagtttgttttacattcccattccaagaacctaaacctcataccaaacactccaatatcaaactcttattttctttgtatttaatttttatataattaaaattaaaaggaaacttttttttttgaaaccaaattaaaaggcaattttaacatttaaatatccattttaataaaatagtatcataaattattctcttaattaatagtggtagcttcattagttagtttagaaacattttgatgataacatttcttagttatgttcattttttttattaatatatattaacattattcgaattatgattctcaattattatatgtaaaagttttgttgaaataaggatatatatatacatacatatatatatatataacatctatatacccaaatgtttacctaagttacaaatcaaagaatagttctaacagaagtatatacatgatgtaacatatatttatagttttcacttttacatttaagaaaaacaaagtagtgtacttaatattctaatattatacacacaagcttataggatagatcttattatttaccaaaacagaaaagaagaaggaaaaaagggaccattgtgaaagagagagagagagctaaataaaaaataattatatataagtagcattggaattaataataataatggagattattggagagttaatcaagtcgttggaagtcattttcaagctcaataataattctaaagtttattaatttttagggcaaaaacaaaatgaagaaaatggaccaaaatccaaattgtacgatcgatttgtgttgaaaccttatttgaacactattaatcactagtgtttaaatagtatcgaataaatgaatagaagaaaaaaagttatggctctgcatggcctctgcgatgtgggcctttgatcatgatcgaccaaaatagactactagggatctattaatgtacacatatatatgtatatataggctgttattatatatatatatatatattgctgttgtttgaatgtgcatgtaatgaatcaattctgatgcctcaattatgcatgtccaaagttactttttaggtacatgttatatgatattacaaatcttaacaaattcacttgttaaagttagccctaacttccatttgaaaaaaattatccttaaattcacaatgtaaatctttaagttgaatag

SEQ ID NO: 175985 - DNA, 632 bp, Cannabis indica
attaattgaagcacaaagtcatgatcgtgtgattccattaaggacatatatacaacatcgatatcgatcaattccttttatctttattgaaaggaatgtttcttatcttgggagaaagttccacatataaaataactaaaacagtattagtagtggctagggatatattggattcattatgaaataatattatatatatttatattttataacatccccaaataagtttttaaataaatatatattttgtatttatgtatcatgcatgcatgtcattataagtttaatgcatgaaagtgtaacatttgtaaaattattattcaacaaaatattcgttagggacatattcgtatttcccatcttagatatttcaaataattatttatatagtaaatttaacattattggtaagcttaaattaagaaaaaaaaaaaaaaaaaaccttttgtctcactgttgggatgttattgtgaatttattgaatatggatttcaaaaaaaaaaaaaataataaaataagatgaatatgtttggtagaaaataagttctagctggtagattagcttagaggactctcactctcatcaggtgctttataatagctaaaacgactaagaaaaaaataactaaact

SEQ ID NO: 175986 - DNA, 709 bp, Cannabis indica
caacggaacatgaacagtcaactcgcagatgtggaagacgcatacgttgatggacttgataactgtcgttcatttattaatgttaacgttgcttgggtttaattattgcaattcaatatgtaaataatggattaacaatgaatgtgatccttgtgtaaccgattggacacctgctttgtatataaaggggtgatccaccatgaaatggcacctacgaatcccttgctacagtggactaagcagatcataatctgactgaaccactataattctctgtcttattgttattttccagctttcgttgattgtttcccattcccagtcgagtactcgccattctaggttgaatactcgcacttgtctttacacataaaattcttcttgttattaataatacaatataatttggtgttgcgaaattcactcgacaacaatgaggatgctgggatctcatcccccgtttgtgaccatgtcaaattaaatggccgctttaaatttggcatttaagcaattgaaggcaatgtccctagttgattcttaacttcagtgtgggcccaacatcaaatcaacctggctgttgggccatatttccaaggattaaggtttatggttttctccctaagattacttgaatcactgttattttttatgacagtaagaatgccagaaacactttttgctgaatcttatttgaaatagcctaggctga

SEQ ID NO: 175987 - DNA, 803 bp, Cannabis indica
taggtagataataaacatttcgactattttaaagttgtttcctgctgttggtgcaaaatttgctaaggaaaagatttgagaaatggaaaacttcacatcaagattttgctaggaggtgggcgcacacgttggagagagtgaccatgagtatggcaccattggtattttccttggtaccctgtctggttggcggtgttggagcgtttgttggtgtttttgtatggttgttgtgggcgatagttggggttggctggtgaattttgattgtagttggtgtttaatggtgggtaagaggaacgagcggtggttgggtgggcggaagcagggagggaaggggatgggttttgagatttaataacaagctctctcttcagcaatttttcatgaaactcatcaaaactaataggtgtatcacaagcatgaaccgcatcaatgactccttgatagcttgagtcaagattgtcaagaactttatcagtaatgtcttctggagccatgggttcaccaaggatggctagttggtcaatgcacatctttatagcattcatgtattttgtgattgattgagatcccttggtaatgcccttcaaattgagtcttacagatttgagatggccacaagattgtttggcaaaagtgttggcaagcgtaacccaagcagcattgcaagtttctgagtgggagatgaggggaataagggtgggttccaaggtgtgccaataagagctccaagaggagcttgtcttgccaaaaccgaaagttgcataggcatgatttgtggtggtgatgtgttgagaaattat

SEQ ID NO: 175988 - DNA, 760 bp, Cannabis indica
acattgagcgaggggggcacgcgacccccctagaaaaaaaaaaaatacgagtaaaaaaaatgtatatgtattttaattagttacaacatatatttgtattaaaaaatgatatttatagacataatagtaaccttggtgtaatggttaaggtagttagggctcgtttggaacgccgtattaggtcgtattgtattgtattgtattatattgaattgtattttatgtaatatttttatttaaaactatatgtggtattaacttttatggacacttaaatatataatgttttagtataaattaaagtttaacatagtattatataaaaatatgatatatataatccaatttaatataatacaatacaatacgacctaatacgacgttccaaacgagcccttagtgaataggttagagggtaaaggttcaaaccccactaactacactttatattttctttttaaatttatttacgccccccctcactttaaattctgggtccgccactgttcatagtctctaaattaatcttcccattagggtaaaaaaaacaaggagggatgcacttaactttgattagctagtacttttcatgattaaaatattaataaatcaataaaaagtgtattgatatataaaaaaaaaaattctaagaactaactagttagacaatatcttaagaggaaagtaatatttaaaaaaagttccaattataaaatttactaataaaactatatatcatatcctgaagctaagatataca

SEQ ID NO: 175989 - DNA, 474 bp, Cannabis indica
cttttgcttatttttttttttttgttaattgaaaaaaaaacaaatatatttttaaaaaacacatataattttgaaaaaaatatatatatatatactagaacgtgtcataaaaattatataatgttcataaaaatgtgttaacaggtgcaatttatagcatttggctaaactaaaatttgtgtataaatgagaaaaagtgtatgaattcgagttgtatatataggttctgttcgggaaccattttgtttctttttttaaaaaaaattttacttaacaaaattttgtagtttcttcatgatttttgattaattaatcaaaaaactgattttttaatggttaccgaacactactatagttgtattaaagagagcttcaaaagtagatttaatcttgtacaggaaagaaaagtgtctagcatagataaaattgttcttaaaaatgtaaaagaattgtaagtttctcttttgaagagga

SEQ ID NO: 175990 - DNA, 717 bp, Cannabis indica
cctctacggagaggtttctatgcttaagaatctcagtggtgactatctatcatatccatgatttaagtcttctgtgatatctttaaaatagtctattctgtccctgcactatgttcgttgtatatggtggtaaatctcaaatttggtgtaggtttattcttcagataaagtcagaagaagaactaaaagaaaataaaaaagttacacttattatgctaacaaattcaattagcatataatgttcgtgcagataatatctgattcttctaaaccagattgaaagtgtgaagtcatattttgaacacaacttgcagtgcctcagtacatgtaggcagacactcttatggcaagagagtagtgactgtaaaatgagcctttattttatgtattaactatattatgacacccaccttcaaaacagcatagttttcccatcctgctaaagcatatgtataggtgtgtgtgtgtgtttaatgtattgcagatatatcaaactatcaccagtccctcctagtttttcaaatatatgaagttcgaaacatatgtttaatactgaattgttatgctttgttaacatcttctttaagtgaaatagagcttgttacatctcttaagtgaaatagagtatgtacgtttcaacatttatttggttgtaggtactttgattaccttttctatattgatttttgaggcatctatggctagaccacgtgctac

SEQ ID NO: 175991 - DNA, 576 bp, Cannabis indica
accttttaaaaccttgtatgaattgtttgaattttaatatgtttatgagaaattaagcccttgagctgcttaattaaagggtttaatagaaaaaaagtaaagacttaagtagataatcaattcattaggttaaatgggatttaacaaacattattatgttcttcttgcttattctgattacatgaaggttgagcaaaaaccagtactgtttgtttgatacaatttctcacatggggcacttttattatgtgatgggtttctagtatacacatatgattatcctcattcttgaaattccaagtattagtccaattctggtctaacttgatgtgaaaaattcagaagagtttaaatatacacaagggaaaggactatggctgaggcagtgattagtgacactgctgggaaaaagcttattgaaattgatattagttcagacacggtatgcccatggtgctttgtgggcaaaaaaaatcttgacaaagctattgctgcatctaaggatcagtatgactttgaggtcagtcttgtatactgcaaccaagctgttcttcttcatataaactctctctctct

SEQ ID NO: 175992 - DNA, 565 bp, Cannabis indica
aaattttagttttgagaactaattacaaataaagtaaaattattggagatttgactgcaattaatccttaatatattaaattattaatttcttttcaatcctcatcacattttattattaggtttggcgtgtataacgctattaacgcaagaacacacaatttttgacattttggtgagaggagacctattaagtccataatccatgttcttggaataatgaaagtctgcctcgactttaattttctcttttagaattttagtgctgaatgttttttactttattggtgttatttagcatttttctttatttaaataatgctcggcatttattaaaaaatagagtaattagctgtgattttttttttatatatatatatattttaatttttttatacatttaattttttttattgtttagcaaaatattttaggtttatttttcttcataaatttgaagcgtcagtaaaatttcgtagccaaaacagtattactttaattagtatttaagggtgatatctaactcatatctcaaaatttacaaagaaatgtaaacaaaaaaaaaa

SEQ ID NO: 175993 - DNA, 531 bp, Cannabis indica
tttatatatatatatatatatataataaaaaaatatttgatattgttctctacttcatttctaattgaacatatttttaattagtcacttttatttttttttaaattattatttttgtgtaatttttattatttttttagtttatgtgtttcaaaattcttttatatttattgcaataattttacaaatatttttatatgttcaattagtagttcttgtacggtgtcgtagtgtcatttataaattttaattgtgttaatgcaatatgttaatatttaataaatttattttgaagtttgattgttgttaagttgtttttgtgttgataattagttatttttgcataactattgcattgaaaaaaaaaataaccttatacgcccaagctcacttcgtccaaactgccatgtggcagccgcagagtccctactatattctgacattgtagttctgtgcacgacagtatacggctttactctctccactcgtgtgtgaatctcactctcctattctgttcacatgtgtatctca

SEQ ID NO: 175994 - DNA, 816 bp, Cannabis indica
ttgttgtatttgtaatcagcatacatgcctatgcttatgaaaaaagtgaaatggaggagatctctttggtcgcactctctggatgtatttggttgcaggcttttgtaatgatattggaaactaagtaagtttctttctattaattatacttgttaattcaaatttgactctttatcaagccttcttgttactttatcttataaacactgaatgatattcttagtccagtattctatttaaagaatatatcgatgctttatccaatatttggcatgctaggattctaatgttctgacttgacaacagcttagaactaaagaagaaaattctatgttatttatttcatcccgatgctttgagtttttctttgatccttgcagctcttttactatactacaacatcttgctatatgggggaatttgattggcttttatatcatcaactcgatcttcagtgccatcccatcatcagggatgtatacaattatgtttcgcttgtgcagacaaccgtcttattggataactttgattgtaagtttttcttaaccatataatttggacttgcataattttggaaatggggtggcccatctcttcgtaacatctgggttttcaatggtgatgaaaataggatagtttatttttccttttttttgttttgccttgaggattggaaatcccagatagtcttctcggaggcgatctatccgactacttagaaattagaatggctttggtactctaatttttattttgctttgaaacacaaaccatgaaccaataaattggtagtcaactatagagacctagtttctt

SEQ ID NO: 175995 - DNA, 749 bp, Cannabis indica
aaaaaaaaaaaaaacaatcaaactacaataaataaaatcctaaactaaaagcttttgttttcttttctctcaatgacactcttcattacttttttcttttatttagttaagatcatcattatattaatttcttttctctcaatctcccactgtcttatttttttctctattcataattatcattattcatactctttgtttgtatatttctcgcccactaaatcttggcataatctatcaacactacattagtttcatatacaattagaatttttaatttttgttactttatttccatctggtaaaatagttgtatctttaaattttctttgtatgatatatatgttatatgtatttgaagtagtgtatcaatgatcttggatttcataatgtttttttttttattattattattattattattattattattttatgaatttgatttgtgggaaaaaatatttttcaatgatctgaattattgtttctataaaaatattggttcccatgcatattccttctgtaaaatatatattattattattttatggatttatctttcttttgacttacgcgagaatctattaatattgccgattaaaaattttttttcttagatattttcgaggaataaattactatccccgcctttacaaaaaaggtttattctaataagagacgttttaactatttttattttcaaacaatgtgatgtaaaatgggtgtgagaaagggactttcagttatag

SEQ ID NO: 175996 - DNA, 889 bp, Cannabis indica
ataattattttagctttttttttttaaatgttattatgtcattgattgatctttttatttactaagagactatcgaaatgacatgattttgaagtattattattacaataatataaaatctttacatattttcattacagcaatcacatataattgattaaacttttatctacagaaaaaaaaatagattaaagctctatcacagtatgtgttttctccatctattacagtctaatacgatcactaattaaggaggtgttcttagtgctatgtattttaataatatactaggtaatattgctcagttaatttaaggcttgttccgtttaaaaaaaaaaataaaaaatttaaaggacttgttcggtaactattttagttttttgtttttctttattcaccttaacaaaattttataatttgttcttagtttctcattaattaaacagaaaactgattttttaatggttacccaacactactttaattttttataataatataataaaaaataattatttattaatataataaatatttacttgaaaaaaataattctaatatataataaaaataaaattatattatttaattacattttttatttatcaaaagataaaaccccataaaataaaatgaaaaggaaacttaagtctattcacaattttattaattattattatttgaaattgtttattaagaagtataaaatttattatatataatattcactacaaaaaattactacttttagcataacatacattttttgtgactaaatgtgatttttagtcacaacaaaaagttattgtgactaaaatatagtatttagttacaatttgtcactaatttagttttagtgacaacaaatattgagactaaaaactcattt

SEQ ID NO: 175997 - DNA, 870 bp, Cannabis indica
atttaacacagagaaaatatgattcaaacagtctgttgcaacttgcacgttttttattttatacgcatgtgaaagacagtttgagttctatttctagcgtgttaaatttttataaatttctcaaaattttatcgagtatcctatttgattaaacaaaaaattagactccttctaagaagtgcattacaaaatttttcaaaaaaaatacattttgaaaatttaataaagtttttttttttttttgatgcagaaaatttaataaagttagtcaagtaaatattggaggaggcatttgctattatgagccgcgtgggtgctccgtaaggaatttctgtgtttttttttttggaaagaaagaaagaattttaagttagaagttagaagagtgagagaagtcaattaataagaagaataaattttgggcagcttgggctgcacgtactctcagtttgggcagtttgggcagaagttgacgtggatccatctacttagtcttatagtggacccactttcccattaatagaataaatggcaactcaaaattttaacttaatcacccttcctaatcaaacttatttttctaaaaaaaaaaataataaatcaaactttatttttttttttttttgtgtttttttaataattctcttttgttctaatattttcttcttttgaaaacttcaaaattttatagattaacctaaataataataataataataataaaaaatttgcttcacaaagacctttgtaaaacttttcaccaaaaataaaataaaaattacctcaactatatctatgagttcatttttttaaaactttttccttatatattatgagtgaaagttgcaatatcatgatcaatttaactaa

SEQ ID NO: 175998 - DNA, 666 bp, Cannabis indica
cactgtgttgacaacacaataaacatgatcaagtatgtgaaaaggggtttggatgaatttataaatcaaatagacaagcaattgattaagtgaaccaaaacatacacaagtgaatgaaaaattacttctgttactttattgatattgaataatctggattacattgaaacagagttttatttagggcataaaacccaacaatatacccctctaataaccgacgccataagggtatatatggcgtcggttgtttataaccctttagtgtcgccctaatcagcgtcggtagcgaattttgctaaaaccgacgctgaaagggctaaaaaatctcttctaaaggggtttttgtagtagtgattgcatctacacttttttagcattttatgtggagcgtataatctctactccattaagtttctttaggcaaccaaataggcttgtttcgcactaccatgaatcgaatttatttacggtcaaaataggttatcacttggcagcgtatgtagataaacttgagtgctcttcttcctctacaagccatgaagcttggtgaaaaactttttggtctctacatttgccatctaaaaattaaaaaaaaaaaaaaactcttggaaggttatctatgattcactaccagtggaaaaaaaaacttatttaaaagaaaga

SEQ ID NO: 175999 - DNA, 925 bp, Cannabis indica
aactaagcggtctttacacgtacaagatttacgcctcaaatttttgcctcactttttttttttttaattaattgatttatgatgtattatgtattatttgtttttactcaatttgttgtgcaattagttttatttttaattttgttttagtgtttcaggaactggttttctctttgtttttttaattataaccagtttgagttattctgtgttattctttgtattcattatattatagaatcggtgcattattaattatagcttgtttgagttattatgtgtgtaataattaaaatatttagttattattttctattatgttagtctagatatctcgatttgaaaatatcaatttgctagaatgtaattattagaaagtgttattctttttaattaatagaattatgttatatgagcttttgtagttattaggaattatggggctcattgtttgagtctattttagctttgtggttagttaaagataaatttggtattgtggtaattttttttctttaaatgatataggttctatgacttaattaaataatgatatcaatagtaattatagtggcgaaactgaagattaaggtatagttttgtgatatgtagttatgttgaggaattagagattagtttggacttatagcattggtgtgaactttagtggattttctttgaatgatattaagtgtatggaagctacttacaagtagtttacgtgtagcattaaagaataaaatatggatggatagtatcttgtggttagtcattaagccaataaagatttggtcaagtggccgtaaggtggcacacttggagcggaataaatagctaacagtatatatatataaagaatgcttattactcatattttggcaaactctcttttattctagtctttgatcgagtatgaaaaggagcc

SEQ ID NO: 176000 - DNA, 1123 bp, Cannabis indica
agccatacgaaatggggattctaaatttatatctggataattggactgggaccactgaatcaatgaaaatgagcatgcggataaatgtgacgaccaatacaaccgtgaagtccctaggttctatcagcaacaacatgatgttaaagcggagataaggctggctttctcaatcggtcttatccaagaactcactaattctacaataaaaattatgttctgcccagttggggctaacttgggttgcagcctcctccagtcttatcagcccaacaactacaaggggtccaacacgcttcagccacgactgctttgctgggaaagacatttggcaaaatccaaatggccctactaagtccaaacatctctgtggcttttattagctatgatgtgcttttattgtgagcgactaaatgaaaaagtgctgctcattttactaacaaattccttgctaattggtttaagctcaaaatgaaggagaatttaaaaacttgtatgtatatgactagaggaagtcatggtggacatagaagaaggtaaaccccaccactccatctatccggaactgcaagcaacagcaatttgacgataaaacaaagagaaaaagagaatggaaaaggcacagtgactattacttttggtccactataaaggaactcgataattcatgtcttagcatttgatgagagtgctgaataagaagcactgaaacaaagactgacatcttcactggacacagaaatggtaaatgtagccatgaaaacgaacttcatatgccacagacatgctaatgcgcataacacctaaattgccagaatttccatagtgagtttagaatcaatcatactctaattcgtctggcgtaatgggccgtttaagagggacaatagacttcttctcaacatcacgtgataaagctttcctcatatctgaaaaaaaaaaatggaagaaaagaacaaaatgtgagcaaaatgaaaaaggcaattagaatttatgatttggtttcaagtttgagcatacctagcccatcttcctcccctgaataataccgtagaacccttctatagatcacatatccaagctgaggagataaaaatagagtaagtatggggaatcttatttggta

SEQ ID NO: 176001 - DNA, 975 bp, Cannabis indica
tgctaaaacagataaaggtgcatcaatgtatccattttaagggggtgcattgtagaatttcctattactttttattattttattattatcattattatttatgacaaaataataaaaaagtatttgtctagtttacaagttcctaaaaaatgaaaattcaagccttgctaattgaatccatttattattttctttctatttagcttactaaggctgacccaatgcagaagcaatcagtcatgtttgaagtgatttaatgttgaagatgactactgagtcaaatgtggggataagagcattcactaccacatgcattcctttccatatattgcctaagatttttcctcaaccaagaaaaggcaagtgtggtagttttttttttttatatcaaatgagacattttcttaacttaaaatgtctaacatcacaagtaggtgtcatatctaaattattttagttaaagtgtatatcattattatttgttgtatttaactaaattattacttttatcaagatttaataatttttttctttccattaaatacacattaagtaattaaattcttaatattgagatttttatttttatattaatttcatatcattcttcacatgttttattaataattattacactataattgttttctatttctccatggatgaactttaattcatttacagtcataaaatggtcataataaaataaatataattattaaaaaaaaatattaggatattatttaaatttgttttatatataaaatttctcactaaagaaatcattaattattaattcatagttccaaaattttatatttaaaattagtgtaaatgtaatgttgatatttaggagtaaatattaatgttcaaatttaatttttttttcaattaatggaataattccaacttatataccatgtaaaaatgagaaatttttctaattagatagaaaataagtataaaaatatcttc

SEQ ID NO: 176002 - DNA, 929 bp, Cannabis indica
gtgaatattaagttcgatgaaaaatttaggagaggataagaacgagataatgctattgggacttttgtgttgggtcgtttcgctatataattatggcttaaataaaaaataatggtcctggagatagtaagcaacaatacaattgaaattttacaatcccccagaaaaaaatgcaatggttttaatgtagccaattataaatgcgaaccaagcactttgggtgcatcatgcatagccccttgtgtctttctaaattagaaactcaagaaaggagaagcatttggcgcctttttttttcctaatatatataatgttgaccaccatcagtcagttattttgcaaaattaggaaaagataagcactcttccatgtgtaacttttagcttatagtttttcagggaatctgacatgatttctttcttttaaattatggacgtgctgttttgaatttcctctgatgaaaaacggtttctacatcttgttttgtggtttgccctttctctcctacgtacagtctcttagttgtaggtcatcttgtttaatcccttctactattttctgctgcatctaaaatgttttgaaatgcttccgattccgaactatgctgtcataatatcttgtttcttatcctctttagcttttagaaaaagagccttctgaattagcacggtagtgttaacacttgcttgcatgtatatgttaaccttaccttaattgtggttgagtgctgattacctctcgacatgtttctggagcagcaacggttgggcaacacaagcaatctcgtcgttcttatgatgctaaagtatatgagcgttctgatgctaaaccaattaaggttagaagctttttgtttctttattttaagtgcatggcatgatatgaatgatacaattggttgtgacttgtgatcgtcatctctctctctc

SEQ ID NO: 176003 - DNA, 513 bp, Cannabis indica
gtaatatacaattgaaaacaaaaggagtactcttcgtgttcaaatcaagtactacacacgattgtattatatactttcaagtaaggatatgcagacggaacaggaaattagtgagaaattttaatctttatccctatcccatctttattatccatggaagacagggtagaaaatctccaaacatatgaaaataaaatttattttgaaaatttactttgtataaaaatattaatatatataaaaattaaaaattaaacattattcaatatttaatatactaattattatataaaatatttaacaaattataaaatataaaatattaataaaaaaataatttaaatattaagcggcgggttcctatcgagacgagagtgttatcctagtttctggtccgtttaacatttgagaacaaaaaataatcttcgtactcaccccattccctatatttagacgaacaattgcaatcccattagcggatccccgaccagtctattccatgaggaaaatgta

SEQ ID NO: 176004 - DNA, 753 bp, Cannabis indica
atttttaagttcaaagaatattttttacatttaacggttttcaaaaataacacgaaaacaacataaaagtaacatgaaaataacaacaaaaataacatacaaataacaaaaataaacaacaaattaacaagattacaacataacaaatcgtattttctgtaaataaaataaaaaaattgtaaaaatatttaaaatttcgtgaaaccgtatttttgtaattttttgttgattttatgtttttgtgaaataatcccttttaaataactaaacttatagcttcgatggtacaaaaaaatgtaaccaagctttagtgttgaataataattatatttggtttagaaaaaattctctcggccattttgaatttataatagtagtatattttctataaaaaaaaaatgtgtaaaattgttttatacttttgaaatattattattatttagacattagggaatttattactatttatttacaagtaacatatactttttaaacagaaaaataaataatgatatgcatgtaattgtgatttatttttttacccagacaagtcttcttcatgtacaatattataagataatagagtgttttggactttataaaaaattagcagtggtctatttttctagaaaaaaaaaaaaaaaaaagatgttacgtgccaagtcacgtatgttaattttattttagtttttaatttttttttaatatcaataattttaaaattaataatattcaatgtagtgataatcattg

SEQ ID NO: 176005 - DNA, 724 bp, Cannabis indica
taacacgaaaaacaacataaaatcaacaagaaaaaaaaaaaccgtaacaacatacagataacaaaaaatcaacaacaaattaataagattataacataaaaaaaccatattttctgtaaataaaataaaaaaaatcgtaaaaatatttaaaatttcgtgaaactgtatttttataatttttttgttgttattatgtttttgtgaaataatctcttttaaataactaaacttatagcttcgatggtactaaaaaatgtaaccaagctttagtgttggataattatatttggtttagaaaaaattctatcggccattttgaatttataatagcagtatattttctataaaaaaaaaatgtgtaaaattgttttatacttttcaaatattattattatttagacattagggaatttattactatttatttacaagtaacatatactttttaaacaagaaaaataaaataatgatatgcatgtaattgtgatttatctttttacccagacaagtcttcttcatgtacaatattataagataatatcttttggactttataaaaaattagcagtggtctatttttctagaaaaaaaaaaaagaaaaggaaaaaagattagatgagatgtctattttactatttaataagaatttaattccttttttaaaatgaatttaaatggtatttctttttgtttcataacatgttattcatatatctatacgtat

SEQ ID NO: 176006 - DNA, 821 bp, Cannabis indica
aaactcagtaataactcgatctagatgtgttatattatgataagacggattatatttttttatatcttgttactaacaaaaattgtcttcaaatttatatattaaaaaatgttaaaaaataagttcaatgtactattttgcgccattttttatttgacaaaatagataatccgattattaacttttgcaaaacacgagatgtcgaacaagattaaattcattgtctttgtatatatataaaacactatttttataaaaatttcacgttcaaagatatactaatctaaaaataaataacatacaaataacaaaaaatcaacaataaattaataagagtacaacataaaagtacatcaaaagaccgtatgttctataaataaaattataaaaattataaaaatatttaaaattctatacaatcgtatttttataattttttttattattatttttgtatatcgtgaaataagagattattgctacttaaaacatgatcaaatctttacacaaatgggaaactttcattttcctagtatattcagtcaaatattctcattttagagagagaaaagatgagtttttgagttacttgtttcttttgttctaactaatttacctacctaaacttaaacaccaccagagagctttaacttattttcagactattgaacccaaaatctaggagaaaccaagctacatctaatgtaatgtcaaaatgcctagaaaaaacaatatcaaccctttgtactttacggacaaaaaaagtccaaaaatgaaaaatcttgtctttttcccacttagtttttcgatcatttctaaga

SEQ ID NO: 176007 - DNA, 736 bp, Cannabis indica
atatgccaactcttggtttcgcaggcggttctaactagatggacgccaggcggactaccaggagtcagggcaactccgtggggtcgaatcagggacagggagctcagtttcccccacctgctaggggccgaggtagaggtccccgaggcagggctcgtggtcggggtgatgagaacccgccacaggctgcccaggctcccccagccgatcagggagccccgaactgggagttgcggtttgcggagatgcaagcccggatcgaagaacaagacctcgagattcagaggttgagacagcagggtgctcctgcagttccagtgccagtagttccagtggcacctgcccctgctgcccaggccgagatagtggtggcggcccatagattggaacctttgtatgagcggttccggaagcaagcacctccggtattcctgggaggtccagatgtgtcgaaagccgagcagtggcttacggtgatcaccagaatcctgaacttcatgggtgtcaccggtaacgacagagtggtgtgcgccacatttcagttccaggaggatgccctggtatggtgggacatggtgtctcagattcacgatgtcaccaccatgacttgggaaaggttccaggaactcttcaacgcgaagtactacaatgaggcggttagaagcgccaagaggaaagagttcgttcacctgacccagcgggagaacatgagtgtcactgagtatactactcgtag

SEQ ID NO: 176008 - DNA, 729 bp, Cannabis indica
ataaattcatagaaatgaacccaatgttgatgagtcaaattaataagcttaagaatttctttttcctagggcctcattcgagtaaaaataatttggaactgaaaaaagaaaattgagaaaaagatttatatattggaagtttgaaatttagaaatgtaaatctaggtaagcattaattcaagaatgattattaatactactatacaatgatggtataccgagaatgaaagttctagctagctaggcaaactaatgagcactcactaggattatcaaaaaaaaaatgagcactcactaggatgaaaatgaagcaaactggtgattagattactaaaccaagtttttccaacattacgagcactaggaagaagatgaaccaatgctattttatttaaataaaaaaacacactttgattaaaaaaaaaaaacagtaaaaatcttatcaaaacataccctccttcccaaattccaaccaactagaatatattattagggtgtctaccataaaatcctcttaggggtctacttcagattttttcaaaactttaaggaattgtttaaaatgagttaatgctaacaaaagaattataatataaaatattattttgtttgttttgtaggattttttttttttttaaccattaaaatattattcctttgataatatagttatccttgaagagggtattgacgcagaaaactagttaacacttggtcgctagattgacg

SEQ ID NO: 176009 - DNA, 916 bp, Cannabis indica
ggctggatcctttcaatgaattcttctatttttttgaaattgcagcatattgaattactggcaccgcttgataaacacagaagattggagcagatactgcgctctcaagacccaggatcaaaggtcattattttttgctcaaccaaaaagatgtgcgatcaactttctcgtaaccttacacgccagtttggagctgctgccattcacggggacaaatctcagagcgagagggattttgtcttgaatcaatttagaagtggtaggactccagtgcttgtagccactgatgttgcagctagaggattagacattaaggacatcaggtttggctttctcgggttataacccgtatttatgttagaaaatgcttcatgcatgtttctctttgtcctctctcattgacacatggaaataaaacagtgctgttatttttttcacatcacaccttcctttagccatacctttttatccagaaaggggaagatggtgtcactcactacattgtttgtttcttttttctctccagggtggttattaactatgacttcccaacgggagtggaggattatgttcataggattggaaggactggaagggcaggtgctagtggactggcctatacattctttggtgaccaagatgccaagtatgcttcagatctcatcaaagtgttggaaggggccaaccagagagtccctccagaaattcgtgacttggcctcacgtggtggtgggatgaacaggtttagacggtggggttctggtggtcgggatggtgggcgtgggggacgcagtgattccagctatggtggaagagatggaggaaggggaggtggatttggatactcttctaacaatagtggaggacgtgggtttgacagtggttcgcgtgacaggtatatgaggttttatttttt

SEQ ID NO: 176010 - DNA, 259 bp, Cannabis indica
tttctattatgcttttgatggcacatcaaaaaactcagttcccaaacaacaaaattgaagagaaacaaagtcacaaaaattagtacctctttacgcacagtatggtaacagcttgacccggaaaccgtatgctttgctttccaggcttgtcccagcacctgagactattgaaagtaaaaaactttctttaagaaaaaaacaatccatattttgtttcataatcaaacaatacttcgagaaagaactagcttaaaaaaaa

SEQ ID NO: 176011 - DNA, 1028 bp, Cannabis indica
gaactgaatttagttaacccaatcctgcattttacaaagaaagcaaatataatgaaatagcatatgcaagtaacaaaactataatacaactacaaaacaattgtaaacaaactaacatacagaaaaatctccttcaacatcaacatccatgataattctaatttgtacccattgatgatataaaaatagacagaaaacaactagaaaacaacattttcgaaaaaaacacatacagcaaggtgttaaaactatataaaaaaaactatgaaaaaaacaattaaaaaatgaaaactgatcaaatgaagtaactgaaatgaaaacaataatacatttggaaaaacaaaaacatggaaaaaacaacaatatgtaacagaaattataaactaaaaaaacgaaaaaaaatgaaaaaactcaaaaaaataacacataaataaaattaataaaacaaaagccctaaaaataataaaaaaaagaattgctaaaaatgaaaaaccttaaataatgaaatcgataaacacaaaacccacaaaagtcgaatacaaaaaaaaaaaaaaattcaaaatggggggaaactaaaaagaaaccgaaaacaaacctgagatcgaagaccagcaccatcctaatcatttttttttgagcaggatcatgagaatttttttcatgggcagcaaccttttatttcttctttggaggagctcgctcatgtttcgacaacggaggagcaaaatctgagtcatcttcctgaataacaggacgtttgcctttgttcctattagctaaagatttcaaccccattttagaacttttctttggcacagggaaggagtggatgaagaatgagtaatagccatatttataaatggattaagagaaaaagaaaaagagggaaaacagttatgtgagttgaaaaaaaaaagtgaagaactgaaagaagagggaaaacgagttgggatcgtggagggagaagagttcagctatggagattatgatttttttaaaaaaaaattgaaaagtgttactcctaaaat

SEQ ID NO: 176012 - DNA, 775 bp, Cannabis indica
atccgggtagtgttccgcctaactggagacctgctgttgatgaagaaatagggggaggctgaccccttgaatggctctgagttcactagtttgcagactgacccatctaatcaaagggttcggtactgccgaaagtgcaaccagcttaaaccgcctcgttgccatcattgctctgtttgtgagtagttatagttttgtgtagttttagtattcatttggattttgtagcatcataaaagcttgcttattttcaatagaaaataatttttctttcactgccactgacattatgattcaggtgggcggtgcgtgctgaaaatggaccaccattgtgtatgggttgttaactgcgtaggggcattaaattacaagtacttccttcttttcttggtgagttgtgtttctggtatagctgtaaaaactctctatggtgacaattatacattctcttttaagtattctatacaaactcgttgttctactctgttgttgctgttattattgtttctttttgccttttcacattgaagaaacaccacttgaccacttgaatttgtacatgaatctgcttttgatttgttgtttttacgaagatgttagcttgtttcccagaagtgtttaaatagctctactttctagggatcagagaagatatatgaaccactctaatggagttacgcatgatcatttatgtactgtccttagtgataaaattccactctaatttaagcggaatataaaaaaaattatgatgactgaatttgagccatggcag

SEQ ID NO: 176013 - DNA, 576 bp, Cannabis indica
tgtgtcatggactttgagggttcatggagtaagtacttgcctttaattgaattctcctacaacaacagctaccaaagtacaatagggatggctccctatgagatgttatatggtagaaaatgtcgttctcctattcattgggacgagacaggagaaaggaagtacctgggtccagagttagtgcagaggaccaatgaagctattgataagatcaaggctcggatgcttgcttctcaaagcaggcagaaaagttatgctgatccgaagcgcagagatgttacatttcaggcaggggaacatgttttcctgcgggtttcaccaatgaagggtattaggcgcttcgggaagaagggtaagttaagccctaggttcgtattgggtccgatttctagatactcgagaaggtcgggcgaggtagcgtatcggcgtagccttaccaccagccattatcagcgtgtgcatgacgtatttctacatttcctactgttaaaggaaataacgtgtcagacccgactcatgtcttgagttatgaagcccctcgaactacaaccagatttatccaatgaagagcaacct

SEQ ID NO: 176014 - DNA, 837 bp, Cannabis indica
agagtactcgtcagcctcgccctcttgaagacgctcaagacccgaatgaggaagatgtagcctcaagagcagcagaggagtccgaggaagaagaaataatccccgatgatgactacgagggaaacctcgacgagtatgcctatgacgaaggtagttactcagaactggtgcttctcagacaaaaagctatcgatcacgaagccgagatcgaagctcagaaagcgcaaaaccagaaaatgcaagaagtgatgctggccatgcaaaaagccatggaggcagctggcattcacgtgcaccccaaggcaatgaccgctggacttgacaaggagccagcgacgtcttcgcctagttcccaacagcagaaatctagggagcctagccctataagataccctgctgaagggaatcaaacaaaaaaccctacttctaccccagggcgaaagaaaaaggcgcaggatccgcgaaaggtccgctcagactttacccgtaaaagggaaaaggtccgcaggacggggacaacgaccccaaaggagggagttcgttcggccctcgaggatcggacggggaaccggaaaagtcgtttctgtgcaccaggaaccagggggtagaggaagaagaggacagagatgtcctcccattgatctgagaaatcaaatcaatgggaatcaaggtgacctccgggatcaccttgaccaaaaaagatacaggcccgtggtttcctcgggtacgttaaacgaagggattatggcggaactcgccatacttcgaaaagacattgctcgagtctcccggaggcagaagggagacgactccgactcggacagcgaggatcgggag

SEQ ID NO: 176015 - DNA, 1013 bp, Cannabis indica
acacctttaaattttttattttttttaagaaaacatatcatcaatgttattcgtgtggcatgaaagtaatttttaagataactttcttttattttcaatggtatgatatgttttttatttaattatatattacaatcatggtataatatgtttttattcttaagtttttttacctcaagtattttctaaaatgttactattgaagatgttttaagtgtaaaagttatggtagttttggttagttttgtaagttcatttaaatttttataatttattttaagaattaatttatatttattaataagaaaataatatgatttgacacttaaagttaaatatttatgaaagttttagaaataatacttaattattattatcgttaatattaaatttagtgtttatttataattaggagttgaatttaagtatttacatgtaaattattttaaaattaataaatgaagttttctttgtcatttttttttaaacagatctatttgtcatattgaaatagtgtaattactcaatattaattaccaccacaggttgcttctaaacaaattcctagggattctaaaagataaatgggactttttttaataatacaattatttaatgtttatttatatatattttttttttattaatttcacaatttaaattttaaaaagataatttgaaagttctaaaattattaatttactattttttttttgttgaaaaaaatagtatgaaaagataacagaaaaagtaatacgacagtaaatgctatgcaatatgcaaatcaatgagaaattaactttataattttactaaagcaacctaaaaatcacatggtattaatttgtcagcaatatgtaaattaatcaagaataaattagcaaaacaatccaacatgatcagttcgtggggtacgaatcctgttgttagctatgattcgggtttggttgacgttcttctatgcattagcctaatgcagagcgggctctaggtatagtcaggttggcccgcgc

SEQ ID NO: 176016 - DNA, 1293 bp, Cannabis indica
attaataagttgagaatttacttggtgaattctagatctacttattgaaagctcggttatataggcccatggtcccctcactagttgagataatactgcttgcagactcagttaattgattttaattaatcaattataattctaaaattagactatgtcttatttaagaattttcactaagcaagggcttaattgtgaagaaaagaggttttggggtcaatttgttaattaagagactttgtatggtctaattaataaattacataaatgacaattttatttagtaattaattataattattaaataaatagttttggcatttataggattgaattggaaaatatggtattattgaaaagaagaataagtggttgaaataaagtggcaaaattctaactagaaagtatatacctatatatgcaagctcaaatgcgattaacacaaaattattccgaactttcaatataaagaaatatgtgttcttgtaacaacaatcctatatgattgtcccatataagagactacaaattcaatgtgttcttgccacccctaattcaataagcacactttatctgcttcaacaaaatgagaacagtattaattttaaaaaacaaaagagaaagccatatctcaaaataaatagataattaataattaaatagctttgcaaaacaataaatttactacaaaaattagttaaattcatattgaagaataacaactagtatacttatgcagccaaaactcacacgacaaaattacataatggaaatgacttggagcttgtttggctgtgttttcagttttcagtttttaaaattgtgtttttaaaagtgagaatagaaaacagttttttgtcattttaaaaatttaatggtgtttggcacaaatttttaaaaactgtttttagattttttcttacgaaaaaaaatcaatattttagcaccataccatgacattaacccatccgggtctaggttcgggtatggtttcgggtctaggatccgagtatgtgagcaaaatataaaatataatatgttagacaaaaaaaattgtttttgaaaattgaaaacaacattttgatgttttctgttttctagttttttaaaactcaatttttaaaaaacagtttttaaaaattttttgccaaacgactcctaatagtttttaaaaactgttttcagttttaaaaaacagaaaacagtttttaaactgtaaagccaaacagcctatttgggtttttcccaataacgctcttcaaattatatgaaatgttgcatcatcggtcacct

SEQ ID NO: 176017 - DNA, 758 bp, Cannabis indica
aaatctgtcggaaaaaatttagtattcccgacggtttaaaatcgtagtaaacaaaataggagacgttttttaaaaccgttgcctatactataagcgacggttttaaaccgtcacctataagggtccattaaaaaatcgtcacctacttctcgccacatttctcacgtgcccacctactttttttctatttcccacatgcccacttatttattctcacctatttattctacatttcccacaccctaaaatgaaaatcttaactctttgaaaccccacccacgcatccgtaccatcgccctcctctctcgccatcttcctccctttctcaatctccctttcttctcatctctctcgtctatcgatctccacccacccctcctcccgtcggtctccctctactcttcgtcgcatacgtcggaccaccaccacctctcttcggtgtccctctcatctccgtctcatacgtcgcaccaccaccacctcccgtttgtctccccctctctctctttctctctcttaaagctcggtataaatacatttatttatttataattttttttatttattatatatatttattttgttattgtataaatttaatattttttaaagttagttgttatcgtaacaaaattaattagttgttttattttaatttaggtaaaattataaagctaatgcaagaaaaaaaaataggggaaaatacagaattttttgccattaatggtaaaaaaattggtattttttctctttttttt

SEQ ID NO: 176018 - DNA, 528 bp, Cannabis indica
aatctcaatagttcagggagaatttttaacggccaaaaaagttcaggaggtatgatttggtatatgtcaaagttcgggggaaaaattgctaattagccttttactaaaattagaaaaaaaaaatccttaaatcaaacaatctcaatagttcaggaggtatttttaacagtcttaaaagttcaggggcaaaaatcttaattagccttttattcatttaaggggatttttgtagacatcaaaactcaataagtattttaatagtgtcgtttggtaacatttttgttttctaattttttaatcattaaatgaaagtaaaaaatttatttttaaaaaatttgtttttgaaaaataaaaatgcattctctaacttttattttttaattttaaaaacaaaaaacaaaaaatgtattctgtaaagttcattttcattttcattttttgattttatttaagtctaatttaagtccggagttggattcggattcgggtcaaatgccagtttagtgccagggtcctggggtgatttgg

SEQ ID NO: 176019 - DNA, 615 bp, Cannabis indica
gttgtaccactgacgttagcataagcacagaccacactgttggggcggctgttttctagaaactcccaaaattgcatcattgatattttttcggaatcggtttgctgcaaccgatccttcccttgctgaagctcagatgctggtaagtgcagcctgctatgcaggcatcaagcagtaccgcaatatcatcttccactgtgacaacactacagtagtctccttcttcaatgctcctccaaccgaaagaaacaacttcaatctggaaggagccgcctatcgattctccaattcctgtctcacccttcattgttacaagctccttcatatccaaagaaaggataacttcatggctcacaacactgccaaatgggcgcgccttaacatgttctttggtgatattgccatttccaattttgatggcgaggtcttatctgacttccaggaatagttcccagaccctggctaagttcttccctggttccctgccgtttgtccctttaattttctggcttattgccttagtttagttaattttatgtctcaactgcttgtcttatttttttcgaactgatttcctgctttgtaagtttcttttcgaacttgtttcctgctttg

SEQ ID NO: 176020 - DNA, 518 bp, Cannabis indica
acatgcatcatttccaaattttcgatcagcaaacaaatcgttgagttgatttgaaaaaaagtagaagcacaggcacagaagaatatcctcatgttagaaccatgtgcaaataatatgaaatactcatttcttaaaaataaaattaaaaaaaaaaaagaagcctactgtaccatgtgaactaataaatatcttaaacaaaaaatacgcacatgcataaaaccaactcattgctgttttgatttgtatcattcctgaaatgacaagttataacaatttggagtttggaccctccaaaaataataataataataataaacagcagttgctgcttcactttatgatgctgactccaacaaggttgcaacttgtagagattttataaaagttgggaaagtaagtgagagaactccattcccatcatatcccaactccttttgccacatgaaaaagtctcaactttcacccattaatctatatctcaatctcaaactattaccaagtctacacaaccctaattg

SEQ ID NO: 176021 - DNA, 675 bp, Cannabis indica
ataaataatcatataatttaaatggtttaaaaactaatttaattagtgtgtggggtatttgaaaatcaatagtgaaaagtcaaatttaaaatttgcagaaagagaagaggagaatggagattagcttgaaatatatttaaaaaatataatgctacacacttactatggatacttaactcgagccggtaataataaaattataaagaataggggtagcaggcatataactggacatatgaaagaaagaatataaaaaacaagaaatatgatagcttccaaataatattataacaaagcaatgctctccaaatttatcttaatatcatctataacatcataaccttatatttagatttgggccaactttcttctcagttgggcttccagctttcttcacaatgcaagttgccacttctgactttttttttgaaacttgaactgcagccatcgtaatctcattcttctcttgaagcctctcatcaatctcatagcactccatgatagattcaacaaaatatatgtgtttatgtatatttgttttgagcaaatcagtaaacatattttcaacaaattaacccgataaactcaagatccacatatatatagctaagtattcaaatacaattgtaaaatctaaacttaaaacaaaatcaaatggacaattcatgctcaact

SEQ ID NO: 176022 - DNA, 1269 bp, Cannabis indica
aacccttaaatgtaaatgtaaaataaattaaaaaaaaaaataaaactaattaagctaaaaacaaaaacataaaatatgagattggataataagtttataaaaatatggcatatcaaataccataaaaaatcttaaatgtgaaaaaataccatagaagagtgacaaacctataaataccatatttttctaacttttttatgaaatctcatatttaatgtaattttcacaaaaaaaaaaattatatttttgtaaattttgaaaaaaaaaaaaaacataaaaaaaatgaaaattctatacattttgggagattatacaatttgtgaaaatatataggatttttcttaaaaaaaattattttataggaaaattaaaaatatgaaaaaaaaaaaaacaatatatggtaacaagataccaaaaaaaaagaggtaactagttaccctaaaacattttttcaatatcgtttaattttttttttaattttttttattggtatataattcttttatttatcaattaaaggattagaaagatgactgttgttttttcaattagttgttttgatcaatcttacatattagtacagaattttttatttattttttttttcaaaaaaaatccatatttttgtaaattttgccataaaaaattataacaataaaaattcttcgctttttattattcaagttttaaatataatttttaaaaaatttacactcataaatttatctttggagaattttcataaatataggaattgagggtataatttacttttttatagcataaataaataacactatagggttatgggtttttttattttttattttttaacatttatatgggttttttttatgccatatttttgtaaaaaaaaaaaagtagaaatttaatatttgtaaaacaacaataagttttgccggaaaagtcgtcggcaccgaaaaagtcatcaaaaatgttagtgtcgccggaaaaattaccggaaaagtcactaaaaaagtcaccaaaagtaaatatcttaaatataactaaaaatataaccggttttatgaataaaaactaataactcaaaccgtttataattaaaatataactgattctgtaacataataaataaatataaaataacataaaataactcaaaccagttataattaaaatggaaccgattctatatataatagtgttataatgaataaaacaaataacacaaaataactcaaaccggttataactaaaatagaaccggttatataacataatgaatac

SEQ ID NO: 176023 - DNA, 1287 bp, Cannabis indica
tacaattaaaaaacttcaatcttcaagctttttaacttatattactctttgagttaacatactattaatttaggttttccaaccttttatttcattgatgagaatcaaccgcttgaaaacgacaacataactaaaatttgacagattttatccaattttttttatataattatgctgccaattatcttaatatatataataatgaataaaaaaaaaagagtaaataataacataagtatccaaagttttatgtttataaacttaatatttatttttagcggtatactataataacatcaattaatattgatacttatgccgctaaaaataaacattttgtttatgacacttataaatattaaactttgggtacttttaccgctatttaccaaaaaaaaaaaataactatcgagcaaaataaagattgcagaaaatggactaatttaaattttagtatacaattttcccccctttttttataactttttgttttttaccacaattgaaagagcttaagctgtaaattttgcctggactctttctactctccatggcaagaattttaatgtatttcttttctttttttctctctttttcttttttacaaaaaaaaaaaaaacaatttggttttgttgtacatacaatctatgagctctctgtttggtttcccagaaagcttgaagagaaaaataaaagaaaaaaaaaatactaaggaagttgttctaaatccagagtcttcaaactgtcataaacgtaatagccatacgcatcatcgtcgtgatcatcatctttgataccatagcaaaatagtcttccttgttcctccatggctttacagttcttgtagaaaagacaattcacgactgtatcaagaaccaccataatcgagtacaagtagaatatcaacagagactccataaccatccaaaacgaagatgttgttgatgatgatgataataatactgcagtaagggatctcacgattctgtattggaagagagcctcgatggctgccatggccagatttagaggcagagtcaaagctaacgccgtcgaggttctccctaatcaaaacacaagctctcacagtcgacaagtaaccgcctccattagaggacctctccatgccggacgagacccaggcccaaattgcagatgattagggcgttggcgagcacaatcgagtaaaaaacggctccggaggcggagagaaagagactgagttggttgatttgagtaggccgacgtatcgagcgattgaagcgaggagaggagagcgaagcggtt

SEQ ID NO: 176024 - DNA, 765 bp, Cannabis indica
atttcaatttttatatttattttattaagcccatacatatgagcccaacccaagcctataaatcttagggcaaaatccataactcttcacaaaccctctcttcttagcaacaaacccaagtccatacatgtgtattaaaatttggagttggaagtttgtgtttgttttatttttaatctattgatgtaagtatgttagttgtacatttatattgttgttggaacttaattagtttcaagtttgttattttgatttaagtgtgttgttgaaactttaaaaagattattgatttattgttgttgttataacttttattagtctcaagtttgttgtattttcttaagtgttttggaataattatattaatgatagtttaattattttatgattatttcaaaaaaaaaaattgtgatagttcaaaccgcataaaccgcaaaaaccgcaccgcaccgcatcattttttgcggtgcggtttttgcggttttttagtatcgcggtgcgggtgcggtttggaaaattagaaaaaccgcatgtgcgggttggtttgaaaaaatggttaaaaaccgcacaacccgcaccgcgaacacccctaattgtaccaactcatagaaattttaatatatatataaatatatatcaaataataaaatcatatcaatgtaatatgatccttataatgaggacccttattacgttgtgagctcatgtaataataatatagtataatatgtatatgtcacctataactgtttacacttataactt

SEQ ID NO: 176025 - DNA, 678 bp, Cannabis indica
ttttttttttctaacttatgggtcaccttttcgaatcatgttaccgaataatatatataattattaggggttttctaattttataatttcaaaggagttagttttttttttctttttttacggaaattcacgtaaaaatttacataacaattaataaaataatttaaattgtaagcaacccacacaaaaaatatcaagttaaccactaaagcaacttaaattatatatttaaaaaaaattaaaaaaataatatacataataactcccttaattattattcatatatacttgaataaatactattttggtgttatatatattttacattacaccatatattgcaaaaattttattttttttacaaattttaatatattttattcattttaaagatataatattaatatttacatattttcccatataaaaagtaaattacaacttcaattaattaataaaatatgtttatagtaatgaatagtattttataaatgtagagtatatatagtgaattttaaagaaattttaaaatagagaaagaatttagagaatttgatacacgtaagtgtgtttttaggtggcatttggtttgaggtaattaatgaaatgaaatagaaatgaaaagaaacaatttttattctatttctttgtttggttgcatttaaaactattggaata

SEQ ID NO: 176026 - DNA, 754 bp, Cannabis indica
ttattttttttaattaaataatttttggaatttataaagttatgtttgtttatttattttttgatgtaagaattatacttcaatagaaaactcgttcactaactcattagaaaataatcaatatatagaaacaatagaaagaaaatatacttattttagtatagtataaattgactatgtctatttttatgtttacaattataataaacatactaataatataaaatactttgtatatatatgtttattttgttttctatttattaaacatactactttaataaacaaaataataatattcacatatgtttattatatcactctacgtgtcatgtttatttttagtaattttaagtattgatttatatttatatacattaatgtttataattttgatattgtattttattaaaaaaatcttattaaattataataattcatactaaaatagataataaacatttatcttttaataaaaaaatatttaacttgtttatttttataaaactgtttaattaattttacgaaattgtttattttgaggtttaataaacatattaaaaatgtatggtttcatgtaataagttttcaaaatgtataaatttttaaaataatttttttttgcacatttttttgtaattattttgttttttgttgtacatttatgaaaaaagccctttttgcatatacaacagaaagaagaaagaaagagtaagtatgatgcatatattcattttattccatttacatctca

SEQ ID NO: 176027 - DNA, 636 bp, Cannabis indica
caggtaatcaaatattaacttgggtaaccatctactttatatttttggtaactaggtactcttgggtaacaatctatttatatttttatcttgggtaaccatctacttataatatcggtaaccagatactatcattggtaaccaatcacttatatttttttgcaactaagtacttacattttgggtaactaggaacttatattttgggtaaccatctccttatattttgggtaacttggtactcttggacaacgatctacttaaattttgagtaactagatattattttaggtaaccatctacttatattgtgggtaaccaagtacttatattttggataaccaataactatactttgggcaaccatgtacttatattttgggtaatcacctacttatattttgtataactaaatactatcttagataaccaattacttatattttgtaactaggtacttatagtttgggtaaacaaatacttaaattttaggtaactagaatcttatattttagataataagatacttatattttgggtaactatactattttaagtaattaattacttatattttgggtaaccagttactaatataggaggatgaagctcttcttatgatgagtggatcttgag

SEQ ID NO: 176028 - DNA, 731 bp, Cannabis indica
atataccttgttcccttaagaatctaaaattttacaaagcatgtcagttaggaaaaagtcatagactaccatatccattgtctcaatccagagctaatcaacctcttgcactggtgcacactgatttatggggtccttcccatatttcatccaaagaaaattacaaatactacattgtgtttgtagatgattatagtacattttcttagatttttcctctcactatgaagtctcaagcttttgaaacttttatcaagtttaaaagtcttgtagaaaaacaatttaacttaccaattaaagctgttcaagctgatggggaggagagtataggccttttgaaaaaaaattagctgaccaaggcatagtgttcaaacaaccttgtcctcatactaatgaacaaaatggtggagttgagagaaaacatggacatataactgaaattggtttgacacctttagctcaagcatgtcttgatctatcttattggtggcttgcatttcaatgtgccactcaattaatcgaatgcctacacccgtgcttgataatcttagtccatttgagtgtttgtttaatgaaactcctaactatcatattctcaaaccatttggttgtgcttgttatccacatttcaggccctatcatcatcataaacttgagtataggtttgaagagtgcttatttcttggatatctccaaagcacaagagtattgtgtgaaaatgctgctggaag

SEQ ID NO: 176029 - DNA, 523 bp, Cannabis indica
aatattttttattatttttatgaggttaaatttgtctctctaatcaattttttattatttagtaatataatactttttattaaaatgttgtaaaaaagaaattttaaatttctaatataaaaatgagctataatttagaaaatataagttaacaaaaaatagggatgattaaaaaattaataaataaataaatgaatagggtagtgtagaaaaaaagaagactattattattattattattattattattattattattattattattattattattattattattattatttagttaatacccttatccaaaataaattattttatatcattcaaagttattgtcatcattttatctcgttcgatgttatcaacatatcttacttgtagtcacaattattatatcaccatatctcgttcgatgtcagtattttttatttatttagtaatataatacttttaatttattaaaatgttgtaaaaaaaattaattatatctttttaattttcttttattgtagtc

SEQ ID NO: 176030 - DNA, 714 bp, Cannabis indica
aggattagttatatatgtcaattatattagttttgtttcagttatatagtggattaattgaattcattgtttcacacttattttgcctatatataggcttttcatgtcattcaatcagatcaatataccatttcttttaatgtttttcaattcacaaaacttaacaaaagaagaattagaaggatgtgaaaaagaagccacaagaacaacaacagaaaggttcctcctatagaaggacttttttttagtgtaaaattcctcctagaaggacttttttttagtgtaaaacattactatatatgtattacaacacaattgtaaatattgagtcaaataaaaattttcatttcattttttttgtatgttttaattttaacactatatatttaaattttgcattaattaaagatgatcttattatattaattagtaattaataatttatattatttattaaaatataatacgtacgataaagagagaagtaaattaaattatacacaatattcaatctatatataatttcaaaataaaatgaacgagtgcaagttgtgtttgtatacaagttgtaataagttgaataatctgataaagctttttcttctcacgtaaattactacaatcacacatgcatgcacttaattataaactatatataaatttataaatactagttggttaaatttggtacatacatacagttaaatacatata

SEQ ID NO: 176031 - DNA, 1585 bp, Cannabis indica
actcacacactttatttttgtaatattttacaaagttatacactagttatacacaaagagagcgaacgtcttaaagagagcgacatagtccgcgactcaacccagaattcttcattcagtaatatcgttcctcttttattttgctagcagtttactcaacaattctacccaccacccttcaaagtcatttaaagataatttaggaattagaccttaactactcatgttcttgattatgcgtttatttacgtgacaaagtctagcataccaagtattaaaagaacacaacatataagcagaagcattaactttattaacttgaatattcaatttaaacattccctcagttgcataccccttccctacaaatattttaagaaacagtagcgacagatctctaatacatctcactcctcctattgctactcttttgttggttattgttcacgcaacctgtgttaattcctgctgtattgcaaacatatttagttttgacttgtttgttattcatgttttatatgctgtcgggtgggctgagtaaatatgctaatcgtgtcgtgccaaccaaatcaattatcaatcttgtcgttagtggtcgacccaatttattaacactttaggctgttagtttatgctgttagtgttgagttagttagcaattagttagctatatacttagcttcattgatcgttaatgacaaatatcagatgttttttcattcaatactttgttttcatcaaattattaataggatattagagagccattaaagtgtgttgtaaccttcttctgtgaagccagttaggctagttcagtagtgagggagggataaaaaaaaaaggagaaggggcatggggttccaaaaaccccgtaagtaaataataaaattgtaaatactattacactaaccctcttctgtgtatgtatttttctggtgatgctgttgttttttcgttttttgtctattagttgtatttattttgtttcttctctcgatgactggcggtgttggtgctcaatggagtgccaacaataatgttgcttcaagccttttcaatagtgatcatctaggaaatagtcttgtttctcatactttgactagtaaaaattacaatttgttgaattgtctgatgaccatcttaagtgcggcttgaagtctcgggttgagggactccaaaacacttccaacttctactaaattgtcttttgttttataaatcatctaggcacattttggacaaaatccatcgatttactattcataatgtgctgaaatcaaaaactcataaaacgaagtcaaatgtactgaaaacactaagaaacatcattatcttagctagaagaaactaagaaaatataataaacaatgcactaatcaatttttctagtccctcaacaaaattaataaaaactaagctaacagagaagtggtctacttaaaaagaaggaatggtctggccgaagaggtttttttgtctcaaaaattgcagcaaagtatattattggtaaaaatctaaattccacaccaccttctagttactgctatgaaaatcaatcttattctatatataagcaatcaaattt

SEQ ID NO: 176032 - DNA, 560 bp, Cannabis indica
accaaatcaaactaaattttgattcaatacactaagcccaataatatttttgaagaaattttctaccatcaccaattaaaatggaatataagaaaagtattgatgtgtctattataatggggtccattaaagaattttcctataatatataatccaattcaatataatacaatacaatacaataagacctaatacaaggtaacaaacgaggcctaagagagaaataataactaattttttatatttctacatttaaaaacaagcttttttgtatttttacagaaatttacgtagcaacccagatagaaaaaaacgaataacctaaatcgcaatcaaacccaaacataaaatttctaaaaaaaaataaaaaaaaatgatatatgagtaattcccctaataactattcctattcaattaattaaataattttgcaaatatcatgaattttttagtaatcatgaatttaataataaatgaagagagaattaatgtaatagaatgaacacactgatggttgtagaaaaaaaattaagttaggtatatataaattatatatatat

SEQ ID NO: 176033 - DNA, 806 bp, Cannabis indica
cattggaaaatcaattgcaagttaagtgaaaattacattttcattgggttttcttgtcaggcaactaaagtccaccactttcacttagtcagcactaaaatattaaaaacgtaaccaaacacggtaaatttttagattctcattcccacttctcccaatacagcatactaaacattccctgtcacatcaccatctcatatctctccttttatatatatataaattatagtattaattaaattttatgtgatgggattttccatgggtggtcaggccatttggggttgcctcaagtatattcccaataggtatggcagtgccagttataaaataaattgttgtcctgttttaaattggtgatgttttaactctaatcttctggcattcttttatcttgttctctctttaataagattagagttaacttttctttagcctttttgtcattttttcatcaatgaaatggtgtaagtttgttctgttctaatctataggaacttatcaatacaagctatgattggacaatgaatacaaagaacccaaaagcttgtaaaagttacagagcttaagagttaggcctatatttatagtagtagcagtacaaagaagagaaaggaaaatacagttggaaagtagagaacagttacaacagaaataacgaaagaaataacagactcataactacttgactgtatcatccccccccaagcgaaagggtgttacacagactttaagcttggatttcaagtaggcaaatctgtctttggataaggccttagtaaatatatcagcaacctgatcaatag

SEQ ID NO: 176034 - DNA, 881 bp, Cannabis indica
atactaggtatgtttaataaatagaatttcgatatctcgaattataaatattttgtaaaaattcaaagtttatcaaggctttatttattatgaaaattttattaaacatatttttatattaaaattcttaaattagcaaaggttagcaaaataatttaaaaaaattaatttttttgccttagctagtagggcgttatacttttattttttattttttgcatatattttataaatattaatttttagttttctaaatatatttgtttgctgatgagcgttgaagttcagacaatgcctttgtgtttttggtatgtagatagtcttaatcttttttttttttattattattattatatgacaatgtatagatcattagttatctaagacattatgcaattatttgagaaattatgaataactttacactctataagcaaagtttagcagtttgttacacatgtgcattttttattttatatgcatgtagtttaaaatttttactttttgtactgtaaatcattgttattttttcaaaattttatagattgtattaaataattacaatatactttataactatttaaataaaaaatatacaaagtagatgtatcggtgtactaatttttaggggtgcaacgtaaaattagttttataaaaagagaatatcaaattaagtttattataaatataaggccttggaaatatagaatattccttgatgggtaagaatcaataaaaaaaacacaactaatttttgttataaagattatgatttgcaaatctgattctacattataaaaaattgaatggtttttaatcaatgaatatgggaagcaaattggaaaggcattattcattcatgtagtagtgttcacatggac

SEQ ID NO: 176035 - DNA, 576 bp, Cannabis indica
agatgttttatattttgtatgtttttgctgtgtttgatttttagtttctttttatttttacaaccttgaggacaaagtgattttgaagggtgggaaagtgttacactatgaaatagtacaggggcttattagtaatttccaaaatgtgtgaatcactataaatatataattgtgagcttattgtggaatatggaacgagtaaataaaactttaattcaattgaagtttggcacgaacttaaaaaatacattttaagagatttgtcctattcatcattaattatttatctctacacatttcgtacatacgttctcatatttataatattttaagatgatgaaataaccaatgttattacttttcaaaccctcgagattgtaaattatgttaatcccaaatttgttaaagcttagttatatcagccgatgcatgtttgttgatattattgaaatatatttatctacatcaaaaaaagaaaaaaaaacacataaaatatttaaaatttccaccatataatatatccatctatattttctttatatacatagctagttataggtgatccgtaataattat

SEQ ID NO: 176036 - DNA, 818 bp, Cannabis indica
taatattttttaacaattttctttctcttattacattacataccaacatcattttattatactgaacacgtacgttttttcatatatttatttatcatttttgtttcgtatttataagactaattaggatttacgttcgaactttaactaaataatgacacttgaacttttttggtcattaataattctccccgaactattgagattattagatttaaagacttttatctaattttatttaattttaccctctcagtggttatttatgtaccaaatcatgctcaccacactttgatatctactaaatcatgtccctcgaactttgtacatgtactaaattatacccctgaactttcattcatattagacttttttttttactaaaattggataaaagtccttaaattcaacaatctaaatagttcagggagtatttttaacgatcttaaaaatttagggacataatttagtacatgtcaaagttcaaggggcccgtaaaaatcataacattaaaaattatatttaaattaaaatttatttaaaaataaatttagttaatatataaaatatatatatatatatataaacatatatactctacgaattctaaatacagtagaacctctatttaagaatactctattcaagaataacctctaatttgttataaaaaaatcaaagtcccaatttgggccaattataaataagaataacctctaaattgtaattagttatatattttctaagtcccgtattaccaaagtatacctctatataagaataattatatcttaataaaatatatacatgtattttat

SEQ ID NO: 176037 - DNA, 719 bp, Cannabis indica
ggttttaccagtacctgtcaaactggtaaactggttttagtagggttccccaaaaaatcagttttctcaattctcgtccatttcactgtcgtagttgggtgttttcctgtttcttgagttagtgtgattcatagagagtataacataacctaaagttgtaggtttggatttcccggattagggtttttgaccatgtaatttactcgattttattatgcgattagggcatccatctagcgcgagactttccgttcaggtcggcaagcacacttgaatttggaaagaaggtaagaactatatataatgtgtgatattaataactgagtgtatgtatctgttatgtgtatatgcatgcttaaggtttagttgcactaccaacactagtacaagttatggtacagagtgtattggtatagtgtatattgtctatgactacaatacagtgataccagcacaagtatgggaatgtactaggtgtgtggtttatcactcagtggtactcagggtacgaaacaagccctaccaacactcgtatagtgaggtacgtagtgtatgtggtatagtggctataccctagtattgaacgttcttactcatctgttaagccttgtagataggtgtatgggtgcctagttacaagacggtattatgtgatatgttatatgcttttcttactaagtctgtcaactcacagttatgcttcactgtgtaggtaaagg

SEQ ID NO: 176038 - DNA, 1293 bp, Cannabis indica
tattgtgagattgggaatctatgtagtggtatttggtatttaagtttgagatatagagttttctatttcttcttagattatgttattctataatataaaattatgaatattactaatattttatttatattggccaagaataatatgtagtaatagtctagtagacttgtaaatcgtgggtttcttgcgaacaaaaaaatcaagtgagttgggtcgacaatgtatattaaattactctatactctttttatattattctcttttatttttaccctctttcttaaagtttattatttttacctctttttctaaacattgtatcaattttgcccatgtcacttcaatatactctctatataactcttttatgtcagggtattttaggtacaatatatataaaaagaggtatatttcaattaaatatgaaattagaggtaaatttaattaattgattaaaaaaaagtgatatttttcaacttacccctattttttttttagagttgatcaaaattggggatttgtcctgccaacccataaaaaataataagttggtcatgtaaactttaggcccgacatgataaaaatcataatattatatgatttttataaacatgttttttttttccttccaaaaaattacaaatatgataaaataatttaaggtaaccagttacctccttagagtaactagctactttattctaatttttttttctattatttttctaacttttttattacatcattcacaataaagtaacaagaaagttttcaatgcacccctttaaaaaaagtctatctatgcactccctatgaaaattttttaatttaatttttttatggttcatctacgttgtagttaatgacatcctgtaaaattttaagagattcataaaatttaacatattcaaaataagagttaaatagtcagttacactcaatggaccccttttagagagggttcattccaaaagtatccaacattatatatatatatatatatttatatttactagaagaaagttacgtgcgagacatgtatacttagttttatgctaagtactttctacttgatttaaaaataatacaataaataattaaagaaaaaatataattagttattattttgaaattatttgtacatatatccaattaatgaataatcgggttgcacaatttaaattatgaagatttcttcaagtatcatacaaatttattaaatcaaaattactaatatattacattcaatttataacatccctagaacaatatatctccacaaaatatatatat

SEQ ID NO: 176039 - DNA, 777 bp, Cannabis indica
aaaatctttctcccccaacaaatgcctttccaaatacaagaagagttcgaggggcagccggcttccataaatgaagtggtgggatagtagctgttttttaggacccgagctagaagtgagtaaggattttgggtaagtctccaaccttgtttggccaaaagtgcttgattaaactccgttagacttctaaaaccgagacccccttcttctttaggcttgcaaagtttagcccaagagccccaatgaagcttcttgttttcctttgtgtctccccaccaaaaattggctgccaatgtatggagattgttgatgagttttttgggtagacgaaaacagctcattgtatagcttggaattgcttgtacaatagctttaataagaatttctcggcctgcttgtgaaaacattgaactcttccatcctttgagtttattccacaccttatctttgataacatcaaagacctccttctttcttttcccaacaaagcttggtaatcccaaatatttggcatggttcgagacaaggcgaactcccaatctattagcaaactcatgtccttgttgaggtgagatccgtttccccatacaaatttccgatttctctagattaatttgttgccccgaaagtctagaatatctttgcaacacaagcttcatagtatcacattcacttgtgttggcatttaggaacataaaactatcgtcggcgaagataaatgagaaaccttgactctatcttttccaaattgaactccattgagatggccagctctct

SEQ ID NO: 176040 - DNA, 609 bp, Cannabis indica
aaatattggtaagtataagttttagagaaattttttaatgtaatgtaagcataaaaaaataaatttcccttttcttatcacaccctataaataaattaatatataatgttaggtgtcgtttgataatacttttatttttaaattttttaattacaaaaataaaagtaaaattttgttttaaaaattttgtttttgaaaaacaaaatatgttctataaccacttttgtttttcaattttaaaaataaaaaataaaagtgtgttcggtaaattttatttttatttttatttgttaattttatttaagtcgggtctggggctggggtcgaggtcggggccgaaggtcgggttcgggttctaaagatttaggttggggtaggagtccaaaatattgataaaaaaactgtttaaaaaaaaattaaaaagtgaattttttttttttcaaaaattttaaaattttagtattcttcaattaaaaaattagaaaagtaaaaacaaagtttattatagtaacaaagaattttggtaaaagtaattttatttttttactttaatttttaaaaaacttaaaaaaactaaaaatttaaaaaattaaaaggtctaacctaaac

SEQ ID NO: 176041 - DNA, 655 bp, Cannabis indica
aaagaaatccaggctcagatcttgataatactctgcgacagaaaggaacaagggttagagatttgagcggaatgagtcatattatttcggtgcaaccaatgtaaggttttctaatttcttatgtgtttaatttcattgttttagagatattcatatttatgatgttaatcaacatacttgttagtaaatatagatcctggtaaaatattcccaacaatatcatgaaaagagtaatgaaagtgtgttgtttgttaagtttgtttagttcttgtctgcattttctatttagtatgctagcttttgagtcttgtgaaattattatttttttagttgcagttatttaattagatgtcgtttgtttgttgttaagaaagaagagttgaagactacttaagccactaaggctagcttagtggtgagggatggatgggaaaaagggagaggtcatgggttcgaacccaagacctttaagctacaacttattcattgattgtaaaataccattacgttacactcaaaaaaaaaaacgaagtcaaagtgccaagggaaaaggaaatgatgcaaggtcaaattgggcatgaaagttaaaactgggatgaattgttgctataacaaatttagcattctggccagtgacattggacaaagtgcagca

SEQ ID NO: 176042 - DNA, 722 bp, Cannabis indica
cttttctgtcaagaaaatttgttggactttctaattttgatttcgatgattttttttgtctaatctattgtacttcttggccatccattatattctatcttttaaaacttaataatatattttcttttacttgagagtgatgaactttttgttggaaaatcgatgaaggacatgaatatggcagtcaaatagggccagttttgttttccaaacaattgaaattttatgaagttttggttcgatattgacgaaaagctcttaattattttatttattttacagaactcagtgaataatttgctaccaaattgataactattatcatataaggggttatttgcggcaaaaccccctaaagtagggagatttttgcaactaacctccaattctaaaatttttgcggtaaaactccctaaactcaagttctgttagcacttagccctttccgtccatttttagctattaagtgccagattggaatgtccacgcatacacagtatcacgtggcacattttattggtccacgtaaattaatatttaaaaaaataaaaaataaaaaaatatttttctttaaaaattaaaaaattaaaaaattagaaaataaaataattttaaaaaaaataaaaataaaaataaaccctaaattttctaaattcactctttctcttccgccccttcttcttcttcttcttcttcttcttcttcttcttcttcataatcag

SEQ ID NO: 176043 - DNA, 699 bp, Cannabis indica
ataatttgtaatgttcttctttttatgaaaacatttctttcattcctatcaattttgattgttacctataaagagaaattagctaccatgaaagaaaaaacagtataaagatgtgtacaatatttcttaatttagtaagacccatcaaaaagtaatataattaattgaaaaaacagtcacgggtgtgtttatttagtgcaaaatattcatgcacatatctctattacttgtgtaatttacatgtgtccttttcttaaaaataaacacaatagtaaattgtaatcatacttttacttacatagctaatcacagtacaccatctcctcgtaaagttcaaattcttcatcccaatatcaacaaagaaatcagatcaaatatatatatatatatatatatatcataacaaaaaataaacaataaacaatattacagactgacagttatcaatgataataagttataattattgtaaattgtttgtaagtaatttattattaatataagcacgtgttgtgtagtggtagaattactttactagcatttttcttgtttgggttcaagagttcgaactcaccttaactcctttgtaaggattcaagttagacttggtccttgctgaggtggtgctatctatgtgatggtaattttcgtaagtgactaccgatgacccaattaattaagctgagatataagactctt

SEQ ID NO: 176044 - DNA, 474 bp, Cannabis indica
tattgagtggaggaaaatgagagtaagaggcataaggaagatagggaggaagatagaatagagtatagtggtgagagtcaattaagaattacagccacaacaagcaagggagtatagaaacacccaaccccaaaacttttatatggtattcaattttttagaaaatttataaaaataaaataaaattatttggtccatgttgtgaattgtgaagtgtgaacttagaatttattagttgtttaatttaattttttttttattttagttaagacttttgaaagtccataaatataatataggaagcttttatagtctgtggtggagccagcggcattttttgagtggggggcaaaaaaaaaactttgttaaatataattttaatagaaataaaaaaataatatgtaaattgaaaaaaaaaaaaaacgtaaaaactagtagtaacttagtaggtaataaaattaaattatagtagaa

SEQ ID NO: 176045 - DNA, 736 bp, Cannabis indica
atagtagtttaaataataaaaaaaaaaacaagtttaatttctgtaaaaaaaaataatatctatagttgagatcattttttatttattttagtattttatttttttaaaaaagaaaaaataaataaaaagaaacacaaatttaaagttttttatggcattcctcaagttttttaaaaaaatgccatatttagtgtaattaagtttttatgccatatatatcaaaacttatctttattttcccatatttttgtaaatagccttattttttttgggaaggaattgttactaatagttcaaacacgttaaaaattagagtgaacttttatagaatagtcagaattgacatgacgattcttttattagcccacctcctcaacccgtgttactcttctctcctgtctcgtcaaattcatgtggtaaaagccagatcaaagatcaaacgtagctaatttggtttggagattaatattgtaccaaatcgattaaatgtaaaactactatactcatcaccaagaagaaactccataattctcagtattttcaaaaaagcaaaaaaaaaaaaaaaaaacaaaaaatacaaactaactacaattacgatagtagggccttatctagagaattctcaatacatatgaacaaattcttttactctatttcaataaaatagtaatttaaaatttaaaattagtaatacatcatataggatataatagcaatactacatgaaatattatac

SEQ ID NO: 176046 - DNA, 543 bp, Cannabis indica
aaaaagttcaaagcgtaaaaataaataaaaaaaaaaaatgagtattgatgtatttttgtaatttttttaaaatttttgattgtagatttttcaaatgtaacttgttttgtcaatagttctacacatattatattgatgtataatataatcaatatataaaacaatttatgttgactgaatatttagtttcttttcactgaaattgattggagtaacacttttctgcaaaccaattttaattaatggccctattaaaaattgatgtactaatcaatggatttgcttatttaattaataaaataagacttcaattaaggattgactattcatgattttgatgttagttttatctttgttgattatataattggttcatttttatgttaggacaaatcattattttgcatcaacttgatgtattatgtttcttgagcctttatttgattagatgtattagatataattatttattacatcctttccttgtcacaaataaattttgataatacaacaacaataataaaaaagaagataataatgaaa

SEQ ID NO: 176047 - DNA, 930 bp, Cannabis indica
aaaataaaaataaaagtagatgtgataagatcaaataaagaaggtagaaccataaaaaaattgataaacatgactaaacaagggcaaacttacacacttgaaaattcgaagctcggaaacgtcgcctgacattcttgtcatcaagaacttgaatctcaaatgtaaaatatttcttcagattctttacgattataaccaggaatggtagttttataccaagtgttgcatttgggtctactggacaggtgatgtatgttgactgaatatttgatccaactatctctagcacatcagactgtatgtcctcatcatgaggacgtttaatatggccatcagaaactgatcaacggaaaacaaccacatacataaatacatcatcaaaattaataacatggagaaccagcaagatacatcatagtggcataatatgaagaataaaaaaaagtaagctagtctttgttattattactatcaaaaacaaaatatcttcttaaatagaacgagtactaatgaaatgtgcacgtatactagcctgaaatttatcattgtgatctaagtctatcctgtttggcagaccccaaacaagtcaattcattcctttgactcaatttaatagtatgtaatgtaatagaggacatagtgacagtgacacacctacattaaccatgaatacatgatttaaacttcatcccaagcacaaattcactccacgcacaagttaagacttaaaaattcgacacttcatgtattattgagagatgactaaacccagaagtaagcatacaacaaagtgtctccaaccgaaagaatcatatccaggagcagtaacaacaatttcagcagaagggtacagccccttatggatcagaaacaaagaaagcacaggagttcttcctaaacaaagaaggaatgaccttctctctctctctc

SEQ ID NO: 176048 - DNA, 529 bp, Cannabis indica
tttatttatactacatgaaagagcactttcgaatttatctttgcaaattataattttataagtgttaactgaaaaactttattccagtataggtataaagactttccaattatatgtagaaatgtagaatattcttaattatttttaatagtcactgttatgcatttaattatgacgaatgtatcatgatatttttttttaataaaatttagatgtattatactgttgattagtcaactgaaacattttataattaataacagttgccctccatacttttttttttttaaagaaaagttactatttatttatttttaaatatataaaaaaatatctgatgtattatttttatatttatagttttgaattgtttctataatgtttatgtgggtggctatgttaattttgattgtgcaatttaaattattctgttgttaattgtgttatgtaaattatatttgttaattgttatgtaaattgtctatatgtgaaatttcgtaaaaaatacaaaaaaaaaaaaaaaaactac

SEQ ID NO: 176049 - DNA, 585 bp, Cannabis indica
gatcccattgttcaaaaatagatagattcttgaccataccagactagtcaaaactctgacagaatacatccttaaatcactttcagttcggacgacgggagacctaaagagagaattactgatagttaggagaaattatgtaagctagcattattccttcattatattaaattaatcctggtgtgaaaaactcaaaatcataatacaaattttttattgagctaatttttagcatcaacagtatatttataaatttatgggttactacacctataactaattgacctaaagatgaaactctattttgctttttaaatcatacttctacgttgagttttttcaaactccaactaattcacaccagactatttaaaattagaccaaaataaattcaatgtcaatggtttggttaatacggaccgtttataattttgtagttcggttacaattttataattctcactattgtttcaaacttattattgtttttttttttttgaaatattgatatttgaaaataatcttacacagattatttaaattgattaatattatttttgagggttttttaaatttcatttatat

SEQ ID NO: 176050 - DNA, 1002 bp, Cannabis indica
atagattcttgaccataccagactagtcaaaactctgacagaatacatccttaaatcactttcagttcggacgacgggagacctaaagagagaattactgatagttaggagaaattatgtaagctagcattattccttcattatattaaattaatcctggtgtgaaaaactcaaaatcataatacaaattttttattgagctaatttttagcatcaacagtatatttataaatttatgggttactacacctataactaattgacctaaagatgaaactctattttgctttttaaatcatacttctacgttgagttttttcaaactccaactaattcacaccagactatttaaaattagaccaaaataaattcaatgtcaatggtttggttaatacggaccgtttataattttgtagttcggttacaattttataattctcactattgtttcaaacttattatgtttttttttttttttgaaaatattgatatttgaaaataatcttacacagattatttaaattgattaatattatttttgagggttttttaaatttcatttatatattgtaaattttgaaaagtaaaatattaataaaaaaatgaaacaattatgaaaaataaataataatttcgaaccaaatcaatccgttaaatgaattaatttgatttgtttaagcatttaattagtttaattgggtttgaaatttcaaaagtcgctatactaattgggtaccaaaaaaaaaatctagaacacaactaatctgtgaataagaactatattttaaagaaatataacatgaaagtattttcaattaatggataaaaaaaagtattcatccacttatctctacatttattatagggaaattatagtaaatgacctcaaatcataggactatgttagattatgtcctcatttcaaaataatatagcaaataatcctaaatcataagattatgttagtaaatgtcctcatttcaaaataatatagcaaataat

SEQ ID NO: 176051 - DNA, 845 bp, Cannabis indica
gaagatttaaaaagaaaaagtaaaaaaaaatagtgtagaaatgaggagagtatagtaggggtttttagggtggttggcgagggttttggcatgaggttgggttctgctatggtggctagttagtttcatgctgaagaagaagaagacgaagtgccagacaaagcttcaggggttttttttatataactctatgacgtcgattattaggaaataactgacggtaaataatcctaaaaaaatttttaacccacagccgactctatagggtatagttaatttctattaccacggttttttactaaaacattgcctctaaatgccaattttaaactaggcgggtattatcacactctttagctttcttttttataaaatgggttgaaaaaacagcatctaaaggcccatattgtagtagtgtcagtgcactgataaatcttgggaattaaatagtttgaaacatataatcacagttagtttttactgtggtgacaatactatcattgtaaataactacatatttgagatttagcagaatttagatgttaaacaattaatcatgaaataaatatgtaaataaagcaatagataatagcaaaaaattatcccaaatttttttttgattgaaaaataagattatattaaaattaagttttatttaaggcataaaacatcaacaagtctcatgtttctattcataatacattattatgtaagaaaatgaatagagttgagacttgtcatgatagaaaatattacactgaaaatatttataaggctaattaagatttttttttctcctgaactttaatatataccaaatcataccccctgaatttttaagatcg

SEQ ID NO: 176052 - DNA, 750 bp, Cannabis indica
attgatgaggctgagaatattcaaatgggcgaggaggccgcccttatcaagccccccaagtcgccatgaaaatactttcgtggaactgctgtggtcttgcaaaagactcggcagtccaagccttgaaggcttgggggagaaaatacaatccggattgtatatttctcatggagactaaatgtggaagcgttcgaatgaaagatgtggcgagagaattgggatttactggtgttgtttgctaccctgctaatggactttcgggtgggttctgtcttatgtggaattgggggttgattgtggatatagtaagaatggaaaatggtgtttttgaggctgaggtttgggatgggcaaattagtaccaggtggcgcctttttaccatctatggtactccgtatagctgggaaagaggtagtttttgggaagatatggctcacaagattaatctttgctctctgccgtggatggtaattggggacttaaactgtattttgagtagtgaggaaaagcagggtggaaggaaggttgatgtaaacgatacaaagtacctctatgaatttttagattacacagggggtattgatctaagatataaaggttgtgctttcacttggcataacaaacgattctcgaaaggtctaattagagaaaggctggatagagctattggctctcatgattggttgaatatgtatcagtatgcgagagttcataattttccaatcactagtatcggatcatgcacctatc

SEQ ID NO: 176053 - DNA, 1095 bp, Cannabis indica
cagtgcttgtatgaaaattgctcttcaaatatatatttccttaaaaggtttacaagttaacaaaggttgaagaatattggtaagtgttttttaacttgcatgacaacttttcctcgatattgcataggtttgtttattattttatttacttttatcattgtgtttaaagattcaaataaaagtagtaattgttttatttacttttcatgaaatacaatttacttttataagaaaacacaattttatttttctcattaaggcaaagtacgtagcttttagtgttcaagtttattagttgtggatgtggtatagtacttcgtttttactttatcaataggattgaattaatctccataaacacattaaagtgttttgattgttatgttaaatattatttttcgtcattaatagcgtaaattttgaatcttatggtttgattaaattatataattattttttatcaaaatgaattgaaaaaaataaattttttattgtctataccttttactttagaacatctcacaataaaaacaaagctatttatatttttcaatttaacactcttatactagataataaatattaagtatcaccccattaaatattagaatattttgaatagatgcctaaaataaatccgtgagcttaaatttaaggtagacaataacatactaatgtggggtgagcttgtagctcaacaagttggatgaacgggacccaacaagtgatatcaaagccaaatatttaggagttggaattgtgggctaagctcttagtgtaatgacttcgcaattgaaaattgcatggtgtcttgtattaaaagtctttgatattatggtagtcaagcagcatgttgagatggagatatgtgtttagagtcttatgtcaaaagtcttcatcacaatgtaaaaggtcgcttcttatgtcaaaagtcttcatcacaatgtaaaaggtcaagcgacgagttctattagtgatagtggcaatacaaagatgattttgccaaaagagaagctaccgtccttaatttgataagattgattgggtattgattgaagtctgataagttgtggcgaggcatctgcgtgttgttta

SEQ ID NO: 176054 - DNA, 360 bp, Cannabis indica
ataagaattgctattagagcattttcagtcaaaataaatgtttttaaaaatatttgatgatataaatatatttttagcatttattgaagtgaaaaaaaaatatttaaaataatatttttacttctacttttattattattattattattattattattattattattattattattattaaataatagttagtattattttaatattttttgagggacttatcattagaacattttaaaacactatgtgtcataaaaaatatgaaagagggaaaaaatatagagttaattgtggcaaaactcctaaaattttcattttgcttgcatataactcctaaaattcaaatttgagcggtaaaat

SEQ ID NO: 176055 - DNA, 530 bp, Cannabis indica
aaaaataaaataatgaaacaaaaaaattaaaaaaacaaagattaataaactcgcagaaaataaagataaaaaacagtaaagaaactgaaaaattaccttgttcaacgaaaaataaaaaatctttcctttcaagtctctaaaagtttgatttttggtcccaacctcattggtccaattcagaattcttgaaatcctggatgcaactcttttgcaaaaggtgtttaccattgcaggataacattcataaaaccatactatggatacccaaggacagcccaacgctctgtaccaaccatcgtaggactgacctcccttctcctcttttttatttttcatttcaataccatgctctattttgcctttaaaagaatcaatagtcaactcaaatgactccctaccccaacaatactcatcctatcggccgctgtaaatgacatctaaatcaaacctagaaacttccttatccagagtattgctaagaaggaaacattggatgaaatacaacacagagtgtttcaaacttagggatt

SEQ ID NO: 176056 - DNA, 717 bp, Cannabis indica
aaaatattaaagttttttgttagtttttagcttttttaggtatttatgaattaatacctataaaatttaagctttgatgatgagaggccattagggcatctccaatgaggttaacaaatacagttgtcccattattcccccacctaacacatttcgccaatttacaatttttttttgcctaattttttttatttaaaattttaaagagcatcggtgcctactttgaaaactttttattatctctctcttctctcttatatagtcagtattatgtggcatataatatacatatatttaattataatttttatttttattttaattatgtatattttttgttatataattaatttttttctaatattatttaatgaacaatatcatcttttattaaaaatatttaatttaagtactatttatagaaaaacataatattatttataattagtttttaattataattttagtttaatcttaatagttttaattttataataattttcaatttttttaaaaatatcttacacttttttttacaaaaataataataataatatatttttttttaactacaataaataatagcatcacaatagtgatttttaagaaatttctattttattatttaaaaaaaaaaaaagatattttttttagatatgcggattgaatgacataagtgacaattttttcttttaaatatgtgtaatgagtttaaat

SEQ ID NO: 176057 - DNA, 717 bp, Cannabis indica
ttctgattccttttactttcgttttcctttaacaacgacaatgggcttaatgggccttctcttttgcacctgagccccccaaatataaaagattcatacaagaaagtcgtaaaagcctcattttccttggcaaatttacccaatacattttttttcgaaaatatttacccaatacatttaaaacggtattttttttttttttactatttttatatatttttacggatttttcttatttatattttgataggtttttcacttttttctctttaaatattggttttaagtagcagtaacattgaaataatgctattctgaaataaggggaaaaacaacgaaaaaacaacagtatgtattttttaaagaaaaataaatctgtaaataacagcaatttcgtaaaactgtaaaatttttgctatttttatatatttatgaaataatccatctactttcctttaacaacaagaatggtcttaataaggtacaagaaacgacatgtcgtattttttagtcttgtctgactatataaatgataaaaacgacatgtcgtaattttagtcggtcagagtcactatataaccataaagacgacatgtcgtatttttgagtcggattgactatataatggctgaaaaacgacagagtttggttgagctgagagtctgaaacttttgagagtagaagaagcttgctgaagcagaggaaaaatatatcaat

SEQ ID NO: 176058 - DNA, 835 bp, Cannabis indica
cctttcaacaccacctccacatttcccatccaaaacaaacatagacccccactgtgtgtcccaccttttcaaccacaagcttccaaacaaaacccaaccgaacacacatgagttcaagggccgaatgagtaacctaattctcagacaagaacacaatattgggtgaaaactctttaacatgtcaatcaagaatttagaacgtccagcaattcctgaaatcttgaatgttctatgctaaacaactcataatgatcattcttctttagagaatttttatttttatggtttagttaaggcataagttgtggtcataggcatagcctagtggttttatatttttccttacaaagagaatatcttaagttcgaatctctcttgtcctaatataaaaataaaaaattaaggcacaaatcggcaaacatatatataattagcgataatagacgagtaattgattacttttaattttttttccatatttatttttttgattttttttataaataatttttggaaaaaaaaaggacttattttatataaaacccataaaatatgatttccattttttttcaattgataatttttcaaaattaaaattttagccaacaaaagtttttgaaatttcctcctatcctatcaaacacctagtacgataatgtataaaattggacggttggagcatagcaccatggcaatttggaagcatgagaagaaaaaaagtgcagttaattaaagagatttttaaatttgaaagagagtagtggtgtggtgtggaaagtaaataaaaacaaatttctaactagatcgacctgcttctatcacattcacatatatc

SEQ ID NO: 176059 - DNA, 864 bp, Cannabis indica
ttattttttttttttttattttccccctcaatgctaaagaagtagaatagtttattgaacttctttgaccaaccataaaaggtgaaaaataaagtaacggaatgttcatttctaaaacttgaatgagcttaactacacctgcaaataaaacccataaatgaaaaactaaaattcaatgtaaatgtataacaaaaaaaaaagcttaaatagaaaataaaaagaatgtaaacaaccctagccattagatgataaagaattgacggtagtgatcaatctcaacacaaaataaagacaattaaatagccaaaaaccctcttcctcacttgataaacaagaaatagaaaaattgaccataaatatatacaaaacacaaacactaggccaatgtccctacttctctcttatatatatattttctctcaatctcatgatggagctagaaaccaagcttagagaaaacaacacttattatccattatttttacacgagaacaacaaccacatgaaaccttactcaaaagacaacaatttagagcttcccataccaaagggtactacaacttatcttcaagattttcatgttcatgatcatggtcatcaatttccccttaatgggtcctcatcaaatcctaattttgggtcccaagctccaatctttgatcaacccaatttcgaagctacactactagcacatatgggagttgtgaaaacaatgttggaattctatatgatcagtactacaattgtagttataataagccctttacagatccacatttcaaagtaataatggaggagagtacttgaatattttcccaagtagatcaaatcccacagaaatgttggttccaattggactattaa

SEQ ID NO: 176060 - DNA, 1248 bp, Cannabis indica
atgaactagcaaacatggaaatagaaaaagaataataataagaaaaaaaacacacaatccctatattgatccgttttgcgtgatcctggactctgcgcgtccctgtttggtattctttcatccttgctgtggttttgtgggagtgtgtgtgactcacaatggcttcgagtaaaggaaaggagataatggaaactgttgaatgtatttcgaaggaggctctcatgctctcactagagcaacatggtgaagaaggcgaggtgggtgctgaatacatcgaaaaatcagtggtaggcaaagtgatatccaaacgtggtatcttcaaggctcttctgaggaatgttctttaccagaaatggagatcgttcaggggatggagcatgactgaggtggaacctaatatttataccattaggttccaaaagaagctggaagcagagatggttgtagagagaagtccctggcctgtctgtggaggccatctgattctgaagcctttggcggcagatggtcgttggagttctacggatcttgatgtcgtcccgatctgggtccgtgtgtatgatgtcccaccgcggttcttcaccaaaaagaatgctacggcgattgctaacaggattggtggggttatcagcatagacagaatgtggaagaatggattcccaacggcggaatacattagactccaggccaatatccacctgaaaaaacctttgctagtgggattaaaccttccgatggatgaaggtgtaagtctgtggtgctattttaaatacgagaacctccctcgtatttgttttaagtgtggtttagtggggcatgaggaggttaactgtaatcggagacgccgggtgatttcggacgatctaaaccacacagtgccgatgtatgggccttggatgaggttcggttctaggctaaagcattgttttgaaggagttttggcggaggaactggctagagaactggagggggtccatttgggacctatggcaactaacacgggtggtgtggaggctccgatggctgaagataacataagccaacgggacaccgaagttacaggaggccatgggacggccctggagtttgaaccaaggctgctgggaactgagatacaccagaaatacctggaggggaatgctggcacggtggccgccggtgagatggagcctatgggggcctcctcgtggagggacaggtggcgagtacgggaaaaggtactgacgaaagtggtggacgttgaggccg

SEQ ID NO: 176061 - DNA, 830 bp, Cannabis indica
atttttagaacttagccataaaaggttattagattattaccttattaattttttttagttcccatcaatagggtattacccattaaaaagtgttaccatatatatatatatatatataaaaagaattataatttttttaaatactgaaaatataaatgtatgccataagaataagtgacacttatagttaggagctaccaaactttaatttataatagaactagagaatagattcgcgtttcgcatggttttaataattttttttttgatcaagaaaaaaagcttcattaattaacaaagcaaaatacatcagatagctagagcaaacaccgccccttacaactcaaccaagaccaacatgacacttacctattttgtaatctcaataggtagtctctctcttgcttagacaagtttttcatgtttacaagttgtaatttgtacttaacaaattttttcacatcatcaactaaactaccaacagaactagaataattgctgaaaatacatctattcctgttgagccaaatattatagattacagtcgccaaaacagtaatgttgagccgatgtagcctagctcgacctgtcaaaattacccaatcatactatccattgtaatctgtcggccaagccctgaatcccaaccacgaaaaagttgtattcaggactttttgagacaacagacatctaaagaaaagatgttcatgggattcctccttctcctcacaaaccggacaaaggttcgaattaagtactatatgaaaccgagataattttttaattacaaatgaaattttatgtgtaatatagtttttttttttctttta

SEQ ID NO: 176062 - DNA, 1040 bp, Cannabis indica
gtcatcttcatctacctcatcatcaagatcaacaagatcaacatctggaagagctttcttctttgcagcagccctttttggagctgcctttttcggggctggagcaacctctggcgcttctgtaaccaatatgctaagttaggccaaagtatttctatcacaatgctaagcaaagtttaagaagaacatgttacctgctggtttatcaggagatgagtcaagattataggcagcaagtcgatctttcaactcaagtacttcgtcgtcgtcgtcctcactgactaccacctgctcagaagaacacataccatagttagtttgtgtttttctttttcttgttaaggtttgagagaacatgggaaagaaacaagccaagccataccttctttttagcagcagcagccttctttggggctgctctggcttttggtttcgctttctctggaggtttctctgaaatacacaatgataaatattacattagaataacaatgttgaagataaaatggaaattcatgcttgtaactaactaatccagctcaccaatatccattgcagaattaaatgtttcagtgatttgttcaacttcagcattcgtcgccttcttggtgttcttgcgtggggctttcggtgctgctttggaaactttaaaagcagccgctgcccccttctttatttggccttttgcattctttttcagctcctctgctaatgcatcacttttttcaagatcctgaaagtaaacaaaaaaaaaaacagtcagttgaaactccaaatgttggggaatgataacatagtcttgctattttcaagattcatacattcagctcgctctcaagattatcaagatctttagcccacaatgacgttggagttgcttttcgcaattcatcaacctggctgttaagcttatcctgttcggccaacaatgcttgaaccttctctagtgtcaatgttccaattgccatagacagcagatactcataatcaccaatgcgaacttcggtagcagcagcctcagcatcatcctcgttatcatc

SEQ ID NO: 176063 - DNA, 515 bp, Cannabis indica
ttttttttattattattattgttcagagtaaattttcttttattgattaaattaagtaaaaaaaaagcccatttctaatttgagtacaccaatttcataaccatcgtgctagttctttggttttaagttttttttgttgtttttttttttttttttgtgaaaatatgttgtcgtactaaatattgtccgtcctcttttagaaatttttgtacttttggacctagttagtgtattgataatttaatctcaactgcccttctaatcgagggcgtttcaagactagttaatgctgccataaaagcatgtattatatttatacgttatctgttagtcatatggtgagataataattaatatatatatacatttcccatgagtcaccaaaccacgtaatgttaagtatataaatgatttttttaagtgcttgaaaaaactgtgttaattattcactcatttttcccttctatattttatgtaaagttactgatgagtagcattttcatatcttgtaagtt

SEQ ID NO: 176064 - DNA, 615 bp, Cannabis indica
tcaagaaaagtttctcgcttctgctcaagttgttgagaatgcccttagtcttgatgaatctcttatcatagatcttcttcgtcgtgataaggataatttggcagctatagatcatttgtccatatctgttactaacaagacaaaggattttgaagattttaaagcaaaggaagcagagattattgcggcagaactagccatacaacagcgacgagctgagttcgaagctgaaaaagcatcatttgaagtagatctttctagtctcaatgattccttgaaggagaaacgacatctcgctgaggagatagatcagtcaaagaaccaagctaatgtggaaaaattccatgaagctgagagagcgaaagcaacactcaagattcaagaagaagagatccagaggagactcggcgctttgactttatttctccagatggactgaagatcttacaactttgcttctaaaattttttagctttagttttagttttagtctttgttagcccttttttttgtttattagccttgaggactaatagtattttgtcatttagaccttttagaattttgactcctttgttaggaggaataaagaatatttatattttttttattttg

SEQ ID NO: 176065 - DNA, 790 bp, Cannabis indica
agggatgacagtgaatgcttggaattggggttaaaaaatttctacttactttcctaagaatatgtaataaatacaactaaaattaaaaaaagttttatagtataataaatatatatacaaacagatacaagtacaattattgggcaacttactttgatcatcaaatgctcatcggaatccaagttcaagcaatttgatttttcatcccatatcttgacagtcacatctcgattttcttgagtgcatataacacctgttaaattccttatacaacccctaaataacttaccaaactgagtgtctccaatcagattattctggtggaaactgttagtgaataattttaagtcctcagatgtaaatactacaaggctagaatatgactccattatggagaattatacatagcaaaagaagaaaaaaaaaaaaaacaaagactaaaaaggagaagatctaaagcaatgaacaacagctttttaaacttagttacatagctaaatgtttgaccagctctctaactaaatcgaagaactagaatcaatccaacttgagtatataattatatatcaatgagaatgagaatgagatcatttttacttgttcaattggacaaacgtggtatggtggagctttttaataaataatggcagatttagtcttttacataaagtcgatcttgaatattttatgcccaattttcatacacaatttgatgcaaaataatgttaattattatgtttagaaagtccatcactgttaacccaaaaattctaaataaatactaaacttg

SEQ ID NO: 176066 - DNA, 1029 bp, Cannabis indica
accttattaacactttaattaataattatgattatagatttatgtggtcacatcattagtttttggaaataattaattgatcataaacattgcaaattgaactacgtacccacatgaatactaaaaattagatttaaaatataattaataactcaaaatgtataatatatatgattctttagtcatgatcgatgctttatggctcaaaggtgaagaaatggacaggatggtgtccactcctaatacacaaagttttttcaaacacaataataaggtaggtactaatatatatatatatatatatatatatatatatatatttatatataagatgcttcattcctattgtacttttagtttcataaaatgatttcataataagtagtctcagctctagatctactttgaatcttgttttgtgaatttaagtagtattaatggtggaaatgataatggtaatggtgatggtgaattagactagtagtactacttctacttgttcttgttaatttggttggtgtagttagttgtgaccgttagtatagttaaagacagttagttagttagttaagagttagttaattctgttagttaggtgctgttagtttcaagtgtcaagcctataggactattgtatataaagtccctgtttaattacttgaaactaacacacttaacaccattcattgtattcattgatacacattaataaagatacagatttgatttgattcattagcattgaaaactggttactggttgtgtggcattcgagtagaagactcaacagtgtggtatcagagctggacgggttcttgttgcttgaattggatcaagcttgcgtgggaacaaacgtgaagaacaaccagggaaggaaatggggaatgccaagttcgacattgagaagtttgatgggaaaaacgatttcagtttgtggagagtaaagatgagggctctcctggttcagcaagggattcaggatgcgattcttggtgatgacaagatcagagacaagacagatgcagagag

SEQ ID NO: 176067 - DNA, 713 bp, Cannabis indica
ttttcctttttctttttttggttataagtaaagaatttaatttttaattatataaatttaacgtaaaacttaactcaatttaacctttttttttattattattactattatgtttgaaagctagtttgtttaattgagccgttaagttgacaatattacccctttgaatccacctccatggttcaacccaacccggcctcgtaaactagataaaaaaaacgtttattaaatgtttttatattgtttactaaaattaagtttgctaaaatcgaaaaaaggggttaatttcaattgtttactaaaaatatatgtttttgttaatttttcaccgacttaatttctgtatacaattattactaacaaatcctaacaaataacgattaacaaaataaaaatatattcgaaagagagagactaagcaacaagtagcttttagactgtaaagtgttatataataaagatgcaaaaaaaatcaaagtgggtggagagaaaaaggaattgaaactagatttgaacaagaatgcaactagtctttttattgttggttctttcgaaaaaaaattaatgtgttatctacaaaataaaatagaacgaaagatatactataatgtagtgtagtaacgagtttcaactcaactcactgagttgtggaccaacaccgagtcacgtaaaatatcaagggtacaaaacagaaggctgtacaaaaataaagg

SEQ ID NO: 176068 - DNA, 712 bp, Cannabis indica
tttgttgtggctacatttttaagtattattgtttttctttgttaaattcaaatattttttgaaattttcttatataattttatttttatttaattactattttatattaacttcataatttgtatcttttgtatttttatatttacataatttatgtaaatatattttatattatgtttatttactcccttctttcaattcttttatattattcctacattttatattggataaataccattttggatcctgtgttttgcaaaagttacaaattggaccttgtattttgttaaatgacaaaatggaccttgtattttctaaaatagtaaaaataggaccctgagcttaatttttgacaactttttttttaatacaaccaacttgaagacaatgcttaatacgaacagatacaaaaaatgtaaacagttttgtcatagcacttttagatcggattataattaaatcttattttgacaaaaaatcaattcagggtcctatttgtactattttagaaaatacagggttccattttgtcatttaacaaaacacagggtccaattagtaacttttgtataacagagggtctaaaatggtatttacccttttatatttgaaaaaaaaaaaaaaaaacctataccaaaaataatagatccgaaaaatacaataatatagttataataatatatattaacatgtgccatattgtatagat

SEQ ID NO: 176069 - DNA, 654 bp, Cannabis indica
atggcaattttagtggtttgaaacctaatgctccagcaaaccatggcgtggaagcaaaagttggtgagaatatggaggggaaccgttactctgtgaggagtccagcaccaagaggcagcctcggctcgaatcagaacttacccaattccagacctgaaggaaggcagccccacattgacacaagcagacaggggggatggggaaggttcagttcagagggtgctaaaaccaaataggatgcccaagtaaagttggattttacattgtattttataacccccattttttatgctgatatgctataaatggtatttgcccaatccccatcaatcttgagatgtctcagagataattttgttatccataagagaattttgtcatctcaccagtgattttatttattcattaacatattaagtgggttctggcaattaaggaccgacattatggtgaataatacaagttttagttcatttacagttaataaaaaaaattatgtttcatgttattgtttggataattttttgattatgtttcatgtttagttttggatgatatttcttaataaagcattgatttaattaaaaataaataaaaaattatggttcactcaattttttttttttgaacttcaatttaatgatctttgtatat

SEQ ID NO: 176070 - DNA, 631 bp, Cannabis indica
atgaagtaatccaaggtctttcagtgaaaattattattccatgtccaaaatttgaatgaaactagccatccattcataattgttccctgttacaataataacatcactatagatcaaaactaagatgataatttgatctgtcatgtatttgaataatgaagaatcaaccttagaattatagagctttcaatcaattagagtgtcctcaatttatcaaattaagtacggggtgcctattttaagccatataatgatttgtttcagtttgtaaatatagtctgattgctcttgtcctcaaacccaagtgattggaccatgtacacatctttcttgtaactcttcatttaaaaaagcattgttattaatgtctagttgcttgatttcttaattccttgatacaataagagtcgagataattcgaatggttgataacttgatgaatgaaagtctagctaaaatcaaatttcaagcctttaatgaaagcctttagccacaaatttaactttgtattttgtattgagctatctgtattttttttcattttattctttattttactaaaaaaaaatgtaatttagagaacatggttgaagacgcttttacaaaactataagatgctaaagccaaaaag

SEQ ID NO: 176071 - DNA, 676 bp, Cannabis indica
atgctagaagcaaaaaagctaacaaactaaacacgtagaaccccacatgacaattaatataacagaaaataaaataaaaaaattaacatgcacaaaataatcatagacaagactatctggatacagtaactgatctaatttgacaaaaacgacatttacaatatttttgtgccagcatggagaatttggattagaaataaagaaaatattgctatcatttgtcacactaaatatggagaagaactgttgttggagagatatatgcagctcgtaaagcaatgattgaatccatgtcactacaacaaaaattgtcatcaggagcgacttttttcgttccataaaaccttttaattcattccagaagattatttagtgcgactagtcattcctaatattttattcctgataactcgtgcctgaaaattgatatcaggaacaaaatgtagcgacgtgcctgatgctaaaatatttagaaatgaaaatgaattattcctgaaaagtgaaagacgttctaaaaaatttagtcaggagcttagtttttacacattatcaggaacgactgttttattatcagatacaatgcaagacttctaaattatgctacaattgacgtcctactaatggtgacttgcttcagagattttcaggccacaagattccttccaaagtagacata

SEQ ID NO: 176072 - DNA, 743 bp, Cannabis indica
tactataccaatcttctctttatatttttgctatgaaaatcgtttatatcagaaacaaagtacatattagagtatgatctcgaccattcattactaatcagacaatactgtagaatctttaatggtcttgcactattggaagagtactccatcgcccaaggctccccactacacacccaaaaaattttaaaatttttaaatgatactataatttatatctatatttataatttttaccattgtatattataaaacacaattttttacttcaaataagtcttttttgtaagtgttatattttatattctattaagaaaacatgctcaatttacttttcaaaaatattatatttacattattaccactacatattaaaaaatacatctttttttttctactttaaaaaaatgtccaattgtaaatcttttatcactctattaatctgaatcttgatatccaaagaaaaatatcaatatttcattactttcttttagtttaaggactaataacattttaaaataattttttttttaacttttttattagaaattcacataacaatctctacttagaaactatcggagcaactacggacgcaacactcaaactgtaaattcaaaaaataaaattaaaaaaataagtatataaaataattactcttatgtgtaatgtttttatgtgtaacgtgtcatgcagcaaggtgatcggtgccaaatactacaatttggaggatgcagccgggg

SEQ ID NO: 176073 - DNA, 630 bp, Cannabis indica
tgaacaaagctgagcagagattgagttggaaaatcaaagaccaacgaaagattgaattttcacttttcacacaaagtaataagagtagccataaatgtaaataattataatacatataaaataagtaataaaacaatttcaacatggggatgtagctcagatggtagagcgctcgcttagcatgcgagaggtacggggatcgataccccgcatctccattttttgtttaatctttttcaacacaagaatctgacaaatctgaagtctacctcaatctacttccaaccatttgataccaaattttaatgggaaatttgattttctatacttagaaaatcaaaaaaatttttccctaaaccaaaaatttaaaaactaaaaaaactattaccttttttttctaaaaccccaaaaatacccccctccacaatattctctctctctctgcatcatctctctctccctctatctcaccccaaccgcccaccctccacccgaacccacccctccaccccaccccaccgtccaacccccaaccgcccgactccacccacccctccaccccccgtccgacccaccgacccccaaccccctcccgacccccaacccccaaccccgaaacgacgcaacccc

SEQ ID NO: 176074 - DNA, 802 bp, Cannabis indica
gtcttgcatggtatcagatcgatgtctaataatggcaacaatgtttccaacaatggcgcatgataacttttagtagatctcttcctgttggagaatgagttgcacaacaaaatccacaagtagaagcttaaatcacccttccaaacaacaatctccttcctttgatcacaggttggatctcaccaattactcaatccatagatccttagttcttgttggtgttagagcctatgatgttgatcgatacatcctcgaccttaatcctccaccacaaatctacagttggataacctttacagatgatgatctggttctatacattcttggaggcctcatattattaagttgttgttattaatctcgcctctcgcacaaaatcactcactcttcaagaagtttagtttatgcttcgaaaccaaaaatgcgcatccaacaattcactattaattctttcacaaatgttcaagcaagcatggttgctactaatctcaacaatagtggtcgaggatcttattgagatcataattttagaggactatacagaggaggtagaaaaaatttcaacaataggggaggtcgtggaaatggacttatgtgtcagttgtgtggaagggtaggtcacacagttgtgaagtattttcatcgatttgaaattaccttcaatgatttgagtgttagatggctttggaaagcatttgtattggaacgaaaagttattagatttgttattctttcaattagttttttgttatgacaattgcttttttgctgattctttactgttgtattaatgcacgaaaag

SEQ ID NO: 176075 - DNA, 1108 bp, Cannabis indica
tttaggaattctagtatggtccaaccacaaacatgagaacatgaatattttttttaacttaatccttttgtttttgacagggtattcccaaagttgcaaatattaagaataactataatccagcaacatggatgttagaagtcacctctacatctgcagaagctgaacttggtgtagactttgctcaaatatacagagaatcttctatatacgagtgagtactatcaaggataataatatcagtattttacagtttcattggtattaaagaggctaaattttatgtaatgtaggagcaacaaaaatcttgtaaagcaattgagtacaccacaaactggttcaagtgatctccacttccccactcgcttttcacaaaatgcatggggacaattcaaattttgtctatggaaactaaacttgtcttattggaggagtcctgactaaaacttgagacgcctcatgcatacatctatatcagcagttttctttggtgcactgttttgggaccaaggaaaggaaatgtaaaaatctcttcttctttcctattcattcgatcaaattaaagtgtttccaaaactctaattttctttattcaattttatctcttccccatcttttcagaacaaaccagcagagcttattcaatgtatttggttcaatgtacacttctgtgatctttttgggaattaataactgcacaactgtcttacaacatgtagcaacagagagaaccgttatgtatcgcgaacaattcgcaggaatgtactcatcatgggcttattctcttgctcaggtacattttccttagaagttgctcgagtctcctgcttatgatcaagcctcttattcttgaactattacataacctttctccaacttcattttgtaggtggttgttgaaatcccatatcttttcacagaggcagtgatttttctgataataacatatccaatgattgggtactatgtgacagcatataagattttctggtacttctatggaattttctgttcattgatgtacttcaactacctcggaatgatgctcgtttctttaacacccaacttcaacattgctgccattttagcttcagttttctacatgttg

SEQ ID NO: 176076 - DNA, 572 bp, Cannabis indica
aaatttctcatttatctcctccatcttaagtgtttgatttctctaataaataaaacaaaatactcatgtttttttctttaaaaagaaaatacctatatttttagtttgcaattccttttaaattgtactccatttgaaaaaaaaaaaatcttctacttataaggtctcaaaaatatttttttagaaactacactttccaacttcacccataatatcttataaattctaaaaattcttttttttttttttcctacctaatctttaacatctataacattatataaaagatagatgtttgagaagaaactccattaatatttataattattatatatatgatcctaataaaaaagtaacgacaaaaatatcttagaacatctctaaatgaagtgccaaaaaagatagtgtatttctatattttactatcttagaaaaattaaggctgaactccccaactttcacaatcgtttcgatatatactttttctgtccatttggtcgattatgtgttcaaatggactactactgtgtatataagtataaatttgattagtacacataatattaataatt

SEQ ID NO: 176077 - DNA, 629 bp, Cannabis indica
aaaattgctaaaaggtactattgttgcctatcacactcatttgtgtcataccgtaattaaatagtgaatctcctaaaatttaaaaaaataatttttaaaaatatacgctaactaattgtataaagttacttatacaagataaataataataatttttaatttttattggtgctagtgcccaataataattcttttataataatatatgatatgaaatgggtcattaaagcccacaagtgggggctaagtagatgtattataagcatgaatgaatgcgtaattattgttaccatattttacatttcatcattaataatatttgcctcttttgttaaaacttaccaaatgagtagcaaacttaactctttaggatgtacaacttattaacaatgcattaaatggctcagtgggaagaggttactgttatacttaatatggaagttttttatggtaaatagtaaatagtaaaaatgtgtagcaaaccgtttttggtttagacaactgtaagtattaatttcctgttgaccaagtaaattaactccaccaaaatataacgtttgaaaacaagttcatgaaaatgatgcatttcaaatcttaaatggacaataaattaaaatagataatgctag

SEQ ID NO: 176078 - DNA, 557 bp, Cannabis indica
aacgagtgaggaaggcaatagcattacaaaaattacttgaaatatactcccaaaaactaaaactatacacaaaataaacttttcaataaaccaaaagagcataaaataaaaacattttgtgtaactaatatttttgattaaaaatttatacttttatattcaatttttttccatcaatttttacaatattctacaaagacacaaaaatttacataaaaataatagaaaaataacaataaaataatataaaaaataatatacaaataacaaaaatttcaataataaaataacaagagtataatataaaaatacattacaataccatattttatgtagataaaatcttaaaaactataataatgttcaaaattcgtatttatgttttttttttgtgttttttttaaataaccaaaaaaataaaaaaaaaaataaaaattgtgtatagtgtaaattaagagcccagaaaactgggccaaagcccagcccaattagttgtctatcctcaaagctatctcaggtctccagccgttagttactctcaattctctctctctctc

SEQ ID NO: 176079 - DNA, 1079 bp, Cannabis indica
  modified_base (8)..(8): a, c, t, g, unknown or other
ttaaactntaatgtaaattctttagagtttttttttaagctatttcttttatcgtgtagtaataaaattacatagtaaaattaataaacaataagagaataaaattcaatattgtttgattatataagaataatataatatgttttttaatatatattatatgtatgtaatttgatttgatcagtaaagtgtcactcaataaattaaccaatctaaataaaattcaattattcacatccaatctaattatattcaattgtaattgtaatgtatctaatttttatatttagattgaattaaattagtttggatccttctcacccctagatactaacaagaaagaaaaatgtaaaatctatttccaggctaaaagtttaaaagagaaagaaaaggcatatttgggtcaataaaactcttgatctgtctgtctataaaatagtctccttcttaagaacacggacttcgtatatacctagacagtacagtactacaagtacgtagtattatgtatatgtgtatatatatatatatatgtagtgatatgattatgaagaggggtgattagaatgattcttaatttgaagttgacctgattaaaaagattttgttttaagaatggttgaagcttacacgtggcttatttttttaaagaacaaaagaacaatatagttgaaacttagtaagatccagctgttattgagttcttaaactacatttagtttatggtcacattttaatgaatatgccatttggttggtacccaatctcaatagatttatatttttatatttcactcttcttcgttgtttttattataagaatatttttatttaaggaaatatatttctatttaaggaaataaatttctatttaaggaaataaaataaataattgattttctgataaatgaatattttatattcattgaatctggacaaaatcaattatgtaatattctatatatggtcagatttctatattcattacccgatttgatttcctgaattaattgtcaaaatattctgacaattaatgtggcgcagatactgatggagtatctcacctataaatatagggtc

SEQ ID NO: 176080 - DNA, 777 bp, Cannabis indica
gagtcaatcatattgcaagagtaatcttttttactgtttacagatatttttataccttttggattatatgtgtaccataatatacgctattgaattaatcaattaagaaaattatacaatcttcattctttttatatattcctctgtttctgtttcctaagctttttatctattataaagcgcaagagaaattttatagaagttgtctcacataatggggtggattgattagaagggtaacaaactataagtcgtctcttaagaatgcttttaaaacatgaagagttgaatcatagatacatggttttaaggttaatcatcgaagcccttccatctcccatttgatatttgatgtatgcatgtgatacttttatcttttaagctgacatgggagaaggtcaagaggttcaaaatcatcttgatgattatggtagatagtcaagtaattaatgtggggaagttagttgttattttctctaagaatgtggattatctgcaagttaaagtgaatatcatgaatgctttaggtttttgggcttaacacaccaagataagtttctcggtagtccaattatttgttgagaatattttaccaggatctagacttactaacaagtatgttgaattaacatcttaaatacgaatatctctaaaacaatgaatttaacacatagggttaaaaaaacttacattggttgcagcggaatataatgactccttccattcaagatctctagcccttgattcctttctgtagcagagcattatcaagatatg

SEQ ID NO: 176081 - DNA, 741 bp, Cannabis indica
aaattaagttgtttttttttttgcttttgagttaaaaatatagggttttgttatctaatatatttttaatataataatcctataatatatttaataaggataaaaagtaaatgaattaatatcctcgtacaccacgcttgtccttttattttttcttcatttttttttaattatttttagtgatgcattttgcgtgagtggaaaaattttcccactcacgcattaggtgacactatagcttttttattattttttttttaaaaaataaaaattaatttaaaacactttgaatagttttaatgacctacaatctgggtcccaaatattaaatttttactgtctaataatgtgagtcactaaaaaaaattcaaatatttagtgacctacacttttgtgcgggtcactatagaatgtcactaaaagctaactttgtagtagtaaaaatagctaatggtgtgcctgtattttcaatgccctattgtgttttagtttatttacagttttctcatagttggctgaccataattaaatttttaaaaatttcaagaaacaaaagaaatttcatttctcatacagttcaatgggcagtttgataaagaaataaattatgtaaattacgaagctattgatgaattcatctcaagagattgcgaatataacaacaaaaatcaaaaaaatatatgaaaccctaaaaacaaaatcacatgtaaaaacactaaaaagaacataggcaaaatttat

SEQ ID NO: 176082 - DNA, 561 bp, Cannabis indica
aaaaaaaaaaaaaaacaactaagcacgattataatttctgatatatatatatatttttaagcaaaatttgaactttttggtgtcagtttgaactgacagttaaaaggtgttcaacctcttaagtgtcagtttagaaacgacactaaagagggtgtctttttaagtgtcaatttttcttttagtattgttgggttttatgccctaaataaaactctttacaatctgattagttatcaatataagaaatttgaagtgattgatgtttgcatgaattttacatgctaatggtttaatatgtttaatatgtttattacattcatacacacaaaatcagttaaatccagatcatatgtttattcacaattacagtatcgtcaacacagtggaatgtgattgtgatcatatgaatcaaaagttttggtccctgtttcatcagtgttattggatttacactaatgtgataatcagcgatgatgtgtacttacacttggagtaagtgttatgttctttccaggacattagtaaagtatactagtttcgaatgtatggagtatacattgg

SEQ ID NO: 176083 - DNA, 526 bp, Cannabis indica
ctaataaacccatcttcatcaatatctgtggtcttcctattatcctttttaacaatccattgttgtttggccggtgcagatctcttacattcagcagctgagtgaccaatacccgaacaatgagagcaacttataggcttccattcatactttacccccaccgatgtattcatcccatattcattctcgaattctagcatatcaggtagtttttggtccatgataacctccactaacaccctaggataattcaatctttccctttctctagtaatagaatcttccatgagaggtttgcctaattgcccaactatcttaaagagtgacttttggccccaatacttcagttctaaatcctctaattgcacccaaattggaacacatttcacatcctctttcttaaagttgacattaggatcccaaggtttcatgataactggcctcgtaaaagaacatagcccactaatgacttgatctctatattctagcagaatgaaaacgaaataatagaagataccatgagacg

SEQ ID NO: 176084 - DNA, 621 bp, Cannabis indica
atgattcaactcttcatgttttagaagcattctgaagagacaacttatagtttgtcacccttcttatcaatccaccccattatgtgagataacttctataaaatttctcttgcgctttataatagataaaaacataggaaacaagaaacagaggaatatatggaaagaatgaagattgttaattttcttaattgattgatacaatatcgtatattatggtacatatataatacaaaaggaataaaaatatctgtaacagaaaagattctcttgcaatatgattgactccctaaagattagaaattacagaattctagataattgtagaatgtaggaggacaggtgtgaatgtgggaaataattaaagtgtgcactgctccactatttttgacaggatccctcaagcttggcgtggctggagagattacaacaagcttgtttttcaaatagttgaattggctgattgaggtggccttagtgaatacatctcctctctgttcagatgttagagtaaaaacgtacttacgatcagccctcgattgatcatgtctctgtatgtaatgaacattaaacttctatgtgttttgtcttgctgtgaaagaccggatttgaggatagttg

SEQ ID NO: 176085 - DNA, 679 bp, Cannabis indica
gcttattctttaaaaactattagatcagaaaaggttagcgtgagcattgctgctgctgcaccagaggagaagaaagaaactaaaaactaaaaaatcgatattatactttcactggcgattaaagaaagaaaaaaaacatactttaggccacatttgatcaaaggattcattgtttgtgaaagggcatttttttttcttcatttctttgcagctgatcaaatttaagtaccttgaacttttagtaatataaattttttgtgcaccttatatataatgccttttaatctgttttgttttgaacattgtttaactttttcttgtggaagtatacagtctattacaacgtagtcatatgcatttatatattacatgaaaaaaaaactatatcaaatgttctgagaattttggctagaaaaatgatgccttcaagttcaagtaagatgcgttttttttttttttttgcctttttctatttactattatatagtatgatatcatattcctttaagcattcttcttagactaatgaaacaccttaaaggtctcatcatattgtcttggaaaagtttggagtatcttctaatagaaaagataatttaaaagaagtctcccctctacccaaaaaattaatgactttttattttaattattatttgacaaacaaactttataagctaaa

SEQ ID NO: 176086 - DNA, 631 bp, Cannabis indica
taaaataaaaagtcatcagttttttccaaaaaaaaaaaatcatcagttttttttttcatgaacatgaagtttttttaatatactaggtgaagttggcacgtgcaaatacaagtgcttggctctttttattctatttcattcatatttttatttatttaatttttattttctaaataattattataaaaattgatataatttaatttttacaatcataataaataacagtgactaaataatttttcttgatttactttattttatacagtatttttcttaaatttttaaaaatttagacaatatttttttatttttttaaaaaccgtttgcaatgctttttagtgtaataacatttaaaaatcatacacctaatttatcttttttttttttgaaaaaaaattaaagataacagttacctagtattaattacaagtatggacagattaagagataagcaaattaataattaattaaataattaaattatcaagaaaggaagaagaagattaatttgactatttgaaagaaaacgaaacaattatggtgtggtatgttataattaataatattattgttggaattgatcaagttacattatataataaaagcatgcatgtgagtagtagttttt

SEQ ID NO: 176087 - DNA, 690 bp, Cannabis indica
tttttttggctcactatccctggtcacaagtggctttttttgctctactttttggatcggtatttttggatttttggtggctctttttatttttgctcactatcctcgaagcacaagttgtttttttttttttttttttttttttttttttaacttggctcttggattctaaatttttttttttggatttttggttggtttctttttttttttcgactctacttcgattcggttttattttttgttttggttggatagtcgctagtagttattttttttttttttttgctctgataccatgtcagaatttgtgataaggtgaatgaatctcaaaatcaattggcaatgagaaaagtaactcgttccttttatgtattttattatctttttacacattaataatgtgagactctctaaatacaaatcaatctggtcaaaagaatcatgacactacaagaaaggctttaaggaagcttttcttcaagtctctattagagggcccactttttctcacaaggcaaatcccattttcttccggctcaaattttctattgattgttagaaatttttaggattcttattgaaaatctattttataatgaaatataaaaatcccatattttcacatttttcccagttgacctaaaaaaagggaagttatttattttttttttctgatagaaaaaaaaa

SEQ ID NO: 176088 - DNA, 753 bp, Cannabis indica
gttgatttgtatttttgaaattggaaatttcattatgatttatattattaataaacaactttgataaatatatgctaagaaaaaaaaaagctcaaaaataactcaccaaatggttagaagtattgctatattaatttgctaaaaacattgcaaaatttgtttggtatggtttttttttttttttagagattgtttggtatggtttggttggttggaaacataacaattgatgattacattaacaaatgttaatcgacacaacactatttaataataataataacaataataatacttaaaatacaatcgtatttttataatttttttttgttatttttgtatatttgtgaaataattgaaattgggctttgtagtgggtcagaaatttgaaagcccataaaagtcgaactgggccggcctggtccaatccatttccaccgattacaaatagagatgagaagggttactagggtttcacccttcacttttaaagaggtctctcaaaaccctagtttctcccattactcactcagaagcgcctctgctacattctcttcggcggtacgattctctcatttctctttaacctctgctttcatttccattgctaaaatccattgatttacttcgttggttctaaattttgttgtgttttggatttttttttttgacattgatactgttagaacctcaatttgggtttcgatctcaaatactgttattgttatcttctatgcgtgattaggtgtaaaa

SEQ ID NO: 176089 - DNA, 686 bp, Cannabis indica
tgtgtgtgtgtgtgtgtgcagagaccttggaaatgcaaatctttcaggtagtttggtgggagagttggggaagcttgagcgtcttcagtatctgtaagtaaaattaatatcagagcagaatatttgtattaattctgttcgttcaaactttgatttttactatggctagctatacatatataaaacagggcatcattacattatatagctagctacttatttggcaactagctactgagatacataaacatttagtaatattttatattacagacacatacacaaaacacatacactacatgttttttctttttattattataattattgttgtaactaaatattaaattattccacaattattatgaaaaactagttatcattttatttcatggacaatcagatattagaagtcgaagaagaaaattgatttaatttattgggtagaaactcaccaaccccaccagccgtaaccgatgaaaatcaattgttttggcatggagtattaaatatagatgtatgtatagtgtagatgatgaagctcaagtcaaataatgcatttaataatattaaccccacaaccatattggtttcttctttttgttttgcatgtgtttacagggaattgtacatgaattccctgatgggtcctattccaaaggaacttggaggattgaaaagccttg

SEQ ID NO: 176090 - DNA, 703 bp, Cannabis indica
acagtctccttctttggtttataatgttagtatttataaaattcaaaaaaatatatatcactgatctaaatatattcttaaaagtactttaacataacaaaaaaaaaaaaaaaaaaaaaaaaaaaaaaaaaaaactactaaatcataaatctatagaacctttgctaaattaaagaacaagataataaaagatgagcaaaaaaactgacctgaagccattggaaattgtagagaaggttatgatattctaaaaatacaccatctttttaaagtattttctctgatggggaagaagataatactaataatagcatattcattaggctaattatattagtgtggtttgtttcggttcttttttttttttgtaaaggttagtttgtttcggtcttaaataatataaaatatacaaaaaatgatattcattaattgaaaaaccatgtaataagaaaaatagcatataaaactttacaatgcattatagaggtgaggagaggttgttgaaacgaagataagataacagtttttcatatctatcaatcaaattgcttaaagagtcaaaaactaataccaaaactaaaacaaatatactacaaatttaggctaaactcaatgatatacaaaaagctcacataacatacaattgagaattttcaaacattacatcatcatcatcatgaagacggtatcgtttgttactttg

SEQ ID NO: 176091 - DNA, 596 bp, Cannabis indica
aattgatttttttttttgatttggtatggatggtatgatttgtgtaccatccgcgcgcgtgctagcgggtgctcaggcgagaaaactcggcgctagaggctgcttgcagcctgtccgcgcgcgcggccccctgttcagacacgacgtgcgtgttccttcggacagtggctgtccgaacatgcgtgacacccgtgtgtcacatggtgtccgcgcgcacatgggtgccatcacccctaagattttttcaattttcaaaaattcataactaattcaaataaaataaaaattaagttctgtagaaaagtgaattgcttaatttttcccatactatccaacaaaaataattctagaataaaattataattattttacgtaaaaaatttacaaacatcaacacgattcttttattattatatcttttttttaaaaaaaaaaaaactaaaaacgcacacatcagagttattattttttatattattattattaaattttttaaaaaaaaaaacaaaaaaatattaaggtatatattgttggattttatgccctaaataaaactccatttcaatgtaatctttatcttttaaatatcaataaaa

SEQ ID NO: 176092 - DNA, 828 bp, Cannabis indica
tgcagattattgatcttcaaaatgtttcattctctccctatctagttgcaaggttctttgtgctggagcagaatcctctgctggttggttcctgaaaagctcctgcagttgattccaaaggtgaattatttttaaatttttcataagcagtaaatggaggatcattctctccatgtaccatgcttgtgctttaaaagtttatttggagctcgggtgcgtagttaatcactaaagagagcttatctttctcttgctaccaatgaaataccttgatttttaagcctatacaatgatggtagccacccttgttatttctcattgcttgctttggtcaaagaccgctctaagctccaacagaatatcctttggtggtactaatatcctatggtttttgattcttggttaatttagcacgaataccgtatcttgtgtatgtggttgcatgtttagaatgtttctgtgccattttttatttaagttcatttaaagtgagcgattgttttattttttttacaatcttacccagcgtcatattccattaaggttagaggagttgaaattttatcagtgtttttgccttcactatttgagcatagtgactagtgatcttgttttttctttacaagattaaccatattttgactctattggaaaccatttttgtgttccttgatctgtggttatactaatgtgctgtggttatactggtgtcataattttcaggactgtggttggaaaggatggggtgagatatcttatggaggatatgagtgtgttaaacgtgcagaggctgcagagtttctggtagatatgtttcaagattttgcc

SEQ ID NO: 176093 - DNA, 616 bp, Cannabis indica
acaaagccctactaccctaacaactgtcaatagataatactctttatttatgattttctctcttaccaaacactctttaacatgtgataaataaataataaccccaacattaaagtaggttttctttttatttatattcaataaaaagactaaagttgggattcttaaagagggtttggactttggagtattttagaaaggggactatcctatcctatgtatatgtactatctatgtatgtagtgttttgctttaaaagataaatagattctttccaatgtttcatttgtctttttattttatttttgtcctatttaccctcttctctttcaagttgtagcttccatacttcttcatggtaattttttttccctttgccaaaaaaaaaaaaaaaaaactaacataaaacttctatatgctaatatttttgatgtgatagtttctacctctatccacccacaaatttggaccttcaattatatcttttttactttgttggtcaacaatgataaacacattaagaagaagaagaaatattaactatatttttttagatagaaagataattaaaattgttgtatattgcactctcttaaaaacaacacaaaaataacaa

SEQ ID NO: 176094 - DNA, 1016 bp, Cannabis indica
catggttagtcttttctgattaatgaaattacattaaaaaaattatatcacttaataaaaaaaatacaaaaaagggatctttctaacctttgcggcttagttccctaatttgaatatacaatagtagttattttttttttgctaggcgggaaaataattatttttccttcaaatcttattattaatttttaaatagttaatttgaatatagatatttaattaagaactagacattatggttattgtcgagaaaacgaaaagttacacgagactcagattaaaaaagaattaccccaaaccgtagctgccaactacagcattttcaagctctctctggtatcgaagtgagccctttcttgtttcttaggtttctcttatcgcttctttcttgtatcttttttagttttttttttctcttgatttttgtttcacgtacgacattcatttgatattgcggccatattggtctgatatgtagatttattttttcttgcttgattggatattttagatctcttgttatatatatatatatgtatacattctcaagaattttatttttttttgtaagtaaattgtttatgaatcactacatagacgcacagatggtaatgatataaaataatgtgatagctctgattgttttaggatcgaaccaaacaaatttgatgattgtttgatattagttgttgatttgagccaatttcattctatgggaatgttctaagatatttatgtcttatacatttcatattctctttgttttaggggagtggctcagggtgtgaacttcaatcttgaactcccatgattcctcccctttttattactataattttttttttcacttgagtaattttaacatgtgttttttttattatatatatatatataaatttaattagtataactacttttgtattacctaccgagtttggtacgtcaaaaaatagtaaaatttactacattctttaaatctacgactcatcgtattaaatctcaccgaaattacttaa

SEQ ID NO: 176095 - DNA, 882 bp, Cannabis indica
atacttgcacaaatctccgtatcaggttcctgcatacagattcaacgtaagtatttcaacaactgcataatggcatcacaaaaaatacataatataagtttgagtgagactaaatgggcaataataccaccttgtgcaatgcttccaccagagccggaactatgtaatcagataattgttttatataggtctcatttcgaccttgagccagccccttctctatagctaattttgctgaacgcagtagctccggcatggctagaaccaaaagaaaatcataactacaagcttctaagctaaatggggcaaaaagagtgataaaagccatcaaaagtaaaagtggaatgaaaacatgtattgcttgttattggtattacctgatacagctgctttcctaacttcttcgtgaaaatagaatttcaaaagcggaactaaagtaggagcaacctaaaaaaattatcgaaaccttatttagtaatcaaataataaaaaacttagctacaaaaaagaggtatgaatcacaacaactaacctggtcaatccatggaaagaatccttccttcaactcgtcggcatagcaacacagcatattacaagctgtagctttttcctccaacacgctagtcttgattccaattcgtttgtcccaagagtaatgtttccatactgtaataaacaaataaatagaaaaaaagaatttaggaaatgcatctaaagaaaaatagaaagaaaataaagttaacaagagagaaacatatcacattatcacaatactacatcatcacatgatattcacaaatcaaaaaatgtttaaacagtagccgtttaaaaaaccaggggagtcgtaagctccatactactaagtcgaaaaactaagtaaac

SEQ ID NO: 176096 - DNA, 517 bp, Cannabis indica
tgtgacgattttaggagttatcatttcagtagtggaattggaatttaagtggttgttgggatgtagtgtttgtgattagtggtgtgatctgggtaagagttagagttggtgggatcaaaacaccgaaaccttggtgttgaaagggaatcagagctagatattctgttcattagctaattctttctaagcttaattaagttttcaagctttgaaagtatagggtgcatctaaatttctgctgcaactatgcatctatttatagccttttcatcaaatcctaattctatactaataaggaaattatttaaattaatcctatcttttatcatttttttatgataaatatcttttacatgctgaatttaaattctgctgccacgcttaattgaagcctttcatcaatcctaattctatactaattaataagaacttatttaattatactaaaaacacaccacctcaaatattcacttaatagtatgtaggagtacgtcgtcgcccaccagtcatggccacg

SEQ ID NO: 176097 - DNA, 691 bp, Cannabis indica
taaggaactagtgcacatataaggtttacaaattaatttaaattcattacaaataatgcatatttttaagacctttttaatttaattttactctaagattaattttatttatctcatataaattttagttacatttctctattagttaaattatatttgttcttattatttattatacttatatattacatttttttagtaacatttatgctatttttaaacatatttaataaactaaaataaactaataagtcacaataaataagtgcttgctagttaaatattatattatagtatttgttttagtaattagttatttcaaaattatattttagtatttttctttgcaaattatattatagtatcttaatattattaagatacatttttagtaacctttagttttattgtagaaactaattgcaaaatagagaattacctcatataatatttttaaactttttctattcttttaaatttatagcttaggttttttcagtagttgctcaagtaatttctatatgagttgctatgtagattttggttgcaatttaagttgattcgttgattgctatgagagttgctatgtgaatttctgtaaaaaattcaaaaaaaaaaaaaaaaacctatttaaagtgtacaataaaaaatcccttacaaattttcttctacacataatataatccaatgg

SEQ ID NO: 176098 - DNA, 627 bp, Cannabis indica
ttgttgctctgtgcaagcgcaaaattatcgattctgcagcatgtagcctttgttcgaatgcctaggagtcggttgagcatgctttgttcctatgcaaacatgctaaaaaagtctggcgtgtggctggtatttcttttgattatgatctggtttctagaatgaaatttgatgattctttgatgctgctttctacccttaaatctacttcggaaatggaacaactactctgcactatgtggtttttatggactgacaggaacaactttattcatggcaaaccaggcctctcaccaacacaaatttgggccaaactgctgcatattattgcaactttcagcagcattcaacttcaccgaactccatcaaagactctacaggtgcggctgctcaccccaaatggctccgcccacctttggataaattaaaaatgaatgttgatgccgcttgtgatgtctcccgtaacaaaattggtgttggtatcatcattcaaaattcttcgggtcaagttgttgcagccaattcgaagcctcttacgggtagatacaagccacaagaaatggaagccaaagcataatttggaatcgattgtgcagctctttgtaatttatcggtcaatcttttggaatc

SEQ ID NO: 176099 - DNA, 706 bp, Cannabis indica
ctaagctgctctcataagctgacataactatggtgtcaccagaaagatacattttcacgataatatggtcaacagaagactaaaaatggttactttgaaaatgatgtttctcgtttatcatatgatgaatatgtctctctttcaagcgcaactaaattacgaacaggaaaccaaagtgacatttgatcagttaaatacaaaatcaatccattctgctaacatatacaactaaatcaaaactagaatttagaatgaaatgtggtgggaagatttgaaagcttagacctgggtgtattgacccaatcaggataaatctccaactacgaaagatttgtctacttgtgcacattgcttactgacccaatcaattgaatccttctttgtttgattagaaattttgacagcattctgacgcagttaattgacaccaaaaattttcttcactatactaattgcgaagcttcccaagttgtaaaattctagcaaaggttcatctttctcataaaaccaaaacacaaacaaatatacaaataaacaacgaacaagttcttaactaccaaatccattaaaacaaaaactcactcgagtcctgacaaccagtacagcattacccattcttcccatcacgattggaagagctacacgaaaaactaaataaaacaacagtttaattaagcaaaagataactgacctggtccacctgatt

SEQ ID NO: 176100 - DNA, 524 bp, Cannabis indica
agaagatgaaaatggcacaaagtttaataaaagcaaccataccggcaacacagcattacatagctcctcatatgtcatacgcttgcctttgctcataatctcattaatcaatcctgcatatgagaattgaatcagaaaacagcaaacacggggatggccatgacaataaaagaattaaacaatccgatacctggtaaagtacgattaacagggccatcaccaactgtgccagtatcatcatcagaggtatttctaggtgaacttcttatagagggcaaattgcgctcattagcctcagccgatgaagatggcccaccatttgtagtggcagcagaattagaaggtatattcctcttgacagtctcccctgcagctgcagatccattgtcttccttcttggtagaagcctctgcagaataatcagtatcttgtctttttgcatcatgagaggatgaaactttttccattcttttagcttcgtcagcaacctcacgggaactacgaaagccatctctgggagcatc

SEQ ID NO: 176101 - DNA, 703 bp, Cannabis indica
ggaaaatgcagtagtgatagtaaggcagacacaaacaacagtgaaaaatcgagtagcatagatctcgccaaaaaaagtcaacctcaaggataccaactggagtgattttgtgaatgattttcttagttcaaacatatatgtatagcttcaatttgttataggtcccttaatggggatgctatttagttgtaactagggccagcgtaggtgggccctgtgcctagggcccacctagcttaggggccaaaaaaaaatttatcattttttaaaattacacatttcttatcaattttgaaaaatatcatttctttttttaaatgagggcccaaaaatattttttttttcctatgacccattaaatttcagggccggccggcgctggttgtaacaatcatattttgagcaatataatacttccttgttcataaaaaaaaaaaaaaataactacaaatagattgagttataattaattagtggaagatactaaccaattgcaagtataaataatatatatataaatcaaattaatgatatcttattataattaaaacagatcgaaaatgactgattcgatcgagtacatacatataaaacattcaacaactttcagattaacaaagattacgtactaaattagtcattgaagaaaatcgtttaattagtgtacgtgattattatacgtacgtacatagattatcttact

SEQ ID NO: 176102 - DNA, 916 bp, Cannabis indica
aaagacgtgtccactcaggattgaggcgcatgttccgtggacgtcctcaaaaacagggactgtgactttttgagactactactacaatactacttcaactctcaactaatgacctacctacctaatctccaaattctttggtctcccttcttatacgtccttttaaaactcttcctattattcatcccattcccaactagtttgatcactattttaggatcctcagattactcggtctcggatgatgaacaattttcattttaaaatgatatgtatttttctattattttttttttagaataatatgtatttttctatatgtttcatattattgcaagactaatttagttatactataaaaaataaaaaataaaaaaaattatttttgttgaatctttagtaatggtgcaattaattaagctacatttcaatgtaatgtgatatattggagtgctccatgtgaagttggacgaatgtgatgtggcaaaagagaagatgttattgggaggcagcccgaagctaggtccataaaaataagttgactccactacatagctatgtccctctttatttcaacaataaagtctttgccacttatttttaaagggatatttacaaagtggtttgcacttattattttgttttttttttttttttctatcgaagtgtctgatacatattacacaagctgaaattggatctcaaaacttcactaactccctacgcctagctacttgagcaagcctcaagtagttatagtggtttgcacttaacactaaataatttttcatccatataaatattgtaggggcaccaatcataaatattgagtatgtatattacatgtttaaaataaataaaatatataataaaagatagaatataaaaataataataataaaaaactgaatgtatg

SEQ ID NO: 176103 - DNA, 676 bp, Cannabis indica
gggaaacctcaaacgagatatttttttctgctgcgtcgactgatagtattttggtcataactctctcgatattgctcggaattggacgattcaagatgttccggaaagataaaagagagatctagaacttttatgttttgactttttccaaaatctaatcagaagatagtcgaattcaggcttgaagtttcagctttattttcttgcacaattttctctattttaaatatcatgatatttttatcttttttcccatctttttctctgatatttttctaatcttcttctattttaaatctgcaaaaataaaagataacaagcgtaaaaatgctccaaacacgattaaaactcaattaaaaatatactaaacttaatctaaaattaatactaaaaataacctaacaaagtgtccctctaatccggagtctgtttgttacatgggaaatcagaattttaatagaaacaatggggcattctcaaattcttacaatcaagcatggaagaatcatcctaatttgtcttggaggggtcaaggagcaagctcaagcaccgcaccagcccaaggaagacaagcatatccaccgggttttttacaacaaccgcgacattcacaacatgctcaaaattccaacccgagttctttggagagtctaatgcgggattatatggccaaaaa

SEQ ID NO: 176104 - DNA, 643 bp, Cannabis indica
aataaaggtacattaatacacctcttttaagatgctgcatattgtagaattttcatatatgtattctactactgtatatataatacatctaaaactatatataatatgaataattaataagaatttttttagttttttttttcatgattctatatgttgtaattatttaggattatttaaataatttataatgctgaaaataagatttatatattttattacacacgattgtttttctgatacatatagtaaataaatgtttaaactttatttttaataccgtaaattatttaaattttttaaaaaattaaaaatgatcttaaattactacaattgatcttaaatgctgaaataaataaaaaagcgagaataaaagaagccaactacttaagaaatttcctatcttatatttgaggtaagttgaaaaataccatttttattaattaattgatcaaatttacctttaattttatatttaattgaaacatacctctttttatatgtattgtacccaaaatatccttacataagagagtcacatgaagagtatcttgaagtgatttgggtaaatttgatacaatgtttgaaaaaagagtaaaaatgatagactgttaaaaagtggataaaaataaaagagaacaat

SEQ ID NO: 176105 - DNA, 581 bp, Cannabis indica
caatgtattttatccttaaaacacttaaccccgtataaatgatatttcagctaagtgaaatgagtactccaccatttattttcgtttggtcaagctcgaaggaaatcatcctttactttctattcgccagatagaagctatagattccatatttatgttagcgctcccactcaattgcactaccgtgttcccaaaatgtacgtatcaccctgacccaaaagtaggcttaactaacaaatcaaagaacacgaataacactcttgagattgaacctaatcatatcaggattaagatcatttgatctaggatcaactaggtgatattgacttgaatagatattacggtaagtttaataaatctatgtcaaagttcaatatcggtcccttccgatgcatactccatgacccaacccaaacccgaagttaactttttaacctttaaacctaagtcgttcgtttaagggaaaaacgaaactaagtacgcttaacttttccctaaacctaaaagtcgaacgtaaaaacgttaaaaccttcgtttggtttaggtaagttagtttcgtactaattactacgtaaaaaccc

SEQ ID NO: 176106 - DNA, 761 bp, Cannabis indica
atttagataattaattttaattattaaataaatagatttaacatttaaaggtttaaattaaaatatggcatgttaaaaaagataagttgtaaataaatagtaaaattaagagaaaattacctcaatgtacctacttttttaaatatttatgaaaatgcactctaataatttaatacactattaatgccgactttttatttaaattactacgcacgtatacagaagtcactaacattttcttttgctaactatcaagtgtcaattactctttttttttaaaaaaaaaaaaatcctcatcttttctttttctgacatgacaatcttctttatttattattattattttatttctctttattatttttcaactttttctctaattaaaataacatttagatatctctctttattttatttttatgaaaaaattataaaaacattttctagtttgaccagctaaaaaattattagttataatctattatataaaatgataattttgatatacaaataaaaaaaattgttattttttttttctattcaattataaaaattgtaaaatcaacaaagttagatttgtaattttattttaatgtattacttacaaaaaatttattattcatattttaaaaaatttattaatatcaaaccatttcaataggcttttatatgaaaatataaatattacttttaatttttttttatttaacttcaaacaaaatttaatatactattcaatttcatgagttactaaaaatata

SEQ ID NO: 176107 - DNA, 564 bp, Cannabis indica
gttttagccaacgaaattccactaatatcttctcgtgtcattttgcaaggcgacaagtactaatagattctttatgcaagatactgttatttaggtatcagcgtgtataacacctcttgatacgtctcttccaatagttagtcatatattttaaaaattattacaataaactatataaaacaggataattaaattaataatatatttttttaatgtaaatagctgtgttttataatgttcactttcgatacaaaaaatatatttcctaaatttataaaaagagtattgttataagagatttagtaccacgatgaattattatcttataattaaatagcaatatatttattaaaataaaataatattacatttttcttgtaaatatgatgttgattttagtaaagttgtgatttgatttgatctgatctgaccgactgaaaattcacgggttaatatattattttgaaaatggaaaaaaaaaaaaaagaaaacagcactgagtttgattatgtctaacggtgggtggcccgtgatctatgtatgatcaggtacccaatcctactt

SEQ ID NO: 176108 - DNA, 1179 bp, Cannabis indica
agacttcaattcacagattgctacctgctcatgcagtataactacccataagtaaggaaatacgacgcacacatgaagtaaataattaattttaattaaaaatagttaaacttcacttatcacatcacatcaatgtgtgttatagttatgtatatatttatgtgcatatatcattatagtacatattcatatatatatatatatatatatatataattttatatatattttagaaaaacaaggtgcatgagcatatcttggttttgatactatagttataattctaaaattttatgtgacgatatatatacaatataattattaggtaatttatgttatttttgttaaactttaaatagttttttttttttttatgaataagcatacatcatttggaacccctattttatagtattataagctttttgtaagtctaaattttaaataatttaagatgctaaaaaaagatttcaaaacaatcaattttacatgcacatgtaaaacaagatttaaacaaaaagatcactggaggataaattgaaagggatgagaaggggatgagttaattacaagattgttcaggaagagcatgttcttaataaaacccaaaggagattgctgcttcaaccgtattcgaaagagggagtgaaacaagctattttatcaattccagactcaaaagctctaggttcggatgattttaatagcaagtttttgaaagcaacatgagagattgttcgtaaagatgttactttagtagtcctctcatttctctactttggagaaatctaggagattaactctactgcttgtcccaaaggttaaatgtccagaatctacgactgattttagcccaatatcatactataatgtgctctataaagttgctactaagttagtgtgttcaagattgaaataggtccttcctaatctaatttcacaaaatcaaagtggctttgttcacggaaaaatatgtatttctcacaatataatagtttgtgaggatattatcaagcattatggggaaaagctataaaccttattgtatgatcaagatggatctcaaaaaagcatacatcactattgattagagcttcttaacagaaatgatgacggttctttgcttcctcgatcgatttattaagcttgttgaggtatgcattcagactcttatgtttt

SEQ ID NO: 176109 - DNA, 854 bp, Cannabis indica
acaaattaaaatgaataaaacaacaaattcaaaagaaaaagaacttgtatatgtagaaaaaaaatgttaaattttgttttaaattgtatgtagaaaataaaaattatatgtaaaaattagattatacatttaatctattaagttttgaaatatatttgtattatgtgtattagatttttaaattattatttttttacattaaaatattaattgtatatataatttttaaaaatttatataaatatttatgtattggattagatcaattacttttacaagtcaatcaacattccatccgcacaagtgtgatttttttaaaattttcaattcaatccaatctgaaaagtgcaaatatccacactttatgaattagattagattagatcgtgcggattaaattgaattgactattttatagacgcccctcataattaattcctaattcaagttgtccttataacattgaagaactttgaaggcatgaggagagtctttgaccgtatatttgatagagcattgttattgggtatcagtggtgtccaatatttttttataggtagcgttctacgattagttagcgatattttctaaaaaactattttcttaaattatacgggactcggtacttaattacaccaataataatataacattgagcagtgtactaagtgcccaacaatattatttagcaattctctattttgatatattcaagatatggcatgtgcttcttcttattgagactgtaaaatttgtttttgaatatagtcaaattgtgctacacattatcgatactttgaaattcaagaaagaaccactactatctttatcatgcatgttttttgtatatttaa

SEQ ID NO: 176110 - DNA, 1064 bp, Cannabis indica
atacgcgacattgaagaaaatccagagaagtttgaaggttttagttttgatgtagcaagtgcggttaatctgcctaagggaaagcaaataagtaccacagtcaaattttcaagtatgcatatgctcaacttgaaaaggagaaagctcagcaacaagataacaatgatcttaccttctcaggtgtaatcaaaatggctacagataacagaatcaagaaacggcctttaatggagatttcttttaaagatctaacccttactttgaaaggaaaagacaaacatattttaagatgtgttaccggtaatatcaagcctggtcgcattacatctgtcatgggcccatcaggtgctggaaaaacaacacttctttcagctatagcaggaaaggcgattggatgcaaaatgtctggtttaattttaataaatggaaaaaacgaatcaattcattcttataaaaaagtcataggttttgtgccccaagatgatattgttcatggaaacttgacagtggaagagaatctatggttcagtgcaaaatgcaggtatgcaatgtcactgtgagctctttgcaaactcaacaactaacttgacatatagttatgctgattattttgcattattttgtcgatttatggtcttgagttatgtgaactaaaagttgtttaaattaaaatctatgccttgatataactatttttgtgaatgtattgttagataacattgaatagtatatgtgtttctggtaattattgtcattgctcaggttaaatgtactgtgcatggtaaactgtacttgtccatgtccatcttaatgaactgacttctgtaatgttttgcttatgtgtgtgattgtgaagactgtcagtggacttggagaaaccagataaagttttagttgttgaaagagttattgagtctttgggggctccaggcagtaaggaattccttggtcgggacaggtagagaagcgaggaatatctggagggtcaggagaaaaaaagaggttaaatgttgggattgggagagtggttatgggagccgttcactttttgatcttggatgaac

SEQ ID NO: 176111 - DNA, 677 bp, Cannabis indica
acactcaaaatatggattcaaatagttacttctcacgagccttcattgaggggctcaaatagttttttgagagtttcatatataacattatgtttaaaagttatttatgatgacaccacaaaaaaaaaaaaaaagttatttatgatgagatgacttaccaaaaaaaaaaaaaatgaagtcactgctgttctttaagggttagaatgcatggggatgtgtataaagcaaacgcgtggtgctctaaaaaataatgaattggcgagtttagataatgatcttgataatgtcacttggcctctttatcaacaaaaagagaaagagaatgagcttgattcatagtatttttttatcacatgggtatgggccggttgtgtagctttctcatatagcttcaattgtttagcattattttgggtctctttttacttctcacgagctttcattagatactatgaatcatgtgttgaattttgttcaacctaggattactaattacttgaataatattttgatgaggccttttactgaagccaatgtgagaaaggtattgtttcagatgcattctaaagtccaaacaaaaatggcatgagggctggtttttattagaaattttgggatgttgtgcgctcagatgtgtcgctccttccttgggttcattgatgagtctggttcagcaa

SEQ ID NO: 176112 - DNA, 784 bp, Cannabis indica
caagactatatgaagtgtctaactagctagaaaccactttacttttgagtgtggcatttcttttcttatacccatctagctaccatatcaagaagacgtgaccatatatatattctaatcaattttccttccagtttccccttgctcagtttaattaacaattgaaacttgtaatacaaaatgttaaagagcagagtgggttttgacaatatgagaacttttttttcttctttagtaaacgatatatatattaatgtgctatatagctagctagcgggataagatcaaagattgaggcacatgtaataataagtaaaattaagttactataagagatggttggtagaagaagtgaaagtagagaggtcggtccatgcattaatattaccaccactgccactactaccaccaccaccacctaagaactgatggtcatttaatccaagacttcccaaaaaatttctggacagattattcagaccagattggttatgaatattattattattattcacctctaccttcacctcttgtgtctccaatggcttagattgaaactgttcgaacgggtacgacaacctagttggttgttccgagttagatgccatgaaagggaattggtgaacttgatgctgcggcagtctccattgctgatgatcaccgtttccattaagctgaaattcatgaatattatcatcaccatcgcctgtgttccccaaccgcggaggaattcccccgaaattcaagccaatatcacttccagatccgtactctcctagatgat

SEQ ID NO: 176113 - DNA, 662 bp, Cannabis indica
gatggtacgaagccaacatacatatctaatgtaatctaacaggcttcctaacatgcacgctaaacatgtaaatacatatgcatactgttatactaatcttacctcgattctgaattcaggtgtgccggtcaacctgagtggaacgaactgctcggcgatttacaggctcctaaaccataataatcacaacacttgataagtgacacgctaaatcacttctcggggacttaaactagaaagtaaaagtttccctatcgataaaaagcatggcaataccctaatcaacacaaaaatgggaagaactagggttcccaatttttccccaaccggtagaccggttctacaaccggaattccgattctggaaaattcctggaagccccaaccggtcgaccggttgctactggcttccctgaaccggaatttcggttcagtgcaggaactttcaaaaattcgattctcattcaattcaaacccaaacctcatgcaaccttccagacctgttctaaataccccaaagaacaatcccaaagcatcaaaacaacccagaatgcacagaatcaaaaatcaccatgtgagctccaagctttgagttcaaaactcaagcttagctaaaactcactacatgcaacacaacctgttaaatctactcaaatatgcata

SEQ ID NO: 176114 - DNA, 735 bp, Cannabis indica
agatgagagcatgattacaagatgaaaatatgctaatataattcattttttatgttttgtttcttctttagaaccaaaatctgtaaaagaagcacaaatggatgaagattggtttcttgctatgcaggatgagctacatcattttgttcgaaacaaagtctggaaaatgattccaagactgccatttgtgaacatcattggaaccaagtggatcttcaaaaataagactgatgagtttgggactatcattcgaaacaaggcaaggtttgttgcccaaggatacactcaggttgagggtattgactttgatgaatcatttgctccagtagcaagactggaatctatcaggttacttctttccatagcttgcattcttggtattaaattgtatcaaatggatgttaaatctgcctttttgaatggtttgttgaaggaagaagtgtatgttgaacaacctaatcttgtttattttagtgatgctaattggccagataatattgcagatgatagaaaaagcactagtggtggatgtttctatcttggaaacaatcttgtttcatggcacagtaagaagcaaaactcaatctctctgtccattacagaggctgagtacattgctgcaggtagttgttgtacctaattgttatggatgaaacaaatgatggttgattatgggtttgatttgaaaactttaactattttctgtgataatactagtggtataaacatttcaaa

SEQ ID NO: 176115 - DNA, 772 bp, Cannabis indica
gttgtcatcattgtatttcacttatagacgacattgtattcaacattaatatcatcactatatctcatttgttctctgtcaatgaatgtttttttaaaaaaaagaaaaagaaaaaaaatggcattaaaagtgtttttcaaaatatttgtgcatgcttgttatatctttgttgttaacatatttaaatttggatttgcattacagttatatgacttttatgaaactttataagtattatttttgactcgaagttaatttgattagatggatgcaaaaaatttagaccttgaggatcatgcttcttggcctgaggctattgaatcgtattttattagtctcttgtatgaagaggccaaaaaaggattgcaaactagaaccttggacaaaaaagggtggctaaaaatagaaaatgacatatttagtacatttggaaagagatacaaaataaataaattgaaatcaaaattcaatcggttgagaaaggcatatcgagaattttctcatctttggaacaaatggaatggaatgggattctcaaacaagtactgttacagcaagtgatgaagtttgggatgcttatctaaaggtaataaagttatgttatagttgtgttgttgattacttgtttatttgaaatgctttttacatactaatgtgtttttgattttatgaaatatccaaatgcaaagagatatcgaaaaaaaggttgcaacattatgagatgcttggagtaatattcactacacaacagctaccggtgggatgagttgca

SEQ ID NO: 176116 - DNA, 575 bp, Cannabis indica
ctaaaaaaagtaatctattttctttagtggagacatgaagccctctttataggcgacaatatatcgcttctaaaatggtcgacccctaaaaactaaaattattatagtgggggttaccaaggtagtattgaattcagaaaagaagtggtgtcttagaatttatggtatgtgagaaatagtttgaatcatggagaatgtaaaccaaatgcaggggacatattagaatggtgtggaaaatttcttcaagtgtttcaagatagtcaagttaagagaaaatgtggcaatatgtctcatgaggaaggtaagtggtagcagccaaaagaatcatgtgagtaagcaacattttgctggggtattatggtacagaatcatggtggtatgatggtctttgcgaatgctaaggttagagttagtgcaccatcacctcttgttggtaaacttgaaacgattcaggatggattacgtggtgggcattcagcggcaactaagtagatttaaggttgaaaccggttgcttaaaggcattcaagttaattcacaatgtggatgaaattgaaaggtgccaagatacatatg

SEQ ID NO: 176117 - DNA, 1005 bp, Cannabis indica
gaagctgagtttactcaaatgaagttaacagaacaatatggtacccttacaaaacttaagatacactcgtacactaagggcagaacagaaacaactaaaacaataaagatagcacattcaaataaatcttatatcagttttttgttgtatgtatttattgacatgagtgacatgagcgaactaaatgaaatctgtactaaaatttcatgttgagtagcttatatagtggctgatgatgagttggtggagggttctcaccaatggaagaagaaatcaaatttcttgaggaagatgccacacttggtacagcaaccagagccaattttttcttttgtctatcttctctccattttcttaattgatcctcaattgctgctttagctttctcagccatttcagctctaaaattggcttgttctcctcggtttcggaattcagcaactttagccaatgcagcatccaactccttcctcaaagtttccagctcatgcttgttatcagaagttggcgcccaaatttgatcatcaccctttatgttgaccatcattgcgatctctactctctttctgaagctcagttttcattagtgctatctcaacttgagcttctgtttctttcctcttcatttcattaatctcagttttcgcctttagtatatcataagtaagtatttcaacatcatccatcaactggctcaccaactcatttgcacttcttaactccatttttacttgattcacttccattttgaatgcctcaatcaaagcttcttgactcaagctctttctttcccatacttccaactcttctctaattagcttcagcttcaattccgaatcggtatcagcagctaattttttggacaagaatgttagctcttcatttgcttctacaagtttcaactcaagaacattgcccaatatcattttgaaaacaaactcaccttccatctcctccatcatttcaacatctctttccacatcttctagcttctcttttgtttca

SEQ ID NO: 176118 - DNA, 1416 bp, Cannabis indica
caagtattgactatttataatagatgtagaatattttctcttgctgcgtacactcattttaatcaattttgagttagtcaagactgcttattgaaaaggatttcatcagagtgatgcctgtcaaagaacaagctaacctatcaaatttctgctgttgttgaaatgaacaatgatgccttgagactacttatattcgtttaacaaatgcttgataatggttttcctatgcagtctctctggaaacaaaggtttatgtggagcgcctcctttaacagaatgtcccttgttttgggaaaatggtggcttatcttataaaggaaaaattgctgtgggagtatcaagtgcttttgttttctgcatgcttttgttagtggtatatgtcatctgcctccgaaggagcagacatgactatgactttggattacctcaagatttgatgtgtaagtatgcttcctaattattttaagttcctccattattctaccatttggtgttagtagatgaattctaggctgctcagcacgggctacgacaaagttatacatatgattctttgcatgtgatcctgatataaataatggggtttcattttctttcaaagcaacaactacttttggcaattatttgggaaaatagctcataacttgtatcagtgtagtgtagtggtagtggcatttttatctttaggtgtcgtctaccttatctaatgttgcaagagagacgtcttgctcctttggttaggtatctctttattactacatgattacctggtgaattctgcttggcttttaggcttagctacatttcacaatctatttcaatctcttcgaactctttaaaattgaactcttggcagctgaagtgttatttatacctttgtgcagactacagtcgggcttatcagttattatttgttgtttgattatctcaattttttttaaactctacgcttgtagtgaacatgctaattcatttcaattccaagtttacagctactagctaggggctttttttgtgtagaaaccttcgaagcattttaagcctcttgcataactatttttaggcattaggcttctatttgggcctttctactaacactttaatttttaattgctgatatgctatctctacttcacagcattgtatgccaagaggaacaggtatcaaaggcaaaaatctttgatgaatcttgaaatggagagtcaacacgccaaggcattgcaatcaccttcaactcctcggtgactcatcatattggcttttatgcatgcttacttagaaaacgtatagaaaggggggaactttcagaaagcttgtcaattgctttttggttgattttgaagtgagaagaaacacctacaacattatgctctcctctgctccagtcccgaagattttggcttcttctttcaaact

SEQ ID NO: 176119 - DNA, 553 bp, Cannabis indica
ttttactaatgtacctggaaagaacataacacttactccaagtgtaagtacacatcatcgctgattatcacattagtgtaaatccaataacactgatgaaacagggaccaaaacttttgattcatatgaacacaatcacattccactgtgttgacgatactttaattgtgaacaaacatatgatctggatttaactgattctgtgtgtatgaatgtaataaacatatcaaacatattaaaccattagcatgtaaaattcatgcaaacttcaatcacttcaaatttcttatattgataactaatcagattgtaaagagttttatttagggcataaaaacccaactaaaaatatggtgtaaaaaatttgaatttggagaacttagaatatttcttttgctgggcgcacaacattgataaactcatggctcatgctattcatacatactgggaaaaaattatgattctccctaagacagttctaaaaaagataaatgctatttataggtctaaaaattaatacataaaaaatcaacaaaataactaaaaataatag

SEQ ID NO: 176120 - DNA, 1460 bp, Cannabis indica
tgtggggctaatttcatcataaccctcaaacctaagacaaaggcttcaataattgggccgcccatgacaagcatgttttcttattagacaatgcacaaataaaataaattaaaagtgtctttgctcaatatataaatataagaaaaatgtggtgatatatagtaaattagtaagtccaactttaatgtctccaaatgttacaaatggacaagatagagatgtgataaaacttgactttgtagtaatatttccctatcaacttaccgaccatgttaggacttttgggagattgccttcataagtttgaatgtttgatgcctttgaaactttcaagttttgtctttatctccctcaaacccctaaagatgggttttagaggaccaatacacaattcctttgttttccactttgggtcacatgtaggacctagcttcttatatatactgttttgtgtcctagaataactttcatcttcatcaatttttgttatgctcgaatcgaaaccttactttccaatgtcaatgtgagcttttctctttagatttttgttcttttatatgtggtgtggtggtttggagtgggacatccatatatttcatattcaggctctaattatctatataatgcattgtgcatgcacataacacaaattaaagaatatgttttgcctttgatgattccccaacaagaatttaatggtcattttgcaaggaataattattacttttccaaaattgtacttcatgttcatgtatatttgaaaagacaataagagaatatattacacacaaccatgtaatgtattgatgacaatagtgcatctcgtgacaattctcagataaaagtataataaaataaagttcactatttcaattggaatcattaatatcttgttattgaaaaaaaaaaaaaaaaaaatccacacatttggggcttggcatgggttggtggtgtggtgtgtactgttgggtaggaaatgggaaaagaaaagtggttatcttctattctgtctgtctaggacacctctcatggataggaccctatttttgaaaaaagattaattataatacttgctgcaagcgtgagtgaaagaaaaaagaaatggttaaaatgttgtgtgttcttttcttttctattttccttctgaaaaatgaaacttaaaatgttgattgttttgtagcaatggttgctactacagaattattaaatgttcaatctctttttaaatgttaaagtgatagcaactagctagttccggatgttattgttagagatatttttacaatagaagaaaatcaagacattacaattctattgtaatataatataaggatcaacaaagaaattaaataaatgttacaaaacataatatacaatatatatacactatatatattatatataagaaatgtagaagaatatacatatatataaatatatatatatatacactcactcac

SEQ ID NO: 176121 - DNA, 550 bp, Cannabis indica
caaaaaatactcaaaaagttatggctaaaatattattagtcattgtactaaaaagctcagtgccccaaaaaattatccacccaagctgtgaccattgaaagcaccatgtcgcaacctgctacctaatttcaggcccaaaagggtttttcaacctaatttcgaaaaaagggagcttttaattgagacttttgggaggacaaaaatagagagaggaagcgaccttggaggttacaattattgatcttcaaagagttttttttcttctatctttatttttatgtttttaattagtcttaatcaattatttagaatgataatgagcagctaaactcatatttggggtttttaatagattttaatgtaattttagtttgtttttttttttttcaatttttatgtgaatctgtttcatttgtgtttaatgcttataactgcttgatcaccaattattttgtttatgatttcacgcaaaatttaaaagtgagtattgattatgttatagagaaatagacatagatttcgatattggacaaaagtacctatatggtct

SEQ ID NO: 176122 - DNA, 709 bp, Cannabis indica
atcgagtaaacattacatatatatttttgaaaaaaaaaatgatgtctcaaagagaattcaaaagaaaaaataatcataaaaacttagtaaattaataaacttaagtggaatagtgtgtatagtaaaaaaaaagtataatcaatgtaaagcataaagcatgaagttattttaattgtattagttatgattttaaaacttaaacatatacatatatcatatcagggcaggttcggggcgggtatctattcccccgcccccgccccatttctgactctgatatgaatctttaaacccatactcgtccccgccctcgaaagtcaactcccgtacccgcccctacgccggtataattgtcatccctatttcaagtaacataaaatttgctctagtgctgcccaatgatgaattgttggagaagacataaactaactaatgacactaactaggaatgcaatatttggacgagtcacagttagatagttcaactttctaacaaatctgtgatgtttcttaggatcttcaaatggttccccatcacgtgtaagatgcacaacttgattcattagagcattacaaggttttgctcccaattttcctatctcagttaacaaatcaagtacatacttcctttgagacagaaaaattacttttttttcactccgagtaacttcagtacccaagaaatgcttgagctcccctaaatatttcg

SEQ ID NO: 176123 - DNA, 780 bp, Cannabis indica
ctttcttgagaatcacctagctagtacaaaggttggtgagactgaagaaaaatgaagagccaaaaaattagaatttaagaagttcagaggcaacgataatttctctctagctgaggatgaaagatctccttattatttaggagaaggtccacaaggtgttactaagcatagagaaaaagcctagtatgatgaaagacgaagattggaatgagatagacgagatcacagctagtacaattcgtctaattttttagatagtgtcttgcaaaatatagaatcaaaataaagtttgaagtgaagtttagcaattagaaagaggttgtgttgatattgataatggcaacacgtcctccatcaatcatgtaatcattgcagagaggtcttggtttcgtttgaaaaacaaaacaagacgagaggtgtggagtctcaagtctttatttcagaaaataagagaagtcaaaacaaagaaggcaggaagaaggtttgtaactactagcaaacaaaaagttcattcctttggagagtgaaagtattcctaaagaaagagagtagcatggcacaatactaatgcatggaaagaagactccacactattggtgcacctaggacacccatattcattcatgaaggcaaaacaaatataaccatattcaaagaatttactaatatttatttttgataaaaatattttttttatttatctatatatttgtttacaaaagaacgtgaaaacagtataacatatatcttatgatatatatatatgcattatggataaga

SEQ ID NO: 176124 - DNA, 1004 bp, Cannabis indica
aaggaggctggaaatatatgttgggtatgaatctccatctatcattaaatatctcgaacccacaactggagatatttacagcacgttttgctgattgtcattttgatgagacaagtttcccagctttagggggaggggaaaagaaacagctggaaaaagaaattatatggaatgcacaatcattatctcaatttgatcctcgtacaaatcaatgtgaacttgaagttcaaagaataattcatttgcaaaatattgcaaatcaattaccaaatgcattcactgacccaaagaaaattacaaaatcacatattccagctgaaaatgctccaattcgaattgaagtcccagaaggacaattaattaatgattctaaagcacgtttgaaacgtggtagaccagtcggttccaaagataaaaatcctcgaaaaagaaagggagcaaataatcaagatggccctaatgaagaggctgaaaatttcgaggaagatgttgacataaacaaatctcttgaagagattcaggtacctgaaaatattagcaataatgagatctcaataaattatgtcaatacaggaaaagaatggaaccgactcgaagtaattgtcgacaatatttttgcttataatgtagcgctagaaattatgaatgaaaacgaggatcttgaacctaaatctatcaaagaatgtcaaaatagaaaagattggccaaaatggaaagaagcaattcaagcagaattgaattcacttgctaaacgcaaagtatttggacctatagtccaaacacctgaaggtgtgaaacccgttggatacaaatgggtatgtttacgtaaaagaaatgagaaaaatgaagttgtgagatacaaagcaagacttgtagctcaaggtttttctcaaaggccaggtattgattatgaggagacatattctcctgtggtggatgcaataacattaagatatttggttagcctggctgtgagtgaaaaactcgatatgcgattaatggat

SEQ ID NO: 176125 - DNA, 524 bp, Cannabis indica
tatatatatatcttatatattaagtgtggctatactaataaaaattgttaggtttaacgtagtttttttttaaaattttatgttaaagttaatgattaaattaaatcaattaattaattattttttttaaaaaaataactataaatatttaaattttaatttataattatcaacaaaattaaataattattttctttatataaatcttaatttaaatttaaactaaacgttaatgtttgaaatatatgagcgattacaataagatgaataaaagaccaagaacattatgttggaaattattttaccaggatcttagatctactcacaagtatgtttattaacaccctaaatatgaactttctaaaacgatgaaataaacacatataaagtttaggaaaccttacattgggtgcagcggaacataatgactccttccgttcagatatctagcccttgattcctttctgtagcagagcattatcaatatctgaacctggatctctttctctgaatctttgatgctg

SEQ ID NO: 176126 - DNA, 742 bp, Cannabis indica
ttatgcagatgtaattaatattgatcagtatcgaaatttggtgacaacttttatagtgtatcgagtacgaatgtggatatatgcctaaaagtaataataattgatgattactttatatgtgctgtaaaaagaagagtattgatcttggacactactgtctaatatcttttacacgtttgtaattgattagcaataacccacataattttcttgttggatacattctcaaaagttgcacactgcaattagttagcaataacccttatgattttattgttgggcatttttctaaaagttgcacactcaagggaaggctagaagtaataagcaagaagtgtaacaagatttgttattgccaaaggagaggagaaaaatctcatctattagtacatgcccaactaaagttactttagacttgtttctataatgatttttctatttcgggtcatataagaaataacaaaattaaaatcatctctcatttaatttatttttaataaatattatagaaaattgttgacgacatagtggtgatatcttgctgcaaagctcaaaaatgtaaggctagaagtaataggcaaaaagtgtaaaaggatttgctattgcccaagggagaggagaaaaatctcatctatgagtacatgccaaacaaccacttgaggctagctcaagtggtatagaaggtgtgtgtgttgaaggtcctgaattcgagtgtcaagttatgtatagttgtaatatataa

SEQ ID NO: 176127 - DNA, 609 bp, Cannabis indica
gaagtagtaaaaataaaaaaaccccctatcaaaaatatatttaaatacaaaatattgaaacaatcataatccatataatgtaaaaaaaaaaattctaattaaataaaaaaaataagattaaaagtcaaactttcttaatattaccattaatattttacctatatataaatgtacatcttaatgggtaatacccattgatgggaactaaaaaaattaataaggtaataatctaataaccttttatggcaagtttctaacaattatttttttaaaaaaaaattatatttattttttataaaattagaaataataattacaactaatagtttgaaaaaaaattataaattatttttaaaaattaattaaaattactactttattattttatgaaattgtgagtttattaataatttattattgtaaaactaaaaatcatttacatgtatattaatgtatttttttttattaggagaataagagcttgattgtggaatccaattgtcttaatattattcatactcttaaaaataaaacgctacaatacttcttagttcttacttaggctatcattgttagagaaatattattatcatccaatgatttttttga

SEQ ID NO: 176128 - DNA, 975 bp, Cannabis indica
ggagaggggccgcgcgaacgcaggcccccactgccacaaattatgacgttggctctcccacttggggagaccataggtgggcacccctcctaagtgcaatggaggtcaccaacctaggccatgggccttcttgatcacccatagaccccgtccaggtaagtatgtagcccaatcctactcacacctcttttatagccctttcctcctcctaaattttacccatgcccaatgtgggactaaatcccaaacactatttttccaagaacaaacaccttgtcagctctactctacaacactcttttaactcttgcactatgttttttccgatttcatatttcaatatttataatgcttttttatactaactatatatattagtttcaatctactaatccaaagcaaagtttaaagcaattctttccttatatttaagtttgttaaaccaaatttagttgagtgttgaaaactaagacaaaaccaagtagaaatggagtttcatggctgctacaatatttggttttgactaagagtgaagtttaagcatcggtaagaatttttacatgttataatattattttatgtagtttcatagtaagtataaaacaaggttatattagcttaaagagtagccattcaacaaaaaaaaaaaaagcttaaaacaaattgagagaaagttacacattttatgggattggattcgtggggtacaagttgaagagagctgtgagaggaacaataaaattgactaggcagcttttattggctcctccaatagatttaggtcaaatcttatgaattatgataaaagtttgtttataatttgcatttttgttattatatgagcttgctgttctttgaatcttacgggtagattggttcatatttgattctaaaatttaagattttaaaaacaaaatccaaataaaaaatcactttcacattttgacatgtaattgaaaatagcaaaatgatgtt

SEQ ID NO: 176129 - DNA, 534 bp, Cannabis indica
ataggttcaactcattttaggcaatattattaggctaatagctacttaattagcgtagagaatatgatttgataataagatcatgtttattatatgcttatacaattttatattgttagttaagaagtctataataaattattaatgatgagtttggccaacattttattcataatataattattttatgaaattagagctacgattctaaattctctagtatattatatattttttatggttatatattaagtataattgttaaatgaaaaatttattgtttttaaatggttttttttttttttttttacttgttttattatattcgttaaaagtaataccattaaattaattaaattagtattgttttttttaaaaaaattaatttacaattaattcgttatattattaactatttattaaaataatatatatataattatttagaagtgctaataaaattaggtatatgttttttttattaaatctaaatttaattaatgatactcatattaaaattatgtcaaaaaaaaa

SEQ ID NO: 176130 - DNA, 774 bp, Cannabis indica
tgttgtggtgtatcaaacaaagttggacagaacttttctgaatgtccaaggattccacatataaagcaaaatgttggaagatcctcatatttgaaattagcataacataactcacctccttttttctctagtttcattcttctttttaaaggcagatcagtacgaaaagagacacgtacccgaagataatcacgccatattcccacgaagttgttcttgtcggcttctatgaaagtgccgatgtagttcccgatatccttgaccacctttgcagacataaagccagtagatagtccatggagttgaatccaaaaatccagtttattaagcaatactgatcgcggattctcccccatattcagttttgaaaagatcagtggcaccctatcaaaagtccatggactcccctccaccactttgtctacatctatttgatgataaaactgaaatagataaagattatcttccaattcttttacaaacatacctctaccgggtctccacagtgatgccattttgtgttgcatagccatgaagtcgagggatctttcagtgagaaaccgtccgactaaacaccatcgatcgtcgaagtctgataattctctatcatttgtgtcatacaagagccctccatcatcatcatctccactcgttaagatgacaaaatccttatcatgttcaatatccatctctccactttctgccatgaacagatcaaggcaaaacaaaaaaacactaacagccaaactaacactttaacacaaacagcaggac

SEQ ID NO: 176131 - DNA, 664 bp, Cannabis indica
atgctggttcctgaggttggtgagtagctggctggtgcggaccactcatctctggatgtgttggtaggcggagtcttgcaggagcttaccagggttagtcttttctatttgacacttcccttttagcttttcatacttagcttcatatgctgaccttttcctttgtgcaagccggtttgaagcagggttatgcttactccagggctaaatctgctgcttccaagagtacagctctgtccgaaaccttgagggcggaggcggacttggccaagaaggaagctgaggaggccagggcggagactgtagctgttcgccatgagtgggtgaggccaacaagaagctgtttgccgctgagaagaagatcaccgtgctgactaaggacctcgaggtcactgataaagttgaggaaaccatcgagacattatctgctgaggttgatcgtcttcaagatgagaggacttctctgcggcaggtccttcttcagctgaaggaagataaggatgctcaggcggccgaggcagaccgcttaaaggagaaagtcgatgctttgaagactgccggcctcgagctcttctttgatttttggaaggctaatcccaggccaaattcgactacttaggccacgccaaggacatgtaccacgagtactgcgcgacccaagttg

SEQ ID NO: 176132 - DNA, 815 bp, Cannabis indica
tatcactaataaccaaaaacaattcattttaatattaatggacaataactagcattttgagtcattttaaatagaaatggtatctgaaatatactttaacaataatacccaaaacatatggatcaaaaagatattttctctacttttttttttttttgagaaaatacattggttatcataaattaaaaggataaattatttataataacaaagtatataagtagaatattgtctaatcctagagtatatttagccaaattgtggtaaactaaattagttatacgctcgacaagaacaacagtcacactaagaaaaaagatagaagactaaaaattacatctgaatgatccaattcaaactatggaatattacttttactcccatttcgtgtgatacaaaattaccaacaatgaactttgagaggacagcaactaccttaccatactcatctcgaacacagcttcaattccaattatattacaatttgcatttaaagttgcatcaacattaatttaaagtcacccatagtcggcggcttccacagcatgggcacagggattgggaaagatagcctcagaatagcactaaatgatttttaacttttacaagccaatcgtatctagataaatatttagccattttgtttgtttgaaatttgaatcataatttagccattttaaattatttagaagaattaaaaatttactaaaaatagatatgtacttatatttttaactaaaaatactaaaattacctgccaatggtgactaaaaacgatcacaacctaacaattgaccttctctttgccatcgcta

SEQ ID NO: 176133 - DNA, 679 bp, Cannabis indica
gtattgtaaaaacgcctattaatttaactacgtaattaaacaatatcaaaaaatatttctttttacattatatttataaatatatatacaaaatatttaagtcaaacttaatttttaattttttttgcagaaaaattttattcttgaatttttttttctagcagatagaataaccacaactcatatatcgtaaaagtgagaaaattttttaattagatagaaaaataaagtattaaaacttaaatttttttaatattctctattcatgagtaatacccattaaaagtatacacgaacaaatttatgtatatatttagaaacatatttaaactaattatatatgagaggacaatcaattattaaatcataaagaatgaagctttttaaaaacaatccaccacgatcaacacagaccgaatttgaacaaaaaatggtgtttaagaaacaaggaaacgtgcatttaagatataaggattgatagctcaatagaaaatttaaagatgtaaagaatccataaaagaaagtcttagaaattaaataaccgccttagcgaaaataaagataaccattatcccatctttatcactaatataaccaaaacaattcatttaatattaatggcaataactagcattttatgtcatttaaaatagaagtggtatctgaaatatactttaac

SEQ ID NO: 176134 - DNA, 515 bp, Cannabis indica
attgctacgatgaagatggactagcacggagagtgaggatgattcccgtactgaagttgaagaagatcttgatcgatatgatgttcgcctccctaaaactcactagggttcatctacaaaatgtaggacacaagatgagcatttggccgggataatgaacaaaaatagattggttataccaaccaggtccgatcaaaggatcaaaaaataaaaattctacgtgatatggaggtttccaatccagaatttcaaaatttttaattaaagattgattttcactaagccctgaaagggtaagtgaaagtgaatatcatggaatcgaaatcaagaaacagttataatcaagcaatgttgttaagcatactcaagatgttacattcctaaacctaagttttctatggttttcctagaacaatttcaaaaactatcgagttttttacagtagaaacccagaaaatcaagtattcaagcataaaagaggaaagagatgaagaacttactcactgttcgtagct

SEQ ID NO: 176135 - DNA, 787 bp, Cannabis indica
aagaaaattggagattttgtttagtaggaaaaataaaataataaaccttatacacatataaacttctatagctaaatttatttggtcaaatttatggaaatcatgcatgttggtctagacacattaacatcagttcattttgtgtttcatgtcattaacttctattattctcaataattgtagaaaaacaattttttagcaatatttgaacttttagcatttaacaaaccgaaaatgggactataacagtggttacattggaaaaaaatcagtacttacttgaaaagggattctcgtaataatttgtccatatgaaactcatatgccagatctagatctttcaacgtggtattctggtcaactttatcttgatctgttgttctcccttgagttgaccccttcaaatcatagcgacgatgaatccgtaattcagtaaagaacatattccccatcaccacaaaacgtacctgaaaagaaactgattagcaaaggcaaaaatttccagataaatcaaatgttagatgcatgagcatctaaaaatgagctagatgtttgtgagaaagtaaagcagatcattggacagaaaccagtccataccttccttccagctcttagttttatccgatggagtccaaaaaattttgttatgagagtattttcatgctctcctacatgactatagtatttaggcaacattctgagcaacacctacagaaagatgaaattagaaggataaataataacagtaataaagacagttaattatatcattgttctgtagcttgtt

SEQ ID NO: 176136 - DNA, 865 bp, Cannabis indica
ataatagaggaaattacacttaggttgctaaaacaacttggctgaagtccttgtgttttgagttgcatcttcacttacctcgaccaccaatcgtttggtgtgacagcttatgtaccattatgctaactcaaaatcttgtgcttcatgctaagataaagcacattaaattagatctttactttgtttgagaaaaagttcaacaaggactagttgttgtcaaacatgtacttggaccaagtagcgaatggctttacaaaggcaaatttcaacagtaggtttgccaacttcagatctaatctcatgattaaagatgcttcaattataaaattaagggaggatgttaaagtaaaaaaaacagttagaagttggttaagtttttgttggtgttagttagttttacagttagcaattcagttaatatgttagttgaattttgttactttgcaaacagaatcaattattttcagctcaatacctttccgatctttctcctctgttctttatctttctttcttttcacttaactaaaatgtctaagaaattcaaccatttttatgaagaaattcaacactttttatgtttcaatgttatttatttgtagtggtttcttattctatttgggttttttttttttttaatggtgtagatctagattgtaatttaatcactgaaaaaaacaaaccaaatattattaggtactctgtcattttaaatattaaaatccaaattatttagtcgcttgtgtaaattgtctttacctgatcgcaccatattttgtcagtgtaatttatacgttttgtgctcttgcggtgtaatggtggtttaagaaataaaaaacaacatgtacaatttgatttgaaaaaat

SEQ ID NO: 176137 - DNA, 830 bp, Cannabis indica
ctaagtttaaatgtcattttccggtactaatttgtttcttatgattattaatggcatcatgtaggctctcagtcagcacatatctgatttggagggcgccatcgagcaaatagaaaaaccaaattgtaagcgaaatatctccttcccgtccttttttgcccgttaagaaatcattaaactaggcgaagtatatctagatcggtgtgagtccaaacattaaaatgcaaaataattgttttgactttgggattattacttcttatgatttcttctctattacatttgtgtgtgtgtgctttggagaaacttttaccggtacaaatttattaatagaaaattctctattcgcgagttatctgcaggatgcttctcatgatggaaagaatgacaatatggttcgccagaatgaagaatacatcgacgtgagattctcattccttctttggtttgcttttaatatccttgttcttggtggtcatttgaattgatggattaaaaatatcttttcttgtttgcagagtgaggatgaagatgaagatgatgaagccgaatctgattgggaggatgaagatgaagatgatgattcggaagatgacgagtaagttacaaaccaaagctttggaaagcatgattgcattacttgcaaacactgacaaaaaaatggcgacgatagagaataataataatcgggggatgtgtttcagaaaagccaaatactgttttcgctgaactcgtctaaattccttgatttttaagagcagaggcatgaattctggaggacgatgaaaatggatatattgagagaattaacaacttcaagtcaagagaga

SEQ ID NO: 176138 - DNA, 796 bp, Cannabis indica
gaagtattataatttaatatataaacgtttgaggtcacacagaaatttaatgattgaatgataattttaaagttctagtgtaagtgctcctatgcggatcacaaaaataaaagaaaagaaatgcatagttagtcattaagaaaactctctggaaggaggacgcagcgtccaccatagattttcttattttttgtaagaaacccttgtggagtgggacgctactctagttgtggtcttcttttagttgctaaaaagattcctaagtatgggaccctatactaattagcatgggtgttgtacaatctttatttttttattttttctcccatggattttttttcttttaaaccactaaccaagttttatgagttgatatcaccacacaaagttcttcaacacaatcgatttcatccttgttagagatctggcgagttttttcacaatactcttcaatagtgatttatcttgcttatgttgatgaaataaatttatgcttgaacaccaagcacacaaccaataatgtacaacccattggtgcctgacttcttcaccatccactcaaaattgttattaattgcaaacctagccgctacttgtctcaattcttcctagttttttgtacaaatttccaagctgtatttcccatgattccttactttgtaaagaagtaataagctcatgattttttattatatcgtcctttgtccacgtagtagctttgaacttggtacaaactttaaatgatgagaacattgagaactatgcatggcgaggaggagcatgttcttctgatcta

SEQ ID NO: 176139 - DNA, 1003 bp, Cannabis indica
aaagtgtttggaaaattaaatttcgaggacgaaatttctttttaggattgtagaatgtaatatccagattaaaattggtattcaaaatttattgaggtaacaatcgtgttaaaataattgtcttatttatttttttataaagtgtgagtagtgataattattaaagtatagtggctatttctctaaaataagttaaaagttgctttagttacaaaatacaatattttggtattgttacaagttaaggatattatttagctaagactcgagatatacatttattttcttgatgcaaaggaactaatatggaatatataaaagataattaataatgtactagattttagtccctttaattcttctaggaatacactaaatattgttatgaaataagtgttaggcgtgtaccgagttttgagtgtgtaaagcagtaaagttttttttatgctactatatgtaagataaaatagaagtcaaaatttgttatacatatcaataggtacgtggcatttattggtttaatgatagtaatcatatttattatgctttatatattggtcatatataggaaggagagagaaataaggaataagttgatatttaaattaataataatattagaatcagttaagtttttaaattcaaatttgaaagttactatagtcactctgaaggaagagaaggttaaggatatatagttgtattcttccaattaacgtgtgggatgtgatttaatttaataaatatattagttaataatctatgaatatagtgggatagtgagatttgagataagtgggtcggtggatgatatttattttttaaagtttcaaatattttaattggatataaatgaaactagggactataaataagagtatagccaaactttataggactggcgtatatacttgcttcaaaagataaatttaagaaaaacaagagtgaaaagaaggactcggtgggccggtggccatgtaaagacgagtcaattgcatctcac

SEQ ID NO: 176140 - DNA, 821 bp, Cannabis indica
tataagaaatttgaagtgattgatgtttgcatgaattttacatgctaatggtttaatattttattacattcacacacacaaaatcagttaaatccagatcatatgtttattcacaattacagtatcgtcaacacagtggaatgtgattgtgatcatatgaatcaaaagacttggtccctgtttcatcagtgttattggatttacactaatgtgataatcagcgatgatgtgtacttacacttggagtaagtgttatgttctttccaggacattagtaaagtatactagtttcgaatgtatggagtatacattggactggaccgatattgcaactaagttaagatattacattagtaatttggtataataggtcatttctctaattttttatttcattaaaaaattaatataataataaaaaatatttttttaatgtaattcttagtgttgtggttggagtggaaatatgacaccaaatttagtgaagcgtaacactaaatttaatgtgaccttggagatgctctaacaaatgaagaaaaaaaatcttttgtccccaatatcctcctcttattgtgtgccactaataaatttttaagtatgagggttagatcatactaaaactgaaaattccataaggtctagccacaaactttcctttattttatttctaaaaataatcagataaaagaaaaaagaatcaaaaaataattggctaattagtaatttttttcccttgaactttgtacatgtactaaatcgtgccccctgtaacttttttaagtccgttataattctcctgaactatggagattgttaaattt

SEQ ID NO: 176141 - DNA, 568 bp, Cannabis indica
aatgtaaaaaaaaaatatttagatcaacctagttactgttaattttgaaaaaaataagaattttaataaaaaaaaaaaaaaagactactgtctaagaaaagaaaaaaaaaaaaactagacatgtaggcagagtttaggagagagaaacaataaatatacattggtatacctatcaaaaagaaatgcctaaattgtgagtattaaaataggtaagggtaaattcttaaataatttaataataatagttgttggtgcaaatatttctaatatatacatgtgctttaatattgaaatacataatgaagaaagatatgataaaacatccttatgataaataaataaacgtgtcgtttgataatacttttgtttgtaaattttttaatcacaaaaataaaagtaaatcttttttttttaaaaaaattatttttgaaaaataaaatatgttctataaccacttttgtttttcaactttaaaacaaaaacaaaagtgtgttatgcatatatcatttttattttcaattgttgattttatagggaggccaggattgggggcgggtccaagtctgga

SEQ ID NO: 176142 - DNA, 1444 bp, Cannabis indica
ttcaagtgtgctagccgacctgaacggaatttctgtgctagatggatgccctaatcacattttgaaaccgggtaagtcacatgattaaaaccctaatcccgggaaacccaaaaccaaaaccctaggttctgctatactctaaaggggttattctaactctggaaatggggaaacacccaaccgaggtactgaaatggacaaaaattgagaaaacgaagtgttcgggaatcctgccaaaaccggcaaaccggtttttggggcatggcaaaccggtttgccggtttgcaccagtaatcccaaaacacttccttctttgctcaattttccaccaaatgataccaaactttccagagctcctaaacaatgcatacacaataaatcccagccagtatttcacagaaaaacacaataaatatcaacttgccattaaagcttaaagcttgaactcaaagcttagaattgctcaaaactaacaaccaatctctaaaccagctaccagaactagaaatcaactaaacaaaccctaaaattcgaactaagcaaaccttaaaccctaacagcccctataacccaaaatcacctcttaaaaccaacatacaacttcatgaacttgaaagagaaaggagctagggttaccttagatatttttccttgaatccttggatggaaatacagaaattatgaagaaaactttgggtttttccttctggtttgagagagccgaaccccaagagagagaaaagagaaatggttcttgattttctctaatttttaatttctttttcaaaataaaatcccttttcacccaatatattaacatgaaataggtgtcatcacccaaggctgccacctaaccctcatttaaccaaataagaaaagactaaaatgcccttaaggttaaaacttgggtatttctaaagctaggggtaaaatggtcaattccataaccccgctcaatcccgataatttattttctctaaaatatttcccactatgaaataaggttctaaacttacccatgtgatcaatctagccatccatcgcattttccgttgtcgccgagcaaaaattacaaaaataacatatttcacatataagctaaataatacccctagagtttaataaaatctccggaattgagaaattataactctaatatttatttctaaatattggggtccacaattaaattaattcacaaataataataaaataataaaaattagtgctaattgcctttactaatccatattactagagcggtcattacaattatccccccgttaataggatttcgtccccgaaatctaacctgaatagctctggatgttgagtcctcatatctgactccaattcccaggtggcttcttccaccttactgttcctccagagcaccttaaccagtgcaatagtcttgttccgaagaactttttcttttctatcc

SEQ ID NO: 176143 - DNA, 683 bp, Cannabis indica
gatctcacctgtatataaagccttgtacctattatcaaataaatctaataatacactttctttctcttctctcctgttttctctctgttttctctctttgttcactaatatagtcgtaattttcctacagaaattaaagagaaagagttagagtttcttgcaaattgctgtaaatttatcgatattgccttttgaggccaatagactgactcgtggactaaaattaattaatagatgaactaagtaaaaacaaattcacccaatttttcgccatttactatttcttttaactcttaaatattttagttctaaacaccatgtatagcaaacgacaacctcagtatattctcatttctttttgtcaaagtttcaatctcctacgctcctaccaaacaaagtgtcaaaacaaatatttgtttgttagatttaggaacacaccctatgcaatacattactaatacaatggttactttagattagataacaaaatagggagtttagattcgtacaggccactccaataggaagttcccttttcaaatcaaatcttacaaaaaaaaaaaaaaacccttaaccgtaagaacaagaacccatcaccatcggaacccatttctcccttctgagttccaatctctgcaacaaccataccagtagtagcaaacccatttacttcaatctcataa

SEQ ID NO: 176144 - DNA, 1213 bp, Cannabis indica
gaccgtgcctattttgtgaagagcatgtgctatatactacaacataaaactagtttaaaaccacctaacaacagcaaaaccttaaggaaagaataatgttaaacctttagttagatatagtgcaatctcgatttggaagagccaatcatcccaattcccttgcactcacaatcagtcaaccctattcccttgcaagatttgacatttacaccaaaacgattttcaaaacccttttaagcatagtactagcgggcactaacacttacaatgtccattcagccaagaaacttcctttccttatatttggctagccagcacaccaaaactgtagtatcacacttacaatctctatttaagactttaaatttattaattgaaaaagatgaatatgagaattttatgcactgacactaaagaagtctaatttttccgagtgagactcctctacttgattaaacatataatctcattcaaaattacagcataatctaaaacaatatcattctaactaattctaaccagtaccttattaattaacataaaagtttaaccaaaccccccaccaaaacgaaattagaaaaaataattcaacaacttagcgcataacaacagaaattgagaaagcaggcattaataatggcatcaaaaccaaagcaatttaaataaataaacgacggcacaagaatatttggacccaattaccgtctttttgatgatcatcatcattagcttcaggggttgaaactgacatatcgtcatcgcttttctcctgaacttgttctttttcgtcgtcatcgtctcctacttcttcgacttgatcgtcatcatcaatagacgaatcggagacttcggccggcggagattgaggcattgcacaacaggtacggttcggtaacgggtttggagtggtttcggcgagatgagagtcagtgacctcaatcgccaccgggtgtaattccgttccttgcggcgagactcctgttgttttgggtttcggtgttgttaagctaatttttttttttttttttttttggctagaacaagagttgaaagcaaattttaatttgggagttttattttaccagaaaattaatttatataaaatacatatttttctatttttttttctcatattatatattaaaaatatctttatttttatatattaaaagtagttatgtgtttgcaattttattttaagagaaacactatt

SEQ ID NO: 176145 - DNA, 528 bp, Cannabis indica
ctaatgtctggtggttgtaaactaccataagagtgttgttgggttgcttttttcttggtttttttttttttgaaatggttgttgggtactatcctagatagtatgatgtcgttgattctagtaaactaaaattgtgaatttgtaataaagttaggctttgagaccttttttttttttgcttaactgctttgaaacattttttttttacttggggaaacaattttattttagtaataagttgagaaatattttttttttatttattaatcaaaaatactttcatattatattttattaaaatctatttagtttttatgaatgaattgcctaatatacccttaacatctaattatgtgtaacacatgatttacattaatttaagaggtataatagagacatcatctataaaaataagtatatcttaaagaatatgaaaataaaagtaaattaaaacaaataaaataaaatagatatacaatgtaatttccactttattttatacacccgagaatttgttatgatgtatga

SEQ ID NO: 176146 - DNA, 680 bp, Cannabis indica
actcttctcatattgatgaagaatttcattcaacgtcaccacccccaatcgaggtcctgagaactcatctgcaagatgctccattatttactacatcatttctcttcattttaactttctcattccaattatttttgtagtattattttttgggggatattttttacataatacactataattaatttatatttatcatgattaatttgttccttgtctttttttatttttataggtggcgtttggtaacacttttttaatcagttttctgtttttaaaagtagaaaagtgaaaatatttttcaaaaacatgttctataaaactgtttttacttttcaattttataattagaaatcaaaattttaaaaacaaaaaaaaatcactttcaatatttttttaaacagttttttttttcttaatcaatcttttggattacgaccagacccggacccaaatcccctccccacggccctggcgctgaacccgacttttgacttgaacccgaatccgaccccggacctagacccgacttaaataaaatcaaaaaataaaaataaaaataaactttacagaacacacttttgttttctgtttttaaaattgaaaaacaaaagtggttacagaacgcatttttgtttttcaaaaataaattttttaaaaacaaaaattttactttcatt

SEQ ID NO: 176147 - DNA, 563 bp, Cannabis indica
atatatattaattagatttttatgaacttggttggtgatatatatagggagagttaggagtcttttgatcactagcttgtaataataatgtgacattattggaaatcttttttccatggaatcatgtgtttggtgatcagtacacaacaaagtggatccctcctttggcttcttgagttgttgttgtggtaataagtaggtgccaactgcaaacattcaaattttgcaagtgatattattatttatttgtttagggaaagaaaaagaaaaagaatcaaaggatgacaatatatatatttcaagaagtacttgacttacttgataaattcttcctttcttacttattaattagcccacactatatatagggacacgaatgtatttcgtagtacattagatgaatctcagggtaatagatgagtatcagattacgttattattttttaatcctaattacccctagatcaatcttaaccctcggatcaaataactacctcatctaacggctgccgtacatcacggaatacattccgtgaaagtacaattacgggacaaaatcatat

SEQ ID NO: 176148 - DNA, 834 bp, Cannabis indica
gtgttggaggtgagccgtggtggtgcgtttgggggtgggggcggtcacggtgagagagaggaagagagagggggtggggcggtcaagtggggaggtggtggaggtgagccgtggtggtgcgtttgggtcggaggtggtcggagatggtggtgcggtcgaatgttgggttggaggtggtggtcgaagggggtgggtgcggtcgaatggtggtgagagagatagatgcagagagtttgagggaggagagagaaagtgtttgagttatgaggggtatttttggggtttagaaaaaagtgatatatttttgtagtttaaatgtattggtttaaaaaaaattaaattttaagtataaaaatcaaatttccctaatattttgagttcaacatggaacacgtgatagaaatatttatttagagggtatatatcaagtgtaatcttgagatttagctttgggctctaagcatcactgaattttgtgcgcatagataaagactcatacactaaatcaccacgcgaatgtatgggtgaagtgttattttttaactaagaataaaatatttaataaataatattattataattattaataatttatttttataacgttgaaggagtaaaaataatcaatcaataattcattcttttttctaccatgaaaataatatttcccgtgatcacattactaattttaattttaaatcgatttatctatataagtcgtatcagaataacagaagaatacatttcttcaacacaaaaaaaaaaaaaaaaattctctttaaaaacttttatcgaatttctcgaagcaattttattggatagtaatagatcagc

SEQ ID NO: 176149 - DNA, 859 bp, Cannabis indica
tttttcttctaaaaggggatgtccataaacaattttgagcccatagttctagccctatattaggggctttaaagccggataatcatcaagcccaatgggcttacaaaagtatggttaggcccattaggccaattactggcaccttttgagctcacaaatttgtattttactcaatacctttgtttttttttttttttttaaaaccatttctttatttcttttttttttttttttaagtaatctagcaattactttgttaatgttttcaagtgtattcatctatgaaaagtgttatttaaaaaaaatctatgaaaagtagattatccaatccaaaaataaataaaaagaccttaattaaaaaaccactcacacaaataccataaaacttgtatgaaaaatcgttaaaatgaattactttataaggctttttatttatatactaaattaatatttatattgttacagggtttctctgtggtatctatataattaaaaaaaaattgttttgctaacacgtgtacacattgttttaactcatttgaaaagttccaaaatttattcatttgttttaaaaggaaatgtttcataattaataagcattaagcagcttttagtgttataataagtttgtatagttgttcaaaatagtaaataataaagagactcaaaaattagtttctcaatagaatcttcaaggatgttctgttttataaaataaataaataaaatagttgataagagaatctttaaaggaatgttcttaaggtatctacgatcggtttttcctttcccttattaataaatagaaaacaatgaccaaactctttgtagttgaacgtcataataattttttaattgc

SEQ ID NO: 176150 - DNA, 698 bp, Cannabis indica
agtaatatgcttttaattctaaaaaaaaattattaatttttgtatgtgataaaagacaatataaactaataactaatctaaaaaaagggatattttgctacaaattttgaaaaaggacatttaataacataatcctatgatttgaggccatttactataattttcctaaaataaatagaaaatagggataattacataaggcactattttttgtaaaaaaattatattttacgtttaaagaatattttttttacatatttacgattttttatagaaacaacaagaaaattacataaaagtaacatcaaaataacattaaaataatatataaataacaaaaaatcaataacaaattaacaggagtacaacataaaaagaccgtaatttttataaataaaattaaaataattataaaaatatttacaattctctgaaactgtatttttatatttttttattattatttttgtgtattcgtgaaatattccttaaaaaataattgtggtccattagcatgaggcctattaaatatcgacaaacttgtaaattattttgagtaaattgcttgtgtgtgccatccttgtaggtctactttgtaatgattaataaagacaaagaagcactactaaatctaatgaggtccttcagttgagtggaagcttcaaaactggagcagaataattatatatatatatata

SEQ ID NO: 176151 - DNA, 743 bp, Cannabis indica
tagttgtttatttttatcttttttttttgaaaaagttggtatggtgttttagtatatgaaagaatgaactctcaaataattagtaaatattaaattaaggtgggtgattcttcttaattaattatcacgtgtactttcacataatataatctatggactaaattaactatcaaaaactaaactcatagtcttatttttaccattttagaaaatacaaggtctattttgtcatttaataaaatagagggtccaattaataatttttgcaaaacacaaggtccaaaatagtatttacccttatatttatgacagtataaaactttgttgtcttctcttgattatattcgttgttaaacagtctggcgaattgtattatctctcacactgtattattagagtggatgataatcctctaaattgttgactttgttaatttactattaactttatttttaatgaaggttaatcttattctaaaaaaatttaaaaaaaaaaaccctaaaaaaattgtacaatcaatatgactttatatataatagaattcaatatactttactttttatgtttgagtgtatttccaccatagacacattaatttgtagaataatgtttggctaagtgatcatcatcatatcaaattcaatatacttttaagtatatataataaaatggatatgtttattaattatgtgataatattgttttaattttttaccttgtttttatgtactaagtactctcct

SEQ ID NO: 176152 - DNA, 887 bp, Cannabis indica
gtgctatcatcttggatatcataatattgaggtagagatggattgtcaaattgttacaaaacttgtgaataaaagagagacatgtctgacggattatggtttagtttttacaagataattatttagtttgggataagcttaatgtttcttaagtttttattttgtaatcgatctgagaactctatagctcataaccttgccaaactcgctctttctcctgatgaggcaagagtttgttggccgtaattgtttttgaacttatattagcgttgacctaatgataattttcttttattcaaaaacaaaaaaataattttgtaatcaaattctcttatattttaatttgtatacagtttaccttctcattttttatggtaataatttcttaaatttaatttttatttataaatttgaggtatcaattacttttttattatataaatactaactggaattatcattttatttatttaaatttatctgagatttacaaacaaatgttaagttaaaaggaaaaagaattaaaagattaattatatacaaattgaaacatgaaagtttgacgacaaattacctttaatctaataggtaaagtttaattgtacgtacatgaaagtttggcggcaaatttaatttgattggcgaagctggagcgtgtcggttagcattggattcggttgctttgatgaagcactgttttgtcttagttgagagtgattcgaagaaaattatcaaagcgttgaaaataatctacgctttttggaacattgataattatattaatatttgtaaattaaccctttaaaatattttttatgctgtaatttctcgtttgtttccagatgttgtaattttgtgacccataatgtgactaagtagatttttgc

SEQ ID NO: 176153 - DNA, 513 bp, Cannabis indica
cttaactctgtctgggccgtaccatgggcttcctgaggaaacttgctttgaggcagctttcctcatgttgactcgtccgccgttcgacattttgttggcggcgggcgccagctcgacggccttaccggcgaaagccggggaagaaagagccatggtggaagaagacatggtttttttttgttttcttaccaaatgtaattttttggggggttggatatgtgaggataaaatgtttggttgagaaactttggttaaattttgtcacatattaatagattaaagggtccttatcttaagagattaatatctttaatctcattggttgtgagatttttttagtgtgattttctatgtctatgtggctctcttttctgtcaatgtatcaaaaaaaaatctctactcaagctatgtttcttgataggttggccaatgggatttggacacttgttactttggatatataacatttatcttaggaaaaaattgaataaatacaaaaattatttattattt

SEQ ID NO: 176154 - DNA, 687 bp, Cannabis indica
gtatttttttttgtattataaattatttttgttaatcgtaatttttatttataattaaaaagaatttaaaaatattatattttaaatttcattcctaataaaaaaaattatttattttaatataaaattaaaaaaaaagatatttaaaaccgcgcgaagcgcggtcctattacctagtttaggtatataatattttctaagtttggtttttacaagtttatagttttgaaagttgaatttcttttgtgatttttgggtatttatttagaacatttacacaattaattatatttgtagttgatttatttatgtatatttttatattaattaatttttcaatttatttataaatcaattaataaatttagttaatatttttttactttaatttattagaatttacattacttttttcttatgcgctttttatggcttttgtaccattttttatggcttgtccctatttgtttagggtagttttgtggtatgctcagttggcaagagaagtgatttctttttgtgctcatgatttctacttcaaagaccttttcactttaaacaggttattttttggagggcctacaataacaggaaatttactcataactttaatgttatatatcatttttttgattttgattttacaacaatttatatttaggtattagtatgttgttactagccaaa

SEQ ID NO: 176155 - DNA, 630 bp, Cannabis indica
attggggtttgttcataaatataagaaaatttaatggaatttatttttacatgacataaataaataatacaaaaagatatgagattaaaatatgggaaacaaaaaaaataataaataaatttgataaaacttttaataatagattttaccgaaaaagccactgatgcctgaaaagtcaccggaaaagttattgtcaccggaaaaatcattggaaaagtcaccgaaaaaactatcattgccggaaaaagtcaccgaaaaagtcatcattgcaggaaaagttattagaaaagtcaccagaagtagatgtctcagatataaattaaaatagaatcggttctataacataatgaataaaaataaataatacaaaataactgaaaccagtcataaattaaaatagaaaattctgtcactttttgcaaaaccacacgattaacttcctagcatgagatcatagccttttttacctctagtaaaagtatatatgtcattttttaggctttcacatgtgcatttaaatcaatattttctttcttatatgaggagcatgaagcacattgaaaattagctaaaagttttttttttatttaatttaaaatctcaatttctttagtagcatattggtcttct

SEQ ID NO: 176156 - DNA, 1260 bp, Cannabis indica
atgtttatcaagtgttgggaatgaagaaaaatctaccatcaatagctcaattggcatcatcaggaaattatgtcgttttttgtcccaaggataacaaaatttatcaaaatctattaaagtcacaaattgggaggtgatttatacctgatccacttgttaaggtaagggcaatcctcctctaacatgctggttttgttaaagtgggctaacgacccaataactttgctaataaaatcttaaatatttgggacacctttaataaatttgacgtttataatctatctatgttatgttagctgagactgcttacaacataaagttcgaaagaataagacatcaacttgtggcatgccagactaatacatgttagttaccacaaaaggcgatgatcgaaaaaatggcgctcaaaggtctaccacaacttaatgtcaaaagcgacactatttgtgctggatctcaatatgggaaggcgcactaccaaacaaagaatagaacttcaagtttgcagcctcgtgcattctgatgtttttggacgggtcaagcaatcgtcaattagcgaaacacgctacatagtgacgcttgtcgatgatttcttgaggtatgtttgagttttctacataaaagaaaaatcacagactttaaaaagtttaaggaaattaaaaaataagtagaacgagaagtaggaaggaaaattcgatgcctacgcactgataatgggagagagtacacatctaatgagttctctcaatatttacaaaagtataagatatgttataagtatggcgtgttcgcatacaccacagcaaaatggtgtaggaaaataaaaaaaacgacaccttgttgaggtctatcgaagcatgttacatgcaaagaatgtgccaagtagattttgagctaaaggaagcccatatctttaacaggcttcctcaaccaaagcttggctttgtttcacccttcaaaaaactgtgggtgtgaagaatgcattcttggattgagaaatatgtttatatatacatatatatatatatatatatatatatatatgatctaaccaagaggtttgaagacaaagctcgatcacattagtaagttgtaaaaagacattatataaactgaagcaagcgccaagagcatagtatagaaggttgtcgatttttaataaaaagcgaacactcaatgggacatgcaaatctagcttattgtcaaaatgaaagatgtcaaggatctcgagtggtgtggtatacgtagatgatctcttca

SEQ ID NO: 176157 - DNA, 761 bp, Cannabis indica
accaaaaaaaaaaaacgaggacaaaaatgcttacattgcgagaaatctcttcagcggctttctggagatctgagaaaacagaaagaggagaaaaaccccagcctccccagcctcctcctccaccgacatccttttgaggtggcgctacagattgtttagcttctgcttcacttccaccttgaacttcatccttcaattgttgtttctcttcctccatttgttaccaaaacaagcaattgaactaagaatgtatgaccctttgatcccgcagaaatggaatttgctttttcacggagttttgcttcaaatttcaaccatcgttactccattaataatattattaatataattttataatttgaataaataggtatgaatctctaaattgctttgcagaagagagttttaatggagaaatggacgtgacatatacgacgagcgttttgggcgtttgattgggatgagatgagattcagagagcaacgggaggagagtcgagacggtccagttctcgcgtttcctttaagtcaattaaacgacatcgttctggttcttgattacagaagatcaccaacccgtatgacatgtcattatctacgcggaacatttttatagttttaatttaagggaaatttttatttatatacttaatctatatttatatataggctaattagtaattttttttgtccttgaactttgtagatgtattaaattgtgctcccagaacttttttattcgttaaaagttctcctgaacta

SEQ ID NO: 176158 - DNA, 476 bp, Cannabis indica
attcttattcctctactgaatatttggctctcatatattatggaccaagttttgatagattgcattgcatatcataattatttatagatctatgtatgtagtaggaattttctatttttttttaatctctatcgaatagatatttaattttcattatttagaaaaataatattatttatttttattattttgtataatttcttacattatagttatagtaagtattttattaatgttgtaaaattcttataatttaatttgcctaaaataatgatttaataaatagttatatataaaaaaaaaaaaaaaccgaagtacaagtggaaatatatatatatatatatatatattttaaggagtgaaaaataaatatttgaatgcatgttcatcaatgattaaagaatttttttctttctaaaaaaaattattatatagagaatttgaatttgctcttgtttgtatggggctccactttt

SEQ ID NO: 176159 - DNA, 742 bp, Cannabis indica
aacagatgtctctgacatgagtaacagtggaattgagcatgacgctgaagagttagccatgaatgtattgatcctgatgtagctgtttggagtgatctttaaattttttgcagattgataaaaatttagaagactatataagtccacccacacctgtagattaggatgtgttagacaaatttttctcctcttatggacaactttagcaactaattattttagcattgcatttaggagacaaaccttttgggtagctgggacaaggaatattggaactttaacatttttcccctgtacataatgaaataccattcagccttgagcccgaatctttaatcaaaattacattgaaaggcactcatcaatggaaactagttctagaaagaaagtgctagcagtagcaataacatttaaaattgattctcattcctatggcacattatcttgcaatcataaacttgacccaagctggatcgataaaaaaaacatacttttcaagcacaaatagttgatgatgaaacagatctaaacaagaataagataacaaatatagttagattctagatgaagtacaatattgacaatacaacaaatatagtataatattatggcaacattacaacaatgtgtaaacaacattttttagaacaaccaaaaaacaacaagtctattttcttgtaaaaaaatccattaaaaaatataaattcgtaaaatagtagttttttttttataattatttttg

SEQ ID NO: 176160 - DNA, 792 bp, Cannabis indica
aaacacttaaaaaagcccttttgaacaaaattttacaattattgatgtcaagaatgtagaatatagaaagcaatggtcaattctttgcattatttaacagtccttcaacaacaagagtcctttattatcaaagtagagtgttacattggaaaacttagtctcattcttttttgtaaataaaaaaaaaggttttcatgatagtattgttgaatacttgaatattaaggtgactctagctacaaatgtactgttgtactgacttttcttataactagtttcattttaggttcacccttgtatttatgacttggttattttaattctgtgatgtataattatgtttttgcagtttaattctcaaaatccatgtgtccccctttaagctagtctaatccatctaccttaacttttttatgctatatgttattaaccaagcaatgtgatttaagattaagaattctgtagatttatttattattgcttactattttattggagaaattgtacagttctcctggtttgagtactttgatccattgagggaagttatagatgttcttttctttactttgagaaagaccccacaatgaccctgtaaggttttgaatctcaagcttgagacttgttatcttcttctttgatatgtttttttatcatcacattgtgtctgttgttttggtttgtttctgttgtctcactctgagaatatgtagctgaaaaatcatttgaataaaaaaaattatttaatttaatgcttaataaaaaaaaattagtctatgtgttatactctga

SEQ ID NO: 176161 - DNA, 1062 bp, Cannabis indica
atttttgagtagcttagtatttatgaaaaagtttatttatagtttttttattttgttggggtttgaagtattataataatataagtaaatttgtaaattgcttataaaacatatatagtgttatgcaaaagaatttttggtttaatgtgttttttgatttttaaagttaactttattagaatatctcaatttcttaacaaaatattatttattaattttacaatattattacatatatttaaaaataaaaattatgtagacattttatatctcattattaaatttaaattttaattatgtagatagttaaaactaataagtaaattaattaaaataatgtattccgtatacattgaagtaacaatgaaatttttgttgtataaaattcattgactattaagcgtaacattaaattaattattggttttgaatcatttgctttgcccaatatcatcaacaaaaattttaaatatatatatcatcaacaaattaacaaatgtataaatgccatagctattgatgttagtatttcccttcattttaggttgaataatggattgttaatacctaatttttattggaagatgtatgactaatagtcattgattaatataatttggcatatgttcatttggattagaaatttattaatcttcgtactcctttgatactacatcctttattgtacatataaaatacatatatctataatcacatctaaagagcacactaatatagttagaatagttaaaaaaaaattctcaaagattaaaattttaaaccttattttaaaaattaaaaaataaaaatacattacataattaaaaaaattaaacatacatgtatgtatataatcttatctaaaaagtacacatcaatgtagtcgcaatattaaaaaaaattctcaaaaatcaaagtctcaaaacctattttaaaaattaaaaataaaatacattatctaattaaaaaattaaatatacacttaacattatttaattaaacctaataaaacatccaactataaaacataatatccaatacaatatggataagaaagctccc

SEQ ID NO: 176162 - DNA, 1170 bp, Cannabis indica
gttttccactatataacctatctggcaattagatagccttttcctttcatctgtacatgttgtttgtcatgtgaaatcgttgaccttctttcagaggactaagcgcttgagccggagattgttctgttcagttgctacagaaccaaagcaagttgacaaatctgaaatggatgctccaaaagaaatatttttaaaggactacaagaagccagattattactttgatacagtatgctatagacttctaaagcaagtgatttatttagggttgagcatttttctgtaataagtaaaactaaagcaactcttaaatgcaggtggatttgaagtttactctgggtgaaagagaaaacgatcgttagctcaaaaattactgtgctcccaagagttgaaggtagtgtgaacaattcctcccacttatgattcataatgttggaactatatgactttttcctgtggtgatttcttgttcacgcgtaatagtctatttctctcagtagtaaatcttttgcattttcctataatattgtttcaatactccttgttttttattctttttaatccaagtagactgctgttaagtttatggttttaagatttatttactactttttttaatttttttgcaagcaggttcatcttctccattggtgttggatggtcaagatctgaagttgctttcagttaaaatcaacggcaaagaactaaaggcatgtgaattcacaggaatgaattgctaactggagcttttttttttttcccacttctctttcttaccaatgcttatagaactttagattctactttatctccaatgtttttcatgtgtctctttgtgctagaaatacaaagtagtagttattacatgctcataattattaattttcccaatgataggaggatgagtaccaagttgactctcgccatctgacacttcgatctcttccaagtggtgcatttaccttggaaattgttactgagatatatcctcagaaaaacacatctctagaggtgcatgactttttttttttaaaaaaattcatgttttacaaagtcttgtgatccttcattgtgcttacgatctacttggtgtaatttaggggctgtacaagtcatcagggaatttttgcacccaatgtgaagctgagggcttccgcaaaatcacattct

SEQ ID NO: 176163 - DNA, 799 bp, Cannabis indica
tctctttttactttgttgttatttctgatgttgttctctgttgttgtatctctctggttgtgactctttattttgctctgtatattattgcttgttgtatctgagaaaagcacctccttttatatactgttctgtgatctgatctagggcagagccctagtgatatttgtaactgtttttataactgcttcagttgtaactgtctttgtaactgtctttatgttctttagtcttgatatttgttgtatctgatgtaagggtatatttgtcaaaccctatgagtggtgttatacaacttaagggtaaataagtgaatctgtaacaacaaattccacccagattctcttatttacccaaggatagttgataatgctatgagggcttgaatgaccccaaaggtcagtaccatttgtttatccctagcaagttcagtttgaacttagctaggacaaacaccttggtcttcatgtttgtgacacctccttgtgtcaccttgtttttctctcttgtatagatcaagtcacaaaatccttccatttggttttgtgactttctaaacgcaagtataacacatgtggtcttctttaagtaacttaaaatccatatgataatcaaccaatgtatcttcccagtcaataccatatacttgctaacagcaactatagtatatgttgtatctggtatggtactcaacatgaaatacatctttgaatcaatcccattagagttgaggatcttactcatatcttccaactctttatttatcttactgcatttttctttatgtctaaaaggccac

SEQ ID NO: 176164 - DNA, 714 bp, Cannabis indica
agtaaaaagagttttttagtatgggggggagacggagacgaaaagaaacagatggcattcatcaatatttgagctgatatatattatttatataataaaagtggtggaaaaagaaaagaaaaaggcagtagcatctttattcctaaattcctaatatatatatacgtggcagtactaagctttgttggataattgacagcttaataggtccatctctatatttaaatttgattatctctatatactatataatataataatattagtttatcacttttgaatgttgcggcacatgctaaatgaagacattattttgatacccaccacattatttcacacactagccttccttcactgcttaattatattatagtatttagtaataattaaattaaagatgttaatgtttagtttcccaacagcacaacacaatttatctacgtctaactaaagagataatataatacttcaatattttttagagggatatattaatgatgatgttgatcatgatattgtatatatattcaaaatacatacattaatacaatttgctttttgcacaaaatttattaaactaggtaaatcccttatatatttggaggctgctgagtcagagcacttgctatgaacagagagagagagagagagagagagccacactgggcttgaccaaactcagaagtaacaatactgccaatatttaatggtaaa

SEQ ID NO: 176165 - DNA, 910 bp, Cannabis indica
aatcatatgaaccgaagcacctaattgacttgagatagcctacaggtaatcaacacacactcaaacgacatgtcaaatgatgtttcagtcacaaaaataataattatcctaagcgtgacatgtcactttaaagtctaattacctgattggtcaatgatattgccgcccaaaactctaaaaaataaaaaacacttggtgagacatctttaaatgcttctaaactctttgaacagttttatatactccaaaatataatattttgtttagaactaagaatataatgtttaactacaataaacttgatgttttggcttataaagaacctaggctcttaaaattaatcgagagatcaaagaagtgccattaaaaaaatatgagtaatgatatctacatacataaattatacacaaatgtaacataagtttgtgtcacatttgtgtgttcatatcattacatagatttgtgaagatacatgttatcatttttttttaaagaaatatgttatcttatcttttagtgcaagaaagaaaccatttgtagttagagttgctaattggaacattcaaatacctatataaaacaaatgttgagcaaagtggttttccctcaattccctttccttatttccaggtaaacgatcacttttttctcttctatagaaagcgacatcggttgtttacaattcagctaataaaaatgccaattatatctccaaaatgcaatttgtaagaggtgatgtaccattgactttatacattcatataatttaaaaccaaaagttgtctttccaacacttttccaaatcataaacacaagttgagccattgtgtttagacattattttatcttttcttatatgggtggacctctcaaagcccaatgtatatttgttcttttttctttttttttt

SEQ ID NO: 176166 - DNA, 514 bp, Cannabis indica
caattggctttttagcttaattagtgcgacattctaaaattttgccatgttgttttaaaaaatttgtcaatattttttttttttcagtaatgtaagcattatgactatttctttttctcagagatattgcaaaatgggatgtcccggttgagtttaatcagttgaaaaattgcactacagaaaccacaactagtgctactagtacatctactgtcttgccccaatttcattgtgtacaacaacagttgtgtaagattgatgagtatatgcttccattacaggtaataagaataatgtaaaattataattttatatataattgaaaattattgaatagtgtacacattgtcaacttatactttgtaattattaatgaaatattgaagggaggcataataagggaatcaaaccaagtgacattaccatcagctgaatcagatcaaataacaagcacttctacagctttttaccagccaaagactcagatggctaaaatggaaaagctggtacgttg

SEQ ID NO: 176167 - DNA, 677 bp, Cannabis indica
ggtcttggttgtattttttttttttcagacattattattaataactcaaagaaaaatgggaaaaattcacaaaagaagggacagtattctaggacagcgcaggccatgcaccagaacgagatcggtcttcctcaagattggacttactgaagaaacagtcaatttatatagtgataattaataatggttgttcttttataagttgaaataataaaaagggtccagtacagaataaaaaggaagaaatatgtggaacaacactacttgtggattgaatgcagggaatccccaatagataatatcttaggtgaagtaggagaaataagtaccaaacttggaagaatacattttttttttcttgggtagtttatctttctggtggaggatggttgtaagagatggaagggactacagtactattgctatatggtatctagtctattattgttgttaattaaggatgcttcttacatccatactaataaacactaatgaattaatatacagctctagctagcttgtcctataattttcaaggtattttttatttttggtgtacttattattaaatattttaggctgtggctaggagcacctatatgttaatagtatatatttttaaaagcaaataatatattattaatcttggtgaaaattaataggtttttattttaatt

SEQ ID NO: 176168 - DNA, 682 bp, Cannabis indica
accagaaggcttcccccctttcaaagttgttgtaaccgtttcaggtacaaacaagtagtgaagcttatggtggtcccagtccccttcctcagtcaaaagatcagctacccacttatagccaaaggaaggattgccattggatttgggaaaaaattcgttcacgtgagcaacccaagggtcatcccatatacttgtggtcttcccatcaacaatcagcttacaggctcctttccgaatcgtggatctagccttaaccacattctttcaaaaccaagaatctaaatctttgtaactacattgaaagaagttgttaccccgcaagtacttagctttcaagatcttacaacagagcgagttacctccagtcagtagattccaaccccatttgggcagaaaggcctgattcatctcctttgttttccggaagcccaaaccaccacaagactttgggaggcacagtttatcccaagccttgagatggatcccaagattacctttttcaaaaccccacctgaaatccctcaccatactatcaattttagcaccattcgactagagagttttgtggtttgcatagaatcattggcatggcgaggcccacagacttgataagagtcgcccgaccagccttagaaaggattttcactttccacccttgcagttttgaagaaaggttctccat

SEQ ID NO: 176169 - DNA, 607 bp, Cannabis indica
tattgatttgttgcaagcgtgagtttagttacactataatttaggtgacaacatataaattaattaataggttaaagctttttacatattatgtattattaaaaaaaagcatataattgtacaagcattatcaatgggggttagggaggccttgagctggataaaacaacgacactggcaaggatcggttgttgaaacggattgcctaacggtggtacaagcaattaggagtaatcttcctttgttgtcttattttggaagtattatttctgaatgcaaaatgtttttagaacaattgtgtgatgtttctgttatttttgttagacggtctgcaaatagagttgctcatatgttagctcgagcatcctattttgtcgctgatcgtactcttttgagcaatgaggtttctaccgatttgcggtttgtaatcatgaatgattgcagttaaataaagtttgaagattttattcaaaaaaaaaaaagacatataattaaatatgaatattactaataatacattataattaaatggaatagttaattattgatggagttggtcgccgcataatcatatgctatagaaagatgctataggaactcaactcaa

SEQ ID NO: 176170 - DNA, 660 bp, Cannabis indica
caacccaattcattttagtttaaatcattggagaaatgtgataatacttcaaacaggactaatttatcctgagaaaaatctcttccatgactgccaaggtagaaatccacctaaaaagaaaacatatcattagaaaaaaagaactgtccaaagcattttttttaaactgatttaattactatatataaagtactaaataatattattaattaataagagcataccaattaagttgaaatattttgaaataataaattattaaatactatatattctcttattaaaagaagaaggaaaaataaaactttacatttcatcactcattttatgacaaaataaataaattaattaataaaaaggtgagtaccacatccagggcagcgtacatagttttcttttttcaaaaccaaccctgaccctccacacacctcacaacttctttgagcaatctgcccaattaaagtaaataaatcagaaaaataaataaacaaacatacattatattataatcatgtcaaatgcattatatataatgtcacatacgattcttttgctgaattcaatccaagccaccacaaaaggagtccaccccagctgcagcataattataatacatatacatttaaagattttcatatatatatatatatacatacatac

SEQ ID NO: 176171 - DNA, 991 bp, Cannabis indica
acacacattttggtacggattagagtgacaaaggatacgcctctacctgacaagcaagatcacgcaaactcttgccaagtggcaagccagctgatttaactccacggctcattggaaaaccatactcagaattgacatggtcaaaaccttcttcagataataggttgtaacagcaacctatgctaacaactgctttgacttctttgcaatccagaaaagccctattaagaaaaacatgtgattttttcagatcaaaccgctaaataatagcaaaaaggataatgaataaggaagcaaaatattacaaatggtagtaacaaacaacaaaggacaacggtaaatccaaagttcagaaggattttaaagcagtaagagaagggataaaaatcagataatgctaaaatgaatctgtcacacggttcactctttctggctctaaatccagagttcatggtgtttgtgacactggttctcaaaagaattgcggggaggaacatgaagtttcaccagaagataaaaaatggtgccgtgtgatgctcatgaggaatacaataccacggccaacataacaacaaatggggtcaaggaggcagtagatagtagttggcaaagaacgctgggatagttatgtggcttcccaaggcaatgtttgtttattttacacacacacacacaaccgttgttcctataagaacctaatagatttttttccctgaattcatttgtttcaggtctgtggctagggatttgagagtataataactattggagctattacattctgtatatgtaattgggtgtctatttattttctatttagattgagttgagtatttcccatctatacaagtcttacatatgttagcacgtggagactttgatagtataaatcattgcctatactaccaaaataaaaacagtacttcacgtgttttcatctcttcgtctcgtagtcttgcattgcaaaactctgcctacaggtgcaagaatg

SEQ ID NO: 176172 - DNA, 834 bp, Cannabis indica
caatgtaactcacttaactgtaaaagttataactggacctccttcgcccacccccaaaacaaaatttaaaaggggatgaagagggcaccataattgttggaatgttagatattattagctgtacagtagaattacaagtacattttccttgcccccaggccattggtgtagagacaagaggggagtatgcctgactgtggcgggcatctcaaggtcaattcctagtagctgcagaattgtgtggggtaaccccttggtcgataagtggcggtgtggcccacatgtcctcagttattaaaaaatcttcaatgtcattgttgtttttctcttattttatttttctctttggtggtggtggtggtgtggggggtaaatttcttgtttcttgatttagttaatcattgtgagtgaaggttatcatactaaggttttttttgtaggattattaaggctgcgaaaaatgcattggtctcttctatcggaaatctcaagcttgctgagggagaaattgtccttgatgttgatggttcagttcctacacaaccagttttgcaacatatcggtatctctgcatggcctggtgagtgattttattcttctatatgacttttccattttactccaataaataaagcagaaatagggttcatgatttcatttgcaactaaaatttgcttactaatagttctttagcaagataaatccactatacataattgaaaggaaaaaaactataccactatgtcatgagatgaaatggacattactgctggcttagctttttaggttagttcttctcttgcctaaataatgattctagaaaccctcgtgaaa

SEQ ID NO: 176173 - DNA, 671 bp, Cannabis indica
ggaaaaaaaaaagaaaaaattacactctacactttttttatattgtcatcttttatttttaccctttcttttaaagtctatcatttttacttttttttttttaatattgtaccaattttgcccctgtcacttcaagatactctcatgtgactcttttatgtcagggtattttaggtacaatacgtataaaaagaggtatgtttcaattaaatataaaattagaagtaaatttaattaattgattaataaaagtggtatttttgaacttacccttaagaaaaaagcccagtgtaactcaattgtttaattatggacccatttgggtttggtgggcctaggtcattccatggcccaaattaaacgactaagctttttatttttcttcttacacaagtacacaatcttcttcttcttacaactcttaaacctcactcggtctcatagggctttagacattgacattgtgcgatacacttgaagttgaacctgaattataataataataataattaattaatttaccataacaacaataattcatgcttgttagtgtaagttttctcaatcaatcttcttcctgtcttgctcgattttttcaaatttttgtatttattttatttatatatgtatgatcttctttcattgtcaatggtcagcttcggcatcagctt

SEQ ID NO: 176174 - DNA, 702 bp, Cannabis indica
gaacataataacctaaacataaaccaaattaaaataacggaatgaattaaaaactaaaaataaacaaaaaagcataaaaacaatataaaaaaaataacttagaaaatctaaaccctaaaaaatcaaaataatatacaaaaaaccaaaaaatacaaccaaaaaaagaaacaaagttggggaaaaactaaaaagaaactaaaaacaaacctccaacccatgatcatcttaaacattctccttcttgttcttagaagttgggaaaaatttttgaggaacagaaaatttagatttcttcttcgcaggtctacaatcttgtttcaataaaggaggagcaaagtcggagtcatcatcttctactattgggagttttcctttggacttatttgctacaaatttaacacccattatcgaattttttttttgcaatagagaaagggaggatgaagaacgagtaatagccatgattatgttggaaattgttgtgctccaatagaaatatcaaatcaacaagattatagctctatgacaaataatacaaaggataaaaatatagattaaataatcttacaacactaagcaaaatatacacataaaatagagaatatagagagaatagaaaaattacaactcaaagcaataagctacacataaacacaatatataaatagcatatatacatataagagatgtgagatcaatctc

SEQ ID NO: 176175 - DNA, 827 bp, Cannabis indica
atatttaataagaaaaataaaacattatcaatgctttatctcctatagtaaaagatgctcatatcttgaattattataattaattgcataaaattcatgtatgtaataaaaagaaatcaataaatacaaattaatataatgtttttatagtaatttacacaacagagccactgagtagtgtttatctgcaattaatatatatatatgtaaattaatgctacaaatagtaaaatgtatatctctagtttatatttttaacgttacaaactataaaactatacatagtaaaaaatataaatatttatatataaatacattatatgacctacatataaagattttgcttgcctgtaaaatatatggacgttatatgtgcttagaagaaaaaggaaaaaaaagacgttatgttaataattattgaactttccagcaaatcaatgaatttataaaattgtgggaaataaatatttaagaaataacatatcaaattgcaaagcaattttggcaagaggaatctattatgtataaggtaggtcaaatagaatttcttttttaagaattattaattagtttaagataatttaaaaaaatacattgaaccactaatctttgataataacaacaaaactggtaaataagtatatatcgtcctgtgattggttaacgatatggtgttaaatattattgatatcttatagtatttttccgtatatatttgttatattcgaccgcaatatgcatttttatatccccgttaattcctttcatataagacttttttaatgagggacaccacttctaaatacttatagatgagtttttttatg

SEQ ID NO: 176176 - DNA, 778 bp, Cannabis indica
cgctttcctgaagaacagacataataacacagcaacaatttgtgcttaagtggacatgaccttgaatccttgatagactaacagttttgtcgtctctacaagtttctaacaattaagtaaagttctacataactaatatagcatggttcggacagggagggtcgtgaacaagctgtgttcaatcaaactcacacttgagcacataaacaggtgttatgagtaataattatacaattcagggaacttactggatataccaaaacccagtgctataaacacctgcaagcacaagcaaataaaataaaacatgactaaaatgtaaaggcctctacagtttaaaaaataaataaagtagaaacacgtacaaaaaggacaacaaaataatagtttgaacaatgcgtacccaattggaggttgacaactcattccatccatgtgtaacatcagatagatccttcaaagtagttccaatatatacccagagtaaaatgttatgggctgtgaggcaaaaaataatcttgttagagtatacaaataaataaaaaatcacagataaatcagccttgacttgatgttagggaaaaaatgacataaaatgtttcttggaatagcctatataaaaatttatccccgtatagggtagacgatcatgagctctcacataagatagttgctgaggtgtaactaagaatgttcaaatgcctgggcatcacataagtattctggaggtatgctggatgtactcgttcatggcataattgaacagaaaatcatgaac

SEQ ID NO: 176177 - DNA, 705 bp, Cannabis indica
atttttccttaggtcaatactaagataatgtttttagagatttttcatttttgtactgttcaactaatgttttttcttttaggcatgtggatttcatgtgttaactgttattttcatcgtgtgtctccaactgatggtagagattggtaatctttttcctattcaatttaagctctcacttcctattgaattgcatgtttttttttttcttttttttgacatcatttgtaaattgtaaatcaacaactctttataaactattaacaacataaaattttaacataaggactcaagagagtggtaatattggttagaacttttagaaatgaaccagacaatctgttccctacaaaagaacaaatgaatatctcaaattctcaacagtgaaactttttgtatctgtttttaaaattataatcccaatacctgagaatcatatttcagaatcattgtatagaaacaacaagaataattagttccctctaagaagataggtctgtcatagccacatgaccagccctacagaacataagctgtactaattttctaattaacttgtgaccatggattatcatagctagaagcaaatgtatcaaaactcaacgtgaatggaattatcaccaacttactaataacttgtggatttaaaaatgatcacaatctgaggaggacaagtaagtagacagataataaatattggaaatt

SEQ ID NO: 176178 - DNA, 632 bp, Cannabis indica
gggcttcgatcatgacccggacctaaatctccccacggtcctggcgctgaacccggcctctgacttgaacccaaatctgaccccgaacctagacccgacgtaaataaaatcaaaaaataaaataaaaatgaactttacagaatacgcttttgttttctgtttttaaaattgaaaaacaaaatggttacagaacgcatttttgtttttcaaaagcaaaatttttaaaaacaaaaattttacattaaaaaattagaaaacaaaaatattaccaaacgacacctaattaataattgttattaggttgttttcttatattggaaatattaatattaacaggttttaggatatggttgggcggggctgttgaggaaatatgtggtggagccgtcgcatatgtggtggccaaacactcttgttcaaatctccctattcaggtaaattacagagacgaaaatgttaaaaaagaaaaaaatctaataaaatcttttgataggaaaaaatttaataaaattactacagatttaattcatacatttttttcaaaccatacacgttccttttattataataatatataatatagggtggttatgcacccccaagaaaaagaaaaaatagtgtaataatgcatg

SEQ ID NO: 176179 - DNA, 871 bp, Cannabis indica
agagagagagagattagacaggagaatgtgtacctcatcaatatcttccaatggtataatcacctgaatgatgttaggagaaaatgttaacaatgaatgcaatatgctttctaaaatgtaacattgaaaaacataataataaaaatgttcggcataaatcctgtactgatgagaactattcaataagtgcatctacaaatcaaagtattctgctaccattctaaaaattcacattctctatgtgctcccatcaaagtaaacaaattttataacaattcataaccaaagcatatttcatcttagacaattacacttactaaataagttttgccctgttctattttaaaaaggaaaagcatatctgataatgaatcatattcacaattgtaagaaattacaaggctaaccttcatttgcttagaaaacacatttgaatgaaaacaaatgtgccatgcagagacatacatacggccatgatataagaacgatctctcaagtgcacatgaataactgtgatcaacaatctgaaaagaataccacattagatacacatataccacataatattgctggaaaatgttgtaatcagctataaagaaactagattatctgggcagccaaatacaggaaagtatttcttaatactccaatttccatggacaaatagacaaataaaatttcattcaactcacttcatatggaggtaggtcaaatatagtttgaaggggccctggcttttgatgaaccactgtgggccctggtaaaggaaccctaggcttagctccattcttagccctaaccagatttcataacgattttaactttaaacaataataccacaaaacaaaagcaatactaaattaccaatgat

SEQ ID NO: 176180 - DNA, 674 bp, Cannabis indica
aagaatcttttaggtttattttcttatgttttgtttgttttattgattttggttagctagtattaatttgttattttggtaggaaaattttattaaaaaataaagttaaaacttcaagatttaattcattcatgttctgttctgattagattttgaaaaaattttaaaacataaaagttttagatttttttctcagcttttaaacccatcttaaatcaattcatttaaagtttgtatgtaaaagttatacatattttactaaaaaatatcgaagcagaaaaatacatggacaacaagcaattggtgtattgggcctttaattacaactttaaagttacttaggttgagtttgagaggatttttgaagcaattaagaatagagaacatagagaagagattgagaggattggaaataaagattagagcaagacaactctaatctagttttagttttttttttttttttttttttctcctcttttaatttctggttttaatgtcttttagagatatcattatggtatgtttttattgtgattatgaactaatatgtatttagagttttcaattgaatctcttggaagttttattatgaattaatgtcaagttttttatttcgtcttcatcgaagatttattgaatttgtgtttattgtgtttgtgattgattgtgca

SEQ ID NO: 176181 - DNA, 939 bp, Cannabis indica
tctaccacgaacctaacactccccccctccctctctctctctctgcttgtggtgcctgttttcaatcagaagagtcccgcgagtgacagtgtcagtgagtgcgtgctcctccccatcacgtcgaaagatgttctcttctccagtttcgtcgagcttccagcacaaattctccaaatttggtgaccaacattgtagccactgaaaaccaaaccaaaaagaaaaaaaatcagagcaggttttggtttctaaacaataattgcctgttttttctttcattaaactaaagttgtttttttttgggcaattttgatggtagaagtagtgaatttgcttgttgaatatcgaattgatgtgttggtgagatatttgttgcttggttatggaaatttcgtcgatattcttccaaaattcttgtttgtcatatgattggtggtgcgagtcgtaagccacgacaaatttactaatatttatttttaatacctccaattattttagtataattgtaagtaagggtcaatcttacgaggactatgtttatctgattactcaaaaattagtaacaaacgttaaaaaatggggttttgagatttagagtaaaatagcataaataaaaataaaaataaattaaaagtaagaatacgattatgagaaactagttaaaagttattcgtcaccctcaacaatcattcctaattcctattaacgaatgtaatttcagtttccaacaaactattaatcccgcagataaagctgaagcagtcaattatctcaatctccctattacatgtaatcaaggcgaaacactcaataactaactcttttacctaagcaataaatccacgaaacatgcaattaactatttgtcctgcctattgtttgggtaaaattcataaactaccatttcctaaggtttctagcactgagtacacagctccttta

SEQ ID NO: 176182 - DNA, 593 bp, Cannabis indica
ggattgaatgaaagtattcagtcaatatcaggatgacaaaaatatgtttgaagtgcactcaaatttcattgtcttgactcatctatgagattagcaacccccaaatttggatgatttccattaaaaaccaagatgcttaaagaaagtatgacttgggatccaaggatcgttcttgcacatgacattcaaacttccaagcattcccattcaaataatatttgtttctaagcattttgcttagtaggaaattaggactttcgaggagccttcatgcttatttagctagctaagagagcttagttataaagtggacggaattgcaaaaacccattctttcatggattttagctttgcaacgaaagtttcattttccaatgaatggactgactatatgctaaagaacacctccttcccaccaatagagaagagttgctctctacaagaattaagaagcttccaaattttgtcagtgataccactaaaaagttggtgtttatcacaccacgaaaaaaaaagcagttcgtggcaaggttgaatgggcacaccaaggaggtgcttgaatgatttgatcacaagctcttgtgtttagtgag

SEQ ID NO: 176183 - DNA, 554 bp, Cannabis indica
acatggattgtctggtaatgggcaatgggttttattttttgcccatttctattatgtatatagttgcatattagagcatcttttttcttttctcatgttacatgtcctatactttaatcaatggccggtgggtatgataaaaattatttagtgctgtctgttggtggcacgtgcgggataccatatatgtatgtaccctcacacgtaccaatagaaaaaccttccccaaatcagcagcggacctagaattcaaagtaaggagaggcgtatttttttttgttaagtgagggagggcaaacaaataataaaaaaaatagcatttaacgagattagaaccttgtcctctaacctatatgataagtagtttaaccatacaccaaattaatattatacttataaatatcaccttttatgacaaatagatattataattaattaaattgcatatatatatatttttttcgattttttttattatgtgggtcttcccctgccttaaatgatgtacacgtgcgggtcacatgatggggccaatgtatttgacattctctctt

SEQ ID NO: 176184 - DNA, 539 bp, Cannabis indica
agaattttgtgcattttttgttttttatttttttaaaaagaaggattttgtacttgaaatattttaaaaataaccatttttctaggttcaatactataaaataaataaaattatattatgttcagaatttcgtgcatttgtattttttgtacccttttttctgaaaaggaggattttgtactttgaaatcttttaaaaataccacttctgtatatttaccatattatgaataaattaaggggcccttctacaataaatatcaaattatttgctatttttgcaaattacaagagacaatttcttgtacaatatttcagcgaaacaaataattggtagaaatagtctaacacatattatatatttttctatttattgtacaattatttttcgataattaatcttcaaggatttgatttgagttgtgtgaagaagatttgtgagtagcaaaatgtaacaatcaaaggttggcaagaacagatatgaaagtcaccttatgtcaatatccatatatactaccaataccaaccattatatataaa

SEQ ID NO: 176185 - DNA, 509 bp, Cannabis indica
ttattattattattttgagagaaagagagaaccctcgaataaaaataggttctttactatattagcgaagagtatgggaactgagttgtgtaaagtcttcatcttttttaaggttttgagcacatagtgtgacactgatgctcattcccttcatcttctcagttcgttcatcttggaccattctctcccttgtcacagccgccagagccatgagctccatttcgaaccaccgtgcctttcagcttcgagttgacccactcactggcaactcggagtgggttgtgatcgaagaagatcaggaccaaggaactgagattttcaaaaactcagaacatcctatgttagctatgacctcgtacttggatatgcttaatgattttcctaggaatcgagcctatgctgaggccattaacaagactataacagcaccttgccatgtcctggatattgggtaattactgatatatgtttatatatatatatatatatatatatatatgtattgtaat

SEQ ID NO: 176186 - DNA, 701 bp, Cannabis indica
atgcttttgggagattctagaacaattctacgatagctcatgattggggaattatctagaataaaaaatgccagcacaccacacacaaggcatgatcaggtgaggtaaggtccactcttaattttgacacgctccctcaaacttggcgtggttgatcaacgacgactagttatttttttagatatgcaaattgttgaatggagtggcctttctgaagatatcagcagtttgttcagaagtggggatgtgtctgacttcgatttttcctgcttcacttgatcatgaatgtagtggatgtcgacttcgatgtgattggttcggctgtgaaatattggattgaaagagagctgtttggcacctgcattatcgcaccagattatggcaggcagtttgtgtggtatgccaagttctttaaatagagagagccaagccacttcagtggctatttgcgagagggctctatattcagcttctgtttataatttagcgacaactttttatttctttgagcactaggtgatgtgattgcctcccaaataaacacagtaactaattgtcgattttttgtcatcaacatatccatcccaatcggcatccctgaagcattcaacattgaattctttggattgtttgaacttaatgccctgtccaattgtcccgtttaggtaccgtaacactggtttgcatacattccagtgatg

SEQ ID NO: 176187 - DNA, 787 bp, Cannabis indica
tcttcatacgaggagcaaccagtgtaaatattaaacaaaagagaaaaagtcttgagaaacaagacaattgcactgatcaaagtattatggaggaacagtaaagtttaagaggcaacctggcaactggagacagatatgcagtagagatatctagagttgttcaggtaaattttaggatgaaatttctataaggaggggataattgtaataccctaaggtttaataactagattaataactctaactagattaattacgtattaatgaggaattatattattatattatttaatatgtgaaactattttttgtttattgtattttaaggccacattagcgtgtcagaggtatttttgtaattttgacccgagaagggtaatatcataaatttatgatatattgtgcttatggactatactattatatagtatatttattatgtttatttgcaggaattttttgacaagtaggcgcggtatagtcacaaccaggtattttgggccaaaccagtttcggggcccgaaatatatttttgagatttatttatggcattaacatgataaatgagaaaatttgaattataacgataagtgtgaatgagtgtgtgtgtgtgtgtgtgcaaattgacaaatatatctttgttatatattgatgtttatatttatgccttaggggcattttgatcttttgaccaaataagtctttattcaataaagtttttttaaaaaaaattaaaaaacatttatgggtttgtccctctcttaaccgaccccccctctctctctct

SEQ ID NO: 176188 - DNA, 590 bp, Cannabis indica
tttttattttatgacaatgatagagaaaatgagttgtcagatacatttataatggtagtgctggttgccatgttcgattggactagagaaaaaggtcagagccgtaaacatgatgacagaatggaaatatttgtgttctctagatgagaaagatagaaagttgggaatgcaaaccaggtacacatataggttagagttggctaaaaatatgagatttgtgatcctccaaatctgtttagagattagagcattaaatgttttgtttagtaatctctagctttctactagcttatttaggacctattagtactaccccaaaacttgaacttctttcttccttctttttaacccaacttcatttatttatttgtctctttgaacataaatgctcgactgaactgggcttttgttgtacctttatatactccattattgcttaatttattgccatgttatttataggtgacaaatgctgtttgttttcatctattgattagtcatgagacaatgttttcttcttcagagttttttatgtttgtgtgaaatgaatttgatttgagaacacaaatggtaaccaatgataacaagag

SEQ ID NO: 176189 - DNA, 872 bp, Cannabis indica
actacattaaatattattaattttaaaattatgatattagaaaaaaaaaaaaaaagtaaaataaaattagcataagtgacttgacacgtaacatctatctagtatatatatatatataaaatttagagattaccacatatttaatattttattacttttaaaatactgctatatttaccacactaataataattattaaaatgatttatttttacttaatttgtaagggaattattttctaaatttctataattttagtttaattataaatcacttaatataaaattaagtatacctaatttttttaatatgtatatattatatacataatgaaatacttgcaccttatttatttatttattttgaaaaagtgagtcacgagtaattgtatgttggtttgctttgcttaaccagaaaaaaaaaaaagcaatgattcatattcattcattattttattaggtacctctacaactcatgctttttctcttatagtccagtctgttattttttcttttttattattattattattttaaatttaattagatgaaaagaagaaaagaaaataaaataataggatctcttttttatataaatatttatttattatttacttaattaaaactaaaaatctcttgtgtttgtttaataaagatggagaaagaaaatgaaacatgtaaaatttcaattgaataatattttatgaattactttgatttgaaaataatggtaaataagtaattttaatttattatttttataaatatatatataaataattgtggattaacttgaattgaattatgcaaattaaaatgaattgagtatttatattaattaaattttaactcaattaaaatggaaccctaatt

SEQ ID NO: 176190 - DNA, 1646 bp, Cannabis indica
agttggattggattggatcgtgcggattggattggatcggatacttgtgaaccacccctaggtgaaaaccaaaataatcgacaaacgcacgcaaggagtaacttggcttgcagtgcacgcaaagtcctaattttcaatatctcaatctactagtttatagcttccaagtgcattgtatcatagcaataatagaaaaaaaaaattgtcaaaacaaaatatcaggtattacaactgatcaaccttggtccttggataaaaccaccatcaaatattacatccactagatgtataagctagttcttaagatgcaaacaatcttgggtaacaactccacaagacgtatataagattgaacattctaatagtagggcatgtatcgggctgaccttctgaatcggggaaccttcctgcaggcgtaccatatgttttaagggaaaattaacgacctcatttttatcttctatggtaatgaaagtgtgcacaacagaaacaagcttacccgtatccataaggagaatagaagtaaggtggaacatatggtcgcctgaagcgatagcctgaataaggattgaaacgtctagggcggtactgcttcatcccaggaacattggttctcttaggcataacctggattatacacagaagaacatgaacaagcaagttttgataaattatttgtaacatgagatgacaggtctttaaaatcaataatttttccctttttcttttctttaccttcaattgccggccatgtagctcggattcactcagaagaagtgcctcttgaacagcttcagtttctacaaattctacgtatgcaaaaccctttggttggccaaatttatctgtcagtatagtcactctattaacagtaccgcacgattggaaatgctgctgcacttcttcaggtgtgcatgcataatcaacctgcaaaatattaattaactcaatatctgaaacaataaggatgccttacagtaaccagaagccaattaagtgagctcaactttagccacgaacaaaaagttgaaagactccaatatacgaaattcatgcgatagtgttttcaatataaatttttcaacacaaactgattttcacatcaattcagacatactactaccccgtacaagataacatacaagatgcctagaataaaaaagtctgtttattaccattgttacattaagctctgtacaaatcaatagtgcatgcctaatactaagaatagggcacactctaagcaaattctaaattactatatttatggaaaagaatgagcacatctatatgagcggtaagttaagactttttttcgatacaacaattcttaatactttccttcccagcatctgcttattcatttcttcttacttttttaagtctagtaaatagtttatcgcctagtagaaaaatagccctcagaaataaatttctgtattaaataaatagtatcactccagctatcaccacattctcacaaactatgtccaacccgatcaaccgagaaacaattcactcttgtcaatctagactgacaacttcttgtcttttatccaccaatcagcagtgactcacttttgctcacagcatatcttcatggtgaagtccatgggattttggaaacaaattataaggaaaaaaaa

SEQ ID NO: 176191 - DNA, 649 bp, Cannabis indica
accacccgcaccgcaaatactcctaataagaatagtgtttaatgtcgtaatgtggtctcatattggcattttttttcttacttaatgtagtgccatattattattaatataatttaataagaatcttataattaatttaataattattataaaaaattattatttattatttttaagatgaaatagcaattttattgaaatattagcattttgaatataagaaggaaattaactcatccctagcatcatactcaaaaatgctacgatcaggtagaaaacgagagtgtcttgcaacaacatgagcaactcgatttactgatcgtctaataaaataaagcttaacattatttaaataagagagtaaaatttgacaataatgaataatcaagcttaaaatagagttcattgcttgattactttgaatgtcttgcacagtgagcatgttatccgtctcaatctctacaaaattgatttgggtctttagaaaaatattttttagttcgtaattgtgtaaattgatttaggtcttcacaaacatattttttaaggcttttattatattaatgaataatatttttaaaatttattgaaaaaatatgtatgtttattaattttttttatttatttggctcctaagatgagtgaatct

SEQ ID NO: 176192 - DNA, 810 bp, Cannabis indica
accaattacttaagctaaacaactaattaacagtttaacataatacttaaccactctaactaatctttaactaaagagtggttagttgtactacagctccccctcaaacttattcggctttgcaacaggaagtttggctctaagaaaatgaagccttgagcttgggagtggttaaacactctgccaattgatcgattgcttgaacatgttttactttgatgagtggctgaagtatcttaacattctcgtttgtaatttgatgctggaaaactaattagtaattacatggaaaaataatatatttttagtagttaatgtttaaaataaaaaaaaattaataattacactcaattcttaaagggccataacaattgaagagtgtaattagaacccctcaattttcattgtgtaattacattgtcaaacaaataaattgagtaattacctccaaatcaattatacacaaatccaattacactatttcccaaacgagccctttgtattttaattgttgtgcacatccatcctattttattttctcttctcttttcaaaaaatgatgtctatttttcatttattattaatggtcgtacaatgatgaactaatatgtgcaattcttaggaagattcctaataacattactcttcattcccatcttacttcgcatggcctcaactcctgttctattcatttccttcatcactttcatcctcaccatacgcttctcttgattgcacagttgccagtcccatgctcttgtacctgaaaaccaacattcaagaaatcttcttttagttgtcggttcacac

SEQ ID NO: 176193 - DNA, 576 bp, Cannabis indica
gtgatcaaaacaataattgaaagaaaatgattatcaacttaatctcatgccattatgtttactcactattcgataataataagcattcctttaaacatcacacattcctggtacttaataaagtaccactttttaccactcgtcacatacgagctgaatatgtcactatcgttgcccgataaagcaaacgataagtaagaaacctaaccgcggtttcaagagtaattactcataacggtaataaccgtttccaaccctaggtcataacctaggcttaataaacttttaatcaacatcatgataataattaaggccacttccattcatccattaatctttaaccacatacggtgcttaccacttttcttaccttaattcagaagtcaaaagtatggccgacctgagtggaagaacaagctaggcaatcccggtcctatgtcacgacaattgaaacacaataaataccttaactcaaaattccggattaaaaccctagtttagaaatcaaacataacctaactcccaacaaccccaaattaggtcaagcatcccatatttaatttaaaacagatagta

SEQ ID NO: 176194 - DNA, 815 bp, Cannabis indica
aacaacttttctaacaaaaaaacacaaacgcatagatcatgattgatgtcgttcagttatatttttaattgtaacgacaacgacaacttatgaggtttcttgcaacaagatgtttctaaaacaagaaacgtttctaatttatattcatcccatctgcctcgactgactcagtgacatttcccgggaacgttttgatttctgacaattttctgtttttgttttgaaaattacatccaatcaaggccatatgaagctcaaacgattcctttcgattccaatcctcggggtgtttctgctgttgggttttgtgtatcacatcaccattttcattttcattgaagattggattgggttacagagctcttctggctctttaaacgctttgatcttcactttccttactgctttcagtattttctctttctctgtttgtgttctcactgacccaggtcaggtcccaccttcttatgcgcctgatgttgaacaaagtgggatctcagatgaagaaaccaagagaaaagtatgttcttttaaattagttttttttttctttttagtaattatgtctcttctatttggtaattgtaattgctgcattcttttgacggttgaaaatactgaaaattgattctttgattggtttgcatacgaatctttgttcgatatcttgatggagtaattgttttaatgtttgaattctgaggcttgaattcaaattctttgaattctgaggcttgaaattcaaattctttgaattcaacgccccaatatgtactgatgagtgtaatgtgaaaggataaagtgaaattgggata

SEQ ID NO: 176195 - DNA, 586 bp, Cannabis indica
ttcaagtagtccatctcttccaggaaggaggttggagacgcatcataccccaagtgatctttcacgcataaaaaaaccacgtgcatacgagagtcatgttgaatttgtaggtagtagacttcaacttcagtgaaaaaatgctaaagttgcataaaaattcaagtaatgagttcactttaaaagaccaaagggtgaaacatcaccggtgaaacatcaccaggcttgtgacaaacttcaagcagtccttctcttctgggaatgagggttgaagaggtatcataccccctgtgaactttcatgcacacaaactacaggcaagtgagagtcatgttgaatttttatgtggcagacttcagcttctgcgaggaaaggctaaagttgcataaaaattcaagcaatgacttttctttaaaagaccaaagggtcaaacatcacttggcgtgtgataggcttcttgtagtccttcacttacaggaaggagggttgaagacgtatcatatccctagtgatctttcacgcacaaaaaaactatgtgcatgcgagagttgtgttgaagtttttatgtggtagacttcaggttctgcga

SEQ ID NO: 176196 - DNA, 585 bp, Cannabis indica
gaaagaaaaagagctaccatcaaataaaataatttttaaaaataaagttctttccccatcttattcctctctattcatcatgtaaattatctttctattaatgtgatttattttttccattctttttttcaaaaatatagaagtagtgttaaatgaaaaattaaacacataattcaacacatgacaactttgtgctattagacctttcaaccaaatccaataattctttgataaaacatactaaataataaatataacatttatctaattaataaaactaaatataataatttatcgtatgaatcaacaaactaaattactattaatattatcatcaatgagctttcccttgagctaaatttactaattagttgtgtaagctatgcctattagttataaaactatatatagttataatttggtaactcgaaaaaaaaaattacttatatgtaattcatcatatttttatatgtttctcaattttattataaaatacaatttttgtatttcctaattataaagcggaagaaatcaattatattttttaagaaataaataaataatactctaccatgaatttattta

SEQ ID NO: 176197 - DNA, 910 bp, Cannabis indica
gaaatttagtaaaaaaaaaaaattaaaaaaaaccaatatagactaaaaatataaattttatgtaaaataaataattaaagttgagtacattttataagttttccaagtgacaaatagaactcctcaaatacctaatatcttttattttttgtttattatttacgtttttttttttaaaaaaaaaaaaaagaaaaaagaaaaaaaccaaaattgtaatttttttaccctaaaactccaattagcttgaaccggcatgactcattttttatcttcaaagatgaagtaaccgttataattgttgttcatggcattcattagactcaaattggtaattgtaaagaccctattaacattaccattaaatctaattgtttttgtacatctatattgatttgattttacttttgtttattagtcaaagcataaaaataatggtttatccaaaagactaggaaaaatgaacatctctaacccaatcattgaactaaaaagttacacaaaaatacaatcataaaagaaccccaaaataacaacagttgaaaaccaaaacaatcaaaacaagttagaatgaagaacagagaacaaatctcagttgtccattttaagaaaccacctaagaattttgccacatcaaattattaataacagtgttcaatgtatcaaaattaataaactagaaaaaaacagtacaaaatattcccaacattgttaacagaacaaaaatatacacacaacaaacataataaatgcaaagttaagataaaaaaagtttaataatcacaaaaacagactcttaaagaacttttagtttttatatcttcaatattatcaataagagtttttctttatacaattattaagaacaataaaagagaaaaatgaattataattaataatcaaaattagcatt

SEQ ID NO: 176198 - DNA, 511 bp, Cannabis indica
atgatcatttaatattaatttatacttatatatgattagaaggagaagagtatccatcaattgtttatacggatcaagttaaaaaaaaaaacacatagtgtttgacttagtttaagagtggttttttttgggagaacgatgaaggggtagtaatcggatgcggcatggttcagtggttcttttgtgtgtacacattgtaatactgtgtatttagtaattaaaataaggatgtgttggacggtgttgatttggtcctggtgggttgggggatgtttctacttcttgtgacaattttctacttttaaatataatcaagtcgttttgttctgctattattttagctttctcttaacttctgattattattattattattattattattattattattattaagatcagaggtaggcttcaatcgtataccatttgcagctgccaattgaaaagtgtaatttatattttaaagtttaacatattgggattgaaaagttactttatatgaatttaa

SEQ ID NO: 176199 - DNA, 869 bp, Cannabis indica
atatgattctgcatttcgtttggcggggttagaaaattttctgattctttattttcttttctattatttttcatgttgtctttctttcttaattattctatgccgtgatttatctttaaacgtagagatatatacaatcttttatgtataataacattaagaaaaaagaggaaaccaatgggtttgttcggttgttttctctgatttatcaatggttgtagaagcctgcaatgtgtgtaaaattttattatcacatgagtacagcccagcactcttgaattaataaaactgaaaattttaatacaagttcttgtataagcattaagaaaaagttgatgttaatcattaactggacattaaaagtgtcagcaaaaataataaatacgattgcacctcgctttgttattaccaatttttccctgaatgaaaatattgtcataaaatgtgatgaatagggattaggccaaaggaaattattgccttaatttaactcactcactcaaacactttttccatcaatttttgcagagatctcaagttacttcattatttggagctgatgctctttgggcgaaagggtataccggttcaaaagtcaaaatggctgtatttgacactggaattcgagataatcatccccattttcggaacatcaaggtattctatggtagcagtgctgctcatagtttaatcttctcttgtaaaaaatttatttacttcttactttatcttctttttttatgttatagttgttatatgataaagcttagtagtcatcatattaataaggtgatgaaaaatcagtattttttggcatgagaggacatgtccatctgtgctgtgatggctatgcttattgtgtgcagtat

SEQ ID NO: 176200 - DNA, 805 bp, Cannabis indica
gtatttttttaattctttgagaataatatactataagaaaatatattatttaactaaatttagtttttttaataatctcacattaaaagtaatttttttcttctgtcatttagtttgtctcaaaatttatatttatttttcattgattaattgattaaattagtcttattctattttataatttttttaaaaaaaataatcatagtagttttttataaaaatttaagtgattattaatgttatgtataacatataataatatatattatattatttatataattgtataagattctttattatttttaagtttttatttaattaatttaatttattactatatattattaaaaaaatatattagaaaagatcaaatttaattataattacttaagtctaatgttttttttttcatttctattttttttgtcttaatgtttcaagtatttctttattttaaatatattattatttataaaaaatagtaaaaaaaaaaaattaaatagaaaaattattaatttttttttctatcatgcattggaatggtctttcctcccatttcaaaataaaagtggtgaaaagaacatgccattgaaatacatttcaatacttaatatgtatccaaacaaacaaatagaataaaattatttcttttccattgcattatatctaaccaaacgccagctaacaaccctaaatatttataattactgtaaaaaaaagttgttcttaagttaatatttgttttttggaataaattcactaacttattaactaatcaaatcattataacaatagaacgtgc

SEQ ID NO: 176201 - DNA, 1425 bp, Cannabis indica
gtaatatggcaagcaatatattatgacaaataatcaaacttgtaaagtaaagagtttaaggattagaaaatgcaaactctcgatttttacaaggttcggtagaactatgccacctacgtccttggtcttcaaagctatggacctagctttgagttccaatatcgagccaagttaacgggcttgactaacccttacaaccggggaatttttcaccaaggtttttcccaaacctctcacaatagttttcttccaaggactatcaacctcgccggattgttgaagtgccaatctcacttttctcgggttgtttacaaaatcggtgtcaacctcacctacaaccgagttgtttttctaccggtgccaacctcacctctcaatacaatgaatatgtaattttgaaatacaaagcaaactctctctaataagatggaaaacaaagtaaaatcctagagagaattgcaagcacactagagaagataagaacaagtttggctcaagtgtgtgtggttggtgtgtttatgaaaagatgataactctttagtttagaacacttagaatgatgttatatgatgaatagaagctcaaccaacctccatttttgagtgaaaaacgagtttatatagtgtaggaatgaaaactagccgtttatagccgttagcacattttttgaggcacattctgtcatatatttatgcactatagtccttaatatgtatacataacaaaattaaacttttactcaacacctgtagtatagtgttgcaaacaatggactcatctaccacaatatgttggtttgtacttgaaaacgattcataaaagccataatctagattctaaacatggatacataacaaggtgcatatgttgacatgccctgatttttctatcatatcacacatgacttgcaataccaaattcatagcaaaacaaacactagccatgttttatcaacttcatcatgcactaaccatctgccttcatgcttgcattaggatcagtcccttgtgcaatttaactcataaggctgctgacatcgttgtatttccaatcaactaagtaactaggccttaaaaattcagtatccacatcagtatctactgaaagcattgttaccactttcgacatcgatggacgagttgtaggtgatgctcgagtgcataaaaaagctacttgtatgattcttctcacttcttgctcaatgaattctgatagttttgaatccaccagatcgatttcacggccttcttcatgtagattccaagcctagtgagcataaacaaggatgaaattgtgtttgttaggggataacaaaaatatgctattcaattatttaaagctatgatttgtaaatccttttagtaacccattcaagaagatatgccttctcttcacctaagtccgggtcagaaattgttctgccgt

SEQ ID NO: 176202 - DNA, 570 bp, Cannabis indica
tacccattaagagtgcacctatatatattatgttcttatcatttataacatttacaatatatgtgtatatgatatagtaaagaaaataaatatgtataaattatacatatatcctgaaaattatgtatcctcgataaaatattgcatatatcctgatcattatgtatcctcagtaaaatattgcatatatcctgatgattatgcatcatcagtaaaagcttgcatatatcctgaagattatgcgtcctcaataaaatcttgcatatatcctgaagattatgcaaacgtaatattcatcatatagttgacgaatatattatgaaagagatgaatacgtatatttatgtatatgttcttgtatcctttgaggacaataaaaaataatctaatatcgatatagattttgacaaacatttcctgaagtaaatgttttatatttgtccaaaaaaaattaaaattttcaaatcaaattaaacaaattatgttgggttttttttttttttttttattaaattttatcttatatttaataaacataaataaaaatagagctattgctgaaacatataa

SEQ ID NO: 176203 - DNA, 583 bp, Cannabis indica
aatgccatttttgtaaattaattaaaaacttgtatatattactttagcagtgtaaggcatgttgttgacttcagcccaagtgagacttgtgccactctctctctttgcttttatttctaagtgttcctcctaattaataataaagaaaaacaaaacacattaatgatttattttttttaattattgaatattgttgatgtaattattatatgtactctgagttgttccaaaacgagtggattttgtccaaggaatttgatgagccaagtaagagcagcagtagtggtatcatggccagcaacaagaagagttagtatgttgtctttgagttgtttatcagtgagtttattattattattatcatcttcttcatcaacttctaatttgctgtgttttataagcaatgattccaagaaatcttcttgaaatgatccctctccatttctcctctttaaaattattgagtctaacattgcatacattctatccctagcctgaaaaaaaaaaaaaaaaaaataattgcatgcaaaaaatataatatatttttttttgaaagaaatatataaattcattaagaaagatc

SEQ ID NO: 176204 - DNA, 743 bp, Cannabis indica
atggattctaacaatttgtgcccatgtgaacctttgggtcttatgtctcattgatctagttaggaccacttttgtgtcatgtgttgtgtctactatatatctatatacactataattaatttcagtttcaaaaagtagcatatttcacatttttttctcttcacttatatttaaactataatactacaataaagaaaccaaagttcatattcatggttacttactagtatatgccaataatcaatgtgtagcttgtgacatgtaacggtatatatcatcatgtgatttcttgttacatttaggaaggttggctaacaaataattaatgcaagaggctattcttttcatgcattattgccttttgtagtgttgtcatgttagttttagtgaaaagaataaatatatatattaaaaaaattctgaaaccctttttaaggtccaccgatgcaactcttatctatctgttttggcaattttaaaaaaaaaaattacttcaataatttttatagtcgtctacgttataattatttttagaacatcttgtaaaattttaagaaatttttaaaaaaattaacactccaaaaataagatttaaacagtttattttacacgtgtaacaaattgtttaaactctatttttagcctcttaaaatttttcgaatttctcaaacatttacatgatgtcttaataattaataactacaactataaaaaaaattgaactaaaaatttaacaaaaaaaa

SEQ ID NO: 176205 - DNA, 540 bp, Cannabis indica
gtttgagattaaccggtcgccgttttcgtttacttcccgattgcaatgccgccggagccggcagagaaatttccgacggagaagaaagttttggtgatgaagatggtggaggagtgttggcggtggaaaatgcggagattacgggagaaggattgttgggtaatcaaggtatgtgggatcagatgaaggagattgcgatgtttacaggacctgcagctgggctttggatctgtggtccgcttatgagtctcattgatactgccgttattggacagtagaagctctcttgagcttgctgctttaggtacgcaattcattttttaaaaactgtgtttggtattgcaaaaaaaataattatgtatttatcttacacaattatatctttttattattaatgctatacattttaatggtaagataagcatgaataaattgttagggaattaacccacatattatttttttttttcaaatttatagtttaggttgttccgatgcttgttctggtagtttctacatgggttgttatgtgaattttag

SEQ ID NO: 176206 - DNA, 516 bp, Cannabis indica
gtgtgaaataaaatgtcaaaaatcaaaagttgatgggcttgctagattattgggctttgagggtgtctttactgtagatgcaattgggttagctggtaggcttgctctcttgtggaagaaataaagaagatgggagtttgatgggctactctaataaccatattgagattgtgttcatactgctcaatttggtaactggaggctaactgggctctatggagaacccaaccggagtcggcgccaagatacttggagtttgattccaaccttgtctactcgttcggaccttccttggtgtcttgttggtgacatgaacaatattgttcgacaagaagagaagagagggggtcggccatatccccaaagcttactttcgggattcaatgccactttacagcaatgcaacttagttgatattgagcttcaaggccacttgttcacttgggaaaagggtagagggtctaataattggatcgagatacgcctggacagagctttggcaacattggcttggct

SEQ ID NO: 176207 - DNA, 806 bp, Cannabis indica
ggagctacgtttggaataggttaatgactactaagtaatggtttgttgtttttgagggtttagtcttgaaaatcttaattcccctagtaatataactaccagttcaggaggtaatgttcataaccttaaaaatggtagattgaattattaccttccattatattaatttaaatagtatttttgaattaataaataaatttaattaccaataatattatcatttattataaataaaatattacaatatagatatttagtatgtgagtatcggttttttttttaattgagttatttttatattattagcaataatatatatatatttattatacataaattttatgcagatggtgtacatgacatagcgaacaaaaataaataacatagcgataaaatatatagaaatgttcattttaattaataaaaatacaataaaatttaatgtttactaattaataaatatattttctttaataaattattttatttttatatataattaacattaaatagatataataaaaaaatattttttattttaatttttaaaaataatatataagattcctatactcaaccaaacaatgtaatttaattaacataatatgattacatattaccctacactgccaaacacagtttacacatttccctataatcatattctccttcataatattccctataattaaatcattttgaacacctcataccaaacgccctcttcatatttaaggttaaaaagttaatattttttaatatgtaatttcattttctcacagctacttctcaatatcaactgcatt

SEQ ID NO: 176208 - DNA, 741 bp, Cannabis indica
attactacaagtaattgatatgacggcattgatttgtcacttattttatctctagacgattaatatgagcagatctctccaaactcattattattccaactaatccctatatttattcttttttttttgacatggcagatgtaacaaatcaaaatatttctgttcacctcgattatattcttataaattgtgtttttttaaaagaaatgttaaagggtaccagtggtgtttaacatttttctgttaatatcgctattgattcaactaagtattgggtctcatctagtttaatataggggaattaccccatatatatttttttttaacttttttcttaatttacaatttagggttctaaagtggttgtagcgctagttgcagtaggagtttctatacgattttttattgcgatttaggttgcagcgctaattgcaataggggtttctatgtagaatcccgtaaaaatacaaaaaaaaaaaaaacctattttaaagtgtaaaaatgaaaaagcccctttaatataatagcttttaggaagtatcgtgagtcaatcgcaacacaacatgcatgcatgtcgaaaagatactagacaccactagtgcttaattgcaatgctcttttttaatcattatatcgactttaataataaacactgcacgcacagacaaaattgatccatagacaaaatgtatttttttgattggtgcacattgactgaggtggatcgcgaattcttggatt

SEQ ID NO: 176209 - DNA, 1226 bp, Cannabis indica
  modified_base (1212)..(1212): a, c, t, g, unknown or other
ctcgcacaaaactggtgttgtcgaaatttgctcgacaacagttttggcatttatagggttgaagttgcaaaaaggggtgtttgtgaaaaatagataaaatagttgagaaaaatgacaaaagccaaaccaatgtggggcccaatatgtggtcggccacttggtgctcattttgctctatttttatcatttttttattcctaataattcaaccctaaccctattggaatttagtataaaaggaaggctatggtctcattatccaactaatccctccaaagctaaaaacctagttttctctctaggtttgatgagacctcgtccttcttcttcctcttgaatttttgaaataccatagccttcttcacaaaccaaaattcagccattagtgattgagtgcatgcccacacataacaagtgagtcctcaatcataatatgtaagactgtgaagaatccaaacaataagaaggagaatcgggctcagatcttggtgatactctgctacagaaaggatacaagggttagagatctgagcggaaggagtcatttaattccgctgcaaccactgtaaggtttctcataccttttatgtgtttattttcatcgttttagaaattcatattaggatgttaaaaatatacttgttagtaaatctagatcctggtaaaatatattccaacaaaaactcaatgaacaacttaaaccaaatttcaaaacaaaccttaatttttcaactgaacaaaccctaatccccactggctcaaaaataggctaaacatcacttaaataccctaaactaggttctagtaaaacatcccgagcaaaaccaaattcaaagaaaattagggattttacccctgctggccaactggttgatctgttcaccagtggcctgtaaaactagtcaactggttctagcaggaatggaaaatttctagttttcaccttgaaccaaccaaaccttcttcaaactttctcaaacttccttgaacagttctatagcataaaaacaatatatacaagcaatcaaaactcagtaatttatcaaaataactaaataaccataattgagtgaactttgagttctcaaactcaattcacccaattcaagacctagctagccaagaagataatccattcacacacaaaaaaaatcttatatcaaacctagaaacatattctaaactcaatttcacatcatagccccaaattcncaaaaaaaaaaact

SEQ ID NO: 176210 - DNA, 649 bp, Cannabis indica
gtaacaatagtccgggaacttctccaccagttcacagactacaaagtagaaagaattccccgagaaaagaacgctcacgcggactacctggctaagtaagcttaagagagtgaaattgaaggactggaggtagtacccgtggaacgcttggcagagccaagcatcaaaataaaagaggccatagtaacggttgggcaagaacccaactggatggtccccatcatagaatacataacaaaaggtgttggaagttattttaccatgaaatagcatgaaaaatcgaaaaaattgaaaaattggatgaactgtacggatggcatgccatgcatggccatccgcgcgcgtatcctgggtgcttggccgagaaatcacggcgcaggaaggctgcaagcagccattccgcgcgcgtgatgaggttgctcgtcaccccgatttttccaattttcaaaaattcataactaattcaaattaaatcgaaatcgagttctgtaaaaaagtaaattgcttagaattttccaaactatccaacaaaaataattacagaataagaacagtaaccatttttcccagaattcacaaacaacaatcaaacatcaatatgacactcaaagcaacaatgataccaaccaaaaaacacaaagcaaaatcg

SEQ ID NO: 176211 - DNA, 680 bp, Cannabis indica
atttctccatccaagaaagttcattgctatcctaagggcatgcttagccaatctatgagcctcaacattaaagttgcggctaacatgagaaagagataccccaggaaaactagacaataggactttaatatcaaaaaagataacccccagttcatttaaatatacagtctggccctccaagtgtaaatatactattgttacaagtgtaacgtagacacaaattttaaataattaaaataataatatttttaagtaataaaatagaacaaaatatttttaaaataaatacacaaaacaaattacaaattcaatacacacaaaaaaaattaataaaaatataattaatatatattatatttttattatataaataatttttaacatatataaatataattaaattggatcgaattttaattaaattttgagattgacattcaatttaattaaaatctaatttttaacatttaactaatctaattgtaattaaatatctcattttttataattaaattagattgaatccgttcaattaaattagattagaaaaaaaaaaaaaatctcttaatcttttttttttcctttgaagtcacacactgtttttttaaatgattgaagtgattagatttggaattgggacgcgagaaacatgatgagtctctcgtttttttttttttttt

SEQ ID NO: 176212 - DNA, 687 bp, Cannabis indica
atggaatgtgtatgtttggctgctgctataaatagacccataaatatatttaattaattattaattattatgggtttatatggtttggttcatatatagaaacatcatggtttggagttggagaataggtagctagctgagagtaatagtaatagatatatgtgtggtttaattaggtttcctttaatgcgttgaagattgaagaagcgtctccattattgattgtcatgccaaaccactgtcagatataaatgtaatgtaattaatgttttttttcttttaatttcacgtattattttgtgcgatggagaatggacaagagcattaattgttattattattttggttgttttattttctaaggaaaattaaatgcaatttaaatgaatatcttggctcacagtactgcattaattaatgcaaatatgaaaaaagattgttcaaatatacaaaattatatagttattgtttattggtgtaattttatttaatacggatacagtgtatctaaattaattttacaaataattattaattactcgtaaaatgtcattttataacttagaatttagatgatctttcagtcaacaccaaagtcccgaccctatatatacttagagttaccgtttgttatatggtataaaaatcgtaaaattttacattgtattaatctcgaacccaactcta

SEQ ID NO: 176213 - DNA, 778 bp, Cannabis indica
tatatttttggaactttgtaggtacctgaccgttaaatgttaaatcattatccacgtgtgattttcttattggtatatttaaaataattttttttaaaaaaaataaaaatttaatgacttggaccaattaggaattgccacgtgccaatttacttaacacttaatagctaggtacctacaaacgttttagaattataagtttggtattattactgctaaaaattaaacttgggtatttatttgcaattgagatttaaatttagatatttatgccgcaaattactcttaaatattcagtaataacatcatccataccagtttcccaatccttccagaccctagtagattttgtatttgattattacgcttccttgtactagcgtagacatgaaaatacttgctatttttatctcctccatggatacaatattgttctacgaggcaccatctggtatcgatggcctgctcttcatcttcttcttcttcctctgcattttcctcatagaatgtctctagcttacttcttcttaaattgaatggctctccagcgatctctagatccttagtattgaagctactggacgccataagtccaccagaacaaacacactcacacaagataaaaagctcaatagacaaagtcgaagaatacgaaagggctaaaataaagtagcaaaaagaataacgtataccaaacaaagttcaaaaagagaccaaaatgacaaaaaacaatactcataaagagagcccagaataaaacactctagagagagcgact

SEQ ID NO: 176214 - DNA, 667 bp, Cannabis indica
  modified_base (453)..(453): a, c, t, g, unknown or other
cttagtactccatattaatgctcatatatatttttgtaataatttaccatctattttggagtttaaacctttattttgataaaaaaatcaatttaggatcctatttgtataattttgaaaaatacaggatctattttgttatttaacaaaacaaagcatccaattggtaacttttgtaaaatacagggtccaaaatagtatttaccttattttttatgcttatttttttactgtattatttcaaaattttatgaaaattaataaaaaatttaaataactataatattcactaacatataaaaaaaaaaaaaatcaattataatttttatcatgaacacaaatagatgctctcaccatataaagttataaactccctatgtagagaatatttcacttattaatttaatatggtttgatgaaatattccctttatcttcttatatgtattaaacnttttaaattttcatccacttacttgacaaattatttattttttaacggagtacatatgttttgaaaaaagaggaaaaagagagaatatatgttgttttagtatcttattattattattattattattattattattattattattattattattattattattattattattattattattatttaatagaaacttattttcttttcttttttt

SEQ ID NO: 176215 - DNA, 510 bp, Cannabis indica
ccgggatataggtatgataatgaagctatacactaattattgtgtatataaggaaaaaagattgtgctttgtatacaattattagtggctagctacatataggccacaggattatgtttcgagatatattcatgaccacgtgcaataagtgttaaaaggtgtatgaaaaagtgaaagaatataaatatgtataatcatttctattgacaatataagtttgctttaatattttcattatcaagttaatttatatataaatatataaatataaatatataaataagcggtttttatttattttctagaccaataaagaaataaagaaaaaaaaataaataagtgggttaaataaacaatgagcgaagatgcaaagtcaaaaaaaatgatagtggctgctacttttgtgtctccttgttgcctggaggctgcaataaaaattcaagacattctgtttgccatagctaagatcaatttctaaattaagctgtcttttttggccaatctttgatg

SEQ ID NO: 176216 - DNA, 522 bp, Cannabis indica
ttatgagcatgcctcatatgctcatgcttgagtatctcgctgtttgaccttcaatatttacttctaagggtttttcactagtttcccccaccatttctttttaagctctcttttgaacagaattgaaaactccaaatattctattccagatatggagtttgaaacaagacaagcacttgcatgatttgagggaacacactaaggtatttgtcttttccaatttgtaatttggaattgagcaaagtttaaaatattaatggatcgtggtggtcaaaattataggagatttatactattcggtggagtcctactggaccaggcacaatcaatcctaaccatcagttagtgttagcaaggtaaatttcctacatttctgacatctacgtctcacaacggggcaaagtaaaggaattaacctagtacttgtcttgccccacaaattcaggttattatggcaaattgagagaaaatgcttactgttattgggcaactggccactgatattattattgcttaaaaaaa

SEQ ID NO: 176217 - DNA, 700 bp, Cannabis indica
tatatatacatatatttttacttatatatttatacataatgctcaatattttcataattgtattacatatgtttgagtagaatggtctattctatatgttaaccatattttatatgatatatacattaaaattttaattttcggtccattttgcttctaaacttttttgtttttccttttttttttttttttgttattttatttcaagttttacgtccatcattacattaatataaaattagaaatcgttttaagcatgaaagttccataaatttttagaaagtttcataaaattggagatcgtattacatctcaattttttttttttttttgtaaaagtttcgtttggacccatgaactttctttcaaattaaagttttattttaatgtattttcgatgtataaaatctaaatgaatgttataatttttgtatatacattcatttagaattgatttgggcagatttggtcgtcagaatcgagagttccaatcaggtttggggtcaagtccaaatgacctgcatgtagaaaacgagtcaaattgaccggttgaaggaaggagacagccccaaacgacatgttccgattttttatatatatacaattttaaatatttaaaatattaattaattttttatttgtgttaatttagtcaataatttacatttatttaattttttttattttttgtttaatacat

SEQ ID NO: 176218 - DNA, 783 bp, Cannabis indica
agtatatctataaaaatatctatgttaatttcaaatttattaattatttaatttgccatataagataattttaatataatattttaaataaaagacaaagttatcttttaatttaaaatatcttaaatatcaaaatatctaatcttataattaaataataaataaatattaaagaacttaacaaatttttaaatctgaccataatagaaatatttaaatgaacatcaaatagaatattaaatgaaaattcaaatgaaatattaaataggaaaattcaatttagaaatatttaaaaagaaaatgaatttggaaacaaccatgaaaaattggatttttggggaaaaaccccaaaattgcaatttttgggatctgcccaggaagggctgcatgcagcagcccaggaggctgccagcagctggttacgcgcgcggacgagggaggtgaaccgagaaaactcggcgcttgcagggtcttcgtgggcggacgcatgggcgtgctgcttgtcatacgcgcgcgcaaggaggactgatccgagggtctggtgcgcatgagcaccaccctcgacagccttgaatcccgattttccaaaattcataactttctcaatttttatcggaatcgagttccgtaaaaaacaaaattgcttaatttttcacaaggaatccaaataaaatattttcaaaaattgaaaaaatatttttcatggaaaacgaaactgtacaacatcaacattcatcaactaacacataaaccacatgaaaccatccaaatcaacacagaaac

SEQ ID NO: 176219 - DNA, 790 bp, Cannabis indica
ctttaacaaacctaataaaataattaactaaactaaaaataaaaataatacaaaaaagataacacgttaataaaaatatacatttcaccaaaacaaattgtgtccagttccttgaaactcctaaagatctttttgatgaatttgaaaaaataacaattttaaagacaaataaatttaaaaaatacaaataacatacaataaaatatatataaataaactgtataaaatatatttagaatataaataaatctatcataattatatataccttatatatatacacataaataaaaaacacatatatattttacatatacatttaaataatctatatatataatacacaaaaaatatattatctttcaaaaatatatatactgatataatatatatacacagaaacaaaaaaaaatatatatatacatagacagagcagatcaaacaaaaaaaaaaatccaaaatttaagaacactaaccctaaataatttacagtgatcttgaaacaaacaaagacaattttaaaaaaaaaatgttaaaaacaatgaagattggagatgacttacagtgagttgtctaggactttggggccgtttattttgaatttttgcacgaaaacaaccctcctccatctctggccagtgctaggttcaaaaataaagaaagcaaaaaaatatcaaattgaagcaacaaagagaaaaacggaatgggagtaataaaattaaataaaacatatcaatcttcaacaaaaatcaactaaaacaacaagaaaaatgggacggagtaataaaat

SEQ ID NO: 176220 - DNA, 745 bp, Cannabis indica
agaaacattgtggactatcttcattcagatctttgggggccatcaagaactcaatccagaggaggagcaaggtattttctgactttcattgatgatttttcaagacatgtatggttatttatcttgagaaataaatatgaatcacttaacaagtttaaagaactgaaaattttgttggaaactcaaactgagagaaaaatcaagaagttaaggacagataatggattggagttctgtaaagagcaatttaatcaattctgcaaggacaatggcattggaagacatcttactgttcctagaaaccctcagcaaaatgggcttgctgagagaatgaacagaacaatccttgagagggttagatgtatgctgatatatgcaggtttgcctaagaaattttgggcagaagctgctgtaacagcatgctatttaatcaatgaagtccttcctctgccattgagtttaaaactccaatagaagtctggacaggaagcaattctagctatgaccatctcaggatctttggtgtttggcatatgctcacatcaaacagggaaagcttgaacctgaagcaagaaatgtattttctgggtacccagaggggtgaagggtataaagtgtggagcatcgaggatggtaatcaccagaaaattttatcagcagggatgtggtgtttgatgagaagtcatgtacaagacctgatgaatgtacagatggaaatgctgcagcaagaactggaaatgctcag

SEQ ID NO: 176221 - DNA, 617 bp, Cannabis indica
tctcccctaatctcatcaaaatgcatccacaaatataagaacataaagaacaagattataaagcttgaaaataagaaattaaagaaagtaaaatagattaaatcaagttagccaatgtttctcaagctccaagtaaaagaatccaccaaattccacatcaaaattcaagcttttcttcgaaattgtgtttgaaaactataaaatggagagagggagagagagagagagaggcagtcgtgggtagaaagaatccaagaaatgagtttatttcggactaaatattatttattagaaataattcttggtacaaaagactatttgccctaaggcacatatattaccatatgcataataaaaaactctaatttttcattccactcacacacatatatcacatacatcatatttctcattaatcacataagctaaatctcaaaaatatatttgggtctcgaacccagttcgactcaaaatacccggttgtgactatgccgtgccgacttgtcagaaatacctgcagaaggaaaaataaatatactatataataatatagtccatgaacacaatatgctataaaattatgattttacccatctcaggtcaaaattgcaaaaatg

SEQ ID NO: 176222 - DNA, 759 bp, Cannabis indica
actcgttaattagctacgagttgcacagttaagttaaaaatcatgttaacacgcctagactagcagggtgttacactaacgtagaattttcttaagacaagaacattgtgagaaagagccttcaaatatttttctttttttaagttgggtgattctctcattttgtttagaagtaggttgtacaccaatatcactcccaatagctttgatttcatgtaagtccaactctccaaaaatttttaagttcttgtaaaaaagtttcttcggcctgtaaaaatttagccaaggccctattctcatcaagttgatcattcctttcttgcccataaagagaactattaaattatgaaattttttggtcccatcatagaaggcccagccgtgtctaccacattattcaccacaggcctaactaattcttcatttgaatattctgccagcaaggacactcctttgttctttgagttatcaaaggccacatcaacatcttctctatttaaacataccgaatccacaataggaaatacgtcaggttacctttctttcttagcatcaacaaatgctagctttctacccaaagaggaaagaccttcctcatgtgtgcctgagcatgtcttgagaagtcacaccgacttcttggcagcacgtttcatcaatagagggcctggaaaaatcttttactagaattctcaaaaaacgcagaaagggtcggttcatcggaggctggggaagaacagctccagtgctgggcgacgcaaa

SEQ ID NO: 176223 - DNA, 709 bp, Cannabis indica
taaacaaagtcaaaacataattttttaaaagaaattaaaagaaaatataaaaaaaataatataaatttttaaaaaatattaaaagatgagggggggtcatggccacccctccctacaacatagattcgttcaattggtgcacattctatcctcactttttcggtttaataacaattttggggacactttttcgatttagtaaggcacacaaacacttactactcccaaatgagcgctaataaagctacaataaaaaaatagaaatgttaaattttaaacatgctatattctttgtttttttaatctattatttttctaaaaaaattaagattttctaaaactcggggtgtgtatagggagtgatgtatctcaaacataatataaggaagtttcaataaaaaaattaaaaaaaaaaagagtttataagagtgcgtttggtaacacttttttaatcaattttttatttttttaattagaaaagtgaaaatatttccaagaacatgttctataaaattgttttcacttttcaattttttaattaagaatcaaaattttaaaatttaaaacaaaaaaatcacttttaaaattttttaatcaatatttggttccgatcccaaccttgaccttgggacatggactctgccctagcccgtcccttactcggaccacaacctcggccctaaactcgaatctagacctaacttaaata

SEQ ID NO: 176224 - DNA, 719 bp, Cannabis indica
gaacacttattcttcaaaatacataagcaaatttttatcttctttttattttacttgcatttgtttctattttttttttttcctatatcatattttctttatattttttttattccaaatataaaataatagagaaagataataaaaacagaagagatattattaaaaaaagtatatgaaagaatgaatatagtataatttgtaaatgtagagaagagactggaacatgaggtaaattttttaattctaccttctaaactttgaaaattactgtattttacatcatatgtgatttgttctaaagggccagttttcatgaccggctggcctcttatgtgtatactagtaaaaagttcatgcgaggcacgtatactaaattttatgttaattttttttttatgttatttgaaagtgatacaattaaaattatagaaaaaaatattattagtattaggtgagattattattatgtgtataggaagaaatcacaaactaattaatcttataatctttaactttaatcaaatagggttctagatatatgaacaataaataatcacgtaaaaataaaaaaataattatttgaataaagaattcaatatacacagttatatatatgaatctcattaatcaaaaataattattcaatatatgaacataaatttgtcaccctatatgttttccaataagaaatccactcctcatagtcaaaaataaat

SEQ ID NO: 176225 - DNA, 537 bp, Cannabis indica
gaaaatgggaatgaaaaataacaaaatgggaaagttgcaaagtgaggcccaatttccttatatggccgcccactatgcaaagggtttaccattttatttttccattattttaatgccatacaattctaacctaaacctagaaggcattctataaatagaaagtattggcttcaggaaactcatgacttgcacattgtttctttcagagaaagccatagccactttcctctctcttttcttctcttcaaatttcgaaatccttgagtgatagagtagtgcccacacacatcaagtggtatctcaatcatagtgtgtaagactgtaggagaatccaaacaacaagaaggagaatcagcatcaaaggaaggagagaaagagatcgagatatcgaagcttgtataattgtcgtcttcgtcgtacctaacgaaaagtaaagtaagtaactaacgggaacgggtacgtaaggaagtacttcgtaagtaaggtaaggggaaagggtacgtacttaatttaatttaccgttcccgtcgtcgaccc

SEQ ID NO: 176226 - DNA, 792 bp, Cannabis indica
cataaacaatcactaaaacagtaaaattgaatgaaattagacaaaagtcctgaaatctaacaatctcaatagttcgggaaaaatttttaatgaccaaaaaaattcagggggtatgatttggtacatgtcaaagttcggggagaaaaaaatcctaattagtcctaaaattttgctgatgtgtgttggaggcagacgaaggtgcctgctgttgcacctgctgcaatgctattcacgagctggtttgaggcaggattaatctcttggagggatgacgagagtgttgaagcagccatggttctttggtctatttggaatactagaaacgatgtggtatggaatgccaaaatcccaatgatggaggaggtaattcagcttgctaaaattacctatgtggactggtttaatgcacaaaatgctgctgcagacactaccaaagatcaccatgagcctcggtctgataaatggaaggccccggagtttccaatcatcaaagtaaatgtggatggagcagtttttcctatggagaatcggtttggagtgggtctagtagctcgggctgcttctggtgtggttatccaggccaaaacagtgtgcaagttgggtgcacttcagccacatgaagtcaaagcaatgggaatgaaagctaattattggcacgatgtgattgttgagtcagactgtctacaagttatttcagatttacattgcaataaaaaatatggcttctcctatggccacattatttctgattgtaaggcattgtttgctaaaattgataatgtttcgttatgt

SEQ ID NO: 176227 - DNA, 636 bp, Cannabis indica
tgaggcaggattaatctcttggagggatgacgagagtgttgaagcagccatggttctttggtctatttggaatactagaaacgatgtggtatggaatgccaaaatcccaatgatggaggaggtaattcagcttgctaaaattacctatgtggactggtttaatgcacaaaatgctgctgcagacactaccaaagatcaccatgagcctcggtctgataaatggaaggccccggagtttccaatcatcaaagtaaatgtggatggagcagtttttcctatggagaatcggtttggagtgggtctagtagctcgggctgcttctggtgtggttatccaggccaaaacagtgtgcaagttgggtgcacttcagccacatgaagtcaaagcaatgggaatgaaagctaattattggcacgatgtgattgttgagtcagactgtctacaagttatttcagatttacattgcaataaaatatggcttctcctatggccacattatttctgattgtaaggcattgtttactaaaattgataatgtttcgttatgttttgttaagcgatttgctaaagggtggcgcattgtctggcgtgatcctctcttggcaaggctgatcgtattttcagtagtcactcttt

SEQ ID NO: 176228 - DNA, 604 bp, Cannabis indica
aaaagtaaaaaaaaaatgatgttagaaatatagattattgcaatgtagatttttatagcagtataaacaaaacattaatcatatctatgatatttcaataagaacccaactttataacaagaatatatattatatatatatatgcacaagagataatgtactactagtacttgtctttacaagaattttcattattagcagaacctcttggaggaacaagaatagaccaattcaaagaatcctacttgtctttgtccatttcgtttactggagtatgttacggtagataaatataaaaagtgtcaaaattttcaataataccaaagggagtaattgattattctaatacaacatataatttacattatcgaagaacactaaaataggacaagtgagcttaatatgatatcaaaaaatggtacacaactcgacaattgcaaagtgggaagaatcttgcaatttgcccagtagtcttagaagctctaatgagcgaagaggatgagaatgaggctattatatacataacattcacacattaatacacaaaacaacaaatattcatacacaaaacaacaagaacagattcaaaatcaccaaaccagag

SEQ ID NO: 176229 - DNA, 540 bp, Cannabis indica
gaaaatttttcaatccccttttctatacatcattaggggtatttataggctcgtaatggtagtaaaaggtcaccattgtcgtgtttgtatgaactatactttacaaaatttcttaaatttgatcataggacatgattgcttacttttcatgatgtatttagggctgtctatagatatttggtgagatttgacttatctctcgctcacgatttgatagctcattatatataattatatggaccaatataaacacgatacttgtatagtatttgtttacatgtgggataatctatgatgatacataaccactcttatagatggtacttttaatttaccaatataagtagaggttagtggatttttctaccaaaatttgaagtttgagagttaattgagagttgaagagtttagctgcaaatttcaaattaaaaaatgtatacattcatagtcaattaaatttttcattaaacataaattaataataaaaaaaaaaagtactaagaagcaaggcaaaatactataatataaatatatgctaaa

SEQ ID NO: 176230 - DNA, 902 bp, Cannabis indica
tatatcgtaatatatttttttataataatcaaaatattgatggtatttaaatttatttattaattcaaaaataatatttaaattaatttaatagaagagaataattcaatcctattcttttttaagttatcaacattgccctcttcaagaataattatattactaagggaataacattgtaagcataaaccctcaaaacaaacaaagtaatatttcacattaccattctcttgctagcattaacccattctaaacagcccctaagaatctattcatatgatataaatatattttaatacttaataaattaattttatattgtattattatatatggaaaaaatataatttaaaacaaaaataataattttgttcatataattttttttattcttttgaatttgttattttaatttattgttggagacataaagaaataataatatattttattttgttgttaattatgtaaaaaaatattttttaataaatattaaataacttaatattaataagtaatcaatccaaagtagtcgatccaatccacacttttgcaaattagattgtattcgatttgaactattgtgcatattagattggatccaaaatataaaatctacacttagtgcggatatgatacattatgagcgaaatagtgtagatttgattggatgaacacccctattctagacttgagcttgtaaatcccattgtaatacatttaaggccatttggccaaatacaagtgactcgtggactagggttgattaacacttgaacacgtaaaaaatttctatctccatcatttgcagtttattcttaactctctttaattggtttccaaaaattacggtaaatactaacagactagttaattatattgtataaaaaatattaaaattt

SEQ ID NO: 176231 - DNA, 752 bp, Cannabis indica
tttatgtgttctatagttgtgttttagttgtttttatacatttttttattgtacagtttattttttttttttgttgtttttgaatttatgtgcatttgttagggtgtatatttttagtttattcatcataacttttttattgtatatatgtttagggtgtataactttttttgttttgttatttttatgtcgtgttttagttagttttaagtgattttcagaatattttttttgttatacaattattttttagttattttttgatttatgtgcatttaatattgtgtatatttttaatttattcttgacaacttttttgttatatgtgtgttgctttgtagatgtagatacatatatttagtttatttttgattacatttttttttaaatactctcataaagttttttttttttaattctacacaatgtgcactagtagatattggcatactaaaattatctttgctgtgttagcccatgttgttggtgatcaattgttaatgggcttagcatctgtgtgtaaagtctaggtgaagcagaagtgtggggcttttctagttgactgaagcctttgatgagcaggcccagcccaactagggtttgtagctaagtcccctccctaactctataaatacatattgtctcatcacaattgtatccttttgataatcagataaaacaaaactgcttctgtattgaagtatctaagggaggaagtactagttgatagtatttgcactatcaaaattggt

SEQ ID NO: 176232 - DNA, 833 bp, Cannabis indica
tgttacaatccaacttaacagggtcactggaaatcaactctcgtcacctccacctacttgataagatttacgagtcagaagtacagaaaattgaacccccaacatactatttctcatagtagtacatattcttacgaatcaacaaagctcttttgctcagcttttagttttgacgaaattccctgtatacttgtaacatggccattttctgtgtgtaaaaaggaaaaggagagaggaattttcatatagttatatagttttagttaattgtttgtcagttttattcttttgttttcttggctctgtaccactattaattgttcatatacatttaactcatttttcagagtaacgattttctttcatttttcgtattatataattatcgtagtaggattattatattatataagatgagcatgatgacagtaagtgtccgttatgtccccttcacttacatctgaaaaatctttagtgtcctgtcttagaaaagctcagctctacctcaaacataacgttgacacgagtagtcaacttgttatgcctgcctctcacgttcatagcttaggtggacaagtttgtgtcaccatcatttgattccctttgtccattttacacttttcctattttattattattagttgtcttttgggggtgtattatttcttcttatgaagaaggaatgatgtaactgtactacctcaaatgttgcaatgtcagatcatactcagtctactgtgaaaactcagtctttagttgtagcttgtttgattcatagaatgcatgcattttcaagaagatgatgaagaagagtaagaacccacaacaccagc

SEQ ID NO: 176233 - DNA, 556 bp, Cannabis indica
atattatccttttactctcgtaatttgttattgttgtcattattacaatgtttgttatatttttcaggattaataaaatatatgttataaaaaaaattattataaatctcatattaataaaacttttcaacggaaattgttgttttttaaggttattattattttgtaatgatgaatttcagattttgtctcaatcatctccactatcgatttctaccaagggtttcactaactttttaatatttttaattatagtattaaaagtattgggtgattctgtagggctttgtgccctaaataaaacccatttgatattaattaataaaaattcaaacattttgctaatgttatataatattagtattatagtattatgtaaaaaaagagttaatagtaatatagattaattattgtttcattgagttaattattatgattcaaaatatgttaaatatatagatgtagtaataccattgatccaatgcttctggtgttggaaatgaaatccagttctgtgaatagaattgaatttgtcaatatccagagattgatattc

SEQ ID NO: 176234 - DNA, 580 bp, Cannabis indica
atttataggtgtaatctaggagtgtcactagttaaatattaattaaactatatttactctttatattcattaatatgcattaaaataaagtgtgtgtctgaaatcgctgcctaataaatatcttcttaaattctaaaatagttttatgtgctcatttattatatcttagttggttaacaatgaaaaaaaaaagtaaaatatctcccaccaatttttatttctcattacttacttttagcctatgttttatttattattttttaaaagacgaacaactttagagcattattatgtagtactaaaatgttaatattattatgaaagtgaggttttataaataattaatattacactaataaaataatattacatattatgcattgtgttatttaacatttctcataacttaataaagtccaacaagtgaggtaaaaataaaactgcacaattctctcagggagaagacgacactccccacacaaaagaaaactggatgataaacactattatcacaatgcaaaaaaatctaaaaaaaaaacaataaacccaaccagcataggcaaaaaattacacaatacac

SEQ ID NO: 176235 - DNA, 652 bp, Cannabis indica
gtcaaattttgtacacgtggcaaataaaatgatggcatgactatttaattagttatcacgtcagtgtcatattaacgtcacgtgtgtaattaattcaaaaaataataatttaattcttttaatttagttttaattaattttcttaatctttaattgatttttagtttaataattttttaaaaatacatatattttttttattttttaatgtaaaattatacatatggcgatgtggcaattgactaagtatctatgtcattattttttttgtcacgtgtgataaaatttgacaaaaaaattaatttataatactgtaaataatttttaagactatttttaaaagaacagaaatcttaaataacatttaattataactaagttggtaggatgattaagataactataagtaactacatcattgtcaaatttggtattaatagggctaaaatggtcattttcttttaaaattatataaagtatataatattaaaagaaaagaaaaaaagaggggaaaacataattttcatcaactgatgaaatataatcttaaatttatataagtaaaggctttgacaataaagtagaagaactacttgcattaaatttttaataaattaaaatttcatattaaaaatttaaatatttttataat

SEQ ID NO: 176236 - DNA, 551 bp, Cannabis indica
cgccttgaatctgattgtttgagagtgattagtgatattcaaagcaataaaaatatggcctctccttatggccatattattttagattgtaaggcgctctgcgccgagattggtaatatctctttgagttttgttaagcgatctgctaatagggttgcgcaccagctggcgcgatcctctctttctgaggctgatcgtattttttctagtttgtctttaccttttgtaatttcatctttagttttggatgatttgaagtaataaagttcctacttttgttcaaaaaaaaaaaagtaactagttttaattctgaaaaactttttcaaaataagctaatttagtaattttcttttgaggaatagcaacttgagaagctaaaagcagaaagcaaaacatcaactaaacaaggccataatagttcatcatcaaatgtttacaattttttatttcttttcagatatggtgtttctgtattttctttttctttttttttttaaaaaaaaaaaactttgggggtaagtagataattcgaacttgggaccgtttcttta

SEQ ID NO: 176237 - DNA, 582 bp, Cannabis indica
gagtgcacgtagcattaatacaagaattttcattaattaaatttagttctttgaaggaacttaatttttaaattaaaaaaaaaaaaaacatttacatttacatattaagaaaacattttttctaaaaagaataatgaatattattattattattatataagtaatggttgaatcaaaaatccttaagaacctttctgatctgttccaatgtaacgaacaagaccacagtaaaaggtccttgcctagaaatggtaggaataaatcccttatacaaagccataacaccctcagctctaaccgttttaaccgcacaatccaaagccccggagtaaggcggccccgccccactctcaaccctcatattcatcaccctagtcttaatcacatccaccggattcgacgccaccgccgccaaaaaccccgccgccaaagctagccgccacgtgtgtcccaatcccatcgttcatcaaacccttttcaaaatcgtctcccttatctcatcatacgaagccagctgctaagccgtcacgatcatggctcggttcacagtaagagccgagccgcgccaaacggctagccacg

SEQ ID NO: 176238 - DNA, 520 bp, Cannabis indica
ttagcttatgtatgtgtgtctctgtctcgctcttttattagaaaaggagaacttacagtttatgcactttgccatctacacaatcaactcctgaccaaaagcaaggatcgtcatcattaggattccaattctcgaaaaacccagatgggtctgaattgatcctaacccggaatttgagcaaaatgacacctgtatctcagctcaaattcaaaacgacatttcattgaaccaaatgatgaagtgaaaaagaacaaacagcagacccagataacaaaaagtgcgtgcttaccttcatcgttaagcgaccaacatactcgatgtcctgaacaaagaatcaaaacaaaaaaataggaaatcccaagtccaaatgggttccatctatcccccatagcttgacgaacctgattctacaatggtagaggcagtgactattgccgctgaaagccacgacgctacacaatgtactatacaaaatcgccaggtttctcttcttttacttttattgatttatttatttatt

SEQ ID NO: 176239 - DNA, 626 bp, Cannabis indica
agtatttcttttctaatttttattttttttcgaaaatttgtatagtttttatactttatttttcgaatacaataaatatattctcaaggaaatttttaagttgctaattaatttaatttaattcaacttaaattaatttccttaatatttatatttaagattattactaagatggaaataattaattttatttcaatcaccatctaagtataattttataaatattatattaaattcttatttttgaattttaattctaaatttcgaatttaatgagaatatatttattagaataataaagaaaatacattttaaagaatgagctttattattattaagatattcgatctccattgttggttttacatcgcgtttgttttagtgagtaatcctccctaatggaggaacgttcattagcaatttcgcaccgtttaatctcgaaagataagtagtttgtaagtgttttatatggtatagatcaccctaatggtggcgaccatatttgacttgcaaattgcgaaacaatggtagaagctcataagatagaatagccttgactctcgcctaaacgggacaacgctggattccaatcttgatcgaataaaaggttgctagaatgtttaaca

SEQ ID NO: 176240 - DNA, 553 bp, Cannabis indica
gtagtattaattaattatttagtagtgtttatatcagcagctatatcatcaaatatcaatcattattcatcgtaattttttttcgatgccgatattacttatttaaaaattataagcatatgttattataaagatttattctcactgattaattagacaccatattcaattgcgaattatttacttttataggtaatcaggtcattttctgtgacaaattaatggcaacgttatggattccactatgccattaattaataaaataacacaaatgataaatgcatgtacatcggcttacttaattgttctaattatttatttatatactattgtcatcattactattagaaaaattgcagtagcagttacaaatttgggaaaatttagaaagtgtgtatccgtattctgaagtctaacataagataattgataacaacacctatatataatatcaagatagctcaatcatagaactttcaatgaaaatgtaaacaaatggtttaaaattaaatatgtaaattttgcatcaccatacacactattttttttattt

SEQ ID NO: 176241 - DNA, 651 bp, Cannabis indica
atatgtttccccaacattcttcattgtggatggcatgactttaaaacactagcgtcccatgttggttacgaaggttgtatgttcttgatatgggacatacatttttatctggttatatccaaaatatgcatcaataaatgacataagctcgtgtcgagcagttgcatcaactaactggtcaatcctgggaagtggaaaacagtcttttgggcacgccttattcagaacaaagaaatcaatacaagttctccaagtttcgttaggcttcgggacgagaacaggattggttatccacaagggataaaacacctcgcatataaagtcattgactacaacttgtcaacttcctattttagtgccacttgcctcttgaaatctaagggcctccttttctgtctcttcgctgggtagtttggatcaacatttaaatgatggcagataatattagggtcgatccctatcatatccccatgactccaggcgaactgatcttggtatgcgttcagaaaacttattagttgctatttgagatgctcatccaggttcttcccaatgtatgcacactttgtgcgcttcctgggtcgagaataacctcttcccattcctcaattggtttcaatgctttctctcatcttgaactcgggggtcgag

SEQ ID NO: 176242 - DNA, 596 bp, Cannabis indica
agcatatcaggatttagattcttttaatctaagatcaactactgatattgacttggaaagatacaacggtaagtttataatatcttaactaagttcaatatcggtccagtccaatgtatactccatacattcgaaactagtatactttaccaatgtcctggaaagaacataacacttactccaagtgtaagtacacatcatcgctgattatcacatcagtgtaaatccaaaacactgatgaaacagggacttagtcttttgaatcatataatcacaatcacattccactgtgttgacaatactgtaattgtgaataaatatatgttctggacttaacagattttgtgcatatattaaaacatattaaaccataagcatgaaaaattcatgcaaacataaatcacttcaaatttcttagattgataactaatcagattgtaatgggttttatttagggcacaaaacccaaaaccaagcgctacctaggcccaaacctgacaccttttacctctgagatggtaagtcattttcctgctgacctaccaacttccaacaaaaggtatgcagcctgcacctccactaaccccgtctactaa

SEQ ID NO: 176243 - DNA, 524 bp, Cannabis indica
aaaagaagtgtgggctcttggttaccgggactgagttaaggtaaattagacttgtgtttaggacccactcagtttatgagctcaattttttttaaaaaaaaattaatatattttaaaaatatatgtggtattttaaaaaaattactaaaaaaaatatatatatattagtatgcagcaacttgtcaatcttgtctaattagggtagtgtctccatccatcacattagaaggcattattattaggcacatgtaatttctaacatcatcacgtatgacgacttacaaagattaatgatttcgttgactaaaaaatttagactagccttttaagtcacactcgctcactagattggcgggaatgaaatagttgttaactaattataagagagatgccacaaatctatagtagttcactcattgtatcgtgatagtaatgaagctacgtctattttgagttttaatttagaaatggtattagagaaataggctaagtgtcaaagctctaatttttagagagaaaaacta

SEQ ID NO: 176244 - DNA, 688 bp, Cannabis indica
tattaattaatttgaattttcggaaccaaacacagaaagaaccaattcagtcgctttccgaaaaggaaatgaggagttcagtcatcagtattaccatttttttcaacaattgagcaccaatgggagatttggtttgctctaacgacattctgttaaaagatatatttatttatttatttatatatgcacactctaatatcaaatattatttgagtacttctgtataaattaggtagcctatcaccaaataattaatatattactttactctaattttcaagaagtccctgtctattcatctaagtatatatgctatttttttttattcatatgtttttcgccttatttatttattgatatttccaataaaaccatatcaattaaaaataagtgttacgtgttctgctttttattttatattataattttattaagtgaaaatgtgttaatctttgtggttgattaattgccataaaaggtttaggaaacaaaaaagatacgtgttatttagtgagcctatgactatagtaggtttgatttctacttgtggttattttaatggatcattcatgagttttttacaagagatagatactattttcattttggagttgctgaaagaagtgagacgtgtttttaacactattatagtgatatttttgaggtcatgatttgacgaaccagaagt

SEQ ID NO: 176245 - DNA, 939 bp, Cannabis indica
tcaccagatctgaagggagttcagattgaaaaaaagtgttgaggagagctcatcattcacacaaggggatcttgtgtctccaatcaagggtcttggttgatatgggtatagattcactgtattttgtaaaagagtgtattgcttacaatattattggtttttgtaagatacatctttgaatatagtgaaagttattaccttggttcggggaactcaagcactagccgcctagaatgagtttctaagacaggtgaagcttgtaaaattctggtgttgaatctttgattttgttttttatattcaagcttaaatcaagataaaattaatttaaatatgaaaaaaataagttagataagaacttaaggtttacaggctctaaatcttgttttgatggaggtaaaatggcaatgaaattaaagattggcttaggtgaaagtcaacaaatgttggcattcattcaactttgaaaaggatagatttgagctcacatatccaaatttcataaacaaaattttgggacagctttagaagcaatagtgtattaaatttggagaaatcgcaataaagcatactagctataaaaggtgcaagtaattgcaggtagtgctagttgcattaaaaaaatttgtaaagagtagagttgctttttatcttttcatgaaattaaatagaatagatactgagattgttcctaaaaagtttcacaaaagtctttaataaaacttctgaacatgctcttgcagaagcaatgggagttagagttaaagaaatgtttagttggtaattaaagagtaaaagttggtagcaggtgtttgttgagacatattgtcttagggtggtacaagcaattcatagtcatgtataaaatatttttttatttggtattgttatttctaatcgtattttcagtttggggatgtcccaattaagttgtttcct

SEQ ID NO: 176246 - DNA, 849 bp, Cannabis indica
caaccaaaaatcgtataacaacctaaaaaccacaggagaaataactttagaaattcaaattgtaaatttaaaaaaataataataatatataaagtaattgtcctattttttttttttgtgtttaattaacaataaatttaatttcataattgcagttgtcctaaaatactatagctagctacctacatatataatagtgtcttaagattatgtaaactttccatgtatagctttattatattaagcaattattgcagctttattaattatatattatatggttccttaaacatgaagtacttccatcaaattggattaaattatatataataattagagttttctatcttcatttttccaccgttgattacaaagaacttcttataatttatacaaattaatgaatctccaaaaaaaaaaaaaaaaaactgttcttatataattaacagtgtacaaagaaaactgttttttgaatcccactcaaaattattctgcttaattatatattaattacaattagtttgctgatcatttacatagatcagcatgcaaatgcaaactaattttttgttacaatttttattttggtagtaaaaaacccaaaaatagtattttaatattgttttattaattttgacatatataaattactttatcatcatgatcgaaccaatcttgtgcctgtgtttacgtagttttcaaatatttatatatattaatattaattagtttactttggattcgaaaaatataacacttttctggtctattgctatgtatattttatatataaatatataagcctctagagacataaaatttaagattgtggcagtaataactagtttg

SEQ ID NO: 176247 - DNA, 541 bp, Cannabis indica
ttctctctctacaatcacagagaaagccatagatggctggcgaaaacgaacccgcgaagctccttttaccgtatctgcagcgagctgatgagttacagaagcacgaacctctcgtatcttattactgtaattctttcttgcaatcaaaaaccttaatgttcggattgatattcttcaatctctaaaaccctagtatgcttatttgatctttaattttcttattgaattatttgattatcgtgtaggtcgcttgtatgcaatggaaagaggattaaaaatccctcagagcgaacgtaccaagaccactaatgccctccttatttccctcatgaaacagcttgagaaggtcattatttatacatgtaatctattatataaatttttgggtgatatattttttttaatttcttataatttggaagatgggtttttggttttaattcgtttgatcttctaggtttttttcccctgtctcaaatgctgttataaaggacaggccgttaaatgtcatccgtttttgcatttttcttaccaatgcatg

SEQ ID NO: 176248 - DNA, 343 bp, Cannabis indica
tttatttatttttataatttggatgagaatggaatggaataaaagaagaagaagattggtactgttgttgaaaaaatggggactgtggaggagagagatatgcagatgatgtcaatatccaattgctgtcgtttttgagcatttttgtcgtttttaaaccataaattaaattttacctttttcttcttcttccttttgaataaaacataatttttatcttagataagtattaagtcttctttatatagatttacgagacacttgctaaaacattataattttgtgtagatagatttgtcatcaaatgatgcttgaatctcttaccaaactatactcatctaat

SEQ ID NO: 176249 - DNA, 592 bp, Cannabis indica
tagcccatgcaagggggttcaacctataattacttaaaagaaagcacaagagagggattctgatctagaagtctagatctttgcctcaaccctagaagagaagactagttcttcatcacaaaaaagcaaacacatttctgtaatcctattattaactccagaatattcctactaagcttcctcttcttcaagaagaacacggtagaaatgagtaaaagtccatggtttttgtatttgtaaaaacagtcaccggtcgaagagcctaataaaatggactgtagactaaggatagttaacgcctgaaccacgtaaaaatctctagtttattattgtacgatttacaccttcattactttcttaaactctaaaaaatattagcttgcccaaaaaatcagtaaacactatgtttatagattgtgaaaattcaaaaaataatataacctaaataattaaataaattagaaaatatcctaaattacaaacaataataacaaaaaataatgagatagatcaatatcaaaaacctaattaatagggaaaaattacacttaattaatagacaaaaatcaaaacctaatttactcatattatc

SEQ ID NO: 176250 - DNA, 656 bp, Cannabis indica
acgggcatcagaattaggactgagacccagaatccgaccccagagccggaccaggacctgggacccgaagtggaactagactgggacctgagaccgtgatccacatctaaacttggggcttggacctgacccgtagtcagtgtttggatctaggacccataaccggactcaaacccaaacctagactcagacccagacccagacccagacccgtaccccaaacttgggtccgagtccgagtctgggtttgagttcgagaactggaatctgactacgacccagacccaaaaccgtattgggacgcagacttaaatcaaaactcggatcggccaagattgggatgcggatcttgacccacaacctagggttggacccaacccgtagtcggtgtctagatcttggaatcgtaccaggaccctaacctagaaccatttctagaccaggacccaaacccagactcggaccagagacccgaaattggaacaagaaccggaataaggaccttgggtcaggaatttgtcttggacccaaaactagctctagacgcgaactcggaccaagacttgcgccaggacctgcgacctaggacctgtgactcgggacctagaccagatgccagacccgcacaagaaatcaaacccagacccagactcaaa

SEQ ID NO: 176251 - DNA, 551 bp, Cannabis indica
ataataatagaataagttaaaaaaataatgtaatgaataaataaaatggagaaaatattaatcttatgattgagtactattattaaacgataaaaaaactaaaaaacataatatttattaaatatcttatataaattattatatcttcttattatgcccactcatttttaagtgaataattattaatactgataattaataattaaaataaaggcataagtaaaataattgaattttaaaatgtcacaaaaaaaaaaataaacaatccgaaaaagataaaaagtcttctcacctcttatggtatctataaatataattatatcacattttaaaataaataagttaacttaattagttaaaatatacatacatataatattatggatatttaaagtatgataaaatagagaacaatcaaacaaaaataagaaaattaaaaaaaagtaaaaaaataaatttaagagatataattgtataagaaaaaaattaataagagataatttttaatataaattcaaaaataactatatatgtaatttagtattaatata

SEQ ID NO: 176252 - DNA, 1531 bp, Cannabis indica
ataacaactttctattatgcagacctttcatattctttatcctaatagtattaattaaaaaaaaatggaataaataaagttgtcatgtatacaaaagagacactccatggtaaattatattctttataataacttttgaaattccataacatatttaaataaatttaaatacttaatccataatatttaaataaatcaagagacataattgtattatacacactaaataacaaacatgtcttttgaattttctatgagaactaaaaatattggtgcaattaataatgatgataaaaataacaaaaatattaaataaataagagaatggagaaaaaattaaaaaaaaaataaataataattcataatcttattattaaataaaaagaatactattaatattaacaaagaatactattaatttaccgaggacatttcaacttctaacgaggacttttgtcctcgttagagaccctgttttttgtagtgaacaaaatgaattaaaaacatgtaccacaaataataatagaataagttaaaaaaaaaataatgtaaatgaataaacaaaatagagaaaatattaatcttatgatggagtactattactgaatgaataaaaaaaaactgaaaaaaaataataattaattaaatatcttatataaattattatatcttcttattttgcccactcaattttaagtgaataattattaattctgataattaataattaaaaataaagacataagtaaaataacttagttttaaaaaaatcaacaaaaaaaaagaaaaataaacaaattctacaaaatataaaaatttcttctcacctcttaattgtatctataaatataattatatcacatattaaaataaatgagtcaacctaattaactaaaaatatacatatatacatataatattatggatatatattttttttttgacgcggtgatcaaaatcacacaagattatcaaagcagcaatccacaatcggcgacagcacctcctcgaaccaggatagctcattgtctaaccgaagggcatgctttgccaaaccatgtgctacagaattctcatcccgagccacatgggacaaaactgcccccggaaatttagacaataaagctataacgtcttcaaacagcaccacatcacattgaaaaaacaccttcccattattaactagtagtctttagagcaaagcgaaactgaaaaattgcaacaccaaaacaaaaagtattagaatgacaatcttcaaaataaaataatatataaatttagaaattaacacacactttataactctagctatcaacaaattctaaaaaactaaaaatcaacaaaatttctaagaataactagccaaaggtattaccctttggctagtaacaacaaactaacaccctaatataaaaatgttgaaaaacaatatcaaacaaattaagtttaaaattagaattatcagaaaatcttgtaattgtaggcgccctccacaaaataacctacaaaatagcaaaaaataaaaactcta

SEQ ID NO: 176253 - DNA, 944 bp, Cannabis indica
tctacaaaactaatcatgcataatactgaataagtattgatgaagttaaaggatgcaaggctgttgatgatcaaacttaggttatggataaatgggcagttaactaggattataaaattaaggtgtagaatttgaggatgtgtaatcaatttcggtatcatggatcagtagttccctgaaataaatgtgcgtatctttgaagatgaaatgatgaaaaagagtgagtgtggagtgttgtaatcaacgaacctccatgatgttctaggaaaagttataaaaagagtaatatggtttggactgttgagaaatattttcttatggtgtgaagttgagtgttgaaatttggatgagaggatgaaattactttaggaaatataaacagaaatggagatttccaattaaccgtggcccaacacttgttgaaacattatgggaatttgtagataatttagttcatgatgctaagacctaagcaagtaacagttttcaaaactgttgccaagaagttaaaagtaaagcaacaaaatatgccattgttatgagtaaaggatataaatggtgcagaaagctttggttggaagaaaatggtgaatggatataagagagggagtaaatggaagaaaagactctttattgaggttcctaagttcttaacttttatagagtgataaaatcaaaatcgatctatggtatgaaaactcatttgattcttgtttcttggctttattatagctatccaatacttgaagatcaatttgaaattttttaatttattagaatctgatacatgaacaacttttcataatttatgaagaaggatctcttttataacaaagatgttgcttatctattgtaaagcaatcatgattgtgattatgtatgtatttgtggtaataaattctaatgtagggatgtcattcacatcataactatcattttttttt

SEQ ID NO: 176254 - DNA, 929 bp, Cannabis indica
acttagtaagaagaagaagaagaatgattttgttctttgtatgtttcctaccttcggcgtccacgagtggtaaacgaacagagaaaaaaaaaaaaaaaaaagaccctagtgatagtccatcaggttactttttctgcagcaaaccctaaagtagggctaatggacccagttttccccttaacccgaatgcgggtatcgaaggatcaaaatcctgctcgtgatatataactcaggcgggtcaccacttcaagagttaccagctagacgaatggaacttaatcaagaatggtgcatcaaatgaccttctggcaagaagtgttgagctcttccagtcggttaatgtttgattttcttattttattatatcttctttcttcctttttttaaactcgtattctatgtaggcttctttcttggcgcactttgatttccaagccaatcaataacattcaaatcatctatccttggagctaagtaaggccaatgaacatcgcgagctgctggccacccaaaagaatgatattgagagggagaatacgtgcctaaagaagaaagtcgaagacttggagaagtctgagaaagacttgaaggcagagtttgaatccctgaagaaaaacttattggaaagcactgagagagccgacaatgcagagaagaaaatggatgagacgaaggaggcccttgaaattattgcttgcgagagggttaataacatggctaagcattccatttatagcgcttgaatagccaatatggatatgaacctcaatttcttgggtgtaaatgccgagaagatgttggcctagtttaagaaaactaaagaggcggagcgaggtgttgatgaggagggggaaaagttgaagctggtgaggaagaagatgaagtcatctttaagtctcccactatgtagatttagtgtaattatgttc

SEQ ID NO: 176255 - DNA, 815 bp, Cannabis indica
aaggagctgatgatggttgaagggaaggaaaggcggtgactcaacggagaaggacagactttagggatttgggattcaatttgtttatgtacaatgtcaataatttacacgtggttaccactatttattttagagaaatttaaaaaaaaattactacaaatttgaatttaatttctaacaaaaaaatattatcataaaaaatttttaaaaaatacttatttttttataaaataatcaataaaatactaaatagaacaattaaaaataatagtaaattaactaaaaataatattgaaagtggaacaacagaaaaaacttaacacagtacacaatattttaaaaaaaaaacaacagtttttttaatattttcatctcacagtaaaaaaaagtgtgaaattaaagtatatggtataaaaatccctttattttattttgtgtatttttcaaattattcatctgcagtttgctaatattggaattggaggaaaaatttgtgaatttgtggatgcatcttggtctctattttcttttaaagtcttttcttatttagcgttaaatattttctccaactattatactatttttgttttttcaagtttgctatttaatttttctgaagtatttctagtctatatcatctcatgaattagttgcaaatgtattcagagtagattaaaaacttgtttagatatatttggtccatttgttttgtacatttttatttatttattttaattatttctttcattattcaaaaataaataaaataataacacgtatgtatatgattctaatggttttttttttatcttaga

SEQ ID NO: 176256 - DNA, 1094 bp, Cannabis indica
tatagaatagatttatataaaatagatataaaggagaagtatgaagcgttgacgtggcggtctaaaattgctctaaattaactctttttattcttctccttgattctctcaatttataatttttattaggttataaaatcactttaaactcatttatttatttttaatttttctaaataaaaatataaattttattatttttaaaatctaaatattattataataattaaaagcttttgtattcgtaagtctcactcattatcatctgtttcaaaaaaaaaaaatctaaaataaaaatataaattttcattatttttaaaatttgaatattattataataattaaattttttaaaaaaaataaagtattgtaatcgtaagtccctaattcatcatcagtttgtttcaaaaaaaaaaaaatacccctttttcacaattgtttttattaaataatcaaacaaaaattactctctctcatctatataatcaaataaaaatcaatctcttactcacatctatctctctctcttcttttttttgctttattttcttatgtttcaattttataaggattataataatacttgtactatccatttcaatttatacatgtttattttataactattagttttaagttattttctttctctctttttcttacgactattttttactagatctatatacatttagttttagacttttgaatttagaaaaattcaactcccatcgccttccacactttaatacatctaatattgatctcataatgtgtactaaagttggtgagagtctgaacttataattacttaaccataatacaatcacaatctcttttcatatatgagtatattccaaggtatcccatataatctatctaacgccctatcacaaattaatccattatttatagaaaataaaaaagaagaatattttaataaaacagtttcatccaaaagttctacatacacgcgataataatttagtgtcatattaagttttcactccctagcattataataatatataataaattttgttaattgttttttttaaatatttatattgaaaaattatggttagtaactaaca

SEQ ID NO: 176257 - DNA, 633 bp, Cannabis indica
attagctttgttgtgcctaaactttattcaaaaatactaaattatgctttttttattgaaaagataatttaaaaattctaatttctatcaattattgaatatcaaagaaaaatcactacaattccaatacaatttttaaaattatttacaattccaatacattgggaggtgaaactagggccggtccaagtggtttaggagttttggacaaaaaattaaaattgggtcatttattaaaaaaaaaattatgaatcaatacttcatgtaatttaattttcaaaaaaaaaaaaacaaaattaataaattctaaaataggcaataattttagagttatttgtgttaggaccacaagatttttttttttttttttaaagttgttaaatgcatatttgctcttataaatatttattatgtaaattatacattaaaaaagaaatatatattatattatatatataaaaggaatgataaaaaataggagcatgcattttaatttaagaaaccttatgcaataatttaagctgctatatacttagagacagccttggtggaacatatgtacttgagttttatttgtagctagctctataattaagaaaatagcatatatataacgaattatttaactacata

SEQ ID NO: 176258 - DNA, 639 bp, Cannabis indica
ataattgaagtaattaatattaaaaataataatataaatttgtttagaataataaaaatttaatataataaaaaaattaaagtaataattatttaaaaaaaatgtgaaaaaataatttaattaattaatgatataataatttttaaatgatgaataattatttttaaaaataaataatagtacatgtattttttttttaaaaaaaaaatatcataaaattgtgtcattcacttttgtctttatacaataaaatcttatatgtctttataaaactttagatggtaatcgacaagtcttgaatcacattgcaaaatcgtagatgtccacaattttagaatggtttaaatgcattttttagagatggcctcgaaacttaaggattgtgatggtagtaattaggtgcccgtgtataaggtgtgtgaacaatataggtttcaaactttacttgttgtaaaagaacacatattcgattgggatttttttactggttacaagaagaggacttaccacggtgaagcagaatcaagcactactaatgtagtcaatgaccatgataacgttaatgatgaccatgaagttgacgagatgattttgatggtggatgacttccttcaaccgtcaattgaaatagatgataat

SEQ ID NO: 176259 - DNA, 1177 bp, Cannabis indica
gagatagattgtattgctgttgttcaagctcttaatagctcggttgctcttccatcaatttttaggtttgtttgttcaggagtgtcaattgattctttcttctttacataatgtttctatttgtcatgttaaacgatctgctaacaaagccgcacattgtgttgctcgcggtgcttgtttttggtctgatcgtctttttactgagagcaatgttccacatgctcttcagtctattgtgttagcggatattgctgtttaatgaattaaattttgttaaaaaaaatgtgtttttagtcacaatacttggtgtgactaaaactaaattagtaacaacttgtatctaaatactatgttttagtcacaagtaactttttgttatgactaaaagtcacatttaatcacaaaaacttatgttataactaaaaaaattagtcactaaaagtaactttttttttagttaatgatgcttcatcagttcagtgtgtatctaattccaaagtaaacacatccacaatcactctttttctcttctcctatttccaaacaaacatatatatacatcagaataagagatataaacatacctatgaatataaaaattaagagtcgtgtatcaacttcctgttacagctttttagtcaattttcgtgttcaaaaaatatatatatataccaaaatatgttaattttaatatatacctctcttagtgtgagtgttaataaaattaattttaatatatatatatatatgggtatgctcttaatgggtattacccatgtatgggtattttattcttgaccattggatcaaatatctaatggttgatatttataatcattaattaaatattaaaaaattaatatttcctattttgttattctctatattcctaaaatagataaaactattaatagaaataaaaatttataaatggaattgttatttaaaaataaacacactaaaaaattaacaaactattttttaataaaaatcattttaaagattaaaaagaaaaaaagtatatatttatctttttataaaatttcttcaaactagaattctaaattgcattactgaaaataaaaaaaaataataattttaagctttaaactgtaatacatataaaatgtataagattttttctaaacctaaaatccttaatttcataataattaac

SEQ ID NO: 176260 - DNA, 618 bp, Cannabis indica
atcaatataactcaattcaaaaatatgagtggattccaacaattaacttataagtgagagtgagaagattcatagtcaatttgttcaagcaagagaataccccacaatcaattttcatagtaaaaaagagaaaacatcgagtcaatttatgcgaacaaaatgagaaagcgttagccgtcaatgaataagcaacatttacaatcaattaagcaagaaacatttatgatcaattcttactctcgcaagcaaacaagtaaagtatggctagcattcaattttacaaagatggcatcaataaaatatcacctacaatcaattttcattagcactcaactcaccacaatacaaagctaccaatttaccaaaatcatttatattcaaatactaggcccatagataggcccatgaggttattacaaaatcaaattggatcaaaaagctaaactcaaaatttaacttgggactaaacatcaactacaatgattcaaaacaatgaagatgaaaccctctcaaaatgtcaaaaccttcaataaaatatagtgcaactaaaatttgtgtttatccatctatagtttttcaaagaaattacattcactttatatatctatatatataatc

SEQ ID NO: 176261 - DNA, 846 bp, Cannabis indica
gatcatcagcaaaggagtttcagcatcaaagattcagagaaagagatccaggttcagatattgataatgctctgctacagaaaggaatcaagggctagatatctgaacggaaggagtcattatattccgctgcacccaatgtaaggtttcttaaactttatatgtgtttatttcatcgttttagaaagttcatatttagggtgttaataaacatacttgtgagtagatctaagatcctggtaaaataaatttccaacaggtacccccttaaagagcattctgagcttttagccttctaccaggaacatagatgatttttgctctgtagacatatgggaagcaccatatatcaaatcacctagtttcgacaaaccgatttcaccattctatttgtagacccaaataaatggcgaataccaacttccgtccagttccggacaatattgaagatatttacgaaaatgccactacatacaaactaagcaccagcatgcaccacaacatgcgccaccacttggccaacttgtgggcatctctttgcttgtaacgtgccatcttggactgcacgtaacagctagcgatactccttaaaagctattatattaaattatatggaacccgatacttagttagactaataacgatattgacacataggagggtactagacaccactggtgccctttagcatttctcttttattttatattcttacaaatacatcatatatcaaaagttaattctcactaatttatacaaaatattttttttacatattctccatatttttacccttatttagttaaaaaaaaatcaactctccctcaaacgcatctctctctctct

SEQ ID NO: 176262 - DNA, 540 bp, Cannabis indica
tcatacaaatatatttttgtaatttttttgttatttttgtgtatttgtgaaataattcctaaaaaaccgttaaatttgtgattttctcattttattaagttatgaacaaaatttgtgggccggacataattgcaatccatcgttgtaactgtttgggccttttgcatgtaactggttgttaagtccataattctttccttttctttttttttttcttttgaataaaaagtctatatataaattaattctaatggttttgggcaaatgcaagtgctattgcctggccactaccgttaaagagccaaatcttgtaagaagaaaataataagaaaagaaaaacgcccacattgtttggtaatggatttttactcgatcaaagacatgcatttttgttgcacattgttcttttaagcagtgtaacactaatgtggtgttaataatatataacactgatttgagagttccacataaatacttaaaagtcacaattctacggatctatagtttttttcattttttttttttcattttatggatttt

SEQ ID NO: 176263 - DNA, 586 bp, Cannabis indica
tgtgcctagtcgggtgctcatacaaagtagggtgcaatgcttcctttacttccgtgcttcaagaggattgcggactaccaccacctctgcccgacctagtttcgagcagctggaggcaaataatgatgctttgtctaaggaggtcaatgagcttaaagatgagagggagagtctctgcactcttctcacaaagttagagggggacatccggattaagcagaccagagaggaagagctcgtgaaggaggtggaaagcctggaaacagctgccctcgaggtttttttatgaattttggaaggctaatcccgaaggaaattttgattaccttggtgaatccaagaggatgtatcttgattactgtgcaagtcaggcagccaaaggaaacctcaaggcaaccacttctatagttctagccgaccagagcaacgaacccctgtgctcagattttgaacctcggcccccatgccaggcccctataaaccagaccaatccatacagagagcccgagaccccctgctgtttaaacacttttccttatcttttatttttttgtatctattcgacccatgggccttttttagtgac

SEQ ID NO: 176264 - DNA, 1091 bp, Cannabis indica
gttcgtgtctatttttttaatttcaaaaatctagatttgtttaagctaacataaaattttattagtttaatttctatttttttaaaaaaaaaataattttatgaaatttcaattattttttttttattttttaagtatatgagtttataaatataaataatttcagattttcaataatcatgggttgattttttaagatacgtgtttataaataaaataaactttaaaaatattttcagaaataaattaagtttttaagtaaacttaatattttttaattaatttaatatttttatcagaatttctaataagttttattaatttttcaggatcaattgaacattataatttttaaattattttgaaaaaaaatagacaaaattttgtattggtcaaatttaatgcataaaaatacttatttttaacggtaaaagaaatagaccctaacagtagaggtataattatgtaaatgtcatattttaaaaaaaaaaaaattcaaacaagttgtatattttaaagggtgagttcatgtaataatgttgaaagttgaagatacaaaaatactaattattccaattaaaagaataattgaaaataaaatggagaaagaaagctaaaacttttgaattaagcaaattaataattttttatgtaaaattgtcaccaagttcattggttgaataagccaatgaataatgaaattaattagcaattttatttaacccaaaatgaaaacataaatattataaatttataattaagaaacaaaagcattgaaaacataactactaatgaatgaagcctcgaaaaatcatgatcaattattaatcattttgacttgaagcacccaaagtattctgtaggtaactagggttttttattttcttctttcttttcttttcctatatacatttattatttatcattatctatatttactcaaccaaaacttaaattatacatcatgatcataattgagacaccaattttaagattttgttattactattttgcttgaaaaaccttttatttttttgggaaaacaatattgtttcttcaatcggtgtcccattaaaacctatgataaagtc

SEQ ID NO: 176265 - DNA, 790 bp, Cannabis indica
gtatgtttccagctcttttatctaacgtttttattctattaaacaccaattaaagtgctggtcaaagtcatgaggtgaatgaaatttgattttctaatattgtgatcctcaaacactataaatagaggtctaaagtgctcattttgtgatacttagttttctatcaaccaagaacttgacagaaaactcaagacttgataatttctaaagttatttctatgagaattcatttagtgcttggagataagggaaataagctttttgaaaatagtgataaatcttggaaaatagggaaataagttttggtgatccctactaatttacactacatgttttctatgagagttttgttagggttttatgccctaattaaaacaaatttaatttgtaaatttttattattattaccatcaataaataaaatagaaatttttttgacttggtcaaatcgcattgctcacattgctcacgtgtcgtattcatgacttatttttttttccgaacttctttaaatattttactttagcacttttgtttagttactaactttactacaactcgaacatgtttttatagtagttcgatcgggatactatttaattataaatgtggataccgtttttttttaatttgattatgtttctttcaaatcaaattaaaatttaaatttatttataatactattataaaatattaaaatataataaattattaatttaaaaaaattaaaaaaggcttttatcagagcgaaattgcgccggcaaaatgtacccacccattaaaaaatatg

SEQ ID NO: 176266 - DNA, 597 bp, Cannabis indica
catattcatttgggctgtggttactggttgcgattcgtgtcttctgttctttatttaattcggtatggcttataatgggtgatgcattcactttggtttcattcttggcaaccttgtgagtttgataacattgggaattttcagcatgatttttcttctttctcgacagttttttttttttgagtctccgagtgagattgtaacagctatcaagctgtaaagagccatatatggttttttttgttggtgcacgaagagccatatatgttcttgtaatgtgctgctatctaatttttttttttttgttttttttttttttttttttatttaatttatttatatccattttgcacttgtatttgaatatttgaagatgaaagtaatggttttgaagctgttattttctttgaagtgacgctcgttttgcaaaacgatatttaagaatgtgtttttgagtgcagataatattgactgtatcttgtttatggtatttgtggttacattttcaagagttgaagagtgcttggaattcttttgcttatagagtagatgtagtaaaaatgtttggtaggtatatctttaaattaatagttgcag

SEQ ID NO: 176267 - DNA, 1120 bp, Cannabis indica
agcggaataatatgactccttccgttcagatctctagcccttgattcctttctgtagcagagcatcaccaagatctgaacctggatcttcttttctccttctttgatgcagaaattccatagtcttacatactatgattgagataccacttgatgtgtgtgggcactactcatctcacaaggatttcgaaattttctctctttttctctcttgaatttcgtggcttatcatgcatacaagagaagagaacaaggttgctttatatagggaaaagggagagcacaactttccaaataaacagtttcctcttttactgtgtaattgattaactgccttatttagtgtgatccaccactttcctattatagctaggctttgattagcaattacatggcaaattaaaataaaaaataataattgggaacacaaaggaagtaggccggccatagagtggaaatgggcctcacttggattttgcagtttcctcaattttatttctatttctccaaaaatgccatttttccaattctaatcatttaaatgccaaaactaattatttaataactaaaatagattattaaataatattgtcatttaaaataattattaattagacatacaaagtctcttaattaataattaaacctagaaacccttttctttacgatttcatccttaaactgtgagaattcataaagtagacatagtctaacttttagaattataattgattaattaaaatcaattaactgagtcttacaagcagtatggtctcaactagtatggggaccatgggtctatataaccgagcttccaataagtcgaaccgaatttaccaagtaaattccctaacttattaattcctcattgaatccacacttagaacttggaattgcactctcagtcatatagaaacgctctatatgttccacgatatagacacgtcattagttatccattgttataaccctaatgtgatcaatgatcctctatatagatgatttacactgtaaagggattaaattaccgtaacaccctacaatgtattttatccttaaaacacttaaccctgtataaatgatatttcacctaagtgaaatgagatctccaccatttatct

SEQ ID NO: 176268 - DNA, 934 bp, Cannabis indica
catatagccctacaaagtatagtaatttcaactggtcggtaaggaatcaagacttaaccggcaaatgtaatgccaacaggtcggtgaagaatccagacttaaccagcaagagggttagcatgtatagtaactcgattaagccgtatctctgcaaggggtcgatctccaggtcctataggagtctgcaccaaatccaaaacacccacttaatactattaacaccaacacaagccaaaaaatgaataataaagaaatagatgttatatacaaaaaggaacaggctaaaggaataaaaacaagaccagaccttttccataaggtccagaacttcaaagccatgaattactttgccaaacacagtgtataacccattcagatggggctgcttcgcaaaagttatgaagaactggctgccattagtattgggtccactgtttgccattgatagcatcccccttgcattgtgctgtgagagcaatatacaagtagaatacaaagagttaaattatgtgatacaactacaaggatgtcttaaaactcaggtacttcaagtctcaacagagtggcaattaagatgaaaatatgaatattaagctttgtaggccttatttggaccttgtatttcaagaagaaaacagaaaaaggattctgaaggattctattatagcatagtataattttataaaatttagaacaattataaatatgcaaatcaaatttgagaacatttttttcaatatttttcctattattttcactcaaaattgtaaaatccaaggtataaataaagctgcaatgacaggtttgataactaagcaagtaaatcattgtttaaatgtctaatattttggcccttgtcagccctacacctctacagactacagtctttagagccagaaaactctagcaaattgcaaggtgggtatttaagtgg

SEQ ID NO: 176269 - DNA, 643 bp, Cannabis indica
ataaccataatcttagtttctcacttaatcacaagcataatatcaaacatgagagccactgcacttaactctacgtgctaactactgtcttacatggtatcccaagtatgcggagattccaaatttctcgggtgttcctgagcaagcattggtagtcctagtcacacattcctaagatttcacaaatagggttaatcccaaaattcactttcaataatcacataattagcattccatttatagactaacatatagagttcaaaacaagctttcaaacgatataaagaacgtccaaacggagtcccgagtcaaaagttatggctaaaacaaaattggaaaaaataagtaatcccactgccaaacctagtcgcggggactgggtccagaacacccaaaaattgcatttttaacgcctaaaaatgcccaaacacaaacctaacttcacctaagtcatacacaagcaaaaaccatgctaaaccaatgtattttcaggcattagaatcgcagaatataagctcatacataaaagcatgatccaaatatcaatcaaaattctcaattacacatgcttgaacacaaaaattttggtttaaagaagaatagagactatcgtgataaatgtaaaattagtagaatgattgaa

SEQ ID NO: 176270 - DNA, 1058 bp, Cannabis indica
atatatctacagatagattacatttagacaattatggttctgggcagctttattaggcagggaatattattagcaataatgaagtataaaaagattaattattcttgaaaaagagctatatattttatataaaaatcatttatatgcatctgtgtgtgtaatttgtgtgtgttaataatttgatctttttgagttaagtcatgtgctctctgttatgtgttaacagatatatctgctgcaactgcctacttattacatgatcaccactcacaaattcaaattattacaaataattaagattatataatattatatatgtagtactgtaagccacatatggtttatctataaagtttttagtttaatatttttttttatattttgtatgctatatttatttaggatcaattataaatttgtaactacagaaaattaatttttgggtgctgtaataaactattcagatatataaagatcaacatgattttaattaattcgtaaatactaatattgagtgtagtaaattatatatataagaataaattagttaatattaatataatagaaaatgatttgtgtgtattacatgaaatgagtacattatagtcgtttttattaattattaattggaactatatatacatgcaaaaacttgttaattaattatcataaaaaaataacataataaattttgacaatctggtcatctgagttatatatgttacaacttaatgcattaatgaaatatacaaaattacatcctattattattgttcaataaaattgttatatctatatatatgtatataatataagattttttttggtgagaggatcaattttctttgcatgcataattatttggtaggacattattttagagggtaattaaatttagcctcgatcgatcgatcgccacgagaattagttcactaattatctaaaagaataaacaaaaagtatgcgaacagaaagaaatttaaaaaaatattagtgcaaatattgtgttaaatattattattattagttacacaatttataacattcaccaactattt

SEQ ID NO: 176271 - DNA, 1039 bp, Cannabis indica
caattattgaaacagtaaaattgaatgaaattagacaaaagtccttaaatctaacaatctcaataatatgaaattagacaaaagtccttaaatctaacaatttcaataatcaggaattttaacggccaaatttaatatatgttagagttaaaggagaaaaattaataataataataataaatgaagaaacgtaaatagcagtgagaaattagttgggtttgggtggcttatagtccaacgctctcacctggctccgcacagtaggcggacatttccaaactcttcaccctcgtatcctccgcctctttcttccttcttattttctcccactttccctcattttcccatctaattctttttctcttctctcttcttcttcttcattacacctatacacattggtttctctcaattgcctctcacctggggtttccaaacactacacacgccaatgtcgttctccgccactaagttcgctcaaccagttcctctccatgcctccactcccagatccaatgacaccccatctctctttaagacttgctctttccttggatctacccagaagcttcgcttcaatcctcttcccaccaaatcccatcaatccgcttcttaccgtcgatccgccgttgttgctgtctctgacgtcgttaaggagaaaaagcgtcagacttccaccaatctggtaaaccctttttgttttgctgcttcaattttctgttgtagcttcactttcttcttgtttttgttttgaattatgggaatttaatgaaaaccttagcgttttgctattttgtttctaattaattacttgtttaccgtattgggtttcctaagatttgtgtgattgtgacactcaagtaagatcagctgaacactgtttgatcatcgatttgacacctcaactaagcaaatcagaagatttgtgtatcaattcttgttgttcgatggtgaaattcgagttaattatcttccaaaaaactgttggttcgacaccttaaaacgtaaagggattatttttaatgtataaagtttagca

SEQ ID NO: 176272 - DNA, 832 bp, Cannabis indica
ggtatgagaagaagagaggaagccggtgacgatggagtgagcgtgaagttggtgaagttgtttgagagtattacagtgattcagtatcactctaccgacattgctgttattattattgttcatagaagtagctctgagcaaaatgaaaagaaaataaccttttgtttttggggttccctttcccattcccaccatggtttttcagtgcaaaactccatggatttttcatttttccttcaatcagttcattgattgaattgaagagcaaaatactgaaaacaaaagcgtggacggcaggattcgaacctgcgcgggcaaagcccacatgatttctagtcatgcccgataaccactccggcacgtccaccttgatgctacaatgctcgttatactttatataaacgtattttctagattttccctttaagttcattatatatatatatttttaagaaaataatattattttattttaaatattaattaggcaaataaaattgtatcatgtcaacaataaatacagtgtgtacacatagattgtttaacatgacagttaacaacaaaaaataaataaaaatagtaaaattgctaacaaaatacgaatttaaagaaattttaccgtaaaaaaataaatttagagagttaattgctaacgaggtaaaaactttcagaagttttgcttcctacaacatctctcatttggaaaatgagagagattataatgagctagattatttgtgattataataagttagattataacattatcataatcttaacaactcacaacactttaaaatttataatttaccaattactgagctaatttttt

SEQ ID NO: 176273 - DNA, 594 bp, Cannabis indica
ctttctttctgtctatattgttaatttggatacttatgatacaagacaaaatacatgattttttatgtggcaactagcaagtaaagattctattgttggccacaatttttctttcaagtaatattattatgtgtgttgtttacatgagattttatgttcaatgcaaagaactgataattataaaaaatgccctttgcagataaacttgttcaatgttaaaattcatattctctgtttaaaatgttttagtaaactttattttcttgctatggataaggaagaatatgggattctgtgagaatgtctttatgcaaagtaaaatgaaagaattatcattgtctcttaacagatattagttattgttcacaactcttttttttcttacacatactttggtataaactaaagttttgtgttgttctcgtgtgttgttaggctttttgcggttgtggatgacattttttgcatgtttaacggtcacataaacaatgttgctgctcttaagcaacaatatggtttaaacaaaacagcaaacgagtcaagcattgtcatagaagcctacaggactttgagggaccgaggtccttatcccgc

SEQ ID NO: 176274 - DNA, 1279 bp, Cannabis indica
aatcttttaaattctgcatgtatgataattcttggacttgatcttgccaaatcatctctacacaatcaagcgaactcaaacgtaattgctccaaaataggaaatgctaccacctacaaaataaaagtctaatcaacttcataaaaagggaaaaaaatcaaagataaattaggtaattagttcctagtagtacaagttgattttatgtatatcagtatatgttggtatattgttttagtttattttaggaatgtaataggtagatgtctaatttattttgaattagtagtatttttttaatatcatattgcaatacattaatttctaattgagtatattttttaatgtaatgagttgatttataagtaactagggaactaattctggctttgcacaatatttttaggttgctaatatttttaccgaataagtgatcgatataatataaaaattgacatttgtgatgtgaattttgtaagaaatatgaattttttctattaaataagtaaaagatatagtgttcacataaatcctaactctcttttcttcttcgtcttcttttttttttttttttcctatttcgcactttttttttattgtagtttctagctttctatggaagaccattgtttacataattatcatcaaccacatttgaaatagagcatgcatcaaagataaattgaaaataaaatgtggtgtactttttcattaatataattagatatttcatttaattaatataattggttgacaagatattaaacattatattaattgaaagaagaaatgtacctcctccctaaaaagtgggaatatactggtgctcggtgaggaatccaatgatggtgaagtagccacattttgctccggctcaagcttacagaattgaattaattttggtaaccttttcagaaccaatttctgtagtttgagaaactcaatcttctggtgggtgccattttcatttttatggaaaacaatgttctccatcatatcacaagactctacttccatttcttccagctgtccagcaatagttgagactggaaatagacttttcagtgtgtgacattcacttacttgcacctcttttaatttactaaatgagcctgctaccaattctccagcatacatcttttgcaagtttgacagtcttgcgagttgcaaattcttcaagttttgaaaaacaggatgattgcactccatcaagtatctaacattagaagcatcacgtaaatcaaagacctctaattcggggaaaccatcagcatttgata

SEQ ID NO: 176275 - DNA, 917 bp, Cannabis indica
cgttatatatatatatatatatatatgttctttaaaaaaaaaaaagaattatcaccttggttgatgaaaattgaacctggtttaaggttttcatgagcctgaattaggctctgctcaattgcatttacaatagcatcaaatgattgttgtacaaaaccaagagatgtaacagagtaaaccagatactgcaaataacccccgggtcctgagtgtgtgtgaataccactaattgccacattttcttctctgtataaatttccgtacctgttcaacaacctcatcaaatatgtcagggtggtaatttatgttcataggttgtgttcgtgttcgtgccgtgtcaggcttaaagtatgacaagtaaatagtaaactcaaagttgacacattcattaatcttatcagaaattaaaatctaaacccaacccctttataagtgaattgatctaacctgacttgattaacctatttatataatatgttataacaaatttaacatgttcacatgtaatgaatataataaatttaagagtttatactcttatataggttattgttgtacgagttagacgagtcgacccgaaaatgattcgattaataaataggtcagtcatgtcaaccgaaaatgacctaaaccaaatccattttattttgtacacatttcaagtcatattgccgtgtctaacttaaattttacatatatatatatatatatatatatatatatataagtattgctattaggcaccagtagtgcctagtacttctagatatgtcgctttgcgaatggatagctatattctttaaaagttattatattaaactatgtgagacttaatacttacttcgaccaatagcgatattgacatataagagggtgctaattgtaatttctctctctatatatattatatcacattc

SEQ ID NO: 176276 - DNA, 1293 bp, Cannabis indica
ccgatattagtatctaaataatctcaacattattaaactagctttaatttattattttttcaaaatgcctcttagagatcattattagaaaaatatcatttgacattcttagttttctcaacaaaattaaatatcaaacttacctcatcacttacaaaataatgtgattattttacccattattttaaagttttctcctcaattagattaactcaaatattacactaaagttaaaaaaattctcatgaattttgttcacaactttgattatttaagatttataattgcttctccaattttgttatctttgcataatttttgaatccacattaatttactttatttgagtctaaaactgctcttccaatttatgactcaattcacaagtgtagatccactttttatccatttgttcttgttatgacaagacaattctcataaatgtaactctcatagttcacttttttaatctcataaaatgagataattatcagttttaattattaaagaatgtaacttctcacaaattataatttcttttctaaaaatcactaatgaaaaaagaatttcaaattctctttattcaatgataataataatctttacatctgtaataatcatactacataactcatatatcaatataatattaatgtataattcccatacataaattataactacccaaataataatttttatcctaattaatataatatgtatgttactaacaatatctcatgtataacatacacaaaatatattaattattacacaactatatatgttacatatctcacatatatataattgaaaaaccgtgtttttgcaaatgtcagttgtatataagaaaatataaaaactgtaagcgtttgcagcagcagaaagtaattctgctacagcaaaacagaacaggcagaatataaaatatttgcagaaaaataaataacttgacacaagagatttatacgtggtatcagtgttctcacgaacactcctagtccacggggccacgcccagagaatgaaatcaattaataaagtatcaaaattacaaagacaattgacttaaacaagtttagactccctctaaagtattgccgcaatcctttgtaatccactttatgaatctgacttcttgaaacaccttcaagcccgaactcccttcgtctttgaagtgtgagtgcttacttcctcccgaagtaaggcttcaacaagtcttctcccgaagaccaagtgcttacttcctcccgaagtaaggcttcaacaagtcttctcccgaagaccaatctgt

SEQ ID NO: 176277 - DNA, 1271 bp, Cannabis indica
ttggaaagcaagcatgtcccttgaccacacaatatagacatagtgccatttgtggggaaaccactttccatccctgaaaacagaaacacatgcccaaatgactgtaagagaaaaggtggaaaatggttctcacaaactttaattgatgaaagagaaagaagattagatatacaacagaagcaaaataaacactcaaaagcttaaataacaagaagaaataaaatcaaatagtatttaacctattaaataaatgtctatctaacctaaccttcttgtgtttttaacaaattcttgtattttaacagaatatacccaatgaaaaagttaaaaaaaaagttgtctacattactaaacacaattttaacaggtgcatccatttccaatgaataggcatccacagcacaagggtataaagaactacacagtttacaacatattcaaatggtagaaatctgaaattcaaattaacccaaagtgtccaaattcatatgaagtttcaagcataaaactatgaagagttagaagaacaaaaaaaggttagtttaagttacttttactttaattacacaatataataaactttaagagtatataaccaaaaccaaacaaaacaacagtaactaaaggagtggaaaaaacacatctgtataaaccacaaacatagcattatcatgaatgtaatgagaaatgctaaagggcatggtgcctagcaccctttttaatgtataatatcgttatcggtgtaactcaatatcggttcccacttgctttatattatagaaaattactaaccaattataaatcgacagttaggcaccatgggtgcctcatagcaaagctcgatcacagaatataaattacacagtctttgaaattcagaatacatcatattcaaactaagtaagataaatagtaccattctaaagtacaaagcatattcctgattgaagcaatatcatataataataacattgggatagaacagtagattgataattcatttacaatacaacaaaacagaattcgaaggagataaaataaaccacaaaattatgaagagggaaaaataaatcctcgtttcaaaattcatacctgtgactgtgagtagtgaattaataatgatttgtttatgagtgaaaattcgaaaacacctttgctcaccaacccacaaccaaactaaattcctctttagagatttcagtaactgagaaagaaagaaagaaagagttgaaatttagaagaaggtaggagtattttaagaccatcggatc

SEQ ID NO: 176278 - DNA, 1055 bp, Cannabis indica
atatatagaagggccttaagactgtatggtgtggttaattcagaggcatatatatatatgtgtatatataaggtagaaaataacagagttgtggggcagcctttatgtttaaaggcaaggagggtgtcttacaattattattaggttttcttttctggttaaagcagtattggtaggtcatatttctatgcttgccatgtgtagaccctggaccttacaatagacttaaatttaaaaaaaaaaaaaaaaaactattattatttataagaaatattattctgcttgtgagaattagccccactaagcaaacaaaaagcacacctaatgagtcttccacaagtcaatttttttgtaaggacattgtcttttgtaatagcctcaccgttaaatgtggatctatgaaattataaatgtaaattgaaagaaaaaaaaaaaaacaaataaataaacttgtctacctcagaattgagtagaataatatgtttaggtagccatatttgagtagtagtacataaagtaatgattaaggttttggaatataaggtgagtataattagttttgtgtaatgataatgtatgatgaccattaacattaagatgagataatgggaggagtagtagtactgttttgttatctttgtttgtagaattttttaacttaatgacaaaaaaactataaacagcaaaggccatcatctataagataagcagaattgaatggatttgactccatctttggcataaaggctgtatatgtatcatatgatttttaattatttttcaggtttggaaatctattgcactaactttttcatttgaatttaaagtccaaaatggaacttaaaataatacattatttctctgtttaggattattattattattattaagttctttttatttttcctttactatgtcactttttaataggaaatattttgagttaaaagctaaataattggataagataggtatatttgataaactaattatgtttgttgtatatgtgaatgtggatgagaataggatttataatacactgtaaatgtaaaatc

SEQ ID NO: 176279 - DNA, 656 bp, Cannabis indica
tgaagacttaccttgaaatacgttactataggaaaaaaatctatactatttcttttttttatttcaatgaaatatttattaaaatgataaacataatttttttttcccaataaatggtacaaatgtaggtgatgtttgctttgaggtaatactattatgatgtttatttatacactgtaatatagattgtaataaaataaagtaacttgtatctagacaaaaatatcctcacttttattacttttaatatttcaaatttaaataaaagtaaagatagggcaaaatagttatttgttgacaataatcaacattacaaagttttaaaaatagaaagcaaacaagcaaataatattaaaaatttaacagctaggcacaattaaatcgaacacaattcttatgatctcctctcgcgtcccgattttatttcgagtgtctagcgcacccgattctaatgatctcctcccgcatcccgacttttgttccagtgtctggcgcacccgtcgtcggtccctcaaatatcagaacactcatcccacgatggccttgtggaccgcgagaggttgagcctcaggttgggtggtggtgtgactgtttggaagtgtcctcctcacccaatccatccattcgaagccactaaaaaaaataaactgaaaatt

SEQ ID NO: 176280 - DNA, 864 bp, Cannabis indica
tagagaaaaatcaacctctgcatctgcctcagcatttacatcaccatcttcagaattatccgcctgcacagccttgtcgtactctgccttcagttctgcagatttgtcctgataaactttcttctcttcatcagacatagcccgccactttgcaccaccctcttttacaacctgaatttcattcaacaagttaactcacaacaaaaaaagaaaaaaccctactccagggaaaagaaaacaagatcataatttatacaaattatagagaaccttaacaaacactcacaagaagaagaagaagaaaaaaaaaaaacttaccactttaacatccttagagtcgggattagctgccttgaattcctttctgaaatcatccctggaacatgtgaaaaaacgttagtatcacgtatcctacaagcacatttatgaaatgagtaatccaaagcagtagaaaaatgattacatgaagagaaagaatgcagtgggagggcgcttgcgcttgttaggattattgtccttagacttcttcccaactcttgctttctttgcctttggttctgttgatgagggtttcttcctataaagcccaagaattaataaatacgcattattaatgaagaaattggccatgaaaaaaaaaaaaagcaaaaggaccaaagtaaaatcaaatacctctcagttgtcttcttgacctccggaggtgcctccacaactttggcatctgaaacgaacaaaaaaggttaagaataaaattcatcaaatgaaaatgaaacaaaagaaaaaattaaataaatacaagacgaaaagggacatgcatacccagattctatttaatttagtcatcgagacgtgcaaactgtacgg

SEQ ID NO: 176281 - DNA, 502 bp, Cannabis indica
gtccaatttggtaccaaaaccatcttatgagcatttctattactttttctcttttattttatatctgcatcagttgtaccaatttttacattcatatagcagtacttttgaagctaataaatttctatctctctagcaatacaaattcttctactcaatcatttcatgtacatatttaaaagttagtatgggtgcactattattcttcaactctatgattttcatatatagttataagaaactctataatgggggcacattttatctatatattagggcgtttctatatttatagcaatttgaacattatctctcaaattatttaattaagggctctttttaaggtatatataaaaaaaacaaaaaaaaaaagcaactaaattacaaaaatactctaggctgtctctttaaacatttatacaaacccgcaaacaaaatattataattatatctcttattataaactttcagccgcacgaactaaaaatctcaccaacacaag

SEQ ID NO: 176282 - DNA, 500 bp, Cannabis indica
agcctatcatattttttacttttttttatataagaatgcacttgtgaaatgaacaatctcaatttgatataatgtagtaaatattggatatttaaattttcttttcaaaattctttattgtttttgaaaaaaaaaaataattaacaaaaaaaaatttgttacgccaatttcgattactattttctttaccaagatcaagaaacaacaataaagtcattagggctcaaacatttaatcaatgagctggagagagagccattgagagaggtttctgtagagagccattgtaaaaagaagtgagctggagtgagagccattgagagaggtttctgtagagagccattgtaaaaaagagagaactcgagagaaaagagagagtagtatcttgtaaaggagagaaaataggtgagaataaagagagacaaagttgtaacctttacttgatatgttgagagcttgacggagacgttgtgtgcttggttatttcgtagtgagttggg

SEQ ID NO: 176283 - DNA, 763 bp, Cannabis indica
ctgcagataaagtaccgaattaaaattgtaaaatctatttgagtttggtagatacatgctctaaatcagaaatgtgtaggagttaaattcaaaattattgggccaggagaaaacttgtagaataaatttattttgaaatcttctataaagatagttttgataagagtttaatgatagtactatgtcaacaaaaccttaaatctagacctaaacaagcattatgtatatcgagtacaagtcgtgatcatagtagtgcattgttgttattcttgaatttagtattatagtgagagcacatatctttctatagctaattatataaaagaccatctgaaccaaaatcggaaatcgacaaatttcttatctatagcttcaaaataacaaatgtaatttcaaaagcaacaagatgtacttaaattcttgatttttaaattagtactttatacatatacatactaagtggcattctgtaaagaaagatattaatacatatatagtatctgtaaaagccgacaatttatgcagcaaataataaaaacaatgtacgtacaataaaaaaattagctaaaaccagtgatacatatagtattaaaatcaaattaacagatgatgacacaaattcagtaaacagtactagttcaaaagaaataatataatgtatacatctattttaaaggatccttgaaaaatatagtttcctacacatatcaaatttgtaatcacgacataattagtaaatagtattaattttcgacagtaccta

SEQ ID NO: 176284 - DNA, 996 bp, Cannabis indica
taaaaattaaaaaaaaaaaaaaaagttggtatagcagatctagtccgatggtcacctgatgcttatttttttatagtaataaaaacataaaataaaaaaaaataaaaaaaaaattggtagcacatatggtccgatgggtccgatagtggggtccgattgtgtccgatgtggggtctgagtgggggtccgattgtgtaaatgggggtgatgtaaatgggggatattttaaagatatcataaaagttgtcatatcctacaaatattagttattatttatttaagaaaaaaaatttaaccaaatgtaagcataaaaataaaatttccctattaaaatctaccttaattccaaaactaatatacctaaaatgtaaataatcccgaaattttacttttttcttatttttttgtctttgaaaagtaacttgtcggttacttataattctaataagaaactaataagttactttttgttaaaatatcatttatatattatctaatttaggtttgaaatatattttggttacttttaaaatttatttgtataaatcttaataattaattaattaattttaggttatattaatatatttgagtaaccttcaagtttatttttagattagttatatttaaaattttatgtttattttttttaacaacatatatgttaccttcaatcttatttaagaaactaatgtaatacaataaagtaaaataaatcacattatttattgtaattttcttagacatccaatctaaactaatgaccaattagttattttaaagcttatgatatcttaatattacttaagatatattttggtaaccttaatctagtgtaaaaattaatttattatcatataataagttttaggagcttttttatttttatgctttcaaaatagtttttttttatgtagttttacaaaattttacataaaaatctgatagcaactacaaacaatctaaattgcaactaaaattcatataacaatctac

SEQ ID NO: 176285 - DNA, 521 bp, Cannabis indica
tcaaagcaacacaaaaactagatcatagatcctatctactaccaatgttcccaaatctgagctccttttttttctccaaagaatggtgcttttctcaattaacaaagctattagacacccccaaatcattgtgaaatgtcaatgttaaaaaattgaaaaaaaaaaaatctcataatataccaatttacacacacaaatcacagaaacacccaagaaaaaaaattgtttggtagccttaaaaacattggaaaagagtctaattttatatgcaaccatcaggaaatcgaaaagggaaacaagaccttggaaggatcgactttggggaagctcttgatgacggagaggactctatcgatgacctcctctttggtgatatgatcgtcgtgagatgacatccatcgaacaagagtggaagaagaggaagcccctaatggtcgaggagttagggttagggtttgaatgggtagccggatgtggcgaagtacagctgctctcagcgccattctctctctctctctctc

SEQ ID NO: 176286 - DNA, 726 bp, Cannabis indica
tgattactttttgcattgttaaaagaaatgtattattagaatcttatcataattttgtatttggaaccggtttcgtttaatttttttatgtttttattgttttatttaattttttaactggttattttttctgttatatatatttttttttcatgttatgattaattatttttttttgttgtttattttatatattattctttatatcttatttcattaatattatttataatcggattttcaatactgttgaatatgaaatcatatttattttatatataaggttgtccttaatttttgtttcctcttgatttaaccagttcttttcgttttttatatcttatgttttttaaattgcagagtttcatttattttccaaataatatatatatatatatattcttatataatatgttcatatataattttgattattgagtttatatacctgttttgtttatactgagaattgttgttgaagatttgttgatgtgtatattcagtttgatttttttatttttttgttatgtcgattttatgagcattaattttcaggttcacacagttgaggaagaagattagaagcaattgaagaacttactggagctggagaagacaatcagagatgatgattgtttattgtcagctctgtcgtcaattgatcaaaaattctagtttgtgagattgattggttgtgtgaaatgcttgcgtttgagatcgaattgc

SEQ ID NO: 176287 - DNA, 562 bp, Cannabis indica
attatcttttatttctaaagagtattcaccacaccccatctgaccatttgcattaaattatcatattactttaacctctaaatggtattataaatttataattattattgataaacggaaataatggatcttaattatactgtaactcaacaactcgaattttaattaagttctctcaattattaaaaaatgatagaaaatgattaacaaagccaaataaaatgattattagaaattataactgtaagagcattcctaaggtgttatatatatatatatctttacattatttaaaaatttaatatattttattttatttttcttttacattattttagcagccttatttctaaaaatattgcaatagtataatagctatcaaaaaatactataactatatgatatcacacattattatatatatatatatatatatataaatttgtaggttttttctatttttacacttcaaaactaattttctttgctattcttatggtaattttacatagaaatcctaatgcaactagcgttgtagccactttagaactcgaaccgtaaa

SEQ ID NO: 176288 - DNA, 526 bp, Cannabis indica
aaaaaaaaaaaataggaaaaaataagagggggaaattttctctaactgtaaaaatttgtatgacatttaattgtgccataaaaattaattacacatcaatctatatagttgatattttcaatttaagtttgttataattattactgcaaacacaaagatttaagatcaattacatcatattacttttattaatttattttggacaaagttgcataatattatttaaaggaaagactaaaaggaccacataaagtattttatggctattataaatctttattttcttctttaaacaatatctccataatttttgttaaacaatttgcgacggctaattatttaatttgtactgtttattttttttctttttcaaatcatcaattcaatgagaaatttgttcgggttgatctttatactattttgttaacaaatttgtatgtttaattaataatatagcgaactttaggtaaaataaaaaaaactaaaagaaaatttgattttctatacttacatatacttaatattt

SEQ ID NO: 176289 - DNA, 920 bp, Cannabis indica
tatatatatatatattgtttcatttggtttgaacataagaacatccaagggaacctccctgaattattggccaaaccatgaaatgcggtaagttctttcgatcagatgtacattcaagttccatttctcaacacaagttggaatcaatcttttcagttcaggaagcgaaggcctttatattcttcatgcgccctctgactaaaacggatcgattggtaaatgttttacgatttaatttattaaatccaattcactcatcaaatgtaagaagctcatctctttccttctgaagatgtccattaaccttcaactgattgaatatatcatataaaacttcataaatcctatacatctccgaatgtgatgtatctcctgcaataaattcatgaactctgttgttgatttcaatggaacttccaccgggcatcttcttaacacctgtatctctcatgaccttccttatcatcccagattcatcccagctaccagaagcagcatatatattagacaaaagagtataatttccactattctggggctccaacatcataagttgctgcaatgcatgctctccaagttcagcatcaccatgtatattggaagcagcaagaagagatccccatattgctgcattcgtttgaaatggcattcccttaacaagttcacatgcctcttgaagataaccagcccgccccagtaaatcagtcatgcacccatagtgctcaactttcaattgaattccatatcttgaggccatgttgctgaagaaccagcgccccatttcaactaacccagcgtggctacaagcagaaagaatggccataaaagtatttcattaggcttaactagagcactttccactttgagaaacatttcaattgcttctcttccaagaccatgaagagctagcccagacatca

SEQ ID NO: 176290 - DNA, 666 bp, Cannabis indica
gaggcattccgtacgatgagttctctaaagagtgttttttcaagctctgaaagggtacttctgttaaagaaaaagtctctctatagactatttttaactatacaacttttggtccaaaaaaattggtgtaattatggaagaagtttcataaatatatagcatcaaattaattattattattattattattggaatgattctaaataatacgaggatagtgtaggtaggacaattaccactacaaaaaataatatttttagtcacaacaaaatttataattgaaaaaaaaaattatgactaattataagttatcttttatatgttgtgactaaaaggttcgtaattaaaattattagtcacaaaaatcacaatttgttatacgactaaatatgcttttattcacaattgttatgaccaaaactaaattagtataataacttgtatctaattaaatattatgttttagttacaagtaattttttattacgactaaaaatcacatttagtcataaaaaaaaatcatgctatgattaagaagttgtcactaaatgtagtttcttcaatgcacaatgtctttattattttttttctttcttaattttgacattgatagaaatagaacttatatatgtaagacctcttttttgggaagacactaatttctct

SEQ ID NO: 176291 - DNA, 771 bp, Cannabis indica
aatcacaaacagagacctcaacttgatcaatgcaatgatactgaatacatgaatgaaatgttctaaatgcccagttgatttcccacattataaaccgtaagatgcattcatagcttttaaatctttttccatcagagaactgtccttcattttctctgctcccttgtcagccctccacccccaacataaaatttccgagaaaaaaaaattaaaacttaacaacatgggaattactctacctcagaaccagtgtaaccactagctccaagaaccccaatacgaatgggtttttctgctttttgagctttggtattcgcggaacatttaacaaacatattccctgcatttcgcctcttagccttagtcaccttcatttcatcctacattcaaacaaaaatacttaaaaacattaaatccaccaacatttaaaacgatgataacaagaacaaacaaaaagctttcatagtcaattttctaaaatggatacaattaaataataaaaaagcataattttatcgaaaaataaaaagtaaaactaaaagaaagctaaagacgcaaaaaattatagacgttggaagtaaacagaccttccataggcagccagagtcaaagcaaaaggaacgtgaggtggaagagctcatttgacactgccacataaaaaaaaacacaatcgtgaatgtttcaaaagacttgatgaggctttgaagtgtaaagcaatgtgtaatctgtacaagcaattcaccttcaaagggaaacaaaaaaggtaaaatg

SEQ ID NO: 176292 - DNA, 568 bp, Cannabis indica
gctctccaggtgcaggcacaggttcttaccccttcaagctcatcacactctgattccctccctactgaacctgcctttcgccccaaacccccaacggataattctactctcaaccttattccaaatcctttgagtttgggccgaggaggaaaggcccacagaccctatgacaaccttcttggaagccaggcccatgaactcccatggccctcaaaagaattatggacttctggttatagggccctaactggattgggcacagttgacaaatacctacgtgagccatccttgtttaaccccttgctggacattgaggatttccgatctttggaaagtgatcttggcccaaagaaaaggaaagcccttgatggtatctccataggcccatctccttttaaggcctctgctgaaatattaacaccacttgaccatcctacatgtgaagcatctgcatcttcaactcttgctgaaccaagtcatgtccctgcttactccccgggatcctcatcggcctctacatccaaaagaagacgaggaagaccgtctgcgactaacctccctccccgtg

SEQ ID NO: 176293 - DNA, 801 bp, Cannabis indica
acacatttacttcattaataaaaatcattataataaattaatataaataaacttaagaagtaaaaaaacttactgttggcgttggtaaacaatactgcaaaaaaaaaaaaaatttatattagaaaagaaaaaaaacaatctactcaattaataatgtgtttcatcaaaatttatataatatatattttttttgataaattttaatcacacataatattaatcttattattaaaatactatcataaaattgaggctttgggtataaattccaggaatcattcacacataaataatgaaaaacaaaacacatacaaattactcataatttatataatattagtaataaatatttactcactttgaatttgtaaaatttgcatggactccaccaaaaatcaagaccatagccatctatggttccaccaccttgaactattaaattatcaacattctcaaatgtaagaccataattactattatggtcattataattagatttagaggtaattatggttccactaatctcaaatattaaatgattaaatttgcaaggtccttgcaacttaattggcttaacataatataatcttttaggaactttgagtattacttttccttgtgttgagcatgatttttcccatgcttttgtaaatgcctgcacacatatatataattaaattatgtatacaataaaataagtaaatacagaaatatgaagatcatgaaataatttaagtatatatacctcagtatgggaatagtaattgatgcgttttaaatcaataaattcatcaatggtaa

SEQ ID NO: 176294 - DNA, 364 bp, Cannabis indica
ggctgttgggtttatgccctaaataaactcatttcaatataatcagatttacttattaatatagatcagaaataacatttaatgttgcatggttcacatgatttatttcatgattatatgtacataatgtataaattcatctgaaacccttttcacatacttgatcatgtttattgtgccgtcaacacattggaaagtaaacatgactatgtgaataaagtttcctagatttatcagacacagggttttactgatatgataatctacaacaagagtttacttgtatttggagaaatactatgttctttccagaacattggttaaagtaaagctcaggttggatgcatggagtatgcatcggaag

SEQ ID NO: 176295 - DNA, 983 bp, Cannabis indica
aaatataggaaaatgcttttaatttttttgtaagagagagaaagagtgtttaagaatatgagtaaaagaataaaagttaaagaatcatatattagtaaaggttaaaagaaattaaatatgattttttttttataaaatgtgattaattaaagaaaaatagtttaaaatagttagagtgagaatagttagtcatataattaactaatatttttcaaaatatgatattttcaaaaatctattagtaatatgaaattaattaaattatttttaagcttatattatagtaatttagttaatgtattacaaatggattattttaatgattaaaatctatttttttaaaatagttttaatgatgacaaacactttttaaaatagtgagtggttgaggattgccatcttgttatgaaactcatggtgtctattatcagtccaacactgagggtatggggagggctgttgggttttatgccctaaataaaactcatttcaatataatcagatttacttattaatatagatcagaaataacatttaatgttgcatggttcacatgatttatttcatgattatatgtacataatgtataaattcatctgaaacccttttcacatacttgatcctgtttattgtgccgtcaacacattggaaagtaaacatgactatgtgaataaagtttcctagatttatcagacacagggttttactgatatgataatctacaacaagagtttacttgtatttggagaaatactatgttctttccagaacattggttaaagtaaagctcaggttggatgcatggagtatgcatcggaagggaccgatattgaactttgacttagatttaattaaacttaccgtaaaatctattcaagtcaatatcgccaagttgatcctagatcaaatgatcttaatcctgttatgattaggctcaatcttgaaaggctattcgtgttctttgatttgttagttaagcctac

SEQ ID NO: 176296 - DNA, 801 bp, Cannabis indica
ggagaaggtattccttttacatcctctttatatgttatgagtaatgatatgtgcatacatatacataatgatatgtacatatgattactctatatatatattatatattaatgtagatgttaaattaattgttttctagtccaatgtatgtgtatgtgtttcatctttgtgtaatgtattttaaacattgagaagtgctagaactgtgttaatttaatgttattatgcttttgtttaaatgtgcaattggataaaaataaagcctttttattaccatatagaatcaaaatttgtattattatttattgtttgggattaccacggtcagaacatggctgggatttcgggattgcaggttagacgagtttttttagagattgctaaagttgtagctctcaaggaagtactttcgtggttgaagcgtgatttccgagtattaattttatcgaatctgattgtctggtattagtacaagctattagaaattagaatattttatcatcactttagatggtatcgttgaggattgtaaataacttttattttcttttagtgtatattttttttttttatattttgtctaaacgatctgctaatggctagagtgtctcgtttatatggtaattatattttttcggagtctaatcttccttttaatgttgttgacattattaaagttgtaattgatctaaatgaataaaaatttataattaaaaaaataagacatttttctttcaaataataataattaataacaatttctaaacctcctttatcctccctacaactaaacaaaaggat

SEQ ID NO: 176297 - DNA, 573 bp, Cannabis indica
gtttataatatcttaactaagttgcaatatcggtccagtccaatgtatactccatacattcgaaactagtatactttactaatgtcctggaaagaacataacacttactccaagtgtaagtacacatcatcgctgattatcacattagtgtaaatccaaaacactgatgaaacagggacttagtcttttgattcatatgatcacaatcacattccactgtgttgacgatactgtaattgtgaataaacatatgatctggatttaactgattttgtgtgtaaatgtaataaacatattaaaccattagcatgtaaaattcatgcaaacataaatcacttcaaatttcttatattgataactaatcagattgtaaagagttttatttagggcataaaacccaacaaccattacaacataaaaaagtcaaatctcaaaaactatactaatttctttatgattaaaatttaaattatattataaaatacaatagtactaccttttttttcaagataatctcttggatctttcgacatatatatgtcgtattcttctgtttttattaacatttttttg

SEQ ID NO: 176298 - DNA, 758 bp, Cannabis indica
gtttggttatgagatcacttgaaatttttatgtgtaatgtaaaatacattgtatgttctcaggtttatgcacttggaggttttcttgttttgaaatgggttttggcaaggtggaaggaaaggaagggccagaaggatgattcttctgatgaagatcaaccaccagctcaataggtaactcggtttgacttgtaatatacctcaaacatcggaatattgtagacaaaatcttctctcgagcttttttttggctggtggtttgaagttttacattttctttttcataacctacttttcacctttggtaacaaaaattatttcatgtatgttttcttagcaacatgggtctgtagacttgagtttcaactacagcttaatacatagttcaagtttttatcacataaaatttgctccgaataaagtgaaaccctcataaacaagaatctaattcatcgtgaaaagcaagtgaacaacatgttcaaggttgatgatactcagcactatatttttaattataataagcaatgttcagttttaaattcataacacaagtgtatttgtgttggacggcacggcatatataataattattaatgtggcaacacaattggatctacaatgtgggaagaatgtgtgtggaaacatggcaaaaagaagctatttttgaactcttttggaatgaacattgctaggggcaacctataatgctaaacacccttgacgtggacttacccaatttccaatgaaaaagctataaga

SEQ ID NO: 176299 - DNA, 674 bp, Cannabis indica
gttttacacttgccgttcctcagttgtgggtctgaataattgggcctttttgagtgggggcctgccccatacctaacaaaaagctcaacaatgataagctggtagaatcaaggcccaataggctgttttattatattttgttggaatattttcataaatactcaaaattaaacaaaaaaaaaaaaaaaaaactttacaaaaatatgaatgtctttttaatatctttttacagatttatttatttttacaaaaatatggacagttgtttaacgttattttcctcttactactatattataatatgttatcgcaacatgaaaataattctattttttttagaaaaaaaaagtaactaaaaaatatgtaaaaaaaaaaatccttaaaaattttacagtaaaaatatttttaaaaaattatgattttaaataatttatgttaaaatataccatttttctaaaaattaaatagacaaagaagtcgtgggagttttatttaggaataattacataagacaccatttttttgtaaaatatttacatttttacgttcaaatatatatgtattttttttttatatttttacggtttttcaaaaaataacacgaaaacaacataaaatcaacaagaaaacaacataaaagtaacatgaaaataacatcaaaataacaacaaaaa

SEQ ID NO: 176300 - DNA, 677 bp, Cannabis indica
tggatggaagaaatctcttcactttgtctctcggcgtgttcttctttgcctttttttttttttttttttatgacttttctagcctcctttgtaatggtgttggattcgctaatgtaaaatgtggttattataataaaatgttacaagtaataattgactaattagtacattaatacaaaaattacaaatattaacaattaacttctttattaacttaacttattaattctctaaattataggagttactatatatatatttcaaatataaaacaaggattatttcacaaatatacaaaaacaacaaaaaaaataataaaagtaaagttttacgaaattttaaatattttaatgattttttttttattttatttacagaaaatacggtcttttttatgttgtactcttgttcatttgttgttgatttttgttatctacatgttattttttgttgttgatttgatgttatttaaatgttatttttatgttacttttatgtatttttcttgttattttcgtgttgtttttatggaaaatcttaaaaatataaaaaaaaattctgtaaacgtaaaaaatatatatatatatatatttttttttaaaaaaaaataggtgccttgtaattatccctataaaaattcaataaataaaagaattttttacataatacactaaaaa

SEQ ID NO: 176301 - DNA, 626 bp, Cannabis indica
gacagattataaaataacctagctcttttcagatcttctagattctaaatcacatgttatctaattaattccttaattaaactaacatgaaatcagcattaagtaataatctactcgtcacataagtcatgtaaatactttcgtttcacatagaacatcgattatcctaattttagcattctcaattctcacttttcagatttcgaattgagatcataaagcatgcacaaggtgatcaatcttaaacatgaaattaaacacaaattaagataatttcacaaacaagaatggaggaatggtaattaaacattaactaggcaaaacattaaacaacaatcatcatcctccctaaatgggaaatttagttcagaaataaatccataaccattcctatagcaatattcaacataaataaattaaagaggaataaagaaagaaactgttggtggatgaattctggatcttcactttgaatctctctgctcttcctgccgctctctgctgtgttttagggttccaaatcgcttcccttgacttccaatcgcagttttctatttatactaatttttagggttcgttggacaaaaatacccctggaccgtacgggatctcgccgcggctagagt

SEQ ID NO: 176302 - DNA, 620 bp, Cannabis indica
atatatgatggtgtaattataattattgtatgtaagccacgttttatgcatactaaaagttatgttaaatttacataaaatttagcattagttttactataataataataataataaaattcaagacactggaaagagatctcttctccatttactagagttgaggaatcaagagtttccttgctaaggagtatgcctagactaggaaagatcaaagtgagtgttgaatgtaacctttatgtgtggggtggtgaaataggggcaaaggaggaggttccaaacaaaataaatatatatttttttttgtcttattaatatgtaattgatcatactttttatattttattgatatatttaatatgggttttatatattattaataaaaataatttagtgtctttgttgattttttttttccattggtctaaatattagtagtggcctcatatctaaatataagattagaagtttctcttaagatactacaaaaattaattgttatttttagtgataattttttagtcacactataacttttttgtgactaaatgtgacttttagtcacaacaaaatattacttgtggctaaaatatagtatttagaattaagttgtcactaat

SEQ ID NO: 176303 - DNA, 700 bp, Cannabis indica
tgtgatggagtgttgcataaaaagtaagagtttaaaagttgaaaggatccatcaataaaaaataaaaataataataataaaaaaataaaggatatgaattcgaaataaataagtaatataacattgggatccaacaaggacaatgccatgccatccacatggatttcggtggatactacagccgcgttaaaagtttggcaaatcatgagtatattttaataatataataataaaaaataatatggtgttataaatattatattcaacaaaaattacaagttgatatttattaattttaataacctcctttataatgacaaagtttgcatgattatggtaatttaagtctatagcctgagtctgttcaaaaaaaaaaaaaaagtctatagcctgagcaccaccaaattaaattggtccatttttttaaaataaaaaagaaaaaaaaaaagagtagacaacgaccctagaaaaacagaagggcaagttgtgctgaatgttttgtaatttgtactacagagaaggccaatgcccgagaaatactaaaacgcagttagtaatttttatttgtcaatattaattattagtcaaatttgatataataatttaaaaaaagttaggtgaaggaatagaatttattacttttaatacttattttacttgaagatatatgtaacacccatatgccagtgacggctaaatt

SEQ ID NO: 176304 - DNA, 516 bp, Cannabis indica
acaaatttaatgagcattatttacttttttttttttacttttttttttaatttgagagtctcagagtatcaaatcccgggttgtttttttttaaaaaatgtgttgtgattctcgaatatttagcatcaaatatcagttcaaatattaatggaatttgttttattattattttattatatataaataatattttattattttattaaataaaaattaaaagtcacccaaatatcagttcaaatattaatgagatttgttttattattattttattatatataaataatattttattattttattaaataaaattaaaaagtcacccataaatttctcaaaaaccaagaattttagttatataggcacactttatatagaatagatattaatattttttgtattgttacttttttttttctataagtttttgttagttattattttttttttcttatatacttctaataaataatagtagaaaaataagttgagctattacatttcaaatcggacaac

SEQ ID NO: 176305 - DNA, 1419 bp, Cannabis indica
ctaatctaatccgatctgcacgagtacggatattctcactttgtagattagattagattaaatagtacaaattgggtattttatgaacacccctattctctagctaaacacacttttattttaacaaatgcaatatcaaacgtaaactttctacgacactgtatatatttctttaattttaatttgtttagggagcataggagtaaacatgtgtcgccttgacctatattttaaaaagtctacaataatatggttcgtgtcgtgttgacccataaaagtatgtgaattgtgttgtgtcgtactaatattttaaagagtaagtctggcacgatctatgagcctatatttttgtgcccaactaggacttgtgtcgtggtttactcgaaaagtttgtttttcataaataagtaaatttgttttcttatacgggcttgaattcgggtttcacttttctactatttttttttatgattaatgagttaatgaataaagtaatatgtattttttaagtttcaattatttttatataattttttatctataacaaattaatattagtaaatacatatgtattattattactactgttattataagaatttttaatgtggtgcgtttgggctatccatttatgcttacatattgtgtttttgtagcttgtcatgtcgtgttgtacttgaattctattttttttttttttatatcgtgttgtgccaatataccgtatcgtgcccaaactctatttttttcatactaggtcgtgcccgtgtcaagagatctgaccggtatttacaatactattactaactataataaaatatttatgatgaaaataagtgtagtattttttttttttgaacaaaaagtatagtaaaatgttaaatacctttaattacttctttttttttttttttttctctcagctcaatcaataatgtattttattaatgatttaaaatataaaataagtatttattatcagcgtctataacaaaatgtaaaagtttggcatttataacaaaacgtaaaagtatacatagtctaagttaaattaaagcatttaattgaattaaattataattacacaaatatttttatttagttaagtattataaaattttactaaaattaaaaaaaaaatagtaacactattctcccacaaattatttgtcttactgaggctatctttgtgtctgatagaagtacccatactaataatgttatcgtacaaaaatcattcactctttcaataaaagaaggataaagaaggcttgttagcaattaaattaatttgatgaaagcctatgacaagatgagctgccattttgttaaccattatctgtattgctatgggtgccagaggtgttctgtaaatgggtttcccaatgtattacaactacgtctctgaatgtgtatctt

SEQ ID NO: 176306 - DNA, 751 bp, Cannabis indica
atttattaatatatggtaaaataatgtttaaaatttaattttagttgttgtttattactttattatagaacttattactcttgatcaaaaccctaaaaaatcttaagaacttgtatatagtttagtttctatatattattttttctaaaataattttttttaattaatatatattggaagtcgtcaaattaaaatttaattagaaaaactaattcaatctaattattaaattagggttaaaaaaataattaaattaattggacgttgatcctctatacaattaatttatcaggttaaaggatggtgcctcagttttgttggttggaaagttataactttcacgtgggaggttgttattaatagatttgctcaacatatttattattatatttttgaaatgaaaatttggatattattagcgaatagcatcaactattataatatttgaaagtttggaaacaagagctacgagccatacaatgtgcagccttgttagcagaacgttgtacaaattgaatctcaacagattttaaagaatcaagttaagccttacattcctgaatcaataaaccaaaaggagataacatatggatcgaactatgtaaggcttgtacagtaagaagacaatcagtttctagttgcacttcccaattctaccctttatccaactaagagcctccttatgccaaaagcctccacctcagcagcctccaaacatcctggtttactataaaaaaaagcttcaacaaga

SEQ ID NO: 176307 - DNA, 927 bp, Cannabis indica
  modified_base (686)..(686): a, c, t, g, unknown or other
gtgtaccctaagtcctccaccgtgcatttgggtatggccgtcacttgtgagaagctaaggcaacccttgtcgagtggctctctatggttggcttcgcccaacaatgtgagagtcactccacatgtgcggttcaactacttctctcaccctaaagacctctctcagtgtgttagtgggttgaggagattagcgagatgttaaagacctcaaccctttgggcctttttacttcaccatttgacctttaaaaattttattacctcttggaactgaaatttcttcactttatatttttttcaaacataaacccataaaaaaaagtaaataaaataaattattcgctgttgtaaaattaatttagctcagttaattaaaaaaggaatgggacagggccatgacggaatatgctccttgctcttattatctatgacaatttctttcaaaactcgacagatcaatcgcaaagaataataaaggaaggagaacaatcaatcgcaatgccctaatcggctaagttgttgcttactccatcaaactcaaatctgctccattactagacccagaatttacattgatttcatcacattggactcagcagtgattaaaaatttcaatcttagaaatccaaaaatcgagcccatcaatcagaataattttaagcttcctccctcaatcgacaaaaaaaanaaaaaaaaaaaaagaaaggatataaggtgcatagcgtttggttaggaggaatgaaaatataggaataggaataaaaatgggaatttgtagaaatggatgagctaaacagagagaaaaagatcaatgaaagaaaacaagccttactcaaacagagtaggcaaagcctttatttatatcaattgaatattacaaaagagttccaagaagggaacaacagaactaattgaaaaactacttaaca

SEQ ID NO: 176308 - DNA, 653 bp, Cannabis indica
tcgaggttacagaattgtgttgctttgtctactacagaagctgaatacatagttgtaactgaagcttgtaaagaagctttatggatgaaaaagttcctacaagagttgggcttgcaacaagaaagatacattgtctactgtgacagtcagagtgccattcacctctccaagaattcaacattccattcaagatccaagcatattgatgttagatatcattggatccgtgatgtacttgagatgaaagaattgcacttagaaaaggtgcataccagtgagaatggttccgatatgttgacaaagactttgcctaaagagaagcttaaagcttgtaggcgaagagcgggcttagtagagcccaccaactgaggcggagggggagatttgttgggtccgccccttgttggtgggcttggaccatttaagggcttaaggcccattttgtttgaaacaaaaaaaaaaagaaaaaaaaataaaagggggttagggaagggcttcgtgagcagcaagcaaacaaaagaaaaagaaagaaaaagagagggaaagaagagaaagaaagctagagagagaaaggggttttgccattttgcattgaagatcaagtggtggattctcatccattttagctcaaattttgggtggtgaatccttgc

SEQ ID NO: 176309 - DNA, 668 bp, Cannabis indica
ttgttaggatagatgacatggcaagctctccttctaatgttctaacttttctaatttgtgattttttctaaatttttatttaaataaaataaataatgtaacaaccacatacatgtatctatacattgatataaattgatataaatgcataaaatatagcaacgtattatattaataccatttatttaacattttcatattatcaatttaatttttgaccctttatattcatatttttgattttttttttctcactatcatatatgttttggttgtgtctatatagcttcacttatcacctataaatagtggcaatgaatgtaaaatttggcacggtaataatctgtctttcacctagctatatattttatttttctttcgcaaggtttgctaatcaaaggatcattgctatttcaatgatacgagatggcttgaagagttccttttggcaacgggtggagttgaccttcgtttcaagggaggccatttcacttggcaaaacaaaaggtttaatggtggcttaatccgggaaagactagatcgctgtatggatcctttgattggacatcagaatttcctcaagcaggggttctgaactttcctattactgtctcagatcatgctccaattttgctagacacggttatgttcaagaacaaggatacatt

SEQ ID NO: 176310 - DNA, 1156 bp, Cannabis indica
cctcagaggcaacaacactagttcctagagagtgaacaacctctggtttggaactctcgacctcaggttatgtaacagctaccattacgtgcaccttggccaaataagcttcatcctcctcaccaacattggaatcctttttccacaaataatggagtgtggtcacgagtttcatctctacgctctgcacatgacgtgcttatgcatcatcgataacttcatgaagagtggcctccatggttctctccatttcatttttagtcatgatggtggtttgttgggattccttgacaaaccgagggtatgaagccactaacctgcttaaggttccgacaaccacaaaagccttggaccacttagtattatagtacctttccatatcttgaagtttcctcctctaagccctctccacttccaggtcaatcttcagagaaacttacctttttctactggtcgcaacatcggttgtgagctactcaaattcttccttaactctcttcacgttaagatccgcgacattaacttcaatttgtttcttcttaagctcttcagccttcaccaccctttaggcatccaagaggtcggctcgctcctgagcctctttgtgcttcccggagacagaaaccacttcagtcttggcagtagatatatcatcttcgaagttgctggatttggtaccctataggaggcggtggcctgattgacataagattcaaccttcttctttgccttcctctcaacttcctcaatagcttgtctcattgatgtttccaactggatcgtcatctcctccatcttggaaaccaaagtcatgttctccactttgagttgagtcaactccactatcgtggcattagctgtttcagatgccccgctcagcaatcacggtcatctaacacagtaaaaaaggaaagaaagtgttggaaaaaatgaggttatagggaaaagatatttatcaataatgcaaagaaaaccttactctgacagcctattgcttagtagcgtgcgccaaaatgatgagatcattgttggatgccatgacccacttctctagagtcagctttaaatattgttagcggccaggtcaatcttctttacaatgaagggtgcagtgtcacttctaaccctgtgtgtaaggtcgtacgatctacgacca

SEQ ID NO: 176311 - DNA, 551 bp, Cannabis indica
gaaaggaactccgactttaattaataataaaattaaaaaaaaaaaaaattaagtcattatttatactaaattttaatatcttctaaatatatagttttttttttattaatatgagtaacaaatttagttgaattttttttactctcaataaaaaaattaatataataaaatcttgatttttataattattttgaattgattaattaattaatttatattgatatatattatagttatttttgaaaatatatattcaaaatcattatcattcaactatttgtgttattatataaacttaataaaattaaaacaaacatatttcactttgtagtcgatattttgtccaaagtcgttgcccttattgtatgtaaagactcggtttgaccaagtctattgtgtttatatatatataaaataataataaaataatatatatatgtatataaaaaaaaattcaaattatatacagattacgttttctctctttctctgtctatatatctatctttctttccttctctctcttcaaatacaaaaagaaaaataataac

SEQ ID NO: 176312 - DNA, 896 bp, Cannabis indica
tttttaagtttttattggtattccttcttatctatgataatttcatcaagaagctaattttatcttaccgagaaaacggttttttatcaggaaattatttttttcatcaaaaagctagtttttttcatcaagaaactagttttgattatatagaagtaaaaattatatgagtttttagttttttgtggtattccttcttatttatgatgatttatcccatattttaagttttttcataaagagaatatcatatgtaacaccctaactagcataggcgtattacgtgatttttaaacatactgtgcagctcgttgctaatcaacgaggtttatggaaaacgtgattaattaaaatttttgctttttaattaaacttataaaatatttatacaaaatactcgggatcccgattacaaaaccatttacaaaagtttactgtctatacaaaatacttgtcgcctagcgactaattacaaaaatagccttgctgtcccgaggatcgtacgctccaggcctaaccgccccgacatgtacaatcttcaccggctcgctctcacggtccatcagccttagccttgcccttacctacacataaacatagcactgtgagtcgacagactcagtaagaaaagcataataataatcatacataaatccccgagtcatgatcagacgcccataccccctgaccataacccctaacttgtcgtgtccaacacgatactgagtcctgaacgttcatagggcggtactattgacaagtaacagcctatactcggtcgaactggtcatactccagctgctagtcatactctagccctgtacccggatgtgttacagtatccagcctatactcggtcgaactggtcactctcccagctgctagtcatactccta

SEQ ID NO: 176313 - DNA, 638 bp, Cannabis indica
agaggcctaggtccaggaaaggcttagcacctcgccacaagataaagcaaccgtccaagacctggaagccttctcatccatccggatcatggagaaaactaaatccattaagtctacaggaagaaacctggaagctatctgaagagtctaagatgaatgtcgtgtactcaaggaatatcgaaagcctgctacgaagtggaaacttgacgtctcccttgacgtgtttaccattttggcgcaagatcaaattttgtcccctgtgtcagagcatggtagtgcgcgcacctcttctgaatactccgttttgttcgacaactcctctgagcacttttcccgcgagatgtgacctttaccttacatatgccttgcaccaacagtggtcccagtggtcccagtggtcccatataatctattttactttgatagtgggcaaacttttgacaaaaccctaaacgggtcatgggtatgcttggacccaagctttagcctacataaaccccttcattttttcataaagggggatgaaaagaaaatagccgaagctttgtcaaaaatatcctctaagttttttctttttctaagagaaatctagagagacagagttagggttttatgttgtaaacaccacttgtaataca

SEQ ID NO: 176314 - DNA, 571 bp, Cannabis indica
atttatattcttatatcaatataagtaaattaaaataccaatttattgtgataaatttacttttcttttttttttttaaaaaaaataaagaatgtaaaatataacttattagaaaatatatatttcgaaaacaaacctgagaatcatatatgtggttctttagtaaatgatgatcaaatgctggttgtttgtaaaaatcgatacaatcatatgtatctccattttgtgtctatacataacacaaaaacgaatcatatatataatgatattaacatatagcttaaataggtgataaagatgaaaaatgtacttttatactcttgacggatgacttgttcaatcgctcaagtcggttctctatttccaactcttcatctcttgataactgcattagttgttcttcagatttacaataacacaaaagtgtacacaacattatagcaagcaacataaaaaattctctgatatccatatctacgtaaatagatttgacctgcgataaaaagaaaaatataacagtgataatagttgaatttttttcttcattttttcttttttctatcttcttagt

SEQ ID NO: 176315 - DNA, 715 bp, Cannabis indica
agtgtatgaagcaatcacatctttcttggaatctggtaagatactcaaagagatcaattctacagttcaactgtagtgcctaaaatgaaatgtctaaatactgtcaaagacattagaccaatagcttgttgtaatgttgtgtacaaaatggcaacaaagcttttgtgttcataacataatgatatgtcaggacctagttaggcattatagtaggaaaacaaataaggctagttgtcttatcaagcttgatctataaaaagcctatgatactatagagtgagattttattgaagaaatgttccatgaacttactttccaaagtccttcattactcttgtgatgaattgtgtacgcactcctaaattctcactcatgtttaatgggactttgcacagcttttttgaatcaaaaagaggcattagacagggtgaccccatgtccacactactatttgttttaggtatgtaatacctctctaggataatggggaaaattagagagaagcatgatttcaaattccaccatagatgtgcaggcatcaagataaaccatcttcttttgttgatgatgttctctgttttgtaatggtgactttagagtctttgttatatgtttcaaggcctcaagtctattctcttaactcgggtttacagtcgaacccctcaaatctgctatttatagtgtaaaatgccaagatcagacctgaatatgattg

SEQ ID NO: 176316 - DNA, 589 bp, Cannabis indica
gtttctgctaagaatgggaaatgggaaaagtgagaggtctgtgttgagatacataaatggattctatatttttgggaagggaaaaaaagtttcagaaaagtaaggttaacatataacaataaattgaaaagaaaaaaaaaaggaagctcttgctaaaacaaaaaagcttgtatgcatgatgacaaagatttctgttgcattttcgaaaactagatatgaaatatcatatgcataacaaagttgtttttaatcagttgatcatgattattgttattatttggtagtcaaatattcataattacaaaagttgtcactagatcatgttttttcttgcttactggaaagaatgataaagaaagggttatctaattttttattttttatttttttgcctgtgcaaaatataaaagaagaatccaaaatatgtaatataatatgaatttttagtggagaaaaagcatttgaaatatatattttgtgtatacacattctattattagaacttagaagcatattctaattaaaccactagaatagattattatatagtacccctaagatgtccaatgggatattgctaaatagagta

SEQ ID NO: 176317 - DNA, 543 bp, Cannabis indica
aagcatattctaattaaaccactagaatagattattatatagtacccctaagatgtccaatgggatattgctaaatagagtattgttatcctagcttattacaaaagagaattcactttacattattattttaagagatcaagacaccaacactatattattattattattacaaagtaagggtataaaaattcgagtgtaacgtttgtaaatatataattcaaaaagttaatacactatgaataatatataataaaaaatttggtgcaattatatattagttttagtttttttaaaaaaaaaaaaaaatactaactttttgtagtatatatattttttaaattagactttttgattaaaaatatgtcaatatatattaatatgttttaattattgatatttactaatcccattttaccgtaactttattctaattgttgaaattattcaagtattatattatagtccacacacactacgttatgacatgcgtatataatatatatgtgtatgtataacgtgtgcgttctgggtgggaaatac

SEQ ID NO: 176318 - DNA, 769 bp, Cannabis indica
gtagattttttttagaaaggttgttttaaatttttatataggttttttttttttgaaagtttgttagtaaatttctatgttaaaattaaaaaaaaatagaatggttttaattattattattattattattattattattattattattattattattattattatttaatatggagtatattttttataaaatttaaaatttctaaaaaaaattaataattagcagtttatatatatatttaatttttgtgattattataataattatttaaaacataaattatttagatttataaacaaatttagtattatcaatgacttattttattttgacgtaaatatttatatctattctatataaaagtgtgcctatataactgaaattcttgttttatgagaaatttatgggtgactttttatttttatttaataaaataataaaatattatttatatataataaaataataataaaacaaatcctattaatatttgaattgatatttagcatatttcaactctatatataatcacaactataactctagaaattaaaaatatatatatatataaaataatcgtccattttatttatattatttagaataattcattgtggttcaagatcagaaaaagtgacaaaaacacaaatgtagttcaaaatcatagtaaactaagaaagaatgagaagagattattaagcattaaatattctcagtaaacacactcaaagaatcgcattgagagaggaaaaaaaaaagaataccaat

SEQ ID NO: 176319 - DNA, 630 bp, Cannabis indica
gtggagcgcctacccgcctgggactgagatggatttcaccggaaagaccgagttcaccgtcgtcatgaagaacactctcagagccgctattaaaccaagagtttagcttccataatagtaataatttataattttaaggtttttttttttttttactgtgtataattagttatacttttatagagaaaatatatgaccatttcttttcttttaataaagaagaaggatgatctttgaatagtcatataatcatgcatgtttttttttttttttgtttttttttttttttgagtcataatcatgcatgttttggtatgtactttccttgagaaattttggcctttttttttttttcattgattagattatgaatggaatgtttattgtgagtttatttcttttcaaaatttagttaccgtagtattcatttagtttttgtgttactgaaattgcttcaattttatagagctaatttggattttaaataaaatttttctttaactattgagatggttagatttaaaattttttatttaattttattaaacaagattttgcatggataaatatttaagaggtaaaatttcattcttttgaaagtttagaaaacatgatttagtagatatcaaa

SEQ ID NO: 176320 - DNA, 640 bp, Cannabis indica
ggcaaggatgtacggttcatcttgataccaatgtccacgagtatttatactagttatattattttcagtgattgtcttctttcttaatggattagtgttataccatttacattcaaacaatgacactgtaaatgcaccagtataagatatagtgattacatcttcaagtgtgccgtaataattaaacccttctgttccagcaacagtaacaccactattttgtgtcttccgcttttggtctcgctttgatgcaataaaccgaacaccattcactacacaaccttcgtaaaatgttgctaagtaatcggacccagaagcgagagcgagtaactcatcaccattttgtaaagttccaagcttgtgcagctcatatatctaaatacataaaatgcgtgtgctctaaccctatctattttttcaaacctactatttatacatctcacacaaggacatcgtattcgtccatcacaatccttatgttctgatgccattgctaaaaaggcttgtagaccattccaaaattcatggcaaccacgatttctgattttggtccaagacttatcaattgtcgccatctacaatttagaacgaaaaatgaagtattaaaatatttaaaaatttttgtaaagtcttatgaaat

SEQ ID NO: 176321 - DNA, 835 bp, Cannabis indica
  modified_base (768)..(768): a, c, t, g, unknown or other
atgtgcttcttgattctttgctttatctagtgtgtggtctgatctttagtttgatgggatttcaggcttggcctttaaatttttattgttggattggctagtgcagtgataaaagaaaagagatgataagtctggttactaatgctgtaatggaagctactgtttacatcatcttgatcaacaagaacaattgcatttttaaaggtttctgtgttacactataaaataatgtaagggcttattagtaatttataaagggtgtgaaagaccataaatatgacattatgaggctattgttggatatagatgagaaaatagagcattggttcaattggagtttggcactgattcgaagagtgtattttaggagatttatcttgtctcgaagaggactattatctatcattggtggtttcattgagagaaattacactgagagattcgttgtattaactctcatccatggaagatgaagagattgttcaactctttaaagttatggagttgcgtacggagcaacgttttgatgctgagatgaaggatatgaaactatatctcggagagcttctcgatgattaattggagaaactgatgccaagtttcaaagctatctcacattgatgggagacatcttcggtttagacatctcaggtgtcacctcttagccgaaggtcgaggctacatggatggccctgttcaactagtgataaacatcagccattgaaaaagcctcatgatctcgtcaaagaaacatttcaatgcatctgntcgaggtagatcacaatcgattctagtttgatcaacgatgataacggtggaaagcataacacgtaaa

SEQ ID NO: 176322 - DNA, 617 bp, Cannabis indica
gatataccaaaaaggaaataaacaatataagggtaagaaaaggattggagaatgttgaatgaacaaatagcagtagagtatagagcttatttgtgctgttgcctgacacatctttgttaagtcatcactcatttcgataactgtttgatccaaaattttcttgggatcttcaaaggaacttatgactgcattggcatatgactggaataggaatataaatggaagaaagagaatgaatttatgatttcaacaaacagtcctaagaaaaaaaaaatcatattcaaatacatatatctataaatattgtaaaacatatcaccttgacaaatctagcaaaccgatcaaaaagattcatacgggcaccaagagcaccaccacgaattttattggagcgaactgacttgactacctcaactttgaatgctcccactaaccaaaatgctaaaaatagtaaatgcaggtactttgttaaacactttaaatgaactccaatcaatcaaatacatcaaagctagataatttcagtttcacgataatgtaatgaagttacaaattttgcaaaacaatacgaaaatatcaagactagttttttattatatcaataccactcgaattcg

SEQ ID NO: 176323 - DNA, 586 bp, Cannabis indica
cataaaaattaaaccaataaaatattctttcatgtgatttttttgtgatttagaaatataatttttttaccatcgccaaagtcgatcgaattaagagtttttagtaaaaaaaaaatattaataattttttttatgtgtttcaatatgctctaggacaagaactctattttcagctaactcttttataaaataataatgaatgtcaataaatttagtacgtgagtgttgcattaaattctttgaaatattgatagaacttgtattatcacaaaagatagttaaagtatcaagatcaaacccataattcataatcatttgcttcatccacaaaagttcttcacaataacttcttgctgcaatgtgatatcggagaaatttagacaacaccgcaaatagaaaataaaaaattagtatttaacgaacaacagcgagtactcaacctaaaacggtgagtattcgaacgagactgcccagacaatagtaaaacagtaaaaacaaatgaacacaaagatgtatagtggttcagttagatcatggtctgcttagttcactgttgcaaaagatttctgtcttgtctttattcacg

SEQ ID NO: 176324 - DNA, 677 bp, Cannabis indica
ttttctggtttttgcttgtgtatgcactgtctttatcttaatgatatttgacaaccataattggttaggaactgatgtcacctataaaacactcttagaccatcatcacttgtgtagctcactaatccagtgactgttatatatgcaatcactttcaatggtttttggcttctcaaacagtttaaatttgaatagagcttctcggctgcccactgtttttttgttttttgatcaagaaaagagatttcattaatcaagtaaacaaaattacacaaaaaccagccccaaaaccagcagcctcaagacaatttaaggctacattttacacaaaaattcaatgatagcctgtctttcctagtgcattttctcctatcaatgagcgaaattcttgcttttagcacctgtttaatcatcctatcaacatattcaatcgcaccctgttatattacaaatatgtggttattttcatgaactgtttagggtttggggtattataaaatgtcgtgtcataaacactgtgacagtgtttaaaccccctaataatttctgagtatgctgggataattagtttgacgctgctacttttacaaccattcccctattttgtggtgttgaataagccagattttgagccatatggtaatcaaattaaatataacaggagctgttgttttttt

SEQ ID NO: 176325 - DNA, 671 bp, Cannabis indica
ctggatagctaaaacaaaccgatatgcacaacatttcaggccacgaactgtcaagaaaccaataaattaccttctgtgatctgctgtctgttccaggctacagcattcacaacaataccctttagtttgcttaagagacggggcttactccatttcgcatgagtataaaaggtatctgcacccccactaccaacaactgtggcaatacaatggctcccacccaggatcaacaaaaactactatggatagactgatcgccaggacgacccgccagaaagaatcaatatctatatctcaaacaattatataaccattaatagatatatatatatagagaccgaaccaagccaaacacaataagagaattgtctcagaagttacaagttataaccagatgtaaattgtaagctcttgcgttttgtatgctaatctatgtaattacatgctagcacaattcgcgttttaaaaaagaaagtttcaactcaatttacatcaaccttaattcagacacagcttcaaatacaaaagtagcaactaaactcaatacccagtatgatccttggttcaaaattcaaactgattttagtctttatattatcgaaacaagtagaattcatcctgaagctttccacctgattaaaaaacttcaaaaaaagggttaaaactttgtt

SEQ ID NO: 176326 - DNA, 965 bp, Cannabis indica
ataatagaatcttaataattcacaatattttaaaatttataatttactaaacacttgctagtttttttccacagttctgttacaactgttttttctcatagcacgactacaactattttcccctacaacacaagtaaaccaaactggtcctaagacaattttaaccactaactttaggtaaatttaggtatatctacttataataggtatatctaaacctctcacaacaatgagttataatggctagaaactaaaaaataaaataaagaatcatccataaaatactctccattaaatgagctaaattagctaaggaatttatcaaagcactatcattctctaaatatagctatacactattcattcttttaacttattttattattattattattattattattttgatttaaaggaaaaaaaataattaattaaaacagaacaaatgctacacaaactagcatctacaaaacaataaaagaaagatttatttacatgttacaaaacaaaataaaaaatttgttagtctctctttaaaaagatttctcctattaacaagtagtaatctcactttaagcgtaactctaattaaattattctacattaaaaaaaatatttattattattattatttttctttctttctcttttcttattcttattcaatcatatttttcatttaaataaatatataatatttaaagtaaaaatataaagaagctaattattgtataatgtaaaaatttgagacgaaatagaaaaagtaaaattttagtgtaaatatttttaaagatagagtcgaaaagctaattgggagtgctaagctcaatctagtttttatataaagggttagaaaaccttagatgaaagtaaattttctatttaatttgtttgattgatgagttttttctgaaaattttgattaatcaatgtggtttataattttgaaaaatgttgaaggacat

SEQ ID NO: 176327 - DNA, 503 bp, Cannabis indica
ttgtgttcttgactgtttttcaatggatttttgatcgtgtgtatagtaatattttcaaacttcctacatgttcttgactgtttctcgatgactgattattattttcaacaattattgattgtttttttgcgggttctcgattatttttcgacactgtttccaaatattttaattttttgttattttgattcagttatttgttgtttatattcaattgtagaatcgttcgtgtttctattttattttctctctattttaatctcattgatagaactcttttctttcttttctctctcacttgcttcgattgttttctctcttcggctctcttttttctcactctcactcatcattgtactttctttcttttgctcactcaagttcttttgtgggttctcgatttattttttgacattgtttccaaatattttaattttttgttattttgactcagttgatttgttgtttgtattcaattgcagaatcgttcgtgtttctatttt

SEQ ID NO: 176328 - DNA, 637 bp, Cannabis indica
agacttctattacttgatgtagcatagctgtatcacgaaagaagtataaactgatatctccatcttcataatcaggttctaaacagcagatttgttttcattggagatcccagatttccggggtaagatattcgtgtaatattctaccaatacagtctatcagatgactccttgcacccttttcatgcgaaactttccactttgattcagtaaacaagcttttatgaggctgagtaccagacaacctatcatcaatttcttgaatctcattttcctttttccgtgacttctgaaacctccttgcaaaactattattagattgatctgatataccaaatatcatctcattcaaaatacacactgcagtgcctgcttgacgtagcaactgtcccgagccattcctattataccatgactgccagctctctttcttaaattccttcatacggatttccgaaaccaacttgcgcaagtagccaagaggaatttctgtaataagtgacaaatgtattccacctctaaagtctagcaagaaacagaagtataatttgatgtgagagtaaagagaaaaggaaaatagctgaaataatttcttttatacaaaataaataaatattccatagaaatatgacctgcc

SEQ ID NO: 176329 - DNA, 579 bp, Cannabis indica
ttttagtttctattagagatatagcaagagtttaagttcgtatatactaacataggcactgaaaatgttatcatggtaaattttgaaaaatttcccctaaaattgtttatgcaaactaaaattttatcactttgcagacaatgtaagaaaagtgataatgcataaatgataatgaataaagtgataacttggaatatccatgtaaacgatattccaagttaaaaatagaacatttgcatggattttatgctcaaagaactgctgttacgaccaaaacacaatttagtatatataaaatatatgtattttgtatttataaatctcttttttaacttgaaatccatgtaaaatcatacaatctatgttaggaagtagaatcttactgttgaaagctataagagaacttgttaagttatgggttggtatatcactaggtagcctggaaactagttttacctctttacacatacattccttgacttgatatttattgtcagaaaagatggaaagtccatttaattctactactgaagcattatctccctctgcgtctccaactctatcaccaccttctccacc

SEQ ID NO: 176330 - DNA, 1008 bp, Cannabis indica
  modified_base (978)..(978): a, c, t, g, unknown or other
aaaataaataacaagtgtaccaaaacataggaagtgtactgtagactacctaatcgacgtaaccgcaattaataatttattaaacgaatataatatatactcctgtcgtggttctgagtgtacaatcaaatacatgcacatatcattactttatcctttttatatttatttatttattcaacaaattatccctttatttttatatgcattaaacaatactaaaaatttacttaatacaaacaaatatgtgaacatctttttaaaaaaatgtctaaagactgtaataattaattcaaaagcaaaaattctaatagaaacgtgtttgatttttataattgaatatttgaagtatatatgtagaccataaattattttaacaaatttaaaattaatatttagacgtaaatttgtcacacatctgaatgtcaacaagaagtttgtctataatttatctgtaaatatattattattcaaaaaaaatattatattattatattttaacacacttttttttaaaagaaaaatatgaaaactattacaatagtgttttaagaacttatcttaaatttggttcaaaaatattaaggacttataataaattctactttttcacattaattattttgattaattgaccattataaaattttacattcattattaactataattgtgatgacaaaaataataatttttattggtgctgtattaaaatatattgggatccacattatcaagtgaactaaaatgagggtacaaattttagctagtagattgtattagaatcggttgaaagttgacatagaaatccgtgtggcgtttaataatgttatgagcttttttttggctggatatgtttgtaagttcttcataaaaaaaaaaatgaattgctagaggttacttcgtgttgaagtggtatgcttctaggtttttaattttttgttcctcaaagcggtaaaaccacaatttgatcaaatntttaaaaaaaaaaaaaaatacaaaattgaa

SEQ ID NO: 176331 - DNA, 509 bp, Cannabis indica
taataaaaaattgagtgtaaccttagaagaatagataaatattataacatataataaatactatttatcacatctcaagaatgaaacctcaaacttaagatctaaaatttggagttggccccactgtggcagcacttcgtttttcttcaataaaaatttcacttgcaggaaaaagaaaagcctaatttcgaagctaaaccaaaagcatagcaagatggaagtctcaaaaacagtttcaatttttgtttttaataacatagaaataaaaatcttgcttaaagtttaatttgttacttgtttgtttgtgttgattgttaatcatgatatcacaaaatgataagaaaactaaatggcttaaccaattcacaaaaagatagttagggtgtgataaggcttattaatgatcactagtgatacaaaaatatgttattttcaatccttaactcatattctttttatcaaaataaacacaagagttataagttttgtattcattcaaaaaatttcac

SEQ ID NO: 176332 - DNA, 861 bp, Cannabis indica
taaagcctgataacattagacacattttcttaatcatctagaagaaattagagtgttcagggtgcacttacgcccgtttttctccctagacagtagaaacgcatcaaaactcaacgtggtgtttttaaatatgtcaaattaagtatatggtatgaaaacaaaaccaagccagttattaccgttctcttaagcgactttgtaatatgaatcttcccagcaaaggaaaaataatcgtttcacaccagttactaccacagagctcggataacataccgtttgtaaatctgcttgttctcgaggaaacaccagagatcttaaagtaagaataaagttcctaagtgaagcaggccagtgatccttccatcgggaaaagaaaagaaaaaaaaatgaaaattctaccattagagtagtagcactaatgaaaaacgtatgaaatgtgagaatacacataatgcaacaaaaattcaaatcagaatgcaataaaataaacctgaactgctccagaaggaatttgaagaagattttcgactggttctttgcgtagacactcaatccattccttgtcaattgcttcccacagtctatcctgaaaaaaataaaaacaataactataagcgatgcagcttaaacatactgaaacaaatttcctgcgttttttcaagagaaacaaacagaaagtgggggggtctcttctgccttgaaaaaattgacgacatgagcattcacgaagaaagaataaggcttaaggaaatcaacgatggcgtggatccattgaagtgtctgagcggctgtctcacatgagtacttgcaattggtggcgccaatagtggccatgtccaattaccagtgcgggaccagacc

SEQ ID NO: 176333 - DNA, 616 bp, Cannabis indica
taagggaaataaggaatcatcttcatttatgttaatcattatttaatttttttttttataaaaaaacttaatattattttttgaaaatgaaaatcttgtgttatactattactatacagtcaatccttccttctatagtcacattttaaacatgtgaaatagaaaagtttggtaaataatttggggtacatttattgttattatacatagttttgaatctgaatggttagggggtttattgaaaaagatgtttcacgccatattaaaaggtcaactaaaatttttaggttttcctttttttttgtttgaacaatttcaaatgattgccttatctctaaatactaaaatgtagaatttcttaccaattttaaataataatgaaaaattattggcgaaaaaaaacttaaacgagattggttggttcaactaaacaatttatttttcttaaatacaaatctttgatccccatatttttaatatattataaatgtaaaatatttttacctaccaaaaattgacttgtatatatatgtggtatgattttttcttaaaattagaaaaatagtacaataagtgtaaaatagcatgagtacccaaactaatatatactgcttac

SEQ ID NO: 176334 - DNA, 523 bp, Cannabis indica
ggggatggagatttttttttgaataaactgagagagaattaactcaaggagaagttaatgaacatatcagtgatcgtggatagtacttaactactttccaagtttttaggttgtacctaaattatatattatttttatcttttaacaattgaaaagaatatttataatttttatttgtttattagaataatttataaaataatataaaattaattatggatattctgttaaagaatggtatattctgttaaaataaacagataacccaaaaagaatcgttaaaccaagaattgccgttagataagcacttttaatatataaagatatatatatatatatatattcggagactaacttgccaaaccataattatttaaagagatacgatacaaataaacctaatataatataaaaatataagtttctatcatcattttaatttcttttaacttattacattaattaaaaaataaagtacacctcccttgatgtattttgtccttctcataaactagtaggttag

SEQ ID NO: 176335 - DNA, 794 bp, Cannabis indica
catatgttttggacttaaaaagaattcatacattatatacctataatcatgaaataaatcatgtgaaccatgcaacataaaatgttatttctgatctttattaataagtaaatctgattatatgaaatgagttttatttagggcataaaacccaacagggtgatggtaactcaggaattacttctttttgtattggagaatggttactaggagtactattttcggcttcagtgagtgaggaaaggtgaggatttagcttggccatacggtttaggtaggtatttgtgttagggatggttgaaccaattgatttcctagctagtctagtgagaaaagggtagacattggcttttgaaaagtcactccgataacgatcataacccgaattcgaaagtttatcgcccaacataaaagggccgtaagggaggtcagggtccctaccagcatccaccaattccaaaaaaccactacacttctcaaaagggtgacccagaactccacaatgaaagcagaaaataggaaggttctcatactgaaattctaaccagtgttcatcccgaacgtgagaaggttaacaagctttcctctcatcaaaggttgggagatgtcaatccatactctaattctgataaaagccccccagccctcatgaagagaatcttcatagacgtcaacatagtcaccatccattccccaacttcttagcgagcgctctgaatttgctaagaaagggagacgatggatttgaacccagaatggcaccttggagaaatcaccgagtcgaaacactctgt

SEQ ID NO: 176336 - DNA, 654 bp, Cannabis indica
gttattttttttagataattaatcatatatattataatgtattgttgttgcaataattatcaaaaagttgaagtgatatatctttgaattgatccaattatgaaattttgtgtatatcgtaaagtttatggcaatttggttcatgactagaaaaacttttatgtgatataattaattttaaatttcaggatagtatggaatgcttcactttctaatttatatatttgtccaaaatgtgttatttgaattttttgtatgtgatatctgctctaaatctcatgatcatgacttattattattattattattattattattattattattattattattattattattattattattattattatatcttttcttaacaattatcttcactcttacttcatgtcttatcaactaattaatcaatacagtccatatcaagtgagaatatatatcttatcaactatttttctttttaagttttagtctatataacattctaaaagatgttatatgttataatgaaacatgtaatcattataaaaaattgactacttttagttaacaattttttagttcacaacataattttttgttaactaaatgtgacttttagttcacaacaaaatagttacttatgactagtaacatattatttag

SEQ ID NO: 176337 - DNA, 595 bp, Cannabis indica
cagtctgtctgtccccaataattaattctcgctgaccacgtcctataggtatcatagaatcaatagcaataagtcctgtttgaagaggctcatatacggaacgtctcgaaataatacccggagcgggagattcaattaaacgagattcagaagttgaaatttcacctcgaccatcaataggtttagccagcgcatttacaacacgacccaaaaaagcctcacttaccggtatctgagcaattcgtcctgttgcttttacagaactcccttcttgtatcagcaaaccgtcacccattaatacaacaccgacattgcttgattccaaattcagagcaatgcctatggtaccctcttcaaattctactaattcacctgccattacttcatcaagaccataaatacgagcaataccatcgcctacttgaagtacggtaccggtatttaaaatctttacttctctattatattgttcaatacgttcacggataatattactaatttcatcggctcggatggttaccatgaatatttcttaattctttttttctttcaaacaaaaaaaataatccttagcagtagaaggactaatccgtta

SEQ ID NO: 176338 - DNA, 719 bp, Cannabis indica
agtttattccatagagcaggagctacctcacacctggggctctctccaaagcctgagtaaggtaagcggatttgcaggaaaaccgaccactcatatccagagtccacacccacttatctttacctactccaggggggggtccccactttttagaattgcagcaacagtctcccgatcaaaaaggttattcaatttgaagatattccaacaaccatttgaagacatcaactccatcactaaactgtgacccccagcagagtgaccattttggcttgggccgaaatgtctttaaatgagggatccaagggtcctcccaaattcgagtatcccttccgtccgccactaatttgtacgcacctttcaataggatagccttggttttgaccacggttttccaaaaccaggaatctgagtctctatacccacaactaaggaactattttccttttagatatttcgcattcaacaccttacaacacagagactggtcaccatttaaaatgttccatccccacttagccagaaaggcgagattcatttctttagatttcctgaatcccagtcctcctcaggattttgggagacacattttatcccaagcttttagaaactatgccatgattatctttctcaaaaccccactagaagtcacagaccatattgtctatcttagacgccagacgatttgactgcttcgtcgtttgcatggcgtacaacgc

SEQ ID NO: 176339 - DNA, 703 bp, Cannabis indica
tggtcacgaggtacccattatgtatatatgacccatacacaaatcttatttacttatatatatatgtacagtacaccctaaaataaattccaatgattcatatttatatgtataattaatattaattatatatggcctatattgtaatcacagtacatcacgtgatcaactttcaaaattttataaaatatagaaaataaaccatcaacagatttgtggttgaagtgcatcaagtcaaatggttagatctaagttataatttaataagacaggttagaattaatgaaaattcagaaccttataaataaggtcatacatttgtgatatatatactatttacaaaaatttgagtttgagaggacaaaaggatcgtaccatatattaatagatctcaatttgccatctgttaattttaatttacacgtccttgtccatataaagatatattatttatagatctaaattttaattaacctcaattatatatttatataataattaatttagtttttaacggtaggataaaggtctgcatccgataataaagttttaacctaattaagaattagacatagacttgataaatcatggcagcatcctcttgcagctttgttttttctatttttcagcttttaaaatactttaaaagggtcattttggacataaacattacttaattaaaccacaagaactacttattaat

SEQ ID NO: 176340 - DNA, 640 bp, Cannabis indica
aaaggggaacaatcttatccttacccttcaagtaaaccttctccttatcatgcctaacatttttaaaaaaaaaaagtgaaacataaatagtaaagtaaaaaacaaaaaatacaaaaacacaacaaaaatgctgaaaataaacacttacggatctttcttcgatcggcgtccttcaccaagccacaagtcaaaatcaatctcgtctttatgttctacatcttcaccaatcttatcatcgagaggacacaacccagccacatacttaacaactccataaccagaaccatctttagaactagaaatggaagagtcatactccataaacggagacgtcagcgctatgggtttcttagatttcctcttgtcaacaagaggagtttcttcaacgggaattgggtcatcttcaagttcaatgttagaatcaacattgagacctgttgcacccatctaatatattttttccacaaaaatgaaagaaaatagacagtgttaaacacaaaaagtatgaagaaactaaaaaacaaccaaaaaaaaaaaatatacctcaaaacaaacaagacgacgatccgtaacctcaacattttcagaaactgaaatctgtttacaaggatcaccaccaattccatctgaagacatctgt

SEQ ID NO: 176341 - DNA, 817 bp, Cannabis indica
ttatgtgaaagtcatgaaataaaattttttcaagaaaaaaaagattgaagattatgaaactgtggctcttattgaaaaatgtagtgaatttttgcaaagaaaattaccttaaaagcttcatgatccaccattccttgtacaattggaaaatttgaatgtaaacatgcattatgtgatttgggtgcgagtattattatgatgtctttatttgtgtttaaaatacttagtttgggggaagcgaggccaataagtgttactctttagttagcatataaaccagtcaagcatccacggagtattattaaacatgttctgataaaagtagatgaattattttttttttgatgactttattgttctggatgtggaagaagatgatgatgtgccaataattcttagaagatcattcttagctacaagtcgggctctcattgatgcttagaagttggagcttcgggctcaaggagaagaagtggtctttaatattttcatgaccatcaattatttgaagggaaatgatgattgttttattgcttaagtggttgaaaatattgtatcttagaagcctctagtttttgatcctctgttgatgatcttgatgacattgaagtcatggaatatgtaaatcgggttgactttcaagttccttactataggaagaaatatgaggagttgtgataatggcttgaagatcattgcttctattaagaagcacctgagttagattaaagaccttgccaaatcattatggtatgcttatttggtgataatgaagcatttctgttttttttttttgttctctactgttctggtgtag

SEQ ID NO: 176342 - DNA, 955 bp, Cannabis indica
aagatttaggtatcataataactttaaaaaaaaaaaataactttttagggaatatcgataaccaatcgtggagcgccacctataaaaaagtattaagtactactgatgactaatagcaatgctgtatatatattgatgtgttagtagtttgccttacccatttgtcgagcaacgtaacatcgagttgctcgaaagaatcagcaattagtgttggtttgaatggcattgccaagatttgattgcataattctgtgccatgtccaaaaataacatttacatttaggagcaaaaatgacactctcttccctaaaaaattttaaatatatataaatagggacaaaattttaaaattgcaagaatatatatatatatatatatatatttttttttgagatggtatattattttatctttattctttacaattagacattcatttacaagataaaaaatattgtacttaaaatactattaagtttatgttggatgattaaatactcaacattgtagagtaagagttacgtaactgttagaagagccaaaagtacagtgatgcgaagctggacatgagaataaattgtaccgtgtacacaatatgcaacataataactccacacaaaaaaaagaaacgctattggtgataagtgaagaaaaatatatttaataacttccaactcttatgctatattttggtatgtccgatacaaaatttcctaatttcatccataggattgggatcatgaattcctaaccttttctatttcaaataaagaataaataggatacataattcattcctctagttaacttaaaagtttatccacatggtcccatctttggatagagattcacccaataaaatagttaaatgtagaagaagccgggaataacaaaaagaatgactactattcaaagagaagattgtaaacaataaaaaaaaaagtagagagagaga

SEQ ID NO: 176343 - DNA, 918 bp, Cannabis indica
atatattttttttcaaaaaaatatgttagggttgaaaaaatgtatatctttttttataatttttatttttatttttttaatataattatttacgtgggctaataaaattgtccacttgtacactgtgtccacgttgacaatctaatctcgcagttaacagttaaatttggatggaagttgtaatttgctaaaagtattgtagttttggggttttaccgccaaaatataaattttggaggttaattgcaagcaaagtaaaactattgtggttttgtcgcaattaacccattattattagggtttagggtttatgttgatgtaatataaaatcaatttattaataggattttgccttttgggctgtcggattggagagagaagtgagatcagcagaagactcgcgatcctccatcttcccctttcttggaaccctttactatattatggtaatattggttgaacaaacaagagataaccattctacacttctacacgtacatgtaatataaggtttgaatgtatacattatattatatatctttaatttctttctaataatactgctctactctactcatttaaatattttaagaagtaaagctttaatcaagtgaaagtgagacggaggttggaattaaatctgtgatctttagttcttttacatcatcataatgttgacaaaaatagccatactgatcagctgatgatctttagtgagtaaaacacctttttcaaagttgcatgtttgagttatgaatgtagtatataaaagtagttttaattattggctgtgtaatttttctcttcttttctggttttccttttaatgcagttcatgtctaagtgtcgaaaagggtacaagcaatagtggtcttacaaagaaaaaagaagtaagacacaatccattgctaaaggtga

SEQ ID NO: 176344 - DNA, 579 bp, Cannabis indica
cttacatctatttaaaattacatgattatagttatcttattttaaatttaaataaggtcaaaatattttaaaaaaaattaatttaaaaaatttaatatctgaccttaaatttaaaaataagataagatataatcaaatttaaaaataagatagataattaagcaaaaagatagatatttactaatttcaaattcaaattacactaattaattaaaataaaaaaaatattaaataaattaattatgataattagaattgaattaggaatagtaaatatataaatacaaaactacacaaaaaatcggaacttaaatccatgaaaaagcatgaaaaaacgaagaaaaacgaaaaatttgtgagctgtacggacagtatgccaagcatactgtccgcgcgcgcacactggagggactggccgagaaacctcggcggacagggtgatttgcagcattcccgcgcgcggaatggggtgtcatcagacatccgcgcgcgttgttcagacaaaatcctgtctgaacacgcgtgtgaccgaggttgactcggttccgcgcgcgcgtgaatgatgcacagcaaccttat

SEQ ID NO: 176345 - DNA, 687 bp, Cannabis indica
agtgtgtattgtattagtaaagaaaaaagagagtgaagaaggctcagtagaagttggagaggtgagtactatttagatcacgagtcttattgaattggctattcttgattgaatagagaactaaattatattctattataaatgtaatttgcataagattattaaattaaggacaaaactcatcagtcattgaatgaaatttttcatcccaagttcacatacatccataaagaagagtggttctataccttgttatatatatctaagttggtgtacttctagacaggtctcatctaacgccgtatagacaacgttccaccaattttaaaattgtctataataaatacaaagagcttctagagtatatcccaaaaaatgtattatttattttatatatatgtatattgatttatattatgattattgttttgtagaaattttgagaaacataaataatttgcagattgaaatactttgttttaaaaccgtcaattacaattttttaatcaatttttacgcttaaaaatatatgttggaatattcttttttcaatattcttttttcacgacggtgtttgtaatacttacaacatcatccttataaatttttgaaagatttcgaatagtttacagtgccgaaaatacgtttgaagttttttgaacacgcgtagtaaattggaatatcagg

SEQ ID NO: 176346 - DNA, 721 bp, Cannabis indica
agaggaaagagatatgataaaccagaaatattgacttataaagtcaaattgataatggcaataagtaaagtacgttcacacaatgggtgcttgtatagagtatagctagtcatgacaatactcattctattttcgttcccagtggatttcttttatcttgacaaacatgcgtccagtgtccacttatatactagaaacctcgtttgccctggctccccactgcctgaaaatgacaattttagtaatgattagtggtttaataaattggctgaacaataaaacttcacgaactatataccagatcattatttagtcgacgttaggcactgagaaaataaaaattaaaaaaaaaaaaaaaaaacttcgccaaaaatataataccaaatttccactagaagcatttaaagtaactgctggctcattagtactatatgttaaaattactatacaatgactatactattatcaataataataaacacaattaatactcataaacatctaagatcaatcattttatttagggcattgaataataataaacataccttaatattgtgcattctttaattgtgagtctccttgattcaccacaacatcttctaagcattaagagagcttctggaaagcatccccttgtaaaacttttaccaccatactcacccatatatatatatatatatatccgtattccactaaaaacacacacacatatatatat

SEQ ID NO: 176347 - DNA, 624 bp, Cannabis indica
agtggggttaggtccgagagaggggggctgggtccgagagagggtggctgggtcggaggtggtcggaggtggtggaggtgagccgtggtggtccgagagagggggctggtggtgcggtcagccatggtggtccgagagtgtgcgagagagagatgaagagagtttgagggaggagatagaaagggtttgagttatgagggggatatttttgggattttgaaaaaagtgtcatattttttgtagtgtaaaatgtattggtttaaaaaaaataagtttttaaatatagaaatttccctttagaaattaaggtacaaaattttacaacatattttggtctacttctatttatgcaacatcctttatcttcaacaaaaaagaaaaaaaaaaaagattttcttttccttcaaacccaaaaaaattgaaaatcaggctaaggtgaaaatggggggcagttgcttaaatccataagagacttaatctcctatcaatgactatttttttttcttcttcttctttccccccccaccacaaatgtctagagtaagtaaataaggtacaacttaaaaatgagaaaaagtagaggaaagaattcaataaatcctacaaaattaaaaatttctactt

SEQ ID NO: 176348 - DNA, 626 bp, Cannabis indica
tattattattattatcttagttttttaaatagtaagtttaaaaaatattgtatgatatatcgactgtgtgttttggttgaacatatcattacttttttattatcattgaaatattttattttggtatgacaaaattaaaattgatgtatgatttgtgagatttacttattatgaactgttgatgagtttgatgtaaaagatagagccctaattattgttgattttcatgcacagttgcccccaattccaattatagctcaagatgcatcaaaagcagcatttattattatatgcatcaaaaggttccatccttaggggtgcttttaaatcacttaattttggccacgtcatatgttattgtgattgcccacttacctcatttatttacttgaaaaattgtttacattgaaatgtgcgtacggtgtaatgccccgtctctctctcaataaatactcgatagaaacccaaatttaatattaaatcaacctaaggatattatttttacattaattttttttttctaattttaacaataacactaaaaattgtattaaaaaatatgtttttattattatattattttattaaattatctcacactataatatgtatataaatataaaaat

SEQ ID NO: 176349 - DNA, 560 bp, Cannabis indica
aaaaaaaaattactttaatactcgacaccttgatccaaacccaaactccggatccagctttagaaccgaccccgactcctagacccaaactcaaacccgaccacagtctcagatctcgaatcccaatctcaaatctagcccgacctagaccctggatcttagcaccggcaccgaccccagccccagccccgaaaccttcccagcccagctcggcccaaactccagacccacaatcgtaacaaaataataagaaaaatagatatttgtggcaatataccccaactatacatttagttacacttaagcccaaaacctattttttatggtaaaaccctctgaacctcacttctattttactcattacacatccgtccaaaaatcccagttaagtgccacagtggactatccatgtgacagtcagtagtcccgtgatccgtaaggggaaacaccaggtaagctgtgcaatcccacatcgcttgggaaggtcaagtgggatgattctgaggctgtgtaggtatgagactacacagttgaagagagcttaatggattgattggtac

SEQ ID NO: 176350 - DNA, 576 bp, Cannabis indica
acaaattaattgccataattaagaatactttcacctttacattttaggggtctatttaatgagtgagttgtcctattctatttattcttatccataataaatattaatttaatgaataataaaactctaagatgtttatgtatgcattaaatgcctttttttttttttttactaattttagtaaaatacatggggtttccattattaaaaaataaaatagaaaacaaacacagaaatatgacattttttaaaaaaatgagtgattttgtattgaaatatgtggatagatttttgctaattaaattatgttatttcaccataaacacacaaattacgctgtacagaatgtttatacgctattttaaaataaaataaatatatgtgaaactttaatgtatgattaaagtaaatattgaatattcattattggaagaattcatgattactttcttatgaagtaacttgatttctacttttttttcataccaaaaaaaaaaaaaaaaattaccaagtttaatgaaaaattaaaaaaaaaaactacaatttatcaattataagaagaatattagtaatttg

SEQ ID NO: 176351 - DNA, 692 bp, Cannabis indica
atttttaaaattgaaaagcaaaagtagttttaaaacgcatttttgtttttcaaaaacaaaacataaaaattatatttttgtgattaaaaaattaaaaaaaaatagtataaaattgatagcaaaattcgtaagtgaaaatatttttaaaaaataaatagctatttaaaaataattcaaattaaattaaaaaaaataataatttaaattaaaaattaatatattttttaattattaatattattttatttttaaaataaatatataattaaatattattataatatgtataaagtttttattgtatacaagtagtcctattgtaagagtatagatcttatattttaatgaccacgtgatctaaaatcaatggtcaaaaaagcttccctaccggtatggaacttatgttaagtcctaccatagtcttgccctatatatatatatattaaatacaaacgaaattaaaaatattaataatatactttttgaaatataataaatacaaaattggtaataaatcaagaaattttaatttttactttaacaaataataatttaaattgcaacaaaaatgtaaaaaataaaaaataaaattatttttaaaaaataaaatttagaaaaatttaaaacacaaaagtgaaagttgtcaaccgaccttttttagtcacactccatcttaatactgttttttattt

SEQ ID NO: 176352 - DNA, 999 bp, Cannabis indica
acaaaactcctgatttgccgctccgtaagagttggcctaaaccaatcacacaatagaagaaaaaaaaacaagttagtgggaccccatcaatcccttgagcaagaaaaaaattaaaaataaataaataaataaacaaaaaaaaccgaaataggttgtcggggtggctggtgggagagaaagaaaataaaattaaaataaaacaaaatacgtaaaaatagtgaaagagagagtttcctgaggaaggagacccaaaagatggtcgaagacaacgtgctctgagatcatcctggaaaaggcagtaatagagaagaaattaaaaaatacattttttgaaaaataatatgaaatcaaatatgatttcatattattttttgtttgctgccttttgagtctcaatctccacttctatccccagaaactttggagttctatttcgatttcaatttcaatttcgttcattttgtttgtttccagcaaataattatatatatattaatcttaataaaataataaaaagtttgtgttgatcaacatcctttttggcccttgtgcatggtaaagttcactattttgtgtctctatctatctttttcaaataaatgtctctcttgttacgttacttttctccttaggggatagcttgctgaagagggtatttcatgattcttgttctgatgaattctgtttcaatgattacttttcagcgtcatccaaattttgagcgtttctgcgttttatcgatgaaaagggtgttgtaaaatcgaatcaaaagtcgtaatgatgagagatccacatgtcattatgattgttcgacgatttgtttataacatagtttttgtctaggtagcttttctttgtatttttttaccttgttttgagtagaagagcgacaagaagaaagagaaaacggtaaaaggaaaataaataaataaatatcaaataaaagtaaaagaagagaaacctggcgattttgtatagtacattgtgtagcgtcgtggc

SEQ ID NO: 176353 - DNA, 803 bp, Cannabis indica
agatatggagtcaaaaatagagcaaaatcaaaattaatgtgtacaagtattcctaagaagctaccactgtcagcctaccagaagtcatgaattttaacaatgctaactgaaatttcatctgctcattataaagccaccttcactcaaaatagcacaacaaaagtaacaaagaagtattaaaggtgtaaattttaccaaaagcaatgagaattaacaactgatgattgcattctgtttcagtaggtgaaattgagagagagaggcttttgttgtgtttgcctgtatgggtgatgaatgggttaatcgtaaagattgtttaattttttgggtttaattattgggtttattttttgaaatttgaatgaagcagtgtaaaaaaatttcaaaaattgtagtttgttagagagatatgtaagttaatcgtaaatattatttaattttttggtttaattattgggtttattttttgaaatttgaatttagccgtgtaaaaaaatttcaaaaatggtaggatttgttagagagatatgtgggtaagatattttttttaatttaaaaaagattgtttaatttttgggtttaattattgggtttatttatttgttaacgtttaacgttaacagtctgttaagttaatcgtgtaaggctaaataaaaaaagaatcgttaaaccaagaatcgttaaaccaagaattgccgttagataggcacttttaatatataaagatatatgtatatactcaataaaaaaattgaccaaacaactctcctaaatcctatttatttttcttcttctttttttct

SEQ ID NO: 176354 - DNA, 815 bp, Cannabis indica
aagtacaactacttacaaaaaaaaaaaaaaaatcctacttagaaaacaaaatccaaaatctattactgatttacaaaaacatatttgtttggcatttacaaccaacatcaaaaatttccaataacaaatctaaataaaaacatttttttaggaaatttgctataaatggtatgtaattgtgttttttttttactaaggtgatatttgagtttaatgtgtttcatcagattatttttgtgttgtttttttttttttttttttttttatttttttttttaaattatcccattttatattctccaaaacagatttatcatcatggattagcatatacacagtctttttattttttaaaaaatgttagaaaaaagaaaagaaaatccacatgttttgggtcatagctttgaaccataacattgaaagtagcaatttatcatgtaaaatataagagatgtgtttgtactaatttggtttagtttttgttttcacaaaaaacctcattttttgaccaaaccaatgttttgtagtaccataccattaaaactaccaaattttcatttaaaatgtattttaaatgtttgtactaatttagcatgggaaatttgattttttatgcttacatttggttaaaaaaaattttttctaaacaaataataactaatatttgtaagatatgacaatttttatgatatccctaaaatactcccatttacatcaccccatttacaccatcggaccacccatcgggccaccccgtcggaccacccatcggactaccatcggaccaaatctgctaccaatttttttttttttaa

SEQ ID NO: 176355 - DNA, 566 bp, Cannabis indica
gaagaatttggtaattctaacatgttagtggagtttgacatttctggtttgctatcttttgaggtaaatcttaatatgtttctcattttcttctatttttcaaaattgtattttcaaaaaccaaatgatgttttcaagaaacagtttttagacttcaataaaaaattaataaccatatttatagaaagaaaaatattttaaaattttgtaacaaataatgagttaaagtaattcgaaagagtgtaagcatttgtttactgaaatgacaactaatttagtggcccataaatttgttcgagcttctatttcgtaacatggttgagttcagtttgggggatgttccaactgagttaccatgttttagtagcagaagttgatggttaataaaatttgattttcattaaaaaaaaatgtaactcgaaagaaaaaagcaatagaaaacttcagtatacaactttttgttgttctgatttgctgtttttttgtaacttataaaaattattttctgaaaacaatgtcaaaaaatagttgctacataagactgagtagtaattaacattttcttt

SEQ ID NO: 176356 - DNA, 869 bp, Cannabis indica
atgagatggatagtttcgtaacggtccaggcattacaaaattagattcatatgtcatccccttttggtcttttggtgaaagattgcaagctttttattagtctgagttaaagtctgtttaaaatttattttgttaagcaatctgtaaataaagttgttcattatgttgtttgtgtctctagtttctatccagctcgtgtgtttagtgaggatgatgctcctgttgaacttctttctattgtaatagctgattttgttgattgataaagttttattattgctttgttggttgcacttaatttggacgttttattatttttagatttccaataatagatttcatatgacttgcaataattgtaaggtaaacaagatacttactagaattataatgtaaattgttatataaaaaatctttctaattattaatatataaaatatcctttatagtaaaatcaaaagtgaggtaagagtatataatgccttatatatcaccactattgctcccacattgtatctacaatataatgttataactttagtacaagttataataacaccaatttttttaatattaaccaaacttgtctacccatataataaattaataatggcttggttgcaagtttagtaggttattctctaatcttgaatggattataataattataatttaggggtgaaagagaggagtaccttactaactttgtatgagatgaaagtagggtaatatttgcaagaaacacaagtagagtgaaacagaaataaagtaatatttgtatgaaacagaaggaaaacaagacgagcgatgagatgaggtaaaaaaaagtaaataaaatgagtgtagagagtgtaatgatcatttacaat

SEQ ID NO: 176357 - DNA, 695 bp, Cannabis indica
ggttggaactagtgaaagggatagtgacggtgaatccgaagcccaacaaaggtttgacatcaaaactcatcgactggtttgaaaatgtgattattaagcttatgtatgactcttcacaacatcaacattatctctccggtaacttcacttcggttcctgaaacacctcccataaaggacctcccagtaatgggttaccttcctgttagtatttcttgccctttatgaacttcgagtttattatattttttaaataaagattgaaactttggatgaaaatcagatctttacgacttgggtttgtgttgaaattgttaattgttttcatatgagaccttttattgatctgggcttcatttttgtactgcatgcagttagtttttgaatattctttgttcatgtttttaggaatgtttaaatggagagtttgttcgtgtgggttcaaattccaagtttgctccagtagctggatatcattggtactatatttaattttttttttttttgaaagaaactatatttaattgaacaattggaaattatttaagttctctgttcagctgtctgagctcatttatcataataaaaaggctaattagaactttgcccgcccaaaactttgaacatacactaaattatacccttcgaattttcaggccgttacaaattactcacgaactattgaaattgttagat

SEQ ID NO: 176358 - DNA, 788 bp, Cannabis indica
agtgaatgaggtttttgggttgctgttagttgagtttgcgttttttttctttagagaggtcgttgcaacttgcactaggcaatttccaatctaagctctctgatttatcgctgcgtggcccattgaaaaaaataaataaaaggaatatttatatgtaaaataaaaattggaagacgtatatttcgtcacagcgaatatttatttcagacagaaaaatatacttttgttttgacaacatttgaaatataattatgacataaagttaggacaccgtagtgtaattttgattgcctactgcatcacatttttgttctgtaaatttatttattcttggagttctattggtttttttttttcttttgtaattttttgtttgggagcttatttctaagcattttttatttttggcctacgcataaattaaattttatttttctatatgactgtgtacactaattataataagtggtacatttttcaaaaataaatttgcaaataagaaaaaaaaaaaagaaaaactagttagttgtatgagtataaaatcaaaataggcacatgtgtatgtgtgggggtttgggattccgatcaaccgatgccaccaacaaggctttctaatgaagtgggcttggaaggttttcatggacaacgatagtctttggagtcaagtcgtgacagccaagtactaaaaaaatcgcagctcctggacattgagattaatacctcagactctcttctttggaaggccatcatgcaaaactagaaagtctatcaatagaggtctttgcagg

SEQ ID NO: 176359 - DNA, 758 bp, Cannabis indica
ccttccttgtaggagtgtacgtcgctcggtttggtcgatttacgttacaatttattcaactcaacgtaaagatcgagttacaaaaatctaagtgcaacccgcccaattaaaaaaaatattcaacccgcctaatgaaaattggtcagcttagtcgagttaacccgcccaaaccaagcactaatatttactttttttttacattcaattgttatattttagttaattgtgataatgagagaaatatatagattgaattcaaagttcaaatcaaccaccataaaagaaatatagtagtttgaaatttttatctttataaatatataatatagagattatatataataaaactatatatatataaaaaaaatcctcttagtcgggttggccagatcagtttgggttgattgggcaggttgatattatttttaacccgcccaatataaagattggacgagttatattattgttaggtttttcagtttgtattttttgtcgggttatctcgatttggtttagacgggttgttcgggttggcagtttacaaaaatttacgtacagccctacttctttcgtaaaatttacatataagatatagtctttatttagaatcctattaaataaaccaattaattaagactacaaaataatattatcccagttaatgtaaggatcatgggcctatgtaaccaagttcttaataagtagttctagaatttaccaaaattttctatctttctaatttctcctgactccactat

SEQ ID NO: 176360 - DNA, 812 bp, Cannabis indica
aatcaagtaatggaattaaatacaagacaacataccattagcaacatatgggtttatagaattaaatacaacccagacagctctgtagaataatttaaagctcggttagtagaaaaaggctacacacaacaacaaggtgttgattattttaaaacctatgcccatgtggccaaatttagcacagttaaactcttacttgctcttactgtcatcatgcaatggcatctacaccacatggatataaataatgtatttatccatggtgatttacatgaagatatctacataaaattttcacaaggtgacacccctaaaggcattgttcccaaaaatgcagtctgtaaattgaagaaaatcctatatgacctcaaataatccttgtggtatgtgaaactaagcaataccatattgcaacagggatttattcaatccaacaacgataagtcccttttcataaaacaaacaacagacattttacttgtcttattaatatatgttgatgatatcatagtcgccaccaatagtaacttggctcttcaataattcacatcaactcttgatgcttattttaaactcaaagagcttggtcctttccacttcttcctaggtcttgaaataactcgctgcaatagagggatattagtaacccaaagacccttttaccttacaactcctacaagacactggccaccttggcacgaaactagtttccacaccaatggagcctaatgccaagttaaacaatgaagttggactactgccaactaatcctactcaatacgaaacctaaattgggaagctaatctatctca

SEQ ID NO: 176361 - DNA, 795 bp, Cannabis indica
tattgatcgcagtcgagtactgcacattacagttcaataatatatccatcttattacttataatagaatatcatatcatataattataatatatatataaatatatgaagtcgatttttgtgttcaattgaatgtttttgtctgctgtatcccatgtcatctctattaagtttttttattcgcacatatatctatatatatatatatatcttttaacacatgttaaaaatacaatatataaatcgtttcatttcgacacatgtataaacatatattatatatgtacatatatatacttgtcacaagatcgatcgagctagaaaaacattttcatatgaattcatcagattcgagcagtgaatccgtccatcttattttttttgttttttttttttttgagaaaatccgtccatctattcattcaatcatttcgacattaatatatagtaatttgtgttaataattgaatacgataattggacgtgaaatgctttttttttttttctggctaggtcatgatcaataaagtgaagaactaaaccctcaaaatttttgatgtacattaaagataaaatttaatagatggtatattttatctaaatatatataagttgtgtactttgtgtttttattaatatataatgcttattaatttaatactttctattttaaaatcatatatttgataccttcaaattaaatttatttcataaaattttattaatgcaatcaaattatctttaattttataaattctaaattcaaatttcattattacatatagcataaaattat

SEQ ID NO: 176362 - DNA, 730 bp, Cannabis indica
aaaaaaagtgcgggaaatttcccactcaaatattttcaaaactttttagcggcggactttttttgttattagcggcggaaacccgccgctaataataagaaatctgacaattttattattagcggcgaaatcctattattaccagcggaatagtccgctgctaataatatcgtataaaaaaatactatcagattcattttccttcattttccattctcttctctctcaaaaacttctcctctaaataattcttaaagatttaaccttcgtccttgaacgatgccaagggtactgccttcagattttgctctctctctctctctttgcgagccttagtgaacggaacaaaactaccttctctcagcaaccatcttcatggagccccttcctttttcatggtctcttgtctctctttctagtgagataaatgtaagtttcaatactttctttacttttcacattaaaattatttagatgaatatataatttaatgggggatatgtgtatattttcaagagcacttcccgcccgtctctcttatttcccagatatatctttgtctcttttcttttaaaatttatttatttatatttaattttgttttctctcagtgaatctattttgtagttcatttttaatgtctttaggattatttggattacgaaataatgatttgtctgtagtgtagttttcttgattctattaaataaaaaatatatttttaattcta

SEQ ID NO: 176363 - DNA, 1248 bp, Cannabis indica
atatgtattattttatttatagtgcaatctgatcaacattaaatacatattttatattttgaattcaattcaattcgtacaagagttctaatccaatcaaatttgcaaaagtacagattagatcgatttttttaaattgattgctttttcaatattaaattatttaataattattaaaaaaatatttttttttacataactaacaataaataaaataaattattgttgttttatgtctccaacaataaattaaaataaataaaataaaaaataacgaatttaaagaaaaaaaattgtacatagaaatatttaatttattttaaattatatgtagaaaaaaaattatatataagaatagaatatacatttttatattaaaatgttaattatatatatatataattttttaaaatttatacaaatatatgtgaattgaatttgataggttacttttatacgttaattaacatccaatttgtcaaaattttaaattttccaatctagtttaatctaatatgcacacgtgtaaatatccacactttgcagattgaattaaattaaaattgtgcaatcaaatttgattgactattttattatattcctacttttggagtattttcactacaaaaaaaaaatattcctacttttggaatgatttgaaatgtaaatttaatatagtaatttataatataaatttttatttaaaattaatattttagttttatttgtaataaattaatagtaatttaataaagaagaagaagcaaagccgttatcaaagtcaaagagatcctgcctataaaacaatcttaccaaacatttacaatttgataaaagctaaaacaatatatgggatatatgttagcctaaaaaatgtcctcactcaccgtaccaaacataataagttattatcttataatgagatatttaatttaattaattaatttatattattatttatttatttttttttttaagaaaacagaacttcattcaaagttaaaaaaaggattaaaaccttacaagttcggtagaagaataacacaaacttattaggagatgacataaataacagctaactatacactgatggtgaaaggagcaaaaaactcaagactcacacagaagcatttaaaggaataaatcccaaaaaaatccaaagaccaactccaaaaaactaactaaactaaaattcaaaaaataagtaaacaaataagatagaacaacttcaaagaactctccaaaaca

SEQ ID NO: 176364 - DNA, 731 bp, Cannabis indica
atagatatttaggtttcttgaaaacctaatttttcaaatgtataagcttaattttgaaattaattatttaatttaattttataatcttcgaaaataatattttattatttagatttttcaaaaattatttaattatttaattaatttaaattaaataaatcctatatcgaactatccaatttgttgcatgtgtgtgttttatatattgtttagttattaaacttgtttttataaaacctattattgtttgatctaaatttccatggttaacttgttgacagatccaatgatctaattttaactaatggttccattgtcaatagcttaaataaataatttgtaataggtaaattttgcaatcttctttcatctgtgtataaacctagtaacatgataggaactatccaaatcagtgtgtctgtgtataaacctagacgcatataagaagcccatttaatttttgtaattaaaatggactaggttgctaaataaaattgtcacatttgatagattttatttaggcccaattagtattaggcctattcaattaataacagttgtttaaattaaggttaaattcctctcctttgggccttgtgtgagagttagggggccattagtagtgggtacgacatattgaacccagccctccctcacatgaacaaccccaattgtgaaggcccatttgcctaatttgaataactgtaataggttaattaaactagtttaac

SEQ ID NO: 176365 - DNA, 507 bp, Cannabis indica
aggtatctaataccatcatcattaaagacaaaagtgtgtagaaggaaccaatgacctctaatttttaattttttttatactaaaaaatgttttcacatttcaatgtctttcaaataaatataatatttttaattattatttttcatagcctaaaaaaaattcaactccaaatattaaatatctcaacatatataaacccttcaatctaaaattcaccccttcatacaaaaaaaaattgtaacaataatagcatttaattatatcatcacaactttttttgactaattaaaaatttttattgaacgaaactaaaccagaatagaaatcacagagggggctgataggaatttcctatcatttcggtacacacaatagcaaagtagagaaaatagagctgatatattgatattggaatgaaaagaaaacaagttgctgggtaattcgagagacccagctctctcccaagagctaaatgctcactttagcaaaataatctctaccctattc

SEQ ID NO: 176366 - DNA, 535 bp, Cannabis indica
aaaaaattttaaagacactctattctaataatatttattttatatattcaaaaaaaaaatatatatttattttatatcttttcaaaagaaaaaaaaattgattttatataaaatttatattttaattatattaagttttttttttaacttttttctttcagtttatattcttagaaaatatatttattgaacaaaaataaattatattttaaacattatgataaaaatcaaaaaaaaaattatatgaattttttttttaaaaaaatatatacataagtgaggaaaaattatgaaaataaaagcaaaataagaattaaaattaaataaaattacctcatatattattttttttttcaaatttagggtttggatttttaaagtggtttctccggtagtttttatgtggattgttatacgatttttagttgtcatttaagttgctccattagttgcaatatgagtttctacgtaaaattccgtaaaaaatgtaaaaaaaaaaaaatgttttgaaaaagtaaaaataaaaaaaactcct

SEQ ID NO: 176367 - DNA, 801 bp, Cannabis indica
aagtgtagactttaatttctcaaaccaggggcgaggggcctgttttaaaccgtgtagcgacttttgcaattttcacacatagttaggtttcttcttatcctcaaaactagcaggctggtacgtataaacgtcttcttagagctatccattcaaaaaggcattgtttatgtcgattttccttacatcccaacttcttgctacggctatagtgatcacaattctcactatagaggctttgacaacatggttaaacgtttctccatagtctattcccggtctttgattgcacccctttgccaccaattcgtccttatacttttggaaaaagctatctgagttccatttatgtttgttaacccatttgtttcccacaacattcatatggggtgttttggggaccaaaccccaggttttatttttcaccaaggctgtattttcttcatccatagcacctctcaatccttcatgggccaatgcttcacttactgaacttagctcttcactgatgtgattccactttgcttgcccaacatacactttaagttaaatataccagctcttgcccgagttatcataggatgagtaggagcaaggcttgttatagcattatcatttgttgccatttcttccacaacattatcaatcacctgttgctgagtatttcttaaggtggagcaccaacatcagtaatttcaatattaaaatcatcaaataagttattttcagcatgattattctactgttagtgagttatgatcaaattgtacctcgtgggcagcaagaagatgagttttattagca

SEQ ID NO: 176368 - DNA, 690 bp, Cannabis indica
aaaactggtttcacatgttttaactgttctgtaatggggttgctccatttttatgatattattgtatattttttagtttgtataaaaccagttttattattgtatgatatttgaacaataatttttattttattttaaataatcagtttctgacacacatattattttattattttcataactggttttttaagtaacagtttttataactggtttttttattgttgttcacaattgagttttaagtttcaattttttatttaattatttcaagaaaccgatttttattttggttgttttactaactggtttctcacattccacaatttttttttgttattcttttatggtttttattgcacttttgtctctttaattttctttgtttctttttttctctttgatttaatttctgattctctttgttatatttgctgcacattattgtatgtttaaatcaactctaattttgagcaagcaaataaaaaaattaaaatgccaaaataaaagaatgaagttagaagtttggttattaggtattgatataaaattgatagtgttcgaaactggtttttaaattcaatatcatttgtaaaagtttaagtgcatgtttggcatcataactaaaaaaactgtttttttagttttttaaaaaacagtaaaaattgtttttaaaaaactaaatttggt

SEQ ID NO: 176369 - DNA, 566 bp, Cannabis indica
aattttaatttatgattattctttatattttttatttcaaaaagtcatattttaagtagttgttaacatttttactaaataagtaaaatattataaattataatcgtttaccatttttcaataaagctggaataatattttaattcatatttcatcaccttaatttttcttatttctttatgtaactattattagatatcattattaattactaaaaaaaaattgattacctattattcattaattgaagtatatttagattttattatatcattatttataatatattgttgtgtataattttttttataagtatattaaataccacttaaaatagaaatgaataaaattagaaaaaatagaatcctaaaataattggatgttgcctcaaatatatattagataaatatatagatttgatttgatgactcaaaataataataataaaattataattaattggagaagattaagttatcaatcactcatatatttttagacaaatcaaagcgaaacgaataaaaaatattttatttatatctcacaagcatcaccaaaaatagctc

SEQ ID NO: 176370 - DNA, 682 bp, Cannabis indica
ttagtgttggatccctcactggttgcgaaaaaaagaattcactccatagataataagtgtggtaagaaaggcaacacgatgatcaagctaaatatggaaaaagcttatgattaaatagatttcgatttacttcggtagttttgtaagtcttggcaattggcatccaaccttctttcttagatttgattaaaaaaaaaaatttacacaatgcacttaaaattagatatttttttttacattgttacggattctgtttttttctttttttgcaggtttttcatttattttttcttttttagaaaacattgttttcatgttgatttttcgtagcagcaacgtgaaaacaacggaaaaataacacttcatattttctatataaaaaaaaataaaatccatcaaatatatataaaaaaattgtacattcataaaaatgtaatttttttttctttttgtgtatttatgaaataatcccattaaaaatataaggtatttatgaatttttttcccatctatgtattattgtgccttatgaatttttcaatctattaaaaatagtcttctaactattcactattgatcatagtgttgtaaattgattattttattaagttttgttacacgtgatgaataaaataatgatgtgtcatgtcaacgctacttatataattaatttgaaaaaaat

SEQ ID NO: 176371 - DNA, 675 bp, Cannabis indica
cccctaaatatcaacatgaacaagatcaaaacaatgcttagcaatgttgtgattagaaatgaaaggcaattttctttgtttagcataaatggcaaatagaacaatggaactgattgctaggataatgactgaatttcagctctttattcaaaggatgagacttaatacaagaggggtggcctaatctatagtgccacactatttcatcacaaatcttagaatctgaaaaatgaaaaaacagtagcaggatgacttgtttcctgaggcagtttcaagtaataaaggtttcctatcctctcacccatcccaatcggctgagtcctcataatgtcttgtatagtacaataattaggataaaaaaaaaaaaaaaaagcaagaagcagacttggttagggcaatgacaaacaaaatataggtttcaaaagtggaacacacaacacattttttaacacaattttatctgtcaagtgaatagaatcagtgcaaacaacagccacatttctaccatctggtaacttaacataagattgagaaggatttttgacaatatcaacaaacaaagataagtcagggcacacatgatgtgtagcacctgtgtcaataatccattttttttattatgaataaaattggtcttaccaaagaaatgtgaaacaattggctgatctgcattag

SEQ ID NO: 176372 - DNA, 557 bp, Cannabis indica
attttatttttttgaaaaaatatgattgttaattagtttaatataattaatttgttgtattgtataattaattaatttgtatttatatataaaccttgttatattcgtgtaatatacatgtataacttacattatatcttatagacgctatggccccacatgtataatttggtttgacaaaagtgaaattaaaatctattttttttccttattttatatttctagtttttataatttactagcatatattaaaaggaaaaggaaaattatcaaaacaatttagtatatatattaaaattaaactatgattacttttgtttatatgagttttttagtggttataattataaagttaaaaattaaatattataggaagtaaactaaatatagaaaagagtaatggtgtaacgaaatgaaaaacgatgtgggaccattttccaacaaccattattttattaccttctccaaagttcctgagggaaatgctaaatatacatataaatatcaaagtagaataattattatttatataatttaatattagtttttatttatta

SEQ ID NO: 176373 - DNA, 744 bp, Cannabis indica
atatatcaccttacacgacatgtgggccatattttaaagtccaaaattaatttcttaattttaccataaataaaatttattatttattctatcaataaacaataattgattaattcttattatctcttattttacaaggattgatttaaatattattttctctaaaataatattttatctttttaatattttttaagaataatattagatttaactaattaatatagttttatctaataaaactaaatagttaaaaatactattaattatacaactcataatcgttataattattcaaaataataattttataaattactattttgtcctaaaaaattgacttctcataaaaattaatacacactaaatcacatacactagaagtacagtgtatagtaaatcatacttaatagttctatatcaaagatttttattactttaatatattaccgacttgttttatttatattgtataatcttaattctcttatatatctatacaagattataccttctcgatatgaatacgaaatttttagatatttattatttatactattataattaatgtatcatttatcttatatttgtatttcatatattctctaatatattctctattaattactagaggcatagatgagtgagctagaagagtgaggccagcaacaacatggcaatttttatgttcaacacgaccatcttttttaggcgtgcgaggacaagaaagcttatggagtatgc

SEQ ID NO: 176374 - DNA, 719 bp, Cannabis indica
cctgaagaaataaaagctttgctcgatttaccttcatcaaagaaaccaaaatagtttcattacaaaaaaaaaaaaagaaaccaaaataggtaaaatcattgacctgaaaagtggtggcattaaagagcttcatttcaaaatcaacagacaattgtcttcaattttttaatgtgttgcgaggaaataagcagtttgaatggagagagaaatgcgagaaggcatttcatggaattaaagaatacttgtcaaccccaccagtgctttcaaaaccattagtcggcgagatcttgtatttgtatttgtcagttttagaaaatgcaataagcgcaacattagtgtgagaggatataaaagcccaacaatcagtttactacgttagtaagtgtttactacgtgtagaatcaagatatcctttacttgaaaaactcacactaattctaattctttcctcaagaaagttgagaggttaatttcaagcacacgcaatccatgtattgactaatcatccattaaggcatgttttctctaatccagatgcctcatgtcaattaacaaaatggtcaacagaataaggacagcttgacataacttatcacccacgagcagccatcaaagggcaagcattgttagatttttcgttaaatgaataaatgctaacaagatacgaaggaaatcccaaaccgaagaatcacgagttatttttgatggctcatcaaatg

SEQ ID NO: 176375 - DNA, 838 bp, Cannabis indica
cacatagacatttagaaatattacaaacagggctatacttgcaaaaaattgcaatcctgtttattacaaaattccatcatacaacatgaacattgacacttcacatataattacatatatgaatttgtcaaaaaaagaatcttaatttttattattatttttttttttttgtaaaaataaaaaagaagaagaaaaattttagttaaacagtaactgcccaaaatcaagaaattgcatatttactttagaaattaatggatccatagtccctctataagaagctgcaaggccaagcatcaatcccacagttgtgctttcatgttcctaaaatcaaagtaagcaaagtaatttccaggattaaacatacaatggaaaataaatttatatgaccacaaatatgaacataaaatattacatggggcggcaacccaaaaaatacagtatgtatatatatagtaactttgtatgaattacaaaacctgattgtaatactggaaaatatctgtaagacttaaaacacggagataaccgtgcaaccctagtgcaagaagtagtccagcatgaatagcatttggctcttcaggtttgttgtatataatccaggttcttgacattttaccctgcatacaacaacctccgtgtctctaagaaaactcaatagatgtaatttaaatgttattaatatcatgtacatatttcacagcaagacaagtgagaaaaagaattaaagatagcataaacttgagatcactattatttcaaggtaacgaagaaaattttgaaatgatacgaatactacaaagcatcaagcagaccatttaacagaagaggtacacac

SEQ ID NO: 176376 - DNA, 672 bp, Cannabis indica
gggagaactaaaaaatttaaaaaaattttaaaatttaaaaaaaatagaaataaataagatagaaggcttgtatttttttttattattattatttttctgaaaattattttttttattagttattgaattaattaatatttaatgtgaattaaaaaatgtagaaaaaaaaaagagaaaattattagagtagaataaagctattttagactgtcacgtcaccgcctcatgcttctccaagaaccttcactcaatatctacttaaacttagaaacttatttattttcttattgttgcatgcattagattttcctgtaggataaatgatagacgtatttaataattgataaatgaataaaaaaaaataagaaagaaaatatgaataaaataataattaccttctcatgaataaaaatcatatcaagacttatcaattctccatatttcttagtattaagagactcccacattctacaaactctaatctttatgctccaactaactgtattagtatttaagtcggtaagaaaacaatacaccatcatgagagaagaatagagaaggtaagtagtaaagtgaattatgaatttaagagaaatagtttaggatatatatagagagagttttaaaaaataattaaaaaaaaaaaccaaaaagccaaaaaaaatatatgat

SEQ ID NO: 176377 - DNA, 771 bp, Cannabis indica
tggtgggacactgtagacaaacccaaaattgaggttacatatactgtgcggttgcacttgttttttgtgtaatataacactattattagatttttgcaggcccattggtgttggccttaggactccaaatacaccattatccaactagttgctatatgctatatatacagtagttactctatttaagaatactctattcaagaataacctctaatttgttacaaaaaaatcaagttccaatttggaccagttataaataagaataacttctaaattgtaattagttatacataaactaagtctcgtattaacaaagtatatatttatataaaaataattacatcttaataaagtatatacatatgttttgtaatttatttacataatattaataattttattacaaagattatatgtttacaaactattaagttttcttgtgttgatagtttcaaccttcatttttaggcatttatagaccaagatctttcttgtttgtcatattgttcagcactgtagtacctcaacttaatctatgatgatatgtgatttgggtatttaagtatttccttactgttattttcaatattaaatttttatgcattagtttgctctcaatttcataagtttattactaaagattttaatatattttactatcatttttaatttaaattttattttttttaaaacattttcactaatcaactacttattactctacatcaaatattatttattacttacatatgaattttttttttttaaaaa

SEQ ID NO: 176378 - DNA, 586 bp, Cannabis indica
ttagaactacttataaatttttagaagattttaaaagtgtcgaaaatatatttcaaacagttatttatcacgtttatagaaaaactatcacgcatgcaataaaatatttgaattttttttattaaaaaatataaattcactaaacaaagcaacattacagccctaccaccaacaacaaaacctacttacattttacaaataaactacaaacaaatcctagcttctttcttagtgattttcctcctattaacaagcaagattctacccttaagagcgtgcttagtcatcctatcaacatagctgattaagtaaattttcttttcaaagatacaaacattacctgtgtaggtaatgcctccaacacactacgttgaccttgtagacttaatccaattcagccaagcataatcatcaagaggccacatagctactcccaatcacttctaaacccgttgaaccactttctttgaataaaaacattgaaagaacaagtgttcttgctgtccatgccatcattgcaaaccacagagttctggaagttatattaatctttcttagcactaatatataaatttgtaacaatcag

SEQ ID NO: 176379 - DNA, 617 bp, Cannabis indica
gaagacctgaatatcaatctatacatttcatgtgtaagctcttcaaaaacctctgttagttacaaaattatatctacaatctcaaaaaccattcttcatccaccagctgcactttctttggccaagtgcaggaaattcggttcttcacagcaaccttgatcaagtttgctacttgttctggtgtttgatgccctgaattgcacaatatgtcattgcggttcttccacaaatagtagacgagagcagcaactatagctgtgtacacagtttttttaaacttactaatttttattcattccagccaccttatcaatcttataagtgttgaagtttcaacattccatcccaaccatgatttcacaaaggaaaggcaaagagaagagaagggacaagagaagaaaagatgttcagatgtttcggtttggttcctgcaaagcaaatagacatcttcatcaataatctcaaacctgtgtaacatttctcttgttctaagcctattctgtatagctatccataagcaaaaactatgtctaggtatattcaatctattccatacctcatggctccaataaactttgggtggagtggggcagtaagccttgtagccattggatatt

SEQ ID NO: 176380 - DNA, 906 bp, Cannabis indica
atataaccggttctattttagtgataaccggtttgagttatttcgtgttatttatttttattcattataacactgttatagaactggttctattttaattataactgatttgagttattttgtgtttatttggtttttatttattatgtttacgaaaccagtttatatttcaattataatcggtttgaattatttatttttattcattatgttatagaacttgttctattttttgtttatatttgagacatttacttgactttttcagtgactttttccggcgacggtgactttttcagcaattttttcggcgactgtgacttttccaacaactttttcggtgacttttcggcgagactaacttttccgatgactttttcggcaccgacgactttttcgatgcctctgactttctcggcagctttctgacgaaccttattattaaaaattttaatcaaatttatttattgttttttcccatattttaaactttaattaatttttaactccatatttttttgcattatttatttatgccataaaaaagtaaattctactataatttttcatatttatgagaaaaccccattttaaaaaggaacttttagtttttctaaaaattgtgtgaagtgggcctcaaagatatatttttcatgtaaaataaaaattattgaaaaaaaaggtaaaacttataaggttttaggtataaaattaaattctcttaaaatttttattaatattaattactaaaaaatatttattaaatattttagttaatcaatatttgtaagtatataataatttaattaatataattctaaaaaaaaagaaattttaacttgttaacctgatggttatataatgttactattgagtagtttcttatatttttaaattatatatctt

SEQ ID NO: 176381 - DNA, 641 bp, Cannabis indica
attacaagctatttatagagtaagtagtacaactgtaaaagactctaacagtctaacaaactcttaacagtgctctaactttctaacttactttggctctgacagttgctagtcagaggtttaaatattattcaaattacaaaattattcatcttttttgtcattcaatatatttccgagtgttattggcgcattgagatcatttgaagtaaaaaaaaaaaacactaaaaattatgaaattagaaatgaaaaataaagtaattcaagcgtagaagtaacacatatagtctatttaatattctataattttaacagaagtataatatagaattaaactgagtaggctttataaagaagtaaacattgttttctcactcaactggatcgagtattgatcttaagtggagcctataattattattttatatgggatcattattattattattattattattattattattattattattattattattattattagagtctggatgggatgcctccagccaccacaagggtttactccggtaatgtagaaagcatcatcagaagacaaaaaaacaagcagcagcagcaatctcttcaggggtaccaagcctcttcagtttactactatccagaactatttcatc

SEQ ID NO: 176382 - DNA, 737 bp, Cannabis indica
aaatattaaaatatagcattgcagcactctatcaatcaaagatactctaaaatttaaaaattccttttagtgtttggataaaaaaaatattagaagtcaatttttaattaagaagtcttttgggagaagaagataagatttgtagctttttctagacttttgagaaataattttaaaaattagaataattaataaaattttacataaataaaagatatttatataataattatccacacccttcaaacaattttttacttagttttgtttatatttttaactataactaaaattaaaaacttaatgattataatttattgtgagatttattttatttggaatgttttaaaagagttgaaaagctcatatctttatatattaaaagtgcatatctaacggcatttcttggtttaacagaatatacttaaaagtaaaagaatattctgttaaatttaactttgatctaaataaacccaataaaaaattaaacaatcttttaaatattaataatttctttttaaattaaaaaaatcatcttagctacatatatctctaacaaacctatcttgggagaatattaataatttttttttatttttaaaaaagaaaaatctttatatattaaagttaacctcacgttatctaatgttttctctggataagcataagagcagaaataccaactctatctttgtgtgattgcagatataccacttatgtcattgacccactttttt

SEQ ID NO: 176383 - DNA, 810 bp, Cannabis indica
tttttattttttctaataaaaaaatcatttatatccataaattattcaaaataaagaatttgatgttaaagtatctaactagtactcaccaaatgaattcatcaagaatataaattttaataatcgcataactaaagacatttatttaaatttggtatcaatttattcaaatgtaatgtggagctaactcttcttattcttacacttcttttctctaactattataggacaatatttttaggttataacctataaaataaaactctatttccataataaaagattaatttttgacagaaaaaataaaattattgaaaaattaattataaatatttcttttttcttctatgtagataatttcttttatgtagataatttctctaacatacaatagtatatgcattttggaagtttgtttagttttaatctaaaatttgatagttggcccccctgttatttgaacttggctccgtccctgattgcacgcatgactattttattttatacgcgtgtaaaatagactgtttgaacatttattttctatattgtaaattattccaaatctttcaaagattttataagatatcttaaatagctataatgtacatgaatatgaaaaaaagtaaactaaatttttttttctaaatgccgaaacaagtaaaaggtgcatcagtacatcccttttaatagggtatattgtagaatcaacctaaaatatattattttaattttttaaatttttttactatatattctaaataattataagacaatactaattttttttaaaaaatattattattattatca

SEQ ID NO: 176384 - DNA, 858 bp, Cannabis indica
aataataacaataatcattgctactctaaatatagaacagttttaacaagtcatatgttatgagattataataataataataaggtaaatatcatttttgtaaattagactcttgattttgttaaattataatttcgattttatattttttaaaataatttaaaataatgcattgagtttaatttttgacaaaatagtacataagactatctttaatgcaagatctaaaaaattgtgctaaatttgacaaaaaaattgagtttgtacatttagtccactatttacaattgtgctctaatacacaaaatgttaaataaataaaaaaaaaataattaattatattgatagtcatttgatattttattcagaatatacaaaaattattattattattgtttaaataataataatatggtaaataaaaaatataaaatttaataaaagccaataaatcataataattattgtcactgtataaattaaaaattattatttattatgggccaattaaatttaacacaatgttatagggaaatttacaaaaatactgtaatttaagttaatctttacaaaaatactatcacacaaaaatcttttcaaaaatactgtgtttttataaaacaccagtaaaacacaaagcagaacaactcaaaacaatagtagaacaactaaaaaataatcagtagaacaccagtgaaacttaacacagtatactgcagtatgaaacttataaaaaaacacagtaaaaaagtaaaaaataacatttggcagtatttttgtaaaaaaataagcaaaaagttagtaatccaatgtaaaatttcccaaatgttatatcttgttggttagagtgtataacac

SEQ ID NO: 176385 - DNA, 775 bp, Cannabis indica
gaaaaaaatggttaaaaactagcaccacttacactagcgaacaactttatgttaaactatacaataataaatgagtactatcataaaaaattgtattgttgacattgaaactatttttttcattaaaattttgtaaatggagctaaagttatattgtttgcggtagcatttatttatttttgagaaaagatagataaattagatttatattaatgttgaacattttttttaatttgaatttaaggtggaggtatatatataatttaaactttatcgttgcacattaaaaaaaaaaaaagcaaatatttttttttatataaatacttactaataattagttttattttttcaaattctccacaaaaattttttaaattctcaaaatttatatccttattctcttatcaaaatttatatccattattcatactaagaaattcactatcatatatggctttcatacacattccccacctcaccccaccccacccaccgcacccccaatatagcttcaaaaatttatagttctaagtatggaaaagtcaactattcataggtttcaaatttttaaatttcatgtttatttatattttatataagaatttttagggtgaaaatatttataattaaaataaataatatattaaataataatgtgtaaaattatgatagtatttttgaatagtatttttaaaaataagagtgcgaaatgaaagagataaaataaaatattatatttttaaataatgtgaaaaaaaaaattatacgtttaaat

SEQ ID NO: 176386 - DNA, 606 bp, Cannabis indica
taccacatatagttttacgtaaaaatattgcataaaatacaaattcaatataatacaatacaatacaatacgacttaatacgacgttccaaacgagcccttacgcagtgtaattattattagtttacatacttctaaatgcaaccttaactaggtaactattctcacaacaatcatcatgttaggttaatggtaatttattatttatttttagttaatttttaaattaatcacaattcttaaataattattcaataataaaaaattactgtagttatatatttaatataattattaaaaagtacttccatatacaaatattaaatataataaaaaataaatatatctcacaaattcacaatcactaaataaaagactaatgggggttcaaaatcaaaccatgaacgtttaagattacactttactaaacatatatatatatataaatatatatatatatatatatattatataagagaattatgtattaatttattattatttcttttttaggtaaaagatttatgcattaaattgggatcagggttcttctgtgttactagttttttggagcaaagacgtgaacagcgtctccaacagaaagaaa

SEQ ID NO: 176387 - DNA, 632 bp, Cannabis indica
atatataattgtagaaaattcacgtatttgaagttgagatgattaactattttatcgatagaaagaaagacaaaaaaagtcaatagtcatagatcttgataatcaatctatcgagttttgaccaagtctccccataatctcaagtcccaacaatatcatgttaaattaattaataaaaataatgtgtacgggttagtattctcttatgctataatattgctattaattgtatcaagtctcatgtacataaaattttgtaataatttttaaggaatattattaactaatggtctaaaatgacagcttgaaaaatattagctaccactgataatgaataacaatgcttataatgatatcaataattgtggtaataacagatcaataatataacaatatacactgcgctagtgctatatagtatatacatacaccgtataccacgtactatataatttcttgtttttggaagcattccaattaatattaataaaaatacacaaatacaatattcaatgattcttgcatcaagttctctcttgcataactttttgcagaacacagcttaggtgacccttcaagccctgataactaggtagagaaagaaaggtctctagctttagtgttaggctaat

SEQ ID NO: 176388 - DNA, 818 bp, Cannabis indica
taagacactaggaaatcagctacacagtaaaaaaaaatgcacatcattcagaagtgtaagtagattaagaatgcaaagtacagctaaaagataacgaatccaaattcataatcaaactcacttttcttcaagtaatcttgggagaaccacgtccctgtaatactgaacaggtgagaaagcttttattctgaagttgtaaacattactcatgttgtggtcaaatctatccattatgtactcaggaatcttgtcaaccacttgcacatcattttccaaggcatggatgaaataatcttcatcataaatatctccgaatttgctggacaagtgagagcaaatttagaaacacaaaaagaaaaaaaaagaaaaaaaaaaagccgccttgtacaataaaactactagtgattggtgtaagattaaaaacagaaaaagtgttgaaacacaatgaacatgcctatgtattattcaaaacaaatcaatatgataaaaagttacaaaacattcaaaagttctattaccatctatcccctctttggcttcataatattcatatataataataagaggcaggtagtaaatggtagctccctaaacatataaaaatgaaattattccagaaacagagattaaaagaaaacgtgaatatgaacctctttcaaatcttaccctattactactagtcatattaaagtacaagtactgcacaggaagtttggttcaagtggtgactcaatcatcgaacttcaaacattgctatgacaacagtgcagtattcccaagccaatttacaatttccttacaaattacattcatttcat

SEQ ID NO: 176389 - DNA, 668 bp, Cannabis indica
tcttgcacttgtgtgatactgatatatattgtttatatatctagtagaatatttcacatataaattatggacatgcatacacatttatatgtataaagtcctagaataaatagtagtgttttagatcagtgtataatatatatgtcaaatatgtttttgagtataatctcaacaatcgttacaccattggcatataacaaataaaagttatatggatcgtgatcaatgaaaaccggctatgtataaatatatatatcgatatatatagtaaggatgtactttttgaatgatatgagattataattattagtatatattggaatattagaagctgaagataagtgtaatatgtcagttaattcagttagcttcttttagttaagttagttgagtttgttattgtcagtttggttagctcactcatttgtaattgtttgtacaaagatctctataaatacaaagtctggctcaacagttttcagttgagcaatcacaatactttccactttccattcagttcatttcccctttcttctttcttttgctctattctggttttcttgatcagtgtatatattaatgtatagtatatacaaatatatacgatattcaaaattatctttcaactattatagtgctaagattgatgttcttattagtataaacaa

SEQ ID NO: 176390 - DNA, 506 bp, Cannabis indica
atgaaaaagtagaaggaatatattggtagagacgatgaacagagaaagatagttgattgtttgattgatcatgttcatgttcatgatcacaaactttctgttattcatatttatggaatgccaggcatagggaagactgcacttgccaagcttgtttctcaagacgaaagagtgaatcgttattttcagcttaagatttgggtgtcagttaccaaagaattggaggttcacaaactacttgaaatgatgctcgattacgtcacgaagaaaaagaacaagaattcagcgaaagatcatttgattgctgaacttcaagggtatataaagcagaagagatttttgttgattctggacaatgtttgggatgaggatgaggaaaaatgggaggagttgagtggttatttaagaggaggttgtaaaggaagtaaaattgttataaccacacgtaatgaacaactcagaattcggtgtatgaaaccagatttttctcacaaagtggaaggcct

SEQ ID NO: 176391 - DNA, 610 bp, Cannabis indica
taatgtcaacataatattttcaggtcaaaaataaaattaaaaatggcacaattattcaagcaaaatgttagtaacaagccaatacgaactatacaaagttaccttgaataaatctagagttgtgagtgtgtgcaccaaacttgaaccttcttaccgcaaaccataacacataaatacttttgaaaaatataccaagtaaaagtctcaactccatttgcctcacaggtattgaaaatatttattcatggctaaggatttcactcatggagttggaaattgaaaagtgagcactcgaaaaggatagattaatttaggacaaacatttgaataaatattgaaacgaagatagattatgaattatttggacaaaccaccataagagtaccacaaaccagcttttcgggatttttaaacaaaaatagacaatcttttacatttattctaggagccaaaacaaaaaaaaatgaaatactacaaacttttttttttcttttcttattttttttttaaacaagaggcaacatgttagacaaatggatagaaatgttgctcttgtcaatttttttttttttttttttttttttttttttttttttattttttgtttttt

SEQ ID NO: 176392 - DNA, 537 bp, Cannabis indica
atgattaaggatgtttttttgccgaagagactatgccatccgctcccacaattttaccttgccacactttgtcattccgtgcattccacaaagaccaacacacagccacaacaatttcttttccagctttatcaacctgctgaaacacatccgtgcaccaaaccagaaaactgaaattctggtgcaaacccgtgcctataccagttctttcccagcatgttgcagcagtcgggcccaccaaggcatgaagaattgtctcatctgcactagaacaaacagggcacaatgttgcaacctccacatacttagaccggagctgaaccatcatgggaagacagtccatacaagctctccaaaccagatttttcatcttagggggacttatctaaagttatttattatttttgtttgaaggttatttaaagttatcttgaaaaaaagtatttacaagtatgtttttcatttttttttgtttgaaaggaaattatttacaagattaagaatatataagttctacacatgtagaagtcatattag

SEQ ID NO: 176393 - DNA, 641 bp, Cannabis indica
tagaagcattgaaccatacacaaaaagtctattgaagtactttcccttgagattagaagcaattatagaagcattgaattataacacaaaaaaaaaaagcaatagtaaaagctagataataccttgccggttttgtaatgtgacatatcagctagacagtatctgagatgagtttaaggcaacaatgagttgctctatatccaaggaactgatcatgtgttgaaattcacaataagattataaaacagcccacctatatattcacattaaaaaactattcctactgattgcaaaggatactctttaaaaagcttatcatagtatcgcttcaccagcctttgctcccaagacgtatccatgtcatcttcctctgagcgtatgaacctatatagatataagtataaaagcggtgcgaatcatttaatctcaaaaaacaacttgaatatataaaacagttcttctggattgatggaaataatttggcagtaacaccatacaaataaacaaaagtgtaacacaaaaaagagacaactgcaatccagatagaaatggttcaaaacttaagtaccgatatccttctcttaaggtatcttgatcggttttgataggcaacctaatgtttgaaggtttctctttcccat

SEQ ID NO: 176394 - DNA, 543 bp, Cannabis indica
taacacctccgcgcctataataaataaatagggcgagagacgattgccttgtctgaggcctcgtttaggatagaaagttttagttaaaccatcattaagcaacagctgaaagtttacagaagacaaacagcagagaatcattttgcagaaatggtgattaaaaccaatgcaacgcattacctttaaaacaaagctccattccaagcgatcgtaggctttggacatgtcgcacttgaccccaacataagcagagtttccttgtctcttgtttaattcaaagaacaactcattagcaataattgaattctccacaatccatcttccttgcacaaatgtggactggttaggagagataattttgtctaacaccatacacagccgattagccaagagcttggctaataattttatacgatgtgttacacagactaattggtctgaattcaatcaaaacagttggcattggggcttttaggaattagaaccgataaacgtttggttaatctccttgctcgaaagtcccaaaacgaagaattcatgcac

SEQ ID NO: 176395 - DNA, 736 bp, Cannabis indica
ggttcgggtcagaggcagggttcagcgccagggacgtggggggaatttgggtctgggtctggtcgaaatccaaaatattaattaaagaaaaaaaaacgttttaaaaaatattgaaagtgattttttttgtttttaaaattttgattctcaattaaaaaattgaaaagtaaaaacagttttatagaacatgtttttgaaaaatacttttattttttcaatttttaaaacaaaaaactgattaaaaaaattataccaaacgccacctaaattaacagttgccaaaaatcttaatcaatacaatatcattactattattaaaacctaagtagaatttacataaagaaaattattttttttcaatcacacttatagtttatacaattatcaaaatcttatctttgaacaaaagaattgaaggaatgtgaaccacattctcacattgaaaaaagagaaatgctaaatgacattagtggtgcacactctcctcaatattatattactattggtgaaattaaaatcactaactaaacttaaggtgccacctctaaatagtgttagacaccactaactaatgtccaacatgaatactctaaaaaaaaatacaccaaacaagaaattcctttcaaaatttctcaacttccccccactaaaaaaaatctcctaaatataaaatctcataaaatcattcacacataaatttaatagaattatggcttgatagtttaataactacaag

SEQ ID NO: 176396 - DNA, 519 bp, Cannabis indica
gtatgcgtcttccgaatctgcgagttgactgttcatattccgatgttaaactcgcaggtttatcattatgttcaggatgtctgcgtccttagatagtcgccttttgtggacatcgcatgacgagctgatagaacctagacatgcaagtctatattggtttatcaaggctgcagggttcttaggaccaactcgcatttatagaaagtcggtctcctggtttatagatggacacagggaggatactcgcatataattcgatatatgcgagctactctcttgtctcgaatgcgattagactttggtcatgctcgctgtctctcgctgattctatcttaagcgaggtttaaaacttcgaggagtccctcgtggacatctcagttttcattggaaatctgagtatacgtgtcctctaaacaggggtctggtctcgagtttctaagtgagagaaatctcactataacacagcctactgtcaagtttctgtacatggtgtaggaaaaatctaggaacaatagtaca

SEQ ID NO: 176397 - DNA, 697 bp, Cannabis indica
agagagagagagagagattgagaatcctttccagatctccaaagtgttaaatattttgctgttgtgaaagctatacttttgatttaatgaatctttgtttgttttttgttttaatttaatttttaataataaaagataataaatctcaattatgtgggaagatggaaaaaggagtaaactttggtgtaacgttttcagtccaccgagatgggactgacgaattaaaggttgccacgtcatgtgatgctgagtacgattctggattgtgacgtggcgtgttgtgattgaatggaaatgatagtaggtgtggtttgcgtaacagtggaagagaggtggtgtgttttaacttgaattattaaaaagggcaagggaaatgggtttgggaatgatgtggggtgtgtcagggattattatgaagcgcatgtttggggtgagttgtctgcttggtcgaccctgacattttttatttattttttttaaatggaaaagggaacatttttctatactctctctttctttccaacaatacaaaagaaaatccattttcaaactttcgaacccaacttaacaatggattgaagtctttgttttttttgtttttttttttttaaccacttaagctagccttacgtggccataggtgtccgtgtgttggagtcccagttaaacatggtcctaggtttgagtcccaataaaa

SEQ ID NO: 176398 - DNA, 964 bp, Cannabis indica
  modified_base (873)..(873): a, c, t, g, unknown or other
caaaaaaaaaaaggaagaggagagaggatgaatactgaagttatgatgttttgaaatacttgcatacactactccatgtaaatgcataacatgatagatacacaatcacaaaaaacatctaaagaacatatccaaaataaaaacatacgagattgcattaagataaaatagaaaagagtaatgtagtacacagtaataaaatagaaaataataatttaaaatgttggtatagacagacaaggatatataccaagctttggtcttcaaataagagctttgctgatgaagaaggatggccaagtgtggattaccaacttgcacagggagaaagagagagcgagagaagaattaccaagaagcttcagagtcctagatataaagaatgcgtataaaagcatttaaaattaaaactgcttccttaattcatgatgatatttataagcataactaaaaatatccagcttcttaaaaaaaaattaacaataatttgaataaaattcaaataacttttaaataggaaacacatgtatatttaaatttatttaataacagaaagatctatctaagtggaacatttcagtagatatatatatatttatttttatttttttttatttaaattaacacttaagattacatcatattcgcccaaattatgttagctttgagttttaaaaatattcaaactatgttaggttttgtttgttgttagttcgtagtaactcttacaacttgggaatcaatccacaaatgcattttcacccctgtatgcataattgtcatctctatatctatgcaagtactttacatttttatgaaacgcgataagatatataattgttaaatcagaacaagtagacgtcatcctaagtnttacaactccttaaattttccaagactattaaaatgttacaggaaacaacaacattgtgatatgctgtgaaatctcaaaacgattttacta

SEQ ID NO: 176399 - DNA, 700 bp, Cannabis indica
aaagtaatttaatagaaattatctaactttttttttaatcaatagaaattatcaaactttaaaaaaattattcgtacaagtctcacatgtgaagtatattttctctcatttttcaaagtttttaatttattttttctcaattgttaattgcaattcatattaaataattagagaaaattacactctataccctttttatattatcctgttttatttttaccttcttttttaaagtctatcatttttacttctttttttaaatattgtaccaattttgccccaatcacttcaagatattctctatgtgactctcttatatcagggtattttgggtacaatacatataaaaagaggtatgttttaattaaatataaaattagaggtaaatttgattaattgattaataaaagtggtatttttcaacttacccctaaatattaacatcatttcatgttaatgtttgctagaaaaaactaaaaaataaaaataaacgtatattaaatgttaaagttataaaaatatggtataaataatatatactctatctattttctacaataacaattattgatattccaaataaataagtatttttttttcttttatacatccatttgttatattctctacaacgctcatagttttttactaaaaatcattaaatcaaccaatcaagcaaaaagaaaaaaaaaactcaaat

SEQ ID NO: 176400 - DNA, 776 bp, Cannabis indica
acctattcgttataatctttattcgtagatcaaagactcctactatatagtatgatttacatcgagatgggaaaaaatttaaccgtttacacccctcaatcgtattttggtccccttaaaactacttagactacctgtaaagtagatgttttagtgtatcttaagaaatagtacaaactgaaacaagaagtctcaattccattttacttctatttacgcctaagctcaagggaatcaatcacttcgaacttctatactacacgtaaagcctaataggattaccataatttatagtttaagactactaccaactacacgttcatattatcactagttcccaaaatataccgtaagtactaacccgtagtaccccgttaaaagtaacggtacttaaactaactaaaaacttccgaaaaggaaacctaatttggaaaactttaacgaaaacgtacccttagaaacgggaaatttttaggaaagtcccttaaaggtacctaaatttaactacctaagggacgtttttacgaagttccctttttaaaatcgttaaagaatttccaaacttacgtagtactaaacgtttggaaaccttttaggttaaaaagtaatttaacgtaaaccgggttaaaggttttttaaagaaaacttaattacctttaaaacgttaaaggttttccggaaaagttctaacggggttccccaagttcccaaaaggtgtaagtattccatacattcgaaactagtataattttataatgtcttggaaaagacataac

SEQ ID NO: 176401 - DNA, 623 bp, Cannabis indica
aaactctcgtgagaaaaatgagaggaaatagaaagaaagaaaaatcaacattttgaagttcacggcataactataacatattgaactgttgaactcaactaaccaagtacaaattaagtaagtatttaacttgggtgagtgagttcatgcctggttttccagatctcactttatttctattcatcagaaataaactaactacttttttttcttcactttcctacattttcccctctaccaaacagtgcgatttggacacagagacagaaaagaaaaaaaaaaatcaaaaggaaggtcatcacaagccacatataaacaatctgaaagagaaagcgagagagagagagagagagagagagagaaaaaacaaaactgaatctctaaatagaacatgaaaactgcaaaatgcacctcgaaaaagaaagtacgaaacgaaaatggcagaagacaaagataaagagtccaaaatctgaaacagaaagaggtgcagggagagagaatgtacctgaattaagagagagagagagagagggaagtaagttggatcgaaaggaaagagatcacaatgcgagtgaggtaagagataggaagatggaggaaagagctggaaaacgacaccgttg

SEQ ID NO: 176402 - DNA, 592 bp, Cannabis indica
tattcaatgaagctctaattttgatgtttttttatatttatgtgcaccttaatttcatttgagaaaattttctttagaggaccagaataaacataaaatttaggatttatttgcttaaatacattgccacattaattacattgttatataataatttatcataatacatggaagataatactcgccaaataatgaggacctattgccatgattcgtatatttgttatttataacaagggtaatcatttcgcttgagttgtacattaatttaatgtcgatcatgtgggagaatgtaagtattttgtaatattagaattattaattacattaattctaactgattgtattcaatgtaaatatttattttaattgacaaaatattctaaatatggtcaacattatttagtagccaatttggtttgatttagttgctcaaattacattttctgaattaattgtcaaaatattctgacaattaattgtggcagagactgtgataaaaggtctcaccaatataaatatagggtaccagtctcctgcaagcttactactcatttggtaaaatacagtaaatctatctaaatagagtaga

SEQ ID NO: 176403 - DNA, 782 bp, Cannabis indica
tatgagtggaatcatttagtgtttgtttatcattttgttaatagtagttttgctaatttttttttttcatatcgaactttcagcgagagtgttgttctcactaaatttatgtttatgcggttaggtaatttatcttctagatttgataaaaaaaagaagaagacaatttttatgttgtaaaaatgaattttacaaattctaaagataattaaatttttatattattagaaggttttcattgtaaaatctaaaataatttcatatttaaattttgtaatattacaatgaaagtatatgagttaaaaaaaaaaaattaattaaagtgtctaacataaaatcgaaggtctccatgcttattttcttttataagtatgaaaataaattttttgagctcttatttgagcatatttgttttaaagcttcataacactacaataaatactattataatattttcttttaaaagtattgttattgagtattagtggtgcctaatactttttaaatgtgacactctacaattgtttaataatattttttaaatattattatattaaattatataagatctaatatttatactagtaacataatattaagaaaatgttagatattagtagtagcttttaagatttctcttaattttaagtacattttcatgtctaaattttcccaaatgtctaaaattttgtacagatattgaaaagagttaggatatgttgtaaaatgtgattttgtttgtatggtggaaaggtttcttttgtaaaaattattattgagag

SEQ ID NO: 176404 - DNA, 539 bp, Cannabis indica
gagcacggtgctcttggcctagacttttagtgccacacaggcggttggcacatgctaccgagtagatcaagactcattggctaccacgatcgcagacaataggtatggcacagtccactactgctcctccacaagcacatcaccattcggcaagacgtcagtaattttgaccaaagagaggcttgtagagatggatccggtccaacaacatttgatgtacgaggctagatagagagagagaataaggaagaaaagaaaaaacttagaatatggtattttaaactttttttacaaaagtataggatactgtctactttcagtttcattaaaaataaattgtagtaattttattagatgttaatttttttatgtagtttagtacatttggaggaagtagaacaaccgagtattaatttaggagtgaaagatggagattatctgtaattcaagcatattgttgacatattattagtaacgttcgatagttttccttcaaagttcaataattgtgttagcctttattaggagatattcttttt

SEQ ID NO: 176405 - DNA, 830 bp, Cannabis indica
atcgaaaaaaaacacacacacttctagagaatatagtattatttatttatttaagattttttttttgtaatttttcattttgccaatgtggaaataaaatttgaaaaaaactaaaaaaaaaataagtacatcgtgaaagttaagatctaaagatctaaatttatagcctgcctataatttagtttttttaaaaaaaatatctgtagaggatatttcttaaaataaaatgtgtatatatagttttcaaagaataatgaaaaatatgatgcaacaaaaaaaaaaaagaataataaagaataaataataattattgaatctttttaataataaagtgagagagagaagggtggaaagattgattccatcaaagcgggtgaatcggatgatatttgggttgatcgtaaactgattatggggatatacggtttgttagagatatgtgatttttttttaattttaaaaaagattgtttaattttttgggtttaattattgggtttatttgttaacggtagatcaaacctattaacatcgttaaatttaacagaatattcttttatttttaaggtatattctgttaaaccaagaaatgccgttagatagacacttttatatataaagatatttacaataaaattttattttttttactaaaaattaaactttttttacactaaattaaaattctcttcttataaacaaatttttaaataatttaattattttaaaatgatattaattatgttgttacaattagaggaactaagtatgaggcctcaacctaatcaatcgataaaaaaattttgtaatatctattctatctatatatct

SEQ ID NO: 176406 - DNA, 634 bp, Cannabis indica
ggagtagcttttgttgcagaacttgcagaaaacgatcctgtcgacacaaaacctggattggcttgtgatgctgtcctggtgttcttcctggagtctgagattcattagatgccatgactggagtacaaccgtgctctgataccaagtgagaaagtaaagcaaatacagaggatgatgataaatctcagctcaatgagcatgagtgaattcattgctatttaaggttttttacaaatgattacagccattggatacaagggacagatggcagtagattaaacaaaaggaatattgctgaaaacaatgctaacaatacactaaaaaggcataacagaatttgtactttagtgaatattcagcaatgatattttcccagtatattggagaaaaggattgccaaatcatcagccaacacagcagccatgtcaccttcatttcttcacatccaactaattcttgttgttctaattatgatggcagtaagctactgagctagaagggtaggaaaaaggaagagaacatgtattagaattcaagactctaaattattagtaagtaagtgatactactgctctacactaaaaaaatgtaatggtggtggtgtagaaaaaaatattcaacaagctccacgaaa

SEQ ID NO: 176407 - DNA, 995 bp, Cannabis indica
aaaataatttccaacagttatcttgtatgtgatatccttgcttaaatgaccttagccttgatctttgctccccatctcctatatttgtgaggttatgtgcacattcaagatgttaatatagagttcaagcacacagaccgtttgtatgaggagaaaaaaagggttgaagggggtgtaaggaggatgggcatgtggaggccaggcacgtggggaaaagagcctaggcgcgggggctaggtgcgcagggaggggagctgggcacgtagggagggaagcctaagcgcacaggctaggcgcgcagggagggctgcttgcatggaggcttggcgtgcgggcatgggcacaaggagcttgggcgcacggggcgtgggcacgggggagcgatggactcgtgcctttgctcctcttcgtaccaactcatccctttgggtgtattttcgaattcacacttggcgaacttttggacataacactaatgactctaaaaatcacttagcaatttttgggagtcaatagtcatcactgtcccacattggttcgatggttacatcttcaacgtatatacggtgcatcttaatacttaaatccgcttgtatttatattggttattattatttttcatttgattgtttcttttttgatttggattagtgttataccacttgtaaacaatagtcactatatatgcaccaatataaaataatgattattacaacttcaagtgtgccataataattaaaccattcagttccaacaacactaattttacaattttgtgtgtttcggctgacatctttttcagtcgtaataaatcaaacactattcactatacaacttttgtaaaaggttgctaagttatctaagccagatgctaaagcgagcaattcatcaccattttataaggattcaagcttgtgcaactcatatatctaaatacatgaaatgtattaatatgataaaaatataataaaagtttaaaatactctcattttacc

SEQ ID NO: 176408 - DNA, 1168 bp, Cannabis indica
gcctttttcaatactaaaataatacacataaacacaaatttatgatatttatataaaaaaattgggcagtaactttttttaaaatatacaagaaatttctgtgaaatttgacatggtaatgcggtaaaatatatcacaattaacagagaaaattagtaagaacatgtaaacataaaaatcataaaagtaatttgtagtataaatacttaagtttaattttcggttgtaaataaatatttaagtttaatttttttatagcaatacttaaattatatttttgtaattctgtaagtattcgattgttaaatgttaagtaaattaatacgtgacaatccttgattggtttaagtcatgaattttaattttttttaaaaaaaaaattaatttaaatataataagaaaataacatgtgaataattacttaatatttaatggttaagtaattatagattaattataaaaatataatttatatattattattatcaaaaattaacttaagtatttataatataaattacccaaaaataataataataataataataaagaaattaagttgtaagagtaaatttccatataataataataataatattttaaattatgatgctattgtttggttaaatggcaacatgccttatttgactaaaagaatcaatttacaattaataatgacaatgatatatttgaaaaatgaattaaaatataacaagcattagacaccttcttttcctacacaacttttcaaaggatggtttattaagtttatatttttgttcatagctagtaaacagtattagtttttactcatttttatcgtttaaataactattatatatataaaatttaaatatcattaaaaaatattaataaattaaaaattatataaattattttaattttcaaaataacttatctttttgaaaaactattaaaaatttgtaaattaagaatttatataacataacttttaaattaaaaaaagtcaattttttattcaacacactcagaaaagacattttaattcacaaaaaaaattatacaaattaggacaaaaaaaaaacaaaatcttaattgaaaaaaaagaaaacaaaaattaaaagttttaggactttcttttagaaaaaattaattgacaaatgaaaaaaaaaaaaacaaaacctac

SEQ ID NO: 176409 - DNA, 573 bp, Cannabis indica
ttttttagctaaaatgttaaaatagaatcatgttactccaccatcctctttactataagaatgattatttatattataaacattagttttaatttgttaaatagaaattgattcaataaaataaataaaaaagaaatattattttgattaaatattatttataaattggaaaaaaaatagggacttatttttttttatagttggagtatattttttttaaaaaatcactctcaatttttttttgagcaaaaaggatgatttattcattcataaacattcaacatcaacaatagacttgagttcaagaggagcagtatgctcactaacaatacgatctgaatggtaacaagacgctctagcaaggcaatgagccgccctattagcagaccgtttaacaaagtgtaaagacacatgactaatacaagaaagtaaattacgacaatcttgtaccaaaaaaccaaactgcgaaggcatctgaactgagcccgtgacagcctgcaccaccacaagcgaatccgtctcaatctccaccttcgaccaccccttacgcttgatccaactcagcgcttcctt

SEQ ID NO: 176410 - DNA, 984 bp, Cannabis indica
ttccttactagtgatcattaggaaggtagaagaaaaaaaaaagtaagaaaaacaaaataaaacatattaatattaaggtaaaaaaaaaaaaaaacttgatttaaattgaataaacaatggagggtgttaacgttggtgggttagtagctgttaaaagagttaactgatggttttaattcattaaatgatgtaatagtttagttttattggatagactgaacagaaaaaataaacagagacgatctaaggtttgagagaagcgaataggtggcatgttaagtgatccttaatcgagctgtggaggtaggagaggagaggagagaaagagtatgaactgtatatgtgacaatgtcaatgactacgtcttctttgacagtgatcatgcaacagaaaaagtcaacgaccaattagccatagaacactacaatctcaactctcaaggcattaattatttgatcaatccaattaagtaaaattcaaggagacgtattcttctatatatgtattatttgtttttaattacgtattctattctattgtattatcttcttcttaattttttttgtaactttactttttatttatacataataatatgtttttctttttagtttacgttatacgttatgttgacttgaaaaggtcaaaatatattccagtggaatcgatttcttttttaactgattggattctcatgttaattaaaatgtatatttgacttggatttggtcaaatcaatcatgtcaaacgaactaaggttgttatttttaaccaaaaaaaaaaatgaaaaaagaattgctaaatatatgtaaaccaccaaatgttaggataaaaagggaaatgtaaataaatgtacatatatgatgagagatgggtttgaatgttttttttaacaataaacaaaacgatttattgaaaaatttaaagagaatagtatattatgaaagaagatggagagtacatttaaactagttcactatttac

SEQ ID NO: 176411 - DNA, 696 bp, Cannabis indica
ttactttttgtaatctttatgtgtaaggctagagaataaaatttaattctcatggttaacaatttttgaattgtgtgttggtttttttttgagtttttgtaacatagctttgtggattactcctcgatgagagagtgcaaagaacaggtgaaatctgttgctattttataatcctccatgagtaattcacatgaggtttctcaagaaccatttgtagaaagactatggctttgctagatggagcggtgtaacaacctgagttagaatgttggaggtatgtataaagccaataagccaatgtctttttcaaatgtttgtagatttaataagattgtatattgttgttgtgggaaatgaatgttcgtggtgacaaaatctgatggaaatattttaccgagatctgtaagtgtaaaagtttatggatttgagtctttgaagcacagagggagatctgacgagttgaggatgaagacgatggtgttgttgctgttggttagggttagggtttggttttggggtgtttaagcttgaggtgatgaaaatggtggcaatcattaagttgaggaacaggaagagaatagtgggtgtgaaccagctgttgattgaagcccagattgtgggtatggaagaaacagagtcttcaaacatggctactactgttgaatggagaagaagaagagttagagagagaagggg

SEQ ID NO: 176412 - DNA, 638 bp, Cannabis indica
caaaaatatatttatatacaaactatttaagttaacattctggttatcaattactttatattatttgttgaagacaatattttttcaacctttttttttagtttttcctacaatatatatatataaatatatattaaaaaatacatatttttgtgcaaacagatttttatgaaatgctagaatttatgcctttaaaagtttgtaaagacattttcattttaaatataagttatacaatttaaattctatttgattgttgttttgttgttgttaatatgtaatttatatattatttttatgtcgtttaaatattatttttgttatttatacattatttttagtattgtaaactactcaaatttttttaaaaatttataagtaatttttttttttttgaaaaaaagcgtatttcattaatagaataggttagaccttatggtcattacataatatgtttaaagaaatggtagatagcggaatatcacctaataacttgcgggtaaacgcccacttagtcacattatggacaacaaaattacaagtcctgctattatgagaaaaaatacaactcgaaaagaaagaagagtgactattacaaaaaaagacatagtttccaataacccaatgagactccttcc

SEQ ID NO: 176413 - DNA, 620 bp, Cannabis indica
attgtaatcccttaggcttttctagcctatctgataataatactaactcgtagactaaggcttgttaaggctccaaccacgtaaaaaactctgatttccttcttcatattttattttcttaattgtattttctttatctctaatattaaataattagttttttgaaaatctcagtttatattttggtgctttcattgagagctaaagaaagtagtgatatcgttcaagattacgttcagtaactatggtactcacccgaaccaaatctaattttcacttcactgatcctataaagggtaattttgatcccaatgctaagatgggagatgcaaaatatccaactgatgcaactagttgccacaagaaggatcaaactaacaaggactctattcctgaagatcgtataaaagaaggcaatgaattaaaggagactgattatgctcatcctaatgataataatcaagacatgcatgttgatgatgatgttgaaaaggaaggtgatccagatgagtcagatcctgtggtcaccatggccaggaagttgaaagaactgaagataatatcgttgcaagagcaattttcttcctgatgcatgaaaaatggagagaatggaagatgtg

SEQ ID NO: 176414 - DNA, 771 bp, Cannabis indica
aaaatacagggtccattttgtcatttaacaaaatacggggtccaatctgtaacttttgcaaaacacagggtccaaaatggtatttacccatatataaactatatattagaattagtattcttttttttaataattgatatatttttaatgaaatatttaggatgtttccacttaaattataaaaaatatagaaaaacatgatatataagaatataaaagaaaagttttacaatttattttttattataataatatgatgttatcaaatacaaaattttgactcataaataattttgttttatataattgtaaaagtatttaattattacatataattagttttttttaaaaaaaaataagtgtatgatttgtaacctataaaataaaatttatagtgatcattaaaaaaaaaataaaaaaaaaaatactattactatatatattcaaataatttaaaattatagtaattataataactatcattacctccaaacatagatttatcagtacctaaacttaaaatatcaaagcctatataaaaaagtaccattagttacgaagaaataaaaaaaaattaaaaaaagtaagactaaatcaaaaaattgcgaaacctcaaattttcattatatatgaatatacaaatatacttatttaaaaatatacacaaaaaaaaataaataatccaaattattttctaagaatggccataaaattaatgttgtaagatataatcaaaaatggaaaattgtataagtattgctcagccataat

SEQ ID NO: 176415 - DNA, 655 bp, Cannabis indica
  modified_base (581)..(581): a, c, t, g, unknown or other
ttccattcaaaaaaaaaaatattaaagagtggaaagatcagtacaaacttatttataatgataaggaataatttgtaagtgcatataggatgtatttgaaacacagctaaaaagaaaaaattaaaaaaaaaaatcaacgatccttttacacatgcacccaaatacttgtgggtatggttatgccatctactgagggcataagcaacacaaaaatgaaaactttgaattcctccattaaattttgcacaattcttggacacataaaacaaagtgacagatatcaatttttataacaaaaaaattaatatattttcttaaataattcttttataaatttaaaggaagaaaaattaaagatagaaaaatcggtacaaacttatttacaccgacaataaatggtttataagtccatataaaatgtatttagaacacaactaaaagaaagaagaaaacttagtgattctcatgcataggctctcacacattcgtcggcatggtgtgccatctgccaaaagcacaagcagtacaaaataaaacttaaaattttttcaattgattttttttcactagtcttgacactntaaaaacaagtgtggatatcaattttcaatgacaaaaaagatttaaatatattttttttaaataatttttttac

SEQ ID NO: 176416 - DNA, 895 bp, Cannabis indica
atctttcagattgatccattacacaaaaaaaaaaaaatagtgtaggctactaggataaagtgtatatgaagttcttgtatatatctcattacatgtgcaagaacaatttcttatgtgataaagagtaaaaagcttgtggtaaaaaccctttctaggctttcaaaaaagttacgtgaaaaattctattaaaagacttatgttcagattttattatacggtatattcaaataaacttaacgaatatttcatttaattaactatttacaaatctatttattgaatcttattttattattcgaataaataatacaaattaattcaattatagatatttatatctaatagccgattgagggaacactactacaatatgggcctttagcttctcttattttaacccattttataaaaatgaaagttaaagggtgtgaaaacatccacctggttcgaaattgacatttagaggcgatttttggtaaaaaccgtaggtatatatattaataaaccctatgccatcggttggaaattgggaaattttaagggttttggtgagaccctatgtcgtcggttcctatatgccgacggttctttgctaggaaccgacgatatagggtttaactaaaaacccttatatcgtcttcttttccccatgatactagcagccacaccactacaccagaccgttgaaaacccacgaaaccctccccaacaaacactaaaaaccaccatatctctctcatttcttcaccatttcatcccatttttgtcttaaaattttctattttcaatatctaatcccatacactaaaaaagttttatttttccacccatttccactatacccaaacctattttaaaaaaagatggtggtataactccggccaccgattttagc

SEQ ID NO: 176417 - DNA, 865 bp, Cannabis indica
atattgccaaaccaaaatacactattattgcttaaacaaacaattatgatgtatcaatcattcaatcctaacaaaataattcactcataattataaaggtgacatttttttttttttttgtaaatgtataaaggtgacatttaattgttaattatatatgttttatttttatccattagatcaagttttaattagcggtataaaactagttaaacttatgtgttcatagaacttaactaatttcatcacattatgtataacatacataattattattcacaacacaacacaaactaataagaaaaattcatcctttcatccttcaccacaatcgaattttctaatctaatttgattctttttagtgaactgcgatgattaataccacaaaaatgcctagtgcccttttagttattttgatgttggttgttgttgcattgattgttgccgtgttggtcggtgccaactgagtgttggcagagatggtttccgagaaaaggttgcaggctcctagcatgattagagaaggagatttgtcaacctcccggattagcagagttaactaccaattttcctcgcagagatatcttggtaattcgggaggagctttatggatattcgacggggagagtcgtccccggctcaagcagcatctctggaacgtagaagaaccatattcgtctccatctccaagaagtcttggaacacgactcaagtaaatgatttctgagtagtgaagatttctacggactggttgcggaccgtgatcgctcctcaaaggtgaatggccacgtcagctccatatggaaaatcgcctaacaaacagttacactttttctgacacaagatcagatctgtcccccatg

SEQ ID NO: 176418 - DNA, 665 bp, Cannabis indica
taaatgtaagagctctctacttttttcccaaacttttttcatagtattttaatataatactattattttttattattttataaactaatttatatttaacaaattccaaattataaaatattattaaaatgatcaaatattaactaatatagagcatgattggagtaacaacaataaaaatgactctttattttagcttcttagctacttcagctaaaaaataaaaagtaccattggaaacgctcttaattttggtgatgaccgtgatgcattcaaaagagcattgctattgtgcaccagtggtgcctagcacctctagacatattgccttgtgattggctagcgatattctctaaaagttattatattaaaatatataagactcgatatttaattagattaaggctaattaggatttttgccccctaaactttgacatgtaccaaatcatgccccctaacttttaaagttgttaaaatgtcccctgaactattgagattctttgatttaaggatttttgtctaatttcattcaattttactgttttagtgattgtttatatactaaaccatgctctccagactttgatatctaccaaatcatgtcccttgaattttgacatgtactaaatcatggcccctacactttcatccatgttagacttt

SEQ ID NO: 176419 - DNA, 606 bp, Cannabis indica
atcaactgaaccttatccaccttttacttcatctgctttcatactaagtactagaaaattcccaaaaaaaaaaaaaagagaagaaattacctactttctgagaattggacgggggagtccatcgttgtgtctcttttatcactttccaattccagatctcccttactctttctttctccagtatcactcattgaaaagtggaagctgccttttgtttttcttctcttttttgattttctttatttcttctggaaaaatattttggagaaagcaatataaatgaagtatatgaactatgaacgtgggattttcttagtaaaagtgggccaatattgatctactcttatttaacacaattcgaaacgaaaccctaattataatttttcgatttttatgggttatttttaacttacacaaataatgaaaagagtccaaaagtttacaagaaatatcacactgaaataatctttttaatactgatatgatgaacacaacccaatggtaactaagagcatattcatcggcggttgcccataaagtggtcttaccatgtataactttcaagaccaatttcatgtatatatgggctgattgttgctcaacttg

SEQ ID NO: 176420 - DNA, 564 bp, Cannabis indica
cagtgtgtcctaatccacgccagcgttgactttacttttaaaacagtttaaatcacagcagtatgtatttttaaataataactgtatttatttacgtggagcataattaaagcccacaatttcgggaaatattattatgggaattgaacttaaatgtaattaactgccaacctatatcaatataaataggggcagattatacaaaaaaggggacgaaaattcttagagagaaaaaggaatacacttattgtaaagaaccctagttctgtattagaaaaatatgaataagattcactagtggactatgcagaattaactgcaaaaccacgtaaaaacttagttgtttttttcctctactaattgaattctataattttttgaggcaaatctattacaaaaataggctaataaccgttaacgaaaatttgcgttaaaaaatattttatactaataaataaatataaagaaacattaaaaaaagaaaatataaataaaataaaaagaataaggagaaaaaaatagataaaaaataatagaaaagacttaaaaaaaataattttaaaa

SEQ ID NO: 176421 - DNA, 685 bp, Cannabis indica
ttgtataataaccaacgcatacaacgtcgcctggaacagcttcagtagctaattttgcaaaaactgacgctagaaataacttaaaaactacctccaaagtccaattttgtagtagtgtaaagagggaaaaggagagagaaaatagtttttagaaaagaaatatctgaaccaaggtggaatgcagttcaaaaattagcaaccgttcataacttccttttaattgaggataaattatcaaacgaaaagagaaaaaactaggaaaaaaaaaagaaaattaaggagaagatatacatgttgaagatgatgaaaacaaaaagaaaaacagagggagaaggccgaagaaggcggcaacgtgtttaaattagaagaaaaaactgatagaagtgacaaatgtaactcaacacagtaaaaaagaaattttaaaaagtattatagtataaatgaaaattgtacacagtataaaagtaaattatgtcgtgttacagtataattgaaaaaaaaaagccaaaataaagtatgggatgcaaattttaattttttgttccctttttaattgtaattgtgttgtcacacttgtttaagttgtcttgtatgataatttcaaaataaaaattaaaaaaaaattaagaattgtcatttaaattatgtggaaaaatttacaatgcactttttaaaagagatttac

SEQ ID NO: 176422 - DNA, 586 bp, Cannabis indica
actataaattattgggtctctcttattaattacttaacaaacttttcattcttgccaatttagcgagcggatgtggcttagaaatctagtccagatttttgagtcaatattttagtgcttttactgagaaccatagctcaagaaagtcactcatcaagattgttgcatcacgttctacaagtgttgacaaacaaactccaataactggccaagcaactgggggcatgctagtggacgaagttggaactaggactacttctctacgctaggcgccaagagtaggccttgaaccagctcctcaactcgccctccaaggccaccaccaactgctcctagggctggcaacaacgatcagatcccacccggggagccgcacatggagatagaagaccctgaggagaccaatccttaggtagctcagcttagctaaactgtggctaacttgcaacaacacttgggagactctctcgataagtaacatgaatggtttcaacactggttcatgaaaaactaaaagaactttgaaagccaatgcattaagaaagaacaacagagagctaagttgtctcaatggattagagaagct

SEQ ID NO: 176423 - DNA, 778 bp, Cannabis indica
ggaaacccctcattttgtcttcagactcaaactgtttaatgaaatgttatgacaatgttaatttaagacagctacaaaataaaaggctaaaggaggagggcttactcactcacacattcccttcaagttttactagatttacctatatgggctaatagttaatattgtgctctaatttctgcttgtcataggaaattttcttttcctcccttcaaccacttgaactatcaccaaacatgaatttgaccctttttactcatgggactagcaacataagggaataaacatgtcaactagaaaaaaagacaaaccccataatggaacaaaatcacatataaagcactttccccaaattccttcacaaaagagactgatgtagaaaactcagcatcacattctatcagaattcaactttaagaataataattcttagccaatcctccctataaagtagtcaaccctaacacccaacataaattctagcctaagctaccatcatgttcttattaagcaaaaaactcaatgcaaaacatacattttcctacaacgattaactcaaagcacactcttcttttacaaatacactacaccaagtagtgtacttatgcatcaagatcaaacgccaaaactccagaaactcagccgatgccccctaatctttctcagaagcactattcaggccaaaataattcacatagaatacctgacgctaattactgaatctgaacatcaatagtttatatgttaaagaaataagcctactagatgcatgagacag

SEQ ID NO: 176424 - DNA, 702 bp, Cannabis indica
tggtcctttagagagcctgaatggcctggtcccgaatcccctttctcttgaggaccaaaaggacctggtaatcgtacctgatgctgtggagattagacagacccttttctctatgggtagtctgaaagctccaggccctgatggtatgtcggtgctgttctttaagcactattggaacacggttggaagtgacttctgtgacgctgttggggaattctttgcctccggcctcatgcataggggaatcaatgctacaaatgtgatcctaatccccaaagtggataaccctaagaaggtctctcaatttagacctatttctctctgcaatgtgatctacaaggtcatctccaaaatcttggctaatagaattcggccggtgcttcccaaactaatttgccccactcaagcggcttttgtcccgggccggagtatcaatgataataatgttttggtccaggaaatcattcactctttcaaacgaaagaagggtaaagaaggcctgctcgcaattaaaatagatttggtgaaagcttatgacaaacttagctggagttttattgatcatgtcctctctactttcaaggttcctgatttattccggcagtgggtttcgcagtgtatcactacgactacttttaacatccatcttaatggaggaagggtgagcagtctgaatcctgagtgtgggttacgacaaggggt

SEQ ID NO: 176425 - DNA, 793 bp, Cannabis indica
gggagtatcgctagccaatcgcaacgcgacatgcgcaaaggtgctaggcaccactggtgacctaatagcaatgactctaatttaaaaatatttagtaattaattaataattaatttttaaaaaatatttatttaatatatatgaaacttatttaattgtaagtattggatattactagtcttctttaatattaatcaatgtaaatgtaacaaattttattcgaaagttattaatatatgagaaatattaaaatgtattaatagtagtgaatagtacttaaaatgtgtcatattatatcttgaaaataaaatatatcaataagtctcacataatttatataatatatataataactttaatgaattgtcacgaacagcaatatactcttaattatacatatatatatatttataaaatgtcttaactatttgaaatcctcagaaaccaacgaattttaaaaaaaattatttcatacattattattttttttaaaaaaattaatttataactcaaaaaaaaaaaattaatttataatttgagttgcttcagtaattattctagtagtttctatatatgagttgctatgtagattttgattacaatttaagatactttgttagttggtatatgagttttaatatgaattttaataaaatacaaaaaaactactttgaaatataaaaataaaaaaaaaaaaccaataaaaaaatataagataccagtagtagcgtggactgtcgatactacatattattaacattaactggacgtttggaatgaagtgttcaaaata

SEQ ID NO: 176426 - DNA, 1222 bp, Cannabis indica
gtctcataaatatgtatatacataccatactatattactctgttctatttatatagtaattacaatttaaaaacaaaaaacaaaacatataattattaatttgaataatgattttcttagaagttatgttaaataaaatttttataattaatggttaataataacattattattaagcaatcgattgcatatgtgtaatggcaaagtcagtataataaataagaactaaacaaattacattttttgttttgttttgttttttttttttattattgttagtcaatattacacttttatttaaacaaaaacgtgcattgataaaattagacctcacggtcattacaaaaaatattgcttgggagcgaagatacacacaatcgaccatactgattgttaatgaaaaatctacttgactacattatggatcataaagttataacttctctttataaaagaaaaattacaaatattaaaaaattgagaaagttgtttacaaaatttagcatagttattaatttaccatcgaatattcaggtcgttgagcgaattgataactaccctagagtcactctctaaaatgatttacttccaacttttctccttagccacttccaaagccaagtagcaagcagtcgcttcaccgctaattaattataagacatcaccttacaatagtgcttgacacattggtaccctatagcaattcttttcaatttagagtcgcaaaatgtgtcataatttatgtgagttgcttttatatttcgcatcaggcgtgtcgacttgttatttgactcgtgtctaatattctcaatcctaacttgtaaaaaattgtaacgtattcatattaatccactttaacctattttgctattattaaagctaaagttgtaaaaaatcttaaaatattttcaatttattgaatcgctatataaatatatatttttatataattatattattattattaatttttttatttatttttatttaaaaaactgtgttaaaaatgtcaaatttatattaagtcaattgtattgtgtttgaccaatttttattttatgtcaagtgttcaatacggtcattttcgactagcgtttaacctataaaatttatattgtgtttgtgttataccatattaaaattcattttgccacccttcaattaagcgtgtgactattatctaaaaaaaactaaattaagcgtgtgactatgagtgaaagca

SEQ ID NO: 176427 - DNA, 916 bp, Cannabis indica
tgggtgttatatgtgtcctgtttaagacaataacagagtctgtactgatgaaactggaagaaaattacagttttataaacattgggtacttatgccactaaaaaaaattattgggtttatgccgcttacaaacctaaaactttgggtacttatgctactatttattctttactttatgactttttttcaaaataattttttatttttattgtatttttaattatttttctttatttgttaagatatgagtttataaatagggcgtttttcatttttatacttcacaacattttttttttgtatttttacgaaattctacataaaaattcctattgcaactagtgctgcaacctaaattgcaacaaaaaatcgtatagaaacccattgcaattagcgctacaacccctttagaaacccaaaccgtaaattttaaaaaaaaagtgaagaaaatagtacatagggtaatttctcttataaataaataagtttgattttttcgtcaaaaaatcttactttatttaaattatttgttacattctcaataatttgggtttgatcatttttttaagatacctaaattagaaaaaaaaaaaactttcaaaatagtttttttttttaggtaataatttaagttttttttttaaattaaaataaatatttttttaattaattttgatatttttattagtttttaataatttttattctttttttcctagtaagtaatagaatattataattactttaaaaaataaatattatatttttaaattattttttaaaaaattagtcaaaattttgtattggtcaaagttcatggagtaaaaaatatgtaactgttatattttgtattggtcaaagttacggtaaaataaacatagcctaacagaagggacataattatgtaactgttata

SEQ ID NO: 176428 - DNA, 786 bp, Cannabis indica
taccaactcaagatgtgtgacactccttttcgtttgaggggggatgttaaccaattaataatttcttagcagttgtctttttctgttaattagtttcttgtattttctgttaattggttgtaaagtttgttttactgtgtaacaactttttcccttttttgtactgtttcattggtctataaataaaacattggtgccctgttttcgggtaagccattacagatatttttcattctactggctctctctttttacagctcatagcttttctctctcactggtctttaccactcttcatggtcattaccttcttcaatatataattaaatcaaatgtatatagacctacaaatattaaatgtagtataataaatactttgaagttaaattttaataaaatattttaaaaaataacaatacactatatttataactgtcgagtgattttgtgaaaaagaaattcttctattttacaatgttaatataaataacttttgcattagtattttttttccttactaatatttatattttggaacgaccaaattagttagtaaagaaagtcaaatttaaattaaagttgtatcacaagttattttactaatatttaacccctatgggttgaatttgttattcttgaatagtaagacaagtaatttaatttgtattattgtatgaaagttttgttatgaccgtataaacataaattagtacacaaaaaagttaggaccatatacaacttcacctaaatcctaaaactcactccaatcaaaaaaattagcatctc

SEQ ID NO: 176429 - DNA, 748 bp, Cannabis indica
cattaattattattattttagaatgtggggtttggtctcggcactgtatctccgagaatagccagccacctacctactaagattggagaaattaacaaggttgtagtattatattattattattcttttgaatactattagaatttatatatatttattaattatgtgattggtaaatggtggtctggggtcaaatggatgtggctttcgaaagaaagggccttaaaaaggacgtttgtaaagagtgtaagagcgcaggctaacatccacaactaagaccctcgacctcaaaatctttcaccaccattcttttagaaattagtactactcttcatttaattaactgtgtatatgtgtaccaatctctaaatttaaatacagtttttttatatataaaagctaggactttttttctttttcttttcggatgaaattacaatgaaaattgtgtcgtataggggagtgacaatgggcttttactcctttgattattactttatggattattggtgatgccccccatttacaatcatggctatttggacttccttctcgtcctctcactcccctctcctctcctctctcaatatgaatgaaatttaaaagtggtgcctctttttctcattttgttttctttctttttcacgtgcctacctttcaagtattgccacattttattaattttaaaaattgttgaagacccagcttgaagtgcgtgaaaggctcatgtggttgtagtttttttttt

SEQ ID NO: 176430 - DNA, 817 bp, Cannabis indica
cgaaatatcgagagctctgttacctcaccaccagctttattccagtatctaacatcaagttctcacaggtgtcatcggaattcttcgacctgttcaccttcagacactaacccttggatcgaagggtctcttcgatggaatcattgctgaccgtgactgaattggtaggcttttgggtgatcttcttcttcttcgccatgggagaagtaggggaacctcacacgccttagaaataaacacactttctaacatgtttgaggtgagtacatttcataatgtacatacatgttcccttgatcttcgaggaaaagataactgtcaagcatcacctttgatagttgcccatctaattaaggataagttcgcaactgacggctcagattatttggcctttgatataaggaaagatatgcacaagaattacgtgagccaaatgagttatgaaaaggcttggaggtgcagagagaaggcactacacctagttcggggtacacttgaagatgcatacttgaaattaccttgttacttgcacatgctacattggagaaatccatgtaccatcacagattttgtggtagaggatggtcgctttaagtattatttcttctctctaggtccttataagcgtgggtttaggttttactgacttgttatatgcgttgatgggtctttcttgaagactaggtatggtgcgaaaatattgtgttcagtggcactagatgcaggcaggtatatttttttgatagctttcactgtagttgacagtgaaagccataattcttggacctattttatgggaaaattgaaaaaagtgatt

SEQ ID NO: 176431 - DNA, 676 bp, Cannabis indica
attaatattttttatcattacacctaaactcctttgcttctcctaaaggcatggcaaaatttcttcaggtcggcccaatattgcacataattaatgagctcttgctaatggggcactcccctatttacttcatcacaaatcaaggatcacaaataccgatattacccttttgactttctgacattttagtttgctttccacaaagcatgccatctgaaattgtaatttactaagcatgtcattaacatgatatactatggagtgctctaaatcactatttctttaagtttcttttctatgtataaagtataagtccctagaattattcgaccacactcttcgtagcacatccccaaaaaccaccacctttcaccacttttcccgcgtcaaaccctactataaacctcaagtcttccctccatcacatgccaaacaaatcacaacttctttctctctcttaattctctctctagcctcctcttactcattccatctctacatcttcccctttcaagtatattatagtgaacaaaacagtacttaaataaggtatacaagtagccatggaagccatcaagataatcttcctattcgccatagcaatggccttatccgtggccttgatcaccctgaccaaccctactgaagaagtgaaaggtattggatggagtcagaa

SEQ ID NO: 176432 - DNA, 1110 bp, Cannabis indica
gatcaaataaaattggaaggtattataaaactgagatttaaaataatcaaactcaagtttactaatatatcatgctatttcaatatctaaactttaattaattaaaaagaataataatttaaataataaataaatcaattatgttatatgatatctcgaatttaaatttgaataatatatcatgaaacttaaatttaaatttcttagatttttatttttttttcaaatcagatttttgaataattaattatatatgttagatcatcacgtaattaattattattatacatgctatactataataaattattttatgatacattgatacatgttaaaaatatctaccaattacttcggtatatttacacttatttaactattatttaaaaaaaaaaaaaaactttattaatctacaaccttatgatcacacaatactctatataaacatacctaacataagagttttaattgaaaaaaaaaaaagtgagtgagtgagttaagaggttttattaacatggcgaggttttcgatctttctcttctcttttatggtggctttgagtttctgtaatgcacaacatcttagcagtatcaataaaacttacatgagttgcgaagaattacaacaattacaaccatgctctgctaacatattctcttttttcattcgaaagcaacctatcaactctacatgttgcgaatctattctcagcatcgccaataaatgttcgggtgatctaatgcctatttggtttctcaaaagccaaagatactgcgctattacaaatgccattaaatcagcaccaccagtaccttcactgactccggagcaaaaatcatcattgttgaacgctacatctcccgttgtcggtggtttgaagcaaaattgtgtatatgaactacatcgtttaacaccttgtatcggtgatataaaggcatacatgaggacaaatagttcgatcaattctacatgttgtgccacaatcctcgacgtgggcaaccagtgtcattgggattcatggccaaaatggtttgcacgaagcaaagcaactgcaaaaaatcactagggatgaggcatctctatcaatttgagcttgtctagtttgttttg

SEQ ID NO: 176433 - DNA, 1402 bp, Cannabis indica
cagctagcaaaattatatgtaccagagaaagcttgttccttaaggaatccaaccgagcatccaaatctggatttgagagtgcatcttgacagattgaattattgctggttggttcaccctgacaagacaagttcaagcacagacatatatttgatttaaaatatatgcataatatgcgtgtaaactaatttcccatttagatattatgttgaacatataatctctaacaaaagatattgtattactgcagcaaggatataagcgttactgaagtacacaaagctgaaacaatttgggaaccaagttccacaccaagcaaaaggaactcttgaaagtgtgacaataaactctcctttggtattaagaatccaaagcacttgacatttttccacattaatagcatacaattttgaaacaatgctaattgtcttcttgagagctatttgaaaacgtacagcacacttttcttttcaaaagcttaaatactagaacactttttactgccaaggacaagtaccagaaggaggagcaacaacaaaaacaacaattgtaaaattaaaacgtttagcagtgttaaatcataccacttggaaagccaaactatttctcaaaccacagtgttgaatcttttaaaacataaaaatacaaaacatagaagtatattcaccctttcagcaaccaaaagagcagccagaaaaaaaataataaaaaaaaataagtagtgcatagttcaactattacaggagaaaatgtttctacttcaaaacagctcgtgattcagcgttgacgacagataagttttaacataacaagatggtaatttccttcaaatatgaaactgttaaactagtaagtgacctgcaatcaatataatctaacataaataccaaatgctactaatatactaccttaagtggcaattacttgaaatatcaacaccatgaacagaaagaaccaaatataccaaagataagacatcttaagcagataagcaaatcaaatcgtttgcataaaagaaacctacagttttcggtaaagaaaatccctcaggaacttcgaaacagtgattaagacagtactgctcccacatagcgagtcgcttatccaaaaccgaaattatcattttgtgaatcacagcaacaccctgagaaaacgaattttatatatttttattatcaaaaataataaataccgaacaaattgaaacacaaaacaaaacaggcaaaagctcgcaaaccctagaatcgaggaagattgcctataatttcgaaaattataaccaaaacgttaagcgcgcgaaccaacacaaagagaaaaaggaaaaaatgaagctaccttggttagagtctagagacctatcggggccatcagttttcagattggatgaagcctgtctggtagt

SEQ ID NO: 176434 - DNA, 857 bp, Cannabis indica
attttaagaaggttatgaagtagagtgctataattcagttgctactagccaaagggtaatccctttggctagttctaatattttttagtggggttctggttgcttagttcttgttgtttggtagattctggtcaatttgataattttctaataaaagttttattctggttttctgcttttttcaggtgtatttcaatgagctaggagcggtgtttgaagatgttatagctttattgtctaaatttccgggggcagttttgtcctatgtggctcgctttggatatttagcggcccatggtttggcaaagcatgctctgcggttagacgatgagctatcctggttcgaggaggttccagcgccggtggcggacgtctgcgtcgtaaattcatgagtgattctaatcactttgtcaaaaaaaaaataaaatatttaagtggtgtttggtaatatttttatttttaaattttttaatcacaaaaaaataattaaaattttttttcgaaaaaacaaaaaaggaaattaccaattgtaccacattttccaactttttttcacttttacgttcttttttaaaaaaattctaaattctataaatattatttacataaatatttttaactgactttttaaattcatttttacattttgttttactcttctccttcctcttcaaattcagtggctttctaaaccatctcggcccatctcctactgattgtaaagacgctacccactatttctcatcatgtttgatattcaaaagttccgattggcgaaagcgttggagtcggagctacctatggaccagtttttgaagagaaatgcatgcaaactcagtccgagcgatgattgccag

SEQ ID NO: 176435 - DNA, 672 bp, Cannabis indica
gaaatgtttatattatattcttattcaatacacttttaactttttgtgaaatgataaaccgacttacatgcacacacacaacacgtatatgtcattataatacatcacacgtggaaccccataaatgaagattaacaagatcatgaaacttttacaaaccaaaagaataataattaaattaatttatctctcaaattttgatatatattaaattatgcctttaaatttttaaagtcgttaaaaatatttcctgaactattgagatgattagatttaaaaacttttgtctaattttagtaaaaaaaaatctaacataaatgaaagttcagagaacataatttagtacatgtaaaagttcgaaaggcataaattaatagatatcaaagtctggaaaacatgatttagtacataaataatcactaaaaatagtaaaaattgaaatataattagataaaaagtctttaaatttaacaatcttaatagttcaggggaaatttttaacagttagaaaagttcaaaaaacataatttagtacatgttaaagtttaagagataaaaaacctaattagtgttcgaaatttagttattataaacacggaggattacaacttaatatacaaaaatacatataaatatacagaggactagtaaaataagaattgagtattttac

SEQ ID NO: 176436 - DNA, 581 bp, Cannabis indica
atactatatcaacaacagtcaaatgaagtgttacacttcagaattacctagagaactgtcatagcggcagctaccagctggagttagaggagaaggggaacctgcattttaccaataaattccagtgagatatttttcagaggctgaaatttccaagtttctactaaatgggctacacttttgcaatagcacataccaccatggaatttacagcacgaacgaagaaattcaacataaaaaagagaccagatgagaaatgacaaatctcctcaccagtatttgacacaggtgtctgtggtgcagatctattggcctttgcaccctttgacctattgtatgttctgcctcctttagcagaaactggagtttgcatcggactgttgttaacaatattaatatatccaggactgctagcccaatccctatgatcaacttcgttattctgtaatgcattcttccgctttaatgctaaacaacataagccatataaactcaaattcagtaaaaaaggcaatctacaaacaagaaattactgttaaatgcacatcatgctggacgactcaccattataaagaacagtc

SEQ ID NO: 176437 - DNA, 726 bp, Cannabis indica
cttgataaattttcacatgagcaaattataattacaaaaaagtaaaggtggcgtttggtaacacttttttaatcagttttctgtttttaaaagtaaaaaagtgaaaatatttttcaaaaacatgttctataaaactgtttttacttttcaattttataattagaaatcaaaattttaaaaacaaaaagaatcactttcaatattttttttaaacagttttttttcttaatcaatcttttagattaggaccagacccggacccaaatcccctccctacggccctggcgctaaacccgacttttgacttgaacccgaatccgaccctggacctagacccgacttaaataaaatcaaaaaataaaaataaattttacagaacacacttttgttttctgtttttaaaattgaaaaacaaaagtggttacagaacgcatttttgtttttcaaaaacaattttttaaaaacaaaaattttactttcattttgtgataaaaaattaaaaaacaaaagtgttaccaaacggcaccaaaataattacataaaatcacaaactttttttctaaaaaataatttttacgtttcaaagttttttttaggttttttattatattttttactagtattctttaaaaactacaaaaaaataaacatgaaagtaacaagaaataacatcaaaataacataaaaataataaacaaataataaaaaatacaataataaaataac

SEQ ID NO: 176438 - DNA, 669 bp, Cannabis indica
acaaatacctaacaaaattaaatcaaataaaaaaatcaataataacaataaattagtaatgattaatatgaatatgaatatgaattttacctgtattcttcatatcgatcaaaatttttccaatcgccgtgtttattcgtagccattataataaaagacaatacagagaagagaaaagccattcctctcagagctaaagagcctcttctcaacaggtcctccctcttccaccgccgtaacactcccgtgactccaactgatccctccgccgccatcggattctccacgtcagcaggcgatggcgacggttccaattttggagatccgacatgatcgtttgggttcgacatggtcgtttttgagggattagaatacgaaattggaattgaaattgacgagtgtataaattaacaatggagaatacaccagacgatactaccttcttcttcttcttagtttattttttatttttattttagtaaataataattaaattaaaatttgtatttatttatatattttttgggtagagtagtacctaactacagctcagacgattactagggacgaaggaaagccatgtaatgttcggtaagagaaaagtgttttacattgttggacttcatcatatatctgccacgtggctttatatgtatatatttatagatt

SEQ ID NO: 176439 - DNA, 643 bp, Cannabis indica
atcaataactaattagacaagtaattagccaatttgagcactaaattatacattgtcattattttgagtacatatattttgattttatgaggataatttcaacttttgagaagatgtgtgaaattaacaagttatgaaaattattttttttaagaaaaaagttatttaagttttgatgattatgaaaaagttgatatacagtagaacctttatttaagaatactctattcaagaataacctctaatttgttataaaaaaataaagtcccaatttgggccagttataaataagaataacctctatattgtaattagttatacattttttaagttccgtattaataaaatatacctctatataagaataattacatcttaaaaaaattaatacatatattttataaatttatttatgtagaattaataattttatttcaaattatagtacatgtataaatattatatgtactcgaaaataattttaatataatatagtattaagaattatttattggtatttttgttacattgatattttttgatattttttttttcaagtgtaactctatctagttataacctctcaattagaatattattttcttggtcccaagtgtattcttagatagaggttctattgtat

SEQ ID NO: 176440 - DNA, 792 bp, Cannabis indica
ttataatatgattttttttttcaaatatatgtaatattttacataattttttaaagacagttcaacataatgacttgacgattagtatacatgtaatgatgtacaaaaattttctatatattcttatatattaatttttttacatacaaatttaaataaaattaaacatttctttatacattactaattttttttcttcattttgaatttattatttattatttgttattttatttattttaattttttgttggagacataaaataacaataatttgttttattttgttgctagttatatgaaaaaagatatattctttcataaatattaaatagtttaatattgaaaagtaaccaattcaatcctcacttttgcagattagattggattggatttgagttattgtacagattggattgaatacaaaatatgaaatttgcacttaggtggcgtttgattagaggtaatgaaatggaatggaaaggaaaggaaacaatctttattccattcctttgtttagttgcatattaaagtattgaaatgtcataattgttttatcaatttttttatgcattttatattttattccatttttattcctatatttcattcctcccaaccaaacgcgtgcgaatcgaatgtactatgaacaaaatagtacagattgaattgaatgaacacccctaaacattatagtttgtcaaaaataatcaatagtcttaataaagtttcaagtattacctaatttaaaatgagactttatgtatttgtttaaataaaaaagacttttat

SEQ ID NO: 176441 - DNA, 696 bp, Cannabis indica
atacatgtaaaaagggagattatatttgtacctcaaaaattataaccacaccccatcattaaattgaccccaattaaatattgttttttataaccccaccacaccctatttagcaaaagagtataattttgtacacctcaaaacttctcattttaaattattttattacatataaattaatgtatcaactgtataaatgtatacatatccattcaacatcataaaataaagtccaaatacaaacaaaatctcataaaatactgtttgaaagagtatatatatatataatatatttacttttgtatttattccttcattgataaagtctcaaaattttattttattgatggatgattttaaggtttcaaacttcttaatcaatagtttatttttattgaaagaataacaaatcgttttttaagaaattgtgggtggggtgtacttattaagaaataaaataataaatataagaaaaaaaaattaaagatatttattttggtcattttacaataagttgaatatttatcttctgatgtcatagtttcggactttcattatattttatctgtatatttgtaatcttgtgtacccatttttttaagagtacagtatttctcatgttcctaaatctgttaatactcatgctcataaattagctaagtatactttttcagtggacacaaattgtatttagtt

SEQ ID NO: 176442 - DNA, 749 bp, Cannabis indica
atgcttcattatcactattttaatttgttgtcttaggtgagtggtggaaatcagatgtggaagctgtgattaacgaggctttgaaatctggtttggctccaaatgtttctgatgcccacacaattaatggccaaaccggccctatctcaggttgcacctcacaaggagggtttaacttacccgtagaaaataacaagaggtacttgctcagaattatcaatgctgcgctcaatgaggagctctttttcaagatagccggacaccaagtcacagtggtcgaagttgatgctgtctacaccaaacccttcaaaactgacaccattgtcatagcccctggtcaaacaaccaacgttattctccacgccgaccgaaatgctggcaagtatctagtcgctgcatcaccattcatggatgctcctgcgattgtcgttgataacaagactgccactgctactttgcactactcaggaaccctttctagctctcgcaccatcctcacctccacacctccaagaaacgccacatcaattgctaataatttcaccaaatccttaaggagtcttaactctaggaattaccctgctagagttccactaaacattgaccattctttgttattcactgttggactcggaatcaacccttgttccacatgcatcaatggtagtcgagtggtagcagatatcaacaatgttacctttgttatgccccaaattgctctccttcaagctcatgtattcaatattagc

SEQ ID NO: 176443 - DNA, 673 bp, Cannabis indica
taagtaaaaaaaattatttaggtttcaagaaaataaaaaaactaattttagagattattttttaaattacgtgatatttagcgtttaataaaaaccttaaaaaaataatatacaacatatataactaataaaatagaaaaaaaaaagttaaaaaaaatggtgatagatttggagttattattttttaaaaaataaaataaaaattaagaaattacgaaaaaaaataaatagagatatatatatatatttataaaactaataaaaaattaaaaaaaaatgagagaattaaggagagaacaaataatactaattaaaaaaaaattagagtgtcatgtcatgtctcatatctctcctttatatatagatatataaatatagataaatgtataggtttaaatatttttaaatataattaaaaattaaaaaaattgagagaataaaggagaagagagaaataattttgttacgattttacagcttcatgtcaccgtctcatatagatatatagatatattgatgagattaataataataataataataataataataataataataataataataacgaacgattttagagcatcatgtcaccgtctcatatagatatataaatatattgatgattgataataatagtaataaagaaaaaaagtgtagtatgggtatt

SEQ ID NO: 176444 - DNA, 620 bp, Cannabis indica
aatatatatcattacaaatacccctaaaaatattaaaattgaactttgaattctaaggtaatataggatatatatatatatatatatatatattacaaataatacaatgttaattaaaagggtacatgtgtcattaaaagtatcaccttatatattattacaaatacccttaaaatattaaaattggactttgaattcaaagataatacaagatatatatgtcattacaaataatacaatattaatttaaagggtatattgtcattaaaagtatcacatgattaagacacttttaatatagtaagatacatatgggtgactactcaatgattacatttttattgtagcgataatggttatatttttcttttacctataatagtaggttactaataggtaaaacttcattttttagaatcaattaattataaataattaataatatttacaatgaatccgtactataaataagacattttttatcaattaaaaattataaataatttttatataaatccttactataattattttatcaattaagctattttattataatatttacaatgaaattttatttttttttactaaaaatttaatttttttttacactaaattag

SEQ ID NO: 176445 - DNA, 1068 bp, Cannabis indica
  modified_base (1006)..(1006): a, c, t, g, unknown or other
tcatttttatatatgatagtgacattcgaccagtttcgaatatttatggtgggaaaaataaatttagatatttaattgtgtatgcacttatgcatataataaactaagtaaactattttgaacttaattttcttatgaagagttttattccattactaaaaatttgtaggatgcctatataagttagtaagcctaaaaacgacactcgactactattgttgctaccttttgataattaatgtacatatatagtcaacccactgatatttattaatatttggtcgtgatctttcctttatcaatagtaaagttttaatttatatcaaagtcctaacttttaagtaggttataaaaataagaatatttttattaatgctttagtgggtgtgcatgtgataatggaatccatgttcatcgttcaagattataatatagctcaatagctcataagtagatatatatatatatataataaaaaaaaaaacttacagtacaattaatgtgataataattatatcatagataagatatcctcttaatttgaagtttgcacacgaacgttttttaacaatacaattaccttaagccagctgttcaaatttcttaaatatttacttcaaagttaaaaaggtcgtaataaagggggtactatatggcaagaatatatatatattggagttactgaataatctttttggcattttaaagaatattaatttaaatttatgctgtttggtagtaatattatagagtatagctagggacttgttttttggtttggctgctttacagctttgttgttctactgtgtgtctgctctactttgttggattgaattttcaaaagtagccttcttacgagataataatagcatgaaaggtagagaagaagagtagtatataatgtatagtcacgttgtattgcctttttgcttttttccaacatcacttcatatcattatcatatgtctccctttgtctctccattattatatataatgaacatntaactatatacacatttcattatatatatatattatataaacatgagccaatggtctttcag

SEQ ID NO: 176446 - DNA, 594 bp, Cannabis indica
gtctctcaaaacgattcgatcgagctccggaacatagagctggttcgcggcggaccgagaggggacgtcgaaggcgaagccgttgccggagaggatggagtgggcgatctttagggttagggattcgatggtggactggacggaggatagagagaggtcggcgacttcgcggcaggactcggagagagctaggtcggcgagggttagggctttggatgaggaggatgaggcttctgtggctgcgcggactgaatcggtgagtttctgaaggatttggaggatgactgggtcgggtttgatttggttcttgaagggttggtggctttcatcgtcagaactcgggtcaggccgtcggcgcttcttcttgtccgccatttcagtatcagtagagagagagtgtgtgagtaggcgggaagaaaatgaagcaagaaaattggagccaaggaaaggtctttattttatggtaactgatgattaagaaaaacaccatcttttctcagagaaatcaaaaaaaataccatctgtttgctgtaatttagtgaaacaccaaaaacatttttaaattctaatgttttaaaaaagatttactaaatg

SEQ ID NO: 176447 - DNA, 834 bp, Cannabis indica
ttttttttcgtcattttcagtttagatcattgcaggtattcttttccagttgattttgccagaattaatagttgtatttttctcgttttggtttcattttggttgttttgcggttttgaaacgagcgcgtattttcatcttcatggttcgctctgtacagctgaaggcttagtgcatgtggtatttttgtaaatatttgtatgtggactgtataaatgtttaatgggccggcccaaagtatttttgtaattttttttcctttttgtatttttttgtttttttccctaaaatttatactttttattaacactaatattcctttaaataacaaaaaaaaaaaaaaactaattaaacatatgtggcttgattgagcgtaattgtaaattaagaaagtcccataacccttgaatatatattacacgtgtaaagtttaagatgtgaatttttagcgttagataatgaatctatcaaatattttattcagttgaggtagaattatttctatgatccaaatatccaataatcccaatatgttataattataagatgtcatctttagatctagatttgagtatgtctcattgtatatatatagaaacgacagaacataataatgatgataataatgaagattattagtggttgagcatatagctgacctgtatctcggaaagaatgcagccatgaagggccatgacagtgaaggcgcagtgtctaacggcgccgctcactttgacatagttctcccaagggtattggtacatccggtaacgaccatgaggtggttcccatactgcaaatcctagctgacattatttgattcattgcacataa

SEQ ID NO: 176448 - DNA, 868 bp, Cannabis indica
taatgtaattaaacagtaagtctcctataatattttcattaatttctctccaaaaaaaaaaaaaaaccccatattcatctataacagaccaaaacactactcactacacatatcttattttatatatgataagaggcttcttcaccacctcctgcttattatacaatagtaaccttctattttaatttttatgaggacattatagtacatttatttcatcaatattatttttcttttatttatcaaaatagcttttatgtatttcatttttttaaaatttatcttgtccaacttcaccctcattttcacagtgatcatctacacttttactatgtgttgccatttctctcaacacctataatttattgacgagcaattaaattaggacattatttccaaaaaaaaaaaaattaaactaggacatttagaaattttacttatctatttaaacttttaatttatcaaggaggtttacaatctccatcttagatcactctaatcaaatgagctaaatttaagttattataactcattctctaaaatacaagaaaagtgataaaagttattttccatcaatgagctaaatttgaactgttagagcatctctaatagagagttataaatgtagtatattgttattttttgatgtattttattaaaacttaattttaatagtaatgtaaaatgtgtgtcaaatttaaccctaaactaaaagtacatcatattttgctttttttattctaaaattctcccaattaatttagtggtttgatactttgatgtgttttgaatttgttgaaattcatttgtatatgttttaatatgataacctagactaagtatatttattcgtattaaaaagtataat

SEQ ID NO: 176449 - DNA, 1282 bp, Cannabis indica
ttgacaattgcttgtgtacaatcataaaaaaaaggaaacaaaaatagaggaaaagaatcagcttaaaaagaatatacgtatgaagaaataaaaaagctaagtctatctctaaagggatttgtttaaatgttgggaataatatttttccaataacaataataataatgttgtaaaaatttctctttccttcttgttaatttattttctccattttctctcaataaaccctagatttatattgagggctgattgtagtttcatattatttatgtttgatcttttatccttaattataaatatggtgtggtgctttttataaagttgtagtatatattggctgaaccaccgaagtgtcatggtaagaaaattgaactcatcaccaatttgtgtattaatattgaaatatgtcattaaagaataaatattactaattaattttctttttttttttggtctagaattacaaactaagcaaaggggaaaaaattgataactctccgtggataagatgttgactctcctataggtggctcacacttatattaacacttctatatataaaagataaaattaagttcagttgcatgaattaattacttaattcatgcttctatatataaccatagctagtaaagattgtgtgcacgaatatatctctgtgataattaatttgaatattcaagactatttaataaaaaatacattatataataaattaaataataataaaaatgcaaacatattacaaattaatcttcaaaattgtttataattaagtactatattattaataatactacgtacacatacatagaaatgataaaaaccaacaataattaattaagaaacacagttttattaattaattattataaaataaaagtgtttactgagtaaataaagggattctacaaatagggcattgagtgagctttccctggatcatgtcacgagtgcatttgttgtgaaaacaatgaccacatttggtgattcttactttctcaccattctgaaattcataggcacatattgagcattagtttgcaaatatggtatgcccttcgcatggatatttacttagctcgaacattacaattttggaagcaatctccttattagtaatccagtactgatataaaaaaataaagaacctgctattactatatataaaaatacacaaatagctacataataatagtgtgtatcgtatctagagataccaaaatctcttcgaattgtccatctactgtcctaacaatagaaattaggatgaagaagatgg

SEQ ID NO: 176450 - DNA, 754 bp, Cannabis indica
tgagttattttttttttaattgtttttattctttatgttacagaacaagttatatttcaattataaccggtttgagttattttgtattatttactttcattcattatgcaatagaaccggttctatttttgtttatatttgagacaactacttctgatgacttttttcagtaactttttcaaacgacggtgactttttcggtgacagtgacttttccgacgagtttttcggtgacttttccgacgacttttcggtactggtgacttttcctgcgctggcaaatttttcccgcaaaagttattattgtttacaaacatggaatttccatatttttttacaaaaatatggcataaaaaaactcataaatgtaaaaaaaaaaaaaaaaacccataaccccttagcattatttatttatgccataaaaagtaaactcttataatcttcccacatatagtataatttctactaatagaaaacataatatactgtattaagagaaatttaattttctatacttacacatacctaatatctttcccttaaatccataataccccatattccccataatacccctctcatttgaaatcccaaacccaaatcgcctcctctctcttcctcttgccaaaccgcctcctctctcttcatctcgcccaaacccacggtgaaccgatcccaaatccatagaattaaacccacagtgacggtgccccctgctatcgacggtggacgcaatctcaaacccaccgtgacg

SEQ ID NO: 176451 - DNA, 861 bp, Cannabis indica
ttaatataacaaactttaagataattttttacacgaacaaatccatcccatttcatattaattttaattatgaactttgggaaaagaaatgatagtgttaccttgattttggatcgttacttattaatttagaaatgagatcttcagcttctggaaaatgagagaggaatttcaactccatcttgttctcaataatgttcaaatgaagttcgcgaccatcatgagtgtcgaaggggtggctacgcccatcggttatacaaaacgaaaatatgcaacctatgctaaacatatccatcgctgtgcttatgtgctgacccggtacaagacgttcagctggttgccaatctttcgcgtcacaacctatatacagtgacaaactcagaattttttaattaattattgtaaaaagaaagagtagagcatactaatttacatataatttttttttataaacaataaatcacaaaaaattaatgtaactattagagatggtcgtaaggtgacacttaatccgtgaagtaaatatttatttacattatgtaattcttaaaataaagaataatttgtaatataaatacctaagttacaaataaaaacttaagtttaatttttgacagtaataatatctaagttataattccggaacttctgtatgtacctaactgttaagtgttaaataaattgacacgtgacaatcctaattggtctaggtcattaaatttatgttttttttttaaaaaaaaaaacttagtttaaatataccaataaaaaataaacacgtgaataatgacttaacatttaacgactatgtacttacgaaattctagaaatataacttagatattatttgtaattagtaaa

SEQ ID NO: 176452 - DNA, 659 bp, Cannabis indica
tttttgtcctaaggcgaaaatggttatttgacaaaaaaaaaaaaagttaataatttgaactatacttgatatttctaaaaaataaaaataaaaattttatttttggctttaaaaccctcttccaccaacctcctctatctgttattccctctttaaaattattgtaatcttgagaatgaagtgtagtaatttgaaaagaattttggttgtgggttgtatttagctttagaagaatcatttgaggtagttttaatctcctttttattaatttaatttcgaaatttttaactttgttttggagctagcatattgtgttatgttgttcttgacttggatgtaaagtatttttgttatggatattaagttagtgatgttgtgttgcttgagttcagcaaaatctaaattttgggtcattttgtagttgtgttttttagcatgaattttgaacatttaagctgtgttggttgtgtgttggttgctttgaaaatgatgaatattgaacataaatttatatatagttagattccaagccttcattatgtgagctttgggaatttttgagcttgaatgtgtgaattagctatgtgataatttgttttcttttgaactttccaacactctaaattggtattagtaaccaataggatattatgtttgaa

SEQ ID NO: 176453 - DNA, 799 bp, Cannabis indica
gctcatgttggtactagctctcttgtttctgttgataacaaatgcttagttctaaataatgttttacatgttcccaacatcactataagaacttgctgagcatatctcaattaacatctgaaaataatgtgtttgttgaattttttgccaaacactgttttgtgaaggatctggacacaaagagagtgcttctccaagggacaattagagatggtttgtatcgagttgctggacagcaagggagttcagccaccaactcgcatgagtctttaagttttcagtctactaaaccgtttactggtgtagtttttcaatcaaaagatcagcatgttgctggatctaagtctgttgtcttgaggaataagtggcacaagagattgggccacccctctagtcgtgtcttgagtcttgtgttgaatacacttaatgtaaaaccagttattaatggaaaagataccttctgtgaagcttgccaatatggcaaatcgcatgccttaccatttaataacaatcccagtcgagccaaaggtcctttagacttaatacatacagacctgtggggtcctgcacctattgtttccaacacaaactttaagttctacatacactttgttgatgaccacacacggtacacctggatatatcccctcaaaaccaaaaacgaggctctctcagcctttattcagttcaaaacgctggttgaaaaccagtttgagagaaaaattaaatcactcaaaaccgattggggggtgaatttcagtcatttgctgagtgtgttgttcaaaatggaatagatttt

SEQ ID NO: 176454 - DNA, 781 bp, Cannabis indica
gtgtttctttctttattattctcttttaacatatttgtatgcaggcctagttgtaacccactcaagtgtcaactctttaccaggtatcaagtcaaatttctcagacaaatactaacttaatgtgtctctttaagtccatagatagatataacaataatagatatagattagatttctcataacaccccttaattattgtatcttccatccatattaaagttattcgaagccaatctaatcaatagtcacattattaatatgatgcatttggtagcaatacgtctctgtaattgaaaatgaaaatagacccttttttattttttctattgtgggggggtacactttctagtgggtttaagtatggtgaccctcaatttgtctgtgggtttaacacgttttcttgtactaaaaaatctttctttttttttctttgtactttagttgtatgtgtcaaatataatagccacctatctttgggcttcttctgtgttttgttttggtgtaaaatatttaatttatatatatatattatgttgtcactttcgatgactctcatgagtttttgtattagtattagtacactagtactactgttctgtaaccaaacaacttattcacattactacttcaccactatagccacataacatgactatatagcataagaaaatgaaaacactaggaccatcatgaaattattactaaggaaaataatgtagtttctttatttctttctttttctatgtaggtggacttgggttggatatgagacaatacatac

SEQ ID NO: 176455 - DNA, 1271 bp, Cannabis indica
aacttcaatggttcgataagtatttggaagaaaatgttgggtgtaaagctcaggatgtgaattgcaaagttggtgattttcatgatgcattgttttgggttggtgagattggtgccaatgattatgcttacactattggatccactgtttctggtgacactattcgaaagttggccatgattagctatactcaatttttaacggtaagatttacaaaagtagacacatttactaataatattaagaacttttcaaaacagcattgttgttaggcatagcacctctagacatgtagtcttgtaattgactagcaatacttcttaaaaattattatattaaattatatgggacttgataattagttggactgatagcgatattgacacgtaagaaaatgctaagtactaatggtatcttttatcatttttcttttcaaaaatgtgtcaaaatgtgtagaatgaatttagaatgtcatttcccatataattatcaaaatcatataatggagagttttgagttttgtactttagtagatataattttgttattgttttgcaaagaaacatagttaatttcgaaaatatggttaagattgtacccaaggctggcctgaccatcaatggccccaagattttattaatttttttttttttttttttgtttttaatctaaagttgagtttgagtattattagcctatgttaccaaattttacaaaactactattgtttttactacatagtattattttgtataaaattttgaactctagatttgcaccttactaatcatactttactatagattttttccaattttagtctcaagcatacaatatgctatgtatactctagaccatgtaatcctcttacttgatgtataatttattggtttttgcaggcattgttaagaaaaggtgcaaagtatgttgtagttcaaggttttccaatgacaggatgcttacctctggcaatgacattagctgctgaagatgacagagacaacataggttgtgtgaagagtgtcaacaaccaaagttatactcacaaccaagccatcttaaacttggttaaatctcttagaagacaatttcccaaagctatcatacatatgctgattattggacctcatatctaacagttatgcaaagtccaaccaaatttggtatcaaggagcttttaaaagcatgtgtggcatgggtggtgcaccctatatattgatgtgttttcctttgtgggctctctaccaagcctgcctaaacccatctcaaat

SEQ ID NO: 176456 - DNA, 648 bp, Cannabis indica
ttttgaaaaaaagtgtaaaatagtaactaaaaataatatcaaatgtatgaaaaaaccacaaaattaatttaaaagggttcttgatcatttagacatgcacaaccaacattttagaatatgattcttctaagtttttgtacttacataaacgaatcattcagaaaaagggaaagtctccgaaaatttgataactaaacagacttacagcttataaacgtcctgctccggcacaacaagtatcaatttagaacttatccacacaaacgccatctcgaagaacctcataagcctctctgctcctgcttttcttcatcccagctgtaaaatggacctttgatcgatcagatgagatcgaggtaacttttacccatatcatcactttagtcttcattccttctacatcggctaactttcctttctctagaaaaccggttactgttgttgaaaaccgcaagacagatgaatccttatagccaacttcacatactgcgggtatgtagacaataagctttccagtctcctcgttgaactcgtagttggtagcatcacgaggaaagattcccacgggaatatcatactccttcagcagctcgggcaaggccttctgcatttttcctgtagatcatatatagtgcagaaatccaaaaa

SEQ ID NO: 176457 - DNA, 514 bp, Cannabis indica
agcttttgttcgtgaacttagtacaccttaaggacaccctaagcaataattggaatcacacaagacaatgcctaataaaacaatcccataaaccaaaaacacaaaaacccatcagtcataaacagaaaaacttagatcaaacattccctgtcctcttacaaattagaagacaaaaattagaggaaacctaactctttaaccatatagcaacccatagcttgactctttccccaattctctatttcctttccttatcattgaatcaaaatgatgcaaaaacaagtaacaatccaaacaggaggaccattcatcgtcctccaaaaaccaacactaaagtgaaaagttaggccacattttccatcctaaagaaagtgagaggctttactatttctaagttgttttgggtcgatatttttgtctgtgtggtcttcctgtctttcattgtttgttcaccttttatcacggggttttggggttgtttttgcgagtcttgttctcaaactctttctttggc

SEQ ID NO: 176458 - DNA, 1185 bp, Cannabis indica
taggagactgaaattagtcgctcctatacggattccttttaaccaataaaaaacactatatcgcccactaagaccacttatgacccaacacttattagcgctcctctaggattccctagacctaatcgaagagcttcatgaggcctcacaagtgcagttggcgtcgtactaaagagaagtggaaaagtacttcaattcgaaggtttgggacaaaaaattcatggtgagaaactcaatcctcaaaggagtcttccctgcatcacaagatcccagagtgagggtgttaggcctcaactgggaaggcccttacgagattgaaaataaaatatgctctaggatcacctcaagcaattggacggaaccaagatcccatgatcctaaaatgttgtacatctttgcaagtactataaatgagtaggagaccatatttgtttttatttttaaattttgtgtaacttttgtgggtagcagtgatcaagatattattgttaatgtagtgatgtgaccaaaatatcatataaaatttcttaagtgtgtaaacgaaacttgagggcatgacaagtgactttagacctaaaacctaacactaaagcaccagggcgacaaattgcctgcaccggtaaaattgaattaaaaatattaaacttagtaaatgccaaaaatttacacaaagatcaagaactcaagaaattataattaaagtggagatatataaggccacctggtcgcattatcttaaaaaggtacgaaaacaaaataaaaatatagctaaaagtgacaagggaaaaaactgctaaaattttacccaccccgaaaaaatagcctcacgcccgtgcaaaaataataataaaaaagacctcatgaccatacagaaaaagagtcacaagagtttggctgcgaattgtattcaatttttcggggacgctggaggaggcaacttgggaccacctattttcttagcaagagttgcctcaagcttcttgttcttctcctaaaagagctccagaacctccttaggattctctagaaagtgaaagagaggttcaaagcgattggccttctaggtcataaacaccccatcctcatagcctttcacgcaatgttggcatgtgacgggagttacaacaggaggtgaattcatgttcgtgatgtcttggatcgattgattagcatcccagaggcttc

SEQ ID NO: 176459 - DNA, 775 bp, Cannabis indica
  modified_base (685)..(685): a, c, t, g, unknown or other
ctgattttgctgtagctgtttgagctgttgtagtttaatttttttgcaaagttaatcactgttaatccgacacttcccataaaacaaaaagaaaagtacagaataagaattggtatgaccaataagactttattccgttgagcaccatatcttgagcaatggaataagaaataacaatggcttcttctactaaccactctcacaaacactaaccaccctctttctaaccaatcctataaaccattttaagatcacaatcaaaagctctcaaatgatcatttctcatcaaaaagtttaaaatttgctaatcttaactaagagaatgtgctaagttagattttatagataacctcttaataaaagaagtaagtccttagttttaacagtaaataatttttaaagggaagcaaatgtaatcttgccaacagaaaaagttttagagaattactttttatgtaataggttttaaagtttgatttgtttgattttttaatttattgaaaatgttagtctgcaatatatatttgtatacttatatgttagttgataaatattttcttttgaaaacaattctctaacttggtagtatatattttgtagactgatatatcatgtcagtatatattgatcctaacatatttccatcctagtagtctcataagaatctctaatgttttcctaaccntttactgaatctcacagttgctctcgttgagatagtgtgttgtttattgataaactaggtaaataaaaacttccatcttgtattttgttt

SEQ ID NO: 176460 - DNA, 864 bp, Cannabis indica
ataacctttttttttttttgaggtattgacttgatgacttaaaagtagggacaacatttaggcgcactaaacatgaagcatcatgtgaagattgaaaaaaggagatggtgatgggcaatggctgaagaacatgggtgtgggggaacaatggttttgatttgaaaggcaaagcaaattaagcaattctatgccaaagaccatgacaattgacaaccaagttggatgttgtagaaaccacaaccactacctacgtattgcccacttttgaattttgacaagtattaccatttattattagagaaatgagataatatatgatttttttttatttatttttttttttggttcttaattaataagaattacaaactcattgtctttgtttagaattacaacacactattagtcgctctgtaattgggatcaagggattaaaaacccaacaccaagaaatcatatgtgaaaaaagaaaaaagaaaaaacaacaacaacaacaacaaggaacaagttttgtggagtagtaaaagggtaaggaggagggaacacccacaaacaacctctcatccaaaaccctctttgtacatttgtttttgtctctctttttcttttttagtcttttaccgtttttttttttcttttttgggtaggggtagggaggagggctagactattatacaaaagaatcacacacataggtgaattaacaagtttttaggatttggcatgtaaaattgtagttattagtcaaagctcgatgagcggctccaccggccttgcaagtaatcctctaatgacacactttgatcaatgctgctgctgctcatggagactgagtcatcctccacatcaagcagtgcaaggttt

SEQ ID NO: 176461 - DNA, 608 bp, Cannabis indica
gatcaatttaacaataaatagattacagaaaaagagtaatagttaacaaaatggtttgatatacataagaaactgttaaaactctttccaacatcatctgcattgtaacttcattggatcaatttaacaataaatagatcacagagaaagtgtaatagataaaaaaaataaaaaaaaaacagaaaattggtttgatatacattagaatgcaactgttaaaagtctttccaactttaacttattaagttttgatcttgtttgttaacaaggacagctggttggatattgaggaattggttagccttggggttgaggagttcagaaggttcaacggctgacgaatgctcagaggggtggtggggagatttaggatctacttaggtagtcttggcattgttgctaaaagatcactaggttccgcaataacagagaacctttctagttctccctttgaaattactcagtttcatattgtataatacagctactttcatccaaatcacattctttattttgaaatgctagtttctgatttttcttataaaaattgctagtttctgatttccatttaggacctatcagacagattacattaaatttcaactttc

SEQ ID NO: 176462 - DNA, 701 bp, Cannabis indica
tgtccggctagtcttcaagttcgttcagtcgatgggaggcgcgtggtggcttgtaaaagcgcgtgttcggcttttaattcgccgaggtattgttgtaccgggaaatacgggagccctcagtcgtgtaagccgacggcttattcgaagatatttaaggcggcttgtcctaaggcttattcttatgcttacgatgatccaactagtattgctacttgtacacgtggcaactatttggttaccttttgccctcgccatcaccgttgatttagatctatttatttatttttatatttttattttattattataggttaattaagttaatgaagaatattcttcttattaagtattattatatatataatttattagtattattatcatagttgagtaatgattctggcttttgttgtattgatgagattatatgtattaagtaacttagtagaagtattactattaattgatgtttttaatgatttgttatttttgttaaaatgtggttgtagtacggatttgaatgtttgtttggttgagaaaaaggcaaatgagaaaagagaaaagaaagcatcttattcaaatgagcattgccaagtgagagttttgttaaagtgagagttttgttaaagtgagagttttgtaatgagtttgtagtagcactgaaatacccgtcatctactagcatgcaaaagcaaacgagc

SEQ ID NO: 176463 - DNA, 903 bp, Cannabis indica
acgtatccatatttatgagttaataacggaagtggtagtaacggtgtaagagaattgtaacattatgtatttttgcctccaaaaataaacattagatatttaagtgtataaaatctgaaataatagctaagtatttataccgcaatttacccaaatatatatacccaaaaaaatatatataaaaaaaaaacataattttgttagtataaattaatcagattttctaaaatatttacaaatttacctacaatatttttcgaaatttacaataataccaaaaacttgtacaatataaagtaacacacaaaatagataaataaataaataaataaaataccatagcgagtcccaactccctgacatcttgccgaaaaagacaaagtttctcttacagtcatttctccaatatgaacatcatgttgactgatataagcagctgttctttgaggaatgaactcattcatttcatgtccattatatgtcactctcccagaaaactgtaccaaataataagtacttttcatgtcttaattaaaagggatcaaagtttgatgattttgatgtttttatgtttttttattttgttgtaattacctttaattcagaggcaagctttcctgctagagtcaataaaagtgtggttttgccagaacttggaggacccaataacaaggtcaatctagtaattaacatcaaaacaatagtaattataattatatataaatataaatttaaaattacaaacaaaagcaaattacgtaccttcctggctttatggctccactaacatcatcaagtatggtcacgtgtttctttttgcttttgagtattggcaaaaaacttaccaacatcttcaatcaaaatataatttataataataataagaagatattaagattgatc

SEQ ID NO: 176464 - DNA, 727 bp, Cannabis indica
ataattttaaataaaaataaaatgttacaaaataaataatataaaaattttggttgttattatccttaacattaatatattaataattgaaatttccccatcttatgggccaatgacccagcccagctacagtgtactctgcggactgaggtccttgtcactgggcagaaagctctaacttcggcccaattctgaagcacgtggcttacaatgaagctgcgaatggttgttttcgcacgtgtcccattttccacgtgatgtgggccccgggaattttcttgtctttttagtagtaatccgaacctggctcattgttttgatgacactttaatcaaagtatcattcttcttggagttttggaccacctggctttgctactatggaaatgacacaattatccctaataagaacatatctatcatgagtcatgacatcttgaaagagaaataattatttattaaagagaataaaatatatacatatatactctcttaatattaagtaaaatacatttatatttaattatatttttaatttttattttaattatataattaattttttttatattatttaacaaataaaattattttttattaaaaatatttaatttaaatgatatttataaaaaaaaaaattaataatattcaaaaatagtataaattattattttaatttaaaaccttaatattttttaatttaataattttttaaatatcatacactt

SEQ ID NO: 176465 - DNA, 526 bp, Cannabis indica
atttcattttaccagcgcaatactaaacttttgccagcacaagcaaaagtgacatttcttgtatcactatgatattgatttataatggactaaatttcgataatgatgctaatagacaaagccaatgtctcaattttcatactaaattaaaggttaattagtatgaaagttcaggggacataattcagtacatgtcaaagtttgagggacataatttggtaaatattaaagtctgagaagcatggtttagtacataaacaatcacttaaatagtaaaattgaatgaaattagacaaaagtccttaaatccaacaatctcaatagttcatggggcatttttaacgaccttaaaagttcagagagcatgatttgatatatgttaaagtttaagggacaaaaatcctaattagcctaaataaaatgattcctaaataaaaatgaaatatttacaaaaatattagattttagaaaaaaaaaaaaagtttacaattttagattttacaaaaatatatatgatgaataagaa

SEQ ID NO: 176466 - DNA, 530 bp, Cannabis indica
ctgctatcaatgtagggggctatggccccccactaacaaaagtattgtcttttaaaaaattaaatataattatagaccaaaataataaaaaaaaatcccacaaaattaaataaatttagtaagagtgattataatacaagtataaatattttttaataataaataaaccccacaaaataaaaattctgagttcatcactgcatacacatataattatgagattcatttgagtctaaatggtactgttgatttctggtcctggtaaaaaataggtgcatttttgaagctcaaatacaaccgttcattaatgatattgaatcatttatgacaagcaataaattttttcaaaaaattatgtgtatttatttctttccccaaagaagtaaatgaaaatgaatatcttatttgatttttcctaatattaacatatatttttgaaataaccacttgaggctagctcaagtggccatagatgggtgtgtaagtgttggaagtcctgagttcgagtcctagataaacatattgtaata

SEQ ID NO: 176467 - DNA, 712 bp, Cannabis indica
acaatggcttggaatttaaaaccaagtatatgcacaattatcaatgtgttatttttttctccaattagtaatattttcttctattactattacaaccttcttttttttttttttttggtttgtttcaaaagggatctattcaatcctcaagccttaatgtgaatgccttagatttttctaatatgcttgttagtagattagtttttttaatccttatcttaaccttattaaacaagttgcatatttcatattgtgtatgatctaaaaagtctcataaagaatcaaatttggagtagaagaaaacaaaacatggcaattgaatacattaaagcctgataatgacatgtatttgaaaaaatatgaacaaagaaatcttcaataaaaattaggctgcatgttatcgttaagtaatatttttttattgtttggttcatgagtatagtaacatgtgagccaagtctcaataattgacaaaattttgattaagacttgtgcggtatggagggaggagggacagagtacttgattataagaaaaggagtaaatttataaacaaatcccaacttgggaaattgatattataaaaagcaagattgaaggcatttataatgggtgtgatggagaatcctcatagggaagcagtccataccatagggctccaaaattacatgatctaaggataatgatgccttgagtgtgtcattaatttaag

SEQ ID NO: 176468 - DNA, 863 bp, Cannabis indica
acgtttaactgtaaacagaaaaattggatagagataagtttatattattccttgaatttgtattgtttattatttttaatatccctacacaaacataatcatatgtatctttaatatctataattggtattgggttctaaatgctattgacaaacataatgctattgtagggttttttggaaagaagctgggttttcgattgactatagcttggtaaatcaaatgtgagatggagattatctaattcacctttttacaatctattctactgctgaaatggagaagatattgtgtattaggtggcatattggtctaatgaaatatttgtgcatgaaaaaatgacttcagactctgttgcaggttgcttctaaagttgtagcatacattcacaatttccagcagtataatattgctgcaatacctgctgcaatgagcagtaattgtcctattgcacatcatcattggttacctcctccagagaacaaattaaaattaaatgtcgatgccgctattgattcttcgaggaataaaattaattgtcggtgctattataagggattctcatggacacattcaggcagaccttgctaaaccagtaataggcaatttcaaaccacaagaaattgatgcaaaagtcatgttttatggtctttgttaggataaacatcttcgcttccaacttgattttgtagaaatggattccttgattctcgccaactctctaaatggctctacatctaaccattcttgttttcaagacctggtgacagatatttcacatcaattatcttatctctcttcagcttgtgtatctcatattgacgggtatgctaacacgcagctcatggcttggctaaacaggc

SEQ ID NO: 176469 - DNA, 1107 bp, Cannabis indica
gtctcaaagtttgaaaaataaaacaaaaaaatcataactcaagtataggatcatagtctcatacctctcaagtctcctaacaaattaaaaagtaaacaaagatgaaattaagaatcgagaagaaaatatattgacacatgttaatccacaatgatcatcggttcactatcgtcattagatcttcataatttaagcatataatatataattttgattatggatgataatcaaaataattttgattattattcatatatatactatatatatgttaagaataaaaaagaaattatatacatctatatcggggtcggatatggtgcgaatagtattatccccgccccatcctcccttcgggtattgaaattgtcccccaccaccaccccattaaccaccaagatggggaatccccaccccattaggagcgggtccccgtggttacccatccccgcggtataaatttccatctctattgaaggttcaacttatttccaaacttcaaacaattcagattaatctttcattatgttgattctgttttggtcttttctcttcttgattcttctggcatgaaaaaactccaagttctcatctccaaaacgcaaccaagttatcttactgagttgggatagataactggcatacttggaatgagcagaattgaacagatttttggtatcaacttttaatttttgcaaagcaaactctgaagggttcttggcaagcttgatctgggcttctatgtacatatttttgaatgctttagggccagtttggtacagctgtgctgtgggaaaaaagcaactgtagctgtgctgtgagaaaaagcagctgtagctgtgctgtaagaaaaaactactgagtgtttggtaaacataattttaaaacagctgtgagttgaaaaagttgtatataagtgtttggtaagctaaatgattaaatagctgttaaatatataattactaaaataggtatgacatttgttatctaatttatttaaataattttatacatattaatatatttataaatattatttattatattataaattacggtaattttttgttggtattatatttatccaggatcttagatctacttcac

SEQ ID NO: 176470 - DNA, 882 bp, Cannabis indica
aagtctagggttttgaattttcgataagatctcgatctcattatctacctcattggcgatctccggcgtcgaattgggtcgtgacccagtaaaattctgaggccgagaaggtcttttgactgccacgtgtcgtccacggaccactgctttgtagacatatccatggcttcctttacccaaaagcttctgttcagaaaacccatttgtggcagcttcaagatcactatactcgaaatgttggatcttaatgggcttgtcttgaccagagccgacaccggcggttgttttggcagatgggttttgagaattggcggtggaaacggcggattcagctctacaagaaaggtatcccatttaatcaagatcgtacctttatgtctatataattatatttttctagatttttttataagtaagaagaagaaagaaaaacaaatgtttttttttttagatatattttatccaaaattaaatccaaggaagagaaagagagacagaggattttggaatttggagtattggtgaagtaaaagttttgggttttaatgcaattttttaagatatgtttttatttttattttggattttttttgggattttgggattgggaatggtccaatttttaatgctatgtctctctagtagagagtagttgaagtatgttgtagggtgtttttgtcttttatgggtccaccatataagaatcccaatggaaaattttatataatttattatggtaagaatatgctaatttttttttgttaatgtgacataaagattggtcatttatttaattatttattgtaatagtatttttgcatgacaattggcaaatgtatacgtatataagttatctatatctaacctaacaaaagatatgat

SEQ ID NO: 176471 - DNA, 792 bp, Cannabis indica
atactcataatgattggcgagcctggtcggccgagcccgccaaagtgacgttttttttttaaacagtagcaaaagcatcccccatacacacatcaaaccccttcgtcggcccaacatgcccaatagaaaaagagaatgaattataaaataattgattttcatacaattgtttactaaattttagaaaaagagaaagtagtggtacccacataaataaggaagaaaataaagggaaagcttctcccccatttttatagggaatacctttctttttcctaacttaatttattttaattttaattttataaaaaaaataaaaaaaataaatatgccctttcaaaatctataaacagaaaataattacatgttctaataaaaataattttgtcaaattaaagtatttcgattatctttatgtgattgtagttttctttccgacagtttaataaacagcataataaaatattatctttaattattttttattttaaaccgatacatttctctcattaattaacgagctataaatggaattaaattttaaaaatattttggttttatttattacctattatatatcattttctataatatttttcaaaatattacttttttgattataacttcttaaatatagttttcatggtacctataaagtgttttatataattgagagtgttattcaattctaaatctatagtagtgcaaggcgattaataagttagggaatttacttggtaaattctaaatctacttattgtaaagctcggttatataggtccatggtcccct

SEQ ID NO: 176472 - DNA, 534 bp, Cannabis indica
attttattacaaccttatctctttagcatgctaattactctaaaacctaatactagtaattatgctgacatttttttggacaaaatacaacataacttgtcaacttatcacaccattcatagttcaaaattattacatatgcatcctctctataatataaatttgacaaaattttaagtactagtcaaagactcatttgagcatgtttaggagtaggtccttcagtagaaacttctgatgctgatataataataagtggttctactgtgagtagctcttttatattcttaatcaatgtaatctcatcctcttgcttcttaaaaccctcgagtttgaccactttgagatgaccaagttctgtatgcctagtacatttctttgagactgtactcattcttggcaccaaatagctttgggggtcaacctgcaaataagtgaacaaaataataaacgttattttagatggttagtcagataatagtaaattttagatgaaaaaataaaaataaaaaattacagttacaaatagcctct

SEQ ID NO: 176473 - DNA, 505 bp, Cannabis indica
attatattttttcacaaatatcacttaaattaaatattttttaataaaaaaataatataaaaaaattaattatacaattaaaatatacataattaaaataaaaactaaaaatataacttgtattataaacctaatatataaagatgtacacgagtagatgcacaagatataagcgagacacgtagaaaatatttaaataattaattatatttcgtttcaaattttgaaaatcttatatcttttagtatttaaatttatgatttttcttaggtgagagcgtcacttttgctctcacctatgagagctatttttttttttttagttttgattggttcaatagtgaaaatgtataggattaaaatgagttgttaaacatgctgataaattttttaatatttattttaacaaattaaagttgactttataataaaaaaaaactctcttaattaaaataaaaaatgaaagttaataatttttcatgtatcttctttaacatcaaaattaa

SEQ ID NO: 176474 - DNA, 524 bp, Cannabis indica
ctattattctcttttcttattctgaacatgatatgaaataagaattgaaaaacaaacaagatcttatgagaatagaatcaataatattttaggttgtattagaatctcttccattaattcaaacatagacaagagaataataataaaccaacagcccaatcgaaaagaagaataaagtatacaccttactcatgcaacttgatgaaaaaataaaaaaaaaaaaagaatgaaacttaaaaataaatatcttataaaaaagaaaaggtaagatgacatacttattgataatagagatatctacctaattttcttaatggctttctcatcatcctcacaaccttaaattaatattccaataatcaaccttacattataataacatatccatttgaaattgtgatatcgtattattggatggttttaaagagaagaagaacacatgtatctcagctttaatcaaataatatactttaatggcataatttacattatgtcgttaaactatcataaaaataataaacagt

SEQ ID NO: 176475 - DNA, 586 bp, Cannabis indica
atattgtcacacacggaatatcttttcaaaaatactatgtttttataaaacaccagtaaaacacaaagcagaacaactcaaaacaacagtagaacaactaaaaaacaccagtaaaacaccagtaaaactttaaacagtataccgcagtatgaaacttataaaaaaatacagtaaaaaagtaaaaaattccgcctgacagtattttgtaaaaaaagaacaaaagttagtataccatgtaaatttcccttattttatctctcttccacattatttttagcactcttacatctaaaaaatactttaatgtataatactctttaaaaatactataattataatctcacacattatatatcttaatttttagctataataatttttaacttcaattttttattacatccatacaaatttttaaaataatattttttctcctcaataatataatatcttaatattttgtcacataatatctatttttatttacatctgaccaagtaaaatgctcatagcatttccctttatattttcgtgggtgtggcaaaaccactataaaattgtcctaatttggagtatttatattagg

SEQ ID NO: 176476 - DNA, 980 bp, Cannabis indica
atgttattgagtgtctacggtaattaggaatgagactgcacacagaggagggaaaactcaaaagcgtaccatagaaggaagccagagacagagagagtggtggtgtggtgtggtgggtcccaccaaaatagttgggtttttttttaatttttaatttttcgaaaataatttcttaatattaattattgacaagactagagagagttggactgttcatattctctgcaactttctgttttcatttcccaatggactattatagaagaagaaatcggatcaggctttaaggattttgattttgaaaaataaaaaaaaaaatagaattaatattaatttaaagtattattattagaaactaataattaaaattattttatagacgacatttatatttttatataaatttaatatttaattatattaataataatttgatagtgagaaattttagataatttttaataatttttattaatttaatgtaatatattaaaaataaaattaatatttagttttttttttttgtagtaaaatatttagtttatttgagtgtatagtgatataatgaataataaatgtaaaaaataaatggtaaatactaaagaatcttatcaacttgatttttaacaaatattttaaggtaagttttcctgctattaattttggtatataggaaaaaaatattttattttttttaattgtgtatattataattgtttaagattattagtaaatttttaaaaaagttagaataatttataatactgaaaatataaaaaaatattatatgacacccgtggttgctttttcttatacatgtggtaggatattgtttgaatattatttagtattgtaaattatttaaattttttaaaaaattgataagtaatcgtaaataactataaatatatatacaatcatgaaaaaagattgactaaataatatttttttaggcattttttatttttacatttctaatt

SEQ ID NO: 176477 - DNA, 640 bp, Cannabis indica
ataagacttgtttctatattcctaacctactattcattacagagcacttacatgacttaaaataatttttttttttaaatatttgaggaactaaattaaaaatatgctttatcatactcaattttttttcattttaaaatttctttaaaatttactattcatattttatatttatagaatattattgttctaaatatattttattaattattttagattttacgtattaatattttatatttgaaattaataaaatatatgaaatttgggtgatgtattttaaagaaattgatatatgatgtaatatataaaattgaggtgaaataaagaaagtggaaatttttgtaatgtattttaaaagatagagtagagaaactgatgagagtgctcttataatatcaaaatgatgtactttgttacgttgcaacgttgatcctaaaatatagtttgttcattttattttcctacaaaaatcaagttctcatgaaccctcatcacaacattataggtgtattgttttgacgttgaaaattaagttttatggtagcaatgttatgtggctccaaaattatggtttggaaagatccgtcttttgttaaaaattcaaaaaaatcttgcagtattccaaatttataaatga

SEQ ID NO: 176478 - DNA, 723 bp, Cannabis indica
ttctctttctctctctctttcttttcgacacgaacccccctaacccttcttcttcttctgtcattcttctttatcagataaaccgtatcaatttgtttattccatggaatccttacccctaaacacaaaaggtggatcaggtatgtacatactagtttattttgtaatggtaatattttgtaatgataaagattgaattaatcaaagtccattcagtagttaaatattcttcttctgccatttttcttcttcttctgatggtggtaatggaagtcttctctgcgatttgctaaaccagataaaacccaagcaaagagacaacaaaacccccctcgaagctccaccgtcggttaaaccccctcgaagcactatcgttcaaaccccctcaaagggcttctggctaagaacccacacaccagcgcaccgcctatgtgaaacctcgtcaccagagcatcgcctccgtcgaactccccaactcgcgaggcccttctcgtaatggtttaatggttgcagtggtgatgggagagagaaggagttcgggtggtgatggcaattgcaagtggtttcagtgctgatggtggttttaggggttttggggattctggatggtagtaatggtagaaaaaaaagaagaagggttagattctgtcgagaagaagaaaaaaagggttgggggttttgcgagagaaagagaagagaaagaaaagaaaagaagaaaaaaaa

SEQ ID NO: 176479 - DNA, 1439 bp, Cannabis indica
aatattaactcaagtaaattatcttaatttataaacgaccatattaaattattaaaaataaccaaacatataaaattcttataaataccaaaggattgaatgaggccaaagcacctgggtgtgtactacataatttttctaatataaatatagatattttaattctaatggtcttgtattaattattgtcttttcagtatatgttcatatatgcataaaagaagaagaactatttaattaaaagcatcaattaatattattccttgcattattgcatatatatatatagtaatctactaagctataaacaatcatctaaactaggtgtatctaccctattaagaaaatggattacacacgaaattaagaccaactattttcaaataaactcaataatttccactttatttctcattcccctgcaaatttcaacatggcacaccaagttttgtcccttacttgtcttacatacatatattatagtaagatgatgatcaaaatatataaacccatttcaaattgaacacatcattttcacctacgccatatatataaatactaataaggaaaacaaggaaagaaaaactaataagactaaacttaattgatgggaaaattcatgaatttttctctttttagttggggagtgatatgtatatatcttttcaacttcgtttagtcacgttagagagtgacctaataaatatatatattgcttttgtgtgtggccacaaatcaaaaagatcttttccatcgcttttcctggtctttctactccaatgctaatctactttaattgtataatatatatattgataataaataataatatagagcatagaatattttatatacaatactataattgatgaatgttttattagcaatgctaaaattgatcaaatcgagtcttagaatatattccacatcttaatcaaatttaatgtttattagctaattttcattgactctcgattataacatgcaatgaattcatggcgtctttatcatttatgtgaaaaagttagttccattattatggaaaaataaccaaaaatattattattattattattattattattattattattattattattattattattatacagaacgtgacaccaaataattctcaaatttattgaataaataaaattttgaatcgtatattttgtgaaagttcccatcaatttctctattttattgaaagaaaaaataataattctaattgtaccaaatagagcataatggtaccataagtaattttaaccaatttctgttagtataggaagggaaagttctaggaaaaatattagttccatttagttaagcttctaatttacactaaagtataaaataagtataagtttgtcttattttaccgtttaaataactattatataaatatcaactttcaatgtgtttagatatca

SEQ ID NO: 176480 - DNA, 622 bp, Cannabis indica
atatccaaacacactttacattttaaaatatagtgtaattactaaattgtgtaattaccaccctagtaattaccctacataatcattacacagttacttccaaacacacgtaaagattttggatttggctggttggcctaagacttccattttgacacaaacagggacaattatgactagaaaaattaatcataatgtataataacaagagaaatttaaataatatcctcactataacaaatttcatttttaatcataacaaaacttgtaacttattatgactacaagtaaaaaaaattatgactaattttaatattataactaaaaattcgtgactaaaagttttaatcacaaaaatcataacttgttactaataaatgtatttttaatcacaatacttgttgtgactaaaattaaattagtaacaaattgtatctaaatattgtattttagttataagtaattttttattgtgactatttattcgtaaaaaaatttatattgtgaataaaaaaattataaccatgatttttttattgtagtacctgtcaaataagttgatatataataatatgtacaactaatctatggataagggctaatgataattgctaggacaatg

SEQ ID NO: 176481 - DNA, 667 bp, Cannabis indica
ataaaattataaatacacccattaattaaaaaaaatataaaacttaaattaatttttaaaaattactctttaatatttttttttaaaattttttcctcacatttattttatgttaattttcaatacttatttttgatttctatttttataattttttctaactcatgtatattatttttttattttttttaagaaaatttcatataattttatatttttaatttttttgtcataattttttaaaatgtaatttaattttgtttgataggtatattttttaagaatataaattgaaagaaaaaagttaaaaatacttagtaaaattaaagatataaattttatataaaataaaaattattaaaatggagtgtatttagaaattttgggggtgtaaataaaatttcccttttaaaaaaaaagggtaaaaataagaagacaatataaaaagggtataaagtgtaatttcttcaataaagaataaagaaagaaaacaatgggccagactattaaagcctatactagcactagcagagatgccacacaagattcaaattcaagcccaagtgctagggtgttgggagaataggttaaccttttcttatttttcgttgaaaacgatcattttattttaataacctgctctgttcttcttcattaaaaaaaaaaa

SEQ ID NO: 176482 - DNA, 582 bp, Cannabis indica
aaatctctaaacaaagcatcacagctgaagccacagataacttaacaaatgcccacatatccttgaaagccaaccatgaccaagcccttccaaccatcctggcacccacccacaatgtaaaccacctgagctatagccacagcccaagctgagatatcataggctgccgcggccccagtggtaccccagtcaaagaccttgatgaaaagatacaaaataccagtgtgcatgatcagagccccaaaaccaacccatgccagaattgtcactttgctctgagcctgcaaaaacttctgagtgggaaaattgatagcaagtgaaaacatctgaggaataatttgtattgtgaatttcccagcaagctctgcaatttgatcctcttggcctagtagtttgaggattggggtagagaatatgtaaagtggtagtagaaaaaagcaagcggtgaacaagattatccatgaacgttgcatgtaaactcctaacatgtctacttgcccagctccaaatgcttgcccacataaggtctctaaagcactccccatgccaagctacaattaaccaaataattattcatgtaat

SEQ ID NO: 176483 - DNA, 505 bp, Cannabis indica
caagtggtatctcaatcatagtgtggaagactgtgaagaatccaatcaacaagaaggagaatcgggctcaagaaggagagaaagagatccaggttcagatcttgataatgctttgctacagaaaggaatcaagggctagagatctcaacggaagtagtcattatattccgctgcaatcaatgtaaggtttcttaaactttatatgtgtttatttttattgtttttagagaattcatattaggatgttaaacaacatacatggtagtaaatctagatcctagtaaaatatttccaacaactgggcccctaagaacgactagtagtagtagttacttttaccttttcgttaagtaaattgtaagttaaaaacgttaaaaacgtagtagtttaattttagtttggttagtttaggtttaggtagttggtttcgttatagtttgggtttttaggttttgttggtttacgttttacgttagtagtagtagtttagtttagttggtagttt

SEQ ID NO: 176484 - DNA, 695 bp, Cannabis indica
gtaaatgctatagagttatctataactatatataaatcagtcaataattttttgacttttacatgttatattatttctttaattttattttatttttccattaaaatttttgtaatttaatataaattacattatttttaaatttttaatcacttcctattaataattatatattagctaataatcatataaaaaattaatcatcaataattataataaaaatgtcaataattttaatcttttcatattagtttacacaaatatcctttgacaaatagtaattattaacttgttaatcttaaattttgtatatatataaatttaattttactttaacactgtgtaatattatttatgaaattaattttgtattttatgcattaattatttttatagtacttctatattttaaataaaacaaatttcgttttttaaaagtaaaaataacaaaattcagaattttagtaataacagtataataatgtagtgttagactttttatttgggcttacattaaattttattggttttattaaaacttgggttgattggatagttctttgctgtattagcccatgttgttggtgatcaattgttaatgggcttagcatctgtgagtaaagtctaggtgaagcagaagtgtgggcttttctagttgactgaagcctttgatgagcaggcccagcccaactggg

SEQ ID NO: 176485 - DNA, 703 bp, Cannabis indica
aaaaaatattgttaaccaatcgtgaaggtctacctatagaggtgttgggtaccactgatatccaataacaatgctcttaaaaaaaatagtaaaaagaataatatgaataactaatatgagaattagagtactcacaacaacttctttaaaatagaaaactttaaaatctttaaaaaaagcatacaaaaaacatattacatcaaatgttttaaactctttcattttatagaatgctattcattgctctatatatatattatattaattattttgaattttaataattatttttatataagaatatatgtatatattaatattatatatttaaaatcaataaaatttattaaatttttttaaaaaagggggatcattgatatattttagaaatgctatagtaatttgttgtttctttaatttttttttttaatttttggtgggtttaaggtataatcatgtgaagtgaataaattgtcccacaagactaaatataattaaaagctgagatttcaatttccaaagctcttcaaaatcataagactactactaatatatgcttctgcaacatttttctgaattatgtactttgttgctaaatatcatcaaaatgaaagaaagtcctaacaaatttaaagggattttaacataaacattcatgagttttcactactatatgattctgtttttttataataaagtaaca

SEQ ID NO: 176486 - DNA, 634 bp, Cannabis indica
atatatatatataataaacatgatttttgttacaattatattacaaaagaaatcaaaaaatagtaagactagaataggaaatgcttatcgaattatctcaactcaaagaggacaaatgaagaaaacaagaatgaaagttgaacgagttaattctattctaaacaaaatatttattttatttcttatttaaatagtaaatactaaaataatcggattaacacaaatcagtagaatcagaaacttatacataatgtgatctcatttttcttttagcctattattaaattgttgatgacaagtgtacaaatataaaatggatataatgtcttgtctcatgacatgttttgaaagtttttgggttactgctgtatgattctgatttttttctgtgaatctcggtttgtctcttgtagttgtttggatctttctgtgatggcttcgagtagtatggcagggggtgattggacagatcaatatgctcaattacaattggaggaggaggaagaaagggttctgatttctgatgatcaagagggagaagagcaagcttttgatgacaggtggtgcttggtcggcaaattcctcacaaatagaacaatcgactttgatgctatgagacacatgttggcttctc

SEQ ID NO: 176487 - DNA, 554 bp, Cannabis indica
acaaaggggtaaaaacaaaggagactcaagcaagaggtgtgaatatcatggcgacgtgaggcacactacaaatgaatgtgattatctgagagacgagataaaaaatatgatctttccaaattgaatctttagtggaaggtcagttcctactgaatttatgtctattcttttagacgatttgtcttcttaatgaagtcctactgaatttatgtctattcttttggacgatttgtcttcttaatgaagttctatttctattcaaaaaaaaaaaaattggggtacctaacccctctggccccatagctcggtcattgacttctctattaaaattatattgattgtattaatttatagcaattcataaatacataagaaaattttacataataaaccaattttttttaaaaaaaaataaaaaataggtacaaaaatacgtcaacaaagaaaaaaatttaacgctttgaactttttttttactaaaatatatcttcgataaaataattaactattttttatataatatatttataggtatattatagttgtcatgaggt

SEQ ID NO: 176488 - DNA, 855 bp, Cannabis indica
atttatgtatatttatatataattaattttatagatatgctattcaaagaaaaaaaaaaaacataaaacactttttgaaaatacactaacttatagcctggtgatacatcattccctttaacgtattttaaagggtttctttttcatttttatatgtacaagtggttttttttaatatttttacctaaattcacataaaaattcatataataattaacagagcaatttaaattggaccaaaaattcacacagcaatccacgtaaaaattaacggagcaacccaaactgtaaatttaaaaaaaaaaaaaaaaaagttaaaaaaaaatagcatacaagataattctctttatttttaatgaggtgatcgtgcggcaactactaggcgtattttttgaaggctcggccgcttggacattggattaaggtggcgtaggctccagtttgaaccaaataacaaaaattagaacaagtttatagaaataatacatatatagttttaataaattaagtatctaggaatgtacaattttattataatcgatcgttgaaaaaagggtaccaataaaatttagcatttttcgataatttaaacatttccgtgtaaatttatatatatttcctaaatacaacctccctattctatgctttttaagttattttggacaatattagcttaagagaatatttgggagagatataattaagcaaaaatgtcaaagttttatggctgcatttgatcagagtccaaattatcagtaattacacatcatcagtagtttctttgttctttgggttgttaattataagttggcactgtgtgagaattatatgatccattatttaattaatttttat

SEQ ID NO: 176489 - DNA, 1169 bp, Cannabis indica
acttttttgaaaatacactaacttaaggcatggtgatacatcattccttcaacgtatttgaaggtttcttatcattttataggaaatttacatagtatactaacttttgatattttttacaaaaatactgtcaggtcggtattttttactttttactgtgtttgcagtatactgtgataagtttttactggtgttcaacttagtattttttagttattctactgttgttttgagttgttatgtttgtgttttactggtattttataaaacacagtattttaaaactttccgtgtgacagtatttttgtaaaagttaacctaaattccagtatttttgtaaatttccctttttatatgtacaagtggttttttttttttgaaatttttacgtaaattcacataaaaattcatattataattaacagagtaatttaaattgcaaccaaaatttacacagcaatccacctaaaaattaacggagcaacccaaactgtaaatttgaaaaaagaaaaaaatagtatatgaaataattcctctatttttaatgagaggtgattgtgcggcaactactaggcgtattttttgaaggctcggccgctcggtcattggattaataagggggggtaggctccagtttgaggtcccaaataacaaaaattagaacaagtttatagaaattacatatatagttttataaattaagtatctaggaatgtacaatttattaagatcgatcgttgaaaaaagggtaccaataaaatttagcattttcgataatataaacatttccgtgtaaatttatatatatttcctaaatacaacctccctattctatgctttttaagttattttggacaatattagcttaagagaatatttgggagagatataattaagcaaaaatgtcaagttttatggctgcatttgatcagagtccaaattatcagtaattacacatagttctttgtctttgggttgttaattataagttggcactgttttgagaaagtataatgatccattatttaattaatttttataaattgctgtgaagtttattataaactctatatacggataagtctttggtttgtttcagaagctttaacctgattacgtatcaactatatgaagttgatatcaaataatattagatgctcaaataatag

SEQ ID NO: 176490 - DNA, 683 bp, Cannabis indica
caaattacgtttactctctaactcgaatttacgcttccattcagcagcctcagcttgagcagcagcttttccttcagcagatcgtctcaaggcctttgcaacagctacatagggattttcaatacaacatttgcatcttatacttagtctatgtccaaaattcagttcaaattaatcaaaagttacaaacaaaaatcttcttacttctcaaagcttcagagaattctctaaggtgatcatcagatcccataactggattctgctgaataagttcctgtactgccttttctgagttcagaagcgaaattgaattgaaaaaaccactctcaggttgtgaggatgaaacacttgcatcatcctgaacaaagtttcaacaacattcccttataagctaatatagttatatcgtcaaacacaataaatgcattccagaatacccagacaataatgcaaatttggtactcaaattaaattatcatattacctaaacacaacaagttactctcacaaattatagtctcacaaagctaaagcagccattagagaatagaactcacacccttaattttaagaaatcaaaactgaacactgaagatacaagtacaaaaatttcagcaacataaacatatacatgtatatatatatatatagagagagagagagagagagagagaggaggtagt

SEQ ID NO: 176491 - DNA, 678 bp, Cannabis indica
agagagagagagatgaaagatttgtgatagtataccggttgaagaaggatttgatatggtagggagagagagggtatccactggagaatgtaaggtacaagcagcgttcctcctccggtgctcggttcgtttgaggatcccactcctcagcacatggattcaacattgtttgctgggcatggcccgaagcggtaggaaccactaacccagccctagggttagacccactagtggttcccccaatcaccctggactccatcgatataatgagtttgaaacgcttattattaggtgtgaaaagtttgaagagggagtgctgtttcaatttgtagtccccagcgagggttttgttttccatatatatacgaaaacaaagaaaaaagaggtttggcaaatggattttttttagaaataatattttctgtagaaggcagggcagataaacatgctatttcattcaacggtattaactatatatgcaaactaattaactaggatactgctccacgatctgccacaaccaatattttttcacataataatggatatggcaatataccatgtatagtcattcatatgaaagataactgataagtcctacctatatcaaataccatttgttaaataatttgccttataaaattttgaattgttatttaaaaaatgatttattttttt

SEQ ID NO: 176492 - DNA, 637 bp, Cannabis indica
aatgagagttttagagattgagtcgaactgagtgaacgagagcccaacaaaaaaatgggtgagtactttcaaaatttcacacaacaaaaaaaagagtttgaagatctaaataacatatacatttgcatgggcgtaaatttttttttttttttctggtagtttcataagtaataaaggtaattttggtattaataatagagctcataaacattcttatttttattaaggttattgatatagattatagtgccaagccaatagttggagaatgaaggccccatatataatctttcacttttagcttgttcataaaagaaacaaaaaagaatgtggaatattgaccaaaagaatatttggtgtaatatgaaatcttggcggctaaattttctactttgtacttaattctttaagttcaaattttagtggtaaatttttcaaactactaaaccattaacaaacttaagtatcatttattaatctcggctaaatatcatcataaatagcttatgtggatatactctacacatgtcaaatttacactattacacttaatataattattttaagagttaaaattattttaatttttgtttttcttaatttcttgtttacttttttttttcttattcttctattg

SEQ ID NO: 176493 - DNA, 781 bp, Cannabis indica
taataattagagacagaaatattatgaatttgatattagagtaaattaaaaatgaaaactttaacataaaattgatcacattaaaagtattattttttttacttacaaaaaaatatttaaaaaaaaaatattatgtatgcatgatagatgaaaaggaagtttagaaacatggaaaattccgtccaataaaaaataaaatattatgacacaacaaaaaatacaataatatttgtatgattgaataaaatagataaaatattacttcaaacactaataattcaataaatgatactcatataatattaaaataatataaaaaaaagctatataaaaataaacaatcctaatgaatataaaagaaagaaatgaacctttcgtaaatatgcatgaaattggtttaagaacatttcacaccgcttcaaaaattatagtagcccttgccgaccgccaaattatctttatacatttgaagaaaaaaacatcttcatacacactgttaagacaaaaaattgtttataatcaatgtataaacatatcaatttgaatatgttatagtgagatttctctcacctagaaactcgagaccagactcctctttaaaggacacgtgtattcagatttccaatgaaagctgaatgtccgtgagagacttctcgaagtttagacctcgcccaggataaaaccagcgagatactgcgagtgcgacttaagtcgcaccacataaccgcaattcttatcatgcagggtagatccaactcgcatgtgtcagaacatgtgcgag

SEQ ID NO: 176494 - DNA, 781 bp, Cannabis indica
gagagacttgagctgtttggctttgctcagtcgacatggtagagccgtgctctgataccaagtttaattttgcagagataacaaattgatagaaaactcagctcaatcgagagagtgctacttggattttattaaatagacaaaacaaaaatacagaggaaataaaatgaccaatacaaaagcaacacgtattacacaaatgattgaacagaatcataacagaaaggttgttagaccaggaaatgattgcacaaatgatcacacaatatcccttgggattccctcattcacattgacagatttgccctctgatgacacctcatcagtatattcaaattctttgacattcagaagtacaataagacgaccaatcaacaaagtagaacattttaaatacgagaactgtgtttagcaaattaaaaaataaaataaaaaaaatataagaaaaaaagtataataataataaaaagaaaatcaattgttatatctggtatgaaatttttattgaatctaagttttttctttataatattttttatactataaacacgaaaatttatttttattattttttacttttcctttcttggcgaaaattcaacttccaaaacatgaatgtaaatatctgattaatgatatggactgacaagtaataataaaagaaacaaaatcaaaatttaaaaattaaaaagcaataatatatgctcatatggtaacaaatctaactcggtatcgtgcctaaatctgtatctaaatctatagaatctgagctggaacaatg

SEQ ID NO: 176495 - DNA, 791 bp, Cannabis indica
gcaccaatcataaagttcatgactataatctgaagttgaatagcctctaatggagaggctcctcccataataagcccagtcattgccccaggaagcgagataagccccactgtcttcgtgttgtctattactggcgacagagatatcacaagggccctcttcacctgctgaaccgtcgcttgccgcggtgtcgccccaagagccagtgctgtctccacctacatatatatataattaattacagatattaattcatcatgtgtaaaacacaatttttctctgtttttataataatcaccctgcaataatttctcttttttattaaataatttttttaaaaagaaaaaaaaagctaaaataatactatataatacatatatgtatagttataccagattgatctgagttctgatatcgtctctgagtcttttcatggtgaccccagttacagtcattgaattcccaaccatcattcctgcaacagggataatatagcgtggagtgaacggaaatactctcagaacaaccagaaagaacatcgtcaatgaggtgcccgccaggatcgacactcccgccactaatttccctctgggaacgtgttttgcccgttgaccggcggtgtaaccggccactgtcacctgcaccaggcttattaattctcatcaatgaatcaacatatttagaactattacatctacagattacacacatatatatctatattaatatgactctatttcggtctaactggtcctgttgaattcgaagacaagagtttgatcataatatat

SEQ ID NO: 176496 - DNA, 712 bp, Cannabis indica
ctatgaccatatagtgcgcatatatctaacaacataggcaagtcaagcaacttcttttcctgcaaaagaactacaaacaaagttagtgaacaaatgtgtaagaaaactagaatttcaaactatctgaaaagaaaataccagctaccatatctcctacttattattgatcatggatattgttctaaataaagaagagtaattcaaagtatcagtggttaaaagaaataatttaaagtaaaattattacttaatataatgtaactatttcgttaaaaataatctgcaatacatttaggttggaatatcggttgatataaatttaattcttttactatacacatcaagagaacaagctccaaaaatcctggtgcataaaaattggccctcaactctttcatactaattttgcttatgcccccttctatgtgcttagaatgatcaaatgcaacatccgttaaccctcaaaaatcccatccataagtagctatattgaaattgtgagaaaagaagatataggaccaacctcccgacataaactattatttcaaataaaagactgaaaacaaattacagggcgaaatagagcccacctccatggtcatttacactgaggctgtcagcagcacgagcccctggatccctattggatgatctgcaaaagaaagaattcccatgatagaaaaaaaaactaatgaaataaaaatgaaaaatc

SEQ ID NO: 176497 - DNA, 656 bp, Cannabis indica
gcaaatctcccaagagttctggctataattggaagatcctttggccgtaaaacaaaaataaacacaaacccaattcagctttggtcttttaaagttaggaaaaacgatagaaagagaggttaccttaccaacaagtgcagcggtggctccaatcaataggaagagctctccgtaagaaatggccaacatttgtgcttcttgaaacgattaaaggattggaggagtacagggctttaagaccacagcagagtacgggatggagatccggcaatggacgctgtcgctgaccacctaggccttcgtttgcaggcagcctttgtccaataaattaacaccctaaaatctgttagaacttcttaaccaattgttgtgcttgaaaacattttcaaaaatattttgattgtggtattcattatagttagctacaatttcatactttttaaaatttcgaatagcttacgatatcaaaaatcgatttgaagttaagtttttgatactagtataaattatttggaatttttttgagaaatttactagaaggtctcacctaaagtgtcttacggttatgcaagaattttatggcctattagtttatctatgagctttgtgcttcttaattctttcttctttctttcgagtgtaagcatcaacttcag

SEQ ID NO: 176498 - DNA, 597 bp, Cannabis indica
gaaagagtaggtgaagaaggcccaagaaaggcccaaattatgagggagaaggcccaaaacccagaaagaaacgtttactcaggtggtggtggaacgatgaccacaccacacctcaccaccttccccaccatcacaaccagattccccgttttttcccttggcttcttcttctcctccaaaatctcaagcccatcaatctccactccgtgtttggttcttgggttaactctatcatcttcctcgaacatcccaattcccactcaccgcctaccccggaaatggtctccccggaaaacaccaattggctctttgattacggcttgatcgacgatattcctgtccccgatggaaattttcctgtatcatcttctggttttaactggcctgtgcaaaccctaaatggctcttcaagtgtcaggttattccaattctaagaatcctcagtttttgattctggctcccccaaattgtgagcttttgatttaggccaaaagcaatcaaagggttttctgggtctctttttgttttggcaattgtgggaagtatgcaaattggtttttttttttttttttatttttttttttttatttttatact

SEQ ID NO: 176499 - DNA, 662 bp, Cannabis indica
tgagaagttcagcaacaggtattctttccttctctattctttttcatagtgaaataagcttctttttcatgcacttgcaattttgatgtaccctctacttgtttcggcatccagaagagttttttttgtccaatatatataaatatatatatatatattcgtgtatgttatagttgtttaagtcttaagatattttacaaaattttgaaataatttacaatattatagaatatcttaaataatataaggtaatagtcagaaaaaatttgattaaaaattatttcggataccaaaacagataggagtgcatcggtgcattccttttaagggggtacattgtagagttttcttaagttttgtattgttaaaggtgctgtatttattttagattttctgacaaaattagaagcttactgtattttcttttgaattatgcagatattgcaatggagtttttttcgttggatttaaggagcaaatttttttgtgcccagttgtaatttatttctttcttttgttgatatgaaatatgaataaataattaatgtaacaagtctttaatttggaaacaaaagaaaaaaaaacagaaaaatagattggtgtatatgaataacgtctttttttttttttagttaagggtaatatagtctttatttcaaaaa

SEQ ID NO: 176500 - DNA, 514 bp, Cannabis indica
atttcaaataccaaaacagataagagtggatcggtgcattcctttaaagggggtgcattatagaaacaccttataatatattatttttaattgcagctaaataaaatattccaaagatgatataatgactatattacacatttacgtttaatgtgtgatagggttttttttttacttcatgtgctctttggtccagctttacttagttgattttttgatttagttaaaccgtaatgttacctagtgagatttatttattctttgctattgctactgtagcccgctttcttaatagaattacttttggtgtggaagcaaatggaggttttagttggaggtgtggattgaggaggaagtgtttgttagtgttaaatatggatagacatttcgaacgtttagattaaattatttgggtattttctatttcattatattacacatagcactgacctgttaagtttgcaaattactttcttcaaaggtaccttaatttcatttctttgaatatccaggt

SEQ ID NO: 176501 - DNA, 532 bp, Cannabis indica
tagattcactctattaaataataatatctgtgggtagtttttgtcagtaatgaatgattagatttgtattcggtagtcattttcaatcctaccgttgattatacaacacaactctcatatcttatcattttattattattattattcatggcaaaaaataaatatttattattattataattattgttttacaattgttattagtattattatttttgcaacaaattagtattttacaactttataaccaattgtcttataatatgtggtattgttaggtcatttcggtattatactaacattttagagtatctccaactttaaacactaaatttggagcatatatactatgcactataacatacacatcaaaataaagcaaaaatttgataatacctggtaacaagttggacactaaattttttgttttgcttgtctcttgtagatgctcttaaaaatcttatcctataattagagtaataacttgtgcacttaaataatgaacctatgcactaaaattttgtgatatgtg

SEQ ID NO: 176502 - DNA, 582 bp, Cannabis indica
taagatatgatttataaatttctaataaagaaaaaaatgatatatatagaaaaaatatcatttttaaacttataatttataaataattaaatatttaacaaaataacaaatttttgaatttgaaaacattatggtaagtatatctataaaaatatctatgttaatttcaaatttattaattatttaatttgtcatataagataattttaatataatattttaaataaaaagacaaagttatcttttaatttaaaatatcttaaatatcaaaatatctaatcttataattaaataataaataaatattaaagaagttaacaaatttttaaatctgaccataataggaaatatttaaaattggaaacattccaaaatagaaatatttaaaattggaaaaattccaaattgaaaatatttaaaattggaaacatttcaatttagaaatatttaaaattggaaaaatgaattttgggaaacaatcccatgaaaaaattggattttgggaaaaacccaaaaattcgcaattttggggaactgccaggataggctgcatgcagcagcccaggaggctgccagcagctg

SEQ ID NO: 176503 - DNA, 561 bp, Cannabis indica
aaccctttggttacataatttctcatgtattagttttttttttcttctattggtggaactttctttgatagtttaatttattagttatgctatgtcttttctttttttgaaattttattttgggttgaaagtgaaaataatattttaattgtccacataagcttcatttaaaaaagaatcacaaatttttggtaaatatttcttttttgcattgtcattatacaattttagtttttttttttttttcaatatgtataaatatagaataattctatgataggtacccttattttattcttatagcatgtgaatattttcttaactattgatatatatgacttttgtagtgtactacaataattaatatacacttgcatgcacctaataaaaaattaaattataaaataatgaaaaaaatcctcacatgttatctattaatctttatctctaaagcctttattttttggaacaagttcattaaggactaaaaaatagtaggattccacaggggaagatccaaatagcagtagttaacccagcaacaccggttctagcttgaga

SEQ ID NO: 176504 - DNA, 566 bp, Cannabis indica
aaaaatgtagaagacaagaagttaataccagcaagcttcaccgtttgaatatcaaaattgtcaataccaagctccaaaccctgcaaaataatgccgcaactacattgtatagtgcagtggaaattaaagacttgactcaactactagtcttaaatgatcagaaagcaagaaaaacctgataagtttttagcttctgaacagattccccagcaagccaatacaccccaagagagtgttcaaaccgagaatgcatagccccaggataaaccatgtgtgtcatgcctaaatcaagtcaaagaagaaaataagcactcttatgagtgttgatacaaaaacacaatactgaaaaacaaccaaattccctacttaagagtgcttaacaagtaatactcaagccagttcagttttaaataccattagtcaaagtaaaaaaggatgtgaatacccttcatttgtttttaacctggatatgttgacttacataataattaatgattttggcaacttctgccatatacaactcttaaatatggttcaaacaaagaaaatcacaatacttaccaagt

SEQ ID NO: 176505 - DNA, 495 bp, Cannabis indica
agttctcaatacctccaaacagaattaaaagacttgagtaggcagttacggaaccacttgggagcccctcaattttatttattttatttttccttcataattttcttcttaagctaaaacaaataaaataatgcagtataggtttttgaaaatagagataaagcaatgaagtcccttaactttataataaaaaatagggacatgttcatttcaagcatctcatatttctattgttcccctcgagtattctgcttgctcacaaaaagttgataaaggcagtagcccccaaaaataattcatgaccacgtaacagttagtagtcgtgttgcaaggaatgataatgaatataatcaaaccacatcttctcccaacataatataaactataagacaatgaaaattaacacgattcaattctacggatgatcagaattaaattctcaattcatacaacagaagtgtaagaatgcaatctactaaatttgaatttggttca

SEQ ID NO: 176506 - DNA, 553 bp, Cannabis indica
tcttacagacctccattatttaaacactcaaaatcaataaaagtgactcgtaaactatgtctaaaccaagtaaaaacttaatgtattacaaattaaataagtattataataaagtggtattattgccaatatttagagaaaagtggtatttttgataaattatgttttcttatttattttttaattcattaattacctcattaatttcttagggttttgtgagcatcatgtgtcacaatgacgacatttttgtacactccatagtccatattgctataatcatttgaaaaaaaaaaaaaaaatcatagaaaattattatggagaaagtaaaatattatatacagtacttgatgagataattagcactagtagtagtactacactttcttaccttgtctttttactttttctttttgtgggttggaagtgttttttttttaatttacatatgattcaagattatatatttaactatatatatagtattccaagattccttccaaaacaatcatgtaataaagtagtggagtaaatctctcattaccaatacttt

SEQ ID NO: 176507 - DNA, 788 bp, Cannabis indica
ttatttctagatatttaaatagactgtgttgctaaaataaaatattacaattgatagttttatttaggcccaattaatattgggcttattcaataaataacaattatttaatgagagtttaaattaatctcctttgggccttgtgtgagagttagggggccattagtagtggctacgacatattgaacctagccctccctcacatgaacaaccccaattgtgaaggcccatttgcctcatttaaataattgtattaggctagttatactagtttaacctaattaaaattgaaatagcaacataattaatttcgaaataaatggaattaatttttcattggattattttaaaattaattttgaataaatatacttagtttaatgaaatattctagatagtgatttctagtaactaatttatattttctaatatttaattaagtagaaaaatatatttaagttgaaaattaatttgttgattaattttagacaacctgaaattagaatatttttcttagaacttaaatagaattaataattaagtcgattttgttcaagatacttaattatttgattctatttcatgaaatttaattaaatagaaaatatatttaagttaaaaattaatttttaatttattttggtaccaacttaaattaaattacttcttagaatttaatttagtaattaataattaatgtttatttttatttctaactatagttaattaattttcttatttttaatttagtaattactaattaaaattaagtaaaatttaattaattt

SEQ ID NO: 176508 - DNA, 591 bp, Cannabis indica
cacaaattggaatcaaagacctgcattccaaactcttaatagttcttattctataatacagtgttcaaaaaatagaaacgccaaggtcagtaactgtgtgtcacaattcagtacctgagtttgccaatgtaagtgctgcttgatcgtgatatgttatctgcgtccatggagatcacatactctgtgcatgttgttcgacgtgttcgctttgcacaaagaagaaattttccattttcaacaagcaaagctgcaaaagcattgcactcatcaaatggggatacaataggaaacaaataaataaattattcttgaaacataaattaaagagctaataaatcagtagagtctctagacaaagcaactagtatcaaattctccatagacactgtgatatgacactttgacattcatacaactcaaaatacttttcttcaactaatttatgagaagacaagctaggctaacagcaattgtctattactacaccctcgatcaaagaacaaggaagatttggttgagctcaatataataacagtataaacaaaactaatcatatagaagcttacctgggctaaggcaaaggaaaaggtg

SEQ ID NO: 176509 - DNA, 812 bp, Cannabis indica
aatattgccaccacagttgatgttttgagaataattattgatagttttgtgaataattattaaattaaaatatgtgatgagagaataatatactataattaacttttagttcatttaatttgtccaaatgatttgatttttcttcatatataatttaaagagtgtagagtgcaactatagtttgtccatatagatatcataagtttttttcttctatattgcatgttgtatataaaatatccacacccgaacaaatttttattatataaaaaatgaagctggctggggctgaggtaaggcgaatcaggtcctaggcacacccaacttaagggttcaaaaaaatatatacgttagtagtttttaaaaatattacatatattttaaataaagggtctaataatttttatttttttaaggtgcacccaatctaggttcggccttgatctgaagttaaaattgatcaaactaagcacttttccccttgtgctaaatattaaaatgaaaagccaaatcgattaactgtctatgcatggctgtacctgtaataaaaaaacagttgaatagataacacaaaaaagagatttattatttttcaaaaaaaaaaggataaataaaagcatatgaaaatttattatatttcagtcacttgtcgcgtgatatttgatattctctgactatctcactaatgaggactttataatgtatatatagaattatatgcgtatatatgatattcatttcaagaaaatatacatcacctggaacaaagtgaatttataattaaataatagagtcacactacaaaagaaaaa

SEQ ID NO: 176510 - DNA, 807 bp, Cannabis indica
atttattatttgttttttttttttttgtgtaattgttgattgtgaggcaacatagcattggcattatgaagatcctgcattcattgttttgttaaaaatggtagaatgctcaaaataaggttttctttatcctatctagacaggtgaaagaattaataagagagttatgtcaaaaaagaatagagttaattggggcaaatttgtatattatttcctttttgtattgccaaaacaacttttgtggccataattaagaaaaaaaaaaaagaaattaggagttaaaaaaaaaaaagcaaaaataataagtaagccacccgaatcccttgccacatttcccactctacatcaagactaacactaattaggagttaattagttgaatcatgtataattttagaaggtatcgtattaaatttcttatttttcttggcaaattatttggtgaataccttacccttaaattgtttttctctaactattgtttttaaaacaagtcatgtgatttcattaagcataatcagctaccaaaattgctcccgaccttaacagggacaaatcccccattagtaacacaaccaataagtagactgagccaactagttggtggtttctctttcgaatcgtttgacaaaacaaatgaaacattcgaaagaatctaacaagacaatggtttctcaaaaaacttgcacaatcacaagcaaatcggtttctcaaaaaacttgagtaaattagtactgttgtaacgagtccaaatggtgagtgtgtaacttatccagctaggagctctttcaagccaatggcctctac

SEQ ID NO: 176511 - DNA, 782 bp, Cannabis indica
acacaaagcaagaaaatcttgtactcgttagggataaaatgcacaccagcagaaacttatagagtttgggagcaggaatttaaaggcacaaaaatgtaccaagttgtttcaaaactaagagctcttaaaccagtccttaaaaatataaatagatctgattttttagacattcagggggcagatattaaagaacaacgggagcttaaagagtgttaagacaaacgcaaagctgatcctgttaacaaggatttacaaaacagagaattagaagcaagggaaaaatatgttgatgtacatgaggatttatactcctttctatatcagaaatctaagctttcttgggctaaagatggagacatcaactcgtttcatttaagtgttagagagagaagatctcaaaataaaatctttactattactaatgctgaaggaattagagtagatgatccatcaaaagatggagacaccaactcggctcttttagaactcaaatgatgcaaaggcagcctgttttgtttacattattgagcgtggccctctcttaactaaataacatgctgacttgctaatggcagattactcaaatggggagattaaaaatgcagtgttcaacattcctggaatcaaggccccagtccagatggctatagctagttactttttttcaagataactgagagctaattagcaatgatgtctgtgcaaccattatttttttttttacaattcgggtcaattgttgcaggagattaattcaaccatgcttacccgtgatttcaaag

SEQ ID NO: 176512 - DNA, 639 bp, Cannabis indica
attgttaattttagtattaaatccgtgataatgctattctttacattgaatctgtgagatgatattttttattttgaactagattatctggtggtagggacccctatgttgacgtccttcaacaaagctttccaaaaaaaaaaggttaatagttattttttttatttacttttattattttatttttttggttgtatttgatttttcttgttttgtaattgtcctaaaaatctgaacaaaatattatattacagcaaagcttgttttccttatagagttagagttagtaatacatttgattattatggagttgacatatgttataggtttcgaattgacaggttgttaaggtgctctatcaaaagtgataaatccaagtttaaattaatttaattttgattactcagttgcttataccctatatatagggttcgttgcttaaatttcattacactctttttgatcaatgtaagtgatcttgccgatctttgaacattttaaaattatacatgcgacatgattgtaaatcttcaaatttttttggttatttctttcagtgatccaagatcaaagagacaactccttttcaaaagttttggggcaaaattataggaaaccatctaaagacagtaagctatc

SEQ ID NO: 176513 - DNA, 976 bp, Cannabis indica
tctcattgttacccattgatgatataaaaatgggactgaccaggttaatctaatctattagctttgccaccttcactcataaatcttaatcatgtttgtcctaatacttttctaatataaaacatgctgcatgcaaaatatgaagcttgatctgatgattttctttagtaggatatgtattcaatttagtgagttttcattaggacatgtacacttttttgttatgttattttcattttcactttcatttgctatttgtttttgttattattatgattctttccatgataatgatatatagccagatatcctttatgctcgaactaaatcgataataacatgttaaataaaattaaataatgattttctaataaactgggttattattaaaatattttcttccaattgaaataaagtttttgtaatttttctagaattaattaggatataattatcagccaaaataataaatataataacaaattaaacatcagtaataatcaaataataatcataataaatgacaaattaaacattttgcaatgtatgcatcgggcctttcctggaaactaacttatttaaagctgagccaattgtttattgttttttcttttaatttccaatattttgattgctacaaaatgatcagtataagacaagcaccgacagacaaagttgatatggcttgacgcgtaaggaacagtgtccaacaaagttcatacaaaaatatgattattaaaaaaacctgaaaaataaaatttaaaataaaaaaattaaaaaacctgaaataaaaattaaaaaactaaaaaagaaaaagaagaaaaaaaaagagaagtgaaatgatggattgattgatagaaaaatgaaaaaaaagagagggaagagagtaggattgattgatgatggatggaaatgatgagtaaagtggtaaaatgtgtaataaaaaataaagtttgtaaagtataaaatgtagtaa

SEQ ID NO: 176514 - DNA, 656 bp, Cannabis indica
cgtttcgactgctatctagttttttcaacaataacaaagataccataaagtcaaagaagtcaaattcacactttgcatttctcatttttcggctcactcgaaaatgaagagtttcaagtctctcatttttttacagacaacaacatttttcgtgaactggtgaccagcttcgccagaacacagaaaactgactaagtgatgtcaaaatatcacttaagcatcttaaagtacattccttttgacgttttttacaattacccaacatccaagttgacgtatatgtcgatctgggcgatgggatgcatgggcacaagatatgtaaacctcagcgttaatgtcatgaactgtcttcagtaaacagtcataactcagtgaatattgattcgattgatgcgattcaacttgcatttcgaagctaattcaatgctctatcaagtcatgtgccacacttcaatcgcaattctgaagctgtcatcgtcaaatttcacaccaagggagttacgaaataagctccaagttactcgcagcgggacccttaggcagcaaaaattgctatttaattttcaccgttagattatcatctacggtcaaattttctaatttgtatctttccctatttttgtaggcctcattgagagtttcattagctcattttt

SEQ ID NO: 176515 - DNA, 716 bp, Cannabis indica
attataattattataatttaaataatactatcattttaattgataagtaaatatttctcattattattattatcaaatgagaattgttaaaagtcactattggtgtctagtatcattttcggtgtcatacgtataattaagtattgagtctcatataacttaaaaaaatagcttttaagtaatatcattaatcaatattggaacgccacctatagaaagtgttgggcaccactggtgtccaatagtaatgctcttatcaaattattatattttttaatgtgttatgttttgagctaagtgcttatgtgtcgtgttgtgtcatgtcgtgtctaaattcatatttttttttttgtattgtgactaagcacgtatatttttgtagcgggtcgtgcttgcccgtgcctctcgggctcacttcgtgtcgagtcaaaatctcccgcccatatttacaacactaagtgagagtgtaaaaaaaattgtttttctttaatcttttctttttaacctactgcaatactaatccttgactaaattcattaaatattaatcaatttgacgagatacgttatacaactcttccattttttatttttttttttttaaaggattttttttttttcattcttatcttcagaccaaaaagagaaaattaaatactataaaatcagttatttccgtaactgtattaaaaaaaatcattcaataaatatttacca

SEQ ID NO: 176516 - DNA, 668 bp, Cannabis indica
attatttaatagttatactcctttaagaaaagaaaaagaaaaaaaatgacttcaagacaaataatgagatattaaaaacgaaaccaaccaattcaaattgattacgagctaaatagtgaaaatttgcacaccactatactctaccctttttccatcttaagtgtctctattacataatagttttcattattacatttatttattacaagatgtacattttcataacatttgaatgcttattaagtggaaccattttaagttttacatgcaagaatattaaaatgatactgaagaggagtaacttggcagagcagtggatttagttctgattatcaattacaaatgaagaagaagaatcatcctaacaatgaaattttgttcaatataataaataaaaaaagaaaattaaaaaactaaatcaatccaagtcatttaatataataacaattacaaaatgccgggaaaacaagattttcccatatatattctctttctcttcttcatggcattcccctgattcctatcccatccatcatccattatcatgaacatgaagaacactagcatggcataacataaaatcttgtttgaattgaagaaaaatgaatgaatgaaggaattatctttgatgaataatgaacttactttcacagcaacaacaaagaata

SEQ ID NO: 176517 - DNA, 546 bp, Cannabis indica
attaagattgttaaatttaaggacttttatctaattttagtaaaaaaaattctaacatggatgaaagttcaggggacatgatttagtacatatcaaaatttaaggggaatgatttgttagatatcaaagtctggcgagtatgatttagtacataaacaatcactgaaacagtaaaattgaatgaaattagacaaaagtacttaaatttaacaatctcaatagttcatggagaatttttaacgaccaaaaaagtccagggggcataatttggtatatgtcaaagttcgggaagaaaatttgctaattagctttttttttttttatgtatacatatatataaatattatttttgattttgtatttataaaagttcacgattagattttttattttgttaaataataaaatagatgttgtatttttcaaattggtaaaaatagtatatattttgagtcttaatttttttgataatttttttaatactataaaataattcttaatataaataaatatagaaaacataataacacatttagatcgagttat

SEQ ID NO: 176518 - DNA, 786 bp, Cannabis indica
attgagaagaaagacaaagaggcagaagacgatatggctggtggtgggttgtctacaggggaatctgggcttcgttcctttgctttgttgttttgacagtattcaacgagataagctttgtcaaacttggtgttgatgctttcgtttcggatctcagatgggtgtgaggctcgacaacgtcaagggatcaacgacggcgtgaactcgacggtgagatctcgtggttgggctatggttgttggggtgttgagaatcatggggttccatctcaaaaccaattggcaatgagtggagtagcccatgttcttatatatggctcaattctctaccatttattccatgtgggacaatatccacaatattgcccctcaagatgatggctatttttgctcatcaatcttgaaccgtatcagagtggacaagatcggataggatcacttgcccgcaagggatatggctctgataccatgttgagaatcatggggtttcatctcaaaaccaattggcaatgagtggagtagcacatgttcttatatatggctcaaattctctaccatttatttcatgtgagacaatgtccacaatagttaaagatggatagagtatgtgaagacgacaactgattaggttaattttgaattgggacttatcaccatagaatgatttatttaagattgaaagttttgattgatcttgagcatttgatgttttgagattgattatgtaattggtgtctttaatttttggaaaacatgtttttttaagagtgaaaagtacaaacattca

SEQ ID NO: 176519 - DNA, 602 bp, Cannabis indica
ttcaatttttttttgttacttttaattagtggattttttgtttttctttttgaaacaaatttgattagtggtggttggtgcaaatactttttttttttcttattttaaattatataggttgatctctccttataaaaattcaaatatatattaagttaatattgtacgtataattttttaattaagtaatgttaagtgtaatatatttaagtttaatttttaattaaataatgtattattttttattttaaaataaagtttgagatttcgatttttgaattttttatttttatttttaaatatacataataaataaaaaaacattctattaaagttaacataaaaaaccaaaaaactaaacccgttaaactaaaagctctattacataactatattttatatagattatatatatataggttgatctctttctttctctctctatttttttatttattcatcttttatgttttactaatctatttagttactattttttttcttttgttacctactagttagtagttagcatttggtttatcttaatttttttggttacatttttttttctatttaaggttgcttagttttttttttttttt

SEQ ID NO: 176520 - DNA, 690 bp, Cannabis indica
tataaaagataaaatgttgaattataaaatattaatctttttaacacctaaaaaatgtattcatgaagtattataagatggtaggggattattattggatcacattcaatggaatttagacccaatggattcaatctaattatttattggatattaaatttatcatccgttccaatccaatcgaattaagtcatttgatctgattcgatccaatccagtaaatttattggattggatcagtgccaaccattggatgtattggctaattttttattggattggattagatccatccaatctattttagctaccatttaggttaatttcatttaaaaatatatatatatacaaaaaaacataatttaaaacataataatccaacatatataataaggcttatttgtaccgcatgtccctaaactatacatgttttgacaagttggtcctcaaactttattttttggcaaattagtctccaaactatataagttttggcaaattagtccccaaactttatattttggtaaattgatcccaaacttttatttctttagcaacattaagttcccactattagatatgacatttttattatttattttacttactttaatttatatttttgtgttaaattcaaataatttttttttaattttaatactttgacaaaaataattatattaatatttt

SEQ ID NO: 176521 - DNA, 572 bp, Cannabis indica
aacacattctataataatatttaaacactcacttgcatgtaagactctttcattttatacacattttcagcctattaaattttttttgtaattttttaaaattttacattaagctttaaataattataatgtagataaacataaaaaaaaaaatgaactagaattttcttcaagatactaatggttctagtggattccttttaaaaaatgcattgtagaatttttctatatacaaataagaattggtgccaaaatttaatataagtaacaaatgaaggtcttttaagattggatggagcaggtggaaggaaagagatggagatggaggtggagagagatatatattttgagatagaataggttttgtgctaaattgaacttaaaaaaatgagtcaatgtgttatatttgtcttaaattttacaaattttattttagtgaaaaggggtaaaaaaaagatcaacaaaaatattaaatttttattgaaagaatataaaaactatatttaatatataaataaaaatataaaaaagttattaattatatgagtggcaaaaaaaataaataaaaaaat

SEQ ID NO: 176522 - DNA, 606 bp, Cannabis indica
aattcattcttttattgtatatataaaatatgtatgtatataatcatatttaaagagtacaccaatatagtcggaatagctagctaaaaaaaaaattctaaaagatcaaaatatcaaactccctattatttacaaaaaaaaaaaatacattgcctaattaaaaagtttaacatacatatattgcagttaacatcacttaattaaacttgattaaaaagataattaattatacgtgcattagacctaacatcaacctagtactccattaaaaggaaattctatttttgcgtgcacacataaaaaaaaattgaaattaccattttttacctatgccaaattaaattataaaaatacgctacatccaaacttattctatatgtgtaaaatatatagtttaaagtttatgacattaggctttctttattgtcatttatagaattacgtttttttcaacaagaaaaaaaaattattttggacatcatagttcagaatttcgtaacgactgttaatctatgctatcatataagaaattaatataatcacttcatctgccaaaaatgtaaatgataccctacatatatatatctatacatatttatatatata

SEQ ID NO: 176523 - DNA, 1205 bp, Cannabis indica
attatggaaaaatatttaactaaaagttgtcctgaatgctaaaacaaatacaaccccttaaggagtatactataaatttaccctatgctctcaatgtactaaattcttcatatttgtgctaaaaaagaacaaaaaatctttatccttatgctaaaaaaaatcaacatacttaggcccctcactaagggctggttccgtcactgtatatatttataattctattattagggtagataatgtggcattctttcccctcaattttctattttatctaatttgtggttttttttattattttatttaatattatttttttctttcttattttctttcaataatgcaaactttattacaaataaattcaaaaccgtttgtaaaaaatatcaattaaataataatgtatgagttatcatatattattattaattaataataaatcaatatatatatatatatatatatctctgctaagtaaataatatggcatgttattactttttacttttaattattattctttttcttttctttttttttaaattaagtaagttacaaccaatgtaatatataaccaatgtaatatatgtaataattagtaacttagtgtattatatatggtttatttttaaccgtgttaacaaatgtaaccgtcaatcatttaaatgatacattgagcgctaatgatgtattacatatgtaaataaatatagggaaatttatatttccatattgtattttttctcatttattttaattttattgtgatacggcagtaatttcttttttagtgtctatttttatactacctttcctattttgtgtattcaaataatgttttgctgataaatttttttttattttttttactacgtgtcagcctagagttttgcatgtgtttatttatttatttttattttaagtgttaaaaaatttaatgtgactgtgtattgtcacatttgtgacagtctttttttttcttttaaattcaatgtgatcatcatttcaatacaattgctctctctttcacaccgcgttttggtggtttatacccactatcccatttaactattcatcatcttcttcttgtgtttttttttttatactcactatcccatttaactattcatcatcttaacacacatccagctattgtcttgggggcaatttttggtggttacttaaattaaatttatgcaggttttttt

SEQ ID NO: 176524 - DNA, 899 bp, Cannabis indica
ctaaattttatgattagaaaagctagcggagccatataaattagagaaaaaataaagagagatttttctcctattttattgggattgtcattttcttttgttaacttattttatttctattttaattttatggaaattttatttacagtttgcactttaaaaatttataaatgcactttattttatttattttaattctacataaaatatatatttttaattattagtgactactcaatgaacacatttttattgtaaccataagttatattttttttgatctaataggtaaattattttttttagaattacttaattataatcaactattttcttaaaataattaattaaatatttaacaatgcctcttttagcaagtaatatttataaataatttttttttatataaattcttactataattattttaacagttaacttatttaattataatatttataatgaaattttattttattttttttacaaaaattaaatttctttttacatagattagatacatagagtgagggttgaagtacctttcctgccatgactaataagactaccgagatttattgtgtttgtaacgccctaatgaaaggcacgctacgatcaaccattaaacatcacctaatctcgctaaactgaaattactaagaataagagaaaaaattaaactttaaatttattaccgagtaaaaacataacttgtaactatttaattttataaatatttcaaaagatacacaagtttcgagatcccgtaaaaatctttgcaaaacattacaagttatttttacatgccgaccaaaacggcaaaactgagaatacaaaatacatcaactagtagacccaacccccgtggacttagtgtggctcgaacatgtacaatacac

SEQ ID NO: 176525 - DNA, 1188 bp, Cannabis indica
gtcccaaatcgaaggacactaacactgaattttatagtcattttgtgcgggtcactaaaactcacttctaaccttttagttacatgcgcttttgtatgggtcactatagagtgtcactaaatggtaagtttgtagtagtgcggaaaactccgatccagaggcgaagggaagggaagcatgtggggtcattcccccccccgccccggcgctcctatttttaattatataatttgtatatattatttttttagtattttatatttcgacccaattaaaaattaatttttttaacttgtccttacattattttatatttatcaccataaaatttatattttcacttttattctcacattattttatttttatttcgtagaatttattatttttttaataaaattattattttttattaatgcttacaaaaaaaatttatttaccccactaaatggtgagctgactccgccagtgcccatccccctcttctattccttttcctatatcactttctctctgttttttgttggaatgttattatggtgcatgagtttaaatatggagctcttaaaaccatgccagaaggactgcaggctcgtgtgtcctctacattttattaaagatatatcacaatcttttgaaatggataaagaccgatgtattgtgtaatacacacaatgtaaattgtaatgcatatatataatggataaattaagacctacattttatcaaaccaaattctcgaaatatctataatacataaatgtattgtgtcagtcagattcttctttcagttgttcatgtcgtgtagaattttaaaataggctacctgctagccttatgcctccagattggatgaatgggggagttcatataaatatatatatactttaaggtgtgattttgtaattaaattattaatatatgaaatgtgttgatatagtaatcaaataataccaataaagttcaagtaatgaacatgagttagaaccttgagttcaacaagaaattcatttgaacctcgcatattcatcttctttaatgttgctttttaatggtattcatcaaattgcacaaaccgtccaactgtaccgcaaaaaaactagtgattttcaaattttttgcggtgcggtcgcggtttgaatttttcttaaaccgtgcagtgtgtaacgtgcgtgctagatggcacgt

SEQ ID NO: 176526 - DNA, 505 bp, Cannabis indica
gaattattgatcgaactttgaagatcaatcttgtaagtgtagatatattattataaatgtatacatatattatattatagaaaattaagttattatagctaagccagctaagattgtggaagcaaataacagcagaatgatcagctagggttgaactagtacgaacgtactcatcaagtttaatttgttaaggtttttttttttgtttttttttttttttaatgtggattatataagtaccaagatttaattaattagtgatctggtacaattataatcacaggctctgtaagggcgtcttgaaaaatctatatgtacgtacgtacgtataccgaattactttgtattatatatatagatgtgtaagatgtcatgaagtgtgtattatgtatcacttttgctctatactcgtttctcaatgtttgagttttttttttccaaaggaaatttgtgtatttattttatccatattcgtagctagctatactactattacatgaagtaa

SEQ ID NO: 176527 - DNA, 606 bp, Cannabis indica
ttcaaaataataataataatcatggctgtatagtagtgttattacttattttgtcttaattattacattttgaaaaaaaaaaatgaaaaatgaaaaatgaagaagaagaattagagtattgtgtttaaaaaatgaaaaatacagttaaagcatatttttgttttatatttttaccttaacacatttaatagaaaattccttccttgcatataatataattccttacaagtcgttaaaaaagaaaaacaattcttagcataaggacatagaaatgtgtgggaaaaaatattatttgcttgcaatagtgacaaagcaataaaaaagtaaaacaaaaaaaaaaaaaaaaaaaatcatcacaaatctgttggttgtaatctttaacctaattagaatttttgtcccataaactttaatatatcaaaatcgccttttaactttttggttgttaaaatttttttctgaactattgagaattattagattctagatgtcacgatccgatcgtcgagacaggtatataatagggcaattttcatttatatacagtaaatgcacaatattacaaaaaatatagcaaaaaaaaaaacatttttttttttagacaaa

SEQ ID NO: 176528 - DNA, 638 bp, Cannabis indica
gttatttcaatggttgttcgatgcagatatgctagtctctctcgtggtgatgaaacattctgtagcgtccctcatcattaaattgaaatacataacaaatgaaggtttatgttgggtttttattacttgttcctattaccttagttatgaaaaacttattcttaggttaagctgaatttcttttctctatgatgttaacttatcttgtctacaaagtttgaaaataattttgatggcaaaccaatgatactgattttagaattagttaagtatttatgttatatttaggaggcaaatgaacacttttgtctacatttgaataaaatttacttgattaaatgtacacataaactttgtagcctaagaaccattgaaacaatttattgcctcctaaggattatgtgtcactactttatatgttgaagttgacagcatttgcttttataattcaaagttataattcagtgcagatagtatttgaagtaatattcacttgaaagtgaacggtttgatgatactaaaccttgtaagaaccttaagtttacagttagggacgatggttgattgttttcaactaaatgctatcttgcaagtctttttttgactaatttttttttttttgtttttgttttctaaag

SEQ ID NO: 176529 - DNA, 1418 bp, Cannabis indica
aaagaacaagggttagagatctaagtggaatgagaaatattattctgctgccatcaatgtaaggtttcttaactctatatgtgttttccattgttttagagaatttcatatatttagggtgttatttatatgtgttttccattgttttagagaatttcatatttagggtgttaaacaacatacatgttagtaagtctagatcctggtaaaataattcccaacacaaaccaccacgagtgtttccagcgtacttttcctcactcgcacacttcctggaaaaattttctaggaggtcacccatcctgaaattatcccaggtcaaacacgcttaaccgtagagttcttttgtgatgggctactgaaaaacaagatgcacctattgatataggtagtactaaccaatctatttaagccctcttcaactatgtaatcacatatctacacagtctcagaatcatcacacatgaccttccccaggcgatatgggattgcacagctcccaatctttccccttcggatcacggggttctgactgtcacaatcacccccccttttgggggtctaacgttcatcgaccacatttctggctaggtcaaggctctaatccatttgtaatgtcccccgcttcaagcctccattgggcccttacacccttggaatgatggctcttatacatgagtacgtcactttggctgcttcatggaatatgactgaccctacaaaccaacacgattatttttagcgtgctttatcctcagttgcacacttcttggaaaaaacttcccaagaggttacccattctgaaattatcccaggttgagcacgcttaactgtagagttctttcgtgatgggctaccaaaaaacaagatgcaccttgttgatataggtagtaccaatcaatccatttaagccctctgcaactatgtagtcccatacctacacagtcttaaaatcatcacacatgaccttccccaggcgatgtgggcttgcacaactcccagtcttttccctttggatcatggggctttgactgtcacatcaaggctctgatactattttataacatcccccgcttcaagcctccattaggttcttacacctacagaataatggctcttgtacacgagtacgtcactctggctactttctgaaatgatgactaacgctacaaatcaacacgagtatttctagcgtgctttgtcatataaactataatatatattttaatgacaataagatatggcatattacttgtttttataggtcacatgtcccactttcatcatcttaagcatctaacttgtgaactcttacataagatattttataatgctcataatcttttgtggctcattatggaagattttaataattacaagttaaatagtgatacaagtggtggttgtgtttccaattc

SEQ ID NO: 176530 - DNA, 815 bp, Cannabis indica
cttgctgatgagacaacctgaccttgcccaccgcaggtgctacatctggatggagtggtgcctggttttgcaccagaaccattgcaagttccacagctctctagacgacttatttcaatctctttttcaaccccaaaaactgcttccttgaagttcaagacaagattgtaatattcatcctggccatcagctgctctactcctggatcttccccccataccacccatcccacccataccacccatgccttcaaatagcgattcaaatagatcaaaaggattgctgaaatcctgagataatcaatggtcatctcatgtaagatggtaaacaaataacatcaagttatgaaaaatcattttctgtgtcacgatttcagatatacttaccccagtgcccatgccagcaccttttagtccagcctctccatatctgtcatatagagatctcttttcatcatcggacagaacctgcaaaagaattaccctcctataagatcagataaattgattgtgtgatccaacctccacctcctaaatcttaatccaatataattattttacctcgtatgcattacttatgtccttaaacttctgttctgcccctggttctctgcaatatagaagggtgaactctcagcaagtaataacaggcacctcacaaagagcaaacacatgcatacatctctatacatagcattacacaaaacaacaatagcaatgccgagaacctgaggttggggacaacttatgactaaaaagacttatggaaaaaatcaactaaactcacttgtttacatctggatgataactccttgc

SEQ ID NO: 176531 - DNA, 667 bp, Cannabis indica
ttttctaatgttgtagcggatagcctggctaaagatattaggttgaacaatcttgtagcaagaacgttttaaggggaggaagttccccctgtgactccctttttctcgtgcgtagtaatgaacttattgttcttacccaaaaaaaaaaatcatataactagtaagtaagtagttaaataattaaaattttaattttgttgtattttattatatcgtaggttgtgagctacctgattattaaggtatcaaataatttggagttgatcgatttttgtagttagctacaggtttatacattcactaacttttgttattattaattaataattattaatgcttagtagagtttgaatatcttaaatattcatctatagtaaagtaggttctgtgatatattgtactgtggtcgaatgtgtgacataatatgcatgttagttgagtttgaatatcaaaaatattcaaccgtagtaaagtaggttctgcgaatacatgtactacaatcagaggtagatagtttttatattattaatgctattttatttggtttgtattattttgtttgttttttttccttattttttggcaatgtttaaaaaattttggaacgctcgaatacaaccgtcatgctatcaaaattttgataaaattaggataaatttgactaaaa

SEQ ID NO: 176532 - DNA, 1143 bp, Cannabis indica
actatatgtgccccggactaggcgctttagtccttggtgctgaaccgggaaacctacagaagtaagaatgggaagaggaaaaggaaatccaacgggttggattgctcgtgtgttcttgttatcaaggattggcatcaccaggttgagtctctctctttggcctcagagtaggatatttccattttagcgtaggatatgggagtagtctatttccggatgttttgtgttgttcgcaatgtagaagtcaaggttttcttccatcagactcaggaggaaagtatgaaaaggctgcagtgcccgatctcgcatctagcaatgggtcgaatcttgaagaggaagccttggttgagctgtcagaggtccggaagaagcatccaatcggaattagcttacagcagtgacaggctaggtgattgatcctttgatttagtcctcccaagggtgaccattaagaagagtccaatctgagcgatcagacgtccctgggttcgggttccgctccttctcattcatattaatggcagttccttgggcttccttcttctcatctggggagctgggaactaaacaattcctccacgaaggggtaccggccttcatccttacgaccgggaagctgattcttaaagtaggagtgttgagaacgaaggcctcggttgacagattcttaggctcaatctcaggtctccgtctttgcctggcagttcaagggctcgtcttctttgtttcgttatgttgttcctgtgaccgtttgaagacgttttaaggccggggggatgaaatgcttgaaacgagagattttgagatgggcataaaagaaaatagattaggctatcgggaatgggcgatttcaacccatcaatccaacgttgaggcaatggactggctttggcatgactccatcctatgcctcatcagtctctggcgcgcgttgagcttttttcttcctttccgtctttaaacccacctccctatactgcgaaatgagtttcataatcagttgcaaaagaactagaatgaacaccatctggagctatgtctgaaagtatattaatgtaggtacgcttagcgcttggtaggtcaggagcggaggttgtagtatagtagttccaaatctaacttctgaggagatatccggttcat

SEQ ID NO: 176533 - DNA, 985 bp, Cannabis indica
atattgtttgttttttttcaatcatttttttcttttgttttgtttgattgttttagtgttgttttacagttgttttgtcatgattatttatttgacgtcgatttcactacttttgctcaattttgtcggaattaatagttgttttccggttgtcctgatgttgttgtggtggttttatctgtagttgtgaaagatggaggcctcatacttttgttttggtatttacagtataaaagaaaaaaaaagggggaggacagtataaatataatttttaccgtgtggcagtaaaattgaaaagtattactccaaatccaatatttttataaaatgcccttctataaaacgctttattttcaaaaaaaaaattgggtatatagtggtatataattgtaaagtttccttattttttcgtataagtgtaattatgtaaagaaagcccattgtttaggcccaatacaactaagttctgagtggtccgttccaaatgtctcaactacaagtcgtctcgtctttattaagtacaatagctgggcctttaggaatagcttgtcctgtcgggtacaatgttaacgttttattggtccgtgaaaggcacgcgcattcttattcgtctggctttagtcatgtgtagcttcgtcgaacaaaggcaagagctcacacatatagctgtttccctgttcatctttcagattttggtcttcgacttcttcattttctctatcgtttaacacatttctttctcttatacccaaatcctcgaagcttaaaatccattttttttggttgtttgttcgaatccaaacctaaaccctctgtcttgtaatcgtccctgtatcgaaatttgggcgaaaatcaatggctcaagcagtggaggaatggtacgaagcagatgcctatcatcactcgctcatatcttactgcggccatcgttacaaccattggttgctccctgatgtatgtttcttgatcgattgaattttctttc

SEQ ID NO: 176534 - DNA, 938 bp, Cannabis indica
gcatatcaggatttagattctcttaatctaagatcaacttctgacattgacttggaaagatacaacggtaagtttacaatatctttaaccaagttcaatatcggtccagtccaatgcatactccatgcattcgaaaccagtatactttgccaatgttctggaaagaacataacacttactccaagtgtaagtatacttcatcgctgattatcacatcagtgtaaatccaaaacactgatgaacagggaccaaatcttttgaatcatataatcacaatcacattccactgtattgacgatactgtaattgtgaataactatatgttctggatttaactgattttgtgcatatatcaagtatatgtattaaaccataaacatgtaacatacatgtaaacatacttcacttctaaattgataactaatcagattgtaatgagttttatttagggcataaaacccaacatgggaaccctagaacctcaatatgatgggactaagtataatctcgttagaggcacaataatttgtgaccctccaatcgagctcttcttcctgcataagaatggagagctccatcatcaagaaaggaatgtgacattcttatttttgttaatcaagcttcgttgatgctgacatgataggagccattacagatgtagaaaagaaagtaaaagttgcaacttgaaattttggcaagaaacggaaacaaagcaagaaatgggaaaattttcttaatggtgaatgaaaatgactatttccttaaacttaaataaaaaaaaaatagaaaacgtgacacttaagaaaacacttcaacatttaaggcacgcccaatcgtattcctcttagttcccgaacgttgcactcaaaacacgggtgagtggtaaacatgcgactaatcgacagtgaccttgatcatgattacaggtgttgactacg

SEQ ID NO: 176535 - DNA, 621 bp, Cannabis indica
aaggaattttatgatgtagcctttaatttaactagtaattaagtatgaacatgtagtaggaaagtctagcacacacgcacatattctgtatacatatataatgactactattagttggtttcaagtggcctcttgattctttgctcgaccaaatgagttttcaattaattcatttcagatctaataaattcctctactttcggtattcagaagccaaagttgcgaaagctgaatccaaccatcaaatattctttccaacgtaataaaaacaataaatctacttttaaccttttgcttatagaacaagtatatatataattattcattttcctaacatatccttatggtactattattttattatgtacagttagctttgccaacatatatttaattcttcttcattctacttctaatgaaaataatagataaagcctgccgtttcataccttcgtatcaaacccacctaaaatcaatgtcttggatgatatgcatatcaattattatcacacgcaaaccttacccaattatttaaacctaaaaatattaaattttcacttgtcttcccctttttaacttttaaatatactagaacactcaactcaaccgtgtcaatatatt

SEQ ID NO: 176536 - DNA, 1083 bp, Cannabis indica
atgttatacaaactgatgaaccaacagccaaaccagccagctctcccacctgcaattatattgttttaattaattaattagtccaaattaattaattaataatccaacatatgtacacattaaatgatatatatatatatatacgtacggctttagcatcagttgcaacagcagaagtgataaacatcatgttaaaagtgacaacaatctccattatcaaagccctaacatcactcccagaaggtgttgtcgtcccaattcgatctattgggtccagaagtgcacgtagtgtaaatgctgctgcaattgctcctgtgaattgagataatgcatagaatggcacctacacaatatatatatttaataatattagaacacaccaatattcttacatacaatgtttacattttttattattttaatttaatacaaaacgttagtaattttaatccaagataaaaaggctaggcttataaatttataatcaccttcaataaatataatgatatttacacataggagggtgctcgacaccactagttgtcttgtagttatttctcttgctattaggtactagtggtgtctaacacctcctataggtgacgtcctacgataggttagcaatattccctaaaagctattacaccaataatggtatgacaccgaggaggatgctaggcatcagtggtgacttttagcatttcactaaaagttatcagcagtgtctagcattctcatacgtgtaaatattgatattggtacaattaaatatcgagtcttatataatataatataataacttttagaaagtatcgctaactaattgtaaagtgacatactaagcaccattggtaccctatagtcagggtcggccctgagcataggcacgctaggcctgtgcctagggcctccctagctcaggggccaaaaaaaaaattctccttttaaaattacacattttttttttcaattttaaaaaatatcacatttttttctaaatgagagcccaaaaatatttttttttcctatagcctcctaaatttcaaggtcggtcctgcctatagtaatgctcaatataaaatg

SEQ ID NO: 176537 - DNA, 500 bp, Cannabis indica
gatattgccttatttttttttttttcattgatttttgcactttgagcttaaattttatataatgtaatttgtctctatttacctttttaatatttattttttaaacaaaagtttcatattttgtttttgtcccattttataatgttattgctaatgatgttttaatgaaacttttactatttttgaccatgggttttcttttcacaaatgttattttagggtttgagacttttaattatatttctgtttttcgaacttactccatagacaaattatagtgcaaatattatattttgtaaaaattattaatcaagactttttatttcgttaaatgataaaataaattttgtattttttaaaatgatactaataagattttaaattgtatttttttgttaaaataaaaattattgtctaatttacttttttttttactaaaaaaaaattatcaaaatcaaaaatttatttttaacttgattttgattttttaaataataaaa

SEQ ID NO: 176538 - DNA, 608 bp, Cannabis indica
actacttttaaacgaattcgtcattcatctgtgttctgcaattttaattcatcccaaattccagaagagttgtatcatgcaagtaatcgtttgcgaacactcttactgtattgtgaaggtaatttggaagtgccacttcataaactgttttcttgtttttcatgtttgtctgtgctgagtgtgagtggatccaatctcgagagtttcaaggctccaactggttccttgtggcatttgacataccttgatttatctcacacccatataaaagagttacctgatgagttagaagatatacctggtttacaaactcttaatctctttaattgctataatcttttagcattgtctgacttgacaaaaatgaaaagcctcagacatctcaacaacaatggatgcgaaaaactgagttgcatggtgaaaaaatggctcaacatactgtggtttaagtccgaacattcagcttaaacattgccattgtttgttgtaggcagtcatcttgacacactccttttaagatggcttgagcttcaaaggtagtttaaaaattacatacatggagaacattaaatctaaatttttttagaactgaataccaatattagaat

SEQ ID NO: 176539 - DNA, 571 bp, Cannabis indica
ctatgtaaattaataatttttgggaccactttacttatccactttatgatgaaagcaaaaaattcatattaaaaagagattaagtaagaaaattaggccaaaatggtatttaattaaagtaattgtttaagaggaaattacactctatatcctttttatattgtcctcttttatttttaccttcttttttaaaatctattatttttacctctttttttaaatattgtaccaattttgcccctgtcacttcaagatactctccatgtgattctcttatgtaagggtattttgggtacaatacatataaaaagagatatgtttcaaataaatataaaattagaggtaaatttgattaattaatgaataaaagaggcatttttcaacttatcccattgtttaaagcttaagtattgacattttaattatattttgttgtgtgctttagaataaggttgaatatacggtggattgtatttgcatccactacctactatcatagcacaacattagtacactttgaatataataataataataataataataataataataataataataataataa

SEQ ID NO: 176540 - DNA, 610 bp, Cannabis indica
agttagcaatgtaggtataatttactttttggaacttttattaatgctcttttaacataaaaaaggctaatttggcaattaactactatatatattaacatgacaataaattaaaatgcaaatatcgtatacaaatatatttttatgaatatatacgatcatcaccatctcttaattaaatcaactaattgtatatataaatatatatattagttattgttgtatatgttaaggtatgataaaagatatatgttcaggagaatcagatacctgacttgatagtaacaatacactattttttatttttattttcttagaagtacgtacgtatttaatcatatacatatattaatatattctaatgataaaagctatatcaaatatttcagtgcagtcgctatgatataatatatgattctctccaatctgatctctttttatttttcaaaaaaaaaaaaaaaacttcaaataatatttatgtttaaaaagttaactaacaaaaaaaattctttttaactatgatttcacgtgagaagtatattaaaaaaaaaatatatatatgttgagtgaatcaattacaatcctgtattaattatgttgtgttgctgtg

SEQ ID NO: 176541 - DNA, 719 bp, Cannabis indica
attactcaaataaattatattgatagcttgtgctggtgaaagtaaagatgcaactcaagagcttcataaagttttaattttcaaatgggaaaattgcagtaaaagtcctcaagctcgagatttttgtaaatttgttggtcctttttttttaacagatctgttaatttctccctaaaatatcacatgttgatattaaattgaggcataagtccttaaaaaatttacgttgatgcaaataagttctcaaaaagtttactttgatgcagataagtcgtaatctcaaaaaattgtggatatagtctgtaggtacccaatttaacaacttttttgtagttcttaaaacttctacgtgtcaaaaatttattgtttcacaacataaaaattatttaaaaataatttaaacatataataaaaaattattaaaaactttaatattatttttcattatcttttattaaagattaaaaaatattatatatataaaaaaccttctacgattcgccacccacccttctcgatggtggaggctttcgccgacaagtgtcatcttttcatcttcactttcttcctcatcccatcccacgatcccatgcaaaaaactcgaaaaatataagcaaaaaaaaaccctaatagttgcaccttactccaaccctctcccctgaatctattctgtatgcccccatctacaatgggtggtgggttttgagggttgttttgtg

SEQ ID NO: 176542 - DNA, 640 bp, Cannabis indica
  modified_base (40)..(40): a, c, t, g, unknown or other
agtataaatttatatacatttgaataaaaatatttttaanattattaaattatatttttatcaaattgtaaaaaaaaaaattgtttaataaaaaatttgttaaataataaaaatataaatataaatctaaaaatatttttaaaaacaaaataaaaaattagaaatttatatattatttattttaaatatttttttgaagaaaaaaattattttattttttttttttgatataaaattttttgtaaaaaaataatttattatagtctaataatgttgtaccagcttatttatctgtaactttttttttataaattcttcaataagttattttttaactgcttaacaaacacttttttgtcgcagttttttcaagaaatagctttagcttttcaaaaattggccataaaactaaaaaatataaaagtagacaaaactacacacgtaaattcaaaatcaattttaaaaaattcttcaactaaaaaatatataaaaaataaatgaaaaagatacataataataaatgcacaaaaattgaaaaatatactaaaaaataattaaataacaactcaaaaatttatttatataaaaattgagcttatattttttaatctttttaagcaactaaataacaacataacaa

SEQ ID NO: 176543 - DNA, 672 bp, Cannabis indica
caaatgaagttagaatgcttcattcacagagagcaaaaggggatggtgaatatggtcaaacttggtttggtccattttcttgctaattttgcgtttggtactattcctgaaaccaaagtgagcaatttcttttggaatattgttgattcagctgatgccaatattaagcaattcccatatggtaaacatttatgggaaaaatctcgtcattcaatgagattaagtctcatgaaaaaagaagagacatttgagaagatgtttgatgagaaaacaggaaaacttcaaccatattcctacaagctatttggttttccatatgcattttttatatggatatttgagactattcctgctctttctctaactttttgtgagaaggtttgtgataattctcaaaggattttatgctggaaatgtacatgcaaactgagttattccacattaaataagaaaatttttaccagaagaaaggtaaatttcttaatttatttattgtatatttaattgtggttattgaaatgtagattaacttttgttatagttagttttataaatctataatactcatgttaatgaatatatctggtttaaagtaaccagattacttattattttttttcaaaagttaatctagcttactttatcattttttgttaagtaaccaagttactt

SEQ ID NO: 176544 - DNA, 880 bp, Cannabis indica
tggttatgatgacaaagttatgagctcaataaggttaacacatttatatgtatacatatgtgacccagtgggagattgttagaaataattggggtcacaattgtatatataaaatgtgtgttgggtcatcaaataaataagtcaaatttatgtggtctattttggaataaagtttatgacttaagggcatgattgtcatgattttaatatgtggataccaattagacaatttctatattgatgaggggccaaatagaaatagtcaaaaatattgccaacaggtttgtctgttggtaatataacgggtaatggtccccattttgcatcgtatcatatttttccagagttcttgaatccccatcatcaagaaaataaggtttcaaaggttttgatgcaaaattggaagatcataccaatcaaagatcgattctatggactccggtacgcttccgctaatctatattctattgtttgattctcatgaattaattagggctatattctgagtttacagtatttctaacaaattaagcttgaaccaatccagaggtggggctgaccaacccaagttacaacaacgggaggtttagcaaaaaggtgtgagggtactatacatagcattggaaaactgaattaatataatgatgagggttatgatacaattgttatgtacctttcgttctggacaagccaaatggtgtccactaaaatagaggcaaaaaggaatgcctctctcataaccacccttatattctccaagtacttacaaaaaaatttaaccccaatcccacattcgcaccccccattactcacttaaataggaatccaatcccccaaaggtgaagctctccataggtgagaagcaagattacgaatgtag

SEQ ID NO: 176545 - DNA, 1204 bp, Cannabis indica
ggaattgaaatggaaactcaaatctttatttaatgaatgagcttttacacaagaaggatgacccattctataatgccaaatggtgtcatttgttattctagtatcagaaaatgaagagaacacagaaatagagtcatgaaaatgattagaattcaagtaatagaggctgccacatttttcacccatcccaatcatcttgttcttgacattgtcctgaataacacaattatcatgagtgaaaataaaagtgcaattagctgtagctgtcaatgaatcaacagataacaaattgcattgaaagttaggcacatataggacattttcaagaacaagattattggataagataacagtaccaacacaagagattttaacatgtaaaccagttggtaacaagactgttttaagattggaatccttgtaagttttagaaaatagattgatgtcagggcacacatgatgtgtagcacctgtatcaatgatccatttggagttatgagcatgaaaattcttaccaaggaagtgtgacacaacaggttgttcatcaggaacagaagaggttgttttctctgcagctttctgagcaagaagagccatgagcttttgacactgaatattagacaagctggacaccaaatccttttctcctgaattattctctgccttttcatcatctacaccagtgaaattagcagatgctgaaccagttttgtttggatttcctttggcatttcggtttggaaattttccatggagtctatgccctggtggatatccaatcaacctgaaacatcgatctatagtgtgtccattcattccacaatgcgtgcaattgaatttggatcgaaaaggttgaactgcaccagcaaattgtccagcaccagtagcattagcggaattctcattatcactggaagtaatagatccaacaggtccagaagttaaactcctttgcctttcttcttgaacaactgaggcatatgctttgtttacagtagggagaggatctctcatcagtatttgtgatcttacattactgaaagagtcatttaacccaaccaagaactcaagaagtcgatcctcttcctgctgttcaagaatgaccttcatagcaccacaattacaaacaggttgtggtctaagttcacgaatctgatcccacaacgatttcaatcttgtaaaatagctagtaacactgctcgaa

SEQ ID NO: 176546 - DNA, 807 bp, Cannabis indica
tctcctcaagaaattccatttaatgatgatcaccacataaagccagtcacctatattttgcatcaatcgaaaataggaagctctccaagacttattgattaacaagtttccacaaacaccacaaaatccaatggtgaatccacctccaattcccttgtaaaaccacgacaagtcaaaccattctccaccatcgtcatcacgagctaaatttgaagcgggaacatgcgaagactcattatcatcatctccggggcatgaacttggtagaggatttccacaaagaccaaggttcatggaatatgcggaagcattgaagctttgtaattgagtaccagtaggaattcttcctgtcaatcgattatttgatagatccaagtaactcaaagaagatacttcagctaagcttgtgggaatttcaccatttattttattgtaggaaaaatcaagcacttgtaggttggtcagtttcccaatctttctaggaatttttccaaacaaattattccttgatagatttagtgcacccaactgagagagttgagtaacttcattaggaatctctccactcaatttatacttgataagtcaataactcttagtaatcccaaaatgctcacatattcatgttctgcccctttccatgtgattgatgcattattctcataagaaaatgtatactcattatactgcaatgactcaaatgctcatgtctggcattggaccttcagaaaatctcacatctgacggatggtcatccttgaattattactcgaatcattgaagtaaattttaatgcaagaaggaatg

SEQ ID NO: 176547 - DNA, 674 bp, Cannabis indica
ctattatttttaataataacaatgataaaaaacgattcaacagatgccccctcgagcatgcacatggtaatttatatggacatgtgcgatgctcgagtgattttgagagtttggcacatgaactttctacccctctttgtagttttcttattccaccactagtaatttgaaaagaacaaataatttgcatatttgcacatttgtctttaagcttggagagagcaatttggaattttgatttggtggctgcatctattatttatttagattgcctacgcacccttgatgggatcaagcctttcatagttcggaaaagcattttgtgcatttgtgcttctttactccatgcttaagctttatgctttgaaatgtttttctgaacgcattttagcttcttgctttgcgtcatggctttttgcctttagttcctgcattgtgctttgaactttgagttttttgctactctccttttctttgagcttttgcctttttgttgttggcttttctttttgctttgcctaatttgtcttgggcattagcttttttgctttgctcatttttttttttttgagcttttagctttcggcagtaatctatttctctaagctttagctttttgctatgcttattattattatttttcgagcattagattttttttctttgctctattt

SEQ ID NO: 176548 - DNA, 549 bp, Cannabis indica
ggctttacgacgatctgtactatgtcgaatacccctaagaaagatcaaaggttgtgattttttttttgtccaatatgtattataagggaggaatttctaaattggtaattgtaggttgaaatttttaacttgatgtttattatgaaatttaggttttaaatgttgaaggaaattgtatgaaatttttggcttataaatgtttagattgtcattcaatctttattaattgaagaagaatagtttgaacactaatggagaatgatggaaactgctggaaaaagacagggttagatggagtgggtttaggggaaaagggggtccaatgacaatactaaaaaattgggcattcgtgttgatcaaaatatcagttttttcgtcatcgacagtaataaaattgagtgactgtttaatagaaagagctattagcattgatttataatcgacactaacaattagcatcaatttataaacgatgcaaaaggaagaaaaataaaaaaaaataaaaaaaaaaaaagctaaagggttgaaatgctaatttagaaactaagt

SEQ ID NO: 176549 - DNA, 997 bp, Cannabis indica
cataatgtgatgtttgtgtgcatgaggatgagatgtggtcttgttctttttgttttcgataaaagatcaagaattcacgttgattcaatcatttgatcttttgaacttcctcctgacccatgatttgtgatgacacaggcatttgatggtattcagaagttgatatgtttttttatacaatatgacattgagtgcattaagttactggtctgtttatttgtatatgtgtatttatatatgtatatttattgaatttccataattccatgtataattctatattggtaggtaaagaacgaatcaggcataacccttctttgtcactttctcaatgagcggagtttgaaaatagccagaaatcaatccacttccatatttttaaggtagttctttaaaaaaaaattaaaaaacgcttcatacttttattgggtttcagatccttcgcgtcaccctataatcacttttaaaagtgcctcacattcttttgttatgtacaaattataaagtaaacacatgattgagttaatcagctggttgatctttattcttacacagaaggtatgaagacttggagaatccatcccaagaggtagcatctatgtcatttcaacttgctgctttaggatctttcatgacttcctcagttccagtctctcttttgcaaagtcaaaagtttgcttggagaacaagtatagtctcctctcaaggtatatcctgaatctatttcccttaccagaaaaagataaaaaaaaaaactctttaatgtatccagccacacacacatggatgttgtctacacataaatatacttgtcaaaataagataaattttgtcttcccagttttgattaactgaagatgatatgaaaagaatcttggtgctgatgaatattgtaggaagtgaaatttgatggtgccaaggttgaaactttaagaatgtaatctgagagtgtcccccaaaagaaaatcaagtatctctaattcgtctaacgattctc

SEQ ID NO: 176550 - DNA, 1413 bp, Cannabis indica
attcacttgataaagtatttaggctagttaattaaaataaattagataaaaactaattcaattacaaaaattaggtataaactaaatttgattaaattaaattggaaaaatctaatttgttaaattggattagaacaaatctaatttaattaaccaagctaaattaatttaattaaagaaatatttattttttggcttgttttgggtacattcagaatttttactttaaaaattttgaagcattaattttttctatgtgttcttggtatatacatataaaaaaaagaacaatatgtgtgtgtccataagctccaagaaaggagctgaatggcacaagaggagttgctcgcatggctccataagctccaagagaggagctaaatggaaaaagtggagccgattggcatggctccatgagctccaacaaaggagccgaatgacacaatggagctgaattgcacaagtggagccgattggcatggctccatgagctccaacaaaggagctgaattgaacaatggagtggaattgcacaagcggagccgatcggcatggctccataagctccaacaaaggagccgaatggcaagtggagccgattggcacaagaggacccaattagcatggtttcctaagctcctccaataaagacaaaggaggtattggtcaaaaggagacccaattggcatgattctctattgaaaaaatgtatatatatcgaaaagggtggcgtggggatgtgtatatatgtttatgacatatatactcatcaaattcctacctattttagcctactctactttttttatctttacttcttaaagtctaaaaagccacaaacacattttctcctccattttattttttttggatcaaactagggatttcaaatgttcatcactatcatcatcatgttcttcattttttcctaaaaagtttatccaaatcacaccaaatatataaatctctctcctttctaaaataagagtggattaagataacccatagcctacattgctaagtttcattcatagattctaaaaattacaagccaaatttcacaacattagaaaaaatcaaatatgtaaaaatagggttttatgaaaaagtctaaagaatactatgatattcatactttctatattagttttatgtaatattataatttagagaaagaaaatagagaagatatgagaattttttgagtgttttattccaataggtgatctcctatttatacacatacaagagtcaaatattaagaaactaagagaaagggaaactaagaaaaaggaatgttgattaaattaatggtaataaataaagaatttggacatccacataattaataatatttataacactcccccttcggatgtccataataagtgcctaattaaacgcctcgccgag

SEQ ID NO: 176551 - DNA, 831 bp, Cannabis indica
ttcatcattattggctagcatcactaatcaccatcataatagagccaaaatttcaccaaaattggagcaatacacacatcataaaactgaacctacccatcataattaaatccaacattcaaaactcaaaaaccacttgattattaatgtgagaccaaaacagaaaaatcaagaaagtttacacaagagttggaaagagagtgagaaggaaacctcaaaatacaaagatagaatgcatatcagatacaaaaattgattcttctccatgtttagtgatggataacacgaacgtggaaatcactagaaattaaaacggaaaatccgaactatcttcacccaacaaaaacaatgatttcatacaccaaaaaaaacgaggaaaagagataatgaaactaaccagaagagagggcggcgcctgattttgaattaagatttgggtagaaattgatgaaaagggctcgtcagtcgccacttctgctggttcgaccttaaaattgccaacttttttttatataaattactgtaaaaatatgttttagattttataccattaaatattttatttttatgtttagaagtaaatatactcaatgttataattctcttatctattactatcacttttatgtacacataaaaggtccagatgctaaatgttacatatttcaagaaaaaaatgagagaaatgctataccaaattactatagctgagtgaaccactgcagtatatgaaatatgattatcgaactaaaatgtcaatactatgtgaaaattgttatgagaactattttttttttgtgtgtgaaaaaagtagtatttagtttctaatat

SEQ ID NO: 176552 - DNA, 527 bp, Cannabis indica
gtccattgagtcgtcaatcattgctggccaaaagtacccctttcggagtatcttttggataggcttcgccccagcatggtatcgaagaagccttcatgcacttctatcatcaatcgctcgacatcagccttcttgacacaccttaaaggcggcattgagaagctctgtctgtacattactccatctaggattcaaaacctagcagcctttctccttatcttttttccttcattcttgccttctggcaaggctcaagtttgaaggtaagctgcaataggagtaatcaatgttttactatcatctaacatttagacttcttcagggattgtaattctgggttcttttaggaactgtaattgcactatgtttgccttgtcggtaatggtgcgatttgctagatgggcaagtgcgtttgctgtagcactctgttctctagggatcttcttgattgtacatcctttgatctagcttaataagtctttgatcttgctcaagtaggccactattttttcacctcgagctgtgtg

SEQ ID NO: 176553 - DNA, 628 bp, Cannabis indica
atgtatataagggcacaccttccatgtgtttgacaaaatgcctaacatagttattcttaatcattagcctaaagaaagagggcatcttcaattgtgttattgtaatttttatttttcttcaaactggattttcatgttgttcctccgatgttatttatgttcattttgattttataaattagtcaatttaacaataaatttgatgcaatattgtttatatttttgttatacgtgttgttttgctattgcaatagaaagaaaaaaaaatattgattcctagtgttgaagtacttccaagttgattaggataactttgtgacaatttctattcctttggtagaataaagtaagttgaacacattgagagtgtacaagaaaatgctctatagctgtgtgtgtgtgtgtgtacaatgtataaaatacgcatgacacgtgtttggtgaaatacccgagagaattgagttttcactaacataaagaaagagaacatattcaattatatttttcttcttctttaagctaaactttatattgctaatcttgttatttttgttcattttggtttattgaatttgtcaatttttattatagatttttaataattgttttttgatatagtattgtgtta

SEQ ID NO: 176554 - DNA, 695 bp, Cannabis indica
attattttagttgtctatatgtaattacttgacctaagattgtagttatatatatagttcacattccatgaagtagttaatattaaatgtgtatattttattattttccgaagggtaaatttaaatgtatgtatttatttatttttttgggcttgaattaatatatattccttaaaaaaattatttgcatatcaccttgatagctctgtttctgttatcgtttcaggttccccttcctcttatagtcttatgtgcatgactgtttaaagccttggtggaagtcagtttggactatcgaaatcctcctaagatcaagcacttcatttggaaggcttttaatcatgttttgtcgtgtgctttcaatttgttgaggagagtatattcttgatagcccaaattgctccttctgtagaagcaaagaggagactgtttctcatgccctaataggtttttccaaaattaaatttgtgtggaaagaaacttcattttaccatttttatactgcaattaagaaatatcttcttaggggctttgattctttagtaaggatgaatttagtctgttccttggcgttagttggacgatatatatggtcacaaagaaatgcttcccttttcagcaataaaactaacccttgtacaaatatagaagatcttgtaaaaaatattttgtaggaatacaaggatgctcaatct

SEQ ID NO: 176555 - DNA, 787 bp, Cannabis indica
gaaaaagattagaaaaaagggacaaagtacgtagaattgtagaaagaggtttttcttttttttttcttttttttttttttttggtcgtcacattgcattagtctactagaattttagaaaaaataataataaagaaagaaagagtgatatatttgcaattgagtcacattgatttgagcatcaagcatggtgagtgtagttgaataagtaaatacttggaatgaatgagaataggagacaaacatgccatggataatgcatatctatctatttctactctatcataacatagtcaatcattttgtggttcacttcatcccatgctttataaattattacaaaagttttcttgattgccgcaatccttgttacactctcggattaaatatattctaggaattattcattaaaagatgtattttttttttttaattattatttgtggtgcatgatcaccctcaaaatatgaatgttacagcagtaacaatgtttaagaaaatgcaattcaaactagaacaaattacaaaattaaaactagaacttaattaaattagataagaataaacttaacttcaaaatgaatgaatcgtggatctttattgctcgattagtcactaatacacaatagaatgtgtacatgaataaaactcaaaacagtgaaatgaatacaaagaaatatcttatattgagagaaataacttcaagagtgatactcctattacatccctccaccacacactcactatgatcttggactctctctctctctaaacttgtctctgaatct

SEQ ID NO: 176556 - DNA, 638 bp, Cannabis indica
aaatattacaactagttttacgttttcttccgtttgctttctagttttaatgcacaggaatgttttttaaaataaataacaactttgcttccattataaaagtccaaaaatttcaacttttattaatttttattttttttaaaaaaatcaaatcttcaaactgaatacaaaattgcagcttctgccggcgacaagcataaaaaaaaaaatcaaagaacgatggagagtgaaaggaggaagaaagaagaagctacgaagatcactcaccacttctcgacggctctgtaatgttttgagagagacttacgacaaacaactttcaaacttgggagatggcgaaggagctttcaaataaagttacagtgaatttcagaaaaacaaattacatgtgaaaaggaggaatcaatgggtgtatggttgagatcaatggggattggagaagaagaagacgtggagtgggtttgtggaatgagtttgtaaagtgagattgtaattttgagagaaaatcaatcagatatgggctttctaaataattttacacaaatatggcaaatctaatcccataataaagtctaaaaatacaaaactaccataaaacgtgtacaaacttaaaaatgccatatttaagtaaaatattt

SEQ ID NO: 176557 - DNA, 1303 bp, Cannabis indica
  modified_base (1253)..(1253): a, c, t, g, unknown or other
agcaaaagaatagagagctctctaaatgtagagaactccttatttttttactaaacgtttttcatagaattttaattaaaattattattgcttttttattattttaaaattaatgtatatttaataaattaaattatgaaatattattaaaataattaaatactaactaaaataacaagtataattagaacaataataataaaattgattttttattttaattttctaattatgttaacaaaaaaatagaaactatgattaaagatgtttttaattaatttataaaagatgtcctaaataaaacgtgaagtagagtgaggtgagatgagaaggtagaatgcccaaattcgtaacccgacgtgtcaaccatgcgttaaagtgccgccactcttttctgagagattggacgaaagccgagttccaaccttcataacaccttatattcctttgcatattctcttttgtggctcaaaacgattagctgtacacaccacatgactcaaaaccgaatcctacgctttttgaactttttctatttttttttttataaaattttctaaatataaatatttataaagaaataattattcattatctatttatttattcttttgaaaaaatagctattgttttacgaaaaatattatttatttattattatttttttcatttctaattttagttgtatttccaacgattaaatgtccaattgaattaaagattaataacatttaaaataaaaattaaaaattaagaaaattgtatgatttatttttttcaggaagcaactttttgtttgccgtaaacaccacataactcaataccgaatccaacgctcttttctatttttttttccttttccataaatgtttctaaatataaaacaaatatttaagtgattctacaattcactatctcaaaatggatgtattgatgcactttttagaaaaaaaaatttagtctaatttctttttagattgagctacgttatagctatttaagatattcaacaaaattttgagaaatttggaataatttacaatataggaaacaatgttcaaatagtcgattttacactctataaaataaaatagtcatgcgtgcgatacaatattttaacatagtttttaggcgtgttaaactttcttaaatttcttaaaattttgtcaagatgtcttaaataactataacgtacatgactatgaaaaaaatttagactaaaaaacagataaggaatgtatcaatataaaatntaaatgggagtgaatcgtagaattttcctaaatattttacgtaacaaaat

SEQ ID NO: 176558 - DNA, 1090 bp, Cannabis indica
cattatttaggttaataaaattgcaaagccacactctctctctcggttttgtgtggaactaaaaagaaagaagaagactttcaaagttatttcaacaaacagttaaaatgcattatattaatctcatacaatgatcctaacaaatacacataaatatgtacataagcaatacaaccagaaaattggagggagaaattagatctaaggagagaaatcaatacaaaatttaaaaaaaaaaaagaagaaatgttacatacattcaaatcaaaggacaatatggaggttgtggttgctgatgtgcagtgttgatggtggcagaggtcatgatggagcttttgcacgatggcggaagctgaagttgtgtgcgttaaggactctatggctgaaacatgaagaagacttgtgtggagggcatattgggtaatgtacttgtaaaattgggtatatttcaatcaaatttaaagtgcaggtatttttggttaattgaaacttaaaaaggtattcttaaacttaaccccaacaattagacatgaaatataatgggctttagaacaccaatacaatgggcctggtcttcttgtaatttttgatcccaaaggcccaaatttaacattatgaatcgcaagcagcgactttaatgtcataattgtattgtatttaagcaacaatggcagagaagttgagacttgtgctgtcagtgccactcctccgcccttcccatcttcattgtttgccgccattaaaatccttttggagcaaaacccacttcaagttcaagatttctggtacaagaatggcttcctctgctactgttcctaacaccaaaaccaaagttatagattcccatttgcatgtttgggcatctcccgaagaggtaagtaggtaacccaccaatcaaagatttgatttttcttctaccgctacatcaatgtaaaagaaatcatcattttttatacaggccgtagacaaatacccttacgttccaggcaatgaacccactttacctgggtctgtcgatctcttgctccaggtatgaatgctgtttctatgaccataattgagtctcatccattttcgaaagttgattttt

SEQ ID NO: 176559 - DNA, 787 bp, Cannabis indica
taattaaaacatatatatatataattatatatttttacactacatcaacaatatgtttaataaataaaatatttaagttaaactctaacttttttttatttaattaattttttttttgaccaaaaacttcttttctaaaattaaagatttttctaatcaaataaaaaaattaaatataaaaactcaaattttcttaataatatccattcataagtaatacatattaaaagtgtacactcatatatattttaatttaataattattataaaaaaattactaattattaacaaagaaccagaatcagaactaaatattaagtgttactagtacctaatagtcaggaacggacccacttaacaaaaatattgctttttaaaaaattaaattttaatttttttttaaatttgataattttagactaaaatagtaaaaaaaaaattcttcataaaattaaataaatctagtaagaatgattaaaatatataaatattttttaaataataaaaaactctcaacaaagaaaaaaattctagagtctgtcactgctaatagcaataccctctaataattattagtggcttatacatcatacattttatataatgatatttgtgcatcaaagtttatttttcctttttatactatattgtgtacttgcaatgagatcatgatatttagaggctgcacatatatgagaaaaaatctaatccaaaaaaatatcacataaatggatactcctagctcttactatgctttttggaagatagtgacatatatagaaatata

SEQ ID NO: 176560 - DNA, 720 bp, Cannabis indica
cgcagagggtagtgcaggacgtgtcgtcagctgcggcggtggtggtggatgggttgagccagagttgtttgggcgaatatgcctcaggagctacttagagaggtgcttatcagaattgaagcgtctgagaccgcctggcctccaagaaagaacgtcgtcgcctgtgccggagtttgccggagctggagactgattactaaggagatcgttaagactcctgaactttctggaaccttgacctttcccatctctgttaaacaggtttgttttctgtttttctttttctttttacataataaaaggaaaaaaaatgatcttgacttagtgagtagttattgttgtttttctcttatcaatttgttattaattttatgtgcatttggatttggatttggatttggattgagtctgttttgagttgctaagtatttggagaaagaaggaaaaaaaaatcttaatttaggtgctggatttgaatttggttttggattatcatgctagtaatgggtataattaactaagatatcttatttaggggaaaattgattgaatttgtttttcccatcagctgaaatttttctattttatcatatgtataatcattttttgaattcaaaactataaaataggatcttgagtgtggaaaaaaaatggtttcaattttctatcacactgaagagtcctttttattttttttctgttatttgttatgtttttcat

SEQ ID NO: 176561 - DNA, 846 bp, Cannabis indica
attttttgtcgctttatacagtttggagttgggtcggtttagttcaggttaagctatttgttgatttttttgaacagccctatagtccaagttctaggttggaatcgcgtccagttccaaactggggtcgatgttcgagtgaggtccgcgtcagggtctgcttgatagaaagtcagtgagagaaaaaagggaaattctttatttagaggcaagaagggtcaaaagaagagagataattggtgtttggatgtgcgagcaatggagtttggctaagcttttgttgattaagggtaggagagagtgtggttgtttgtggaaattagctagggctgcaactaaaatggagaagagggcatcgaaatcagaggcagaagccattgtagtgcgtacaggaatcatcgaaactctttcaatttttcttgcttgaactcgtactgcacttacattgtttctcaaatttgggatcgagtttgaagcacttcaattggccttggtaatgtaacgtatcaagtgtggaaataattttgatatagtaactttatttcacaactacataaaaaataataaaaaaaaaattacaaaaatattgtgtgaaattttaaatatgtttacgaattttatgattttacttaaaaaaaaaaaaaactgatggtacttttgttatatcattcacccaataataatacattaatatagaaactttttttctaataataaataaatttttatttggccatgataacttttctatttgaaatacatatatttttttaatattatttgtatctcccttaataataaaaagtttctaaaatttgttacagtaaaaccaattagtcattacaa

SEQ ID NO: 176562 - DNA, 655 bp, Cannabis indica
gtccttttctgagattcagaattaaaatggacataacaaaacctcttctccgtggaaggatgattactcttcctagaatcaaggatgagttctgggtggaacttcgttatgagcgattgcctgattactgtatggagtgtggagttattggacatctttatcaaaagtgccctgtttttttggaaaaagtggatcatggaatagaaccagaccttgcttacagcctagaactgaaaggatcaagactgcctacgtcttcctatgaccggtatcgtactgattttcctaaaggcaatgcgtggccactactcacaagattagctcgtacatcaatcactcatgccctccccaagcttcaatcgattccccaacctcaaccataccctttattagtgggtgaatcctccacttctgcagcagtcccacttcagggtaatcaaactcaaaacattgcaaatgttgcggatcacacaattagtactgttgctaattctcacttggttcatagtgttacttctccatcatttactccaccagttcttaacaatgcctccttcactatgtccactgccactaaccgaaataaagacataatacaccaaccatctgttgaacatggttcgaattcaaaagggaaaggaattcttacttcttg

SEQ ID NO: 176563 - DNA, 743 bp, Cannabis indica
atgattcacaagcaaaaggggctaaccttgtgctcgttttgtcttgttagattgcagatatcaatcaggttttcgcagttcagattttaacgtcagaaaaacgagaaaaccaacttcctccaggtgaaatcattctccaaaattacacatgacctacccttgtagattttggttcacgtgcatgtaatgtgaacttgtttttcgtgcctgataccttgtaaattatatgctcacatttatttcttgtctgcagatgaagttattgcagctattgatccgtcgaaagtagagatatttcaaaggtatattgatttcatgtgttgtaccaacaatgtatgtactcatgcagataggattcataggaactattgtcaaggttactaaattaagttacttttgcggtggccaaagtttagcattgagtttctttgtttttcttgcaggtaccttcagtggttgattgaagagcaagattcttgtgatactcggttccatacattatatgcactttccctcgccaaatcaacgattgaaaccttagaggtagaaacaagttctcagaactctgatgctggaaggatagaggagacaacagtttttgatcccagaatgagctttatttttgaaactcctgttcgtgaaagactccaaacattcttacagtcttcggacttgtatgatccagaggagatccttgatttgattgaaggatcagagctttggtgggaaaaggttagtaataa

SEQ ID NO: 176564 - DNA, 561 bp, Cannabis indica
aatctaaatctgagtatctctctatatatatataggacacttctttatgtatatcatacattttgcttatttatagtattaaaaataaaaattaaaatagttaattatcaactttttagcatttttatgtgaattttttttatatatcataaataaggctaactctgaaggtaaatgagtcaggcatgtgtcttgagtttctaaatacttaaagtcttgaattttgaaaaaaaaaaatatattaatatttgatgtagtggtaaagagttttactttaaattaaaaagtatcaatttttaatctcttatttttttaaaaaaaatattaaatgtgtagctataaaaaattaaactttcaaattttgaagagttttttattttgtcccgtacacattaagaccggccctaaagaagggtgggttggatactgttaacttgggcaaatatttaatatgaacacagatgaattaattaatgattaaaggactcgtttggaatgttgtattaggtcgtattgtattgtattgtattatattgaattgattatatatcatatttttat

SEQ ID NO: 176565 - DNA, 618 bp, Cannabis indica
atatataaattaatatatatgaatcatggatgttattaaaaatcgaaagaacgacttgtttttatctttttttttgtttttttatcttttttgttttttttttatataattgtttttggtttttggtaaataatttttttgtacttgttattggcaccttaatgtgcttaatgtcataccgatatggtatctaataattagatagtaatttttttggtcttttgtattaattaacaatttttttatcttttgtgtgatttttttttattttttataaatgatctttgtaatatatttttttgtaaataatttggtgtactattattgttatgtgacattttagggtgttcaatatcatactgattcacatacacagtaattgattatcaattttctaaatcatttattaaattaaaatttgtaggaactgatattgaaatacactaatcacattcttttgtggtgcttggcaccttaacgtgccattcaatgttgtcattattaatatatacatatctttattaatttcgattatcattttctttttatttttctttccttgttatgaatgatcattgtattattatttttttattaaatgattttttgtactattat

SEQ ID NO: 176566 - DNA, 723 bp, Cannabis indica
attttgttaatgacaaattagacctatattttataaaatagtacatcctaaatttattttttcttatcaaaataaaacttaatacttgttaatccagaacttttttttggtggcgtggacatcaatgtttcatggcataaatgatgacgtcatggagttgagtagacccgagtcatcacagtcaacctaggaggggaccctagccttgcgcccaagttgatttcgagatctccgggatggaatctcggacttcaataacttgcagtggagttcttgttagattattttaccaggatcttaaatctactcacaagtatgttgaataacaacctaaatatgaacttctaaaacgaatataaataaacacatataaagtatgagaaaccttacattgagtgcagtggaataatatgtctcattccactcagatctctaacccttgattcctttctgttgcagagtataatcaagatctgagcccgaatgaccttctttgttgactctgaattctacacagccttcctcactatgattgaggtattacttgatgtgtgtgggcactactctatcacttagagaaatttcgaaacagagaagagagagagagagagagagagtggcggctcaagaattttctgtgaaaggaaatgaatgcaaatgtgtgtgtgtgttcctgaagcctttacttctatttatagtaataccacataggggttagggttg

SEQ ID NO: 176567 - DNA, 770 bp, Cannabis indica
gttctacaaataacacaatattgcgaataatatttttacaatggaaaactaaataaaattgataaaatattataaaaattaaccaaaactaatttataaatactaaaactaatatttatacaaaattaaggaaaaccaaataaaagtcactaaaataaagtaaaaatacttgagagcaaagctagtttaatggacaaaaagagccaaataactctattttcatagagttatcacaccccaaacttaaaactttgcttgtcctcaagcaaaaagaaaaataaacataaagcaagaggcaatatgacactaaaattggtgatctccacatttcccttgaaggttgattaatgaacatagcttagagaaaaaatataaagattgtccaatgattgtgaaaaattcaagaacaagtttcattctaattcttattactccaagtgtgtgtgggaaattccttttctcagaagtttgcttgtgatttagatcaatttatgtaaatatgaattaagcacaaaatctctaaaatgacaaagtctcataggtttattgttcatctgtctctccactaatgtagacaaacacaaaaccaaagatcaaaaggactttttcaagcttgtaatataaggcttaggtgaaggtagttaagagaagtcatttttggctcaaatcagctaaaagcaccttaattttcctaagactaaaatgagacctcacacttacttcctcttaatatcccacaaaaagtttgagtattaatattgccattattt

SEQ ID NO: 176568 - DNA, 738 bp, Cannabis indica
atatatataaacggctatttttaaactttatatccttctttttaaaaaaaatatatatacatatttttcgtctatatacattttactaggtcaaacgttcttggacatgcatgtgtagaaaaaagttattacattaattaatcttgattataataataacaatttcataaaaaaaatatatatatggttgaatatgtacaattctatatattaaatataacataactttattatgaaattgttattattataaaataatgtaattgatcgatatatgtgatcagaatatttatacgtatttctcaattttggtaatgattatcacgtaaataaagtttgaggaaatcaaacatataaattttggctaagacatgagtttatgagactagatttaatttacaatatatatatacatttaattaaaataattgaaaaaaatatgttacatcattagaaaaaggattacaatcttctttaaatatagtttttctatttttattatttttactaatattaagaattttgtggctaatttcctaaaagtgaagatcttttgtgtattttagatctgcaaatattaatactcataaattagcaaaaatatatttttttggtttgacataaattgtgtatttagttagatgatactcccttgtttactattgtataataattacttctttcgtttttacataatatataatctcaccatatgtagtacccaattaaccacataat

SEQ ID NO: 176569 - DNA, 505 bp, Cannabis indica
ataattagaaaataaaactaaaaatttgtaatactatcaggctaattttagcttaagtttcggagtaattttagtagcttaattttttttttttttaaaaaaaaaaaatgaaatatcaacttcattgaaatttagcattcatcatacataagagctagaagctcatcaggaaaatcaatcctatgaatgctacgatcagagaaaaatcgggatcgcctagcaacaaagtgggcaacgcgatttgctgatcgtcttacaaaacgaatactaacattatttaaagctgacaataaactcttacaatctctaataaccaaaccaaaagtagaggacataatttgattactaaagattgcttgcaccgttaccatactatcagtttccatgtcaactttattccatcctttgtccttcaaccaacttagagcttctttgatgccaagagcttcaaccacctcagctgggtagtttcctccctgatatgtggctcggagatcaacaatgt

SEQ ID NO: 176570 - DNA, 411 bp, Cannabis indica
ttaaggtttacggaaccgaaaccgtaacgttaaacgttaaaacttaactactactaactaaattagtcgaacctaaccgtaacgtttaacttttcggggtaagggggtaaaaggttttaagggtttaggtaattaaatttaacttaaaaactaaaaactaacttaaaatttagtagtactttcgttacgacgtcgtatatctactaacctttttctcgacccctatcagttcgcaagatctttaaccacttaccattgctagaaattcatgaaattttttcaaacatttcaaatttcttttgcttaaggtaaaatatgttggaaattattttaccaggatctagatttactaacaagtatgttggattaacaacctaatatgaattctaaaacaatgaaaataaacacata

SEQ ID NO: 176571 - DNA, 615 bp, Cannabis indica
cagaaataacttaaaatattttcataacaccttaaggcacctacatctttccaatgtattgaagaacgaaaaaatatctcttttacaatatatcaaagctctctaaacaattctttaacaaactcagatttaaaattaacatagtgaaactcaaatcgaatgaaaatatctctttccaatgtatttgttgttagttttttacccgaacaaaaatacccaaaatttaagaataaattaatagttaaaaaatttcaaagaaaaggtcaacaaagacctactggaatgtatttgaatttttgcctaggaggcttggccggtgccgcctttgtctcttctttatcaaaaacctgcaagtgtttcacggggatgataaaatataattattctttatccttgcgatgttccaaaatttaattaaaaagtgtaatcattatcatgggttgatcaaatgctttcaatctttatggtctgattgtcttactcaaccatatttaaaatcgatatttaattccaaattcaaatgtaaaatcgatatttaaggtataaacaacgggcatccaagtgcccattccgtagagttccacgttatgttttgtcaggtgttgcaaacgtatt

SEQ ID NO: 176572 - DNA, 541 bp, Cannabis indica
aaaaaaaaaaaaaaaactgactgattctttcttgacactatgtagtgaatatgggcactgaatcataaaattttgggccttattttgggatatgaaacagaatattgttgattactcactcactcactatattttgtttattgttgtctcacttttatgttatgtgtatgatcatgtacttacatactacagccgtaatagaagtaaaaaaagtagaatgaaaaagtgacaaaagaagtgattattagtaaagaaaattacaaagcatcatcatcatcatcatcattagagaagaagaagaagattattattatgaatatggaagaggagaaagtaagtggttcatcatcatctattgggattattaataatagtaattcaaaatcttgtatatgctctccaacaagccatgctggctcattcagatgtcatcttcaccgagctaatgtgtctaattcatgcaatataaacattattagtactcttaataatgataataatagtaagagttttgagtccaagaattatgtccgtaccaatg

SEQ ID NO: 176573 - DNA, 567 bp, Cannabis indica
gtattatatatcatgataacgatgaggggtagtgatggtaatttatccaacttcaagaattaatccagaggggagccacttcacatggtcccttattaagttctagctacctagctggccaaactcttattaataatgctatatgtaatagcctacaataatatatattgggaccaaaagataaatgtagtagctactgtgttttaggtcatggatctaataaaaatgaaaacgaaagggaaaaatgatttgtaaattgtcaacattattgaactgttaattttttatttatttgttgaattattaatgtctagctattatttttaacgatgtatgtacttgcgtttcatcactaacctactataattatttctccctttttttttttttttttagaaaatgacctactataattatttcacgcactacacattatagcgagctagctagagagattatcaattgaaagaaagacttcgatccccaatgttttctaaaccatgtaataattatttgaagcagccttattatcactatttgtttgcttagttatatatatatatatat

SEQ ID NO: 176574 - DNA, 513 bp, Cannabis indica
tttttttagtaatgttaactgagctaatgagatggattatgtattaaactttaagtttgtatatattaattttattttaaagattatcattatactaattttatttttagtttggtgctatatgttttattttatttttttattttgggtttttattttattttaacactttaaaatagtttttttttttttgcatttttaaggaattacacacagaaatctctacagtagctaacgcaacagtctaaattttaaccgaaatccgtataacaagccatataaaaattactgaaaaaactgtaaatttgaaaaaaaaaataatttatgtagtaattctctttttatttttccagattggctagctctggtgactactattaacaatatgaggtgtatttcaatgtgcgtgtgctgtatgaagatatagttttattgtctaaatttttgaaagtaattttgtcttatgtgattcgtgttaagaatttaaaaactcataatttgaaagtattattc

SEQ ID NO: 176575 - DNA, 542 bp, Cannabis indica
ggttttccttttactcccttttccttaaattgataatgttcttaattcgatttgatcaaccaagttgtttaattttttttcatcattcttgatattctgtttttcagattacttggcagtggcttccttttacaagttctgctcgaaaggataatttgcagctataccattgggtaatctttctcttgcttttgaagattgttacttaaaaatactatcctaaaattgtatatgcatttggtttttgttagaaagtctctcatttgttaatttttgaaaagataataaaatatataagatgcactagctactcctcttatagtcaattagttttgagataaaactcatgcatcttacgattctaacatggtatcaagaaacaaaaacaaaaaaacttctaaacgagtattcgatgcaaataaaacaaaaatgctgaataaaaaagagttgctgtgattgagctgtccaaaaattggtgaagcaaaaaaatagttagagagtctcacattactaaatgtagtggaaaaagataaatagaaata

SEQ ID NO: 176576 - DNA, 516 bp, Cannabis indica
ctattcttcattcacatcttcttctttagctttcccacatcacagtataaacccaatgatatcatagttgctccaattacactgttcattcaaaaaacaaataccattaataaacaaaaaaaaaaaaaatgcatattgattcatatattaaataaattataatatttttgttaccttccaagatgaagagaatccccaagaaaaatgaaagtcatggcagctgcaattgcaatagagaggggcttaaacattgccacgtagacaggtcccttcaagtgcaatgcccaagtatgcactgtattattcaagaacgatccaaaaactccctatccatatataaaataccattgttaataacacaacacgatcttaaaattatcaagttttatttgttaaaattttaaaaattaacatggatctttattttaatagttttttagcaaaatccgaaaaattattttatcacaaaaatattttagggtaatgtaagcagttactttatactgtttttattat

SEQ ID NO: 176577 - DNA, 672 bp, Cannabis indica
aggcaattgtttataacacatgagccaaaaaaatgtcttcggcggagcatatctggggcacggtgccatttattggttctagcattataaaatatgactcgcctcattgatcccttcttagggtctttcccaccaaacaaatagagatgacaaccactgagtacagcacaaccaaacccgagagcatcagaatattcctttgggactggtggaaggggctgccaaagctggtatatagggtcgaaggcatgccatgagatttttccatctcggtctcttttaatgatatatatccattcttctgcaaggccaaggtttttccgaagggagtaaaagaagttaccaaccataagacgataccatcttttgcagactaggcgaagtttacggtgctcggcccttgggacccgtattagacaagcaatggcaagatcatcgggaagtccaggaagcaaaggtgattggttcctactcctatcaccgcgcgccggcttacttcttgttggatgtatagatggtttaatatcaggctgaagacagagccttgacccaggaacatacctttttgctccagcaacagttttaagtccggcatctactctacataaacatgctgttgtatcaacctgcaagatacacgcatgtataaaaattaaacaacatcccctcaaa

SEQ ID NO: 176578 - DNA, 832 bp, Cannabis indica
ctctatttacactcttttcattggtgatgaaatgctttctttattgtgtaggctttttcaacccaactttggcgttcttgccagcacacttgtttgaggtattataagatttctttacgacttttaactcatttcagaatgataaataagaattattttttcttctatgctctcattaggtctacaaagcctatgattttcttagagaaagaaacgtagatgtattgtgataaaaatatgtgacttttcctttgcagttgatattttctgcccatctacagcatttatatagatcattgaaagctgtccagagtttacaacattgggtggtcaggctctggctctggctcaaataaaatctaccatgtcgaggacaggcatcgtgttctacaatctctcatccgacaaacattaccattttggcagctccacaatcttcgctaaaccttaatttatgtgacaaaaattataaatgctaaattagatgctggttcttatgtactttcttggggcaatatgatgtttgataaaatagtttccgaagcaaaaaaatagatcatgtaagaagacagttagctaaaatgctagtgattactacatttatggagtgtatataacttcattttattccaagaacagcaaacacaagagcccacaaccttgctcgagcagcccttggaacggacaaagagaaagtttggaaccgcttcagttccctcattgtttcagttctttgtttcctttgtctttgatcttcagttttacaaaaaaaaaaagacttttttattatcgtaacaaccaatctatatatatatatatatatatatatata

SEQ ID NO: 176579 - DNA, 526 bp, Cannabis indica
tcctctattcattactatattcaaatgagtttttggattaaaaagtttgaaactttgaacaagtgttttcatttgattgaatacctgttgatggccataagaaagtttttgtgaatgtaaattcataaaacataaaattttcatgaatctctttctatattaattttggtttgatctggttaaaatccaattcattttgatgtcgaacacgatgtttacagtggattaccttttggaagatcattcatggccaaatggattttattgaaaatctagagtcaaattttacatgtttattaagctaaaacatgtgatgaatcctattttgtattgatttcggcttaatcttggcttaatccatttattttgactttggaaaccttgtttcctgaccgggtccgcgcgactcaattgctgcaaatccaggtcaaatgacccattacagaggttgaagacaaagaaaacgacatatcgttttcatacatttccgaaaaacgacatgtcgtttgttgaggagcagtttttt

SEQ ID NO: 176580 - DNA, 741 bp, Cannabis indica
catctgtgtatgacctagcaacatgataggacccatccaaagtgtgcctgtgtgagcctatgtgtttaattttattatagatgcatataggttgttgttgctaaataaaatatcatagttcttgatagattttatttaggcccatttagtttttgggcctattcaattaataacagttgttcattttaaggttaaattcctctcttttgggccttgtgtgagagttgggagccatagaagtgggtacgacatactgaacccagcaccccctcacatgaaccaccccaattgtgaaggcccatttgcctgatttgaataactgtactaggttaattaaactagtttaacctaataaaattgattagcaacataattaatttcatttattttgaaattaatttaagaaaattatagtttaaagaattttttattctaagctaaactatatgtattttcttgtatttaattaaatatagaattataaccatctagattctttctgaagcttaatttaaatttttcattaaatattcctatttaagttgatatttagttatctacaactaaccaacttaaatctgaatatcttttggatttaaaatttcaaaattaagttgaggaattttaggcattggttattaagattctttagatattttttaagttaatatctttttttttcaaaatattaactttaaaaatggtaaatatttttctaaaattaaagtggttaactaactt

SEQ ID NO: 176581 - DNA, 1054 bp, Cannabis indica
cttcattctttttcttagaccaccatcacactaccatccaactaccaaagtcgggtctgactaaattaagataaacctaataaaaaaatacaacatcatactaattcagcataactaatttatcaaacccattttcaaccataaacagactttaacagaaaataatattaaaaaaaaaaaaacttctcatattgagaaccagccaatccattttctaaagtttagacatgcatctgtgtgtagatctgaagctactacattcgtcgaaaaccattgagaaccaatcacaggagcctcacaattctctcagcgctcatctagttgtcctctcagccgcactcgagacgcaaaccggtgcttcctgcaagaaaaacacaaagccaacaaagaaaaggagtagaagaagaagaggagattgtgttagaacctacccacacactaggcaccatgttgatgttgttccaccattggagccgagatgaagatattttgaaggagcacaacccatatcccaccgacatcatcccaaatctgacccacccttgcttagatgtcaatgtgaatggtattgagcacatcaattgccacgtagcaataataatataaaaaagcatatactattttttttatttttttttaaatttacgattttggtttctaaagtggttgcagcgctagttgtaataggagtttttatacgattttttgttgcaatttaggttgcagtactagttgcaataggggtttctaggtagaatttagtaaaaatgacaaaaaaaaaactgttttaaagtgtaaaaataaaaaattcctataaaaaattatttatacaaaaaaatataataccaaataggagtgggcatctgatccaattcaaccttttttctcatccgatccaatccaattaataattagatttgaaaaatcatcatcccatccaatccaattagtaattgaatttgaaaaataatcatccgatccaatccaattagacctcaaaatctaatccaattcagtccaattacttattggattggtatcggttttttaattt

SEQ ID NO: 176582 - DNA, 687 bp, Cannabis indica
tcttgagagagtggagagagaactcaaaaattcaatagagagagggagagagagcctttttttttatttattttacttaggattttagtgtttttagcataaagctctatcatattctatttataggctctctactggacttggattaagttaaataggctaagaaaaacataatgagttgtaaatcacaagcgttggccaaattccctataaggcccaaggacttgaatttttgttattttatttcattaaataaaataatcttattttttaaaaaaaaaaatacaatttatctaatcattttatttagatattaattttttatttaataattatattatctatttaatttaatatttattaaaatattcacttaggctgattgaaaataaataatttattttccatctttagtatatgttttaaataaatattataaaaattacttaatttaaattagtctaaaattatttaaaaattaatttttaacttaaattttatactctataaatatattaatatatttttaaaattctatgtatttagaaattaaatacattttttgaaaaaatatattaaataaaataattaaaataaattttctaaacacaaatataatttcttatttaagtaaatgtcacaaaaaataatccaatattgaagtatcttgattaaaaaaaaaataaa

SEQ ID NO: 176583 - DNA, 598 bp, Cannabis indica
ctaagtaaaaggtcagtttatcattgtgtacccttatttggtcaaacatataccatttttttaacattaacattaattaattaattaattaataatgttacgagtttgaaactgatcactatattagtttggaaagaagatgaagcatatagtatgattaatgcatataaatggaaatcgagagagactagatattttgattattaatattaattaattatatttgatattattaattaggtatatgttttgtgcactaaaacagggagctgttataagaacaggtgactgaaataaatattaaagttcctttagatattgttgtacacatttcttgattgccatctataattaattgatcttaattatagccagtttaattatttgaggttcttcaacactttattaacgaataaagtttattttttaattatccataattcggtgatatatatatatatatatagtgtctactttgtatttatgttgtagtaatttggacacatgatatcaaataattgtagtccatcataacatatatatttaaattataaatactgattatatccgtatcagtttcaattgtatatatttgatt

SEQ ID NO: 176584 - DNA, 750 bp, Cannabis indica
tatagtgactgcaaagctggtcctcacctcaacatgtcaaatataaatagtataataatttgtaatgctttattaccagctttgcagtcactatattcttcaagaaaagttcagtttgattatgatcgtaataagtactaaaccatgtttacacctcattttcatacataaattggtaagagtatcaaaatttgctttataaaaaatagggtggagaacatccaatccaattaaattgaattgatttaatgcaatccaattacaattaaattggaggttaaaagttagattctaattggattgaatcaattattagatgtcaatctcaaaatttaattgaaaaccgatctaatcttgttttaattattttaaacttttagttgcattacacttgtaacgattgtatatttatggagtattaaacttaaataaagggtgctatttagttgatatgtatttttttatatatttttaagttaatattaaaatttaggtgtaattagatatttaattaaattctgcataaggttcttctcccacttttctagcaagatcatgcattaaattctgcattttgcattttattaccttcccaaactcatctttctcagtttcttgaaagaaaaatcttttaagtaaatactcaaaactataataaccatttatgtcaagattctccaaatgatgtttctgcctcacataaccctgtgcgcccacaaatacacaagtgtgttcacctcaaattcataa

SEQ ID NO: 176585 - DNA, 540 bp, Cannabis indica
agatttgtcactttctaatattgggttggacaaaacgaaataattactcttaaaatgagtgtgcatgttgctagccattagttaagaacttaagagcataacatattaattggagaaatacgtgctttcaacggttttgattttggtttttttttatttttgtaattcttttatctatttttttttccaagactcaaaaatgacaaaaaaatattataaagctacggatttagagtttttttttttttaatgtttttgtggatgtaacatttttgttataaaaatacggaatggtgctttttatattattttttttaccaattttttttaacaaatacaaattgtatgttgtttgtatatttttacaaaaatacggaatggtgctttttatattttttgtacggtatttttatgttgttctatgtttgtattgggttgttttacattatttcaagaactcggtgaagatgttaaaaaaaaaaaagacatagttcataaaaatataaagaaaaagtgatcattttaagttttttttttttt

SEQ ID NO: 176586 - DNA, 685 bp, Cannabis indica
gcggttattataaaattactaaaccttcttcttgtgacaatactgtgattagaattctcaagtattaaatctagtggaagatttaatttcactcttatagatggctttttcataatatctggtaagtttttcttttgtttgtccagaacctgtttcagcaaatttgtgcttttttggaacagatggaacagaggttgcaaccgtatcatcactgacagcagctcctttgtgattttcagttggatcatcgatacacctataaatttctacctcagtagagaattcagaacaatccctagcatcatcaataccaacattaccggacttaattacagtttgggttcttatgctataaacacaatatgccctattattaatgaagtaaccaagaaaaataccatcaacactcttagcaactaacttagcattagactctttagctaacttaggtaagccatgaacaatacttgcatgagataattttttcaaagttttgaaattaatatgaccaagtttagcatgccacacattagtattgttattcacaacagattgacacataatttaagcaacatggtatagaaattgtcattagatctaaaaccttcaagaacattctcaccatttttgttcaaaacaaaataattgtctctatcaaagttaacagtgtaaccttgatcacata

SEQ ID NO: 176587 - DNA, 698 bp, Cannabis indica
agatatctattctttattagctgttgttggtagtggttcttgtagtgtcattccacaattagcgaatggtgttgtccatatactggtaacctctatcactagttttaggagattgtatttgaacagatatttgtccttgattttttagttcttctataagagtggatttttataaatgaaattcgtaatttttactaaaaaaaaaaaaaaaattgagtttttttagtttggcaactttatcgacaaatttatgaaaaaaaaaaaaaccaacttatcaaagggaaaaggacatgtgggatcgcaactcataacaagtaaaagataaaattaaaataaaatgatttgatggatgttttgctgttataaaaatacattaaaatttaatttttatggtgaaatagttcttatccaaaaggtgaatttatgaatatacgtattataaatattagagtaaacagtgacataagtacctaaagttttaggtttgtaagtggtataaatctaatgatttcttttagcggtataagtactcaatgtttataaaactgtttattttcttctagttttatcagtacagactctgttattgtcttaaatagggcacatagaagactcaaattctagattatttagtttggacggaaatatgtagtatcacttgcttttatatttttttaaaaaaaatttaaaacagagct

SEQ ID NO: 176588 - DNA, 595 bp, Cannabis indica
cttttttaaaatctatcatttttacctctttttttaaacattgtaccaattttgcccctgtcactttaagataatctccatgtgattctcttatgtaagggtattttgggtataatacatataaaaagaggtatgtttcaaataaatataaaattaaaggtaaattttattaattgatgaataaaagaggcatttttcaacttaccccatttttcattgggaaagttacaaaaatactagaatttgggtttacttttacaaaaatactgtcacacgaaaatcttttcaaaaatactgtatttttataaaacactagtaaaacacaaaacagaacaactcaaaacaacagtagaacaccagtaaaacaccagtagaacaccagtgaaaacttaacacagtatactgcagtatgaaacttataaaaaacacagtaaaaaagtaaaaaataccgcctggcagtatttttgtaaaaaaatagcaaaagttagtataccatgtaaatttccctttttcatctatatacgtgtttttaaaaatagcattacgcttaccaagatttaaataatgtacttaaccaattacatatattcaatat

SEQ ID NO: 176589 - DNA, 792 bp, Cannabis indica
aataatgacgtgtctttgtcaattaataattttacctcttaaactttaacaactatcaaatcgtacctctcataataaaaataagaaagatttaatatttttttagtaaatcttaaaaaaaattattttgaatgattaagaaattaaaattttaaaactaattatgggatatgaaaaattatttactttttattaaaaaattcatttagatattaaaaaaaatatattaaaaatttaatttgtaaaaatatattaaaaactaaattttacaggaacaaacttgaatatatttttttttatcaaaaaaaatatagtaaatataacattttttttgtttaatttataatttttttcaaaataattttatatttttattgaatttttaattatttttttatttgttaaggtatgagtttgtaaatataaataagtttaattttttctttaaaaaatcttagttcagttaaattatttattagattctcaataattttggtttgattttttaagatacgtgtggataaataaaataaagtttgaaaatatttttttaagtaaaattaatatttttttaattaatttaatatttgtatccaattttaataatttttattatttttttgaatttaatagaatattataatttttcaaatttaatttttttttaataaaaggggggtcaaaaattttatattggtcaaagttttagggagtaaaaatacttatttttaacggtaaaagaacgaaacctaacagaaaggacatgatcatgtaactgttatattttaggaa

SEQ ID NO: 176590 - DNA, 948 bp, Cannabis indica
atacgattttttgttgcgatttaggttacagcgctagttgcaatgtgagtttctatgtagaattccgtaaaaatagtaaaaaaaaaaaaactatttagaaatgtaaaaataaaaaaacccttatttatttattaaacaatattagataaaataattactgatgaaatattgttatgtattatataaattaaggacccaactatagtttcatgcacaatgcaacggtagctccggcagtatcatattacgactacatcattgtgggaggtggcaccgccgggtgtcctttggcggcgactctgtcccagcattacaatgtgttgttgcttgaacgaggtggatccccttatggcaactccaacatcaccaacctatctgcgtttggcgccgccctatctgacctctctcccacctcccccgcccaacgcttcatctccgaggatggcgtcatcaactcacgcgcccgtgtcttgggtggcggcagctgtctcaatgccggcttctacacacgcgccgcccctgattatgttaggtacccctatataacatacaattgtgaattgtcatcattaattaataaactcaaatgcttgtctaattccttagctaattatctttcaaattaataagagtaaaatcccacgtataatttttgttaatttttttataaaaatacacttaaacaaatatatgtatatatatatttatattacctccactttatttttattttgaaaatatttttaatttattttaaatattataatataaaaataataacgtatcatttatattaaaaattaagaagacagttataaataaaaataattcctaaattataattaattatatacattttctaaattttgtattaaaaatttatatctttacatacaatatatataattattacttcttaatctttttttatttatatttttttatagc

SEQ ID NO: 176591 - DNA, 706 bp, Cannabis indica
ttcattcctcccaaccaaacgccccgtgaaaggacttgtaatgtcatgtatttgcctcttattgaggatatcccaacccttgaattcgtactcttggggttctgctgtgttggcttcattaatgagttgtcttcatcataatcttcagaagaacaccaaaacaattaaagggttttccaccattaattcttactgtaagtactaaatatatataaatatatatatatatattttaattaatttttgtcttaaattattatttctaagcttattaaactcttttgtaatgaagaaatctaatttctatttataaataatactaaatatatagtaacttactaatttttaatataattactttaaaatatatgagaaggatattagaattattttatttatggaaattattttctaattaaggaaatgattttctatttaaggaaataaataaataattgattttctgttaaatgaatattttatattcattgaatctggacaaaatcaattatgtaatattctatatatggtcagatttctatattcattacctgatttgatttcctgaattaattgtcaaaatattctgacaattaatgtggcgcagatactgatggagtatctcacctataaatatagggtctcggtcccccgagctcctcactcattctgttcatacagcaaattccatctaaagagagttgag

SEQ ID NO: 176592 - DNA, 678 bp, Cannabis indica
cgcagccgtaagttattaccaagttgaggaaagactacaaaaacttgatttgaattaaaaaagatcttgtgaaaatgtgtatttttatcattctttcaactaccatattcttataattatcaaagaatagcatcaaattatatgaagatgaaagacgtgaaggtagcagttgttgcaagattagggaaacacaatgttaatgcataccagctagttgacaggtgggggtgggaaacacctctcccaagcaaatgcaatttactcgcactcattctcgactggtggcgggacgagagttgccgttgaaggaggtaaaaatccatatggagagggagacttttttggcaatcaattttgacatgtaacaaattatagtaattgagaaatacttttttgtttttatcaattaactaaaaatagttgtagttctcaaaaaaaaaaaaaaaaaaaaaaaactaaaaaaaagttctatattaaaatcaatttaaatctaccctttattatgcaatatactcttatatatactaccttaattaattgactcttaaatataaataaccccaattgtaccatagcagccatggaatcttacctcctctatggtcattgacttaaaatatcttataacaataaggataaaattggtaagagtagttgaaaaaaaaaatgaaaaaatat

SEQ ID NO: 176593 - DNA, 856 bp, Cannabis indica
ctttttattattatcaattctcagcaccatattcactcaacaaatgccaaaagctaacaaattttgtacctgtgttgatcattgaattcaatcctctgaacttgttttagctctggtgaaaaaaatctacaaaaacacaaaaatatcaaattctttttcatcaaacaaataaacaaaaagagaacaatgagataaaaccactgcgatgaaaagagagatgatgccgatgccgttgccgttggtatgggagtaaccattagaggaaagaaatccaagcaaaaggaagcgccttgaacaatcaacagaagcaaacgaggccggtgcctgtggaggtcctttctggcgatctcgcgacggagtatggtggtcggagaaatggaagagtaggattgggcgagaagaatgaatgagagacgaaaagcggtggtggcgataagtcggagccggagccggagtccgggagaggaaaggaagaagaatgcggtgggtggctttcctctgcatagtagcaaatgctatgattgtatagtattattccatttgggttcttctgtgtgtgaatttggggattagggtttggagattatgaagaagaagaaaaagaagaaagaagaagaagaaggcattaaccattaaaacaaacaaacactcttttttgagtcttgcattgccactgcaaaaggaagaagctctaatgagaatgggccctctttttacttaattgggcccactaattttctgttaagcccatttattgaagggtccaattatccatcattttctcaaattacaatttcacccctaccaaaatagaccaaaagttaatgaggaaattacactctataccctttttata

SEQ ID NO: 176594 - DNA, 720 bp, Cannabis indica
aatagttataatagcttgaaaagatgtctaaccaaattgatgaagaaaatatatatatctattctatataaatgtttaaccaaattgatgaagaaaatatatatctattctatataaaatgtggctatgtaacataattcttagtttaacagtgttttttagtatatatatcttggcataagtaccaaatgtttgtaaaactataatttttttctaattttgtcggtacagactctgttattgtcttaaacagaactcatataaagtctaaattctatatcattgagtctagataaaaatatgtaatatcagttacttctaaatattttttttaataaatttaaaatagagtctgtactgaagaaattggaaaaaaattacagttttacaaatatggggtatttatgccgctaaaaataaattttgggtttatgcggcttacaaacttaaaacattggtacttataccactatttaccttaaatttaattaaaaaaaaaaaattaatgaaagtgaaaaactcaaaaaagagaaaaagaaaaaatttaaggtaaatattgggtttgacttggaatgtggaaaactcataaaagagaaaaagaaaaaataagcactctatttatcttaggacaaaaaacaaaaaaataaaaaataaaaagttaaccctctctacttcacatgcaactcacatcacatgcaaggatcaccatttatcaactaa

SEQ ID NO: 176595 - DNA, 698 bp, Cannabis indica
gcaacgaattcatatagttactagtaccaactacaaaaacacacctcactgtgctctggcaacaggttcaagagcttcaacagtgaccacactatttcccctaataacctgtaatggtaaatgttatatcagtcccgtaaggtcaagtttattatcaccccaaaaaaaaaagctataaaatgacaacagaaaaggcataaaaggaagaaattagggactcaccaccatgcctatatcattgttctcatttccatttacttccacagtgttgtcaacaactagattcatgaactgatcgaacccccgaagagtcccaacaaccatgcgattggcattcaacttgactgcagtaaacgcatcatgattcagtgttaacgattttggccattttaagagctagaaactttgtttaaatgtttatgtcataaacgatatttatgcaaatgagatgcgaactagttctattctctcttctttaagatacattaaccaaaaaaaccaaagaaagctatgtggtacccattcgcgacgatcaaatatatagccgttaacaatatgtttggtggggtggaaggagaatagagaggatgaatagttaagagaagatggaaaaatataaaggagggagaggaaagtagtaattcctctacattgtagagagatagagaaatggaatacccttattttcaaaaaaaaaa

SEQ ID NO: 176596 - DNA, 609 bp, Cannabis indica
atatatagataacaggttcattgttaaacaaaataataaaaaaagtctcaaatttgtgtactttcattttaattttctgtccctttattaggggtgaacaaaatatgagtcaaaccattcaatccggccaactcaacccattttttttgtagtaaagggttatgttaagagtaggccatggcttattgggttgaaaagtgataggctatataattatgggttttttatgggttgaacacattttaactttatataatccaaaccaacccatttcttgaaagatgttccaaatttgagacttctttcatacataaaatatactttacattcacaaaatatatacaaatatatattttacgttttcatacataaatgaattatattgtgataactttaaaatgtgaattaatcaaaacacatcactaacatgtagtgtatatagttaccctactacttctaccaacaagtctaatgtgagaatcaatcagtattattaactttgctactcacacaatgatacccctactaccttaattttttttaaagcactatattacacacacacacatatatatgtatcattttttttttatgttatacactaggttg

SEQ ID NO: 176597 - DNA, 617 bp, Cannabis indica
cattgtaggttaccgtagtcacacaaaacataataagttgcacccaatgactactaaaacccatatgaagcatcatcctttcaataaaagaccattccacacgatcatatgccttactcatatccagtttgatagccataaaaccttctttaccagctctcttcctcttcaaataatgcatgatctcaaaagctaccatgatattatcagagataagacgccccggaagaaaagcactttgattatcagatattacattcggcaatacatctttaaatctattagccaacacctttgaaataatcttgtagagcacattacataatgaaattggtcgaagatcagacatagattcaggatgtttctttttcgggataagcacaatgtttgtatagttcaactctctaggaaacgaaccaacaacaaaaaaattctgaacaagagagataatgtcgttacctacagtgttccaacatttttggtaaaatcccggtgtcatgccatcaggtcccggagatttatccgggtgcatttgaaagagcgcacgacgaatttccacatccgtaaccggctccagcagtttttgattctgaacagccgtgactgaggctgaaaaa

SEQ ID NO: 176598 - DNA, 568 bp, Cannabis indica
aaagatgaaaatcccttggttcttcaactggctactatggctcgaagggtagggggagagaaagaatgatatgttatgttttttttccttagtttttttttttttttgtccttttcttcaaattaaccttaattatttatcactaacataaatctaatgactaacccaatattcagctagaaactactaagtaaccaaataaaacaaaatatttaaggcgtaataaaagactatttttcccttccatttatagtaaagttaaaataaagcctatggatattttggtcactttctaagtttcccaatttaacctacttcttaaaaatcatacctagtacggtataaatccaattcaactcatctcttattatcgtaacatttgtaactacttcgtcgagtctccacggccgccgaatccaaatataatttattttaaaaatggtatcaacgatacccacatagttagataaaatctctttaattaatgaattatgctttatttattcatttgctcgtaattatcttaagtaagattataatcttactctaatatccatataattacata

SEQ ID NO: 176599 - DNA, 1015 bp, Cannabis indica
tataattatatatatatttaatgatgattagaatgagataatgaatgaatgagaattaaacctgtgggacatagagataatatttggagcctttgagataagtttccttgacatatgttcttctccatttttttggagttggtgcatttgaataagctttttcagaatagcataagacatttgaactgatccacctccaagatcaaccactccaactgtttctccatattcttttcccaaatttccaagtaagtagtttattgctacctataaaaataatgaaattcattttgcttaaattaatgttgaactataggcttaatcaaacattaaaacatatatgattttttgtagagcaaaatatgatttttattatatgctctttattttatttagaatttaactaaggggcgaatttcaataatcaacataaaaaaactactattttaatattaattttttttttgttatatattacacgaaaaggtatattctttattagtttttatataaaaataaaaataatacatatatatttatattgaaaaaatataattatacgtaactaatatttaattattaaaaacttaaaaaaataataattttagtgtggtctaaaggatacagtgtccccataataatagtgagatattgtagacaatcctatatataggataacttttagtgtttggttggattaattttagtgagaattaaacaacactaactttgaatttttagtgtcccgttgtagatgacttaacaatatttttttttaaaacaaaaaaataagaaaaagttacgggttgtttgacttcataacttaaaaattatttttagtttttaaaaacaaaaattaacttttaaaaattaatagggtcgtttggctaaatttttaaaaacagttttaaaaaactaaaaaaaaaaagacatcaaaatgtagtttttcattttcaaaaaatatttttttttgttctaacatattatattttatatttttgctcacatacccaaa

SEQ ID NO: 176600 - DNA, 579 bp, Cannabis indica
aacaagaagagaccaatagaaagttgacacgtgaagcatcgtacgaagaagaagatctttgtcaaaacgtggctaattataactggtcagtcatacgaatttctgacacagacaggtaaacgaacccatcttaccgttaaagaaagggagatagaagagagcacaatagaactggtgtggataggaaaatggcggcacagtcttgctcaattcccctcctctcatctcctaccttacccaaatttagcccttattcttcagaagcttcaactagggtttcgattccttccagaaagttcttatcatcgtcatggagattgaatgcgacgggtttttctgaaattgaacctgatctcaacgaagatccagtcgatcgttgggccaccaacagtgtcagcgcggtaatagatatagatatccgattcattatcgctcaaatttgatatttatttggctgtgaaattggttttgatttttggttgagttgaattattcaggaagattttgtgtatggggtttacgatgggcaccatactttccatgaaggcgaggacaacaaaggtattagttaagctattt

SEQ ID NO: 176601 - DNA, 624 bp, Cannabis indica
acttaaataagtttaccctaataaacatcccaaaattatttccctaaaaaatttaaataccaatttttttttttttacaaaaacaaaaaaaaaatacatggtatatataaatattttgagtatgtattacatcaatataaaattcatttggccagaaaaagaatgtgagtgttcactcaaaagaaaaaaaaaagaaatgtgagtgttgtttagtttctaatgtgctcaagactcgaccattattaatgattaagagttcgtttggtacgccgtattacaccgaattttattgtatagtattatattgaattatattttatgcaatatttttatgtaaaactatatgtgatgttaacttttatgggcacctaaatatataatattttagtataaattaaaatttaacatagtattatataaaaatatgatatgtaatccaatttaatataatacaatacgacctatacggcgttccaaacgagccctatataacaatgtatctattctatataaagtgtgcctatataactgaattcttggtttatgagaaattcatgggtaactttttttttaaaataattttttattctaaaaataataattttaagatgtatttatattatc

SEQ ID NO: 176602 - DNA, 757 bp, Cannabis indica
atatgtgtttaatttatcgttttagaaagttcttatttaggatgttaataaacatacttgtgagtagatctaagatcctggtaaaataatttccaacagtatcattgaccactctatccgaacaaactacttcgagcaggaaaataattaactacccataaagggctccacgcaacttgaacataatgttttgtttttaaagtattttttttataatttatattatttaataataataaaaaaaaaaacaaaaatctctcaaaaataaatttataatcgtaacatatttaaaaaaatttcttaaatatcttcaaactaagaaaaaaatacatatatactaaattaatttaaaaattaaattcacattgatttattgtttaatttaatttaaaaaactaataaatatctattgaacaaaacattaataaaaataataaaattataaaattttatttttatttattttaaccataaaaagtaaattatatatacaaaaagtactacacaatgtaaagaaaatatgtttcaaaattttaaaaataagtgatattatacaatgaaaaatatacaaattaaaattagacttatgaaacaaattacataacaaacttatacaattatctgttttatattttgaactttgaaatttgatggacaaatcctaaagggttgtcccatctgtgctcgcaaatgaaagtgcacgagtggagttggctgaagcgattgccgtgaggctctatatgatgatgccatcgag

SEQ ID NO: 176603 - DNA, 1204 bp, Cannabis indica
aaatgaactttaaaggattaagaatcttacccagcaaaaaccacattaagaagaaaagctctcgtagttaagtaacgaagaacattctcaaatttcgaaacgaacccattagagccagaaccagaaccaggtcgatattcgctaccataattgtgttgaccatagccataaccatacccataagaattaccagtaccaccaccagaattatgataccgatatcggaaattatagtcggcgcgcttccgatcgtcgctgaggatctgataagcttcagagacctgtttgaatctgagagtagcggtgtccttgacagatttggaagatccagaatgcttgtcggggtgaaatttaacggctaatcgtcggaaagcatccttgatttcgtccttggtggcgttcttggtcagacccagtacctcgtagtggtccatttgtgtgaaactctcattacgaattttcctgagaaaatggaaaaggagaaattgggtttgtatggggaaggagagaggaattggaaagttaaaggctttggtgaatccatggcggggagaagtgtattggtggcgggaggaaatggcgtcttcgtggcgcttccatagccggcaatggattctttccttccttctaattctaataatttattttatttattatttttttttcttactaaataatttaggtaatttttttttagcattgttagtaagagtattgtaattaggcactatggtcttgcaaatggggatgcacatgccacacgaggcaaataattgtcgaggagtgtttgttctattctcatttttgtttagaattttaatattcgttcttgcttattctttattaggggtgaggcgggaaatttcctaatgaagatggggacgggaattcccttaggaatggggtctcacgagaactcacccttaatgaggcggaaattcctcaaagttggcattaggaattctttaaatatcatattgttgttggtccaattaaagtgtcataatgtgtgcctcacgatggtcatgatggtgctaaacacgcttgtgtttacaaatagttgtgataatataattagtgtaatttaatattagaatctaattttaatgtagtaagtaatataggaaaattgataactactcatgaaatatctaataacaatatttactgggattggaatcaaaataattcatgaaagaataaa

SEQ ID NO: 176604 - DNA, 675 bp, Cannabis indica
ggtattctccatatgatctctgagcctcccaggtgtagcaacaagaatctgcaaataataaatatgtaatgtgcaccattaattctgcttgaaacaaacattgccattgttattttagtggcttcacagataattaaaattcaacccaaacacatccattgttaagttgacaaacaatttacaatttgaggtgaaagtaagaaatgaaacagctggaacgtgacttcgcaaaccaaaagtttcgtaacagcacacaatgcattactcacaccctttgatgtttcatagtgaaaaaaaaaaacataaactttgaactagtgttttgctgtgaagataggacaaacctgacaagggtttgcttgcatgcgcttctgttccagagcaagtcttgtacctcctattacaacttgtacaccaatagaaggatgatacttcaacaatgtattggcttctgcagcagcttgacatgccagctctctggtggggcatattacaagcacaaaaattggggggatcttttggtcacggccaatggagttgactttacaacaacttcaatcgatggaagctgagagagtaagcagagaaagagaaaataagatacttcatgatagtgaactgataacttggatatcccaaaaaaaaaaatcaaaaaacatagagaagacaaatacc

SEQ ID NO: 176605 - DNA, 732 bp, Cannabis indica
tgtaaaaatataaaaaaaaaaatatatattttaaaatgtgaaaattaaaaaaacaaaaaaaaaacaaatgtgtgttttctagaagaagccaaagccaaaataatatattaaaatattcttttatcaatctcatttgtgtctttttctgcattacgctactgtagaattatgcttagtgaaacagtgaaaaaaaagcatttccgatcaacacagcagtactttataataactaaattcatataaaactccgacaaaatcttaaaaagctcatctttaacatatatatatacctatcttttcaaaggctaattaacattaacacatgaataataacacacaacacgaactattactatagattaatattattattattattatttacttcatacaacttaagcttatattatattataatatagaagttactattataacttacaagaacatcatagaacaaacaaacacccatatatattccttaataaaacataaactaattaataacaagacacagagagtacatatagttatatatacgacgcaaactataatttaactaaatcccatgatctgtttttgctgtcgttttttaataattgttcctacaatctcaaacaattgcgatagggcccacattggcggtggtttccatggccttcatggcttcaaaccttggctcttagcttggaatttcagcccagcgtatagcttcatgtagtcctcaaacac

SEQ ID NO: 176606 - DNA, 679 bp, Cannabis indica
gtatgaagccttttgagaaagtaccaaaaataaaccacataagcgcttagactcaaagcggacactattattatgttaatgtaaaagttaaagtgaggtaacaggccaataagatcgaagaacagaacccaacgaaatgtgggttttcaccaaagtgactaagagaattccattattaaaacatttagcatgctatatgaaaggtggtaatgaagttacaattaacattggcagataacctctaaaagaaaaaaagaaaaagaaaacattgaaagaactcttcgcaaagttacacttgaagcaaaaaagaaagagaagaatgagaaaatgaaagtgaatttgtggaattaatactgatcaaccttcaaatggttggcttgacactttatttatattgaaatagctgaataagtcagaaaaaatatctttatgttatgatcgcatgattagacatggaaataaacaaatattagtagattattttaaaatatttgtattattacgaaaataagtcatattgtcacaaatagctatttgtgatataaattctcaattataaagattttattaaattctaattgtgctatatatgtaatatgtgaaatttgatattttcattgtttagtgttcgtacaatagtgaaaattcgacggattggctaatagtgtcacaatagtat

SEQ ID NO: 176607 - DNA, 800 bp, Cannabis indica
tttagtacatgtcaaagttctgagtgtaaaaatcttaattagccagtaatttactttgaataacattactagtatgcataaatcaaactaaattagcttagtgatgattggctcctttcatttttgggttagtaaatatttttccctttatacaaaacatttgaatatttgcacaatgtctttccaaaggcacttttaatagaaatttgtcattatatttttaaacttttattgcaatttttcttttgttccccttcccatgcagtaagtttttgtatatttccatttaatattaattatattctaagttaacatattatagtgattcatttagcactagaaaaatatagttgaaaataatttattttattttttggatcacaaattgccaaattcaataaatttaaaagagaaacaataatcatttcaaatgttcaactctaaaaaaaatcatttcaaattaaataatgtagtacacgttatgggtttatgaaatcaattttttgggatatccacctaagccatgtgatagaaataaattgaattcaatgtatctaccaaaaaagaaaaaaaagaaatcattttcatgagctcctttattgatcttgatggttaagttgtttatctatctatttgatttaatagctttaacaatataaagaaaattatttccaaacaattacttttaaagctcaattattagttaaaaatcatcattaaacataacaaatctacacaacaataaaattacaaaaaaatctatgtccaaatagctttaatctacaacatgtagcaattat

SEQ ID NO: 176608 - DNA, 1267 bp, Cannabis indica
caaaataaatagatgaatacaggtgaattagcacactaaacaatgataatgttgtgaattttgtattatatttaatgttgcatttataaccacaaattctcatatttaaaatataaataaaaagtgtacattaaaaaaaaattacaccccacttaattaaatcttgggttcaatcaccactacatataatttaaaataatagtttgtatgaaatattgttaccaattacaagacgtcatctctaagtagtgttaggcgccactaatatctcatagcgatatttaatatcaaatcatgtcctcccaaacttttcagactgttaaattttttttctaaactactgagattgttagattcaaggacttctattcaagtctgttcaattttactaacgtgccaataatacatgcattaaatcatgcccttagaactttgatatgtatcaaatcttgtcactcgtaagttttgacatgtactgaattgtgtcaattgaacttttatccacgtcaggtattcgttagtaaaattggaaggaagtcattgaatctaacaatactaaatagttcagggagaatttttaatgacttaaaaagttcaggagtcgtgatttagtaaatgtcaaaatttaggagataaaaaatcctaattagccattatgtttttggcaaactttctgattgagcaaatttacttggattattattcacaaaattttctcacttgtaatctaggtgtactcttttcaaaagcaataatgaagagattttatttagtttttccaatttcgggttaatggtttagaagagaatgaaattttttgtaagtaattaattatcacttgtttttttaacaataaattcatttggggtgtttgttttgagttttggattgaaactcaagtgtacaaatgagttgatattatccattaaaaagcatgtaacttccacaaaataacaaaacttttccaccttaagaactatgtcatacataaaaaggattcaacattctcattcccaaatgcacaaaccactaacggcaaagtgggtaatgaaatccttttaaaaaatgaataaatattcttcattcttaaaaaaataaaaaactaaataaacaacaaattagcgaactaacataagaagaatacttcctaacatgatttattatttttgcctcaataaactaacatttaatttttattatttttgttcatataaaaattaggggaattatcccatatactattttttttaaactttttttctttttc

SEQ ID NO: 176609 - DNA, 778 bp, Cannabis indica
aaataacatctcattctctctcaccatctcttaccgcctccttgtctctctttgaaaatctctcaagctctcaatgtaaaatgaagatggtctgaatcaacagattcgacggccatgagcggccgtttcttgatgccggtgaatcatacagaggccacgaacgacctctccgccacttgaatcccatcctccattccccgtagctaagttggttcctacctgaccttttataaagtttttaactaaaattcatgttttggttgaaattcattcttggaagagcttaatgacacaagttagatagtcatcaatactcattgatggaataacaatttggtgtagtcttcctcatgtgtatgaaaattataatcaagttggctcccaaaagccaaattacttatttcaaatatgcatgtaaaagttcttcaattgggttattgagattttctaataaaattttacaggctgattgatcaagcttttgcagaaagttgatgtatgcagcacatctgatgaaaaggcagtatatgctttattgggtcttaaagtttatatttttcgttgcaagttatatgcttccacttgagatttaatttttactagagccaaatcttataaagggaataagtactactatgatctaaactgccagtttttttagcttttaatcacactattatagtagatattatttacaagtatttcatattagtttgtataatttagcacattctgttcttgtttttttttttcttgtttattaacagatctatgtttc

SEQ ID NO: 176610 - DNA, 775 bp, Cannabis indica
atcaaattctacttctgcttttataactttgatatggattataaaaactaacacattatcgacaaggtgtcgattaattgttgacatattatcgacaatatagcttaaattaaatttaagcatcatttctcgacagtatatcgatattatgtcaataatatttgaaaatatatattacgtaaatattatagatgatttgtcgatatgttgttgatgattaataaaattttccatttctcatcgtaattgttgtttgtcgacatattattgataggatgtcgatagtatgtcgacaatattataagaaagtggctgaaacaagtgaaaacttttaaacataaataaaaatgcaacaatcaggataacaatcatgaactttaaaagtaacccctaaacgttaaatttaaaagtctcaatagtttaggcgattcatgcaatatatgcataaccacccagccatgaccggtttgcctttaactaaatttattttgcaacgacgacaccattcggggaaccctggtagtggataaaagagatcaccatgtatttgaatgcgttcgaacctcctctcgttcgccaccctttcactttcaaatagttccatacattctcttttttgtctttgctaaaagcgatgatattcttagccatgtttcgctcttaattgtctgacttgacattcaacattaacagaacacgagggggatgtttgtcctcgttagcacataagttgcacagccagtcttgtcgaatatcgctcctaggcctagccaga

SEQ ID NO: 176611 - DNA, 654 bp, Cannabis indica
atttagtgcggatcagatgcagtatgagcaaaatagtgtagattggatgagcatccttacgacatgctacgaaattggttagataaaaatctgtacttgtgcagatttggattggattgaaaaatttaaaatttgcatttgtgcggattggatgttaattgatatgtaaaagtaaccaattctatctaattcacatatatttagataatttttttttaagaaaattatatatacaattaatattttaatgtaaaaaaaattgtcatttaaaattctaatacatatataaatatatttcaaaacttaaaaaatcaaatatattttccattcttaatttcttatatatatatattttctttctttgaatttgttattttttattttatttatattaatttgttgttgaagacattttgaacttaagaggtagttcgaggacgttgatctcgggagtaaagggtgacttgcgtgcttggtctagctcgagatcaatgagtttttggccggccaggccttggaacatatttttttagttcatccaattgtgtttgtcacagatggatgaacggtttagcctcttggtgacttgtgtcatgtcatgatctcttagggctgggtcctagatgtggagacctagttgagtggccggttgaa

SEQ ID NO: 176612 - DNA, 846 bp, Cannabis indica
aattgatggaggaactaatgacatttaaatctatgtatttatataaagaagagatatatgaagtggttttgtgtggcactttaaaatctcttgtattatttgttctctttaattattttatttttttaattttttattaccttcataagtattaattgatataaaatatatatttttatttatttttccataattttctcatttttttaatttttttttttggtttttttggctttttttccatcaagttttatttatttttgaaattaagagtcgtgtattttttttttaattaagatatttaaaaataatatatttttttcaaaaaaatgataactctaaaatttttggctaaaaaaatatttacataagagaaatgctaaagggcaccagtggtgtctagcaccctcctatgtgtcaatatcgttattagtctaactaagtatcgggtcccatataatttaatataataacttttagaagtatcgctagccaatcgcaacgcgacatgccgagaaagtgttaaacaccattagtgcctaatagcaatgctctttacataaatatagaaaaaataaaattactagtttacataaacatggtaaggaaacttaataggaaaaaatatgatatttaaagtaaaaacttaacatatataggatatgacactttcaattactataagaaaatattaaaattcctttctaaattttttttttaaaaaaaattaaaactaagtgatactacaatgatcgtcggagttgtcactggggtcataagtcactggaatttgctgccggtgctggaaaagtcgctggagtagttgcagtgtcgaaaaaagtcatt

SEQ ID NO: 176613 - DNA, 761 bp, Cannabis indica
aagaaggggaaggagaaggagaaggagtcctcgacccgcaacggatagaggaggatttattcaatcacatagtttgggctcctagaatatggcgcccttggggttttcgatacaatcaaatagaaagccccaacgaattgggatttccctattgggccaggtcatttcggggcaagcggatcatttatgatgaagaggatgggcttcaacagaatgattcggagttcttgcagagtggaaccatgcagtaccagacacgagatagatcttccaaagaacaaggcttttttcgaataagccaattcatttgggaccctgcagatccactctttttcctattcaaagatcagccctttgtctctgtgttttcacatcgagaattctttgcagatgaagagatgtcaaaggggcttcttacttcccaaacagatcttcctacatctatatataaacgctggtttatcaagaatacgcaagaaaagtacttcgaattgttgatttatcgccagagatggcttagaaccaatagttcattatctaatggatttttccgttctaatactccatctgagagttatcagtatttatcaaagctgttcctatctaacggaacgctattggatcaaatgacaaagacattgttgagaaaaagatggcttttcccggatgaaatggtgttgctatctgctacaatacgaatcatggtttaaactgaataaactaaataaaaataagataagacatttctcttcgtctcaggt

SEQ ID NO: 176614 - DNA, 539 bp, Cannabis indica
gcatttatggtgatgtaaattttatgtcataacaaatattgtgccatatttgtatcatattttggcatactattggagtcacattttttcctaagtgagctatattttggctttgtatcacttagttgcatctccattggagatgctcttaggtatactaatagcaggtgcaacataccttgtcattgtctctccttctaggaagtatggaccattatttaacttcccttgcatttaggatatgtgaaccttgtttaacaatcatcgtaccatcatcaatacttattgagtatccaagtttgttgaacatactaaaagataacagatttcttttaagtttaggtacaaatctaacctagtgtagagttctaaatttgtcacgatgagatttgattatgacaatcctgattcccttgatttccttgtcttttgttctttcctgtataatattgttctattatgttcctctaagaatgagcccaactagtttcttatttggtgtcatatggaatgagcaacctgagtccataatctaccct

SEQ ID NO: 176615 - DNA, 528 bp, Cannabis indica
tttccaatggtttacaaattacaatcgatacatatgtccatataattttaaccctaattacgttacgtgttaaaaaatccgaactaataattatatatttttgtttcaagaattaataactcttttaaaatagtaattggtttaaaataataataataataataataataatttggacaaaacaaaaaaaaaaagaactaggcgggaaaaacgccaaaacatctggaaaaacgaatgggacagaatcatagggtggtaataatacttaaaagaaaaaatagaaaaaaaaagaaatatgtttttcttaacccagatttcgaatcggtcgcagtcacacatatctacatgtttacatttactatctcataaattatagtactacagtttaatatgtgcattaaaaagatagtcttaacaactgtaataaaataatatatatttaaatagagaagaaggaatgcgaattttaatattgaattatttatatttatctttttaattgtttggtctggtcttgtccgaaaagta

SEQ ID NO: 176616 - DNA, 638 bp, Cannabis indica
cttttagtgacactccataatatttagtgacccacattgcaagagactaacacagaatatttagagtctatttgtgtttgtcactaaaaatactcctaactctttagtgacacacactttttatgtgggtcactaaatagtgtcactaaaagtctaatttgtagtagtgaatttttatcaagagtcaatttccaccattaggtcatcatcaatggccaagatcaatccaaaatgatcttttcatattttttgtattattttattaatataataagacatccttccctataaaaggagagctcatctagtttatttttttatacattcttttagagcatctgtctctagaaatctgaactcttgccttagccagttttcttttaattctcgtaaaaactcaaagtagacataaatctattaccatcacgacacggggagtcaattactataaattgcttgtgtctctccacttatttacttcaacttagatttcttctcgccaatctagtgagcaagtactggccaaatttccgcatcaacacaaagaattattataaaaaaaaaataattaaaaagattaatttctattatgatatctgatcaatttgaaaaaaaaaaagaatctagaaaaaaaaata

SEQ ID NO: 176617 - DNA, 560 bp, Cannabis indica
caaaagctagcataaatactttactaagataactagcttccttcctccatgaaaagagcaaacaatacagcaagaagaagtatctctaatgttatccacaaccagcaaagtttcccacaacaaaacccaccaaccatagcacaacccaacaaacaagtacatacatcatacatatatatacatatatagaaacaaatattgggaaaggaaaaagacattagatagattaagacccacaaagataaagacaatgcatactcaaacagcttcactttgaagtggagtagtgataaaaaaaattaataaataaataacaattgaagaagaagaagaatacctgattggttctctttctaattgggtgattaaacttgcaattggatccaaacttacacgttccagtcttgaggtaaaaggagcaatcttcagcttcaggcctcactgggtactgatactttcgaataccaccaccataaccgttcttcttctccatctcaccgacaccattatttactttcacttccattctcagtctcatttccactcttattctctcctaa

SEQ ID NO: 176618 - DNA, 745 bp, Cannabis indica
atggaatgctgcactaagcaacttcaagccaaacaatgtattaccaagatccaaagacttctcatgatcatcttaaagatatataataatatgtatcaaagcacatattttatgactgtgggagttattaaagtaaaatactccacgtatgtttttttggaatgatgtcaattctaaaactttatgaaaatcatatataaatttgttatttagtagtatagtttacttttcaatgactttaatatgcattttatagagaagattatgcgtaggtcaaggtttttgatactgctgaaaagtgagaatactcattaacaattttgtatggatatataattttatttacactttaaaaatttatacatatatttcattttaataatttttaatttacaaaaaatatatcttaaattatattagtttttatatgggtgcaatttttttggggggaaaatctttaatctaaaatcataattcataaataacaaaatgaaaaaaatgaaaattataaaaatacaatatttaaactagtataagggagtgtgtgttgcacgtgctctatacaatatgttaagtgcaagttagtagaaacaaccattgatatacaataaccacttgttgtgtggtgtagtggtaagaattgcttttattgacatccttctttatttaggtcagagttcgaaacctattccagcactattgatgatccaattaaagtaagctgagatataaaaattcttatagc

SEQ ID NO: 176619 - DNA, 596 bp, Cannabis indica
ttttgtaaagttatttgggttgtgtttttttgtctgtttattcggtttgtaatctttttggaacagccttacataccacactcatatctttttttgtttttttttttccatctttttttgattccagtgaaattaaagaaaaagtataatatgacaatgttaagcttatcatttaatgtgatttgattctcatatatgattcttgagatttctcatatttgtgagatatatttatgattatcacggtctggtgttaaattggtaagaattttttgtttttgtttgagcctaagaagaaaaatgattactctcaatgtgtatggtgttgccatgatcatttttttgttaaaaattaatgacagttaccaaagacatttgtttgtttgaacgagctattctaaccaaaatatctctctgctattaaaaaaaaaatatatgtctcgcaagcacatcgtgtgcaatcgagtggagccatcaaatccttcctccacaccctttcttcgttccccaagtcacgctgacttgctgagggctcactcctcgaggcatcaaatctaattatttgtcaaaatattaagatgtgtttttaaaaaatt

SEQ ID NO: 176620 - DNA, 929 bp, Cannabis indica
aaataattaatcaaaagaaatcttgctataatttatttcgtaaatattagtcacaaaagaaaattgttatttatttctttagttttagctataagtactgtaataaaattctgaaagataacttgtcatttgaatttaaaagttttttggttagcttatctatgggtcaacaattgcttacattgttgtcctaaaaatctttatctatatttgagcgtcaattaatatatcttcccaactccaagagtgacaacccttcgtctttttaaatatttcaatacatgtgaagatttggagttgagactttttattactttaaagattttttgatattatatgtgttatggattaaagaaaataatatgatttaaaacacatgcgtacacacaaaatttagaattatacctattgaaaatttttatatagtatttctagagtttacgctaatattttattttgttttgattaagcaaagtttgttttgattttttcatcttggtattattttgttattcgcttgaattgctagggctagcaataagctagttggagattgtgttgaatgccaaaatattacatatataatatgtaaaaaatacaaacttaataaaatttcaaaataatattttcataaaattagtgttatatattcgtatgttgaaaatatttttttagaattaatttttatctttgtttatagttaataattagtactatggcataatagagaaaaaataaaaaaaaagataaaaggtatatattctcattaaaagaataacaaattaaaataaatatttttatgaagttaaatatgatatattttatatttaaaaatattttatttagattaaattttgttgttgtttggagtaaaaaaatagcatttgtgacatgtttaaaaaaataaaataaaaaaagagtaaaaataa

SEQ ID NO: 176621 - DNA, 865 bp, Cannabis indica
attcataataataatacttcatgtttattttaacaatgattttgaagcttttaataattaaaaatgtttataaaaacacaaaataaacaaatttgtaaaattaaataaataaatattaaacagttctaacatttataaagaaaataaatttttaataagaaaaaaaatatttattattcattttatttagaataaatatgatttaattaattttttatagaaatataatatcaaaactataaacattattttatttaaattatagaagtgtgtttatttatagttttaaaagcatcaaaaaaccaataaaatttagatgcatgtttattatgttattctaatcaatgtttataattatattatgtagtaatatagtttattttatacattatttataatatcacatattcattaataaacactaaacaaataattttacaagctaaattaaaatttaaaaacaaacatactaaattttgtgttaaaaatagttatttattatccatttcaatataaattattataataataaattatgaaataaaaattatatatatatataacttcataataattttattattataattatggtaagtactaggtacatttatgtttaattattaccatatatattaattaaaaaaataaaaaaattactaattgtattaaaatgtagaagaaatattaataagttttttggcacttaaataatgtatacatacaatccgtattaattaaacttaaataaagtatatgtatgtattagaaacaaacaaaaaaacaaatccaaattgtacataaatttacaccttccatacagtactcctctggtctctcatcctctctgctgcagcagcagcag

SEQ ID NO: 176622 - DNA, 628 bp, Cannabis indica
gaaaaggagtttgtgagctgagggcgataaggcagccctgcgcaggcgccatggctgcattgacagccatctcgggttgggttgttgagccttccgctctctcagtccctcagcagacttctttcttttcatgcaagaaaatgacccattttcataattttatattattattacccaaaaaaaaaatatcaatcatgttataaatcactagaccattctagatttttactccattcccatgtagatgatttactgagttaatttaataattttttttttcttaattcttattttatatataactttctcgtttatatttttataatttattttatatatttatattttataattaattttttttattctatttataaaataaaataacatattttgaaataaaacagcataacgtcaaaatttaaaattgaaacaatataatctcgaaataaaaataacataatttcaaaataaaaaacaactttataaaaattaaacaaaaatataaaagtgaaaaaaataaaaataaccgtatacataatccctaatattcttttgggtacattcagaattcttaattgtctcaaagcacgtttgtgttagcataactatcattgtgatttgagga

SEQ ID NO: 176623 - DNA, 561 bp, Cannabis indica
aatttctgagcatatcatattatatatcataaatcgacaaaataccactattagcataatgcagtaaacgacatacaatataataaatataccgaaatattaatagcttaacttacataagaaaatcatgactgaacttatataaaagatactattaattttggaagaaaaattagaagatgaagaacaatttaataaatgagatatggagatgaagcacaaaagaattaatatcaataatggaaataagaattacaaaagctacactctaacctcaccaatattagtattttaataaactcatttttgtcactaaaataagtatagataaaatagtaataaaagagaaaaataaaatgacaaaataattttctactctctctaaaatctgatgcctttttacaatgctaagagtactatttatagtaattcagtgaagatttgctcccacaaattaaaattttagtgcctcatttagtggagaaagtggctctgaaagctaagagaagtaaagaaatggcactgatttgcaacatatgaggaacatgtggcagacgtggc

SEQ ID NO: 176624 - DNA, 928 bp, Cannabis indica
gagagagagagagagagtgaaagctattttagttgagtcttgggaaagggagggaaggagaaggtgtgaaagtacgaaaaagtccttcaaatacggctttgtgtgactcatgtcacttgtttataaatctaagctaacccacgcgcgcgcgttttttacacgtcaacacgaagagatgctcacgtgctaccgtctttttgccataataatacattaactatgtaagggaaatcttcagatcagaaaaaaaaaaaaaaaaaaacaacaacaaatgtaagggaaatcaaatggaaaatgctaaggataaggtgtcaaagaactgtaagagttggggtagttttattagtgcattttgatatgggtctctaatataatttaatttaataaataatatagagaacaattaattaattataatgtcacacataaatatgatatatgatatcttaaagtacttaataataatattcaaatcaaaataattttaattcacaaaaatgtttaattaaagtttcatataaagcaaaaataataaattataatcacgattttcttatataacaacataaattttaattatttaagatattttattaattttgataagtttaaaataatttatagcacaaaaagtatgattcaaatactctattttacacttacttcaaataaaagaggcaaacatgcaatagattcttaaattttattttctaacacaatatattatttaaatttatcaaaaatttagagaatatcttaaataattattgaaattttaattatccatcaaattacattattaggattagtagacagattttttgtaaggagaaagtaaactaattttaggattaagaaataatgttttaagattagtagctaaaagaaaaaataatttagtaacaaaaatacgtgttctctaaagatc

SEQ ID NO: 176625 - DNA, 747 bp, Cannabis indica
ttttttttttttttcctttgtatgttactcctacatttggttagattatggagttataagaatgggcaactctaactatggaaagactccttgttatcgatcaatttttaggagttatatgtgtttatgtgcaggaagagaccctcagcgtcaggctcatcacccctccaggggaattcaccttcaaaattcagtgaaacgagattgttttatgatggccaaaatatccatagccccacaaatgctgcacttattctagataatatcaaacaagaggttgagagcatggatggtcatggaatcccagaagcagatatctgttttgattcagagcgctcttcactaaaagcttgcaaacgagaggatgagttgctgtctgatagtgaagataccacattttcatatttcgctcagctacttgatcctgctattcaaggtgtgtttgaagcataagtgccagaagtttagatagatcatcaagtagtgtcaagatctggaaataatttagatttttatttatagtggtgccagaagttcattttattgttatgacattagcatagtttaatttataaatattgatatcatagttacctctatattttgttttcaggacatattcctattcccgaccttatactgcaatttgagaaatgctgccggggtgtttccaagacaattaggtttgttaccaaaaactctaagtattagcattgcaacaggtgcttgttatacttctgttttttt

SEQ ID NO: 176626 - DNA, 768 bp, Cannabis indica
ggatcccaacttttgtaacttttaaattataaggtttaaattattacaagttattttcattccgtttattaataaagtttaattttcgcacttattttactagtaatcccgattaggggattattgttcaataagtttattgggtagcttgcctaattatttagggaattacaatggaggaaatagctctaataccatgttgaacctctttgccattgatgaacaaccaagcaagcatgaacaataaaaccagagaaaaacagaaacgaagagatagatgaaagagaaggaaagatagagaaagggaagtttgaaaacaaagagcaatcttactattcagtaaagaacattggcattatatagccaatgattacaactgtagtttgttgaagataatagaattagttaagaaagagaataagaataatactaaacacaactaattctctaaccaatcaactaactgaatagacactcctaacaagtacaataattttccaccaactaattgaacaaaaacaaaaataaaaataaaaagaaaggcccttttactatattagtaataagagaatcccactaattatagagcaatattgtcaaggagaaccaagctgttaagtagttggttatttcagttagttgttagttaggaactctagctaatttcttgttgttagttgtagtcaattatgattgttccttttttatataaagcaatgtattgtactattcgatctatcattgaataacaaattgcattttaattac

SEQ ID NO: 176627 - DNA, 751 bp, Cannabis indica
atgcattttcgaggagtatcctctgcaacttgactatcatccattgtagggtcgttggattgaatcaacttcttcttatgttatgattgctgctggcaagttcgagccgtgtacgaagcaaagaaaccctaacgcctaaacacctcaactcttcaaggaagacaacggaattacgagcaataatgcactgcaatggtcatgctaagttctgttttagtttttagaacaaaaaaaagtaattaggatttttacaaataaactttaacatacaataaattaggtcttctgtacttttctggtacttattgagatttttagatttaagaattttttgtccaatttcatttaatttaattatttcactgattgtttatgtaccaaatcatgtccctcgaactttgacatatactaaatcatctcctgtgaactttcatctatattagacttttttaactaaaattggaaaaaaaaaatccttaaatccaaccatctgaatagttcagggcatttttaacgttcagagggcatgatttggtacgtgtcaaaattttagggacaaaaatcttaattagcctaaaaaaactcaaataaaaactatttttaaattaaaacaatttaaataattcttaatttattcataaaaaaattgagtgatatttaaacactttgtaaaatatttttattcaaaaaaatctaacataaaataaatccaaacttatacttatctatttctaactataagtaaaataaa

SEQ ID NO: 176628 - DNA, 695 bp, Cannabis indica
atagtgaggaaatcatgataggaaacaagaggtaaaaatatctaaactaatagttaggtttgcattatgtataattgtggtgagatacagggtttatggttcatatgtgattcaacaatttttttaatcaaagtttttttttttattttattatcttccgctgcgaccctaatatgaaccctaaaaccaacaacccttttgtatatccttttaatgctttatccttaccttggagctttcctcccagataaggctctagacttggttgagtctttaggttgttggtagggtcattgtcatttaaagttacttcaaggtaagaaatagggagaacttcgttttccctcaattggagagagatagtaagggtgtgctttagtgaggctctaatctttctaggcagagacgattcatgcacaggaataggtgaggtcttcccaaggtcattttttgccccgagtctatgagcatactttccaagtatgttggtactcttgtattcgaattcgtgaagtgttctcccttagatgttttgaaagcacgtatctcaagaattgagcacacattccaagaaacaatcatgtatcaaagatttaaactctacaatgtaaggagaataaggaccaatcatgatggcgcgcagatcccaatgtgaacatatgagttgtgtccctccgttgatcgttattcgatcc

SEQ ID NO: 176629 - DNA, 714 bp, Cannabis indica
ttcacacaactcagcttctagggctttttccagtacctcagcatacgtggttgcccttactcctgacatcgctatgtcccgacttattcgggagtcgagcccttcagtaaaacgatgaatcctcagaaactcagtaggaaccagatctgtggcaaactttgctaatctgtcaaattggcgagcatactctgtaactgtagacttaccctgcctcaggttcgtgaactcattaactctagctgagcgtattgcttcactgtagtattttttgttaaaaacttgtacaaagtcagcccaggtcattgcggccacatcccgtgtttgtttaataacatcccaccagatgcgggcatcctttttcaataaactagcagcacaagctacactatctccgttaccgagccgcatgtactcaacaataccttccactgttcttaaccattcctcagcttccattggatctgagcccccttcaaaatttggtgggtgttgcttgcggaacctttcatatattggttcccatcgaccctccggcacaggcatgtattgcaccggcaaaaattgatgttgtccttgattgggttgttcctgacggttgtgagcctcttcatctcgcttcctaatttcttccttgagacgagcaacttcttgcgccaaatcttcttgttgtggtggcaccactacaggggcgttttggtgttcttgaccaactac

SEQ ID NO: 176630 - DNA, 511 bp, Cannabis indica
ctctattttttttgcttaggtcagtgtatatgtaaatggcttgtaatattttgtaaaagatttcacatgatcccaaatatgtattgatattattttggttttaagttaaagctaaattttattactacaagttgtttaattaattaagattattttgttttaatcacttggcttatttgtcccgattaatgagattaacgtaatgtaatcacgatacgtggcgttccactaagtaggacattacactcatgtatgattgaaacttttcaacttctcattcatctcacatttcttctcaatcattgtttttgttttgttgaattgaatgtgcatttcttgaaagaagaatgtaggtttcattttctaatatatgttttaaagtgttccaagtcaggatgtaagattacaatagaaaggaaagataaatgaataaatataagggcttactgcaaaaaatagttcaaaaagggcattaagatgcaaatttctgtcactgtttggtttctcatat

SEQ ID NO: 176631 - DNA, 510 bp, Cannabis indica
atgatgacttttttcggcgacggtgacttttccgacgacactaactttttcggggacttttcggtgctgttgacttttccggtggtggcaattttttcaacaaaacttattattgtttataaatataggatttctatcttttttttttacaaaaatatggcataaaaaaactatataaatgtaaaataaaaaaaaaacccatataaatgtaaaaaataaacttaaaacatcttatagcattatttatttatgccataaaaaagtaaatttttataatttttccatatatgtataatttctacaaaaaaaattaagagtgttatcaaagttggccctaggtgtaggtgtgctaaacccgcgcctaagtcccactcattttaagaacccaaataaaaaaatatcttttaaaaaatatacatatttttttaaactgatttttttttttttacctatacccaatttaactcatggcaagattttttctttcttcatcataaataaataaataaa

SEQ ID NO: 176632 - DNA, 457 bp, Cannabis indica
atagggatttttgtacgattttttgttgcaatttaggttgtaactctagttgcaataggggtttctatgtggaattccataaaaatacaaaaaaaaaaaaactgttttgaagtgtaaaaataaaatttattctttgattgtagttaatttaaagtcaaactctttaaatactttaaagtttagtacgatcaactccctagattagaatagttaggattaaactcttcaacttctacaattgttttgttttgtacttattacatacactctagaatcttaatttttcttttataagtataagggttgatggtatcaaactttaaaatttaagaagtttgaccgaattatactctaattttatttatttagaccaattcctataagtactgtacattaattgaaattttctttaattttagacaaaagatatgaatatagacttcaaatcaagtttttt

SEQ ID NO: 176633 - DNA, 855 bp, Cannabis indica
agatttgaagaaggagaagaagaagaagaaagaagaagaaagaaaagaaaaggagaaagaatttagggtttttttttaatttttatttttgtaaaattgttttttaattttaaattttttaatttttaaagaaaatttaattttttttattttttatttcaattttaaatatttattacgtggactaataaaattgtgccacgtgtacactgtgtacacgtggacattccaccatggcagttaacagccaaaaatggatggaaaaggctaactgctaacggagtagtggtttaggtagttttaccaccaaaattttagattaggaggttagttgcaaaaacctgctcactttaagaagttttgccgcaaataaccctttttgtttctattttacatatatatatgaaattaatctctagttttatggcatttatttccattgtagttaaatactacttatttctattttgatgttaaattattttcattttcaataagacttgtttctatttttagtgtgagttgtttgtatttttattatttttgtttctattttacatatatatatatatatatatgaagttaaacggtaattgtttctattttttatggcatttgtttctattgtggttaaattttattgttttctattttttattgatatttgtttctatttgccatatatatgagaattaaattttagttattttacaattttttattagtatttgttttccattttttaagttgtacttgtttttatttttagttgtgtagttgtttcctattttattatatatgtggttaatttattttttatttttttattggttatttcttttcctattttctaca

SEQ ID NO: 176634 - DNA, 594 bp, Cannabis indica
gcttcgtaatatgcgtttctatgtaaaattccgtaaaaatacaaaacaaaaatattttaaagtgtaaaaataaaaaataccaaatattaattattttatgggttcatatatatatatatattattatcaagtcaacaagtttgagatgtacaatatacaaaaactgctacaaaaagtagcaacacaattatattattaataaacactatatattacatgtaattattattaatttagctgtatatatatataaactatatgattaattaacgacatatggataattatgctttgcctcttaactcttgtcacatgaaactacagtcgaaactatataatttacagcgtgacatatatatatgatcaattgtacgttcaacttacttttttttttcttacaattaataaaatcaaattgctgtgtgtaggctttcatcatgattttttatttacagaatttatattttgacctttgacttagatcatgaactcaataatttcagattccattgcaggttaaattttttcactaatttgcaatttcatatttattaataacctaacgatttgttcatataatagttctttttcggc

SEQ ID NO: 176635 - DNA, 786 bp, Cannabis indica
ttaagtataatattggaatattatatcatttctaaggggggacattttgtcgagtcactcatttctaaaaaaaaagtaaaaaaaaacaaagagaaagaaaaagaataaagcatgagaaaaaaaatgacgacatttttatattctcgagtaaattaaattaaaattaaaactaattaattaattattattattattattattattatttttttgtaatttgtgtgatgactgagatttgagattggggaacaagaaacatgagagagaggtagctttgcttgttttacaattttctttctttattgggagaggtgattttgacacgtgtaaagatgtgattggtttggatggcaggcaagtaagtgccacgtgttgtcgagttgtccgaggtgtgcggcgacgcggagccgcgtatgtgttttaaatttttattactataaataaataataactagtgaacattggaaataagttttgttgttggtgtgtacttcagtacttcactatgtactatttactaattaataatagtaactcaggtgttttattttattttttattcagtttccgtacaactttttaattaaaaaaatataaattcaagattaaaaaagaaaaaataaagagacagagctgtctctgtatactcaaatttgaaattttagtaacattgagccaataattacaaagagtacttccataaaaaaaaaaatagaaagataatagttattaatttaactatttaaatattaaaaaaaattatcacataaatatttaaatttaact

SEQ ID NO: 176636 - DNA, 827 bp, Cannabis indica
agatactcttaatactttgtacaaaagtaacaatttcatgattctttattatggtttatgagttttattattttttttcaatctctatttctatttcacttttaagttagcgtgtaattggaggtaatgaaatagaaacaaatcaattaatttttttgaatacttaacatttttgtttagaaagttaaatttttttaagtagttcatttttttcttctttctcaatgaaaatcttaaaaaaatttctcacttgttatatatatattagatcgttttttttctctttccttttattaaccaaaagatttataggtttgtaaatcaatattatttttctttttataaattttgaccgttctatttttttttttatttattaatgaattttatgagtttctaactagattaatatttaaaaatatattttctaaagcatttatttatataactatatatatttatttgtattattatatatatatatatttatctttctaataatgttaatttttatataaaaaaatttgtatttaattaatgccagcccattttatctatttaaaattaatgtcaatttttttttacctttcactgaaatccacatcaccaattaatcgactaaatataacaaaaagtaatataattgacacatctctatagttgtattatattagggaaattttcattaattgaccctataaaataccccatttcaaatttatacctcactattatcaaatattcactatactcattctacccaaaatacccctcaaactttaattttcctattctctctctctctctttccgtcttccctctcttcc

SEQ ID NO: 176637 - DNA, 817 bp, Cannabis indica
tttttttttattacaaacactcaataacagtttcattaccaaaaaaaaattatataaaagaaaaaatttaaaaaaaaaagaagtagaagagaacccacattagcatattacttaattatatatataattttaaaaaaaaaattattgtattccaaattttacaattatttagttttaaaagaaaaacaaagaaaacaaaatgaaatacggccagacaaaaacaccttttatttatttatcatgttcaaatgaaatactagaaaaatagccacaccctacctattcaaagtaaatagtagtatcctttccaagtcaaaaatcgatgatcaactttgttgaatcccattctccatcttctcctatatatacccatttcattgtatactagctaccaaatcacttcattattcattcgaaaacaatataactactcctactcatcattttctacatcgtgcgtaatttcatcctatatacgttcatacatattataatcaagaatcctagctttcgttcgcgtacgtaaaagttagaacatatgtatatatatttttgatggagtttgttggtctaataataagtagttttcaacctcgaattaactgggtgatcatgatgatgatcatactggtttcatttgtgtactttggagactattaatgtattatcggatcctgaaagttcatttgtcaaaaaaaaaaaagttgtattatcggatcgggacggttccgacccgaaaataaacataaccggggcggggcgaggcaaaaataaacataaccggggcagggtggggcggggcgaaaacccgaagtag

SEQ ID NO: 176638 - DNA, 702 bp, Cannabis indica
aatttggtatgtatgtatttttgttatattatgtccttgataatcattattaaaagatatcctgtatttaaaaattactacaaaagagtgctttgactcaattttactaacaaactaccagtatttctcactaaaacaaatatatatatgacaatgttatatattaatgttcaaattacagagtaccaatattaataatcattattaattaattaagaatatatatgatacaaaagttgaattgtagataagtagcacagaaattataaatgtttcaaaaaatttagttcctagaaaataaattgggacacatgtatagctaggtgggtacatagtacatatattaactttttagatacaataatattatgcataaaagttatgagctatagaattcatgatatataattgatatggtacacaatatattaatcatcgtttgagcattaaaaacaaaggaaaattattgtatatgcatgtacacagaaaatcaaataccaaaaaagaagaagaaaaaaatacaaatactgtgtgcgcacaatatatatatacaatttagtgtactatatataagtattttatcaaagtaataatttgatctttaactatatatacatgaatataaaatataatcggtgcatgactatatttacgttttatgcaaaacttgtatattaattggccacgatgcatgctgtgctc

SEQ ID NO: 176639 - DNA, 568 bp, Cannabis indica
gaaacaaaaactgtatagcttacactataaatcattgcttatagtaaggtgatgatataaaattgtgccctatactccacagtgtatgctacaattttacactgtcgggaaaggttttttacgacgattttaaaccgtcgcctattccattcgttttacgatacttgaataagcgatgattatagaaactggcaggaatattttactcaactatttaaaactgttgagaaaatctaattattgtttagtagtgtattttagtttgtttagtcttttcaatgtgcactctatgcctttagtggcattggtggtcttttttttttttaagtttatattcatttttatgctcttgtgtcagctttgagttttttgcttatttatttatcggtatagttaggtgacagttaaaattattttttagtgaaattgtgtggttttttttgcctgacgtatgacctttgtttaacaatattaaatcaagtttaacttttttttaaaaaaaaaaaaatctcctaaccgaaaaaccgagcttatattatatgatgtctaccacaatttataacctttt

SEQ ID NO: 176640 - DNA, 1003 bp, Cannabis indica
aactgttttgaagtgtaaaaataaaaaagcccctaaataatatttataccctaaaaaaaataatatttataaaatataatatgaattattattattaatttttttttatataaataaagaagcatagatatagtgatgctttttgagagtagatgttacttttatagtgtgacataatgttttgactctaaaatcttatagtgacgcgtggggaaggaggctaaaagggtttagtgactcaccctgaagggtcattaaatactgtttttctagtcatctacatcagtgacgcacagtgaaaggtcactaaatggttctagagtcactcaacacgagtcattgaaaccaattttaatttgtatagtgggttaatatgtggaacacgaaatggacacgaattgatttatttatattcattatattattgaaatttatttatttatagttaaattattatttatttttataaaaaatataaattagaaaaaaaaatttgttacaagaatataagatagcttaatcaaacatgatattaataattttgtttattgtatttatattttgtaataaataatgaattttatcaattttgtttatttgaagatttatatatttttcttattaaaatacttcaaaaagaaaaatactgatactagtgaatgtaaataaataaataaaattaaatatgtaattatatgtatcaacatgtagtatagaataagttgttatattatttataataatataatatatagattaaatatgtgtaataaattaataatatgtaacatatgacaatatatattagctgtcatctttttgtaacatataggagagttacttgttacaatgagtaacctccaccattatcaccaacattaagagtgtaaaaggtgttaacacatcttaatttgaaattcttaaactctatagtagttatggtgtgcatgagttacatctctttatttgagtccataacatccatggaggttattacttatgt

SEQ ID NO: 176641 - DNA, 859 bp, Cannabis indica
agactatttttaaggagtagtgctatgcacaaaccaagctcattcacattaattattgtctaattatgagcttgatcatgatgatgatgcacctcctcattgctgcgttctcttttaccaatttatcactgctttaacatccttcttagttgtagaatctgcaccaacaaataaatttataaaaccacaacacagaccaagtcaacaagcttttaactactacttgctatatatgttaaatgtgttcttatactaatactatggtgctttgaatccaacgatcaggttgttaatggttacctaatttgaccactatatatgaatcacttgtggtgtctcctcatattctttctataaaatggagttagttacttaaatagtaagtgattttttttattttggtttctatatataaagtgaccataatgtcttattctgatgtggaaattaaactgtttttaattagggataattttacaaatacacaaaaataacaaaaagattataaaaaaataatttcacagaattttaaatatttttacaaattttttaattttatttacaaaaaatacggtattttcatgttgtattcatgttaatttgttgttaatgttttgttatatgtatgttattttttgttgtttttacaaattttttaattttatttataaaaaatacggtattttcatgttgtattcatgttaatttgttgttaatgttttgttatatgtatgttattttttgttgttgttttgtatgttatttagatgttattttcattgttacttttatgttaatttttttgttgttttcgtgttattttacggtaaaaatcgtaaaaatataaaaaaaaaaaatt

SEQ ID NO: 176642 - DNA, 748 bp, Cannabis indica
tatatctatatatatatattagtacaaatttaattgtatattgaattgaatctatatatattcacccacattcaatgaataaatatttatcttctctctctcattttaagggaagtggtcctattcttgtcttataacaataataaaataaaaaagataatacataggtataatatttataaaaaaaattacattttatgtttaataattttttttttacatttttacaattttccgtaaaaagaaaacgaaaataacaagaaaactacataaaagtaacatgaaaattgaaaataacatcaaaataacaataaaaaataacatacttataacaaaaaaatcatcaacaaattaacaggaatacaacataaaaagaccgtattttctataaatgaaactaaaaaaattcgtaaaaatatttaaaatttcgtaaaatcgtacttttataatttttttattgtttttgtgtatttgtgaaattatcccaaataaaaatttgtacagaaaaataatatgtaagacaaaatatatgaaatatattcgtacatattagtagtacaagtaatatacaacaaaaatgcttctttgtgtacatatgtttattatttgtactgtacatataataagaatttgtgtgtaatttatgtgtctaaatattatacttttttacaaaagtattgttattaagtattactagattgtataatactaccatgaaataacatgtcaacatatagaattcgataat

SEQ ID NO: 176643 - DNA, 608 bp, Cannabis indica
catataaacctgagccagagatttctgtttacaatataatccaagctagaagtggaattcccttgaacaaaaatagttgacgtgaaaaatagaaagaataatattaatataaggaataaaaaaaaattgaaaaagtgtggctgcatgcttaatttataattaacatattgtatgatgtaattattaagaattatatatatgttatagtaatatatatatatatatgtaaatttgaaacaatatattatatttaatatatatttctcaagaagaaaatgattaaaaatatataatataaatttaaatatattattttatttgcctggacttaatattattatattattcaatatttaacgtttgattgaaaatgattaaaatactagagaacaattagtcatgtaagttttttttttttctttgtaaatcagtcaagtatattttttttatattaatacactattaattaattattatttcgtttatattttatagatagtgtagttaagaataagtatgtcccacaccagcactatgtgtaatttaattattattacaatattaatattaatcttttaatgctacattttaatttgattataattaat

SEQ ID NO: 176644 - DNA, 789 bp, Cannabis indica
cctcgcaatgttccgagcaggatacatgtatctagcaaagcatcactatctgtgcagaaggacgcgacatttagaaatttcttaagatattttctttaagtatcaccataattatagcataatttgaatcactatatttgtgggattagttttatatagttgagagattggtaggaatttatatgtagtttctcgattattttttaattatttttggtaataaactcttgtatcttccttataaagagtgaaattatttttttgtttagggatccaaatttaattttctagagaactattacgttgttaaaataattataaattttctcaaaaatattaagaaactcacatggctagatcttgtgatcttaatcattcactaagtaacacaactaaaaagtatcactattatcatgggaccgaacctctacaaattatttttgtttttattgctttattatttatatagtaattgatcattcaatttcatcactttaaagactcgatgtctttggctaaaagcgaggtcaacattttagtgcttttattaagagcaaaggaacccaatctcatccttgacaattttttttattttaaatatttatttacgtggaccatacaattgtgccaagtgtacactgtgtccacgtagacattccaccatggcagttacagctaaaaatggataaaaatattaaactgctaacagaacacgagttcaggggttttaacctccaaaattttaaaattggcggttagttacaaaaatctagtcacttaaggtgttta

SEQ ID NO: 176645 - DNA, 522 bp, Cannabis indica
cattgtgggttttacaccgcgtttgttttagtgagtaatcctccctaatggaggaacgttcattagcaatttcgcaccgtttaacctcgcatgataagtagtttgtaagtgttttgtatggtatggatcaccctaatggtggcgaccatacttgacttgcaaattatgaaacaatggtggaagctcataagatagaattgccttgactctcgcctaaacgggacaacgctgaattccaatcttgatcgaataaaaggttgctagaatgtttaacattttagatgagctgacaactctattcaatggatggtagctttgactctcgcctaaacgggacactgatatcagtttgttgaaaaccttggaaattatttaggattgtaagtttacgtttagtttactttacttacgtttcgtacttaccttaccctttaacctttaacttaattagttttagttttaaattttaacttttcgtaagttaagtttggttagttagtaagtttaaatttaatttagtta

SEQ ID NO: 176646 - DNA, 742 bp, Cannabis indica
tttatttttttgatacattttttctaaaatacaattataagttttttcgtttttttaattgatataatttgtacaagtagatgtttatattaaaattatagttttatctagttaattttttgttgttttaattatatattacccattatattatgtacgctattttgaaatcataaaattttattatttctataattaatgtatctatttttttaacttctataaaataacttattattttaattgtcaataactcaaaaaggaagagaggaaaaaaaaaaagagttgaaagtataaaattgtaacaataaatttcatgaaaaaaaataatgtagtagtgcaaaaaaaagataaatcaagttgtcaaaattaagtaaaaaaaaaaaaattcgtaatacaaaaacatgttgaggagttgatattgttttacatattataacgagctcaatgtcttgttatctttttgttaatttgtagttgtttttttgttgttttataattgttttcatgttattattaatatattctagagttatttttttttttgttttacagaaaaataatatttttataattttgaaactttaagacagtatttttgaaatttttaattagtatagtaaaaatgtaaaaaacagaagtacaacagaaaaattataaaattagaaaaaaaaaaaaagtaattttttagtaagaaatgtaaaagcatttaaatcttctaggcttcaatcaaacccacttc

SEQ ID NO: 176647 - DNA, 471 bp, Cannabis indica
tctccattttctccgactgtcagacactggtgaagagtttggctgttggttcctcgcctgagtggagggcgtgtgggctgttcgatgccacccgcaacctcctgactcggatgccgagatgtcaatgccgatggatacctcgtcgattgaactccggggctcacaatcttgctgcttgagctgctgctaatagcagcttcaagttcttttcttcaagggaagtggcaccctttgttgccactatgaaccttggttgttaagccttttgtttttcttcaataaagatttgtttttcatccaaataaaaaaaaaagaaaaataatatatttaaaaaaagaaaatcagaatttttgagctgatggaagcccaatcgcgtgtcatcagcctctcccaatcacagccgtccatgcggctgatcaaggccctggtgcgcgcgtgttgtccaccccagacaagggcgcgtgaggtgca

SEQ ID NO: 176648 - DNA, 542 bp, Cannabis indica
gtatacattatggtgagtgaaaactctttttccaacaagtcaaattcaacttcttcaaaaatatacttttgattagtacattcaaaagtaaatacataagaagaagtcattcatgccatcaatttgcataagaattcaaactaattcttgaacattattatactcaaactctactatcatgtatagcattcaaacataaatctatttttcctcaaaaaatatactatttttaacattttattttagttactctctgattccattagttttctccttttgaagggaaaactttaaaataccaccatccatccctcagggaggaggacacgggtcataataatactaaataataatatcaatgatgagcttgtgtaatctgtcatcatttttgttattttaatccttatactagtcgtggtaaatgctttaaagccattacaaatttacaacaacttatttatttatttttttttataagatcattgtcacaagaatcaacagtaggatcattgttcattcaaaaaaaaaaaaaaaaaaaaaac

SEQ ID NO: 176649 - DNA, 751 bp, Cannabis indica
agcaataaaaaatccaatatagaatagcatttcgagtgctacaggatacgattgattagctgatgtttcaaaatttaatgttggttcattagaaccatataaacaaacacctagaattcccattaataaaaaagcggaacttcctgcagtatacaaaataaattttgtagctgaatacaaacgtttctttcctccccacatagatagaagtagataaactggaattaattctaattcccacatgatgaaaaaaagtaaaagatcttgagaagaaaaaggtcctatttgaccgctatacattgctaacatcagaaaatggaataatcggcactctcgagtaactggccgagccgctaaggtagctaaagtcgtgataaaccccgtcaacaaaatgggtcctatagaaattccatctattcccaacctccaagaaaaattaaaaaaatcgatccatttataatcctctgtgagttggattaatggatcgtccaattggaaaaaataaccgaatgcataggttattagaaggagttctaatatacatatacaaagagtataccacctaattaccttattgcctctatggggaagaaagaaaattagggaacccgcaaatattggaaaaactacaattactgttgagaacgaaatatacaacgttgtatatgttgtatatacaattgcctctatgatttatgtcactattgtccgattttcaatgccatgccatttaaaatcgatacaaattgtg

SEQ ID NO: 176650 - DNA, 769 bp, Cannabis indica
gacacaaggagatccatcactggatatgcatttacagttttatgtggatgtattagctgaaaatcaaacctaaataaggtagttgctctgtcatcaattgaggcagaatattacatggctgtaatagaggccataaaagaagttttttggctcaaaggtttcacaaaagagttggggttcaaattagaaaatataacagtgcattgtgacaaccaaagtgctctacatttgatgaggaatccaatgttccatgagaggtccaagcatatagatattaaattgcattccataagagacatcatagctgaaaaaggtgaatgtgaagaaaattagaactaaggaaaaccctgtagacatgatgacaaaatatgtgagtttagctaagtttaggttttgcctaaacttactaaacatcctcaagtgctagatgaggatttaagaccagttcagccttagatctcaatagcttattcctctcttaattaatgactaaggtaaataattgttgtgattggtctttaagtgaggaagcatttggcactaatatttttcaactgttttaaccaactgtcagttataacggttgtatcaagtcccaataccaaaggctatatattgccattccctgctatattttgggatgacttattcagagacaccttgaggaggtgttagagagctagttcatagaaaaagagaagagaaaaaacgagtgttgtattggcctatggtgtgtttacttcatagtttcacaagtgagatgaatatc

SEQ ID NO: 176651 - DNA, 810 bp, Cannabis indica
cttatgcatcgatcttgtgctggcagcctcatgtaccgtgcacaaggccttatttggcttatgctctgagtatggttagcaaattcatagcatatctagaaaaagagcattggtctgcaatgaaatagatacttaattaggtatctacaatgctctatggatgtgggacttgtctatgataacaaagtctaagaatgaggttgaagtgaatggatacgtggattctgactatgctagaagcatagacacaaggagatccatcactggatatgcatttacagttttatgtggatgtattagctgaaaatcaaacctaaaaaaggtagttggtctgtcatcaattgaggcagaatacctggctgcaatagaggccataaagaagttttttggctcaaaggtttcacaaagagttgggttcaaattagaaaatataacagtgcattgtgacaaccaaagtgctctacatttgatgaggaatcccatgttccatgagaggtccaagcatatagatattaaattgcatttcataagagacatcatagctgaaaaaggtgaatgtgaagaaaattagaactaaggagaaccctgtagacatgatgacaaaatatgtgagtttagctaattaagtttaggttttgcctaaacttactaaacatcctcaagtgctagatgaggatttaagaccagttcagccttagatctcaatagcttattcctctcttaattaatgactacggtagataattgttgtgattggtctttaagtgaggaagcatttggcactaatatttttcaattgttttaaccaac

SEQ ID NO: 176652 - DNA, 601 bp, Cannabis indica
gtgaatctacctagtgaaaaaacagaacaatgggactcatcaattcagcgagtcttcagattgtgatgtggatggatctgaagcttccaatgaagtcgtttcaccaatggagtttgttgatagtaagaatgaggagtttgttcgtcaggaggaggaggagagtcctaataacaagaaggagacgtttgctcgtaatgaaaatgaagaggtccaacaaaatgagaacagagagttagctgataatggggataggatttttcataatgagatcgaggagtgtgacgatagtggaaatggggagcttttccacagtaaaattgagaaattcgctcgtaataagagtgaggagcttgctcacaatgagggtgaggagtttcctcgcaatgaaagtgaggaatttactcataacgagagtgaggacttaacttataatgagaataagaaatttactccggaagttgctcgtaatgagattgagcaattttctcaaaaacaaaatgatgaattcaatcaaaacaaaattgaaattttttctcagaaggagtctttagctttggcgggagtggatgtagatgtaccagtcaatggtgagagcactcca

SEQ ID NO: 176653 - DNA, 649 bp, Cannabis indica
ataatatggaggtagagtatttgaatatatacatagtctaatgcaggcccggccctgggcataggcgggttaggcatgtgcctagggcccacctattccaggggcccaaaaaaaaatatttaccttttaaaattataccattttttatactaattttaaaaaaataccatatttttttctaaagaagggttcaaaataattttttttctatggcccactaatcgtcagggccggccttggtctaatggtttacacaagttttaaataattgcgtaatttaggaaattaattttatatttaaacaagattttcaactatatatatcataataataagtcatgattacaataatcattttgtaagaactcgaatatgtttttaattccttttatctataaaaacgtctttatcatatcaatagtaaatacaagttgcacaacatctctctctcccatttttgaaaaattgttaccccatgattgcccaaaaccctaatcatgactttccaagaaaccaaacactccctttattttagggataattaagtaaaagaactatttttttaaaaaaaaaaacttatatttttaatgtttaaaatttttatttttacatttttacggtatttttattaaaaactacaaaaaacttc

SEQ ID NO: 176654 - DNA, 821 bp, Cannabis indica
aaagatttacatattttattgtatatatgactgttttttcttatacctgtagtaagtaattgtttaaacataatttttttcacggtaaattattcagaattttacaaaaatttacaagtggtcctaattaactacgacatacgttattataaaaaaaaaaaaatagactaaaaatttgttatggatgcagattctaccataacaaccttttaaggtgcctactacataaatttctaagactatttgcatttcaattgtcctagtaaatataccctttacatatgtaaaaatgaagagaaacttttatttacacccccaaatttttttttattttaataatttttattttatataaaatttatatctttgtactaaattttttaatttttttttcaatttatatttttaaaaaatataccaatcaaataaaaataaattatattgtaaatattatgacaaaaaaattaagataaaaattatattaaattttcttagaaaaaaaaatatatatatatacaaaaaaatatgaaaataatatcaaaataggtattgaaattaacataaaataatgtgaaaaaaaaataaaaaaaaaattaaagaaataatttttaaaaattatttaagtttatttttttttttaattaataaggtctatttatcattttattagagtgtaaataaaactcctcaaaataaaataatatctttctttactattattttttgccctatctttatgatatctagattaaagtagacaagttcgaaatgtgaggatggagtttcttctaatatggttattgtattaaaatctcctaaaa

SEQ ID NO: 176655 - DNA, 494 bp, Cannabis indica
gaaaaaaaagaaaaaaaagtattagaattgaaaaagaaaaataagaaaaaaaaaaaaaaattcaaatgaaggcaaccctaagaaaaaaaaaagaaaaacaaaagacaaaagaaaaaaatatatatataaatatacatatatacacacttacacaactacatatatataattctaattttctcgttactaatgaatttgcaatggtgtggtgatcttgatttcaggtgcaaagaatggaatgacagaaaaaaagggactgctgcaatatggtgtgagcagatttgtatgttgaagcaatagaccccagtacagcattggatcagcatcacttcagcattttgaagcagggatggcaaaaaaaatgaaattgctaaagtaatgctgtagtgatgctgtaactgctgggagtattaagttgtgtttaaaatactgggagttcaattgaagcaggggtttgaaaaaaaaaattcttttacttacataaatatacatat

SEQ ID NO: 176656 - DNA, 535 bp, Cannabis indica
atgaatcattttcttgttgcagagagattgcaacggctgtgctcaaatacatgaggaatgcttttaagtcgatgtcagcacgagtatggaggaatgaggataggaaagtgaaatggcctaaaagtagagaaagccgctgcctagtttcattgacgacgcagagcaggagaaacctagcagctgagtgtacaggatgtgaatgtgtttgagtctttattatctatacattgaaaattgagggaacaataggaaaaatgaggtggtgtaggttatattgtgattgtaaaatctctttccttgaagactttttatgtgtgctgctttcttttgttagcctttgaaatgaaattgaaatagtagtaatattattgacaataaagtaaaagccaatatcgctaagttataaaatgggagcatattttgattcaaaaaattcaaaaaattcaatgctttgcatctttgtgcccattaatttgaagcaaatttttgggctagttacaattaatagctaataacggtttcatgttctataagt

SEQ ID NO: 176657 - DNA, 558 bp, Cannabis indica
ttttttttttttttcattttgatcaagtgtaaattaatttaatgaaaggagaaaagagaagaacatgataatttctacgtagaattattttgggtttgagcctaatcgattctggaaagtgtactcttctttgtcagtattcctctattcacttatttataagatagtagttaccatacaaatcataattggcctccccatactaattataatagatataaagcttatgaaacatttgaatctatggtcgctgaatgttaaaccgtttatttcaattgttcaaatgtatgttcacatatatcttgttgttatttttccctgtgattcatatactgctgcttttatttgatatgacagggttccttcttagaaattgcagggtctctttagcgaagtcattctcttggggagggtaaattcagtggtggcccaagctaggggcaagaagggcaattgcctaagacccattactaagagaggcctctttttttttacatcaaagctacttcaaatacaacatacaacaagttataacaactataatatatataatttcaa

SEQ ID NO: 176658 - DNA, 672 bp, Cannabis indica
atactatatgagcatgagttgaaattttaagtatattttcatgaacgtcccccgtatcatagtaatctactattcacattcaatgacattccacaaaattgtgcacggttcgatttggccagcgaataatctaataattcccgaaaatctatatcgacactaattacactaattattcttagatatcatttgcttcagtagaaatttattggttgtttttttttatagaagataaatttattggtttttgaatgcatttgacaccactttaaaaaaaaatgcatttgacaccactttaaaaaaaaaatgcatttgacgtaaaaaaataaaattgaaaattacatattttatagaatttaatacacttttttgcaaaattattattttttgtaaaacaattattttaccttaaactgttttttttttctatatttttcatattttaatttttcttcaccataaagaacaataaaaatgaaaatcatgcagtactcagggatgacaaaattattctctatatttaccctattttaatcaagagcactttttctaaaagtaaaaacatgtgagttctttttttttttttgtaaacccatgtgagttcatttatcaataatatctagaattttgatacagaatttaaagctaaacataaattattgtccttacaaa

SEQ ID NO: 176659 - DNA, 566 bp, Cannabis indica
aaaagtttcaaagagagatacacaatggtttcaaagtttgtaaatatattaacattgtatagttgtttttatttaggccctcctttgggtcctatttgggtgtaatcaattgtttttgagctaatacaatttctgattcatcaaaaaaaaaaaaaatatattataacactttacctataaacgttgctaaatctcccttttattaacagtttctttttaataaaattaaaattaattagttttttttaatttaattaatttagtaatactactatataataattttattagattttaatgaaataaaatcaaatgaagaatttacaaaaataattatgcattaatatagcgctaatacttttacaaacttagttgaatatgtagctcatattttttataaacttagttgaatatgtagctcaaattatgtacatatatagacataaaatcttaaatttctatgaaataatcaaacaaaatatccagttgtgttgttcaccatcttcacataacatctaggtgactgtgtacacttgttgattatgacagtgaacttcaaaatagat

SEQ ID NO: 176660 - DNA, 588 bp, Cannabis indica
cgaatcaaaatacatgggtttgggctttgctatgaaaataggatgggtcgatttgtatacacttgtttcatatttattgaaaactaacaacttatttttttaaattaaaaatactagatccattattttcattttattttatcattagaatttatcaaaagaactattcaatatttttccatagatacaataattgaaactttgaagcttgttttgtttagcaatttataaaactagatttagttatactcaagcattgaactgtatcatttttattttaaaagtaagtgtttattttatatttattctattatcttcattttcgcattgggataattaaaatattgaatttggtttataatatatatttatccatgtttatacatttttctaataaaattatatcattttttattttcttttcagctattttgaattaaaaattgatgcttttttatttttacacttcaaatcagttttttttgtatttttacagaattctacatggaaatctctattgcaactagcgccgcaacttaaattgtaacaaaaaattgtatagaaacccctattgcaactagcgctgca

SEQ ID NO: 176661 - DNA, 603 bp, Cannabis indica
aggatttacatcaacatcattgttgataattgagcattttgtcggtgttgtattttggagaaagactatttatgatgatactaattacacttaattattatagcaatgcagtacgtacgtagcaatgactcttcgatttaatctcttagggcccgtcaactgtatttcccatacttgggtccatggatcatcctctcaaccacctatatatatatcgccccaaccattcatcaccttttaattttaaagccatcaatgatgatgattcagatgtgagtagatcataaatttggaggctagctacatttcattttgaataaaatgcaacatatataagaattatgatcaccggtgaaaaattggtgtcttattaaactaataactcaacacgctatttctcttaaatattatcaaccatatagatagtttttttcttccataaaatattctaaataaattgatgtgttatatatatttaaattaatttatggatataaatattactaattatgtggatgcccaaatcttttatttattactattaattgtaatcaacattcctcttttcttaatttccttttttttagtttcttaatattttac

SEQ ID NO: 176662 - DNA, 520 bp, Cannabis indica
ttatttatttatttattttgaggtggtgaacactaattaacaatacggcaaattataattggtagtaaaattttttcgaatcaaaataactcgttgtataagtatattttgccaaactatgaactgtaaaaatctaatcccgagctaaagtgccaaaccatattttatttatttgttgaaagatacaatataaatagagaattttttttttttaaatttacgaatttggttgatctggtagtttctatgtagattactatgtggattttgattgcgatttaagttgtttcgttagttgctatgtgagtttttatgtggattttcataaaaaatgcaaaaaaaaaaaaaaaaaaattaatttagtaagtgtaaaaataataataaaaaaaatacctatataaatatttaagtttaactctcagttacaattaaatgtttaaattagtttttgatggtaataatatttaaattatattctggaactttggtaagtaaattgttgttataaatgttaaagttc

SEQ ID NO: 176663 - DNA, 728 bp, Cannabis indica
gaagggtattttgggatttattcaaaagggttctattttaacaattacccatactatttgtactcctaaccaattatgcctttaaaaatgcataaaaaaaatcaaatttcccaataaaaaatttagtaaaatcctaataaaaaaattatgttaaaatataaaaaaaaattaaatttagtataatttatgacttaattatttcaaaataaaatacaactacatgggaagtgaagtttgtttcctagttctacaatgcacccctttaaaagtaatgcactgatgtatcttatctgtttcagcatccaacagaaatttttaatttatttttttttttcatgattgtgtacgttgcagttatttaagatttcttgcaaaattttgaaacaatttaaaaaatttaatacgccgaaaacaaactcttttatttatacacatataaaataaattatttaaacattactttgtatattataaattattctaattttttaaaattttgtaaaatattttaaatatatataactataatatacatgatatgaagaagaattcgactaattttttttcctaaatactcaaacaaacagaaatgtatcagtacacttacattgtaaaatcactaattgttatattaacaatttttacaacttatatacatttatttgtaattatatatgttgatcgattctcgttaatatcttctaacaataaatatattgtaaataata

SEQ ID NO: 176664 - DNA, 651 bp, Cannabis indica
attaattccgctgcatcaatgtaaggttttcttaactttatatgtgtttaatttatcgttttagaaagttcatatttaggatgttaataaacatacttgtgagtagatctaagatcctggtaaaataatttccaaacaataaactgttcaatttggaggaatgggttgaaatatggagataccatttatatacgaatctaggtatttccatcttttagtttttaatcttttttctaaattttaaaatatttatttatgccataaaaaagtaaactcttataatttttctttgtgtaatttctactttttaaatgtaagatcattttgcagagtaaaatgaggaaattacattatacacccactttacctaacatgttttaattttacctttatttttatatttttttaagatatacccacatttatagatgatgtctctattataccttttaggttaatgcaaattatatactagatttaagtagaatgtgaaagtatattgggcaaccctctcacaaaaatgagtatatttcaatgaaatataatataaatatatttttaattaatagagtattactcaacttatcccactaaaattaaattgtaggaaattacatggtatacccactttactttacttgttttaatttt

SEQ ID NO: 176665 - DNA, 751 bp, Cannabis indica
ggtggcaaactgttctgctaggctttactaactctactagagaactttcttaattagcaaaggttaacgggagtaaaaaaaacctactcacaaactaatacctggacaaaaaggcaaaaaattgaaatgagtccaaagagaaatgcaattaataaatacattgtaagactttgaatgtgttttaacaatgaacctcatattaaaaaaaaccattctgaccaacaaaccaaaagagcagaagtacaatgggctaaatgagtaaattttcaatttaacttacaaaggcgacatatctatctcaaaagattctaagggaagaagaaaaggaatgagactgaatcagtaccaactgtccggagaaagataagtttccagtatgcacaaccaatagtcttatcctaaactgaatttttaaaataaaacagacaaatctgccatgaataacagcagatccatctatgtaatcaaccacaactgtttaaaaattcaaagcaatcatatcctgatctcttcaaatacacaaaatccataaaccaaagctaatgagattcccacaaaattacaattttttgaaacacactgtataattcgtacggaagactacaacttggagaagaaaataaaactagaaaaaaagactcatgtccataggctacatactttgacttttaagtataaagatccaagtaccaggatgaggcatctgaagcatttctttgtccctctttgcttctacatccaccatttttac

SEQ ID NO: 176666 - DNA, 567 bp, Cannabis indica
gacctactatatttcacgaccggccaaaactgtaacgtacttagcttaagagcggtgccggttaaattacaatcctatcataatctaacacttattaaaataaactaaatacattttttggtgggacaaaatgagatctctactccttctactccctatattagaaatgctaactagcaccctcctatgtgtcaatatcgttattggtccaactaagtatcgggtctcatataatttaatataatagtttttagagagtatcgctagccaatacgcaatgcaacatgtcgagaaggtgctagacatcactggtgcctaatagcaatgctcatagaatatataattttgtgtgtttcccgaaaatctgaggttgttgcatgttccctagctagtcggttccagcattatgtatgtatatataatataatgatggcatttccttaaatatataggtgacactatagtctatatatatgagatattcaatgtcaactaaaagtgtattaaatgacacaaaagtgcattcatgatcataacacttacacaacacaacacacttctttaata

SEQ ID NO: 176667 - DNA, 501 bp, Cannabis indica
ttcttcccttcccctttatgcgccattggtcccctgtatttttgcttcatttgccttggtctttaaggtaagagaccctttatttttctttgggttttattctctctatttttttattttaattcacggtatattatatctctctctattctgtgaagttggttgatttagtcttgaaggaggtaagagaccattttatttttctctagattttgtggagttgctttcctgattttgtgtaaagttactaacttagtattttaatgagatgattacgttatttatttaggagttttggtcctgttttatttagattatatttacactttattgtttacacataattttcagggtgcttcgtaaaaataccattaaacaaattcgtaaaaaaataattcataatttgtaaaaatatataatatatacaaggcacaaataaaatctaaaaataaacagatcaagatcaaaatcaaaaatcaaaaatcaaatgtaccaataaat

SEQ ID NO: 176668 - DNA, 780 bp, Cannabis indica
ggtttagcttaatggtactactcctctttgttttatgaggttccaagttcgaatcttcccgaaatatgacgattattatcataaagaccatgttggaatgttagagaacttggactctaaggaaaatgctatagaatgacaatctcatttactattaaacacaagaatgccttcctagaaccatatctatatttggtagaagttaacattttactttcttgatatttgctctacattagcttggagagagttctaatcatgttttagattattgggttttctagaaccataatcttcattccttaaatgtttacttcaattagaattagccaattagtcactttctcttttatgctttgtttgtgctttctgatttcattgggattcatcttttttcttcccaaagtgtcttctttagattagctttatgttgtttacctcttcttcttagcacaaagaccttctcatatgtacatcctctacttgggttacaacatatttcaagtgcttcaacataatataatatttactaccatggaagaagttttgaccatattatctcatttcaggggtgttcacagaacttatacaacaaatgcaagttaaaggtgtacaggtaagctttcatttaccctcagtcaataatcgacaatatcaattttaatatatgctttgcataattgtacttctcagttatttcaatgtaacttgaacccatatagttttcaacttttcagtttttattttcaatgaaacctgttaactgcaatgcacatcact

SEQ ID NO: 176669 - DNA, 621 bp, Cannabis indica
actaagctgaacctgtcaagatgagacaaaagaaaaaacaattagatttaaactatccaccaaatagatgaccagagcaaacacaatttgccacacagaacatctggatcttacaattaccactttggccctttgcaaatgccatctgcaagcaaccattgatgccaaattaaatctcaattaaggaattgaaaaatgttagaaaatctactcataatatttcactgtgtcctcgttatacaattaagagcaagggttggaaatgaacctttttttgtttttcaagatctcttgttaaaaagtggtgtcctatattgtgttcaccaatcaaaatttaacacattcattaatttttatttataaaaaattaaacctctaataaagtcaataaaaatttaacacattcattaatttttatttataaaaaattaaacctctaataaagtcaataaaagtagttatcatatttaatataaattagattagttgatgtgtcaaactttgatagatttaacacagtatgagacactaaattttaattatgagattttaattcttgagaggcatatgcaatgtaagcgtgataaaaaaacttgcatacgttgcatttgttgtttgaac

SEQ ID NO: 176670 - DNA, 836 bp, Cannabis indica
actgtagcgtagagtaacaagagaaaataataacgttagtgttactaaaacatagtgaattatagaaatagatatgaagagagaggagagaagaaaagaaagaattcgttaggaagaaacaagaagcatatatagaagaggatagaagaatggggatggatgaggggtaaattgtttgggagttggaggttatggctctgtttccgaagcgattatccctggcgaagctcgttctagaccaccacatttaaagacttcccgtcacttttggctgtaaaatctgctcatccaggttctcttatgccgacctcataatggaaaaggttgtttatacgtctttggggtccagtcctcacatcctcaagttctacggccacgatcatacattttctgaagaacatgatggaaactatggcggaatcatttataacctgtttttggagaatgccttgggtggatcattgagtggtttgattgagagaacaaaggttgggttgcttgagtctcaagcaagagtacacactcgctctattcttaaaggattggagttgatacaccataagggttttgtccactgcgatataaaaccatccaacattttgatggttcattgtgatgatgataatcctcatggtgtggatggtttggttgccaaaattgctgattttggtctctctaagagaagtaatgatgattttgagaaacgagtgagaggtacttcgttgtatctgtctcctgagagtgtttgcgaagaaactcaagaccaggcctctgacatttgggctcttgggtgtgttgttcttgagatgttgactggaagtacgccatgggatgta

SEQ ID NO: 176671 - DNA, 989 bp, Cannabis indica
attaatttgtcaatgcaatacatatttttaattttccctccctcatctagattaaaataatattaaaaatttatagcttttctcaagtattttctcaaaaaaaactctagtgttgaacataacaattataaccacgtgtgtgatggtacgtaattactaatttgtatattttctttttaaattattattttttaggtatttatagtaatttcagtgcatatataaataaattacatatccatatatatatatatattatatgattgtgtataacataatacaaagaactttttataaattttagaaggtttcaaataattaatagcagtttttttttttacactttaaaagtattttttttttaatatatacttttataaaaattttatataaaaattcatatagcaataatagagtaacctaaatcgcaattgaaatttatatagcaacctacataaaaacatccggagtaaccaccagaacaacccaaaccataaatttaaaaaaaaagttaaaaaataatatatcggataattttcctcaattatattgtctaaaattataatttaactaattaattgtatgtttaatttttttttttttaatatttataagtgtaaaataaattatttgaatattattttagtatattctaaattattaatttgcagaaatcagtgtaactacattctttattttcatgtaaaatagagttacaattatttatagaaaatattaaaaatatcaataaataatgattaaaagtaattaatactatctttctgaaagaaaaaagaagcaatcaatactatagtattacttaccgtgactgttatttctaatatacgtttgtaatcaattataacaaaaattatatttttttgattttcataaaacaaaatatatggtttttaatactgtaaattatttcaaaattttataagtaactttacaaagtaaattacttgaactaaaaattaacttcaaac

SEQ ID NO: 176672 - DNA, 373 bp, Cannabis indica
aaaaaaaaaaaaactcccaaaaaatatttaacaaaaaattaagatttaagcgttaatttagatatatatgtagaaaagatgagtatttttttttaaaaaaaaatacttataaattgatgtatcaactaatttttttttttaccgtgcttttttttaagaaaaaatctttctaccatgataaacataattaaaaaaaaaactcccaaaaaataattagaaaaaaattaaaaaatagataaataggttttaaataattaagaaaaatgaaaaaaaaatagataaacaggttttaagccattttaaagggccacgtcaagtttattgaatcacagacttttattataggacatttatatatatatatatatatata

SEQ ID NO: 176673 - DNA, 689 bp, Cannabis indica
agtgaagaacccacatttgggtgcctaaaacctttgctcttgtactccacaagtccacaccatacctaatctaagcctgactgtattccatagttagtacctaaatgcaaaccactcacgtgtggctatactgacctaatctatcaagaatatgcaacctattctgttctaatcagataaaagaaatatcagttttactgaaaatactaaaagttcttagacaacaaaactcttacatccatcttagcacttactccaattaattattgaaattgttcaactgtcaccaggacatccaccgtcaagattcttatgcaagtaatagctctgttttgggtaaagagacaagcactagcagacaagtattcttttggtcattacattagaaccaccaaatgatcccctaattttttaatacagacaaaatatcatgacgaataaataaagaatttatgttcttaaactaaaaggtaggcaccatacaaatttttaagcaaatgaactagtgtagtgttacaaaggattttctcaaattcgtgccgccaactgaacaaagtcaatgtcaactagatgcctataaaaatgtttttctaagagaatattaaaattataataccaacctcagcatctactacaaatatatattttaatgagtcaaagatattataaaacgttcaataataataata

SEQ ID NO: 176674 - DNA, 530 bp, Cannabis indica
tatgtatagaacttgacttcattatacatgactcattaattatttattaagttttgtaagtttgtgaattgttaagcaaacgtgtgcgaagctgcattttccgtttaatgcatctgctcctacgtgttcgatctcctatatgtgtctgtgtcactgaacatttacttcttctaactgatctttctcgtttcaatccaagtaagacatcactttgtttctgttgttttggatgtattatatatggatatcattgcattcaatgagctatagctatatacatatagactgtctatatataaatatagctctaggttaatttattaattggcccgtttcttttcttctattcttcctttttctttttatatacttatataataattaagaacaaagatccttttggttgattggttcttcattcataccaatgtgtgatttcatcatagctgtgattttttttttcttttaccaaaagttttattgctgtgtagtctttcattttcttcttcttcttcttcttcttcttcttc

SEQ ID NO: 176675 - DNA, 1130 bp, Cannabis indica
gtatatcttagttgtaattagattttttttatatatataaatattatgggtgttttttagagaaatattatgggtgcacttagatgttacttataaatgaatattattagaattttgaattttatatttaattttactatttaattaaaaaaattattttacattatataaaaatataataatgaatgtaaatatatttttaatataaatgtaaaaaattatatatatttttttaattaaataatcaaattaagcatgaaaattaaaatttctttctgttattaatagaacaaagtctaattgttgattgttatagcaatagtagttattaattaatttctaaaaatgtatatttttagaactgatatttatagttaatttttggggaattatctcatatactatttttttaaccttttttttctttcaaatttacggtttgtgtttataaagtggttgtagcgctagttacaataggagttgttatatgattttttgttacaatttatgttacaatactagttgcaatagaagtttctatgtagaattccgtaaaaatacaaaaatatatatatatattttaaagtgtaaaaaataaaaaaaaataaaaaaaaactaccttaatttttcggtaattatcaaaagtggtccatatctatatacaagtcaaaggttatataatttatcatccaattcaacaaagttattatttgaatttttttttttggaaagaaaagttgcaacttttatcaatcaaacatcctacatcaaggatttcacaccataagaaggtcatccaccaaatacaatcaacatgtaaataggagtccaattttagcaaaaaaaaattgacaactctataaaagtggctttaaataagatgataaacttatataagtcaaagatcatgtagtctacccaccattcaattcaacaagagatagatattttttttcgtaattaagtaaataatcatagaaactcaatttttttatatttattggtccatttatattaattaatttctaaaaagttaataattctaaaattgatagggttgttttattgtagtatataaaaaacaacataattacaaaaaaaaatctaaaaaaaaaaaataaaaataataa

SEQ ID NO: 176676 - DNA, 1025 bp, Cannabis indica
tataataatgaatgtaaatatattttaatataaatgtaaaaattatatatatttttttaattaaataatcaaattaagcatagaaaattaaatttctttctgttattaatagaacaaagtctaattgttgattgttatagcaatagtagttattaattaatttctaaaaatgtatatttttagaactgatatttatagttaatttttggggaattatctcatatactattttttaaccgtttttttctttcaaatttacggtttgtgtttataaagtggttgtagcgctagttacaataggagttgttatatgattttttgttacaatttatgttacaatactagttgcaatagaagtttctatgtagaattccgtaaaatacaaaatatatatatatattttaaagtgtaaaataaaaaaataaaaaaaactccttaatttttcggtaattatcaaaagtggtccatatctatatacaagtcaaaggttatataatttatcatccaattcaacaaagttattatttgtattttttttttggaaagaaaagttgcaacttttatcaatcaacatcctgcaacatcaaggatttcacaccataagaaggtcatccaccaaatacaatcaacatgtaaataggagtccaattttagcaaaaaaaattgacaactctataaaagtggctttgaataataagatgataaacttatataagtcaaagaatattatgtagtctacccaccattcaatgcaacaagatagattatttttttttggtaattaagtaaaattaatcatagaaactcaatttttttattattattggccatttatatcaattaatttctaaaagttaataattctaaaattgatagtgttgtttttattagtgtaatataaaaacaacataattacaaaaaaaaatataaaaaaaaattaaaaatatatacatttgaagatatatttacataaaatcacacaaattgatcatcaaataatattatgtgttaatgactaaacttac

SEQ ID NO: 176677 - DNA, 718 bp, Cannabis indica
gatacttctgtaattcgaagtccagctaacaagtttcatatctacttcgtatttgatgcttggaatttgaatagcaatgtgtagtggaatctaaactgcctgggtgataccaagatgattcctgcccccgagccattttcgtttgagaatccatctacaaatagtttccaaagctcttgtacagaaccttgttccattccttcatcaacatttatcccgtcgattaaggagtctactaatgcttgtcccgtgattgttgttcagagatgataggtgattttaagttatcccaattcaatggacaactttattaatcgacctcaagcatcgggctttgaaaaaacttgtctcgatgactggttaataaggatttgtataggttgtgatacaaatttttatatattgtttaaaatgagatgcacatttacatagttcaacaaaatttattttcctacatctacggtaacaaggagttaggactgcatttttagtaatggaatgagattagaaaatcaagagaaaatatacttatttttgtacaacatgatttaatcttaggtatgtgcgtgagtgagtcttaaaaagtaaataaagagacttatgaataggtagtaggctgcttggtatacgagcttagtaaaataagcagcttaatataatttaaagttatagcttggtagaagggggtatcttggtgaattaagcaagtcgatgtatt

SEQ ID NO: 176678 - DNA, 729 bp, Cannabis indica
atatttcagtatccatttcttcttctgtctctcagatctttgttatatatatgtatattaatggtcttggatataaatttttgagtgagctttggtgtttatatatagatgattattgaagtagagattttttttttttttccaaaatccacattatttgacctttatttattatttttttcgaaaaatcattaattttcattgactttgaacacttctacattttctaatttcaattgtatactgttatatcaatattggcgtccttatatatatccgataacacgcaaggaattaattatgtatattaatatataataatttaatataaattatgtgtttgttataatgttattatacaaaatgaggtgagaaaattttaaattttttaaaaagataaaagataagtagaaaaaaaaaaagataatattttctctattttttctttgttaattaatttttgaaattttcaaggattaagcatatgtgtttaaagtcctaattcaattatgaatgcttgaagaacaaataatacaggtgcctaagaatgtcaaaattgatgctcatctggtagtttcaagcgaaacgggctcggttcacgtgtaaagttgacttgggggccaaatgctaacccaaaaaattttcctggtgaagtagacatcaatgattgacatgtggcatggaggatgacgtcatgaagttgagtagacctgagtcatagcagtcgac

SEQ ID NO: 176679 - DNA, 808 bp, Cannabis indica
attggtttgaagcgggtttggcatcgtggaatacggctgaagctcttgaggctagtatggtttgttggtcaatttggactcatcgtaacgatttggtctggaacttcaaacaccctgatgcgggggaggtagtggcactggctcagttaaattatgttgattggtttaatgctcaaaaacttaatgtcacagatgtaagcttaagcgggccaactgcactacctgtggagcaatggacaacacctgatttcccttttgtcaaagttaatgtggatggtgcactttttgccgaccaagggcggtatggtctgggtttgattgcaaggtctgctgcgggttgggttttgggggccagaagcttatctagagaaggtgctttgcaacctcatattgttgaagccattggaatcaaggaagctctctcttggagtaaagcaaatggatggtcacatgttgtcgttgagtcggattgtttaagggtcattagtgatttgcaaaagttcaaaaatatggcttctccttatggccatattctttatgattgtatgactttggttgctcattttgatattgtttcttttatttttgctaaacggtctgctaataaggttgcgcatgctttgacacgatcttctctttctgaggctgaccgtacttttagtagagactctttaccttttgtttttgcatcctggttttggatgattagttaatgaaatttaccattataaaaaaaaaaatctaaattggatgattaatatagatagttagtttttaatatttagatatatataatttaaataaaata

SEQ ID NO: 176680 - DNA, 634 bp, Cannabis indica
agagtgaagattaaaattgtaattgcgaatagcttagatggaaaaataatagactccttttcctttccctttttttttttctaattatttgtttatttttgaaataacaaaaaagaaacaaattaaaataaattccctttattgaataaaaaccaaatataagaagaattttatcttaagtttttgaatttagtaagaatataacaaacacccatagattttttaaaaaaaaaaacacgcatagattaaagacaactgtttgagaaatttgggtgcaaaaactgtgaataggggagaaaagggtttctacgttgagaaagaagaggggtacccgaagaatgattgtttagagatcgatacctccttttacggtaagtttcttggatttttttcttccaatttttttttttcattttaaaacaagtttgccaaaaattactctttgaagagagagaccaagtacatataacattgagttgaaatgctaaaagtgtcttcataactcgtaagagtccaaattctctttaactctttagtctttctttgttttctataataaataaataataaaaaaaaaaacttgttggtttggttcgttaaagccattttccagctaaacgagcccaggaaaaca

SEQ ID NO: 176681 - DNA, 563 bp, Cannabis indica
tctttcaattttccggcttctttcctcctaagcctgagaaaaccaccaatcaaatgattgattatgatagcacaactcaaatatgggatgcactccatgagtattacaatgctcttaacactatccaaagctaagatcttataatcagtacaaactctaatataggtctattgcctatgttttcctaggcaacatcatgtcacacaagggctccaaaagcctttccaaagataaaagactttacatctttcaaatgagtgtttgatgagtttaattttccttttgttttctctactacatcatctgtttttgttgcttgtctctgtccctcttctccctctggaattccaccaattgttctccatccaaatcaccccttctcttgttatgcttggtccaattgttacatcacatatcgccccacctaactctcctcatctccacccctactcctccttaaattccatcaactcttgacaaccttgtcaattttctagttgaatatgcaacttccttgcttcaatctgcacctatcactaatgtttctaatgttgatttatatg

SEQ ID NO: 176682 - DNA, 637 bp, Cannabis indica
  modified_base (188)..(188): a, c, t, g, unknown or other
atttttttccttgtattttctttgttattttactgaaagctatgtatgattgttgtttttgttcttttttatttgaaaatttccttccttttgtattgttagtacttttttcactgggtatggcaaaaaatataattttgaaattattatttagctttttattttcaaggtttttttttttttttttnttttttttttgaagttgacagcttttgtggttttgcaatctctaagttttgatttttatttaataataatgtattacaaattaccctttgtgttgtattggtactttctttagtgggtgtggcaaaaaattaatttttgaatattattatctttgtatttcaagttcctttgtatgttgaaactaggggtgttcaataaaatttacaaaccgcccaacccgaataaaccgcccaaaccaaaccgaataaaccgataaaaaatataacccgaaataatacaataaaaatccaaaccgcccaatgaatatattgggtggtttacaaattattctaaaccgcccaattaacccgaataaaccgaattaaaccgatttatatattttttttttataaaaagtgtatatattatatcacataaattacatttattagttaaactattttgtatt

SEQ ID NO: 176683 - DNA, 604 bp, Cannabis indica
gttgaatagaggtggaaaaaaatgatatttttgacaatatttgacgaatgattcaaagactgcaatttttttttccaattgaagtaaaaagctctatacctttataccaatacccttttagatatttatagaagtctgatgaagttcgaatttctctcttcagatcagaacaaaaactgaaaaaagtgctttcctaatgatatctcaatctatggctagcttttttttttgttgtttttgtttagttggaagcacattcgagcaagttattcctttccacttttgcagaattcactaatccgtatgggatccgatcagccagcccggagaattcgaaatcctcatccgatgatgaattatctcaatttggcacagcacgagattaccatgattttgatatgcaaaatgatctgttttggtataacgagaaagatgatggcaacttcatgactccctctttcgaaggcccggacttctttggttgtcctagtgaggataagttcataatgacttcagacatggataggcagtgggagaacccattggatctgaataatcattctaaagaatttctatcagatatagtttatgccattctagtatg

SEQ ID NO: 176684 - DNA, 786 bp, Cannabis indica
attaacctcttttttaaagtatattatttttacctatttttttaaatattgtacaaattttgcccttgtcacttcaagataccttccatgtgactcttttatgtcagggtatcttgggtacaatacgtaaaaaaataggcatgtttcaattaaataaaaattagaggtaaatttagttaattaattaattaaaaaagcatttttcaacttacctgcctatcggcaatgttgtcttcaatgattttagttttaattgggaattaaaacctctatatttaatatatatgcacacataattattattatgaggttttatttaaaaaaaaatgatatgtggactcataatttatatatggttaattagaatttttgtcccttgaaatttgacatgtactaaaatatacctcttgaacttttaaggtcgttaaaaatgctccctaaactattgagattgttggatttaaggacttttgtctaatttcatttaattttactattctagtgattatttatgtaaaaatatgctctccagactttaatatctaccaaatcatgtcctttaaactttgacatgtactaaattatgcccctgaactttcatccatgttagacttttttactaaaattaaaaaaagtccttaaatctaacaatttcaataattcatggacatttttaacgatattaaaagttcaaaaaaacataatttggtactatgtcaaatttaaggtggcaaaaatctatattagcctttatatatctattttctaaataaaatgtggctatat

SEQ ID NO: 176685 - DNA, 860 bp, Cannabis indica
aggcatttcctttacctacctagggtttcgtactaaacatgctgcaagggcaggccttacaacatgacgatctgatcgttggttggtaagaagctcctcatcgtgtgctatacagctgcaataaaggactccacgtgaacaaggacacacatcacccaaaagtttcaccttgaaaatatgttgcctagataatttgttggacaaaaagggggttttagaggcacatacacgcaatactatggtctgatgtaggggacttggttgccatcattttaccttttaccaccttggatagagcttttgtgattctgtgaattctggtcttactgaacggatgtatttgtagcaatggtatgttgttggttctttttctacccaactctgtccacatgctgaactgcttcttcgagctttgtaaatccatctgtttggtccaagaattctaccattgaccctatagttagtcttttatgtctttttacaattcttctaaaggctcaatacatcttaggattgcagctagcctcccttccttggttaaccctttcacttttgtagctgcataatgaatttgttgatataaactctcaggggctgtttggtatgcaattttccttacttaggaatgagatatgaagtcaaaccaatgtttggtattgctttttaaattttttagctgagtgttcatttactatggggtcaagttgactttcacagagctaatatccacctctccaaaatagttgagttttatttgcctaaggaaagactcaccttaaaaaaaactctcattttgtgtgaaagtatctcttcattcctttgctaacacaaggtatctcgctctctctctctctctctct

SEQ ID NO: 176686 - DNA, 726 bp, Cannabis indica
gtaaataaaattctatattgtcaaagattacaattctataattatagtggaataataatagaattaataaactagactattttatttgtgagacttaatagtaattaagtatttattgaagtttcgaaatataggtctatggtccatatcacatctatacaacattgtaaaggagaagatataatttgtaagatgaattgagaaagaattaatttctaagagaaataattcttgaggacaaaatagtaattttgtataaattattattttgtataattatgttaattatgaattgaataattaaaatagaatttaaatatttagttttatttaataaaagtatattaattagttaaatataatattattgctaaataatattatgagagagaaacttattattttagtgaaaataataattattaatccaagttaaataagagattaatgaaaattaatcaattattaataattacaaataataaatcttatttaaaagaaaaaattgaggaatcaattttgggttaaaaaatatggggtcggactaattgaattttgatattgagttactgaaattatatttgaattaaattttaaattaaatattatatatattttttattttaaaaaattaaatatttttttttttatgtaaatactctatatgatatattaagtaatacataaaaagaagactgatcagttgagaaaatatagagttttctc

SEQ ID NO: 176687 - DNA, 835 bp, Cannabis indica
attcaatttacggttttatattggtataagttgtttaatattataccgatataatattcaataattagaaaatatatcgggtttcgcatacggttatattttataagtgataattaagttataaaattatattaaatttaaatttttaattatatttttttaataatatattttactatttttttacttaataaataatcatttttatttgattaacttattataaatataaatttatattatttcaaaattattaatattactgtattttacattattacatttaaaaatattgtagatgatcacatcaccggcgctttgcatattatttaaatttttatctcataatataaatcaaagttccataaaaaaatttaaaaaaatacatgggagttattaaatctcaatcccgtctataactctatattgagccctatctcctaatgctcttattaaatttaatttatttcttatacctatccaaagattataaacttgacttaattataaaaatatttaatacatacatacttttttattaaattttatactacatcatattttattgtatgtaatataatttacaaatttgaattttatacaaactacaattttttttacaattaataataattaatagtacattaatttaattcatataaataataatatattaaatgtataaaattaaaataaaaaatgaagcaaaatcataaataagtttgaaaggatttttctgcttttagtatatcaaatcaaactatatatattatggtctaatcaaatttaaaagtatatcaaatatgaattcataactaaaaaaaaaaaaaaaaac

SEQ ID NO: 176688 - DNA, 795 bp, Cannabis indica
tcttttttttaagttctaaaggagttttttatagggtataaataagactttttatggttcgtttttagaactttttagacttatgtttttgagagagcaactcacacaatgattgcttctatactaattgtttattcattctaagtttcttttcttattttttaatcttttactcttgattgtgatttcgatttataatgattattttttaatttgaatgctatgaatattgtgaatttttgttaggtgtacaactaattaaaattttgtattattctattatcatcttgaaattacttctcacctactagtttaggattctaagtagagtgataatttgcaactaatagtaatatcaaatgtgtctaattgattgtgatgaaaaatagaacctaagttaaatgaattatatgcttcattgatatatatctatattaacttatctccatagaaattgatggtttttatagaataaatagattgcatgcttcgtggatctattgcttagtaaagagatttaatattattgagtattttgccttgattaattgtaataaggagattgaaaaaattggccgcttcagcgttttctacagaattaataatttaattgagaaattaaaataatttttattattattgatcttgaatgattgttaaggatggagattggcgcttagctatttttaatagcctattatctatctttatttgctttctatttatgttatttaatctttatattaaaagcctcatttttaattgttagttataattcttgaataataaattaat

SEQ ID NO: 176689 - DNA, 572 bp, Cannabis indica
ataatataagaaaaattataagagtttactcttttataacataaataaataatactatatagggatatggtttttttacaagcttttttatgtcatatttttgtaaaaaaaagatgaaaatcttatatttataaaacaataataagttgggaaattactcctatatactatttttttaacttttttttttcttccaaatttatgatttaggtttctaaagtgctttctccggtggtttctatgtggattgctacacgatttttggttgcgatttaggttgctccgttagttgcaataggaatttctatatagaattcagtaaaaaatgtaaaaaaaaaaaaaaaaaaaaaaaaaaaaaaaaaaaaccaagttttagaagtgtaaaaaataaaaaaaaaataaaaaaaaaccaataataagtttagccgaaaaagctaccagcactgaaaaagtcactggtgccggaaaagtcactgaaaagttattgacgccggaaatttgtcgaaaaaatcaccgtcgttggaaaaatcatcgacaaagtcactgtcgccgaaaagtcactggaaaagtca

SEQ ID NO: 176690 - DNA, 926 bp, Cannabis indica
agccaaacattttgcctgaacaactgaaaaacaacctgcaaaaaagaaaaataccaacaaaaataacatcaatttctaaaaaactaagaaaagataaattaacaatattcattctatataaaaagagaaaacttatcttatcaaatgcagatgatgccagcattaaatcctggacactacggactacttcaaacaattttataattaaataactcaataactttacaactctactaataaccaagagacaaaattctctaataactaatactactaatagtcataataaaatctaacataataagctaatacaacaaaaactaacacctttaataataataataataataataataataataataataataataataataataataatttatttttaaaaaagactcataaaaatagcaatataattactctcattattttagttaatatgataataatattttcaaaacaatcataataatagttaaatacttaaaaaaaaataattgaaataaaataactgttcaaaaaacttactggagtttaattaaaaaattgaaaaaacattaagaacgtatgtgactaaccacatcttcaacaaatataataaaattaaataataactttattatctaaaaaaaaaactctcattattttatgataagtgttacattacaatttgaaaggaaataataataataataataataataatttttcaaaaaaaaataataataactgttctactaaccgtgttgtataaaaaacatagaaccgcataataaacttgatgagcaagatttttttttattttattttttctttcttttgaatggagaattatttggaggaagatacagaccgcgacggtacaatccatagttatgttgaaaattgtggaattgagggaagccatgtgagaagat

SEQ ID NO: 176691 - DNA, 693 bp, Cannabis indica
ggactgactgtctatttaaacagcatctgacttttctgtttggaaaaattttctatttattgacctgattgtttcttagttgtttgatcacgacctagagggattctaaagtgtataaatacaccatcaagacgttgctttcctttatctctcttggtgtatcatgcctaaaattactttcaaatttagagagagtttctttgttgtgtgaagaacttgagtccaacaagttcttagtattctattattgtgttattctatattgtttcttgttgaaattgtgcaggttgaacaccttaaatatcattcatcaagatttgggagaagtcttgtttgtgagacactttttgggagaaaaagtgcaaattatagacactcttcgggagaaagattgcaagtgagtcacttttaagacgaagtgtgcaagtgctactatttgaagggagttcaaggtctcgacacgtcaaaaatttgatttgaagaatagattacaacagttgcgataaattcaaagagagagtctgtatttgtataagtcaatttggttttataatctcttgagattcatctaataaattttatctttgggcgtggcccggtggacatataaaatattgtgtcattttattttctacaattttactttttacagtatatttctttctgttagattttgtatctgatagaacatag

SEQ ID NO: 176692 - DNA, 642 bp, Cannabis indica
taattaagaaaagtcagtcagtcgggccaatatataacaccgcaatacatatttataaatactaaggagaggttagcgtgagtagttttttttgtttcattttatttatatttttgtttgcttaatttttattttataaattattgtgacaaaaatttatataatttagtttttacattttaattgtagtgtaaattacaaatataagttttattattttattagaaatacaaaagtaagaacaaactgttattccgaaattaaaaacaatgaaactggaacgaattaccgatagaaaaatctggctgagtcgcggacaatgtcgttttctttaagacgttttgcagctctgcctgaagtgtgcacggcagtctagcaaccacggcgttcccaggataaaacaacctctctatacgtacgatacgttctgcaccgaactgtatcgctctattacaccctaaaatttgctctaagaaaaatcgtaaagaagaaagaaaagatttttttaatgtttgaaaagatattttcttacgttgttctgatacgacttatataaaagtcggtccaagaataaacggtaatgttatcgttcgtggagaagttggatcgagggagtaaaaagtgaatcattgactgatcgcg

SEQ ID NO: 176693 - DNA, 828 bp, Cannabis indica
ccccccccacccccccccccaaaaaaaaaaaaagtaatatgtgagtttagtgatggaattttgacccacagagacaatatccactctgaatggggcgaggattattcgccttaataggtaatggggcgggatggggtgaaattttatatacccaaagcgagtttgaggtaggttcatgagtgatactacccaccccatattcgaccaagatatataatttacaaacttttcatatagttttctaattattacatattaaagttattgactatacttataaatttgactattaatatttcctattttatcgtgtaataatagctttttaataggtagaatgcttatttattttaaaattagtatgttattttttattttcattttaattacattacattattttcttataattattgttattttaatcttaatgggtacccaatggggattctcctatcctgaacccatcagagattaagcgaggtgggggagagaatgggggcataaatggaaaataagaacggggttgggagatgcattacccgcttattacccacctaatttccatccctaatgtgagttggacttttttgcaaaaagcccagaaacagaacaaaatcaataaacaccttatatacttcgaacaacactaagggaacctttgaagaaaatgaccaaaccatcaacaaaacagagattaacaagtttaaagctcttgcagagaggatgaaatttaaaaaccttcattgaaagaagcttgttgcagtcgtctagttgaataatccaaatccaacataaatagtaagaataggtattggatcacctagt

SEQ ID NO: 176694 - DNA, 611 bp, Cannabis indica
tacaaaagttttgaaatgaagagagattcttatataaagttttctatgtgttgtctttattattatttatttttggtaaaaccaaagagaaagcttaaagtttcgtttttttttttttgttcttgtttatttatttgaaattcaaatgggaaaaatggttcttttttctgttggtgaagaaagaataataaaggttaaaaaaaaggaagtattgtggtgtgggttagatttagagtctgacagaagtaatagtcacctgatttaacagaaaaattcacaaaaatggctttgaatatagaaatgggtatccatacatatattgatattttcttgacttgaaaaccaagattaatagaaatgaattcaaaccattttcaatttcagagcatggcgcctttttattattaatgccccacgtgaccatcatgtgaccctaccactcaattactattatttattattattagagctacaccaaaccataaatgatgacaataaactcatggatctgaattaggggtgataattcaggtcacgatatgaacccgacttaagatttttttacgggttagaaaagagtcgtgttcgtatcatttaaaatacattattaa

SEQ ID NO: 176695 - DNA, 812 bp, Cannabis indica
ctcaattgatactttcattcattcaacacacaggctggctctcagatcagatttgaattaaaaaagatactctgtttctgcagtaatatgaataaaccaatttactagacatgacataactcaattttaatataaacaaatatataaaagtcatcaatttgcagagtatggacaaactaatgtgtaagatagtagttagttagtgttagatgttgttatgttgtttcaaagctttttgtggctacttgcatggcctttttattgtttagtacatatgtgctatgtactcctgtcaatgtcatatcaaaattcaaacaatatctatctgagccagccaacacacttctggcaaaatctagttttgtcaagaaacaatgacattttctactcactactaccccctgttttttatgtccaagtgagattctaaatgaatacaagtgtttgtcaagtttatgtgtaatttatatgcactatactaataaaggtttacttaagtctagttagccaaatatttgtatatgagcattgctattaagaacttaacgtttggccaatagatggtaattttttataataattgttaaactaaaatatgtaataccgaatacttaataatactaataatgatatgataccaaaccttaacagcttgaacaatagtgaaacaaccactttgaaccaaaatattgccttttcaagattgttacaattggtcactatcttaactaaaaacttgaaatttattgtgtaattattctctagggggtcccgaaaagctaagaaaaagataatttcagacctttgaatag

SEQ ID NO: 176696 - DNA, 794 bp, Cannabis indica
tttaataatttatttaaaaattatatacaaacgagtttaaaatctaataaaaataataaaaaaaattattataaaactaataaagaatgctctatagattaaggcgttacaacttggtatcagagcaatcattaaaggtcctgaagactggtcgactatgtacattcgctgcgaggacaggtcgacttatggtatagtaagtgtttatattattttctattggattacctgcctaggctattataaagtatgttggaaagtagcatattgataattttgataggaatatgtgtatggtatatgcatatagatattgatattcgtttgagttttaaatggtttgaagatgtggactaaatgtgtgataagttatacagtaagggcaatcaaataatctgattaacaagctatttgggctcggcgcaaacggtaagaaagagaattctttattgccataatgttgggaacatgtaaattctgctatgcaagatatgattagacaacaaggaaaaatagatctgagatctgaaagaacaataggctcatcttgtattcattcttgtattaccgacacttcctgttgtaccactatatgtgatggaatatatgaagtcaacttactagtagatcaggaagcaaaaactaaatgaaaccaccaattatgggacaggataaaaaagtttaagggtggtcaagatagcagttaaggtgagaataagaaattgtgaccttatcctgagtgttcaagatgtaaaaggcgcatttgaaccattgtagagccatatctttgtttt

SEQ ID NO: 176697 - DNA, 756 bp, Cannabis indica
attgcttataggatttttctaactattctagtcaccgttgcccatgcagaacggagtttttccaaattgaccttgatcaaatcttatctccgttcaaccatgtctcaagaaagattaagcggtttagctatgttatccattgaacatgatttagttgcaaaacttgatcatgtaaatttaattaatacttttgcatctaaaaatgcaagacgtataatatttaagtaatacattgaaatttataagtttatgtgatggtttggaatgtatttatattactaaatattagtttaattttatttaaaattacatatatataaaaaaaatacatatacaaaagggctcatttttcttaatttgctaaaaccgtcttgggcccatattttttcagagccggccctgcctgttggacacaaccgagttccaaatttttatattctctattggccaacgttcatagcaaggataccacatatttcatttttctcaagtcagctagatctatttttcttttgttcttatcttagaccattagtatttttcttcaatgccaactaatatcctatggagtcacatagcaccactaatctccattttttatatacactgaatgtatctaccacacccaaagattatcatttttcatagctaagtcccaaacatacctgccaatagctgctatattccatctctcaatgtttcttgaacccaaccctccttttttagattttcacaacttttcccaagcaatttatc

SEQ ID NO: 176698 - DNA, 917 bp, Cannabis indica
tttttttttttttttaggttattaaaaaaagtgcatatatttttataatcaatggatgaagccaatagactggagagtgggtttttactatccgaagagagcaaaaaaaaagtttgatatttatgtcaaattaatatcttaattttatgtaaccaaaagttattgttaataacttttattgaatacaaacacatggttctattaatttataccttacatttacactatcaataaatataagggtatgtttagttaaggaaagagaattaattgtatggtattgagtaattctcatttgtttattaaactttgtaatgagaaaaattattggggcccacttaaattagagaaaaaagaaagagaaagattttctttctatttttatagagaatacatttctctcttctaacttaatttatttttatttttattttattaatgaaaaatttaaaaataaaaatatgcccttctaaaaattataattaaaaaacaattaagaatatcaatttagtcaaattttaatattttcgttatataaataaaataaaattattttgattttttttttttgcagacagttaataaacaacatttaattattttatattttaaactcattcatttatccattaattattctgattctagatataatttagtaaacgtgccataacattaatgacttataaagcttcttaacttttattaattagttttattaaaatttaagttaatttgatagttttttgttgtattaacttatattatagtgaccaatattaatgtgcttaaatagaagtatagatttttttagttagctgaagctgttgatgagtgaagctccctcctaattctataaatctatattatatcgaaatttttgtaagtatctgggtttattaatttttctaacaact

SEQ ID NO: 176699 - DNA, 564 bp, Cannabis indica
atgaatttttagtaaagtttttttttttagaataggtcatgatgagtttaaatagaatagaagagcatgttgaaggtgattcaagtactgacaatgggtgtagtagaaatgatgatgataatagtagtgataagtctgttgattctggagttggaagaacaaagagacaaagaaatgagagaagtaggagtaagagtatgagtaagagtaagacaagcaaggggaagatgagggagaaggggaagatagaaaaaaatgagagagttgagtcaagaaaaaaacgattgacatcagatgtgtgggatcattttaagatgataccaaagaaacatcccaatgacaaaccaagagctgcttgtaattattgtgggatagattatgcagcagacacaaaattaaatgggactagcacactgcgtaatcacatagaaaatcagtgtaagaagtacccactaagtgtaagagtggaagataagaaacaaaaactcttatcactcactaaaaaatctggtggggaagatactgaggagtgtgctagtagcttagttgcagtttcatggagca

SEQ ID NO: 176700 - DNA, 1355 bp, Cannabis indica
tatatatatatatatagacaacaaaaacaaacaaacaattaataagaaaagttaaaaaaagaaaaaattattagtctagtagtgttgggcaaaatggcctgtcggaaccatctctgtggctaggaatattgaagtgcctcaaccttccctcttgcttcttcatataaccctcacatagaaaagccatggagaacttatcttccacaaccctattcacatcatgaacaaacacatcggtctctccttcttctctgttcctggccatcatcccagctgtgtaaatggcagtcattcttccaggtgcctcatcatagtacccagttggagcatcaaccatgatcacatcccacttcgtctcgtacactaagctcggcaaccccttaagggctagctggcacatagagaatttgggatcgctgaccgccgtacactccggccccttccccacgtccatcaggttgtcagcctcatgcaccttgctctcgtacgtcacatggtacgattccagcgttgggaagcggcgtcggatttgctcgatccacgcctcgtcctcttcgaggaaaaccgtgcgccctccgtagttgagggcgctccacatgaggctgtcgtgccctagcccgaagacgaggaagttgcatggagacttcttctcaagaactctcgccgagacggatatttctctcagtgtttgttgtggagtgatggtggaggttgtgtagtggattagggtttgggctaaagaaggtggtatttttgtgcatgtttgagtatcatcatgaggagggcatttgctactactactgcgcctagcgttgttatcatttgtgggttctttggaatctaacgataagtttgatcttaagaagaagagaagcaaaaagcctaggaaaactccgacaaggagaaacttgaggttgagtgattgatgagctttcgttctcatgcttttatgatgatgaagaaaaggaaaaacagatatataacaatcaaaaactggattttgatattatgggtgtttctagctagctagggaaattaacgagactgtatataagatatttgttgaagatatattatagactactaaggagtaaatgatcggtttgcagatcaaaaagggatatagagatgtgagatgatgatatgagcgttgaaaaagtagcaattgagatatgatgtggtagtatgtacgtattatatatatatgcttaaacatcaaggaataatagtgatgacatggatctaacgtacggttagaagcttgatgaagacataagagctgctgtggtttttgtattaagcaaaagcttggttaggtagatctactagttcggtgaaagttttttttttttttt

SEQ ID NO: 176701 - DNA, 635 bp, Cannabis indica
acataagtacgaatagactagcttgaaagatgtgacacttaacaagctcgaaaagcacagtacgaaacaataaaaaaaaacctataacttaataattataataatatgtgtatttgttaattataaataagttaaaataataataaaatttatatataatattgaatattataattttataattaaaattattaaaaaatataaaactaaaactatatattaatttatttatagagtgaaataaaaaatttgagattttataagttaatattcaaactataataattttaattatttttttatatgagtgtttgtaaaatattatttaaaaattatataaatataattaaaactataaaatatgcataaagtttagtaagtaaaatatgaattcgagcccaaatatgaaaatgtgttggtctgtctaagaaaaataggtcgacacgcatgagcaaaacacgacataaattcgaatatggtacaaaaaatatcaagcttgcgggccgtgtttggcctacctcgtaaaaacagtaacacgacacgacacaatccatattttgagaagcacaaaaaattatgaaatcagaccggcacgatacgcacgaatttacaatactaataggaataggatatgc

SEQ ID NO: 176702 - DNA, 540 bp, Cannabis indica
tcgactctaatcgcaggtattacatttcaagtaggcattaccatgccagcagcagggaaatacaatactccaaagggcttggaaactttcgaaaagttcatgcaattcaattcccttgctttttcattgtcatcgtttaacatgttcttacacttcattgtgagtactctttccaacaagttcttacggggaagacaatataagaggtttattagtattgcaacaattcccataatattttcatctgttattgcatttatatgcgcctttagtatgggtacagaaacacttatgcacgagaagaaagagctaaatagtttcattgataagaattctaatatgtttaggggatatcttaaacacttcaccgaggggctgttgtactggctgcaatcatttatacatggtacaatagactatttgacttctcctaagtatagtactggtattgttttataacggtcctggttacttttcaatgtattattgttattgtttactgtgttttgctaattagttatgttattttgttatattatt

SEQ ID NO: 176703 - DNA, 718 bp, Cannabis indica
cacttatggcggaggaaaaccgttgttacaataaaataattctttgtattgatgctggcaataagacacccaatattaatattatcaatatctgtactgtactgtgtaagtgtgtattcatattactgctctatcgtgggataatttggtacacaactaccacttttaagtatgcattgaattaaacttgtctttattgcttgcatatggaaaaagctcttatatttaaatatagtatatcaaaaaattgtggacagcctatgcagctacttgtctgtaatacagatgaattcccattatctctttttaatacaatctcgtttcttattcaaataatagaaaaattgtggaggtattctttatcctgcgatttttccaatgctgatgtatttgccttgatttctaggtcctgtatatatccttacatagacatgaaggaggaaagttttatcctggtactggggctgctgatgaggtattggttcagttttgtattgtttattgttccaggatagtgataaagatagctgattactattctttactttaattaattaaactggttctctgcaaacaagttgtagttttctaagattattcatcagccacgtatacaatttaagaaaaatagagtgaccatatctgacttggagccttaatggaccttgacctggataggttatttcaggaattcattttgtcattttatctataattt

SEQ ID NO: 176704 - DNA, 1266 bp, Cannabis indica
tttaatctaacatatatgagagttgggaatagacttgttattggaataataagtagtgaaatcaaaataaagaagaaaaaagcatgaatggaagaaagagtcaaagaataagaagaggccatattctagttgatcattccttttcaagaagcaaacaagctagcattggtaatggtaaagcctaatcctagctatctccacacgcaagtattcacccatcacatcattattcaactttttgttggtatttacttacttttggttttgaccaatcattctctctccaatgtacaattatgtgaaatttgacaaaagggtgtacccactgtgttcgtgtttttgagagtatacattatagttacctcacaagttattgtaaccgataaaaattataatttcaaatttccaacccttattatgtggggttttagaactactacccctaagttaagaatggattatcattttagtccatgagttgttgttttttttttttctttcaagtaattagattcttaagtttgataaattgtggcaattagattcaatttattcacacaatttaaattttaacagaaagtaaatcaaattattgaaataaaaaaaaatcaacaaagaaacgtctttaatttaatatgcaagaagtacaataaaataatgtatttaaaatatttttaaataaaaacattctcaaggaaaaaaaaattaatttttaaatagtacaacaaaaatttgaaaaaaaaattacaaaaatatattaacattaaaaaaattatttttactatttgaacatttttatttacaaaaatactttttctataaacataataaactattttttttttgttttattgatagttgtattatagttgtaatggaattatttttttaattgtttttgattgtttaataatttatttatagttaatttatagttattggaaggttgattttttcttgctttttagttttttttttttttactttttagctgagcaaaatatatatttttttgtaattttaaaactttataaaaatatttttgtaataaaaaagtttaggtcgtataattatacaaaaaaaaaaaaattgaaaaattctctttctcactctctcctcttgctcaatatcattcacataaccactattgtagatgaattctgcagtgaaaaaaatgtaagcataatggtgattacttcgagactactactactattattatatttaaataaataaatagagatatatatccacacatcgctaatt

SEQ ID NO: 176705 - DNA, 686 bp, Cannabis indica
aacgattaaacccttacaaaattcaatatatttagtaagagtgataaatacttgtttaaaataaacacaaatattttataagggtattgtaaggtaacaagccctgatgatatactgttattggtaatgggtttattactgaattctatatattttgagtaaataaataatacgagaaactagtaaaaccgtctctaatagatgatgtaaaatatattaaaaaaaattatatttaatgtaaataaaattttaaaaaccgtaaaattatttaaaatttcatataactaaattttttgtaaacttttttattgtttttgttcatattttttaagaattatttaccgtaaatttttttaaacttcatataactatattttataatttttttaaaaaaatttttatatatatttttttagattattccatcaaaaaatctttgcaatatacttttttaattattattaaaatatttatttatacattacacagattctatcacattcacaggacccaacacactctcctatacactctatgaccacttgagttaacttcaaatacttttttggaatgtaatacaaatacaatgttctcaattctcaaatctcaattcagacaatgactttaaattaactaattaaaaaaaaatacattaatttattttatttttttcagcaagatgtggt

SEQ ID NO: 176706 - DNA, 510 bp, Cannabis indica
gcagtgatgaggatatgagatctatttttggaatatgcctatgttagacagatatggtcaaaactgttggtggagtttgacgtaagttgggctatgctaggatctatgacgctaatgatagttagcaaactgaatggtagtaaaaggagtacgaaactgtggagaacagcgttgctagcaactatttgggctgtttggttggagagaaatgccaagatcttcgaaggggttgaaaatgattcgttagttatttgggagaaagtgaagttttggacagctacttgggtgtttaaaactaaatattttgaggatttgtcctttttagatttatgtcaggagtggaaatcccttttgtagcggctttgttttctttgtctgttatatgcggtaggatgttgttagtccttcgtttttgtccgctagttttgtaaccacgggtttcctccgccatgagtgatggtttttaattcttttcgggttgggggcctagtctaagactttggcctctct

SEQ ID NO: 176707 - DNA, 914 bp, Cannabis indica
ttactcaactcattaaatctatatgtagtttctcctgtttacaatttttctttctctccttttgcagtccaagagttaaagttacttgatttaagtactagtccttaaaattaagcatacgtactagttactactactagcccttttcattgctttaaattacatcattgaaactactttcaattgcccaaaaggaaaaaattaaactttccaaaaagaaaaaaaaaataataaataactacaccactcatttattcatttgcatgtgcatgaaaataaactttcttccttttttctttctttctcatgccacgggacaacggaaagcggttttgccctttaattaattattgattcttctaactactatctacttctgaatttcatagtaaatgcaaggaaagttgggtgaaggtttttattgatatcaacttcataaataatgaatagttggcatgttgttatttggacctcttagcagttatttctttttatcaagttgatttttatttgtaattttgtttttgggttttttcagaaatatggaaaatgtggtagagtttacttttatatggtataaataaattgtcctgctttaaaacaaataatacaaaaaaatagaattaaaaaataattaaagtttaaatatgaaaaaaaaacaataaataaatttaataaaatttgtaataataagtttcgccgaaaaagtcatcggcactggaaaggtcgccagtgttgaaaaatttattatcacagaaaaagtcaccatcaccagaaaggttactggaaaagtcactggaaaagtcgcaagaagtagatgtctcactataaataaaaatagaaccggttctataacataatgaataaaaacaaataactcaaattgattataattaaattacatataactgatt

SEQ ID NO: 176708 - DNA, 730 bp, Cannabis indica
tatatgagattttatttaattaaataaataacaatatcaatatataagagagtactaaatactattagcgccttttattaaaattccattttctttttcattttataaaggattttttcaaccttaaaaattggtctttttttattttaatgttcaaaaatttggactaaaaataaaaattattggactttagagcctctggtaggcctttgtgcatgcctggcccaccataactcagatctaagtctagccctcgcgataaatgtcaaggaggtgctcgagcaattctccaacaaatggtgcttaagtgatgtaccaacaaccatggcgtcaaagactaatgctctagtctaatagtgtgtgaactgtgataacaacatatatgttaagcactaggttcaagttatatactgaagggactcagctagttggttattcatcaaaacacaaataacttatgcataaaaattgcaacacatattttatcatttaaattttaccttcaaattaaaatattatactttcaatgaagaataaataaaaagaaaaaagtgactagtctcttgtaaaatactcagaagatagtgattatatcttatcttttaatttatagcctagaggcctacaaacacaaagcttgagtacccagtcataattttctagcctcctcgggtaggttagttatcatcatctttcttcaattctcacttataaccggattcaataatgg

SEQ ID NO: 176709 - DNA, 678 bp, Cannabis indica
aaagcacgaatttgagcccgaatatgaaaacgagttgactcattaaaagaaattggtcatcacgagtaaagcacgatacgaatctgagcacaatacgaaaataataggcctacggggcgtgcctgcctaacctatcttttaaaaatattagcacaacacgacctaaattatattttttacagcataacacaacacgactcatattttttaaaaaaatgtacaatatggatcacgaatttatagcattaaattcgtgaatttttaatataatttcaattataaataattatatttacataaaaaaaaatgaaaagaaggttaagttggaatgcaataagaggaataggaattgatttgggttgggttagattgggtcggataggattgggtggtcggttattgcgggtttacccattacagttgtcacttttttatgggctgggccccacttttgtggacccacattattcggcccagattttaaagcccatataactaaatccctttctttcctttttttttgttttggattttcaattttttttaatgtaaaagacataaatagtttttaatatttcggcagtgccccaacaataataatagagaaatgctaaagggtaccactggtgcctagcaccctcctacgtgtcaatatcgctattggtgcaattaagtatc

SEQ ID NO: 176710 - DNA, 823 bp, Cannabis indica
tttagacacttggtgctaccatccattgagaataagagattcaagtttacgaaccttgctcatcccaacttcccaaccctctcaccactagaccaaatcaaaccgtagtggcttaatggtaaatttttgtttttgttgttagaaaaagttatacgaaactgaagcatgtcagattgtttcttctctctttttagtaatattgttttaggtaagctaagctagatcaagtacttgtttttctcttatgtctatgattatagttattgtaaatgtttggttaaaatggttaactgaagctgaatcaggctctatgatttatgagtatttttcactattgttattggctgtaggtgaacgctcatatatgtagctgattcttattaacaatggaaaaaaataccactatgttaggaaacaagtatgacttgtaacatttatttgtcaatcgttgttgttgtggtatttaaagatctctggctgttacttgcatttgatctaatattgacagactatttcttttttgaataccgtagggatttttcttaagaaccaatggaatgatgtggcttgaatagatttgatggttgcagtaatatcttttagtttattttttcctttccttttatggattgacaaccagcagctttaactctctttttcgggttggaaattgcagataattgagatatggcttttgctgtaacacattccgttagctcaaacttattatgtccaacacatgacaagttaagaaagccacaccaacaaaggcgttccctcccaaaggtgcagtcaactttgaacagagtcgatttcgactctc

SEQ ID NO: 176711 - DNA, 502 bp, Cannabis indica
tggcagctaatcttgcttctcccctcacccaggatgcatccgtcaaaagaacctggaacacttgtttgattgcaggaaccagaatcacatcattcctcatgttgtcgattgtgtggtcatacccgtcaaggtccttcctaaaaggaatgttctggagttcaaagaacttttttccagctatagtcaaagccaaggagggacttacatgaacatttttaatgcagaaagcatttctctggttccaaatagcatcaaagacacagccaatatagttgagaagaagacatctacttacacccgaggcagatgaagagaaagtggacaccaactcttccactatgcatatcaagttatctcctgaatgatgttgagctctaattgacacaattcccccaaaccatattgctcttgagaagctgcaattaaaaacaaatgcagggggttttcctcttcgacttcacacagatggcatgtcttttcattcaaaaaatgtagtctgttc

SEQ ID NO: 176712 - DNA, 781 bp, Cannabis indica
gggatatgatataaacgaaattcgagaagaaagattagtacatatcaaaactcagttaatacgattaagtacaatgaaaatcaccatgttggacgtgtattagtaaaattaaaaaaattggaaaaaaatttttaaatctaataatttcagtagtttaaaaacaaaattaatagtatgaaaaatttaaaagtgcgattccatttatatcaaaatttgatgggaaaatcataattaacctaataataatactaatactaatatactaataataattagaagctaaatacattatatacgtacattaatctttgataaaattgcattaaaacaaagatatagtgttacacttttatttgggtttacaataatttttattgattttaataaaatatgagttgattggatagttctttgttatgttagtttatattattagttatcaataattaataggcttaactaggggtgtgcataaatcgatccaatccaatgagaaccgaccgatccaattacaaccgaccgccaaacattggatatccaattgtgatcggatcggattggatgttatttttaaatatccaattggatcggatcggatggtggatggggtgtctaaaaatccaatacatccaacatccaatcgaactaattagtattttcatttagtttggatgagtaattagattttatattgttatacgtcaaatttatatgtatatatgaaaattaacattaaagttttactctttttttcttggattggatggatccagtccgatcc

SEQ ID NO: 176713 - DNA, 1036 bp, Cannabis indica
ttttctcgacacatttgttaaaacacgtgtgtgtaagcctgaaagcagaagaaatataaatgaataattgatagtatgtcaggaactttgtaattactgaagcaattaaatttgtgtatgtggtaaacaaagcagcacatttctttttataagtaaaataaagcaacaatctactacaaataattaatttatcaaaaacagtcagaaaatgcatttacatatatgtcgaaccggaaattttaagagttcaaaataattttggactaaaaagaaattagtgattagaccttaaatatgaaactgaggcaagcatgtgtagaatggagtaacaaggatttgaaaaaggaaattatgcataaagacgttaaatattccacactgaaaacttaattgacaatttgccttaagttctttcattacaatgagggggccagaaccagctctcaaaggcaccaagccctacagatagtctcaatctcaggtgaccaaaaaaataaaatagtagtgcaaaagggtgcaacattcacccagcttagtatgactgcacccaaacataccatgccacttaaaattgggaatcaaactgcaaaaccatcaaatttatgatacccccaaacataccatcccactcaaaattgagtaaactgcaaaaacatcaaatttatgataccaaacataccatcccactaaaaattgggaatcaaaatgctaaaccatcaaatttatgacaccagaggcaagtaaaatatcattgcttcagggcagtggtgtaaacatggaagtcaattacctagctgacgcaatttaaggcccggaacaaaagtttgaaaggaaaagctataggcttaccatccttataaaaggttataagtatataattttcaaagcacacacagtcaacgaaataaaaacgtactatcaattgttaaccaaataagaaaaaggttcgtgttcccccattatgataatataataattgtgctggtgaggcttgcaatgcaaaaagaactactgtaataactcactctgtattcca

SEQ ID NO: 176714 - DNA, 651 bp, Cannabis indica
aataaaaaaaatatgtataatttcagttatatcgtagggctatttacaaaataatagaaaaaaaaatataaagtttacataaatatgacattaaatttgtcactaaatataatatttttttaaccaaactaaatatatgggtatataaatagaaaatgccataaaaatcattagaaacaaatcaatttcctttcatagtctacacttggtaataactaggagtgttcgtagtgcagatggtgcggttttttattattttttaaaacaaccaacacatgcagttttttcaatttttctatactgcacctgcactgcgaaactaaaaaattgcggaaacagtaaaataataccccaagcaaacacaaaacccactaaaatattagagtagaaagggaaaaaaaatagagaaataaaaaccctaaaatgcaaatacaaaataaactaaagaaaaagaataaatcagttggactagaaacaaaacatgaaatatgggtttgatattagatttacaaaacgtggcatatcaaataccataaaaaactttttttggtaacaaaatgaatgaaagtacaactcaggattctatacttgacagcattgtttttgttaggtaattaatttcctaaggatcttagatctactcacaagtat

SEQ ID NO: 176715 - DNA, 689 bp, Cannabis indica
tggaaatgtgtgagtttcacaatgcacaaccaccaattcacaacaaatggctccccccagcaggatggacaatgtgtaacactgatgtagccataggagaaaccttctcagttggggtagcagtgtttaggaatgaggaatgggtcgtattaaatatatccactaaaaagctgcagtatagtgaaccactcgcgggtgaagtggctgctataaactggggtgctgaagttgctgtaagtctaaactacaacaatgttatttttcagtcggactcgaagggcgcaattgaagcaattaccactgatcactcaagggttaagaaactcaatcacaacatccaaccgctggtgcaaaggtttcacaccattgctcaccgtgtggagttatgggaggctacttggattctgagaagtctcaatggtgtagccaacttcgtggctcactgggcaattcaatctgggcagtttgggacaattgaattgaccaattttgtcagtttcctgccatcttgggaggcagatggctgatctggttttttttctgtttttttttgtgttttttttcctgtgttttttatgtcctgtttgtttctagccgggttctgaccctttgtttctttcggttctagctactttgtgtgttctgttttttctctatttctcttagtgttgtgtttctcctttggaggt

SEQ ID NO: 176716 - DNA, 614 bp, Cannabis indica
aatcatcacaaatctagtataaaatataatacaagaacaatataagagattgattaaatatatgttacaatacacatatacactatatattgtatgtataaaaaagatagaagagatgtaacacatatatattacaagaaaagaatatgtatatacacactcactcagaaccttgagtatagatcagtgggagtcaccataacttgaacaatgtataaacacctttgtcaaaaaatttatttctcatatctctaagcactaacagaattctcatgaaaatgttttgtgaattatcaaaccttagagttttctagcaaaattattttttattcaatagaaaactggtcacacaaatgaacactttagactcctttatagtacttctgcatatatatcactatttgaaattctaacacataacattccatgaatgttatggtctcaattaaatgagtatacaattcattctccaacaattatattactataacttttaagaattttaatttaagatgtgaacatctttttacattcttaatattagtgataattgtagaggttactcataacaacaagtaactcctcatataatacaaaatgatgacaactaacat

SEQ ID NO: 176717 - DNA, 556 bp, Cannabis indica
ccagtggtgcttagtagtctcctatgtatcaatatcactactggtcaaactaagtatcgagtcctatataatttaatataataacttttaaaaagtatcgctagtcaatcacaacgcgacatgtcaagacagtgctaagaactactagtaccttataacaatactcttttattaatttgcatatccacaaaatctaatctaaacaatactcatattttatgcattttaaggtattccacaacacaaccacactaattatttatattacttgttaaaattaaatatgtgaaatgtaaatattaaattatattaaggtcccttttagtattttcaccattttttttattcaaacaataatttagtgtagttaagtaaaggtaaaatatataaaatttaattttaatgatatattttgaagaaaaaaaaaagaaaacacctattttatagtactttaacatagcatatagctatatatttaagcaatttaattagtaaatcaatagtgttattattctatatcctaattgttggacacctaaaatcctctctctctctc

SEQ ID NO: 176718 - DNA, 542 bp, Cannabis indica
ggtgaccaagtattttaactccaaagttaaaaacagaaagtttgctattggggatatggtcttaagaagagtcttcccagccacccaagaacccggagtgggggtacttgggccaaattgggaaggaccatatgaaatcgaggacgaaatcggctcaggcacttacaagctaaaaaggatggatggaaccattgtgccaagggcctggaatgccgatcacctcagaaaatattaccaatagccaaaaatgtaacttagattttgtttaaagagtttgtaccgtctaaatgtatacagcctccgcatgttaaataaaactgagtgccttaaaaacaaagtttctatgccactcaggggggtactagggtataccgcacggacagacaaaaaacaaactaagtaaaatatcctgacccaaagggcaggtatcctgacccaaagggcaggtcaaaatatcctgacccaaagggcaggtcaaaaaagagtatgcacaaaaaagaaaaatgaaaagcataagtataaacatcctgatccaaagggca

SEQ ID NO: 176719 - DNA, 875 bp, Cannabis indica
aaataaataaataattaatttaattacttgaggtaatgagaaggtttcgtggaaaaaaaataaaaaaaaaatggagcaatgattcttataacatttcaagccaacttttacacatttctgaatttctagggaaatttaaagtggtgactttttgataatcagctgaaaaaagtgtcatttcaacttatttactattttttttttcccactaatttgacatttggtatggagaaaacaaatcaagaggggataaataatgtaaggggaataaattaaaataaaatatttatcttctatcttatttggtgaacaataatgaaagaaaactttcatacaataaaatactaattttttttttatcaaaaataaaacttcattaatcaaacaaaggaatttacaactcaaacaacaccaaacatcaaaaatttcttctcatttacaaagttcaatcttgccttaatattttattttacaattacatctatacactgtggagcaagacactttcattcaaaaatacacaaattcataagccatgctaaagtttcctagtccacctctatcgtaagcctttttggcctcttgatattcacccatggaatcagttcatcaaaatgtacaagaccaaagataactacctagctatttcccaattttacacatcactctccatgatagggacatgaaaataaaaagcatgatcttctatggccatctcacaatctggacgcatagtagaatttacaaagacttactttttgttgagattatttcgaataagaaagttagtatgaattacttactacaaaatgaagcaatgttttaaaactgaaagtgaataccaaacaatcttctcaaatgctatcgaaaagcat

SEQ ID NO: 176720 - DNA, 945 bp, Cannabis indica
ataattaatagtgtgtccactacaactacgatcaagtaaaattctaaaataatccaaaaattaaaataccaaattaactaatataactctatgtaatcattctatgaattggttaaaaatatttttcaaagagataattacgtaaagtattatttttcataaaaaaatgtatttttacatttaaagattttttttatatgtatttttacggttttttatagaaaaaatacaaaaacaataagaaaattacataaaattattagaaaaatagcatcaaaacaacaataaaaaataacatacaaataataacaaattaataagagtacaacataaaagaccgtattttctgtaaataaactcataaaaatcgtaaaagtatttaaaattatgtacaattgtatttttataatttttttatttattatttttgtgtattcgtgaaataaatccgtttttcctttttaaaagatcatttcaaaaataccatagccctacagtaactttgaaaattactattttatcgaggacccaattcagtattaacattttatttaccattggcacattattaccactcagttttttacagtgggtaaaatatgcctcaacactattttaccatcttgtcataaccgttgttggattatacatcacacattttaagtttacagatatacaaagacacttttaacagattaatctatactctctctatactctattcaaaaaaacagtcatagatcattattatgttgttatcattattaacaactaagatcaatagtgatgcagtttttaactctgagttgggtaaagttcggggggctggaagcgagtattctgtgagtgatactgattttcgtctttacgctttttcggtattttagagttttggtaatgttgtttctctcttgacatttgtgtatgttttgtgtaatctattcg

SEQ ID NO: 176721 - DNA, 656 bp, Cannabis indica
aatatcctaagcgcaactcacacaacagtccaactcaattcgcaatttacatcgcaacctacgcaacaacccaactcaattcacaattcacattgcaacccacacaacaacccaaatcgtaacgcaagttcaaaaaaaaaaaatgtaaaattaaaaaagaaaaaagtgtaacttaaagtacatggggtaattactaggggtgtacatcggtcggtttgatcggtttacgttatattttatttaactcaatgtaaagatcgggttacaaaaatttaagtgtaacccgtccaattaagaaaaaaaagtttcacccgcccaataaattcggtttagtcgagttaatccgtccaaaccgagcactaatattttcttattttcatattcaattttttatattttaattattgtgataatgagataaatataaggattgaatttcaagttcaaatcacctgtcataaaaaaaaaaatagtagtttgaacttttttttttttttttttttttgtttattaaaattctaagtaatttgtattgtcactaaaacaaacttttaactaaactaatacgcacccaagcaaaaggccgaaaatctatgtatacatttgtatcgaggtgggaatcaaatcaagattagagacaaaaaaatgtaattatg

SEQ ID NO: 176722 - DNA, 715 bp, Cannabis indica
atgtttactttaatatttttattttactttttgaacttctaccaataatacttatatttaatgtcttaattattgaactaaatatattttattgttacttttttttttcactttataatgtatttaatattaaaatataaatttacattaatttttaacatgttatgcaatgtagaaaaaaaaaagatgcacccctcacttataaaaaaagaagtgtcgccccacctcaacttaaatcctaggtccgccactgtttggaaataccttggtgaaaatttcccggttgtaagggttagtcaagcccgttaacttggctcgatattggaactcaaagctaggtccatagctttgaagaccaaggacgtaggtggcatagctctaccgaaccttgtaaaaatcgagagtttgcattttctaatccttaaactctttactttacaagtttgattatttgtcttaatatattgcttgccatactacttgcttttatttgattaagtgactaattgcataattttgtgttaaaagttttaatttaccgaaattagtttaaatttccaattcaccccccctcttggaaacatatcttgggctaacacctcattctcttttacaaaaagtgtttaccatcgcaggacaacattcataaaaccagactatgaacacccaaggacagcccaacgctctgtaccaaccatcgtaggactgacctcct

SEQ ID NO: 176723 - DNA, 522 bp, Cannabis indica
ttttatatatatataaaaaattgaataacggcatattagttagtttttggtgtttggttataaataggaaagtttctttataattaaattttttttagtttttctgttttttttttttttttgctctgtttttcttttttcagagttatgggtatgggttaggatttcatcttctttagtagattctctattgtttttttaagttttagtgtgtactactgattagaagtgtttttagtgcatcattttggttactcattcttttgatggtttggtactgtttaatttttgagtattcttatctcctgtatacttaaagaaatagttaaaactcgtcctttaatttctccttctcattctataaaattagcttctaataagaaaaaaaaatgaataatgtatttgatgatgaagatggtggtgattctgatcgttctgctggacctagtgaatcctttgatggtagccgtgacactgctttgcaaactaagaggaaaagagttgctgagaaagttaagaagg

SEQ ID NO: 176724 - DNA, 1297 bp, Cannabis indica
cgtagattacaataatatttttttctaggctcaattgagtaacaacatgaccataaattctttttaaaatttaaagataagagagagaaagagagaaagagaaaaagataaagagaggggaagatggtaaggataaacgggatctatctatgcttaattccacatgctgtacaaataaataaaaataaataagtaaacaaaagggaaaaagaaaaaaaaaataaagaaagaaagaaaaaggtaatcagcttagtatatcaattaaaataaaaacggtataaaacaaacggtaaaattattaattaaatgttgtacaatattattgataataagatataaaagacggctgcacatgtaaatttcccttatattattttataacaaaatcatatatattacatatatagtatacttataatttaataaaattttcataattaagaaattatatcatatttatctattttctaattgagcttattactaatttgtcacagatatttcataataaactaattaattgctaataaactactaattttcatatttaattatgtaatcattataattgtctataatttttttaaaaaaatcgaataattaataatatcaaaaataatatttaaatatttagatgcagattgttttttttatatgtgtagacataataagtaaatgtttaaactttatttttaatatttataattttttaaaaatttataaataattgtagatgctccaacccacataattatattatgtatatatacaaatcaatataaaccaaaaactattctgaatactaaaaaagagtaaaggtgtactagaggagattttccaaacatatatatattaaagtgctaacaaaataataacaaacacttacctaataataataatatgtaatgaaaatgaaaaagactggccgcaaacaaaacgctatcaaagtgtattattgtccaagtattgaagcacacatggcaaaaggagctgaaaattttgaagaatgttactctaatttattattatttgaagcgaaaaaaaaaggattgtagtttgtattttcttcaaccccatcatactacaagttgctactttcgtgtattttgtagatttctttttaaggatatcgtagtgatattttagattatttaaaaaggtaaaagagtattattatttcttaaaagtaaaaaagaaaaaaaaaatagaatcacgattgatacatgtatatgctaaagaacattattagtgagtgtagattctgaaagtaaattagttctaggattctaatttaaca

SEQ ID NO: 176725 - DNA, 849 bp, Cannabis indica
ttgattccatagaatttaatcatgtaaatgaaacataaaattatatctttaggtctataaaatatttattagcctttgatcagttcatgaaattcaaacacttattttaacggatgaattttagcttaataaataattaataacatggtgtcatattaattagttgtaaccgcgtaatcaaacctgtattacactatcactttgtaatgcccacacacctataagattcttatttagctgcatatgcaagaaacttatatgcagtgaccaaaagaaaatggtggaaaaactaaaatatagtcacaatttattttctttttttacaattagtgacaaagttcattaagttctcatattaaacaaggaacttaattctaagttaattgggggatattgttgtatgtacccctacctgagtagtactattcatgacaaatactacaaagaatttcacttttttttttcctattaattaacaagggctattttataattatattaacagttgctatatatatatatatatatatatatagaaaatacaggatctacatatatgacaaaagtagctagaagagtacatgatcttctagaagtcgctataacaactatgattctatcgaagggtcacaacattatatatactaactatatagtacttgtactactacctatttttctttaagtaatactagtttatgataaatagaaagtacgtactacctataaacgttttccttccgacaaaaacgaacagtaattaagtacaccataaaccagacaagtagtaacttctatacatacatacatatatgtatataagttagtatataatatatagtagcagac

SEQ ID NO: 176726 - DNA, 414 bp, Cannabis indica
gcggtccttttgtggtggctagtgttggtcttggggttttggtgcgttttgtttcaagcttctcttccacttagtctagaacagaactcgtcttggttcttaaagcttgattagggggtttctgggttggatggcctgcttctggtttgattatgtcactgtctttgattttttttcttttggcgtcgattttggtctccatccgcctgaaactttcctattcggatctaatttgtgattggtaagggttttgtgacagtcagtagtcccgtgatctgtaaggggaaatactaggtaaactgtgcaatcccacatcgtctggggaaggtcaagtgtgatgattctgagactctgtaggtatgggactacacagttgaagagagcttaaatggattgattggtactacctatatc

SEQ ID NO: 176727 - DNA, 959 bp, Cannabis indica
ttattcaacaaaaacataaaaaaaaactaaaaaaaataaaaaaaaaaatacggtttcaacggtaattttaaacattttttacaattttttttgattttatctacagaaaatacggtctttttatgttgtaatcttgttaatttgttgttgtagtttttgttatatgtaatgtatgttattttttgttgttattttgatgttacttttatgtagttttcttgttgatttatgttgtttttgtgttattttttagaaaaccgtaaaaatgtaaaaaaacattctttgaacgtaaaaatgtaaatattttacaaaaaattgtaccttatgtaattatttcttaaatttttttcatacttttgtaaatagtcataaataaaatataaataattattaaatgcattaattaatggcaaaagagtaaataaaaacgtaaaatttattattgtgcaaattttaagttatacaatattttgtgctaaattttacataatttttaatagatattaaatttaaatcacattatacactaactattaaagtttaatttacaagctaaaaaaatatatataaaccatctttatagcattttaatacctttagtacctagtcaaaatcaaaatataaaacacagcacttgctgtactcttaataatcggagcattatttcattatgttcatttttaattgctaataatatttagtttattcaaaaataaaattaaatgaaggatagtcaaggatccaaactggtaattatattgtaaatcaataatatttaaaagcgccaaagcagaaaacaaattagcataactttgcattatccaaaaacctcaaaattttatcgttatataaatctcaacatctcagctcatttctcccacaacatcaatcaaatatcaatctctctcgaaaaaaaaaaaaactgaagaactcacatttcacattagccatttttgtaa

SEQ ID NO: 176728 - DNA, 518 bp, Cannabis indica
aataaaaaaaaaatgtgtgtcagactcttacatgttaattgaatttcttaaagaatatgtgtttgtgattgaattgttcttttttctctcaaaaattccttctattttttcaaaaatcacatgtgttttctatcatacactaacgtctatttttatatggcttgtcttatgtctttttttaagataaatcacattgatcataggttttattttttggggggttatggcattctcgtttatcattaatgaaaaaatcaaggatttttaaagaagtgttgaattaattgtagcattggtgaaaattggtattttatttatttgttttaaaatattcttagtcatcaaggtattatttttgtcaacgtttctttttatgatatctttgatatttgtcatcatttagttgtctttgttgcctttttttaactttgatttttttatatataaaaagggggaagtttctttgggctgatcatgtagggtttaatggaccttatttttgttgtttctttattgtt

SEQ ID NO: 176729 - DNA, 414 bp, Cannabis indica
tttaattttttctttacttaacttttatcagtattttgtaaatttttaataaaaaaaaaatttaaaacaaggcacatcaattttttttatttatgacttttaattaatttattactttaatatatgtgtaattaacttttaatactaaaagaattctctctcatttttttctttttatacgtgtaaataattttttttaccacactgataattatttagtctaaaaaattacaccattataatatattttttaaattgattattttaatatgtaagaatcatatatttatttgttgtccctgaaaatgataactaaaatcagtatagtaacattttagtttcttttaatcattatgtaaataatagtaaagtttaaacaaaattcaatattattaaacaacttcataagttact

SEQ ID NO: 176730 - DNA, 764 bp, Cannabis indica
aaatactctagaaaatagtggattcttggaagatcaaaaccttctctgtaatctccaacaatggcttcaggttagtgcttccgctcatattttatcatcttctttaatttagcaaaggatgatttatgatttagggttttctatattaaagtcactttttaggaatatgtttggatctgtgatttatatatttcataagtgttttataaatactaacacttattacaaacttctgttttcttttgttgattatattttctcaaataataattaattaaaaaagtaagccataaatatctttgggttgatttttattagagttagttagaaataatttttggaattagtaaataacctgtttttttttaaaaaaaaaattataaacaaccaaatgtatttttctcaattaataattaaattataaaaagtaaaaaaaaaaagaaataattatggtgagaagagatagtggtattttgagcaattataaatttagttttagatatataaattagaactcaaatttaaactcaaaattatatagattgagttaatatttattataaattattgattttttacttcattaattatataactataattaataataacaacttttatcaagaaaaaaataaaaataaaaaacgttaaaaaaataactgatagataacacacactcttttactatttattttgctcaatgcaaaataaaatttctaaatatgaagtatagagtcaacacatattgtaaaaaaaaaaagaat

SEQ ID NO: 176731 - DNA, 1215 bp, Cannabis indica
  modified_base (1157)..(1157): a, c, t, g, unknown or other
attaggacccccatagttacctccttgaaatcacccagagagtactcccaggtgaatcttcgtgagctgtttctttcctcctcttggtagctaaagcttcaagttttatcttcttattggcttggtcatccgctttcctttttggattaaaacctcctccagagtctcctttatgtccagatcgatcactagactagctttacttacctcttcagatgtttgaggcttcacagaagagggaacttcctgaagagggatggtcacgatgaaggcgtccagattcaataaagcatcaaccaagttgagggatggaacctttggagttctggccttcttaggcttgggttgtgacctggaagccttcgcccttaggacctaggcaggcacgccagctacttctctcttagcttggctctttttggtgatgctcttgcagaactgcttcaggctacttaagctttcgtttctgtaaaattcaagcacagttaaaaggcagataaaaagaaaaacaattaatgaaaatcatatttagacaaaaaaaaaaaaacaagcaacaaggtcaagtatacgagatcggcactcaaagttggagccaatgccttcaaaattctccatggaaaaattaatgacatcctcacaccctaaaaaactatcatattcaaagaactcaggcttacgcataagggtgaacaagtctactctaactaactgcgaaggtgctcagatcaagtaacggctaatagggtaacggaacggacttagataaggaaataagggtcgaattcatcttgcttgatatggtcaaaatcttttacttggggagcatgaaccaagtagaatgaagtattaccttgtctagaggtactagctcctcattcgtccatctctaactgggtccttcggagctcgaccaaccaaactttatcttgctccatggcttattttacttcctctgccactatatccattatgccttcccaaatctcttcgctcaaataaaaaccaatccacaaagcttggagcatcaattgattgatgactagctatcagaccaaccttccaaagttcggtcatggtcactagtcgattgatgtccaattattcattggtgcatgtcttgtacgccagccggtgcacctcatccacaaagtctttgngttcgcgaataaggaactatagtcggaaaaaaccagaataagatgtggttcggagaat

SEQ ID NO: 176732 - DNA, 787 bp, Cannabis indica
gatcctggcaactcaaatcatcaacctgcatcacaaggaacttaatttgctacctcaagaaatctcaccagaactcaggatgacacaactcacgttcacttcaaccacactgtctcgatcaagctcaatgatcacaatttcctcttgtagaagcagcagattctagcagccatttgtggcaatcgattacagaaattcatacacgatgttccacctcctctataatttctcaatgatgtcgatcgtgctgcgcacaggttcaatcctgaatttgtggattgggaggtccaagatcaactccttgtttctcggcttctctcctccatgactgagagccttctaactcaaagggtgggttgtaacttagctcgccaaatttggaaagctcttgagcaacactttacactaaaggtctcatctaaaattcttgaattcattgaattggacctctactttattcgtgagaagatccttcagctactggttcaagtaaaacatgttccagcttttgatcagattgttgatggtctaactaagcctatctcaagtcaactgttctcatctttttgacacaaacttaccactggtgatcctacctatgctaagtttgagggggcgtgttagaacagcttgttagatagttagttaggatagtagttaattcagataactacctaaccacctattatttcacgtggtaatttttttgttcattactcgtgtgtatataaacttgtaaatgctcagattgatcaataagagacccttttctctctctttctttctc

SEQ ID NO: 176733 - DNA, 594 bp, Cannabis indica
gctgcttttttccaagtaaaattcatagtggataaactttaacatatattctttcttttcgtaatacttaacagccctgacacccttgatcagctggaagtgaacgaggagctgtttggaaagaatgctaagtatctacaaggtttgttcccattatggttcctgctctcttttgttaatttgtatcaatgttcatatcctagcggagtcattttcactagacatggatggctatgttattataaatggagactgataatattttatgatttcatctttcatgttgtcatttttagaatacctagtttactgtatattgttagggtgctgatttgtccttagtacagatgttagttgtcacatttgattgtaatatgacagctaaactgtgatatttttggtgaacagatgacatgaaagttagagtagaggtttacaatggaatccctttatctgcatcggttccaaaacatgttacatgtattgtgaaggaagcacagcctcctgtgaaggggataggagtgacacctaggtctgtttactttccgttatttgctataatctttatcatatatgcactttaacttctcgttc

SEQ ID NO: 176734 - DNA, 718 bp, Cannabis indica
ccaaaattaatttattattttcaatcacgtaattttgtacatgtggtcttattttgaaatgatgaaaataatctatctttgaattttttttgttattactttatttattttataatatttttatatgttgattttaaatttattcgatagacctcaatttataatttttaaaaacctctaaaataattaagtcggccctaccttctatttcggttgaagaccttctaatgaaagtacttagtaatttgacgataatcgaatctctcggagctgaaggagattggtctagggttgctctttagcttactttcattgctctttacttttttttttttttttttactattttttattaatttcgacatacatataatatttatttaattactaaaaatttattataaaattaaagcataatagctataacttttttttctacattatcttttgtttttcatactatcgatcctctatttaattccttgaatcaattttttttttcttaaaaacaaaaatatatactttttaattaggttgtgaacaaaatttgacatgttaaaatatttttcacacatagctataagatagccttttattctttataaaaaatattgtcttttattattactctgaaaaatagagtgggaggtgaaaaaaaatagtctcaacttaattcaaatccatttcatatattatacaaaaaaaaaaaaaaaatcca

SEQ ID NO: 176735 - DNA, 742 bp, Cannabis indica
ttactaatatccaaatcaactcatgcatgcaaccatcaatactcaactctaaatacatatgtatttcaacgaaattccattccataggcttagttatcaaactcattctccactaatgaaatcacacataatttaaatatcaataggactttataggctcataatgcttggctagggtgtaaggtgggtaagaaggttatttttaagctcaaatcacaccatagaatatgcatatatcttcttctccaagtattcccatttacattcctcacttattcccttgaataattcaatctttcatttatacggttgcaagtatcatttattttttattgatatttttttattatcattatttttagcatatatgaaacactttcaacttacaaacattcattttagaaaattttttttctatacataaccaaatactattattccacaaaatccacacacctttacaaataccaaaaacttaattttctttggtcacttattgcaacataccaaaaactttaaaaagaacttcacatttttcttaaaaattccttatttacattgcaaattacatttgtattgcttctgcctactgtgcgtgaggcttacgtactacaaaaaacggaaaataaaaacgacattaggtaaaatacggatctagccacccctactttacttataactaattgtacgcaggtggtctacattctaacgctcgtgaagtctctgatctgtcaagtctttc

SEQ ID NO: 176736 - DNA, 828 bp, Cannabis indica
catggtggtagtgaaagccatggggaacccaaacttgacattgtcacctgcatcgtagtatccaccaaccaaatcaacctgcattttcaaaacagaaggactaaatcaatattaaccaaaaacccacataccataacatcttcaaacttaaaatcagctagtaaataatgcatttaaacgaaaagtaaaatgtgggttttttttcttccttgcttactttcatggctgagccatctgagagaccagagtctttcctccaagctattctctggttaggagggagtttccctgacctctgtccttcgaaaaagaggatgctttttgtgagagcatctttgtagttgtgcctggtgacccgagggtggtgggaacggcggaaagggttggcattggtgaggaggagagtagtggagcaagaaagaagaaacaaaagagtgaaaagagaaagacgagaacccatctttttgggctaaccaaaagtaataatcccaaaccaaaccaaaccaaccaaccaacccaaactgctaagcgtcagtgcaataaacagagaccaacatcactatatttatactgaaaataaaaggggataaaagctacttctttaagatcacaataattaagtgaacatcttctactgtagaattgtaattaattatatatatattttttaggatttgtttcataaaatggatttgtcctgatattgctaaagtagtgtaatgtcaattcagtgtccctctactaagcataaatggtggtatccaaaggggcattaatgacattaaaacaagaccttttcacatggagagtcatattttcataaaggat

SEQ ID NO: 176737 - DNA, 965 bp, Cannabis indica
aaaccacatgagtgtctagcatacttgtcctcactcgcacgcgtctttgggaaaacttcctaggaggtcacccatcctcgaaataaccccaggtcaagcaagcacgcttaactatggagtttttttcatgatgggctaccaaaaacaagtatctttttgatattaggagtaccaatcaatctatttaagccatacttcaactatgtagtactatacctacacagttttagaagcattattacacttcgactttccctagacgatgtgggattgcacaacttacttaatatttctccttacggatcacgaaactactgaatatcactaataatattttagatttttttttttcaaatcacatgcatttattaaattaccaaaattcgattatgaaatgatggtttagtagctactataatataaacactataaattattcacacaccagcaataatttagagcacccttttcaagtgatcatctatattgtttcaaatatttaaatgaggcaaacaccataccagaaacaagattttgttcattcaacgtttttgtgcccgttttgagtgattatcgatttgcataatgttagagtatattgattgcttgaattagttagaaactggttataagttggttggttgttattgtctagctatctgttcttaactaacttgtatagtctcattgtaacggtttctgttattcttgatctaagtgtaagcttgtatgtaagtcatgattaatggctttgtaatcaatgaatcaattcattctctttgttcatctttcttctctcttttctttcctgtttctgtatttgtttcttttggttcaataatgtcgagaaggtctaatacaaaataatatatatataaatatatatatatatactagtaaaaaaactcgtagcgaggcacgtatacaaatttatgtctagttttttttctattgttatttgaaag

SEQ ID NO: 176738 - DNA, 671 bp, Cannabis indica
gataataacaatgtttgggtagacacacatcctaaggatgtaatagacatcgatggtcaatatatatctattctcatatatgaattgaattgtcttcaggatgaatatgctttgcttaaaaatcagtatacctttaaaggtcaagaaagtgatccgctgctactctggagtctgaaatagctacactgcatgataaaattcaaacgatgtctgaagctaagaagcttcctaaggaaccggtggtgcgccctattactgagtacccaagggttccaaaccccgacctactctgtacgaaaaccctcctaccaaggcaaagaaaaagataagtaagaagaagtcaaatgctaagaaaaagaaaaagaaaccgaaggactatgacactagctaaccaactgcaagaacaaggtttagatgtaggattgtccttacaaggaatgaacgttccaagtgcatccagcaggaatcgaacctacgaatttacccggctgggcactttcaccattcagccatggatgcttagagactcagcgagtgaactaggttttggtattccttctcgagcttctatttcgtccgttaaaggagattcgggaaaagatggaataggaagacgtgtttccagaacaaacaagatacgggttgagaagggggagttagcaaagttagac

SEQ ID NO: 176739 - DNA, 848 bp, Cannabis indica
acaaaaatcaacagattttcatatttaaagtaacaccatagactaacttcttcctccataagaaggaacaatccaacaagcaaaggattcttcatttacacatttactctgaatcaaatatactcatgggaagggaatccgtttttccacatacgatcaatgctagcagccttgccaatcctccgaaattgaggagggagatcaaagattattactcacatctgagtaacaaagaaatccatcgatctccaccgccctttatggcattggcttgaagatcataaatccatcacatattctccagggtgtattctgtactgcaagttccgcctcatacctcttcgaaaaatgaataatgaaggtgttaacaaccaccttttccagcttccaccccatggccagtcgccattttctggctagcactgacctaagcaagcccaagaaatgcatttcttagaaaccaaccgaaccactactaaacgttcaatcacatctttccccaactctgcattttcttccaaagaaatggataactccttcactctggtattcaacacttcttcttttcctttagcagccatcaagctaaagccaagaataccctctagccacaaaactctctcaagtagcaaacttggcagagagaaaagaagcagaaccacaacactcaaagcaagcaaaataaacaatgccatatacaaaagatacagggtcaccaaaaaaccctagaccacaaaaggtcagcaaaagaaaatgaaaattagtatggatactctactgtacagatagaatttgaaatccactcatatcatctaaagaaaaaaataacaatcactcagtgttacttt

SEQ ID NO: 176740 - DNA, 664 bp, Cannabis indica
aggatgtctattttctctatctgagattgtttgtttaggaataaaaagttaataaataaataaactttaatcttaaaaaaaacaaagcaaacttattttcgtaggggggaatgccgaatggtatatattaactcatgtaccacgaatcaattgcatattcttttatctttctttatacttttacatattttcatatgcactggttttttttttcatggcataggtatttatataaattaaagaaatttaaagagcataaaagtgttttggaaaaattgtattcttctttcgagaaaacatcataacaatagaaaccttcaaattttctactaaaagtttaaaaattgtgatacaaaacacaataaagatttgcttgccaaattttttatgaactagatttttaaaaacagctaaaaactgataagagcatgagtgatacacatttaaattgtacacagttattttacgtaataatttataataaatattagctatttataattttaagttaattagactatattattttttaattatacattatttgtatgtaagaagtgtgtgtaatttaagtgtgtcctaatcattttcttaaaaatattttatctaaaaaccacgaaataaaatataactaacaacttacattttcagcatttattaatat

SEQ ID NO: 176741 - DNA, 1073 bp, Cannabis indica
cacaaaacgtaatgacatgtaaatataaaaaaggcacaaaaattatatttttttttaagttatgaaagtctcatcttaattaggtgtgattaattgaaaaggttatactcattttcaacttacaagtttttcataagacgagagcattaatttatgtgtccttagagtttatttttgtcaattactaccaaaaaacataagagtttattttgtaaaatacttaataaattaaatatatttttcattgtatataagattatgtaggcatgacaggataaatatatcaactcataagaatctctcttagaatataaaaggtttacattcatttgttaatgataaaaaaaaaaaagttttacaaaaatattaaatttttggtaaaagtttacaattttacagttacatagaattttttacaaaaatcgtgtatttttataaaataaccgtaaaataacaaaacggaacaattaaaacaacagtgaaacaactaaaaaataactgtagaacaacagtgaaaagttaacacagtacacagtataaaatttacatagtattttaagaaaaattctgcccacagtaaaaaagtaaaaaaattaaaaatttacagtatgtggtgtaaaaatcattcctcatgccgaatggagtgtaacatagggctaaatttaccaattttaaaaatttggcgcgttttctttctgttggggaggttgccccgctttggttttttttgtttaacaaagttgctttgctatctaaacaaaaaattagttgttcaatttatgaaaatggtagcacaaaccaaaatacacgggtcgaggtcggggtcgagttcttattcccgtcgtgttaaacaaccttgctcgtcgataatggttcgtgatttaacctcattccttcagctaaaaactaacttatatttcgatcccttaatcgaattctcccaatattttagagtcataaaattgttctttttttttttaatttggtgattcataattttgcattgagccctcaatttctattatgaagagaaatcttattggtaaagtacaatgtgaggtatgtttatttct

SEQ ID NO: 176742 - DNA, 529 bp, Cannabis indica
gcacgggcctagcccacctatgcttagagccgaccctagttgcgctctacaaataacttataattttagtgaaccttcgtcaaaaatgtaattagtatagtcaatcttctcgatataccaaataatatcttatgtaatgaccataaaatttaatttatagtactaatttaaaaatgctttttaaataaaaaaaaaaaaaaaaaaaaacaaaaaaaaaaacttaataatactttttatatttaattattaaattaaatttgtgaatggtattaatagtgccagtgattactgcatcattttacggtgaaatgtagtgcgagcagttcacacctatcataaaatattttaataaataataatgttattataaaattttcaaacaaccaatgataatacaatcactaataatagatttcaacttgtaaaaaaatgtacacgtacgttcacttaaatatttactaaatataatattatgtccttttcaaaaaaatatattatgtagttaatatatatatagggttttttacac

SEQ ID NO: 176743 - DNA, 627 bp, Cannabis indica
actaagtacgcattgtttgttgggttacaaaggtaataatttgggtactttctctactaaaagataatttgggtatttatgtgttgcaaatgtaataattttaagtatttttgcagcaaatattccaattttttctttgtcaaattgacttttttttttaagtgcaaaataacttgagaaagagaaatttcttagattcattgtgttactgtctaagggatttcttctatcccaaaaatgaaaaaaatcatatatatctattatgcagaatgatttcatatatttatatatatgtgaaatttataattattggtaagacatcaattggggttgtaatatcttctcaatttcaaggtccaattggtgtagtccaactgagatcatatccattttttatctcacttacagtggctttgaaaaattatgtgtttaagaagtaggaattataagatttacagaatttaaaaataaaaagtaaaaaaaaaaaaactggcccccttacacaaaatttcgtaattgtcattttattcaaagtaacacactatagttgctttcaattgaaaacaaccttcacacttgattatagataataacatagacaaagctcatgagtcatgatgaatgaga

SEQ ID NO: 176744 - DNA, 831 bp, Cannabis indica
gttatcttctcctatatgcactattgaattgaatatacctaaagatcaaaaccctttttttcttgagaaaactgttacaagccaaccacaatcaaacgaactgtaacgatcaacatgccttctatggccgcagtctccatccacgctgagcaagtgcttcatgcacctttgaggctgcttcggcagtatcatttaggggaggataactccagctttctctaatctgaaattggaaaagaaatatgtcaaaacaatgagaaaatgatgtgaaaatgagctaagaaactaaataagaggaaatattgaaaatttatgggcactacaaaacttaaacacaattacatagtaacacctttaaatcatttatgtacataaagtgattcttctttaaaagctgcacaagtgtacgtttttcgagtgtaacaaaagaataggaataaaaatagagaaaggaatggaataaaatttaatatgtatttaaaatataaatatattttaaaacgcaaccaaattgcacattacttacatcctcagaacctgtaaatggccgaactactcctcgattcatcagagacttgtggaaatcagagagtttccatctacatttctcaacacccataacgtagacaggtttcctggggagcatagtttttttagagggaaaaaaacccacagaatgtacaaaagtaattaaggtgaagaccacatcctattactaattatgttcgattagtaactcaagagataatattattatcttacccagtgctgcaacctcactatcagactaacagaatctgctgtcacacgaaagcatcagcccaagccaca

SEQ ID NO: 176745 - DNA, 574 bp, Cannabis indica
cagctagctcaacatgagtctcacacaaagacctccttctcccaccacttccggcgccggttcctattccatttccggcgaagggtaatgaaaccgaatgtctctgttgaagcatttgttcctctttcttgttgtcctttctcaacatcacttggctaaatttcttcttttccccttcttttgttgacttcttcgactggtctttacaagaatcaccactaccttttccatagtcgtcttcttcttctttgtcatttaccgttgcttttctgggttgaccagttttggctttggaaagagaatgcttagaggaatcgacagtgggagaggcggcggctgaggaggacatggtcttagacttgggttgatggaagtaggtactgtctataagactaagaatgactttattgttattattccttgaggtgggtttctgaactgtacggacatattgaccatggtcaagcgatcttgacaggctgatgttattgttatttttaagcagaggagaaggtttagagggtaaaatgggatctgggttatggagggtatggtcagacatggaagatgactt

SEQ ID NO: 176746 - DNA, 743 bp, Cannabis indica
gatgtagacctaacttaaataaagtactacgatggctgccgctgggcgtacctataggtcttacaaatgagtaatgagataattaagatccacaataaatctataaacctttataaaaaagaaaatagttcaatttggacttctcatagtctatttacaaaaataactcttcttaattatttatttacctataacttaaacaacacctgttaactattcaatgacaagtgtgttaaggtgttgcatgcgtgggtttttcataacccatattaattatttatttacttataatttttaatgagataacacatgtcaactattcaatgacagatgtggtaagttgtgttgcatgtgtgttttttttttgtctttttattggtattgaaagaactcagttgaagatcgttttgatattaggtttgtttagctcgctttctctctctctatatctttatatattaaaagtgcctatctaacggcattttttgttttcttggtttaacagaatataccttaaaaataaaagaatattctgttaaatttaacgatggtaatacgttttatctccgttaacaaataaacccaataataaatccaaaaattaacaatcttttttaaataaaaaaaatatcttaccacatatctctctaacaaacctatcctcacacctagaaaactatattatccccattcaaaaagcctaatctttcttcttcctattccgtattaacgtatacaaaaat

SEQ ID NO: 176747 - DNA, 774 bp, Cannabis indica
tagaagctgacctgtaactactgaaggactggcagcagcatctgcctgagttatagcaaagacacgagcaggtgcaggtacaggtttgacctcgggcttcggttcctctttcttcaactgaggacagtctttcctgagatgtcccaccgaaccacactgaaaacaggctctccggttacaaaccccgggatgatgcttcttgcaacgcgggcactcaggataagaataagtctgacgtcctcctctattctggtttcctcgaaacctttttccttgccctgaacttcccgaagatggaaaagttcttttcttctgttcaaaggtagaacccccactctctttctcaggacccgacatagggagagtagtaatcccaccaacaccagaagactctcgggtttcttgtaaaaatttaactgccccttcagctcgaagagccttatcaaccatttctgcataagttgtggtatcactcgttgtaataaccaggtcatgtctgattttggcattcagcccagccaaatacttttctttcttgctgaagtctgttggtacaattccggaggctaacttagccaagcgatcaaacttggtggtatactcggtcactgacataccctcaccttgtaccaactcaataaattccttccgctttgcactgcggaccgcctcattgtaatatttggcattgaacaattcccggaactcttcccaggtcattctggtcacatctctggtgagggataccatttcccaccaaatcagggcatcctc

SEQ ID NO: 176748 - DNA, 658 bp, Cannabis indica
ttttagtttcaaatagttaaagtcaaacaacaaaacaaaaagtctcacaaaatccttataacaatgtcaccaaagcataaatcaagtaaggaaattaggtcaacctctcattacttgaacccatcaaaaaaaaaaaaaaaaaatcccatctgaaccaataaggtaaacaaatccatctccaaatctaaaagattataaattgtccttaaaatttagacttaattggaattggtaagagaaactcataaatgccacataataaattctcaacaactgcatgccctcttcgtgtctcacaaaacagtctctttccacgttttatctcttcccctaaatttcaacaactccaaatacataatattattattattagagagaataataaaagagaaggaagtgagagaaagtgatcatatcatatcttatcaccatgggaaggaagagaagctcacctgtgaatgttctgtttggttggttgagaaaacagaatatgaaaatcaaaatctttgttggtgtcactattgggttatttgcactaattgctttgaaattcactgtcaaaaatcacaaccatttctttgttgcatctgaggctgttcatgttgctggaattcttgtactcatttacaaactcaccactcaaaagacttgctctggt

SEQ ID NO: 176749 - DNA, 784 bp, Cannabis indica
cagacaaaagccaataccacataaacaatcactagcaaaaggattataagagcaatcctgacagaaatgcataataaagaattcagttagtacattacaactccaaactagtgaataagaataacattatgaaactgagctgaatttcacatctttattcaattttgaagagcttgagttgatgggcattgcattagttgtcattaaattagttacacattaaagaaatacgttccaacacaatttcttattgtacttcttattcaaataaataaagaagtaaaagtaaattagagaaagaaaaaaaaagggctttagattagaaacatacgtgagcttcacatttctccaccatactgtgcttctaaaacgacgagcttgttttctgaatctgaaggtgtttccttgcatattagcagttttatcaactagcaactctaaccgatcgcctctttctaataccttgtcaatattctctatcatgacatttcgaacctacgtttatacaaaccagaaatttaaaaacatatcaataataaaacaggtaaatttatttacccatcaacagttggtaataagctcaatacataaaacataattacttgttttattagaattcagcaaaatcaaagattcaaaacgatgttattattcatcttttatagacataggtaaccaaaactaaatggtcccaaccaacgaagtttgtatcaaaatctcaacatgagctgttaaattcaccattaagaaaaaaaacattcaactatacctggctcatttcacc

SEQ ID NO: 176750 - DNA, 730 bp, Cannabis indica
atttttttttttttgataattcacgagacgtgtacttgcttgtaagttgtaaaccctaacttacggcatggttttatttcccacctaatcattgtctttatgaattcgatgatatctagttttctttataggtaagcggattaatttgatagaacaaaattaatcaaaacctactttattttagtttttaatttctgaaaaaaaaaagcatctttaatatattattgttattttcgttaaaataaaaattatttttattgttattacttgatttatattttctattttaattagtatttaattattttaataatattttataatttttttttaaataaaaaatgcatactttattaaatatccaaacgaattacatccatcaatgtagcaagggcattagattccctgtacatacaatcagtataagaaacggaagctctagcaagatagtgagctacacgattcgcaaatcgttttataaaacataaatcaacatcacttaactttgaaagtaaagataataattaaacataaatcaacataatattttataatttagatttactaaatataaattttataaaataatataaaatagtaattattttgagagttatttgcggcataacctcctaaagtaggcaggtttttgcaactaaccccctaatctaaaatttttgtggtaaaatctcctaaacccaactgttagcacttagccccttccatccat

SEQ ID NO: 176751 - DNA, 583 bp, Cannabis indica
tccaccgttggatccaccatacctaccacccccaccacagattttcccaccgccacctcctaccaaaacgctcacacaaccattacctctggatccaatataagactcttagttttgtgagcttgaaaataagcccaaaataatttcaaaattagggttatgactcaagaataggcgacctaatttatcaaacaataatgataaggaaaaatgaaaaatatgaatttaagaaatgggaacatacaagggacacgaggatgatgatgatgatgatgatgatgaagatatgggctggtatggttaccttctaggtttgggttttcttgaaagagaaagacggagggcttcgagagaggtaggcggaggagaagtcgaaatcggtagaggcagatggaggagaagtcgaattcgaagtcacaaaatgcagaatgaatctgaacagtagggcttcgatgcgtgggtgtattacaatttgggtctgtggaatccttttgtaattataaatgtatcagttaaaaaagatctaatataaaatatccgactatttataagtgacgctaatagtctattacattttttaaaa

SEQ ID NO: 176752 - DNA, 747 bp, Cannabis indica
ataaggaaagctaaacccatcgtatttaaggttagtgggtaatcttaaccttttatctatgattctattctcttctattcttcctgaagcatcactgtgcatcaacaactaccacacatttcctaacctctcaatattttattataagtttctcttcgtcagatcacttacaatttattattctatagtgtatccaatataaacctgaactctcatgatacacagcaaaaaataagtttctacgtcagatataagacaagtcacaaagctagaattctgaagatatcacctggaaaattccaaatatattctaaacatcataatgggattaataacttgggtcttgttgatagaagccaagaagcaagagtccttgataacaatctagttctctacaactttctaaagcaaaagtaggcttcgagaatcacagtaattcctttaccgtcttcaacaaacagcacacccccacccccacaacaccaaacccctttttccctccccatttcaaaatctcgtataaaaaatatagaaaagaagagaaacattgtataatatagtcttatacaattaccactcaaaaaacatacgtaagctactaaatgaattctgttaggataattgctagtagaacaacagtgttctcttagtttttacgaaaagccaacgtaccgataattacacttctaaaccttgtaatccaaacaaaagtttaaagtaaatattctacaaatattaccacataac

SEQ ID NO: 176753 - DNA, 632 bp, Cannabis indica
cgtttctttttttttttttggctttgaaaaactgtttgttttgactatttgctttttcttctcaactaggtttttattattaatctgctagtttcgagaccatagaaagagtgtgtttacggccaatggaattttcttattgggttataagcttttattgttatgtgtgacacgttttgatttgtgttattaatcatatatatacaccccaattttagtttgcattgttttgttgattttatttgcgtacaagtatatatagaatatattcatttttgtactaaatgaaattaaccaaagctataacaataataattaaggagctttattacttatattaatatgggaaaatttcttgcatcattactgtataacatattaacaacgttgtgatctaaacacaataagtggcaattattatgttaattaattaaattgtaactcataataataaaatgaagttatgaagaatttgccaaaaataaaattgtaacatgaactttgattgccacaataatttattgaatttctgtttagattctgtttttttatcattggtgtttttattatatttttataatgagtaaatcaaatagaatttcattgatgatggaattgtgtgaatgaaatta

SEQ ID NO: 176754 - DNA, 951 bp, Cannabis indica
gccattcaagacagttacattagaattaacttcatcactatatataaccataagactcatcatcttgatcagtctattaatacttgagtagcccatatacagcctaaaccctttttgtaattacttctgatggagaagtgacgctcaaaatctattataattatttttttcttttttattatttatttatttattattttatttttttaaaaaaaaatgctagcttcattcttctacatagaaatttattatactatcgtaataattttttttatttgcattcatacatttactgagatttccattttttttcttactatttgaatggaaaatgtaaagtttgtgaagagtgcttcacagtctgcagcttcatggacatcatccagctccagttctagcggcagagaggaagagtgcttccccatggccttcttctactcctttctcttcaggttaccaaggaaaagctccatcattggtgttttggctgtggctggtttaaaactagaaggaagagtgggaatgaaattatagtctattgtggctgtgggtggttggaattaaattataaattagttttttaaaagataaaaaaaaaaattattggttatcagataaaattttttaattgggtgttaatcttttttagttgggtgccaattttttttttttttaaaaaaaaaataacatttgataacctaaacatatacatcttatgcaattttgacttttaaaagtcatgtaaatcaatggctaaaaagatatatgcatagtataggaacaaaaccatagtcaccataaaattattctattattattattattattgttgttgttgttgttgttgttgttgttgttgttgttgttgttgttgttgttgttgttgttgttgttgttgttgttgttgttgttgttgttgttgttgttgttgttgttaattgataaatcttg

SEQ ID NO: 176755 - DNA, 626 bp, Cannabis indica
aaaaaaaaaaaaaaaacaatcttgtgtgctatgaattgtaccatgcattttatcatgtgctagttcagcaggagcatagccttttcctttctcagtaataacatggatgagaacaggtcctgatgtttgcatagctttgacattattcaaaatgttgactagatcttccacattatgaccatctactggtccaatgtaatacagtccaagctcttcaaatagtgaagtccctgctgcaccagccaccatgcctctaacacaagtgtcaacttttgatgcaatttcatgagcttgccctcctatttgcttggaaatgtcctatacatcaaaatgttgaagatgttacattttccacatgtgaaatcacaacaaaatgatgaatgcattatatttggacttcaactaattaaacatttcacaaaatattaaattttaagtaaaagtttacaattttactatcacataatttatttttacaaaaatactatatttttataaaataatcgtaaaataacaaaacattgtggaacaacattgaaaatttaacacagtaaacaatataaaatttacatggtatttttttaaaaatttttggcctacagtaaaaaagtgaaatttctatatgt

SEQ ID NO: 176756 - DNA, 848 bp, Cannabis indica
gttgcttttttttttaaacaactcagttgttttattttattttttgaatgaaccatttaattcgttttagtacccaatttacatgttcaattttaaaataaaataaatcaatatattttataatgaaaccattaattatagaatgtgatataaattgactaaaaaatcatatgaccactaatttataattataactactaattaaacaacaaaattatatttaaatagtgtttggttggaggtaatgaaatgaaactaaaatacaaattaaataatttttatttcatttctttgtttagttgcataatatcagtctaacggaatgactgttctatcattttagtggaatgactattaatttcattttgaaatgaaatgaaaaatcattccaatacaagatgagaaaaagatttaataatttttttattaatttttgtatgtgttttaattttgctttcatgccattcatttttcctattcccaataatcttattgctattcttataattttattctttcccactaaacactatcttagtttagttttataaataatccaaagtattattaattgttttaaaataattttcttgagattttttgaatgagaatacaactgatttataataaaattgaccaaaaaaaaataattactctttaaattatacctatataaatttattatgataatatttaattgttttaaaattataagtcaaatgtgcaattgcacataaaaaaaaaaaaaaaaaaaaaaaaaaaaaaaaaaaaactaaagtacttaatagaagaatgcaaaactaactattctgttctttttgttgacttgttttcgtacattttgtttc

SEQ ID NO: 176757 - DNA, 1062 bp, Cannabis indica
aaaattggcaaggacaccaagagtatatgcaacaaagctttagagtaaatgcaacaaagctttactataattccgaaatgaaagagttacatttgtcttaagaattattattatgagtgtatgtaatactaaggctaattatgaatttttttttcttaaaattttgacatgtatcaaatcatgccctaactttttcagctgttaaaaatttcccatgaactattgaaattgttaaatttaaatacttttgtctaattttagtaaaaaaattctaacatcgatgaaagtttagggtatgatttagtacatgtcaaagttcgaaaaagaaatcctaattagcctaatattaatttaagttgattaatcatttataagggattaccaaccaattaattagctatagtgacccaacatattgtttctaacatggagttggtaacatgtttcccctaaaagttttaaaagaaataaaataaaatttatatattattttaatcggggtattttcttttttctttttttaacaacaagtggaggtttgattcaaaatgattatgttttttagttaaaactttaaattttcgttcgaaaaatcagcagaatgccaattaacaaggggtcgggtcacttcagtctatggtttggctcatttcaaatagtattaaatactatttcaggccttgtattttgtgaaagttattaattggaccctctgttttattaaatgataaaatggaccttctatttttcaaaatagtaaaaataagaccatgagctcaatttttaataattttatttttttaattataatcaactattagacaatttttaacacgaacagatactataaatgtaaccagtttcattataacatctcgtattcacattgttattaagttttattttgataaaatatcaattcaaggtcctatttgtacaattttaaaaaatacatagtctactttgtcatttaacaaactagagggtccaattgataacttttgcaaaacacagggtccaaaatagtatttatccttgaaaatatcctttcaaaatatatcc

SEQ ID NO: 176758 - DNA, 796 bp, Cannabis indica
aatattaataatttaaataattaaaaaaaataatttaaaatatttaaaaataataaaaaaattctctctttttttttttctttcttcttctgttgacgatgaaaagtggtcaacatcagctcgctagattagcgagattattaataaatttaagataaataatttaaagagacacacataatttatagtagttcacccctatattgcgatagtaatagggctacatctatttcgagtttttatttctcacgaaatggtgattgcagcaatagactaagtatcagaaactccaaactctatagagagaagctctgaccttgtgggtagttttctatatgtgaaaaatgagctaagggagttttccttttataggtgaaggaggcccacaaaaatagaagaaaaataaaataagttattttcacagttgatgataagtgaaaattagcttttggtggggatggtcaatttttgtgcccggcgggtcccattgcgggttactcggagcttattttgtaactcccttggggtgaattttgacggtgatatctttagaattgcaactgggatgtgagacatgacttgatagaaagtttaaatagcttcaaaatgcaagttgaatcacgtcaatcagataaaaattgagtgagttatagctgttttactaaagtggttcaggtactagcgactaggttgccatccagtgcacagtggacatcccaacgcccaggttgcatctgacatcaacatggacgttgtataagtgtagaatgtccaatggatgtcctttgagatgcct

SEQ ID NO: 176759 - DNA, 404 bp, Cannabis indica
gttggaactttgagccaagagcctggtgagatatcaatgatcaatacaaagagcaatggtgacgtaggactctccctctccttaagacccttttcccccttttaaaagaaccttagattctgtcattcatcaaaaggttataatttgtacctttcagataaactatgatccattgaatgaatctagacgagaaacatatgcatttgagcagcttttctacaaataaccaatcaacagtatcataagctttacttcaatcttcatgatacatctagctaaaatgttcttcctattgtagccttttagaaggtcctaaaaattagaatgttgttggaaatattttaccaagatctagatttactaacaagtatgtttcattaacatcctaatatgaaattctaaaa

SEQ ID NO: 176760 - DNA, 1096 bp, Cannabis indica
ttcacaaataattattatgacatcagagttaggtttacgagagtgaatttcttaagtgtgatcacataactaggttcacaaataattatcagttatcaccacacaagcgaaattcatatgcatatgaactgtactagggaaagcctcaataccctcaaactcatctagttctaacaaataatggccctctctttaagtttaactgtttaagcgcattgtactcccaatctgggagctctcagcctcatgttcatggagtttggttgagctgagtcaactaccagacttgcttgaaatcttgaaagaatttacaattgagatggagcattactattgtttccaaatattgtctctgtcatcctcatcaaatacaacatccttctttgaaagattgcctcgggttatgatctttgaactcgaagagagagtgaactcaattcagtggattgattttcaacaggagtcttctctttttctaaagttagattcaatttttatggacttgttttgcaagttgactttcctgtagacttacagggtaatcctgattattagaatttcaaaataggtccatcgatcaggcatgttggcttgataccttcagggccaccaacaagaggccacagtgagattaagaacgagaagggtaaaaacatgggagaagttacctaaggaggatttagtccttgccttaagaaaatagctacgagatacgtgaaatttggatcatacaaatcaaggagcaaagttaattgttcatcacaaaaatgtcatttgtatctacaaaatactacaagccaacctgatttaagtgtggcatatatcagtaccagatatattctaattcattcatcatggacaacattttcataaaactcgactgttgcagtgaaatacactcatttcaattgtgtatttgctacacattctgaatggaatgaaatgtttctttcttttaactttctctattatgtttcgtggaatgcttaaaattgtggttttgtaatgccccataaaaacttgaagaagatacaggaataaaaggaatgaataagaggtgatacagataattaagtcttaagttcattgattgaag

SEQ ID NO: 176761 - DNA, 572 bp, Cannabis indica
aagccatgagagttagagagtgtaattggaaccccttaattacctacaattacacaattataatgtaattacatagtcagacaaacatgtcaaaacatataattatctctaattacatataaattcaattacaatataactttccaagcgcgtctttatatggattgacaaagttaatatcagattgtttgctgaagctaaagaagaagccactggtgaaaacagttaattgactaactatattcagttagaaatttgttataatactggtagagtagttagtcattattggttagttttgatttagctgaggtaaagctcatggtatattgggatatttaaggtaaaattttttaatatttgtaagtgttacacacatgaccttaataaaaaaaagtagcggcaaaactaccatcttacgattttgttgcaattatactattttttggttgttaagtgtcaattaagcccattaagtgtgagctcaaaaatacatacatggcgatatatttctttaacttatttaatacatagtgtaaaaatatgtcgccacgtgtttctgagttgacatt

SEQ ID NO: 176762 - DNA, 495 bp, Cannabis indica
gcctttttagaaggtggctggtctgtgctctttgctttttttctgttttagacttgtctcattgtaagttgtgtttttggattccccaaactcatgttgtagcagccaatgctttggcaatttgggctaggcttgccaagtttagtggatgcccctccttttttgggagttaacttcctttattgttaacaaaccttgtatttagtttctaatgcatctcttccttgtaaaataaaaaataataataataaataaaaaaaaaaaccttttgtgagtgcttaagaaaatacttttattttgtattactcactaactaaaacatatatacttgatctagagttgcctttgacttgtatccacagcctattttcccacaatacttttcctttgggtcatctacatgcttggtctttactattcaatatgatatccatactttctattctaccaagtctttctcttgcaaaaaataaaggataaaaaactattcaacat

SEQ ID NO: 176763 - DNA, 1090 bp, Cannabis indica
  modified_base (914)..(914): a, c, t, g, unknown or other
aacggttgatggcggtgattcacgaagacttggaagattgatgttgaaaggcctaaaaatttttcttccctagcttatttttttaggttagcttgtagttagatttattaacttgttaatactttgactaattttacaatatttgtgtaatatttaattacttctatgaaatgaaattaggtattttggccaatcctaaaattaatttaaataatatttaatttaccttttaaatatataattggcttcgattcctacgggtatatatggtgtcggttattagatagaaactgacgtcatatatactcctatggcgttagtaactagataatagttgacgccataggggtatatatggcgtcggttgttttcaaccttacagtgtagctaacaaattttgtcaaaaccaacgcgtcttaaaaactgtctttaaagatggtttttatagtagtgaactgatttgctaccttgtttggtaggtgaagtaattagttaataaagcggattttttattttttttaaaaaaaaaaacctattgagttaataaactaaataattatcttattaacgattaattgataattgacgtacaactccacattcgaaaggaaatatcttggaaaatataccatcctaaacatccaaacagaaaacagaccactaaatgaaaaacgataatgcataacaaaaataaacaaccaaacatttataaaaataattttgcatgaaagcggccttgatatttatttatctttttattttttttcgaagagaaaacatacaaaataatgaccatgaaatttcttagggggaagactgatacagacttatccaaaaaagaaaaatagacaagttaataaagttaattattaaaaaagccaaaaaagaaacgaaaaaaaaaaaaaaaaaaaaanaaaaaaaaaaacaagaaagagatggaagcaaagtgaaggtgtatagtttactgagtcaatagacaaaaactgagagacttggttctcactttcaaaaagtcgttgccggcaactatcaattattattattattattattattattattattattattattattattattattatta

SEQ ID NO: 176764 - DNA, 629 bp, Cannabis indica
ttccaaatataaacatgatgtatatgtgtattaaatccaatactaattacacgtttgtttacaggttttttttattattatagaattctaagtagaaatttctattaactttaaattgtaacaaaattttttacaaaagctcttattagaattagtactgcaattactttaaaaattcaaaccgtaaatttgaaaaagaaaattaaaaaaatagtataagattaatttttgtttagtccacactagtctatatacatgtattatgtgtattaattccaatactaattaggaatgaaaatggaaaaagctctctgtagagtattcaggaagcatgtttgcggtgccatttattatcttgcaaattctttatctgtaagtatgtgtgtctttccatcttttagtcctacaaatagatgaattgttgtgattgacttaaagtcaacttcagcatatgtataaaagtaagattcttaaaacaaaaatgacatgggaaaaaaaaagtgcctataaactgtaaaagtggtatggcttcatattctgaatttgataagttatattacagaaattctcagtataaatataaggcaaaaatgtagtgaaagtaagtggtttttttggtctgcaaaaac

SEQ ID NO: 176765 - DNA, 694 bp, Cannabis indica
gtggaagcaaaattaggagtaaagttggaactttttaatatcagctaaactcactagaaaaagtgcaagcctgcccacataaggtggtaaaatcaaaatagtgattttgtttgttttaactcaatccttaaatagttgggttattacttattagtgtggtcgctccctaaagtttttgtgaattagcaactatttactcattgttctcataaaaaaaaaaaacaaaactttttactccattgctcaacggataaaagctacactgaagataataatattcttgatttcgatttacatataatgttgattggaccacgtctaatgtttaagacttatccagattcgatccaattatatattagatgttaaattttagcatctgatccgattcaattaattcaacatatccaataaaaaatatataatttaatgttaatttttatatatacatatattttttacatataacaatataaaatttaattattaattcaaattaaatgaaaatattaattagttctattagatgttggaagtattaaatttttggatactccattcaacatctgatccgatctaattgggtattcaaaaataacatttaattcgattcgatcacaattggatatctaatatttgacgatcggtaattaggtaaatcaattatcattagattgatttgatcgatttatac

SEQ ID NO: 176766 - DNA, 904 bp, Cannabis indica
gactagtagtacgtagtcagcactgcagaagatgtaaattcatcgtatatcattccaaattggaatgtattgaatcactcaccagtgtatggcatgacaaagaaaaagaccatgtaatggaaatagtactaacgagtcgccacaaatatatagccaaatttttgattgcttgaaatctacatcaccatttttaaattttcataacatgacaataaaacacagaaaataaataaatttaaaatccagttccactccttctgcaaaaggatgccataataattcttgaatttttatgtaaagaaaaagctcattccagccctaaacccactcccaaggagaggagaagagaagggaatagatgagatgtgaggagtgtttgtgtttgtgtctgtgtgtgcgttttcttcattcttctgcagcactagcagcacttaagtccacactcaggtcaagaaccttcccagtaatgagggtgtacatgttgagtacatccaccacagtcgactcaaaatgtgttgtagcatcataactctgcggagtaaatatatacaaagcaacctggtaagtctcaatccatacctatacatatatttactattcaaatataatatatctataactcactgttgatataaagcaattgtccagtgtgggttcattgactggttcatatctatcataaatatcgaaaaatatctcgtccacaggcccaagaagatcaattccaggtttcagctcagactcaggattatctgtctccgcgtcagttgacacaaatgcaataaattttccttttggagcaacattgtgagagtaagaacaacaaaaaagatacctgcccattcacaaaaactcccaaacattagtctccttaagtaaacgaagtcctttcactatcactatt

SEQ ID NO: 176767 - DNA, 696 bp, Cannabis indica
gttgaggctcgtaagggattgtattagctggtcgccacatgtatccgtaatgtagaaaaggaacaaaactagtataattatatatattatgcaccagattctccttctttttatggctaaacattgtatcattcttttgttctggcaataattatgtgcaaaatcctatctattaatattactatacaatatttatttaaggatggatcataataataatctatgaagaacttatgtcatccttggttggcacttggaatccagaataagcttttcattcttgacctgtctctgtgaaccaaccaattagtatgtctgttagtatattagagtcaagttttatattattgtgagatattggcttttatctctttctttaatatgaatttgctttgcatttagttacatcataggaaaattatatgctcttgtgtttttaaagttgtaaaccactaggattaatattgtcctcatgccctttatgcaatgctatttatttatttttattgaaattataggtaatttggaaaggaatttgtgtcaagcatttccaatgactaccaacatttttagctacttcaatattaagaaacacagacctaataaagaagaagtaataattttaacctcattctatgccactatataccaccaccacaaccacatgtggttataaatcgctttattgtaaataag

SEQ ID NO: 176768 - DNA, 684 bp, Cannabis indica
caaggtatttaagaaagtttagtcttgacactgaagtaatttggagaaaacttatacaacaacatactgatatgttatgccttatttttcagttacaagtatgcaaatgagtccaattcacattatacaaaaactggcaaagcttctttgaggttccagctgataaatcagcgagcagatttttcttttgcattattttcgggtgggctgtcaaatgtaagcttgtgaccctgtctgctattatgctgaatctacattcttggtctcaatatttgaagatttatttacattttttttatcaaattctatgacagatatttgcttacccatttatcattcacacattctcttctatgtaccatcttgattataaaactttttgtactattgatgtttccatcacatgactaacttctttgtactatattgcagccaaaaagttgtggcagtttcaaaattttatatcatttgtcaatccaaaagcaccgctctatccacgtctgctcagggaaaatctgggatgaagtaagtttttcatttaaactgaggcttcttggcaggctgttttcatgtacaataagaagtattgtttaaatgttctgagcttgaaaatcagacattgcttgtctgattttggattttttctctttttatttgttccaagttctgtattgtttaatcctg

SEQ ID NO: 176769 - DNA, 533 bp, Cannabis indica
aaaaaaaaaacttaaatttaaaagtagagttgactgtgtaccctttattctgggcccactgagagcggactttttttttttttgaaagaaaggagcccactaggaagacagaaaatcaaataaattgcaggggtcgtctccaatccaaacggctgcttcatctaacccaagagctcggtgagctagtttatcggccaggatgttggcatcacgattaatgtggcagagccgagcagctgggaaaaaagataaagtattcttgatttgtttaatgatgtcaccaaaaaccgacatatcttctttatggccagagagagcatcagtaatggctttgcaatctgtttccacctcttggactaagaaatgctcgttgatacaccactgaagcgctgaaaggagagattttgcttccaaggttgggaccgagcctcccccggaatgaggttgggcataggcggcaactaccagaccgtcgctgtttctgatgatacctccgaagcccgcttttcgggaggattgagaaagtgctgcac

SEQ ID NO: 176770 - DNA, 647 bp, Cannabis indica
aattaaaataataatataaattattttgagtggctgagattaaatctttcttaaagcctaattcaaatcaccatacatctaaatatatactaatatatttttttaaataaataagattattattaattaattatataatataaatataatatatataataagttaggtaagtttttatattttcaaaaaaactttttataatattatataaaatatatattatagtgatatataaatttaattaattagttatatgattaataattaaaccttttatatattatatttaaattcttattcaatttttaataattataaataaactctaaataaaataaattattaatttaacactaatttctcacaatcaacaataaagcatatatttctcttatcttttcaatttagcgcaacttagtgaaaattctaaaatttgacatagttaattttttaattctaataaatcaattaatttgagacatcaaggtgatattatcctaaatactacagggaccatgggcctatataatcaagcttccaataaatagttatagaatttacagagtaaattctctatcttattaattccacctgattctactacagattcagaatggcactcatgattacatagaatactctattct

SEQ ID NO: 176771 - DNA, 694 bp, Cannabis indica
tttagtgactagtgtgaatacgtttactgtacataggtaactttggttttgtatctaatcatacattagaattataggtgttgctcgaaatcagtggaagcctgctcacattaagaaatgcatatggattttatggtcatgtcaatccatatttaggctgataataggatttgtctttttctggtctgtttgactggaccataaggtgaaggaggcctttttggttttatgggtgaaacattttttacaggttactcatcttagagcagaacaaatagtgagcatttacgtaaattgggatacataatgctagtttccattagccagtagtggtatattttttactatgtttaattatctcagtcatgtgttctggttactttttaatcttgggaaaatagagaaaaatcagatctggttcttacttttagccacagcagataaagaaaaacagaaatgtaggttctcttacattagggcatgagatctatgttctggtgctgggctctgtaaatcggtggagttactttgaagaactaggaagtaagagatgacttgcgaaaatacttcatttttgtcttggttttaatatatgctgtctttgttttttggaatccaaagtggttaactattacattttatagagggagttaaaagcagatccaacatttattcatgttcattaggtgaagac

SEQ ID NO: 176772 - DNA, 899 bp, Cannabis indica
ttttatttctcgcttagacaatcgggctacaaactatagtaagaaaggctagagtgcataatcttttgaatggtgtttaccataggaagggatcttctgttgtgctttccaattacttattttattgaataaattcatgttattccaaaaaaaaaatatatatatttaaatgcataatatttcgacaccttttttaccctaaatgaatataattaaaatatctcttttcaaatgtattaaaagtagattgtctataatttattatgcttaattttcatttaataaatttatctatataatgttcactatattcattgccatcatcatgatcaaatgagtttttgcattgctatataagcattcttattatgtattttatagtgcttaatgtggcgcgtcatgaatagttaaatattttttaatgttatttattaaattaaaatatgtgagacttatatttaattatttgcaatatatcacttcttatagtatttaacactataaagtattccatattatttttcttgttatgatggtttatgttattgcatttcagagacttgagctacaacactctcacgggttcaattccggagtctatgaaaccaaatatgatttacatgtaagattgatatatattatgttaacagctgtttttaattcatttctttgtgacgtttattagaggatgaatactaaaatcttattgttaggataataataccaaaacatatattgttatacgtagccattagcttgtcaaaaagaaaacttattaacagttagtagttagcactaaactgcaagaaaaaagtaatgttttgttacttcaccaccaaaaatattttgatacttatgcatactattttgactcacctctccttaaattttagtattga

SEQ ID NO: 176773 - DNA, 578 bp, Cannabis indica
tcaataataaaacacgttaaccaggcactaccttatcatcaacgatgcctctctgtcatcattttcccttttcttatcatcaacgatggcactaccttcagcttgatttccatcagaggtaatagtaatagatggttccaagagacgagggcctgcataattgagccgcagttggtcgcttctgaggaacaaaatcaaggatgggaaccaggaaaatgaaaatgtaactgtaaggcaaatgaaaatgtagagggaaaatttggagtttacctccaaaaaaaatattttagcaaatttatttagtagcagtttgtttttaataataaataattatatgttttaaaaaaacaaagaatataattatttgttatctttatacattagttaatattttaataaaaatattttcatattatattaaaaataatatattaaactaacattaatatatccaaaaaaataaattaatatttatatattatccatacatatataagcaaactagtaaaaagttacgtgcgaggcacgtatactaaattttatgctagttttttttttctacgttattaaaaaagttg

SEQ ID NO: 176774 - DNA, 1505 bp, Cannabis indica
ataatgtaagtttaacatagtattatataaaaatatgatatataatacaatacaatacaatgcgacctaatacgacttacaaacaagcccttaatgtatttttatattctacatttgttattttgttattgattttttgttattgtatgttattttttgttattttaatgtcatttgaatgttatttttctgttattcttatatggttttataattatttttgtgttattttataaaatgctgtaaaaatgtaaaaaaaaaaaaatattatagtaattgcattgatctaaatgatcgtgtaatatatataagggataattacataaaatactatttttttgtaaaaaaaattatatttttatatttttacgattttcatagaaacaacactaaaataacaaaaaactacataaaagtaacattaaaataatatctaaataacatcaaaacaataacaaaaaataacatacaaataacaaaaaatgaacaacaaattaacaagagtacaacattaaaagaacgtattttctgtaaataaaattaaaaaaatacgtaaaatatttaaaattatgtgaaatcgtatttttgtaatttttttgttgttattgtgtatttgtgatataatctctattttttaacgtaatacttttagtcattagaatttttttaactttaaatataatgggataaatactattttagacccgttgttttgcaaaaattattaattaaaccttttattttgttaaatgacaaaatagaccctatattttccaaaacagtaaaataggatcctgagttcaatttttaacaattttattttttaatataatcaacttttagacaatttctaatacgaacatatacaactagttttgtcataacatctttagattagattattatcaagttttgttttgacaaaaaatcagtttaaggtcctatttgtacaattttggaaaacatatggtccattttgtatattatatacccactttattttatctgttttaatttttatctctttttatatattctttaagttaatataaattatatgctagaattaaatagagaatgaaagtatattgggcaacccacccaaaaaaagtaagtatattttaataaaatataatataagagtatttttaattaatagataaaaaaaatatttttcaacatatcctgtctattttattatttaataaaataaaaaatcaaattattaacttttgtaaatcacaatctaaagctatttacccaatataatattttgtacaaaccagtccaaggtttgaccaagtttgaaacttacaaactcacaagataaacaagttcagaattgctgcattttgcatgtgaaccaatctaaaaaacaaaaccccatcaacaaaatttgcttctcctccttctattcattcttttaatctttgaaccatagaaaagaatattctaaaaactaataatttacatctatgaacaaaaaaaaaaaaatgtaaacacat

SEQ ID NO: 176775 - DNA, 652 bp, Cannabis indica
  modified_base (607)..(607): a, c, t, g, unknown or other
ttttatttaatttttttaatttttgcctaattttaaaaaaatgaatccaaaaaaaaaaaggaaaaaaatgagaagaaggataacacttactcacaaaaaataccgatcaacactttagaaaaaaaaatattgctcaagaaaataataaaataaaataaacaaaattacaagtattttaagaatgttcatcaacaataagtcactttttttaaaagaaatactattataaaagaataaaataaattttgataattttgccaacatgatgaaaaaatcaaacttgtacgaatatacataaattattttaccaagttaataaattagtgtaacaaagttacagattatgcatgaaaagaatttactcagttataaaaatattttaagcaatccaaacagtatgtaaccgttttataagataatttggtaattttatgatattattttttaaaaaaaattgtagccaagtatatgtatgtcaatgtaaaagttggggacattgcccaaattgttaaaaagacttttatgagtatatgtaactaatggaggtactgttagatataaagtcaaaaaccaggtgaagtagcaccactataacaaagtagacggngtaagtagggatcggctggtgattatattcctgtgaacctcatgc

SEQ ID NO: 176776 - DNA, 521 bp, Cannabis indica
agaagtatgcagatatgtaaacttattcaacttggattatgtttgaagccttaccaaatgtttagcatccaattgcttctgtaaggctctcacatcagcttgaaaaaccagatgaagccattatggatttatcagctctgcgagtttaagataaattacaaacatacacagtagcatttaaaccacaacatcaagaatcataggagtcaatctaaaagcttttttaatctgtgaaattccgataaaaattaatcaagcaacacacaagaggaaatatgattcattttattaatgctcattaaataagcaaaaaattttctatagggtgataatcacacacacgaaaacatacatacatacatcttgccaccaaattatccaaatgaacatagtgtaagtgtaaaggttcgactcaacaaaatgtacaacagaaccgagcattataaattcatttctacacagaccaataattaaacgttcagtgtactgagtctgctccaacagttcaaataccaatttag

SEQ ID NO: 176777 - DNA, 672 bp, Cannabis indica
ttgagtgataaaactaattaagtataaagtgcgtcaattttttttttttaatttttcaatataaaaatttgttacatgcaatactaattaattttgtatttttcagctttacagtcatgtcaaataagaagtcacgtgatctaccattaagccgtacaaggtcatttggtccaaagaagacacataataatgattcaacatctacaaaatctccacctcctgtgccttgttctccaaatgaagattcaacaacaccatctgatgatgaaattcaagaattgttaggtacaaaccgttcatacatgcatgacttaattaagataatatatacataaatatagttatatcacaaattatattgtaattatggacagagtcaaagaagaacacccgtggccctactcgtggggatggagttagacgttcatcaaaaaatgatacaagtaagaaaataatttcttataggaaaggtgaacttagagtgtatgggccaaatgcaactatatttggaaacactgttggtgtaaaagtacgtcatcatgctccacttcagtatagtggttgggccaaaattcctccagaagataagaaagctgtatatgctcgcatcatggtatacatatttataatacaatttttatgtacataaagctataattttataattcattt

SEQ ID NO: 176778 - DNA, 744 bp, Cannabis indica
caagacattgatgtgcaaccttcatccgtggacagtaagccaagctacaaattgggccttggcagcccactaagatgctacgaaaacatctactttaaggggaaattcggtcatttgttcttattaatttaatatataaatatatcttattttatctgctaattagagtttaagctctcctatataaagagccttaactcaaccctaaaactaggggtgttcataaaatagccgatccaatccaatccgcacgatccaatccaatccaatccgcaaagtgcggatatccgcacttgtgcggattggattggattggaaaattcaaaatccgcacttgtgcggattggatgttgattgacatgtaaaagtaaccgatccaatccaatccacacatatttataacaaaattaaaaaattatatatacaaataacattttaatgtaaagaaaatagtaatttaaaagtctaatacatataatacaattatattgcaaaacttaatagataaaatgtatattctattcttatatatttttttactacatacaatttaaaataaaattaaatattttttttatatatacaattttttttcttcctttgaatttgttatttgttattttatttattttaatgtgttgttggagacataaaataactataatttgttttattttgttgtctagttatgtaaaaaaaatattttttctataatattaataatttaatataaaagtaaccaat

SEQ ID NO: 176779 - DNA, 686 bp, Cannabis indica
  modified_base (627)..(627): a, c, t, g, unknown or other
gataagagcctcggttgtgatgggatgtttgcaatgttctatcaaaattattagaacattggtggcacatctgtcattaatctggttcttggagttcttaatgaaggcctcgacttgacagataacaagtttttcatcacactgattcccaaagtgcccaacctagcttcaatgaatgattatcgtcctataagtttttgtaatgtcatttacaaacttatttctaagacaattgtcatcaaattcaaaaaagtgccgccttttgtcatatctgaaacaatcagcattcctctcaaatagattaatcacagacaacatcttaattgcctttgaactcgttcatcatcttcggcacaagacacagggtagaattgggtactcgactctcaagttggacatgagtaaagcatttgacatggttgaatggcagtatctagaggcaatcatgcttaagatgggttttgattatacatggacgtcactgattatgaggtgtataaccactatctctttcttattttctcttaatggtgaggtggtggtcatgtgcaaccatatcggggcttacgtcagggtgatcctctatccctgtacttattcctcatttgtttagagggactctcaagntattgcaatcggaagataggctggtatgttgaaaggcttcgattgacacgcaactctcc

SEQ ID NO: 176780 - DNA, 667 bp, Cannabis indica
tacataaaggattcaaggatttaaaaaatctaaagaaatgagccattgcgttcccactataagtatactcatacttaaggtgtttaatttctattttataatgcatattctagttagtctaatatttaggttaaatattagaatacacgattataagtgagaccttggtaaaataattcaaacaattggactcaaaatctttggtaatgttttattttcatgcatgaacatattaaaacaaaattaaatgatttagtcataatttggattgttttcatgtgaattttaaagcatattgatgattttagtaattttttagccttgtattgcatgtttctataataaaatagtatttagtgtagtgatagtgagtgtcatacaatttagaaggtaaaagatcaatttctaacctctacttttcaaactttttaaaaatattaaacgtgagcctacaaaggattgaatcttggaacttttaagaactttaaaaaaaaagagtaatttgcggtaaaaatacttaaaatttatcccaagtagcagataaatacctaagtcgtattttttgcagtaaaaataccttccgtcacacttctggaacttccgtaggtacctctccgttttcttccagttaaatgtccgtgtgtcatccttttattagtcctcaatc

SEQ ID NO: 176781 - DNA, 800 bp, Cannabis indica
cttttataaaacgaacatgtgtactaatgaaaatatcttttggttaggtgtatgaacgcattaaagctcctctcctaacactagtgagttcgggtagtccagagcaatcttatgcagttctaagccacttgcatctcttggtgatgcgagcaccatatatattttcgaatgattacaagcatttctattgccagtacaatgagccaacttatgtaaaaaaaattgaagctcgacatgttgactgcagtggcaaatgagagcaacacttatgaaattggtaatcgaacaacatttgtatgacatgtagaatctgcatcctgttatgttaggtgacctttccctggtcgcagactcataggtgcagatattcttttagttttatttttttattatgactaatgcatggccttcttgtgccaatttcagtgacggaattatgtgaatatgctgcaaatgttgatattcctattgcaagagaatcaattcgtgcagttgggaaaatagcacttcagcagtatgatgtaaatgcaatagtggatcgacttcttcagtttctggagatggaaaaggactatgtgactgctgaagctctggtaagtttcatgcctatgcctgttagatactggattgagatctaactcaaatattatcgtccgttatttgtggaatcattttcattgtcaacgcctttttattttcattaagtggaaaattaacaataataaagtacaataaaagcatgatgtttgccaatatcagtgattagcctatttgatataattttggaattctacgcaggt

SEQ ID NO: 176782 - DNA, 1147 bp, Cannabis indica
atggcctgaatcgtggagaggagatcgctccgtccttgctcgaggccatcgatgactctgccgccgccattgtcatactatcgaagagatatgccgattctcggtggtgtttggaagagttggcaaagatttgcgattgccccaataagttgattctgccagttttttgcgagatcgctcctggtgacgtccgcaaacagaccggaccttatgaaaaggattttaagcttcacgaggagaaacgatcacccgatttggtagagcggtggaggaaagccatggataaggttggaaatctctctggatgggttatcgacaataggtaattattaactttcttataacttttgtgtgcgtgcaactgtgtatacacatgttcttaatttatattatatatataaagtaataataaacaattagattgattaaacataatgaagatctacactgatgctgaatgaagtataaagagaaagtaacttaaaaaatattgatttatcaattgttttaagaataagtttaacaattggagatattaacagtgagaaactttccaatttcaaagaaaacccgattaactgagatctcaagttttttgaaaagacaaataaaagagacagagatctcaagtttgaatagcaattgagtattgcaacacaaaaagaacagaaaattgaagtataactaaattaataaaaaaatttaacattataatttaagttgtaatcggatttataattattaatatctatatatatatatatattttttggtttttgcatgtgctgattagtttgattgctcttcccataaagaaacaataaaataaagaatactggctcattcttctttagtagtttccatccagtattttaatattgagtgtaagattgaccttttcattttggaaggcttttatctattttaaaaaggaaccttttgcaagggaaaaaaagcacccttaacaaaacttcatggacgtcaagactaattatattataaaattatgttatgatatcaccctgattttgtacagagtaattaatctacatagcacactatattatctaattgtcattgacagtgagaaaccagaagaagttggaccaaaaattcaaactattgtcgaagttgtattgcgagcaat

SEQ ID NO: 176783 - DNA, 514 bp, Cannabis indica
tgtaacatgctctaacaattaaaaatacatgatattgaagatgaaaaaaatatatttttgatagaaaaattcatgaattttgtagcacaaaagagaaatcaacatacaaaaataaatcctatctagttacattttacttcattatcatcttaataatcttaaaaaaaaaaattagaagatcataactagattgaaataaaaattacaaagtgacatacttgacatgctcttcaaaatataaaaatagtaaaaaaaaaaatggtccgggaatcagacgactaactttttagcttgttcttctagttctatttctggttgtatttgctgcggggtagtgtcccggctgatttggaagctattttgatagctgatttaatttaataaaagtaaattttttggtaaaaaaaaaaaaaaactcttttaggtggattagtattgaaaatataaagtgatgaaaaaaaccccaaatgtaagctctcctctaactcgtttcagcctctctctctctctctct

SEQ ID NO: 176784 - DNA, 697 bp, Cannabis indica
actcataatactaaatgtatgttacagctcagcagaaatttgataatttgattaacggagtatctaagaagttaagtgttcaaattctaataacttcacttttttattaggctccattttttatttttgtctaaagcgtaaattaatataggaccagccctaaataacatgtaacatgaataattcgaattattgtttgaattttagtaggactagtacaaccattaaatcaaaatctctcttagttaggcttgttggaaacttggaagggtctctttacagtgtaataatgtcatcctagctagtgtggtttgtgttagcagtgttcataaaatatttaatctaatttaatttgtatgatctgatccaatttaattcgcaaagtctagatatttatacttatgcagattggactggattagattgaaaaatttaaaatctgcactttatgtggattagatattgattgacatgtaaaaagtgccgatctaatctactccacacatatttatacatatttttaaaaatatatatacaataaaaaaataataattttaaaaaatctaaatacatatgaatacaaaatattatattcttattcttaattttgtaaagtattttttgttttaaaatttgaaattttataaagtaaaaatacaaatctaaaaataaaattaaaatatttttttaatacgtt

SEQ ID NO: 176785 - DNA, 807 bp, Cannabis indica
tacatgcactactactatagtctatataatactaataaagcttcagttttttttttttttttttgagggaaatctaataaagcttcataaaattattattatatataactagctatatattaaaattgggtttacaatttacaagaagggtcaaatgagaggcttgtaaaccaaactgagtcacttgcgattgccacgtcatcttgattccggtgccacgtccactgtgcatggctcccattcaagaactctagttgcccatgtccaaaactagcctctctaaaaatcgatatttccggttttggatctatgtatctgtaaaaattcattaattaaccccaattatattataacaatattcttcaaattatatacctctatcaaataaattagctacaaaattaattaatattaaaataaaatcacgaacttactccgaagcaaggccttcccggttgccaccatctccaatggtgatatatattggaccacacttatcagctttgtcattatatacacgtgcctatcaatatgaaaaaaaaaatattttcattatattatatttaagaagatttgtagttatcaaattaaatattttagagtaatttttctaaaaaatacttaaacttaatttaattttttttgttgggatttaattttaatttttagttacaaataaatatttaaatttaattttaacggttaaaataatctaattataattttaaaatttaatgtatgtatctagctattaagtgttaaataaattacacagtattaataaaaaatacacacgttaataataaa

SEQ ID NO: 176786 - DNA, 310 bp, Cannabis indica
aactcataagcacataaaataccaaacaacactttagagaaaaaaaaaattgaccaagaaaataatagaacaaaacaaacaaaaaaatttcaagtattttaagaaagctcattataatcggtcacgatttatattatataataagtagaaataaaaataaaaataaacttcgatattattaccaacaaaatgaacaccatgcttgctttgtctttgttcctgataaaaaaatcatactcataagaatgtacagaaattattctaccaaactaatgaactagtgtaataaggtcatacaagttacacagac

SEQ ID NO: 176787 - DNA, 573 bp, Cannabis indica
actttagtaggcaaatgctcttttaactattcttaatctgtacttttttttttgttatacatagaaaaaatatggaagctgtttgacttcataacttaaaacttgttttctatttttcaaaattgaaaacagtttttaaaaactaataaggttcatttggcaaaagtttttattttaaaatttgagttttaaaaaactagaaaacagaaaacatcaaatgttgttttcaatttttaaaaactaatttttttattctaacatattatattttatatttttgtttcacatactcggttcctaaacttagaatcaaacccgaacttaaaatattaatatttttagttaagaaaaaatagtaaaaataaattttaaaaattttagtgccaaacaccattaaatttttaaaaattgacaaaaaactagtttttttatttctcacttttgaaaacaacaattctaaaaactgaaaactgaaaaatacagccaaacaggctcatggttttttttttttttttcttactttttaactaaaataaaaatcaacttttttttatttaacgaacaaataaattt

SEQ ID NO: 176788 - DNA, 1166 bp, Cannabis indica
agatgcctcatggaagtgttgttagaaggcgttatgatggcatttggaatagattttgcactctaaacacaggttcataagttagctagccttgaagagccatttgtctaccttggacagacttagtcgatttaattataccaacttccttgtgtttgttgtgtggaagtggagtggagagtcattctcacctcttttttaattgtatttacaacagtttggtgattcatcaagtgtggctctggattggtattactggttggaaaaaagagctccatgatgtcctaacgtggattcagaaggcaaaagtttctagaggtaaaagaaaggttcttttgagtgtcattacaacaacaatttattttatttggcatgctagaaacaaggtgatttgggagcaaaaacttcctattgataaggtgactttttattgtattgttaatagtgtttgtgctagagagaactctttgaaagctaagaacttgagtaaaatagattgagagtgggtggaagctttaacaaaagctttttatgtaatattatcttgtaagtgttgttattgagctcaatgaacttttttgaatttccaaaaataaaaggtaaacatgacatttcttatattttatttatagtttatgtatattatagttttttttttttcaatatggtaagggtgttttcttaggatctgagagttgtggtcggtaggaggtggtggccgagttggtggtggtcggtcgatgatggtgccccaaaaataggtattggtgattaaaaagtaaaatattgaactcattgtaaaatatcattttacgggttaaagttgatgaaaatatattgtttaatgtatgataatctatatgtatttttatttgttgagaaaacctaattatatctcactagctatattgtcacaaaaaaaatgttaacagctatattgtaatacacacatacatgtattgttttagtgtaggattattgttaatgtagaagtttaaatgtaatgcaatatttataggtgtaatgtaatgttattttagttttacaaaaattaattttagcatattattaatatacagtatgaataatatgtatacattttatatatttttttggttaattaaactaattctttttgtattcacgagtaagtagtaacatcattc

SEQ ID NO: 176789 - DNA, 716 bp, Cannabis indica
aatttgagtcactttaagatgcactaaagtgagttgttgtagtgcaatattaatgttttttattacaaaatgcaatagaattaataatgtcaaaaccagaaaacttcaagttttgttcattatttctcagaatcaaaataataatggcaatgaacatgtgaatgtgagctgatggttcaggctgataatgatgagaccattaaggtccataacgaattttgtccttgtgacacataaatatcttagggaatgatatattatgatttttttttttatagttaattaggattttttctctcgaattttgacatgtatcaaatcatactcttgaattttttttaccgttaaaaattttccttgaattattgtgattgttaaatttaaagacttttgtctaattttagtaaaaaattctaacatggatgaaagttcagggggcataatttagtacatattaaagtttaaaggacataatttggtagatattgaagtatggggagcatagtttagtacataaacaatcactgaaacagtaaaattgaataaaattagataaaagtctttaaatctaacaatcttaatagttcaggagattttaaaggccaaaaaaattcatgagacataattaatacatgttaatgttcggaaaaaaaatcggaaaaaaaatacctaataattttttttattatatgtaagcacacatagtagttgcaata

SEQ ID NO: 176790 - DNA, 830 bp, Cannabis indica
ggaactgctgcagcaccgccatatttcaataacaagaacaaagcatccgacgaccaatatgtaattaaatcgcattttcttaaaattttcgattaataccctattcatatctcgaaaatctaatgaacttccattaatggttgcagctcaaaaatcttgaagcttgtactttactcgtcgagctacatctcaagcgaccttacccttatcgtggaagtgacatgtcaacatgggaggtaaaaaaaattaatcgcattctctcctcgattctttttcgtgttttgtgcttagttactaaagttcatcgaaactgaatttaggtcattggcgcattaccttacttagacagagagctttcaccgcctctataccgatcttttttcatcccttacctttggcaaaacaataacattttcggattgtacaaactgcttaaaagagtaccgaaatcagagtgaaagtatttagcatcatgtagattagcttctgttctgagattaaaaaccagattttgaacagcattacttgacagtgatcttcaccgaaatgtaatgtctccagttcgagatttcgatttttggtgggattttatgttgaattctttttgtcaatgttgtaatggagtagcttaattcatttgaaattgtattttcttgatatttctttccaacataattttctaaggatatgaattttgtagttttctcaaacacaaagtgtgtttaatggttttttaatcattatagcaatatattgagcatctttagttctagcaattatgggtgtttatttgttgggtcatagtctattttcgaaaaacaaccctaaac

SEQ ID NO: 176791 - DNA, 669 bp, Cannabis indica
tcgcaataataactactaaatttaatgacaattcgcataagtagagattggattcggtttattagattgttactttttaatatttattaaatttttttcacataacttataacaaaataaaacaaataattgttgttttatgtctctaaacaacaaattaaaatgtaggaaaacaaaaagtaagaattacaaaagaagaagaaataaattgtatgtaataaaaaaatatttaattttattttagattatattttctttataaataaggatatgatatatttgatctaaagatttaaaatatatttgtatatatggcaaaaaaaaaaatatatttgtatatatgtattacattttaaaattagtatttaaaatattaattgtataaataattttttaaattatatataaatatatgagtattagattagatatgttattttttatatgtcaatcaacatcaatgtgcataattgcagataaccgtactttgcagattgaattaaatcatgcaaattggattagatattttataaacactcaaaattcaaataaattaaattggctactagaaagaaaaaagattgagcacggttgttccgtaatggctataggggcgtgaatgctcctcctgttggtagtctccagtgaaacagaaatgggaaaccatgc

SEQ ID NO: 176792 - DNA, 424 bp, Cannabis indica
atgaatcatgaattctcatattctagtatttcgcactattctcagacttagtgattaataattcaaaaatatattttagaatgggtgaaaatttaatttttataaaataatagatttttattgtaaacattataattaaatggcttaaccgttaaaaaaattataatagagacttaaatattaaaaaaattattaatattaattgctaaaaagagttttattaaatatttaaattaaaaattaattattttaaaaatagttaattatagttaatttaattctaaaaaagaatttttacatgttggtaacttgctattataggtcaacaaaaatataaccaccatagttacaataaaaatgtaaccattgagcagtcaccctattaatatattacaatttttataaaaaaaaaaacaatatatta

SEQ ID NO: 176793 - DNA, 677 bp, Cannabis indica
tatattaaacaaattggtgataataaaaccatttatagctaggtccggaaaatgaataattacaaaagaaattatttgtagtattttaataattagttatagattccattcacatgatcatctaagaaaaatccttttcacctcaattaaacaagagcattaaaaatagtagaaaatctaagtattttctatctaacaattttcatgtatataaatataaatatgtgtatattgaattatatataatatttatgtatatatatgtataatataaatataataataatcttatctgccacccaataatataaagtccaaatattatgaattatgattaatttatgattgagtatggtgatatatatgaacttacttggattattacatagacaaaactatcaattctagctcttccatcttatccatctaaattccaaaacatctcttcatacataaattgttttcacataaataaaataaatattttagcaaatgagaaattcattggtgtatgatagaagagtaatgatatgcattaaaattaatatgcatcaaagtattaacactcaaataagatcatataattcatatccttcaccctaataataaataaataaaaattgacacattaattaattttgaataatataaagatatgtttgaaaaaaaaaattaaa

SEQ ID NO: 176794 - DNA, 983 bp, Cannabis indica
ttagagattaagtgaagaggattatatttttaattgaattttaattgtttttttttagcaaaaaaaaaattatttataatttagatgtaatatataatatattatgaaaaatgtgtatgatctcatctcaataaaataaagagagatttaaaaacgtcttccaaggaattaaaagatgatcgagtatcatttatatttaaataaacattctcaattatgaaataaaagtacatctcaacaaaacataattattatttttgttttgtctttatagcatattatttaagcttatataaattgttaggataagattattattttttattgtgtttaataatttagaaaatatatgtaccaaaatattggacgtttgaatttttgttataaacttaagttagattaatttgataaaataaaatgtatgtaaataattagctcgaatcaataagaagctgctaaattaagggaatttatatagttttgatgttttatattaaaattattaatttaaattgacgatgactctttagttagtttttagtttgtcgtattttaaaaaataatatagtttaaaaatatttgaagagctgcgcgaagcgcggcattgttacctagtatattaataaagtcatcaattatcatctatcaagagtggtcatttagctaatctatgagaccacctccaatgagagatgttaaaattatgctatattatatttagcacaaaaagtaattttgttgtaaatttatactaaattttagttttgtgctccaatatattattgcaaaattttgatgtaaaaattaatatctaattaatgttttattaaaaaaaaaatactaataactttataattaattttattattattttaatatgtaaaataataaaaaaataatataaatgttttataatttaacgtgatagttaaatatactaataaaataatagaaataatttaaatgtaaataaaaaagtagtg

SEQ ID NO: 176795 - DNA, 751 bp, Cannabis indica
aggatatacttagtacaatgcttaaaaaaaaaagtaaaaataatagattttaaaaaaaaagataaaaataaaagaggacaatataaaaagagtatagaatgtaatttcctcttttacattttcatttgtaaaaatgtgggcaatatgtttttttccatttcttttttgaaaaaaaaaaaacagttaagaatttatgatgaaaaggaaaagctataaaagaaaataagttttttgaaaaaaaaaaaaaagcatattaactatgaaaaaaaaaatcattaagaaaatcataaaatcattaaaaaaaatcattaactatatagttttcggtttttcacaaaaaaaaattaataataaataaataaataaaaagctagctagggtgagagccagcttgataatgatatgaattgaagcatatgtataaaatctgttcgggttgatcataatcctgtgtctaaataataagttaaaaataactagaaacagttcctcatacaccatatattaaagggtgtatcaaaccataccacctgactataaactgagaatgcatgcataccagtcagtttatgtcaatttttttagtgtgccatgttagactggagtattgtttcaccacgaatttcaatcttcaattttaaagatccttacttgaactaaatatatatatatatatataaatacatactgaaaatgttaaaaaaagtataatatacatttatgaatgatgaagaagccagtaacacataat

SEQ ID NO: 176796 - DNA, 813 bp, Cannabis indica
aaacaactaagaagaaaatagattttcaattatttccttctaattttccatctctcctctattttctttcctgtaaaattttcaagagactaaaaactaaaagcaaagattctatacacaaatgctgcaacacattgtggacaaacaaaatacttaagtaagtaagagtagccccaaaaagaattgattaactgtaatattcaaagttcaaacccaatgacatgcttaattaattttttttcatcaagcaaattaaatttaagttcatctatacaaagaaggaaacaaatgtagttacagaagaggcttcaaatatcagaaatcctcatacttaatagctttgaacactttacaaatatcatcatactttatttattcaacatataggtcaatgactatccttacaatccctcatacccaagattttgacctcatcaatggttgcttcacataaccaataacagtatttgttcttctatttcttatttttcctccctaatcaattcttcccgagtcaatttcgccttgtgccggcagatcaaaacgaaaaccaatatctttctgcattctcatttgatactttttttttttctttttgttagtaacaatctgagacaaaaccaatctttgaacccactctcctactgtttttttgttagcaactactagatcattcaatctacttactcatctgtttatctcagcatctcttcctccaacccaccctctcgttcttcaacctaataaaccgactattggtgatcatttccaccttggatttcccaatccagtctaactacaaacttgttgaat

SEQ ID NO: 176797 - DNA, 1170 bp, Cannabis indica
agcaaagatttatatgaccattttgttaatgaatctttgaataaacgtaagtagatccttttcataatggccatcatgttgggttgagaaatattgagaattgctgccccaattagactcaaaggtgagttgaacttgaagattacaatcctcatgtgtgacaaaagtcaagagttttgaataggtatggtaacaacatgatccatttcttttaataccttatcactctttttctttccttttcagaaaaatgtccaattcattagcactttctaaaagactatccagaaggcgttgttgaaatacaatgttaattttagctgacaaaatgttttaggtcaacccaacaaattagaaaacattaaaagtggagtgatcactttgtattatacataagaaaaattgtaaatgaaagtagactgggatttaaaaatgcatacaaaaagacaaaaagataaatgcatacaaaaatgcatgacttaccccttattagaaaagtatatcgaagaagactcgttgaaacaatcttacaacaatttttttttagggagtgtttaaacatttttatttgttaaattttttaattataaaataaagtaaaattgtgttttaaaaataaaatgtatttataactatttttattttttaatttcaaaaataaaaataaaaatgtattttataacttttatttttatttttattttttaattttatttaagtcgggttttgagtctagggccgaagttgtggtccgagtctctgactggagctagggttggagtccgtgtcctaaggttaagttaggatcggaatccaaaatatagattaagaagacaaaacggtttaaaaaaaattgaaagtgatttatttttttaaaaaaaaaaaaaatattctcaattaaaaaattaaaaagtgaaaacacttttgtaaacatatttttaaaaaatattttcactttttaaattaaaaaaaaaacaaaaaattgattaaaaaaatattactaagcacactcttaggtgttctataaagttcatttttatttttatttttttattttatttaagttaggtctaggtctggggctgggttcaggttcgggtccagaactggattcagtcgaggtcgggtttaggtctggggctgggttcaggttcgggttcagaactggat

SEQ ID NO: 176798 - DNA, 660 bp, Cannabis indica
agtctctcatttaagagataatatgtgattagtgcgtgacactgcacatttattgtagaaaaatatcacaataacttaaattttaatatttattttcatgaaattaataaaaatattttttcaatgaaaattttcaattttaatttggtttataatattttgtaggaaaatagggtgtatttacaaaagaaatgaaacaaatggtagcaatggagaggagcccaagtctttagctggtgtagtttcccgtaggcccaggccgagagtttcgtttactaacaataggtaggtccagtatttcatctttgtctatatgcattaaccccataaattgctcctttctttttgtgagcttgaaatgtggcgactatttgactaaagaaatactcaaatttgaaaagcaattttcagtagggaaatttgattttctatacttagaaaatcaaaaaatttgatttctaaaccaataatttaaccctaaaaaactatactttttttcaaaatcccaaaaataccccctcacaatattctctctctctgcatcatctctctctcccctctatctcaccccaaccgcccaccctcacccgaaccaccctcacccacccacgtcaacccccaaccgcccgactccacccaccccctccaccccccgtcccg

SEQ ID NO: 176799 - DNA, 669 bp, Cannabis indica
attgcagcatcatttataataaaatgtatataattatgttcccacataaataaattgatttgagtagatgctcaattattgattgaaaatgaaaagtaaataaataagatcttctaacttgtacttcctcaaaaaaaaaaaaaaacaattatattttgggaaaaaaattataattattcataataagaagaaatgaatatatgtatatacatgacatatatattattctagaatataagataaagggatgacttggtgcaagtagaatattgagaattaatgacagtattatgtacctatacacccaaaataatttccaacacaaataataatattaattggtcccttaagattaatattagtggatatatatatttatatttatatatatatattcaaaataatagttatcctctttagttttgtctctttctctcttttttttttttgttattttggaaataattctcataaattataaaattgcaaatgtgtttctttaaatgcatttcgttcatttttgtaaattcaaattactgatatagcattgaatttgaagataatatataatcttaagaaattttttgtaataatttatagtattaaaattggtgagtctattgctcaaaaaaaaaaaaaaaacttgttagagtcttgttctagaatcgg

SEQ ID NO: 176800 - DNA, 962 bp, Cannabis indica
caactatgtttgttgctggtatagccgtggcaggtatgtggttattttgctgtggagatattgtgttgtgagaaggtatcacagtgtgaggaaagcaaaaatcaacatcagtatttggtgttttggaaaaaaaaggaaatatatattttcatgaaagataacatccctagagtggtaaataatattggtttctatatctaaaagagtataggctttcataccatatgggtaaccaatgaaaatggatgcacgactacgaggagtaaatttgtgtcgttttgaaacaagtgtggatccataggccaagcaaccaaatgtcctcaaatgatcatattgaggaggtttattatataggatttcataggatgttaagcctttgaaaagagctgatggtgtcctatttagtaaataggttgcagtttgaatgatataggaccaatagactaatggtaaattggattgaaaacatagagcccgagctatgtttaagatgtgttgatgtttcctttctaccactgaattttgttgtggtctttccacacaagagtgatagtggataatgcctttagaagcaaagaaagaggctaagtttaattctttggcattgttcgagcgaattgctttgattggagtagaaaattgggtacaaactagatgataaaaattcatgagaactgtaggtgcatcggctttccttttgagcatgtatgtccaagtaaatcgtgatttgtcatcgacaaggggtagaaaaaaatatatatccctcaaacactaataatgtgaaaaaagaaccccatatatcccgtatgaattaaatcaaaaaacattagtagaaaaaattgttattagatatgaatggaaagtctttttgttttagccaaatgacaaattgaactaatgttgatttggaatttggagagaaaaagagtcaatcttttttataagtacattggaaatgtaca

SEQ ID NO: 176801 - DNA, 989 bp, Cannabis indica
aaaagagtaaagatgtaaagacaagatgattgtagattatcatctcatcacatggtgagtgtctcctattttagagcaacaactcccccatatctgtttatcgatgccttctctcttgtccccttatctaaaaaaaaccctaatagctatatatagtttcacttttctattaacccttcttttttattttcaccttcccaggccccatcattcctgtctaaatatccatatacgtacttacgaataaaaatcactcctatagggctacgcctagctagctaggtctttatactttatcatatgttgacttttcgtagctatagcaggttggttgggcacaccaacttggcttggttagctctctctgtccaccttacaagcaacatgaatgtatatattttaccatatccaagttcatgtgttgatttttaattggctaatgttaaaaagtcctatactgataattattaaatacaggtctggaccgctaagctaattatcaaatgagagaaaaaaaagttcatttattacaactccgaggagaggttccacctcaaaaacatacagtaattttaagagtagttccttatcaatatgagaaatactatgttttaacaataatattgtatgtaagaatgtatatataatactatatataaattatattggatattttttttaacttgtccaaattgcagagtaaatttttctattaacttttactatgctgatcccattgaaaaaaacgttacgtgcgtggctcatgttttttctagtttaaatactcctagctattaattggtttattttcaaaactattgtttctctgaaaatattctttttatactttatcctcgaagctttttccttggatatattattttatattatttattattttacctattaataatcgttcggatcaatatgcatgagtatatatatactccaatatatgtcatgatatgtctccctccgtggaggtacgt

SEQ ID NO: 176802 - DNA, 724 bp, Cannabis indica
cctcgtgcgcgcgcggaaatcatgcaaccttccccctgcgccgagttttccacgcccaagcaccccccatgcgcgcgcggacgtgtatgcacagcatactgtccgtacagctcgcatttttttcgtttttcttcgatttttcatgctttttcatggatttaacttccgattttttgtgtagttctgtatttatacatttactattcctaattcaattctaattatcataattaaattaattaatattttttaaatttaattcatgatattagtgtaatttgaatttgaaaaatagtaaatatctatctttttgcttaattatctatcttatttttaaatttgattatatcttatcttatttttaaatttaaggtcagatatttaaatttaaaataagataactataatcatgtaattttaaatagatgtaagatattttgctaacttttaaattttgttattttatttatttaaattacatttaaaatctgaaaaagatatttatttatctttttttttaattttttatttaatttttatttataaaataacattaaatatttaaaagtagttagcaaaattttgaaatgatatttaggttggttgaaacctaatttttcaaaattgtaggtttaattttaaatttttttttattaatttcgaattttaaattttttaaatttttttaaattttcgaaaaatatttttttatttaattaattat

SEQ ID NO: 176803 - DNA, 923 bp, Cannabis indica
cccggcattccgttccggccccggggccttaagcggggccatcgaccaaaccaccttacggatttcctcacccgacgatataccagttagatcatcattcaaagcatccgtaatggtagtgggcaaaagatcaaagatctcttgatcataaacggggttactagaagtgtaaatagtcttgaagttttccgagaaataattaccaattatcaagcctattgttgatccaatgaaccccatcctccgagatcgctccaatccaattccgttttccttcgaacaactgtggaggcgtgaaagaaacgagtgttacgatcaccctcccggttccacagctccctagatttttggaaccagatttcgctttggcgagcattaacttcctcaatctctaagaggatatccgcttccagcttagagttttcggtggaaggaactctttgttgaacctccagaagagccttctcaagaactttcagtttgtctttacaaaaaccaaaattatcccgattccactttgcaagacgtctccgagtattagcaatccgagccactaattggaagctcttaaccccgtaaacaaccaaattccaagcctcccgaataacctctctacaagtcgggtccccagtccaagcatccaggaatctaaaaggtttctgaaaactgtcttgatcaaagagcagatccaagaccaaaggcgcatgatccgaagagcggatcggcaaagctttaactccggccttggggaaccgaattaaccagtccgtagagcccaccacacagtcaagcctctccttaacaagattcgggagttgtctcttattagaccacgtaaagaaatttccaacgcaccctatatccactccaccagagagcgacagaaattcagagaacaaacggcaatcagcttccccactgga

SEQ ID NO: 176804 - DNA, 637 bp, Cannabis indica
gatttcaagtgggaaataatgtaaatggtaagagaaagaaagccaagaatggtggaacaaaaccaccagaagattagaaccaaaggccatggttggccttcattacaagttctgtttttacagtaaaaagaaactagagtagctaaaatccaagtaacacatgagaaccccactctccaaataacaattcccttattacaatattcataaacaccaaaacccaaatacgaaactgagattacggcattgagaagaacagtaaccaaaccaaaaaagccaccaccttctcttacaactcctctatttcccatcacgtaagattggctgccatttctccattctctcacaatgtcaaccaaaacccaaatcagtaatgctaagaagaacaccgcgtcaataatctcaaacgaaatatccattcagattgaaagaaaaaaaaatattagcaaaacaaaaacagtttttttttttttttttaagaaaaaagaaaaaacaactcaatatagcgaacagttagaagacatgaaacgccattgactaaaaacaaaaggaaaaagtcttctgtttttcaaggctgcatgagtataggtgattgaggataagatcacgagccgaaatgaatcgaaaagatacaatc

SEQ ID NO: 176805 - DNA, 508 bp, Cannabis indica
accattttgccccttcacactaaaatcacataaataacactaaaggggtatttttgggaaattctaaattcccggccattcccgacattcccaatgtctaataaaccgtcccaaactactaacatactaagttgtgattttactgagccaaacaccgagttccatgttaccgggcaccggaaatgcaaaattatgaaaactactgaatgacataaaaatgcatctctgaattcaataataacagtataataattatttaaatagctataaataattttcataattaaacgtgattaactgctaatttccaaattaaactaagcggtctttacagtagaactaccctataattaaattttttagtgtaatgttttttaagaaaaaaactgatttaatatagtctaggaaaattcttatatagacactccttttagtggtacattagtgtgtccgatattaggaaatataattagtgacaggtatttaatgaaggatttttgtggtaggg

SEQ ID NO: 176806 - DNA, 669 bp, Cannabis indica
ccgaggctggacttagagagagcgggagagaagggatgagagatttagaggtttgatatgtgtggagcggctagattgtttcaaaaaactaataaatatatattagttatatttggtatggatcgacttttaattacttagttttttttttcctttgtgttggtttaaaatcaatgcaaatgatttacactgacgcaaagtcgcatcggataaaaacatacataaaacttaaataaggtagcaatcgtgttgactcttgttaataagtttttttagcagtgttaatagaatttatcaagaacaaagagataaaaatgtagatagtaaagaataaaattaagagataagtaatattatttcatttttttatataaattaaataatttaactatgtaattgtataagcatatatatatatattatattgaattgtaccatatctcatatttttatatagcagtatgtttgctattgacttgtaagagcatctccaactatatgtttattattgacttataaaagcatcttcaattatattatgtaaacatactctttaggtgaaatagggaatgtttaaaaaaaaaaaaaagaagttttaatcaaattaaaaaaatgtcttaataataaatactggcttgctaattgtaaatagattcttatattttttta

SEQ ID NO: 176807 - DNA, 646 bp, Cannabis indica
gctcgtaccttcgcatcttgcctttaggttttatcgacttgcatgctgatgagctctttccctcgggttctgtgactcgagtaacaagagctccacgctagagcacaaaagaacggcatctctctatcggattgccttacccctttctttgatatcccattggcttaccccgacggtatttgtatcggtatctcgttctgatagacttgcttgcgcatcttgtctttggtttgatacacttatagtccagtggcaagatcaatgtcttttattggcttctctgtccctggaacaatatctcctcttttctttctttgtttttttcaaataaagacctctttctgtcttctcgggcagtggatttgccaactctattgctcaactatcggtctgaattcctcttcatcttgctttttcttggtttgtggattctatttccccctgtgcttccacttcccctgcctcgagatcgtgcccttttttttttactcgactcgctccctcgctcaaaaaagtaagatcttattccgtcaactcgggtcggatatgtttgggtaggtcatggtcgacatcatgaatttttctttacctgtcgcgctcgcgtcattcgtctggccgagtcgggagggatagtacattcctaact

SEQ ID NO: 176808 - DNA, 724 bp, Cannabis indica
atcttatacgtgtcgtataaactagacttatgatcctagtggatttgatttattaagtttgattgtgctaaaaatgagcttgtttaggttgatattgagctttgaaagtgcaccctttattaatccaaaaaccctggataataattaatagatagttggttcaccttacacaaagaaagaatcatatttttattgacaccatactattattcgtcaaaaaggatggctttgaattccttgaaaaagcaaaaaagaagtgaaaatagccttaacttttggactagaaaaagataacttagaacactcagaatttaattaaaaaaaaaaactcagaattgatgatatacataaacatcttgaattttagaatcaatttcgaaaattctaatgatactatattactatttattttacaaaatctattaacactaatcttttatcttttattcgattctgattaaaaatatatattactatttattttacaaaatctattaacactaatcttttattcgattctgattaaaaaaaaattattgaaaagaatttatatcttataataatactactaataacagaaaatatatatatttgaaatggaaggtatcatgatatttaaaatatatattttcttaatttttaaaataataaaagatatgtaacaaaataatgataaaactatcttattaaaaagtttgacgaaaactcatttatttatttattt

SEQ ID NO: 176809 - DNA, 906 bp, Cannabis indica
acctactaagtttgtagtaatagttcttactaaatttttagttttttttagaaaataaatctttatttacttttattaattaaataagaaatttgtatgtaataagtttttttttttataattttttgaaatttaaaaaaaatagtaaaaatagttacttataattgttaaaataaaatattaaattttgaaatttaatatatattattaaacaaaatataactgtacgcgaagtgcgaattgtttactaatttataatataaaaaataaaatttaaaataattaattattggcatataaaaaacatgcacgaatgttacagaccatttcttattctttataattttctaaaaataaacaagatgtaaataaaataatgaacactatcgtatcaatataacttttttttggtgtaaaaaagcctgttatgtgccatgagcgtccattatttattaaaaatatggactaattggtaattaacgaaaagtaaaagcccctaaaaaaataaaagtaaaagtaaaatacctaaacaaaaatgacaaaataaatacaatcccaatttaagcacgtgaggtgggcatcactaacataggtttggatcgtaagattctcacgtgcgagcttcatacgtgtgtaatgcaaatgactattttgttttgtttttttattttaataaaagagaaactatcgtattcacacgactcgtgaaaaatccttaaaaaaaagaaaaaaaaaaattaaaactaccgacattgcccacacaaattctaaacaaatcaatttagaaagatgggtattttggggatttcattaatgaattagaccggccgacgaacggagaaaaacccggccggggagagtggctcgatatttcctatataaacccgtaagtaagccccttatttc

SEQ ID NO: 176810 - DNA, 625 bp, Cannabis indica
tgaaaacagtttttaagttaggaagccaatcagcactgttctgttgttcctattttttttttttacaatattaatttttcatacatctcaaactttttctttctaacttttgtgattagtgatagctgaaattagaggtgggcaacatttaatttaatccaattaaaccgaatcaatccaattcaatctaattacaaaaaaatatgttgagaagtacctcattttttaatccattaatcaaaaataccctcatattatattttactaaaatgcatgcacttttatgagtaggttgtctaatgtactctcaccctccacttatatgaacttaagggcctgtttggtacgcaggattggacttgattggacaagattggattatgctgaaagtaatcctatgtttggtttaagaatcgactcgactattttatttatttcctttttgaaaaagacaaacttaaattagataaaaatatataataataaattaaaattaaaaatatataataataaataaataaaaataaataaattcgtaagcaaaaaaaataaatataatcttatatagttaagtatctattctatataaagtatacctatataactgaaattctggtttttgaga

SEQ ID NO: 176811 - DNA, 508 bp, Cannabis indica
cataaaccattttatttttaatataaataaaaagtacactcatgaatttctcataaaccaagaattctgttatataggcacactttatatagaatagatatactagttgtgcagtacgagcacctaacacccgtcaaaacttgtgggttataattatatcttttatttttattaatatatttaaaaaaaattaaaagatatatgtatttaaacaagcacatagtgtggtataggttcgttttattgaagttaaggtcatcagttgtcatctctaaatataagcgcatataaaatttatgaaaaaaattaatattatatgtatgcttatatagtcttttacataattatatatttactaataaataaataagaaataaaataaaataaaaaaaaaagtaaaattcattaaaaacaacatggcaaaaaaattgtaaaaaatagtacaaaagatttattttaaaaaagcaaatagaataaaaaataagattttttaagaaaaaaaaaagaa

SEQ ID NO: 176812 - DNA, 522 bp, Cannabis indica
ttttagtttactatgctgcagcatgataatatgaaccttctgttcaatgtctttcttttttaagtaaagttttgaaatttattttctgattttgtttctttaggtaattcctgcagagaatattgttgcagcatttcaaggaagtgaaaaaaaaagtctttgctatctcaaaaacattttctgaagcacaactcttccttgaggtatataaccaatgtgcttgatcagggtatgagttgaggctcacataatcacatcttagattttgcttttctacagaagcaatgtgctgtatatgttcattcttgttactgcaggccctcgagcacggattgggtggagttattctcaaagttgaggatacaaaacctgtttttgagctaaaggtacttgatttttctgcaagcaaatcttaaattcgaaaacatgaattctatgtggttaatgtcatcaggaatatcttgacagaaagaaaatgacatgatcaacgtattgagcttgaccaaggcaactgtaacccga

SEQ ID NO: 176813 - DNA, 1104 bp, Cannabis indica
gattaagttttatatttcagcgctctaaatagttcaaaagaattttagacgatcaaataagttgagaaaacataaaagtaaccaaattattataagttaagaaacaaaatgctgagtacttttaggttaggaaaagttaatgttggcaaatttccactcctaacaaaggtaactaccaactctctataaagtctttttctcaaactactttctgccatcactttaatagtttgtacgtgtactattattagttaaacatatgtgatcgattaaaacgtgttgtgattatttaattatgtactacactaatcatatgatttagtttattggaaaatttatataatttgtctttaattgggaatacatatataatatatatataatagtagattataacgttctaattaccaaattaattattagagatggcaacaaggaaggagggtctgatcaactccatacaaatcaagcagttgaactgtcaaagtaagtgaaatttcaagaaacatttgctttctttttgttatttttttgttttttcatgtaataaagtggcatttacatctacttatcaaaatattatgcttgtggtggtgtaattttagacagaaaaccatccttaatttataccaatataatatagttgtcccctcaaaactctcaataattttattaaaattacttaaaaaaaaaaaaaaaaagtcgggtcggatctaattcaatttaagtatctgatctagtgggtgggcgagacaaatccttacatgatctggatcaaatcagatcatagccggatcagatatgacccgacctattcacactcctaattataaaaataccatatattaataatctaacttcccttgtaaagtataggtcttaatttttcttttgaatattagtagggatgttcactaagaattatatatatttatatatttatatacgtattgtacttgataaaaataaattgatttgtatattcacattcctcaccctttattttttatttttatttttaaattagactctttcttcgcaagtacagtactgttatttatttttttaattttataagatcatcatttaataaatttgattagg

SEQ ID NO: 176814 - DNA, 548 bp, Cannabis indica
aactataagtactattttagattaaccaattacttatattttgagtaatcaagtacttatactttgggtaactatgtacttatatttttgacagccaagtactttattttaagtaactagatatttatagtttggataacatgatacttatattttagataattacactatcttaattaagtaattatacagaataaaaagtatacagaaaagtaaaataaaatatctacatgatttttatatttaaatatatagtaatattataaaatttataaaaaatatgttgttaagtaattgagataagttaacgtaaaaaactaaaaaataatcgttaaattaagaattctgttatataaccacattttatatagaatagatataaattttaaattattttgttaaaataaaatgatattaaaaaaaatatttaaatagggtggtgtatagaaaaatttgagtgtaacctatgatgcattatttttatattccggtcattatctcactgtatcttaattactgtatctcatctgttgtcatcaccgtatatt

SEQ ID NO: 176815 - DNA, 656 bp, Cannabis indica
gtttaaaacaaattattttggtaatttggaaaaatctcaaaagaaacataaaggtttaaaacaaaaatgggttaagaaaaagtgtctagctggtttttttgataaaagtgctgcatctcaaatatggaattttgatagtggttgttctagacatatgacaagtgacaaggatattttgactaacattcggccaatgcagtgtggagaagtcacttttggcaatggcttagttggaaaagtcattggtataggacctctcaattttgaagggttacctagattgaaaaatttgatcttagctgaaggactaagggctaacttacttagcattagttaaatttgtgaccaagggtattctgtctcatttgacagtgatcattgttatgtgcttaatgacgataatcaatgtatttggcaaggatttcgatctaatgataattgttatactctaactcctgtgtttacttgtcattcagccatcaacaacaccacggatttgtggcatgccaagcttggacatattaattataaaaatctgaaaaaaaattgtcaaatgtaggtattgttcgaggtctacccaagcttcgtaaagaaagtgttggtaagtgtgaaccataaacaattaaaaatctctcacatacgtgtgtctgatatca

SEQ ID NO: 176816 - DNA, 608 bp, Cannabis indica
tttaaaattgtatataatatctttaataactctaacttataccattataaaaaaaaaaaaaaaaattagaatgaaaaatcctctgaatgccgaaagcattagtggcatagaattttcatatatcaatataatgttttggtttcaattattttgaaaaacgtgggtaaaatggatgagtcttatatattatataattttaaaagctacagtgaacaaaatagtaagcactacagtgagtaactgcattgtgtattaaaggaatggaagggagaggttatgttgtcatcaataaacccgagctgtgttatatcatcatatcatatacatatatatataatagataatctctactctgtagctagttgtgttttataatatcatcactaaaagtaaaaatggcagccaccagcaatgctttgaagggtaagattgagattgatgttgatatcaaggcatctcctacaaagttctaccacatgttccggaaaactgctcacatcgttcctcactgtgcgggtagccatattcaaggagttgatgtccatgaaggtgactgggagagccatggctctatcaagttttggaaatacacagttggtaagcctacc

SEQ ID NO: 176817 - DNA, 681 bp, Cannabis indica
aattgataaaggaggtagttggaagaagaacatggcgaaggttatggctaagaggtagtttttgtaggttaagaacgtgggttttaaaaaggtaatgactgatggtttggacaaataggaatggatatgtgtaagtggtattttggtaaataaaaacttattaaaaataaaattgttgtctacaccttctgaaggtatttttgtaaataaaatgctaatttatatttttcatgtaataattcttatattttttttataacttgttatagtagattattaggaggtgaaaattctattttttacttaaattaattataattaactatttatttaaaataaattaatttttttaatcataatatttaattagaccttcttaacacttgatatttataattttttttatttattagaaaatacaataaaaattagttagtattaagttataaaataatttattatctattttttattaatttttattttatttataataaaaaaattgtgagaatataacgcttacttactctcattaaaatatatataaaattattataatatttatattttcacgaaaaaataataggggaattactccatatactattttcttaactttttttttttttcttaattaacgtttgggtttcgttaaattagttgtcagtgtcagttgtcaat

SEQ ID NO: 176818 - DNA, 667 bp, Cannabis indica
agaatgccatgtcatcactagtccatcaaagtgccagattgcacgcttttaagtttttagaatgccagagccgcagcgttatggtggctgtgagacacatatataaatagagagatactatcacgtatatcttagtacttttttacactgctataccttttgaagtttgtgaagctaataaacaaattacaagtgttctagtacagaacatctatatcagcttaagccaacatgagcagagaaaagaagctagttaacgattctttgtagtaaagttaggagagaaacacatgtcaattgtagtttttcttattcattcatctcttgattagttgattgcatgatgttttgtatgctagcatgttagaatgtggaaatatggtttgcaaagtagaatgaggtgcgtggtaagaagcatgagttccatctcaaaactaattggtgatgaatgtagtatcccacactcttataaatggttataagtttccaaacactatcaatgtcggactctctaacatcctttaagatggcgactgtttttgctcaccgatctttgatgactccatcaccaatgtggtttaggaagtagaatgaggtttatggcaagaaatatgcagttcatctcaaaaaccaattaggaatgagtgaaagtagctcacactcatat

SEQ ID NO: 176819 - DNA, 816 bp, Cannabis indica
ataataggattgattgcttatctatattttgttgttttctattatgattgaacattttctctaccacaatgcctaatatgtcatgtatataacctcagacataaacatgctgtaaaagtttaggaataaaactcatagaaatccatctcaaaaaaaaaaaaaaaaaaaattcaaaacaaggaattattagtgttgattttaattgcaaaatagacactatttaaaaaaaaaaattatgtatagagatatattttcttgaaagatcaaatatctggtttgtagtagtagaggtgtgtttgtgttatatatttagtccatagttactattctagctattagggacagattagggccgtctcaagcttttgaggggcctagtgcaaaatttcaaaattaggcctttttaaaagaaattattaaatataccaaattttcaaaaatttatataattataacattaaacttaattaaaaacaatcaaatgtcatatattctatgtaattataataataattaaaaaaaaacttaaaaacaatattcaaatatatagatccatccatttaacaagcgacttttttttccatatttcacgcaacgaacaatcttcaagccgcaaaacctaaaaagaacataaatttgaatgcaattattaaaatagaagagataacaataaatgaatcatttaaaaatgtatctttcttactttttgagatgcaaatttgctaatcaagtcatcgtaatgaagtttatttagcaatttattttcgatagacaatatagctaacccactcaatcgttcttgcaacatagtggatc

SEQ ID NO: 176820 - DNA, 755 bp, Cannabis indica
aatctcccagcaagatgacaagcgattaaaagaattcatcaccactctaaaattactctccatgatgatgaacgagtaccttttgaactttgttgtatcaagtgctaagctaagatgcagcctccttactacaaagagcattcgaaaaatccaatctagctgtattaattcgaaccacttcatcagaatgatttttagcgacagggccggccctaagtatagacgggctaggcccgcacctagagtctactcattttaagaattcaaataaaaaaaaatattttaaaaacatatatatttttaataatttttaaaaatatcatttattgttcaaaaatttttttgcttataatctattttaactcagcgctgagcttgtctaacgaccaccgcaattcacaagctttacactatgtatctttgtactttagttaattaggcaaatattcatcaatatattaaaagtttagatttcatatttttgtactgtcaaggattcgtattgaggacttgttataaatctttttatgtgtgtgtagagaataatgatctatatatataataagtagggttgtacataaaaatttgtaaactgccgaaaccgaataatccgtccaaaccaaactaaaaaaatcgataaaaattacaaactgaaataacccgaaaaaattacaaactgccaatctgttaattgggcgggttgaaaataggtccaacgccaacccgcccaattaaaccgaatgacccgaccaacc

SEQ ID NO: 176821 - DNA, 641 bp, Cannabis indica
ttttagctgacgtggttgggtatatacatacactcttggtcttgggttaggtaaattggtcggaagttaaatattttccattttttaaataaaaaaacttgaaagattttaacttgtatttttttttagtcattttttcattaaaaatttacctacaaaaataataaaaattctttcggtgattcaataaatttctctacaaaaaagggataaaaaaaaagttggataaacatctaaagagtaggctcatttttcttttattaccaaaaacacattttctcttctcttctcttctcttttctctcttttcttttactcattcttacacccaaaatggcaaacccaataatctctcttcttctctaaacaaattatcaattgtacaagactttgacactaaaatcttgtaacaaagacatttattgagctgaagaaaataaattaaggtgtattttcaagaaaataatggtttattgttttcctttgattcttgatattattttattgttttgatgattaagaatattgtttaaatgttcaatgcgtggtttgttagtattttttgcttgttcttttttttttaatttgtgtaaatcgagtttaggtggaaatttgtatttttttggttttttcaattatag

SEQ ID NO: 176822 - DNA, 563 bp, Cannabis indica
cttctattatggttcattcaagcaaggaatagtgttgttttcagaggtaaattccttgagtttgtatgtttttactttgaaagcttttcaattagctcctttttttaacatggtgatttatgaaatctgcaggggacaaatgttttgttgcatgaagctcgaaatgaactcaagtatgtatttcgttctgatgtagtatttgcttaaacacttatttgatggtaatgttacaattaatcttgcaatgaagttcaatttcattatatatatatatatatatattttgtgtgtcacttcatctcaactttgttatctttgtatgtataaattcatattgatattttgtgtaccaaagtattttgataaatgattgtgggaataacttgtctgattactcttccaaatgtcttttttgtctttctattcatggaaaataagtaaaatctaaaagtgtttattttattttgttttgatatagaagaaaatgagaatatacatttttataggctatttaggatgttttttaaaaaagtaaatggttccttcaaaaaaaaaaaaaacgt

SEQ ID NO: 176823 - DNA, 759 bp, Cannabis indica
ggcacaaaaccaagctaatcttatactggagaggttagaagtagacttcaatttggatcccacagtttcagataaaaactattcagtcaccaatttccacgttcaactaaaccgaaacgaggcaagagacaagtgaggcagcaagagacatcttcttcatcagaagaagaagaagaagaaagttcacctacctcaattgttccagtaaacaggcagtctgtgagggcaagtaagactgcggcattatcgaagattactgccagtagagcccccaggattgctgaagatgagattgcagaggaagaagaatctgatgtgacatctgatgaatccgatcaggttagtgaataagccattggtatatctgtaattgtggttctgatgttgttttcagagacagtcttcttctattatggttcattcaagcaaggaatagtgttgttttcagaggtaaattccttgagtttgtatgttttttttttacaaagtaataacattcatttactttggaagcttttcgattagctcttttttttaacatggtgatttatgaaatctgtaggggacaaatgttttgttgcatgaagctcgaattgaactcaagtatgtatttcgttctgatgtagtatttgcttaaacacttatttgtatggtaatgttataatcaatcttgcaatgaagttcaatttcattatatatatatatatatatttttgtgtgtcatttcatttcaactttgttatctttgtatgtataaat

SEQ ID NO: 176824 - DNA, 694 bp, Cannabis indica
atgtacatgtattagttggcgaagccatgggagtaagtttgagttattgattgcggctccctttcatttatacttgaaattctaatttcagggactgatcagcttgataaagatgctgaaatatatccaagttcccacgaaggcaaagaacaaggtgattttgactatggctgggctaacattggaagttttgatgattttgagcgtatattcaggtaatgcacaatatatagttgtctaatctatacaattaatatacataaacacactcattcataactttctctattctctctcacctcttgtgaaagaattctgaatgttgaaagttctaaagtgcattttccaagttagctttcttattatgatgtccctgtgataatgccgtgtaatatgaattttccttgcctgtttaactgcaaagaaaaaaagacacgcagaaattttaatcattttcaaacatttccaaatgtttctgttctactaggcattgatcttttatgttcatgaatttttttctcaattagatctgagagtgaacggaggtagtcatataagtagtaagtccccactcctaagtgtgtctgttgatattgcccttccacacttccattcataacgttatttacccatctgttttctctctttttaatcctttgtatatgcccccgctcccaagtgtatgtgttgataa

SEQ ID NO: 176825 - DNA, 806 bp, Cannabis indica
atatatatatatatattgagtttgattgattaaattgatgatgatcaagattagtggtgaatagtagggcctttagagcaagttgatatgaatcccattttttttaaatatatattaaatataaatatatgtacatatataattagctttgatgggaagcaaatcttgtactgagataccatagcataagatgtagatcatgtaatcatactaattatagtatcatatctataattattattattgtttttccttctaaataaactacataaagtttaacacattaataactagtgaaactcccactcaacatatgtttgtgacaaaaaatataattacttttctatatatatttatataaattgggtatgtccatggccacctaaaaaacaaacacactactcatagaaaaatcaaggaaaaattaaaaaaataaataaaagggtagatgaagatgaagtagtacactaccaatttccacacgtatcaatgagttgtagtagtaataataataataaaatagtttcttttcttttttgataaaaataataaaatagtttctagaaacttatgaaggtgcaacattccttacaataaagaagaaaacaaaagtggcaatgagttaaaaagagaaatggtacttctaaccccacatcatgtgttatcctaatctactatgaaaagacatttaaaaatatataagaaaaaaaagtttttgtggttaaatcttactaagtattgttttacttgtacttaattctccaaagctcaaattttgatagtaaaattttttaaattaccgaact

SEQ ID NO: 176826 - DNA, 746 bp, Cannabis indica
tatttaaaattatgagatgttatcaaaagaataagatactaaagtactaaatagtttataagatcttctacaaaaaaaaaaaaaaaataagtttgtattatctcatatatatatttttgttacttattctatattctagcaggttaattataattataaatgattatatattgatcaaaataacttatgttacttttttgtttgtttatttttatagcaacttttacgttacctttatatatatttaaaatttaataagataccataaaatacaaaaattactaaatagcttatattagcaaaataaatatattttttaatatacatataattattgtatgttgttattaaaataactctataaaataagtttatatagaatatatacctaccatacagtaacttttatatatataattacaaaataatttttagtaatatgaaattagttgacatattaaattttgtttaagctattggttacttatttttttcatttgttaaaatataaaagagactatgaggttactcttagttctaaaaattttatttagtaaaaaaatctatgattctcatatatcaaaagaatcatctcgaaaaaatagatcataatagtatcacttttgagctcaaacagtataacttaaattttatttttcttaagttttttcttatacgttattttcaaaaatctatcaaaatttattctataaaagagataatacaatttagtaactaaaacgtta

SEQ ID NO: 176827 - DNA, 558 bp, Cannabis indica
ggttgaaattcaacaatcattttccccatatcccatttttaatgattatcttttttcgctatatatgaatggattgtatgtttttctcatttttttattgtctattttgcaaaatgttttatgttgttttgactgatgatcatttggcagaagcctttttaatgagaaattgtttcaggtctatgctttcatgaaaagatttgttcttttccttttatttatatcgtctgtcaagataatagtgtcgtgaatgcatttttgatttgagtcatcatatttggttgaagagagtgtttatggttaaatgttaatcattaagattacgttttcttatattattgtttaatttcttgttttttagatgctaagcaagcaatttgggcgattgtggatgagcataaatgatagaaataagttggtagttaatcagtgttcaattttcaaactacaatgagtaatgaaataacttccacaacctgttgagctgtcagatccacaatctttatctgttcgtttgtgtccattgtgtacaagtttttgttgtattaatgtttacta

SEQ ID NO: 176828 - DNA, 965 bp, Cannabis indica
attatattaaaacatttatttcaaggaagctcaaataataataataataataataataataataataataataataagagtagttaacaattgatgattaccattttctatgacacaacaaataaatgagtatattttagggtaaatactattttggattttgtgttttgtaaaaattattaattggacaatctgtttcgttaaatgacaaaatagatcctatattttccaaaatggtaaaaataggacttgagttcaatttttaacaattatattttttaatataaccaagataatttctaatatgaaaagatacagaaaatgtagccagttttatcattacatctctagattagattattataaagtttttttttgacaaaaaatcagttcagggtcctatttgtacagttttagaaaatacatggtccattttgttatttaataaagggtccaatttgtaatttttacaaaacataaggttcaaaatagtatttaccttttattttaactttaaaagatgttgttatcgtttatggaaagaaaataaataaaacgataacattaaataaaaaggaaataattactttttttttagaagaaaggaaataattacttaaaaataccaaactcccaattccctaaattatttatttgagtttctttctaattggaccatcataatccctacttagggtaataactacaactttagcttaattattgcacaatgaattttacttgagtagtaaggcgatttcaccttactattaattgattttaggctaattagaattttttcttcctaaactttaacatgtaccaaatcatgctccttgaatttttttggccgttgaaaattccccttgaactattgagattgttagatttaaggacttctgtctaatttcattcaatgttactatttcactgattgtttatgtcctaaaccatgctccccaaac

SEQ ID NO: 176829 - DNA, 625 bp, Cannabis indica
gtttccttgattatgaaatgtgtcaccacttccactctttcctttttgattaatggctcaattactggatcggttaaaccttcccgtggtataagacagggggatccgctttcaccctacctttttctactttgtgttgagggattgtcatcccttctctgtgatcaccaaaattctggtactcttcaaggtatagctatttcgagaagggctccttctatttcccatcttctttttgctgatgacagtctcattttttgttctgctgatagggattcttgtaactctctcaggcatatttttcatctttattctctagcttctgggcaagttattaattttgctaaatcctctatcctcttttcccctaatactcctcaggatattagaagtcttttctttgccacatttgatcttgaagataagccttttgttagtaagtatttgggtttgccccaatgccttactagatctaagtatcattcttttgcctttcttaaggataaagttctgtctgtgcttactaattggtctgttaagtggttttctaaggtctggtaaagagattcttctcaaggctgttattcagccaatcccagcttatgctatggcttgctttaggctt

SEQ ID NO: 176830 - DNA, 862 bp, Cannabis indica
ttgtttggtggagatactaacagtcgttgagagaattgatcatcatgaagagacttaatttttttggtggattctacccatgttgtaccgtaagttattgtgtccattataatttatcttaaaaatttacataatttggtaaaatatttattgttgtgttgtaatttaatgattcttgtccttagagacctgatcctagaagtcctaacacgctaagtgaacctaaaaagtggaaggagtggtgtggagctatacaaatatgtcagaaagtatttactctcaatatgtctcatttttttttttatatttttaagttaatcttttgatatatcttatgatttggtgcaggtttatgttcccatggtgatcaaaaggcaatggattttgtcagtactagttatgaaattgaagaaggttgacgtttatgatgacttttcgatatgttctactgaccttgggttgactattatggatacattggtactaatgttgtgattgtattgattgagtataatagaattagtgaatttgttcaattattatgtggtataacaaatatttttgtgattatgagcgtgtagttatcttcaatggataatgcatttaaggagagcagaagtgaagcctttggtccgggttggaaattttttgactttgttgtggcagaagcacatgaccaccgaaggtgtgttagtagcttgaaagtgatgaacaaacttcttggagagtacgtggatggtgtcaatgtcttttgtgcacaagtaaagacttttaatttatcattattacaattattacttattcaagtgtagattgtaaggtttgatattatttgatcacttataggtgcctgaatccattc

SEQ ID NO: 176831 - DNA, 1055 bp, Cannabis indica
acactcaaggttgtgagtgagtatatatatttcttcatattatatatatgtgtgtgttatataatattgtgtaatcttttcatttcttctacatttctgatatataatatattatgtgtcgtaacatttatttaatctctttgttggtcttggtattatattgcaatagagttgtaatacatcttgattttcttccattgtaataatatctctaacaaaattatgtgtcaaatatttaaggaaagtcatcaacttcattaactttaatatgtaagttaatgtgttttcatcatacacttgaatgactaatattcattttattgaattattaggaaaagtatgacggacgtagatattgcctccaactctcactggcaagaaattttggacacacttcaactatccaaatcagttgcagaaatagatactcatgatattgaagggaaagagatggtaagtctaaaaatgtgggaggcattctattatacttatgcaagatggaaaggtttcagtcctagaattgacgatacaaaatccaggaaaagtgatggagaaatatacattcgacgatgggtttgtaacaaagaaggttttcggaacgagaaatttttgaacatgccagacaggaagaagcgaccaaaagaaataacacgttgtgggtgtcaagctgcgttacgaatcattcggttacaaaaaacaaatctttggaggtgtcaagaatttgtaccatttcataatcatgatttaataataccatcacaaatgcaattcattcaggcaaaccgcgaggttcttgaaggagtagctccacaagtaattagcatgaatagatgtggtatcaaaacttctttcgttgttgcacatattgccctacaatctggagggcatgacaatcttcctttccaactaagaggtgtgtagaacaaagtggctagtttaagaaagcaagagaacatatcaagtgatgtagaagggacatttggtttcgtggacggcttatcatcagtggaacctgaattctacgccgagtaagagattgatgacaaaaatcgatt

SEQ ID NO: 176832 - DNA, 667 bp, Cannabis indica
gtagtttcagtaggggaatttttaacgaaccaaaaaggttcagggggcatgatttggtatatgtcaaagttcggaggggaaaatttctaattaaccttttaacaacttactcgaggacaagcaagagtcaagtgtgggagaatttaaaaagtgtatatttatcttataaatatggtcatttactcgtgttattagtatttttttcaattcattgaactattgatgtagttttatcttattaggagaattgatgattaatcatacattttgagctgtttgacgtgattttaacacattttggtggtaaatcgtggaggtgggagagttttggtttacaaggcaaaacgcaattgccatttttgacacctttaaagtggagctcaatatgaaagttttatatccagttctcagcttttcagaacatcttgaatcgtttgattctaagaaatattgaagaagttatggataaaatacagatctgagcatgcgatagtgaaaacatataggaaggagctcgtacgatttgcaaaaaaaaaattaaattttaagtttaaattaggtttatttttagggtacaatatataagacatttagtttatttttagcaagttttgattgcgttttggagacaacttaataaaagcggagaatctacatctaaatctag

SEQ ID NO: 176833 - DNA, 605 bp, Cannabis indica
taaagtgaacgagtattacagcttggttaattctatattcaagaaataaaatattttattggaagaaacatatgaaatatattaatctaaactaaacaataagttgaaacaaaaacgaattttgtttaaaaaatatttcttacttattattttatgtaacattgtatgcttttgcagagagttaagttatttactttgattatatttttttttttgtattatattaatatcgataaaataaatatatcaccaaaattttgttttatctcaaatttttatataattgctctattattttcctatatcatttaaatatcatattttaacatatcttattcatttttataaaaataaaattataatatcacacacatatatataaaaaaaattaaaataaataataataaaatatatttagctcaatgaattattattttgtatttagctaaacacaattcattaagttaaaaaaaaatgtaaaacaactaaaatttagctttttcaatggaagtttaattttataattttttaataaattaaaattaaggtattttattagctcatcaggagtgctcttatatatttgtttatttatcttttgtagg

SEQ ID NO: 176834 - DNA, 1006 bp, Cannabis indica
atcactgagattagtcaagtcaaatacaaattcaatatgtaacgacaacaatttataataataataaaaaagaatgcacactattatatttatggggaacaataaaagattaatcagtgagagtaaaatatatgtcattatataatatatatacttgagacatttaaattcagttaaaagtataagattaaagaaaacaaacatcagaatcttaaatatcagttcaaatattaatgagattggttttattattattttattattttattaaataaaaataaaaagtcacccataaatttctcataaaccaagaattttagttatataggcacactttatatagaatagatataaataattggctaaaaaagaaaaagaaaaaaaaaactaacattgatcgctaattattagtagtgcaatttcaacaatatgtagtaataaagtgaacgagtattacagcttggttaattctatattcaagaaataaaattttttattggaagaaacatatgaaatatattaatctaaactaaacaataagttgaaacaaaacgaattttgttttaaaaatatttcttactctatattttatgtaacattttatgcttttgcagagagttcagttgtttactttgattatatattttttttattatattaatatctataaaataaatatatcaccaaaattttgttttatctcaaatttttatgtaattgctctattattttcctatatcatttaaatatcatattttaacatatcttattcatttttataaaaataaaattataatatcacacacatatatataaaaaaaaattaaaataataaataataaaatatgtttagctcaatgaattattattcttgtatttagctaaacacaattcattaagttaaaaaaataatgtaaaacaactaaaatttagctttttcaatgagttatttatatttttatattaaaattaagtatttatagctcatcaggagtgctcttatata

SEQ ID NO: 176835 - DNA, 543 bp, Cannabis indica
cattggtcttgtcgtgccatgaaattctttcagataagttattttggtcttagttgtatctcacttgtctcttatttcacttctcaaaaacccacattgttattgttgtgtcgacgggtagtagaataaagagatgtcactttgtgaatgtttatttctcttctttttttcttttacttgttttgaatttgtgatctccaaattattagcggtgcttaaaccttctttgaaaatatctttatcaaaaccatgcacatatattttttaataataatataagtagaagatggaagcaaactattacttctctttcattatggacattttgttttatgtggtaattaaccaaacaaattgagtaattaacataaaaaaaaattaaaaatgataatgacacaaatattcaactaaaataattctaaaaatgtaattttataaactgcaagtggtaaaagaaaaactaattcattttgtggatgcatgtcaagcgccaagctactataaacattatcatttatcagattattattatcattattatta

SEQ ID NO: 176836 - DNA, 919 bp, Cannabis indica
gtgtgtatataaatttttttaaagagaaacacaacaaaaatttataattttatagaggatgtatgattttttattttttgaaagatactatgttgtatgtgacattatctctttctaattttctatgttattttttaatttgtaaaatttttctatgtttcgtttttgaaagaagtattttttttttttctttctaattgttctatttaataataataaaaagaaaattgtaatatctctaatctataaatctatttgtatttgtgtgtttttattttttataactcatattgttactattgttagtatttattatagtgtcttttcattaaaactataaataaatattcattattattatttattacaaggtcttttcattttagactactacaaaaaatacatttattattattatttattatagtgtcttttcatttaaacaataactatatatatattataataaattatattaatataacgtataacatattactgtaaaaaattttagagaaataatataatgttttctctttattagtttatatatatttataatatcatggatgataataataaatcagttacaatattttttcagttttgcataacattatttcattcactactttatttttgtttttatacctctatctatatgtatatgtaagtgtgatgaatgcatttttttttattaatatggagtttggcattagctaattgctttgcctctttttttttttctttttttttttttttttgttttcgtctaaacgtaaactgtagaaagtctctctattaccaaaacgttaaaaagtaaaaacttacggtttgggtagacgccaactagtaggaacggtacctcctaacccccgtaaacccgtaaaaagtaccgaaaaggtaacggttcggggta

SEQ ID NO: 176837 - DNA, 508 bp, Cannabis indica
ttgctttcatttaaatgtatttttcgtattcggtattcctttactcatcaatacaaagttgtttttcattttctgaggaaaaaaaaaagtatgaagtaacttcagctaccttggttggtgaaccaccatggagacattgactccctcaagagcttcacgtctaagtgctctaagaagttgctgcgaggttgcactgtccaaaccagatgtaggttcatccaagatcaaaagtgaaggctccataaccatctccaatccaacattaactctttttctctgacctccagatattcctcgcttctctactgtcccgaccaggaattccttactgcctggagccccaaagactcaataactctttcaacactaaacttatctggttctccaagtccactgacagtcttcacaatcacacacataagcaaaacattacagaagtcagtcataagatggacatggacaagacagttaccatgcacagtacatttaacctgagcaatgacataaa

SEQ ID NO: 176838 - DNA, 527 bp, Cannabis indica
tccaatccaatgctacaagtaaaaccacactctctgtttaggataattggaaaactcaacttagcaataaccaacaaaaataacatcaaactcctaaaaaaatcgaaaaaaagataaattaataaaacaaatatatttgtttatgctaataataataatatttttggacccatcgagatccaatctaattacacattgtatgttggatttctccaaccgatccaattcaataccataggctcaaccgaaccgaaccgatccaaaaaaatattggattggatcgattccatacaatggatgaatctccgtattagatcggatacatccaatacttttgatgtaatatttttagaccggattggatgagatttttaaagtatttttttaaaattgttttttttttatatgtaatccctaaaatttatttatttatcttttgtttttaaactggaccaaaatttattgaatattacttttagtctattattctgtataagaaactagtcagtttttttttttttatttac

SEQ ID NO: 176839 - DNA, 741 bp, Cannabis indica
tataaaccccaatgacaaattttaaaaatattatatctttattcgtatataataatattgttataaaataatataaaataatataaagtagatgagaagaaagaagaagaagatgaagagagaaagagaaagtgaatgagaatttctgagttgtttattccaatggggtgaacccctatttatacaaatacaagagtgagatattaagaaactaagaaaaagggaaactaaggaaaagaggaatgttgattacaattcatggtaataaataaaagatttggacatccacataattattaatatttataacactcccccttggatgtccataataactgccttattaaaaatcttgctgaaaacttgatcaaaggaaaaagagtatagtgtaaactaactccccctcatttaggcatttgtggagatcttctaatcgacgaatttcgatcttgtctgccgtcttctcaaatgttgatgttggtaataactttgtgaataagtttgtaagattgacacttgattgaatatgttgaacaccaatatgcattttcttgaagcgtataaagaagaatttcgtgaaatgtgttctaactctatctccttcaatgtacctccttttagttgaacgatgcaagcagtattatccatagagaattgcttgggttgatacttctttattgagtgcaatccatatgtttcccgaatatgctatgtcaatgatctcactcacacacaccattt

SEQ ID NO: 176840 - DNA, 759 bp, Cannabis indica
aagtttttttttttttttaaactaaaaatttactctattccgcactttgaatttcaaaacagcaataatcatttcctttttcttttattttacatagaaaaattaaataaaatacttacagcagcagcagaagagaagaagttagtgtctagagttaaatacccattgggaagtcataaagtcaaagaactttttgcacgattttctaaatttacctgtttaaaaatatatatgtatactcatttctacttcaaccaatacatacaagtaaaaaactcatgaacactttcggaggtatacaaaatttataactataagcatttttgaccttcataaatacatgcgatcagtgaaaaatttgataactatatggcatagtttatttcagttttgtaacccaataaaagtttcgttctatttacgagtttatattttttttgaaagcaacaaaatattatatattgagagatattaatggtaagttagtgcaggcacatgactgtacatttataatatatagtagctgtttggcgatacaaaaactcatgcatcgagtttaattacaaatagtaaatcatgcaactaataagtttctctaaagttatgtactatattggtaccaaacacgacacacatatctaacagttaatgtgttagcagaacttgatagtgaattgtaagatataatcactattctcaaaacttttacgtggtaatatgagtatatacatacatattattaacatcatattgtatgat

SEQ ID NO: 176841 - DNA, 1009 bp, Cannabis indica
  modified_base (824)..(824): a, c, t, g, unknown or other
tcgtcaatatatattaaaaaagaaaaattgaagacgtcccaccataataattacaaactttaaattattatagtataagaattgttccacattaattaaaaacatatattaaagaaatttaaattatttagttagaacaaaaaaaatattaaattaatttaaaagtttaaattaaaattttttttaaaaaaaatatgtctttacaaagggttgaattcatgacattatagttgatgtaagagaactttaccacttacatcatgatttatattattgattgtattgattattttaggattaaataacttaagtatttgtctataatttttgttgagttaaaaaataaaattaatatataaatttaaaattaaaaaatcaattaattgaaattataaaaatgttataagataaataagtaagaaatttttaagtttggagttagctttggaaaattgttagctggatttaattattaatatttaaaattaattataaataaaaaattattaattgtattatatttttctagagttaaaattaagttatttgtttaaatcaatacctataaatcattatatctattaatataaaaaacacaatatttattgtattaactccctaattatttaataaatatcattatctaaatcgaaaatattaagaatgcaccatttaaaattcttatgttattgaccaccagtattcagtactttctacattaggtgacactaacaattagttagcaatattatttaaaaataattttcttaaattatatgagatctgatacttaattacactaattacaatatgacacagaaaanaaaaaaatattaagtatcactagtatgttttagcaattctttaattttgctatatgtatgtattaagtttgtgaatttgtgaatgtatagctatttccacacgtcatctcattcaaacctgcatatatggtttcctttgaagccaataaaacaagtcaccaagctggcatgcccatgcatggatg

SEQ ID NO: 176842 - DNA, 827 bp, Cannabis indica
cataaattgatttgacctgaaaccagaattcagcgagaaccagtatataaagagtctttttgagaaccaaaaggtaaaaattgacaggcatctttctaagcagactctaaagcaaatctcagataacatgagcttgcttatgttgacaatttttctgtgaggttatatgattttttcttgtacttaatatattttttttgttagacatgactttcatgaagagtgatttgatccttaatcgcaagcaaagaccaacaaagaccttgcgactctgtcctctacgaatcctcctcagaagaggaagagtgatgttgtcgatcccccaatcctcgatttgtctatgaagcagcagaaatttatccaagagaaggggaagaagctcatgatggatccaacgactaaggctcgcaatctcatggatctacaagaaaatttcataagtgatgacttttttgtacaaatcaatcgggcacctgctaaagacttcttgacttgttcttctaagttcatgatctaggggatgaccgtatattcacgagctatcactacaagtcttaaagaacttgagcttttaaagaaacaaaattctactctgtaagagggcttgaagaaagttaaactcgatgaagttgttaaggataaagagattaaggatctcagtagagccaaaaataaagcaaaggagaaagtcaagaaattggaggagaagatcatcacttttacccgcgacttcaataatgaaaaagaggaaagaagaaggcttatgaccaggttgtcaatgactacatctacactactctgaccaaactgcctaactttagctttgc

SEQ ID NO: 176843 - DNA, 749 bp, Cannabis indica
aaatttttaaatttaaggataaaaacataatattttgacgagagaacttatctttgaagcctttttactcagcatgtcaccattatatagaaactaatttgttatgtccaactactagagcaaaatcttattccaaggtagaaatatacaagtcaattaaacatgcactataaaatttaagagattaatcaaatttaataaaacaaatctcaactaaaattaactattttaccaaaaaagataacgaactcaattagctaatcaaaaaagataaaaatgatgatataaaaagaaaaaaaattcctcaaaattattaaatataattaaagcaagatataactcttatctgtgaaaatttgtagtagcactctttgatgttgtattcactatcaaccgagccaacaacatactgtaaaatagccaaaaaaaaaaatggcacaaaatagcccaaaaaatggtacaaactagccaaaaaaaaaaatagtacacactataaaatatgacaaaagctaacaaagaataataattaaatttatggtttggttacttcggtggttgctctagtaatttctatatgggttgttatgtgaattttagttacaatttaagttactctgttaattgttatgtaggtttttatgtagattttcgtaaaatatataaaaaaatacttaaaagtgtaaaattaaaaaaaatccataaaaatatttttaaaacttaagcaagttattttttacaatttgatgaaa

SEQ ID NO: 176844 - DNA, 771 bp, Cannabis indica
tactcaaggacaagggtagcacaagtcagacaacgaaaaagaaagttaatgattggatgatcaaatgaaaagttttagacaaaaagtggccatagaaaataatataattttggatataataaaaacaaatgtttctacataatgcacaaaagtttttcaccaaccaaaaattggtaaggtttccgaagactgattcatttagttattttaatggaggaaaagaaaacgagtttgaatgaaaaaatattgggttgctttaaaagactttgttatgtgccacaccacactgacccaacaaactagattgatttgaaatcgatatgtacaggccaactcattgacatgatctttataatagagtagtatagtttgatcgtccatcatttttgggaaccttaggcccaaatttggtttcattgacccattttgatgtgtttgtctttggttcaaaaatatttactaaaacaattacatgcccagtcgcttaattttaaatctaatcacatatctgagcctttcatttcataagaatgaaaaagaaaaaatgaaagctcctcctccttccttcatgtcacaacatcaacagttgacaagtcaggaaccatctaaccataagcaatggattagatgggattgagctattttccccatataaaaacacagcccattgggcccaaatttctgtctatgtatccattgcttttgagtgtttaaatttagggatattttcataaatctaaaaaaatgacaaaaagtttcaaaaattaccaa

SEQ ID NO: 176845 - DNA, 1063 bp, Cannabis indica
atatgtttcctatggagtagattcaatctagactcgtcagggatctggcgagcacctgcagtgactatgcaaagatcagagccgcttgtgatggagtagtcggttgaagagagaatcttcgggttcgaggtaggaaggctgcagcgtgctgcaggtctagcatctcacctcggagcttgtctggattggtgtcaaccaagacaagctcgtcagctaggtcttgggtgaggatgggtttgggctatggcccatgccaacattgccagctccaataattgagatttgatgttgttttggtggtagaaaggagtgtagcgttctgaatgggcttaaagaaggcctctgataaatcgaggcctccagcccacccaagaagtggtggaatcactcttctcctccatttttagtattagtgtatatatttgtttgtttatgtgttggatatgtaataatatttataagtgtagttgagtctagttgttcaaaagggaatggggagagagtggttaggattaatattagttgtgtgggatttttcaaagatcaatgtttgattattttgtacatgtaataatgtcgtactaactaactaatgtatcttatgagtgtatgactaatgtgaggtttgttaattcaatgtggaattactttttctttcttagtggacaatcaagtttcaattcccaggtcgtgaaggctagaattttctattatttctagatatatattttatattgtttattctatattattgtgtatgactaaatattcatatgtggtacttttgggtagcaaacatatgccatataccattaccaccattgatttttgtgagttgtggcagaactatgggtggaagtagagaaatggtaaaagccacattttattactattgatataattaaattttgagttctatataatttgataaataatttttataaaatatcgttaatcaattataaaatgtcaccatactaattaagtatatatcgatggtacttacaataagaaaaacgggaaaagatcacactagtagtacttagtacctttttttattgcc

SEQ ID NO: 176846 - DNA, 566 bp, Cannabis indica
  modified_base (547)..(547): a, c, t, g, unknown or other
agagtaattttttatatggttaattagaatttatttttttaagtctcacttcctatttcaactaaaaaatgcatttagagagcatagttattaaaaatgcttattactaatgtaattttgtatcccatctcacttattttattttaataataattatataaaatcactaactatttacaaggtattattttacaatagcggtggtctggtgggcactataatgcgcaagcaatgctgttatattattattacttattaaaggatggttttgagaagatactataaacttttatgtttgtcgagtttgttaattagaacttttattttttaaaataatataaaataaaaatatcttaagctaattacttgtcataagaaatcttaataataatataatcattatatatttgtatatatttgtgttagaaaaattaaaatataaatttactaaaattacgagatactattttataccattataaaaaatataataatttaatttattgtttaataaataaaagtatgatcaataattacatatagaacnctttttttttttgttaaaa

SEQ ID NO: 176847 - DNA, 787 bp, Cannabis indica
gccgaaaaatcgctagatgacattgaaatgcagcgaaacgaagaacacgaaaaaggaatggaagaactttgtatctctagtaggtaacacttttccctttctgaagagttttaatcaccaattggtgatcagtggaataactcgtgttccttatatatttctctttgttcataaaaactagactcagcttccacatcttcatctacaacaagtgatgaatcagaaataatgatgcttcaacatgtcaaaaggcatatcccatcagcttcatcggctatggttatcggtagcattctcgggttaatccaagctttgttccttattttagcagctaaaagaatactgatttacatgggtgttgattctgtatgtgcttcaaacttttggtcagttaattttgtaatgaagatatgtaaatgtttttcattttgcattaataattgcattagtgacttgtttattttaatggacagaattcaccaatgcaaaaaccagcaatacaatatttgagtttgagatcattgggtgccccagctgttcttctctctttagctatacaaggagtttttcgtggattgaaagatactaagacacctctttatgctacaagtaatctaatttctctttctcattcctttcattttaagtattaaagttcactttggaattgctctcatttaaaaccccataaaaatgcttactttagtctcttataggcctgtttgactaggcttctgtttttagcttcttactaaaactgacttctgttaaaagaacttcttagagc

SEQ ID NO: 176848 - DNA, 802 bp, Cannabis indica
ttgtctacagaaccaagcctcaaacaattaacattgccagtaacatcagggaaacttgaaagctctagtgatgttctccgatggaaatctccaaaagaggagcacatggaacttccacttacacccacttggctagagcttccatgattcataccatccaaatcacagctactcacatctgaaattcgaggagggctttgtaaaaatgcgcccaacaccgctgcagcggcttcctctgaagttccagcagcagaaacttgaggtaagcccatcataaatttttaaaaatataaaataaaatccagttatctaaaggagagtaacctaatgctataggcctttgttgcctgcagcagatttaactacttaactaatgtcatctaagcaccaatgatttcatcctaacaaccacaacaagttttaatttccaattcaatcaatataaccaaccaggacacaaaactgcaagttccaagattcttggtacagctgagaaataagtgtatagccaaaaatttaatactatgtatccaccaaaggcatcagcttcttggacatttcagttaccacttccttaacaaaatgtgaggaggtattgaagcatatttcacacatctgaaattcactagtagcaaaaatctcctggcctccataccagcaagataagaaacacatgttcaaggttgtaaaattaatcaaaagcctatatacctgaaaaaaattaccattacataaacaaatcagtgctagttcttgctgcctcaataatccaacaaatccaagcttaaaaaaaaaaaaaaaa

SEQ ID NO: 176849 - DNA, 485 bp, Cannabis indica
atatttttgtaagtatcttttattttatttttagatttatctttatgtttaatacataataaaagaattaaaaaatttaaaacaaaagtaggttacaatatattatggaaataaagttttttaacgtagctagctagtctctcaccatgaccaaacaaattataaacgaaatgtttttggaacaactctgtgactgtaagacaaaacaaaaggaatccgaggatatatagaggtctcacaataagtcacaactcacataacaagataaaaagaagagatggggttactaattattattagggtgatttttttcatttttctgtttattttgtctaatcgttggttgcattctgttaccctgcaaatttaatcagatattagattaaatgataagtaatatatatgaagtccccaacaaaaaatttggtggacgtcggctatagctgtttttttttttcttttttaatagtttgtaaaagggggtt

SEQ ID NO: 176850 - DNA, 1316 bp, Cannabis indica
aaatattagaaccctgaatactctctatgcagtattaaagaaaaagggttaaaaactttaaacaccttcactattggcttctagctcttccacaatcttctcaaccaaactctcacctataaatatcaagtagataaacattgcttattcataagagtatagtgcaaaaaacaaaaaatgattcatattcttctttggagacttaaaaaattaccagcattaacatgattattgggatcaagtgcattgtccatcaaattccgagtcaaaggactaggattcataaaagatatgcttcgaatttcatggcgaatcgcctcaagttgagacattgtttcttgaagctctttgtgaacctaaacaaaatcaaaatataagaaaaaatttcaaactttttgctagcccaaacaattaaatcctacaacacaagtgaatacaaactcaaactcgtctctaacttcataacaaacatgaatttcttcatgccataggtacctggcgagcttgggactggtgcatgacattttcaaattgcccacgagctaattgaacatatccaattgaacgacccgcaaatctcccaagagttctggcaataattggaagatccttaggccctaaaaccaaaaataaacacaaacccaattcagctttggtgttttaaagttaggaaaaaagatagaaagagaggttaccttaccaacaagtgcagcggtggctccaatcaataggaagagctctccgtaagaaattcccagcatttgtgcttcttgaaacgattcaaggattggaggagtacatggcttgaagaccacgacggagtacgggatagagatccggcgatggacgctgtcgtttggggcagcctttgtccaataaattaagaccctaaaatctattacaacttcttaaccaattgttgtgtttcttgtgagtaaactctcgagtctcaattattactttatttacatttaattttttttaagctcaaattttaacataaattaaaggtgtcattcattttttataattaattatcaatatagattttttatgtgtacgtttttgtacattatcaaattttatattggtacatctaatattattattttaaaaatataaaaattattttaaaatttataatatttttattttttaaatattttatttttataattttatttaatttttaaataaattttaacaaaactgttacaaaggacagagagagaaatctacatattcaaccttttaacaaaactgttacaaaggttcttacatacacaagtgaatgcaattaaacacaaaatagaaag

SEQ ID NO: 176851 - DNA, 757 bp, Cannabis indica
gagaacagagaggaaattgagaagcaaagcttgtctcttacacgagactttattgatgtttatatagcccaattaggcagcaaactaatacaaagcaattagttataacagaattgctagaaagattacaagtggcttttaacagaatctgaacagaaaataacagacccaagacacaaaaccaactaatcttgactttggttatcatcccccctcaaacgaaaaggggtagataccactttgagtttggttttgagatagtgaaaacgctcttttggaagacacttagtaaagatatctgcgacttgatcaaccgtggggacataacgcacatcaagttccttattcagtagctgatcacgaacaaagtgttgatcaatttcgatgtgtttgcaccgggcatgaaaaatgggattagcagccaaggaagcagccccttggttgtcaacccagataataggaactgcagcaagagtaacagggagttcactgagaagagaacgaagccacttgatttcagcagcggtgttggcaagcgcacgaaactcagattcagtggaggagcgagcaacgacttgctgctttttagctgaccacgagatcaaattcgggcctagaaaaatagcatagcctccagtggaccggcggtcatcaatacagctagcccaatctgcatctgaatatgcagaaagggacatatgctgaactggtttgataagaataccatgagagatggtgcctttcaagtaacggagaa

SEQ ID NO: 176852 - DNA, 919 bp, Cannabis indica
ctgagcttggtgtcttttaataatttcttgcacgtctgtcaccatcaacatacgtgtcatattctcctacattagagcattgaaaagcaagttacacaccatcaagcaacaaaaacaatcacttgtatgttcagtctagagtctagctgatataactttcagctcacaaaattcaattacagtgtaccttggccaaacaagttattaaggaaaaaaccgaagaaagtaaagtggaggatgagaaaggttacaacggttcaaacaacttaccaaaccaagatatcgaatgtttggttctcgtacagcgataaactttccaagaagtgcaacacactgagacatcatctctttttcagcatctagatgcataacctgaaacaagggaataagcacacaaaatattatgtacatgctagccctgaattataaatataaacaaataaaaatgaagcaaataacaccgctgccctgacagtgtgtgtatggaatattttgattaacaccttattcatatgtttatgaacgtgcatatgtacatgttatagtgtcatttgacttgagctcaaacatgcgcatgcataaatgtcacttaaattgattcagtttaatttccaagaaaaaagtcgaaaataatctatatctttttaagtttatccctatttgaagagctatgaacacaatctatacatacatggcacatagcaaaaaatgaatttcaacaatcaattagaattaacttcataaacaagaattatggcaagctccttgagaatcaaacctcaaacaatgatcttcttgtatttggatcttcaattgtaggaaaatactgaagagccctcattgccttgacctgtgatgaagacatgccaatgagaattaaagtcgatttgtcatattcattttttttttttaaaaaaaa

SEQ ID NO: 176853 - DNA, 820 bp, Cannabis indica
ttagttgctacacacttgattatgtcatttgcatacacataagttgatataaattatatgggacttcacactttatgagtagaaaaacttacagcattccaaatgtggcagcattaaaagagatctgggaaatgacccactaagatcattgcttcgtaaatctctattaggaaaatgtaaatcaatcatgagatgagaaatgaaacaacagtcaatacttgtttgaaacatgtaattgcaaatccacatgaagaacaatttaaagtaaaaagtttttgcaaaagcttgtttgaataatattcccctaagaggagatatatcactagctattgaattaatagttacataacttttattcaaaactctgtgcatatggagaatgttcctaaagatatttgttaaagtgcaataaagttgtagaattgaaaagagaaattacactaatgtcaacatggaggaagaaggaaaagctcgggagaggtatgcccgaatagtgtagcacgagcaagaaaaggttatcctggccgtggatgaaaggaggcccaaagttccatgagaaggagagccgaccataaccttcaacgatgaagacgctgtcaaaattaaattttagcacaatgacccgctggtcgtggaagttcagatagccaataaaatggtgtcgagaaccatgatcgataatggagcctcttccaacatcttgttcaaaaccgcttatgaaaggatggtactccaactcaaggatctaaccccatgcctccagcctatctatggtttctctggtcaaggagtcgcacctctaggacaaattcgtctaccc

SEQ ID NO: 176854 - DNA, 1186 bp, Cannabis indica
gttatattactaaagtagttagagtgaattagtgatcctcttgacctcttcctatataactattcaacgttcattaggaggacatccatccttttctcctctaactgaagttgcgtgtagtgtatggactctcaacttattattattattattattattatttaatattttatgttttcttatataaattttgtaaaattataattaaaaaaccgtaaaattaagactaatatatgggggcccttggtatactgctcatacacatgatgtacaaactccaacaatatttaaaatgtgttgacaattattcatatatatatttaaaaaatttacaacctcttacttaattttaatacttgaaaatatatgttaaaatatatatttcttttttaaatttttttttacggtggcagtgtttgttatgctagcttacaacattatttttaaaattttataaaaatttcgaataatttacagtaccaaaaatacgtttgaagttttataaacacgcgtggtaaattagaatatatatcaggtcttctaatttcgatactgtaaactattcgaaaattttcaaaaatttacatgaataatactataactataacaaatacggttatgaaaaaatattttaacatattattttaaacgtaaaagttaattaaaaaattgtaattattactcttcaatatataaatatgaagcaaattaatatctcgattaatttgacaatcaaaatatttgatcattaatgaaataaaacttatattactacccaacacctatatacatcttgtcctgcaattaattatattagcatcgactaattaaactcttcgatctatatatgtagacacttgccaaacatttgactttttatgatcatatattaagggaatattatatgtattgagattcaattaaattattataattttatagcttaattaattggattattttacatatatcatgattttaatgtttttcatcaaatgaaatcattttgaccatgcttcttgtcctgaaattctacaacatataaaactgtttccctctctttgaattttcaagtaattgactcattttaatttttaaacctaattattaattatataataaatgaataaagttagtccaacttagtataattattcaactgaaactatataaatacgtatggata

SEQ ID NO: 176855 - DNA, 458 bp, Cannabis indica
gatgtagaacatacttaatgcaaaatttattctcttagaaaaaaaaaaaaaaagaaggaagcagtacggcaaattatatctttcagaaaaaaaaatggcaagttataattcaacgaaattacatattaagttttaccaattgatatgtttattgtaggtgccatgtttgggtctgtgtaagtttttcatttttaactgtcttttttctttttaacgattttcttctccttttcatcactttttttgaattctccagcctcatgtaattgttcccgcctcttttccatcctccattacgcccttctcctcccctgttcactacctttctggttttcctttacttttctctcccctgttttttctggtttctagtgcccgcatctacccatggaccccattttttagaccaccctacactccaccctctctcttactgatgatgagaggaacatcatttc

SEQ ID NO: 176856 - DNA, 697 bp, Cannabis indica
gtggcgtatatataattaatgatatgcttatttatgacttaaaaaaaaaaaaagaatatgcttatttataatagatcataatgcatgtgaataatactaattattataattgtgggaagagagagaaagagagagtgattattaatttcaatgaatattgaatatcgaataagacatataagacataggagggcttagttttgtagctatttatgttatgaagaatttacaccatgtccatttgatgataaaagagcttatctttaacaaaaatgtaaataaaagataccaagctaaaatataattcacttttgccatttctgtaaatgccaagaataatgtagtttcacacttatataatctaatcaaactgcatacctaaatttataaatgagattgtttacagtgttctattaattttagtgagcaccatagatcacagtaaaacttattttttttttttaattttcaaattaaataatggttgaatgattaattttttgaatatatattatttgtatttatatatgtatatgataatgaagaatatatttttagtgttatggttggaataaaaaataattttagagtctaaaattacactattttgttgttagttaaatactatgttatctgtatttttagagttgatgacgtctacaattctaaaatccaatatcggtcaaggtacatgccc

SEQ ID NO: 176857 - DNA, 868 bp, Cannabis indica
ttcttcttctgcgacgaacccaccagaccatgatgaacccaaggacaaaccaaaaaaaacccagtgaaccccccaactacagtggtatcaacgaagagttgcatgagagggataatcagaaccggcgaggtcgaggcgagaaagagaaacttcaaagaagggttgggtctcggggcttagagggaggctaaagggttggatctgtaaggttaggaagttagtttttgggtttgtttaggttgaaggtggccagaggtgacttttcgaagctgtatgagaaggaggacaaaagatagagggagtgtgtgtggacattagggttacagggagaaaaatgtaaaagaaagagaataagaagggaaaaaagaaaaaaaaattaatcattttttataatttttgaattatttttaaaatatttaattaattaaaattatgtggaccattaaaaatttgtcatgtgtacccttgtgtacactgtggcatgcccaccatggcacttaacagaagtgaggtttggaaggttttacaaccaaaaaaattggtttacgtggttaagtgtcactaattatatagttcaggtagttttttccgccaatatctcccactaaaatttgccacgtgtccacttgtgtacactgtggcatgtccaccgtagcacttaacagagtcttttgaacggaaggggaggttttggaagattttaccaccaaaaaattagtttatgtggttaagtatcactaatcatagagtttatggagtttttaccgccaatatcctatttttaaaaataataaaatatggagtggaaatggatacagaaagtggtttttggttagaaaaaatgctaagctgcgagatcacaagcacc

SEQ ID NO: 176858 - DNA, 673 bp, Cannabis indica
gttcaagaaaattgtattgatttatttatatgtataattttttttaaaaaaaaagagtaattatgtgtgtgatgaggaaggggaaatgttttatcatattgtgtattttcatcatccatgtcaatatagatttctttgcttgattttattattattattattattattattattattattattatacagcaaccgccgcacccactatctatagcatcaaatattccttccaatcaaactatttcagttaagcttgatgactccaattatcctgtttggagaatgcaaatgcaaaatatcattattgcaaacagactagagggttacgtagatggcacggtagtctgtccatctcagtttgtcgataacatctcgaaccagatcaatccggagttcacagcatggcatcgttgcaatcggcttctcttgagatggttgtatgcatctctttctgatttcatgcttgggcaaatcgtgagcttcaccacagctgcagaaatttgggtgtctcttgaacgaacatgcatagccgcatcttctgcgaggactccgattttcaaacaacattgcgtaacttaaagaggagggctgactgcttctgcgtatttgcacaaattaaaatccttgtgtaatactcttgcttttgtggtgagccaatttcatctcaagatca

SEQ ID NO: 176859 - DNA, 787 bp, Cannabis indica
atgaattatgtactatgggatcttatgattttgaccgagtagtaacgattggacatacagagttaatatgttgtctatcagtgtagacaatttatactataaatgagaatacagaattcatacgaaggaatagtctaatcttgtaaaattccaaggttgatatttttggctatgatgttaagaattaaagaaggttattgagaaccatggaggttaaagcgaaaatagtataatgctttattcttgaaaggtgggtaacctgcgaagatcaatagaatattagaaatatactgtgagcatatttgataaaggttagaatatcttagaataatatcttccctgatgaggtgtttatttaaaaagtgataattaaatgtaccactggttaggtaccttaataagtgtggtacaagagaaatattatatacctgttcactggattaaataggctaggtagcctattagctagccttaacttctgcgttgtccggagtatttcatgtctccatgttgagaaaatatgaatcagactcgacccatattctgagttgtgacgatgttaaacttcagacaaatttattatatgagaaaaatatcttgtccaggttttggactagaaagatgaaatgagacaattctactagttaagaaagtgctataaaaaaaacagcaagatagaagcagcaatttgagaattagaatcataaatatgggggtaatatcccgaattgtttaaataaatttcgaggacgaaatttttataaggaggggatggttgtaatatccc

SEQ ID NO: 176860 - DNA, 772 bp, Cannabis indica
acctatactgctctgaattgaacgcacttgtgcttcgaacctactgtaaggtctcgaatccaagctctttctgtgttgttgattattgtctgaggcataatcagaatcaacatcatcatcatcagcagcatcaacggctaaaagagtatccctaccgtgggtgataatctcggccgtagatttccagacagtagtgccgatgtcatcgatggcttggccaaccgactcgagcgactcctgagcgacagaggcgcctacttcaaatgaagtagggaggtccttgacggcgcgtgaggccacttcacggatgacggaggtctccttcttcaactcagagccaaactcctcgagatcgcggcggtaattgtggatcacggactcagatttggtggccaaggtcttgataagaccgccaaagctccaagcattgttgctgtcgttggaatcatcggcgtcgctttggtgtcggtatttgtgatcgtcttcgggatgggaagaaggttccgacgaggaggaaggctcatctgcgaagacggacttgaagaaatccattgttgaaagaaaagagagagaaatgaatagtggaatatcggtggagaatggggagacgcaaatgctccaaattaactatttattggtcgagcattgctactaataatttctcgatatatgatatatcgtgttgcgattagctagtggatagtgataattagttgagccaatattaaaacataaaaaaatctagacaacactaataccttttaatatttct

SEQ ID NO: 176861 - DNA, 800 bp, Cannabis indica
  modified_base (51)..(51): a, c, t, g, unknown or other
ggtagcttattttttaggaagtgaataacactaacaatacgtaacaacaanagcaccataaatcatgaggccaatatgaagatacgtcgaatcacaattaatagttatgctactaatacaacgtgactttgagccaattgagagttatgaatgtctacaaaagaacattaggagattatatatatggttattttttattttttctatttatattattttttaattttataaaagttgttttattttgaaattatgttatttttatttcaagattatgttctattttaaattttgatgttatattgttttattttgaaattatgttattttattttataaatgaataaaaattaattataaatatataaaaaataaatgataaaaatataaatgagaaagttatataataaaataagtaattaaaagttaaaaaaaaatttagattaactcaaataaatcatctacatgagaatggaagtaaaaatctagaatggtctagtgtatttataacatgattgataatttttttttcttgggtaataataatataaaattatgaaaatgggtcattttcttgcatgaaaagaaagaagtctgctgagggactcagagagcggaaggctcaacaacttaacccgagatggctgtcaatgcagccatggcgcctgcgcagggctgccttatcgccctcagctcacaaactccttttctcggccccaggtatatatatcaatgatggacaccaatcaatgaaaatgaaaagcagattcttttttttgtttccaacccataaaacataa

SEQ ID NO: 176862 - DNA, 1103 bp, Cannabis indica
aaaattattatataaattttgattaataagcaaatctaactaaaattatgacagaagatagcaaaatcaaccataataaaatgcccaatattttagaaggaaattagatggtatactctttttaagttagtgtatctcatatttacctgttcttcaatcttctttaattgatactttcttttatattatttcttctaattacaccccttccttttcattcctaactttcatctctctggagctttcagcagaaaaacaaaattctttgaaactaatttcgtaaccatttcattgttggagctatacgctctacttgtatctccaagcttcgcaaccctactgtcgttgcactatttctattgtcgcagctcggcatctctgactcctttgcgcactacaacaataactagtgttaagagactagaaggtatttgttagaagaccatatttcaatgttggattttgaggtatgttgttgatggtggtgatagtgatggaggaggcagacggttgctggcaatggcagaaggaaccatgtgatcatccctttacaaacatggttgttgacttgagtcgtgtggagatgaatttttttttctttgcagctgaatagaaaggggaaatggtttgatttgaatcctttatgtgagggtattttgagaacaacactcataaaaagaggtatgtttcaattaaatctaaattgaaggtagatttggttaagtgataaaaaaagaggtattcgttaacttgtcccatattttagtgggggcaaaaatatttttttattgagaaaaatataaattttatgagaataaaaaaatatatatgtgagaataaaagtgaaaaatataaattttataagaatacaaataaaatatgttggataaaaataaaaattataaattttatggagacaaatataaaagtatttaaaaatataaataaaaattattatttttgtagagttaaaatataaaatcggtaaatactattttggaccctgtgttttacaaaagttactcattagactctctgttttgttaaatgacaaaatagaccatatatttacaaaaataagtaaaaataaggaccctgagctc

SEQ ID NO: 176863 - DNA, 967 bp, Cannabis indica
ccataaaaaggttattggattattaccttattaagttttttttagttcctatcaatgagtattacccattaaaaagtgttccatatatatatatatatttatgaaacttttcatatatttattgatactatacatacagttttatttgaattttagttaatataaaaaaaataacaaataaaagtagtttattaaatttttgaaattatatattttttttgaatgttgcctaattaatttttaaaaataaataatgttttggttgatttttttttatagtttatcatcctataatctatactcatctctgtgcactccaacatcaccataaaataatgtcagaatttttataaatagtagttaaatttctaaattttttattaaaaaaaaaaatctaaatagtcttttaaaaaactacattattaatcataagacaagcttataaaattcatcaaaaattaattatttttttctatttattttattataacaatacatgcaattttttttttgttaattccaccaaatcactatttttctatatattttaaaataaaaaattatatttctaatttcaatactattattttatttttataatacacacaccaaaattttatattttaaagtatatcactcaatactaatataatatttatatatatagagattacaaaaattgagcaacaccgcgcaaagcgcggcttaatttcctagtaatgttaataataatgagtactatatgtttaagagttataaaaatgaaaagacatcattaattttatttattattgagtattatatatatgtgagagttagaaaaatgaaaagacattattaattgtatttatgagatttgattgataatataaatatatgtgtatttttttttttaagaaaatatgaaatttccataaaatagataagctaggctaaaaaaaaatttaggatgtcacgcagcctttct

SEQ ID NO: 176864 - DNA, 609 bp, Cannabis indica
agaattctgataactataaaaagaattttctggttcacttagaaaagaagggtcgttgtcaatctcaaaaatttgattttcaatatcaaaatatatagagtaactatccctattactatccctaactaaaaaagtgtcatcaggtatgaaattccgcatgtacctgacgccgattaaatgatcaacattactgtaattagaattgtcactatcattcccactagggatgtctttatccatatcatttcgaatttgatcttcatttacactggtattttcaataggatcaccaagactatttattgatttacttagcccacacctgtattctaataccctgctaaacaacattgaatcaaatcgtcgcttgttcatagaactttcttgcccctatttacatgaaaatacaatagatgaatagtcatttgatgaagtggggtactgaaaatttttttttttactttttgttagaacccgtacgtatcgttttgtctatatatgctaaaataaggatgaaacccaaccttttctaattataaataaattaatagtgaaatagtaggttccccgactgctgtgtcaaattacgtcattgaaaaaaaagaaaaa

SEQ ID NO: 176865 - DNA, 698 bp, Cannabis indica
atattttagacttgtcaactactaattaagctggccttaggcatttaccttcttctacttcttcgtattgtatttgtatttggaaagatgagtttcgtagcagtgtaaacgcgcttgtatttgctgattgtgttcccattatatatgagacacatattttgcctaaaacaaaatacatatacgttaaagttttatattcatattcagttaaaaaaaaaaaaagcaaagaaaaggttgtatatacagtattcgtaattgatgtgtataaaaatatttatattttaatgcttgataagctcaggttacgtaacaatttttggtttgttagacatgcacattgcgcgtgcagggtagagtgaacttttatatctgtaacgaaaatatttcgggtattacagaaacgttgggctggtgataagcggatcttggtcatattttaaagttgatatctttgactatctggtatttacgcccaccaaaaactagcctgctaaattaggccactcccgccaaagcccatccttgttcccttttcataaacccattttgtacctttcttttcaaaaaaaaaaaaaaacgtaaatttagaaaagtattgtggtacttgttaaatttgttttataatgttcttcgtttaacaaacaagaaaaaatgtagagaatgtttggtattgtttatattttttgtttttaaaaaaa

SEQ ID NO: 176866 - DNA, 520 bp, Cannabis indica
agattaattatcagactaataattttctatctctttctagtgtctcaccactttcttcacccgatctttggcagcagcagttcctccactaacacactcgggaagatatggactgcacacacgcacctcattcatcacaactatagcagtcttgtcccagcgaaccggaagcctgatatcaaccacaaccagtcagaaaaaccaacatagttaactttaggcatcacccactctgcagattcttttgtcaaaaaccaagaacaaattcaacatattgtaccttaaatttgcatttcaagcactgtcaaaaaaggtttaaattaaaaacaagaaatagaaatgatatttttaagcatccctgcatgcacagaaatatattggtcaaccggtttttgctcgtgtacgagtaaaacataaagacaaagcctaaactatatctcaagtccagtcaattgcctcaataacacaaattccatacattatgattatacatagtattatgctataaatttattgtact

SEQ ID NO: 176867 - DNA, 597 bp, Cannabis indica
actttttggtattcggatacagagcatcttccactacacgaaattagatcactaacgatagtatagttccatgtaataacaccataaattgatgtagattagagctgaaaagatagttgaatgggactacaaataatcactaatgatgaccctatgagattgtcctatgactattaggcctgcaataaataatgctcagaattcagttcttcatgatcacaccgaacacaatgaaagtataatttagtccaatcatacacttgcaatgaactaatgtcaacatatacctactcaaattgaatgttaaagccttccacaaatataaaaatttaaaaatacacagtaatcatcaaaagaaattttatgtcaagcatggcaatcatttgccaggcaatcactacaaaacattaagatacttatatctctattgataaaaataataaattgcaataattattgagtttaataaaacacaatgcataacccctttcccttaagttttttttttttttttctggctaaggtatcatctttaagtacaaacccctaaagagtttatttttatttgttctgaaaaagtttatgagatatattctg

SEQ ID NO: 176868 - DNA, 653 bp, Cannabis indica
cttcaacacattacatttctataatttattgtgtattgtatatctattctatataaagtgtgcctatataactgaaattcttggtttatgagaaattcatgggtgactttttatttttatttaataaaataataaaatattatttatatataataaaataataataaaacaaatcctattaatatttgaactgatattaaatattcgcttataccatcaaaatttgcactgcccacttcgccttctctgccttttgatcgatatcaaacctcaaatcgacgtttgatggtggagtgacatagatgagagcaggtttttaactgttcatgtatggcttattctaacacagatatccgtggagatggtagtggttgtgctatgtggtttggtgacttaattgatattaaataaattcctgggggtggccaagatgtatacatgcgaatgccagcttcagagttaagtaagtataaactttagccttatattatatactattaagtgagatatttacatttatttgttgtgtttgtcctacaattttgctttaattttcttctgtctcgggacgatgacaataaataaaaaaattagaagcaaaaggtgatagtagattgaaagcattgatcgctgcaagtgttattggagcagtt

SEQ ID NO: 176869 - DNA, 695 bp, Cannabis indica
tactaacattttattttcacgttgagtcatctcatgatctgtgagttgataagagaccatataattaatgtatctataaaatgattaaaacctaacaggtaaaaatggtcttaaaaaagatctctacaaccaaacataaaggtatataaatattctatacttttgaatggggccgggtgtagtactgttagctagagataaatttatattgaaagagaactattaagggataaagtcaattgatttgaatttgaaccaattttcctgacgtaatctataatataaattactattacatttgagaattattaatattgtcacacatatccaacttgctcatattaatatagggaagttggaaaatcatgcaaaatatagtttgattacgtttacttccctctcttattccttctttgaattcaaatttaacgggatacgaatacaataataacaggtaaacattaaaaattatgaacacttggacttcattatttatttgtaataaaaaattcacattaagaatcaagatattctttatttgaaaggtgaaaataaaatacgggttaaggagttttggccttacatatatacttaagaatttaaaatcttactttcgcaacaatgcttccccacgggtatttttctttttcctcttcttttaaaggaaggatcatctttttaaaagcgtatactgt

SEQ ID NO: 176870 - DNA, 465 bp, Cannabis indica
tttttttttttgtttttttttctaaacgtgtagctagtatacactataatgatgtatatgtggtcactagtgtttgtgacctggctcatatacatccttacgagacaataaattattattttcgaaatcatgagatttatataatttccttatcgtaaattattggagacttaattattatgcacacattaaagaaaaagaaaaaaaaaaagtcctattaacacacactgatgtcattattcagaactctttgcccccaccatcaaaaccccctttttgacctcagaacttctttatttattgatctccttttcaggggtcacgccctaacaataaaaactaaaaagcaaacgaaaaagaaaggcaagaaagataacaataatgtgtttataattaagtttattttgtttctatctagctatctatagctttgttaagtatattattataatatttttattatta

SEQ ID NO: 176871 - DNA, 841 bp, Cannabis indica
agttaactgactaccaactatatttggtagacttaaaattttgttgactaaaaagtttaggtttcttgtagtgatatacgaaaaacattcatagtaaaagttctacaaaattacataatcttaacaaaaataaaaaattacaactcaactgaaataaattctttttccaatatcttaataactatatcaaaatcactctcaatcatcgattccatatatgtcttatataatattttacaaataataataatgcataacattaatctacttccatgataagttgcatgtgccgtcacacgtgtttcacactccatcttccaaaggtgagctgacacgaaacaggcaaaaaaaaaaaaaaaaaaaaaacgcatctattcatatacttttttccattccaatttttttctattaacactatccacatacagaacggagagacagattgaaaacaagttgaaagaaaaagaataaaaaagatggtgagtttaattatgcaagctcccaacagtttgaggaccttctctgtttctgcttcctcaaatggtataaactttctccccctctcaaattgaaaatctctttgcttgtttcctgggatagaaaaaaaaggaaagtttagcacaattttatttttaattttagggtctccttctccaacgagccgtgggaatataggtggtccagtgatattggagcttccgctggataagattcggagaccccttttgcgaaccagaaccaacgatcaaaataaggtagaggaattgatggacagcatcagccaaattggccttcaagtacctgtgagtatactcttctctcccccactttactatatata

SEQ ID NO: 176872 - DNA, 592 bp, Cannabis indica
ctttatgaatattagttggtgtctatgttattgattccatgtttcttttattggctgcatccattctgtgagaaggtaaaaagcaagggaaggattgcttataataagccaggagattctgaagtttatcatttttgtaattattgtaaggatgagcaaggcatgaactcatttgtggttaagttagaatctcttcaccttaccatgttattaatatgatttaacaagtttataataataatataaagttattgttattggtgactaataattatttttttgtctttaaatatgtcttttaaaattctatgattattttgaattacccttgaaactaaacgtttaatactatttgatgtattatttcaatatgttcttagaaattctataataattaagataccaatttaattgcaccttataataattttcttataatgtttatttttttttatataaaaaagtagtattaatattggaatgagaataattataagataaatatagatcatacttctgaatttttttttgttgaatggttacaacagaccaaacaaagacacaacaccaaaccccctagccagaaaacaag

SEQ ID NO: 176873 - DNA, 1218 bp, Cannabis indica
attgatctgtactcggcttcagcagaggacttggagatagtttgttgtttcttggatttccaagacaaaagagagtgccccaagaaaacacagtaccctgaaattgatctcctcgaatctgggcagacccccaatcagcaccagcaaaggcatgaagttggaggggatttggtgttgcagcatggtaaaatagtccttgccttggggaggttttgaggtagttgacaactctgaatgcagcttgtaaatgaggttgtcgaggtgccagaaggtattgacttaatttgttgacaacataactgatgtcaggctgagtgattctgaggtatataagcttgcctataagacttttgtattgcttaggatctagaagaaggtcacctgattcactatcaacttgagatttggctccagtggtgtcgaagcaggcttcaagccaaggtgacctgtatcttgaaggagttgcacggtgaaatggtctttgggagactgaaattcccttgttgcagcgagcaacttcaagtcctaagaagaaccgtaggcttccaagatctttgagcttaaatgtagtgtcaagagtagtaataaattggttgagaacatttatgttgttagtagctacaagaagtggtcgacttttggaccgttgaaagccttgtgtaatgagagtgaagcttagtttagcataccactgtctagatgcttgttttaaaccgcacaagattttgttgaatttgcaaacaacattgtgtggtatcacccctttaggagtgtaaccttaaggtagtttcatataaacatcctcatatccatgtgatgaaggtgccaatgtttgatggcaacaagggcaaagagtaattttagtgtattgaacttaggtacaggagcataagtgtcaaagaaatctataccttgttgttgtgtataccctttagtaacaagccaggctttgagcctattgactgatccatttggattgtatttgatcttgtatacccatttgtttccaatagcatgttggttgggtggtaatgttgtgacaatccaagtatggtttctttctaaggcatctgtttcagcatccatggcctgtaactaggtaacatatttggaagcttcaacatatgattttggtctagttaatgtatgagatgtaagaatagaagccctgaaaaattagaaaatcgatgataggaaacatagttagcaattggataa

SEQ ID NO: 176874 - DNA, 831 bp, Cannabis indica
gttaaaagaatgccattgtgacattactcttagtttaaccaattttttggggacaagattattcagcataatagattataaaaacttactctatcaactttgtttccaacaagtattttgacacagtcctgattagttgagtacagttccacttctttagcccatacatctgataagtttgtgaatgtttctcgtcgagtcacatcatatactacaatcaaagccaaaaaaaaatgagtctatgttatcctccacagccatagttaagtaattaaatttgaaacattggtatattgatgattgatctagacactaaatatgtatgatttcaaattaaaaggtattagataagtattgttgaaaacataggatgcaaatatgtagtaatataaggtaaatagtctcttcccaatccacaagatcttgagtaagaatcattgatattcaaatattatatctctggattcagatctactagaaagaaagaaaaaaaaatgcttaattgaacatgggaatgacaactaagctaatcccagtgtcaaaatcacattatgtattctagcatacgaaagataaggcaactatgtttgtaattcactcagctcaacactcaacagaacatgatagtcacttcattttctttctctattagaaagtcagcacttgcaaaaggactagaataataataataataataataataataataataataataataataataataaaacttaaaattatatttttgcattaacaattattaatgtttatatttcagacttctgtacatgatttttcagtaattatatgatgtaaacatataatagc

SEQ ID NO: 176875 - DNA, 755 bp, Cannabis indica
gtatcaaaaatagcaacttgtgatcaatttatctaaaattgatgagcaataattgtcaatatgcatcttaatagaaatattaaaaagtttattcggtactttaaggtatctaacaccacaataaggtaaggtgacgttagtgtctaataataacaaaagttaaagacatgtatctacaataaaattaaggtgatatttggtttggtgtaataaagtggtaatgataatagtaatggaataaaaatggtaataggaattcattacaatatttggtttgtagttagaataaacatgtaactaaaattattgtgtttagtttagtataagaatataatagaataaaatttgcattgactaaaataaccctattaatttattttataattataaaataataaaaaatgtaatatagaattttaacttttattattatatttttattaaaatattatattttttttataatagaatgtaattgtaatagagattacattagttttggtatataattatcattacaatacttattatattataattcaaaagaaaaaaataaagaatataatggatctatttagggaaatttgaattaatatgcttatattacccaaaaaattttcccctaaatgcaaagttattaaaattggtaatatatgcccatttaaacaattttcctaaactacccctctcatttctctctctctcatcctctctcttagtctctctgccgaaacccaccccaaacccaaaaccga

SEQ ID NO: 176876 - DNA, 529 bp, Cannabis indica
aacgatcaaacaatctgtctccagtacaacttgattccacccttgatttttaatccaacccaaagcctctcggaatccaatagcatcagctatttcaggccgaaccactccattatagcactctaaatatcaaaacaagcgcatgtgtatcaagctgttgttaaaaaaaattaataattaacccaagatctatttgtatataacatagaacacaataataagatataataattaggtatgtgtacctgattgatccatagcaattatctcagtttgatccacagcagttactccaatttgatagtgcaatactatcaactaagtcttctccctagatctctaaatcagaagcagtttattttatctgattatcaaaaggtatacaattgtgatgagacaatatgtatttatagagttagggaggggacttagctacaaaaccctagttgggctgggccgtgctcatcaaaggcttcagtcaactgaaaaagcccacacttcctgcttcacctacgactttacacacacg

SEQ ID NO: 176877 - DNA, 855 bp, Cannabis indica
gtgtaagtttttctttgctctctattttccctttttttttccttggttgaggactttaatctattgatctttaaaccacaacaaaatccatgcatataataacaaagtggagattctcatcagaaccgttggcccagctcgcccttctcgtctccatgtttcttctcccattaaagtaagcctaacccatctctttctttcccttttcctatctgggttttatctcttctttttgttataatctttattgtaatttcgtagttgaaaatctctgtttgtaattgttgtgtgtgtatttgttattgtatttttctcatttattatgtgatgattaatcttaaatttagcacaatgtgtgttatcttaattttttcccacctaacgtggcatgtccacatggccaacatcaatgccacgtgggagtacagctcgccaacaagaaggccaagccatctactcagcactttcaaccagcaaggagtctaagtacttaggagggacaacgaaatgacaaaccagcgacctcatgggggctggccgtgttaggttttatgccctaaataaaactctatttcaatgtaatctttatcttttaatatcaataaagaaacagaagtattttcatcacctatttgtgtgtcatttggttcatgttatcatttatatgtttatttgatttataaattcatccaaatccttatcacatttatattcttgtttattgtgtcgtcagcacagtggaaagtaatcaagattatgtgattaaaatatatatattcctagatttatcaatacacagggtttaactgatatgataatctacaacatagtttactggcaccttggataagtgtt

SEQ ID NO: 176878 - DNA, 592 bp, Cannabis indica
ctcagtacctacacattcattcatatatcacaaatttgaatggtgaaaaaataattaagaaaacgaaaaaaacatcaatctaattaattaatatttctgattggtttcaaagagcagctgtgtcttattatatggtaaaaaatcaaagactcacatctccttcatcctctgctacttgtcttttattagccaagtcgtaatcaaattctggcaatttttccatgaattcctcagatgacgcacaagcctgcaatgaattatcagaaagtttcatgttgcacttgcatgtataaacttggtatttaagtcaatgctggaattaacaacaaaaattagttcttacatttaagggttctggcacgaggctttccactgggatatcagagagttccaacttcagaccagattctctagccagaattatcacctgccatacagattcattttaggaaagaacttaccacaaaagaaatgacaaacaacaaaaacatgagcagtttgcatacaattttcaagtggaggttgtaacagatataacaaagacatagctatgtgcatttgatgccacctttctattattattttttctttc

SEQ ID NO: 176879 - DNA, 789 bp, Cannabis indica
  modified_base (765)..(765): a, c, t, g, unknown or other
aacacttcatctccaaagttatggcactgtatacctttgtttcaatctcaatatttttcttcttgtcttcagtgaggttcattgcttctatattaagagcttttgagattccttgatgaattaggattgccttcatcttaatcctccataaattgaaatcattagaatcattgaacttgtccatctcaaatctagttgtagacatctcaatcttataagttcttgaaagtttgaatagagatcttgaaacctcttcttggagcttgtagctctgataccatttgaagtgaaattgcttctgttaaaacaaagttatattatgatgaataataataaattagaaccaacaaatcaaacagtaataattgtaaaatttaaaaataaataaaaaagtagaaaactcagttcggttttcaatgacaaatgattcatctttattaattaaatcaatacattacatcaataactcaattatggtagatatcactaaaatctcacattgaggaaaccttaatcaaacacaaagagatcctatttacaaacattattcactctaaaatcttgaacataattggacttatacgtgtctaggcttgaaagagatttgtctaggtgttgaattctttgaaaaaaattgagcgttgatgactatttataggcttaggtgttagtttgtctgagaagtaactaactagctaactccatgtcccatgataacatgctaacgtggtatctattagtgagctaaattctcaacactcaacntacagtctaattaatttttttatt

SEQ ID NO: 176880 - DNA, 580 bp, Cannabis indica
aatgattactctgcccaaattcgaggatgaattttgggtagaattccgatatgagtgtctcctcgactattgtatagaatgtggaattatcggccacctctatctaaaatgctctggtttttttttttttggaaaaattggacaatggtgttgaaccagaattggcttatggccctacattgaagggttcaaaacttccaacatcatcctacgatcgttacagaacagacttctccaaaggcaatgcttggcctttacttacaagactagcacgtaaatcattaactgctacattgactaaattgcagtcacaattacagcctcaaccatctactcttcttgttggagaatcttcaaactaggaacgacataatcacaatgcacaccagtttaattttccaagtactatgaccagagataatgttactactacaacgattgcatcaaatctttttcaagtggctggatctcaactgactttttctccattcgtactcaataatgattccttcaataaatgactgctgatgtaacgccctaatcttcaaaccaggaacaacataatcacaatgcacatcag

SEQ ID NO: 176881 - DNA, 748 bp, Cannabis indica
ccgaaaatagagagagaaagttgagagaaaaagcttttcctttgaaatttcttaattttttctaactttccaatttttataaaatgagagaaattgcatgtaataacatttacttcagccaacaaaactcacataaatcacatttaattccacttactaagtccactaaaggacaaaacatcattggggcaaaatgaccattttgcccctccacactaaaacaacataaagggcactaaagggggtattttgggaaattctaaattcccggccaatcccgacattcccaatgtctaataaaccgtcccaatctactaacatactaagttgtgattttactgagccaaacaccgagttccatgttaccgggcaccggaaatgcaaaattatgaaaatcactaaatgacataaaatgcatttcagaattcaataataacagcataataattatttaaatagctataaataattttccataattaaacatgattaactgctaatttccaaattaaactaagcggtctttacatagcaacataattaacttttaaaatatatgaaatttatttttcatttaatattttaaagttaattttagaaaaacacttagttaatgatatattctagatagttatttctagtactagttattatttctaatattaaataggaaaatatcattgattgtgaaattaataattatttatttcttgaatttaatacatttaattaaattgaaaattcaata

SEQ ID NO: 176882 - DNA, 619 bp, Cannabis indica
gatttatgaaatcgtttttgaacaacaaagtataaatatatataggacagaaaaactattatcccaagggaatatttaaatcttcaaagcataaaatttaacctttgataccaaaaactactcgaggctaagggtgagtgtgatggagatgttctaattccaaattataagtaatatataaaatgcttaaaaaaaaaaaaaaccttggataccaaattctgacaatttcaaattctgcgtcaaaatggtataatttaattagggaataaaagctctgggattaaaagagcaaagtaataataataataataaaaagctcttgtctcactatttttattattattatttttattttagataaattatacttatattcagattccttgttttttttctttattaagttcccactttttgcccggactcttaataattgagaaagctccacatgagaaaatcaacctactgagaaagtaaaggacaaaatatttgaataatcagggaagaaaaaaaaaaaagaacaaaataatagatgtttaataaacaacgattctttatttatatttctaactatagaaatgatatacaggtaatattgttttaattaattttttatttt

SEQ ID NO: 176883 - DNA, 529 bp, Cannabis indica
tttttatatttttataattttcagaaaaaaaattacaaaaacaaccaaaaaaaatcataaaccgtattttatgatcttaaaaatatttaaaattttgtaaaaccatatttttataattttctttttgtgtatttttgaaataatctgtttaaagttgtcaaacttgtgacaatgacaactcgttcaaagggtatagtatttgaaatatatataacatgaagattatattaacttttacatattctttaaacaaattggcatagtaaaaataaaagtgacatattgtctcagcttttttagggagaatgatattcaaaattaaaagacaatatttatcatacaaaatggattaatagagctgtgttcaaagaagggtagaattcatcagaatcaattttcccacttaataagaagaacagatcatatttcttccataaatgtttaattagaagaaagcattgccccaccttaaagacacagctttagcagagagcatatactaaccccatagcatacttctgagtccagc

SEQ ID NO: 176884 - DNA, 1058 bp, Cannabis indica
ggatctttctaccataaaggaaaaggttaggaagttggagtataaaagcagagaacaattcaggcatgatgtgtggcaaatagctttcaatgctcatcaatacaacgatgggcgtaatccaggtatacctccattggcagatcagcttttggagctttgtgactacattctgaatgagaatgatgaaagcttaactgatgctgaagcaggcattgaatctagggattttatgtagtcttaaatcacttatgtctgctattccttttgttgttccatctatataataaaaaaagaaaaaaattgcagctgtatattaaattggtagttcctcttgtaaattattgttgtatcaacctttttgtatagtttgtacataaatttttggggttaaagtggcttcagctctgtgttgtgcattaatgagaaagcagactctaggcgggtcttttattctacaatctatcttttgtttcaattgtattttgaactattatcaagaaaacaaaaacaatgtcccagttaaaaaaagaagaaacaaaattgtgttatttactcaaaaactgaagtcttgcttcttttcctgaagtactttaatttaagagtgcggcgaaattcctttatggtttaatttttatatacttaactcttttattattttttagtggcaaattttttttaagtttatttttctttataaatttaaggtatcagttagctattactgataaatttttaattggattactaatgtattaactttgaggttttacttacatatatacagatgtatacagtggtcattcagttaatatttaacagtaatatttaactgacgtattaaatttacaaagaaaaataaatttaagggagtttgtcacaaaaaaaagagggttaagtgtataaaaattaaaacataaaaaaatttcgccgcaaattgttcttaatttaaatattacactttttattctatttattgatttaaagataaaataatgataaaagatgaaaaaatgatagaagaatgaacaatgttgtttaaataaaaaaaaacgataaat

SEQ ID NO: 176885 - DNA, 756 bp, Cannabis indica
ttggtgccatattctgaagcttacaaccttatagggtgcaaatgggtctatcgaattaaatggaatgcagatggctcctttcaaaggttcaaagcacggcttgttgcgaagggatttcatcaaaggccatgactggatttcagtgaaacattcagtccagtcatcaaagcctcaaccattcgggttatacctttcattgctgtctcaaacaattgggaaattcgtcaacttgacatcaacaatgcattcctaaatggtcaccttgaagaagatgtctacatggttcagccagaagggttcgaggatccaacaaaaccaaaccatgtctgcaagttacataagtctctctacggattgaaacaagctcctagagcatggtttgatcggctgaaaaatacattgactgagtggagtttcaaaagttctaaagttgacacttccttgttttattacaaacatgagaaactaatcatctttgttcttatatatgtagatgatattatcatcatagggaatgacaactccaaacttcacggtttcattcagcaactaagcaagctttttgccttgaaggacttaggacacctgagttacttccttggtcattgaggtgtcacagatgatacgggattttatcttactcaagaaaaataacatagctgaatattgaggaaaacaacatgctgaatcttaaagcctgccctacaccaactaactacagaaagaacaatgtcaatctatgatgagaaaaacttg

SEQ ID NO: 176886 - DNA, 752 bp, Cannabis indica
aaataaacaaatcaataatcgtttaaagtatatatgataaaaaaaaacttgaatcggtaaatataatcgcacctgacctaggcacccagacagaattaagaatcccgtgatgaattttaaggggtttatgttaataatgtagtattgagaagaactttaattaaggtgatgctaactgatgagtttacatggcttaataatatatggattctatttcaaaatctaatccaacggtgggaagtgtttgtgactgatgactaccatgattatgttgggacctttgaaaactggttgccccatggtttgatctctaattctacctatcgaaatgttgccaaaggaaatatgattttggatcctctcaacattctttggtagaaattaatatgattggatctattttatgaaaaacttaaaagaagccatcagtgatgttgagaacttaaccttagtggtaaggacccgagaataaatataaagaaatagatatataataaatgattgaactgcttggagtcctatatatgcttgtggacttggttgtgaaataattagtattatgatgataacttatatataggcctatgatagcttacctgtatgaagggttagtgggtcatttataggagaattatatgggttggttagtatagtgatagcatattaaacttacttcaaatagttctctacacacgtgagctcattattctcaaatattatatgagcaaaaaatcacgtccatattatagctt

SEQ ID NO: 176887 - DNA, 702 bp, Cannabis indica
atctctaagctggagttctctgacgctctttgcggggaagcggcggcttgctgtctagctctggagtcggcaagggatcgtggtttaaagtttattttgattgagagtgattcgagaatagtgatcaatgctcttaatgggaaagattcccgttgggagctcgacgactatgtctcattttatattagatcctctcatttttttgttggatgtatttttgaacatattagtcgacagtgtaattttgcggcccataatgtggctaacggggcgttttcccactagaggttcggttccttaccgattagctctatcccaaataaactcttttccagaaggtctaattgcttttatatatatttgcacgctttttttctaaaaaaaaaaaatagctatattcaaaataaatagaaagtgtcgacaagatgttcactgtttgggaaggagtattttgtaaaatctatttttttttctttttttgtttttttttttttatttttttgtgtaaacctattttttttcttcaatttaaatcctttgacctatttggatcgtagttctcaatctctatgtaagtatagagtccatgatatggataatgatttatcaattttctagtggtaatgagatgaaaacgtaagaaaaaaagtaaaataaaaaagaacgggtgggagtcgaaagttcataaataatgatatacct

SEQ ID NO: 176888 - DNA, 620 bp, Cannabis indica
atactaaaattgatgtaaatatatatcaaaaaatctttttttttcctactaaatataatataatgtttacatatctctaatcgttcttgcaaatatatataataataaaaaaattaaaattttagcatttgaaattttaagtcgtttctttttatttttatataacattaatttttattgtaaagacaaaaacatgaaaaaaaaaaaaaaagaaaaaaaaagaacaaaaacaaatataacattaatttttttaatgatgtcatatgatatataccaagagtactaatttttaagttttgagtgtggaaattaaattaaataatgaactataggagaatggtattgtgttggaggtattgagttcgaattctaaattatttattgtaatatataaacgcttaattaataaaaaaaataagttaattaaataaattaagaagtactgtgtaggtagcagtacttattaattgacatttgtccttttttattgttgtcctcataataccaggatcatggctatgggaaccaaaggagggcccccccttaactaggatataataccaggatcacggctagcatctcttaattatattccacagaccacttttgtgacatgatgt

SEQ ID NO: 176889 - DNA, 1036 bp, Cannabis indica
agaagccaactaataattaaactaccaaactaaatatataatataaataaacttaatcctcctcacctgtactgttgataattgttcatatagtactaatgttctcacccaatatttggtctctcacctaaaattttacaaaccaatcaaacacaataatatagtagtttcattactttattttcaaacaaatacaatatattaataacacttggacaaaagagattatttggtgaatttgtgctaacattgccaaaatacatgtgatttacattaatgtggctcagttttaacctatctttgattggaaatctattatgaccaattcccaacattaaaatataaaaatatcttgattatatgatccattactattatatattatttaataaatattgaaattgaatcacaattcacaatatccatggttcttttcatgtgggtttggaacctaataagtcaataaaattgattatttttattcttttctttatttcttggtttaggccacgactaattaggttagagtgacaaactttgtggttgaccacttattttgaatgccctgttttttcacaggcttttgtttgttgagtattttaaggtaattattattataattatgaatatatatatagattggatgtggctaaaatatacacagcaatatgtataggcctcaccaactagctaaggcaactagttaattatatgtatggttgctgagccaaagtccaacataataatttaacaccttatattaaaaaaaatttaaccaaatatatatatacatccctttttcaaatattgaagacgtggccattttttgtatccataattgtaaggctattattcatttcataaaagagtagagctgcccaaattaaagacacccctccaccaagcagtagtagtatgtatgtatgtgataagatctcaatggaccaccaatgcttcattatttattttaataaccaattaagtatataataactataaggtttattaatatatataagtaatccaagtgtttttt

SEQ ID NO: 176890 - DNA, 573 bp, Cannabis indica
gcaaaggcactgttgaactcatgctagaatccagtcaggtggtccttcatggcttaaccacatgccgatagctcgactccttggccgaaccaacgctctggaagcagcagccagtttgagcctatgactaccgcagtgctccttcaggaggagagaactatcaacactacagcccctatgttggtgaggagtcaaagatcgatgctggcaatatgaacaactattcgcataatgtttctactgatctctcggctgatgcagaaccctatgttgctaaaccatatgaatatggagaaagttatgataatatagttgccagtggctgggactagatgctggtttattgtcattggcgactactcatagtttctataataatagtttaaaaatacgaatgatgttagatgaagactaactacagatttgaagttgacacatatccttgtagttagaaattcgttttatcattacaattacaataccttttttcagctggaggatatgtctttttgtttgttaattaacctcttctgatcaatgaaattgtagcatctttctttttgtggcattgta

SEQ ID NO: 176891 - DNA, 715 bp, Cannabis indica
cgactactcatagtttctataataatagtttaaaaatacgaatgatgttagatgtaagtacttaacttactagtatttgtaagttgacacatatccttgtagttagaaattcgtttatcattacaattacaataccttttttcagctggaggatatgtctttttgtttgttaattaacctcttctgatcaatgaaattgtagcatctttctttttagtggcattgtaattttgttatttcttaggcacacgattgctgttgtgtgcgttatgttatagttttaaagagatggagaaatagtgttatagtttgacgtagaaatggagaggatatgtaatttttttgtttttgttttttgttttttttttttttttgaggaaaaggtgttaatattaaacaatgaagttagacctctagatcattacaaagtaagttcgaaggtatgtcgctaacatctaaacaaatatacagattgtgggtaaaaattcacataaccacattataggctacaatattacaagatcaaaaaatattatctcatttggactccactccattaagagagttgatcatcactcgagagttactttcaagtttcaaaaaataacaaaactgcaccccttctctgttgttttctccaaagccaaacaacaggcaaccgcatcactgcaaagagcatcaataaaatcaagtcttgacgtaactgctcagcaaa

SEQ ID NO: 176892 - DNA, 584 bp, Cannabis indica
cttccctcatattaaaatgattgcattgaaaaatatatcataatgatagaacttttaagactaaacaattatctatgtaattggaaaataattttaaaactacttttttttaaaaaaaaaaaaccagaaagtataattttgaaaagaatcatattgttattatcaaaaatgtactttcaaaacaggtaaaaaaagaataggaaggagatgaattgatgtttaggaaaaagaagaaagaaatataaaataaaaaataaagtagtgtgtacatacaaagaaagagaaaaagaaataaaaaaaaaagcaaaataataagtacaaacctacgtatataattgttcaagaaactaactatatatttcacaattaattaaacatcgttagttgtgatattaattttgaaattccgtccgtatgcgtaatttactctaaaatttattagtagttttgttaaatatccttaataaatatttagtggttctatgataagagcttggcaacacaacctagcaatgacaatataatatgtcgtttgtggtgccctatatgttggacacacatcctctaaacctgtcccacaacat

SEQ ID NO: 176893 - DNA, 704 bp, Cannabis indica
gttcaatttttaaactaaatcaaaccacttaatttttttttatatatatataattactttttttttttattattattgaatacgaatgtttaagaacaatcttggacatattattagtatttgctcaatattattttaagaatctttcttttcattattatttatgtattatagattttaaaggtaaaataatttagtaaaaaaaatagaataattatgagtacaactttgttttgaactaaactaatatatttttttaaaaccaaactaatctgtttttaggtgaatgagtttgatcatataattaatttgaatttaaaaaaaaaaaaaactgcattactagtttaggttaaaaaaaaaaaaaaagaaaattgagaacaaattaataccctagaaaattcataaagaggtccaaaaatttccacaattgaaataaaaatacataatatttatttatttatttgaaaatggatttttaagggttagttttctacgcgttgattgctaggaagaaatacatttttttttttaattttttttaaaaagtaataatacatacaaatgcatgcatatgttttagtgcatttattattggtttagataaaatccttaaaagatcagccattaaattatttgagagtattgttgtttgacataagtaatactcaacactttttacaagtgacgtgatgttctaccattag

SEQ ID NO: 176894 - DNA, 715 bp, Cannabis indica
gtaataattatttagtattatttataaatttttttaaaaaattattgtaatatcaaaaataaaatttatatacgagtaataaattttatttttaatactataaattgttcgaaattttttaaaaatttataaataatcttaaataaataactgtaaaacatacataattatatataaaagaatattagattaattttttttttttttaattaccaaaatatctataattttgaaaagtagattctgtaggtatagtacgtaattgttaattatttggttgaccatgtaaaaggtcgacatcataaaattcaatgcaattaattgaaataattattggcacacattgtttttttttttttaaaaaaaaaaatttaaagtgtagggacacatcttccttaattaattacaattttcccataatagtgataagtgaatagtaaaaaaaaattaaaaaaaacaaaaaacaaaaaacaaaaaagtagaagatgattatcacatttctcctacaaactcaagttttatgagtttgggtaagtttatgttgacttttttaaaatgttattttggagagttttttagtatgattttaattatagttacttaagttgcaattatataagattatttgtaaatttttttaaaaaaaatagaataatttataggaaaaaaaataatatttaaatattttaaacacactactatttttcttatatat

SEQ ID NO: 176895 - DNA, 1155 bp, Cannabis indica
gttcaactatggaggttgatatttttttaaaaaaaaatttgaaaagaaatataaaataataggaaaaagaagagaaaaaagagagaaatgatgtatagagtgattgatgtaatgatatgtgtcactgacatgtcaaaatgcatgatatgtgtgtgtgcatgtgataaaaatgtaaaaaacttaagcaaaagtgtataaaagttgctttcaccgtgttgtagtatatatgtaataaggttagcattttgtatttttagtgtaaaaatttcttttttaaacccgtatattttaagggccacaagtcggtagtgacataagttcagggagcaaatttactaattattctaaaaataattcaaattaacttgaaaaatataatagtaatttaaattaaaaattaataatttttttaattattaatattattttattttaaaaataaatatataattaaatattattataatatgtataaagttttaattgtatacaagtagtcctatcgtaagaatatatactttatatcttaataactacatgatctaaaatcaatagttaaaaaaaaatttctaccgataaaaacttatgctaagttctaccacaatcttaccctaaatatttatatatatttattaattttttttttgaaagtatatatttattaattaagttcctcttaatttagtattcataaaatctacaacaatatcctgaattaaattgggatgatgataacggtgcatttatcacatatccatatatcatttatttttataaaatcttatctctttagcatatacatcatcacatggcaattattatcattttaaatttattttaaagggtgattttatagtgcctgtacttagattggttatttttttttaacttaaattatataatatttattaaaatataggttaattaagatttttattctaaaatttgacatgtacccaattatgttttctgaacttttttaactgttaaaattttctaatgaattattgagattgttagattgtagaacttttgtctaattttattcaattttactaattttgtgattatccatgtactaaattatgatcaccaaactttgatatctaccaaataatttcctcgaattgtaatatgtaccaaattataccattc

SEQ ID NO: 176896 - DNA, 617 bp, Cannabis indica
caataccaagtacactgcatgctttgttgtttcctaacagcactgttccccctgagatctccttgagatcattgaacatttcagcttttggacacatgtggaaggaacaccccgagtccaagatccactcttcttcatatgctctgcttgagacaactagaacatcagcagacatataatcttggcatgcaatgtcagcttctccttgcttcttgccttcttctttggcaagtttagccttgagtgccctgcactcactcctgaaatgtccttcttttgacaataaaaacatttctttcctgatttgaactttgacttgttttgatgattgtagttctgtttgttgtgatgattctttctgtctggtttgcctttggtaaacagcccttctccactgatgtcagtattgtcatcagatttcttttgaatctcctttgagttgagtgcagacttgacatctgccatggttagggattcctttccatataatatagtatcaacaaagtgttcaaaagattttgggagagaagagagtagaattataccttgatcctcatcatctatcttgactccaatatattcaactcaagataatctattgaattcatcaagatgtt

SEQ ID NO: 176897 - DNA, 682 bp, Cannabis indica
atataacaaacgtataaaaagtagctccatcacatattcttcaaaatagagatattttaacttatctctactacgtatagagaagctttaaagcttctttatgtattttttaaaatactttttatctttttgtttattttctctcctactaattatttttagtaatttttctattttgtttattaatttaagtaattaaatatgtaaagataaaatattttatttgaagtagagaataaaataaagaaattgttgtatagtgtaataatgtaaaaaaattaatttaaaatagagaaagtaaaattttagtaatgcatttcaaaaaatagagtaaaaaaattgttggaaatactttagtgtggtaaatttattatagtcattattaatttttatatatttattaagagtagagtgtaggattggtctggcctaaagcgagttaggcttgcgcctaaggccatccagaccagtggctcaaaaaaatattttttaaaaaattttaaaaaatatcacatattttttataaagtgtctaatatattttaagacttatccaatttttaaggtcggtcttaatgaagaaattatttgataaagggtaaatactattttagatcttgtgttttgcaaaaattaacaattggaccttttgttttgttaaatgataaaatggaccctatatt

SEQ ID NO: 176898 - DNA, 1696 bp, Cannabis indica
attgagtttttagggatcgttgttgatgggtctcttcttcttcaagttttttttttcaatctacttttgaaatagtggaggagtgacataagttggtacaattggtttgtatgtcttttttcaatggtggtggaaccaattaaaaataggagattcaacctctagtggagatgatcttttcgaagggatgaattgttgactccacgatttggaatcaaatcataaactttttggcgtggtggtgattcaagttgtgacccactttgatttgttatagtcttgacattctccattgggttactctctatttgtgcaagtaaagtatttgaactttgaatttcacacccactcatagatgtttccattggctctgcaagattctctatcttttaaagagattgttgagagttctgcgtagtttcatgaaaactttgctaaaaataaaaagtactttgttgaatttgcaagttattaattgctatttcaatttactcaacagttattagcttttcactatatggcacaagaggagtaggttgttgagaataaggtaaataattttgagtatatatgtgagcttgctgctgaaactgaatggtgttactcgctagttcctctatcaaatcttcaatagatgaaccttgattatgtggttgtgcaagaggattaaagtaatttggctcaacatattgattaatttcgtcatataatgtattggaatgattcccctattgtgaagagtaactgtcatagtagggatcatatagatatacttgtgacgatacattttcttgaaatatcgcaaaaaaaaaaaaaacatttgcgattattccaaaaagaaaaaaacttatgtgaaagaatttgtaaaaaaaaaagaatgtaaagtaggtatttctcgaattgtatgaaaaaatttgaaagacattcaaagaataaaattgatgtatgttgtggtgtaattattttaggtgtaaaactaatattgtgaattcttgttacaatataaaatattaaaataattaaattttagtattgataagatgtcactggtggtaagattaggagattccaactcatagtaatcgacaataaataaagtagttcatagtagtgaaagatttatctcctcacatctatcagtattgttacgaaggcaccaagtgcttaattaatatttttatgtacatgtcgtcttataattagttaatgattctttataatctttattaaattaaaataagtataacataatattaaattaagcattgttattaggcaccagtggtgctaggtgcctagcaccttctcaacatgtcgcgttgcgattggctagcgatattccctaaaatctattatattaaattatatgggacccgatagttaattggaacaatagcgatattgacacgtaagagggtgctaggtaccactggtgccctttagcatttctctattaaattgtaccaatgtaaatattacatcttataaaagtgttaagcaccataaataccctgtagtatttctacacatctatttgttgtagatactattacatatatgctcctttaagatactattgaatagaaaaggagatgaaaggtttgataatcataacgtagttagaaagaaaaaaaaaaatataattgttagtataatacataagggtacagtaaaactttttaaaatacataaaaga

SEQ ID NO: 176899 - DNA, 880 bp, Cannabis indica
caaaaattacggtttttacggtaatttttaaacatttttttacgatttttttttgattttttatttacattaaaatacggttctttttatgttgaaaattttgttctatttgttgttaattttttgttatatgtatgttattttttgttgtctttttgttgttattttgatgttattttcatgttacttttatgttgttttcttgttgattttatgttgttttcgtattattttttggaaaactgtaaaaatgtaaaaaaatattctttgaacgttaaaatgtaaatattttacaaaaaatagtgtcttatgtaattattcctattttaattggacacatttctaattagattgggctcatgtttaatgggctttatttgtttaaattaaaagaaagaagaaaaaaaagggaaaggagataaaagatattgggcttagactttttggttaaagaaccaatgaagaaatggaagaagcccacgtgatttaagggctaagataaggcatatgtataggcatatatacaaaaatgcatatatgtgatgaaaaaaaaaaaaagacatgcggctggtggagtcctgacgccgacagcaaagaaaaaaatgaagaaaaagaaaaagaaaaaaaaaagaagagttttatttgtagtgctatttaggtagttttagttttagttatttttatttttgtagattggaaaaaataaagaggaagaagtagaagatttggacaaagaaagtttaggtagtattgtgacaaactccatatgggtctttctctatctcttcacttttaaactttgtaattttaattatgagttaacttttattttgttagaattattttgttgacttaaattgtgatttagtattttgttgct

SEQ ID NO: 176900 - DNA, 1045 bp, Cannabis indica
aaataaaataaattatattttaaatattatgacaaaaaatttaaaataaaaaattatatgaattcttcttaaaaaaataaaaaaaatatacatgattgaaaaaaaattatgaaaataaaattaaaataagtattgaaattaacataaaataatgtgaggaaaaaaaatttaaaaaaataattaagagtaatttttaaaaattatttaagtttattttttttattaatgaggtatacttatcattttatgtggtgcaaatagaactccccttaaaaaaaatggtcacattttatattaatacacatgatacccttctcccttctattctcttctaactttaccatccatattctccattctcttattcatacagatagtggtccgattggggtctgatggtggtctaatagtggctcaattcaacccatttctttttttttttttgtacaaaaaaaaatgatagcaccaggccaccactggaccatattctacatttatagacgttaagctccattccttacctttactcattttaacaatatgaagacatcagacgaccatcgggcctggcaaaaaaaccagttttctacccaaaactcagattcgaccattttcaaccataaatctaacatcaactcacagataacagacattaatcataattttttttttctaaaccaataaaactataaataaaatcatacattttgactctaaatcatacaaaatacaataaaatgaaatggaaaacttacattcatggcgcggtggtcgtggttcagagaccttggggtcttgggttggtagttgtcggtgggttggtggtcttcgattggaggcgtggtggttggtagccatgggttgctagggtcttcgtgtgtgtgacaagaagagagcgagagaggcagagagaatagaggaagagagagaggaggggtgagttttgagaggggtattttgggtttaataaaaaaagtggcctatctaactaattttggtatacttagcttaagtttactaacaaatgcatgaatattaattcaaa

SEQ ID NO: 176901 - DNA, 766 bp, Cannabis indica
ggtttttactcaaggtattgccttgtagacaattaaattatttacttatttagtaggatatacattatctagaaatgctttctacttgcaagcggctatgcacattcagcatgaaatcatgaaaatgaatccgtttcttcctccaattgcatggcctgggacaaaaacaaaatgaaaaaagattaagtatgaatgcattaagaataaaaagctcaattgagcttgagagaataaaagagacagtaaacttattttcatgtattaggtttctactaacaattggtcataaaacaagtccatcaacatagtttttccagttcccacccctccatagagataaagacccttaacgggggagtatgaagactgtggcatgaaacgagaccatagccacctactcctgcaagagaaagataaataacatgtgaaacaggtaacaactaatgcagggaagggaacttgaaaaataatttaatactaacaaccactgtatatcagaaagcagtaggaaatttggttcaaaacagagagaattggaacaaaagagttaccttccaactttctcggaagctgtgtatctatccaatcgacagacatcagctgaatcaacaagctcatcgtagagcctctgaagctctcttaatgtgcctagctgcaattatcagtgtcagtatattttacaagacaaaaccaatttcatattcagaggttagtactgccattttcaactatcatgattctgctattgtacaaaaaatgcatcagt

SEQ ID NO: 176902 - DNA, 631 bp, Cannabis indica
tgattttatttaagtcgggtctaagtccggggtcgaattcgggttcggatcaaaagtcgggtttagtgctagggccgtggggaggagatttggttcgggtctggtcgtaatccaaaagattgattacgaaaaaaaaactgtttaaaaaattattgaaagtgatttttttttttttagttttgatttctaattataaaattggaaagtaaaaacagttttatagatcatgtttttgaaaaatatttttacttttccacttttaaaaacagaaaactgattaaaaaagtgttaccaaacgccacctataattttaaaaataaatatgtgtggattggattgggtcggttacttttacatgttaatcaacatccaatccgcagaagtacggatatctatactttgcatattggattgtgcgaattggattgaatggactattttatgaacactcctacttctagtattgctagccaccaagtggtaagtagatggctggttgccaatagattttatacatataggaaatttttcataaatacttaaactttaaccaatattaaaatttagtttctcaatactttataataatatatgtctatttttattttcacctctatattctgcccatttc

SEQ ID NO: 176903 - DNA, 1186 bp, Cannabis indica
aggcaacaccatttgcttacggtgcgggccacatccatccaaaccgagctatggaccctggacttgtctatgacctaaacaccgacgattacttaaacttcttatgcgctcgtggctacaacgaatcggtgcttagagttttctcccataatccatacaaatgtcccaagtctacaagtttgttaaacttcaactacccttcaattacggttgctagggttggatctcgctcagtgattgttactagaagagttaagaatgttggcaccccgggaacatacaaggcgtttttgagagtgccagctggcttttcggctcatgtgaagcccaaagtgttgaaatttagtaaagttggtgaagagaagtcatttgagattgttttgaaggctaaggttgttggaaaacctaaggattatgtgtttggagagttgaaatggtctgatgggaaacataatgtgaggagtcctatagtggttaagtactaacaaaggaatgaaaaattgtgttaagaaaacaaaaaaaaagtttgatttggatagatgattgtgtaaatttgattagtttataatatggtatttgtccttaaattatgtaacacaatgatcctaattttatgtttcattttggacaaaaaaaattagattgtatgatggtggaaatttcttgcattaataaaactcccatgaatgaaatgaaaatgcccttttcttttttttttttcttatttatttatatttatttaaaatattatatatatatatttataattttctaaaattattctcaaaagggtcccaaattaagctattcaaaatgtggtatgaattaataaataaaattgagaatgggaataaatattgttatgagaattagcttctattttaaacaagaaaaaattgttaattaaatttattcttctcttttattgcagatattattgtaaaacaaatacaaaaacaagtgattatctttgtccctttgtgccactttaattagcccataaattatgaataataacttatgaaaaatattaacctttaaatattgcaccatgtgttacaaattataactatggatactaagttgattatttatttttgttgttagccaaattcgagtacattttttttttcttttgttgtttgtgtctcttagattaattcatttcaatgtcaattttcataat

SEQ ID NO: 176904 - DNA, 653 bp, Cannabis indica
caccgacgattacttgaacttcttatgcgctcgtggctacacgaatcggtgcttagagttttctcccataatccatacaaatgtcccaagtctacaagtttgttaaactctaacacccttcaattacggttgcaggggtttggatctcgctcggtgattgttaactgaaaagttagaatgttggcaccccgggaacatacaaggcgtttttgagagtgccagctggcttttcggcttatgtgaagcccgaagtgttgaaatttagtaaagttggtgaagagaagtcatttgagattgttttgaaggctaaggttgttggaaaacctaaggattatgtgtttggagagttgaaatggtctgatgggaaacataatgtgaggagtcctatagtggttaagtactaacaatggaatgaaaaattgtgttaagaaaacaaaaaaaaagaaatagttggatttggatagatgattgtgtaaatttgattagtttataatatggtctttggtcttaaattatgtaacacaatgatcctaattttatgttccattttggaccaaaaaaaaattaagattgtttgatggtggaaatttcttgcattaataaaacttccatgaatgaaatgaaaatgcctttttttttattatttatattta

SEQ ID NO: 176905 - DNA, 533 bp, Cannabis indica
ttcattactaatgcactggcctcaaagaagatgaccccatggtctgtgagaaccaagcccacacgcttgagactggagcttagggggcattgaaccttcctagaaactttatggggatgaatcctccaatgatcacagctctggtccagaactcatcttagtatcactttgatccgtacatctctaagaatgactttatgaataatatgttgatgagtgtttcatctgtacatctctaagaatgactttcgtatcacccatagaagtgccacatcatcactagtagattttaggataacatttatctcccgattccacatggaaactatatgttggcatgtcgacttgctcgacccacatgataggtaaataggatgacacgtgcttagcctgcaaagtgggtgaacaaaaacaatcattttaaatctttaagttgtcctttcatatcctaatgcattgagtatccttatctcgagaatcacatccttgggtcgtgtgctaacggttgtactgctcaagagtattgattgtac

SEQ ID NO: 176906 - DNA, 987 bp, Cannabis indica
aaagaaaaaaaaaaaaaaaaaagtagacaggcacctcgcaacttcagaataatcacaggagaattgtggaactggccagcctcccccattttgctagactcatgctcagtaacctctccactacacggctgagaagacatctcattgtgctgctgctgttgttgcatctgataaagattcagctggaccgtctgccggtgctgcatctggtacatttgttgatttattgaaagctgctgagccatgcaattcgagagatgagcttcaccgctaagctctgcagctgtaagctttagacgctggacttcagctctgagggcatcgtttaaagctgcaaaggcaaatagcactaatgataaagatcgctcaaaagccacaacattcacctacaatctcggaggcacaatacaaaatggtaccacgccattgaaagaatgaagattaatagattaaacaaaagtatgatattatataaggattagacagagccgtatagtgttccacaccacatccttactagacattatacttaatatgcatttggacaagggttatatgccataataatgtccaacaccagatccttactagaaaaacaacacccctacccgaccccccaccataaaaacaaaatatacatttacatgcaatgcaagatcaaaatctaacacaataataatttgcacccgcaacacaacattgctaaattctgcaacatgggcatataagaaacttgatacattgccccaaaaatgagaaactaagttacacttgtagcaacactttcatctacaaacctgaacaataaagtccctaggcagcatcatggaaataatacaaatttaaaaagtatgtttcatcaattgcaaagagaagaaaagaaaacattgtaccatctttcaactgtgcttgttgctccatagcttgaacacgaaatttcaactcactgttttgactcgtaagacccacagaatctctctgtataca

SEQ ID NO: 176907 - DNA, 565 bp, Cannabis indica
gctacgattcacactcattccctctcttcctttctgctcccactctctcggcctctgattgtgagttttcgttctattgtagctgcctatggtttcgctcggtgacgcgaaagaaattgaggtacactttctcttactgatgatgggttcttctcttaatgttgttgtgtatgaataaattgtagattcatctttggaaatttgtagtgaattatattacttctaaatatctaattttacaaacaggaattaagttttttgtattgatatgttaaatcatatatttggaaaaatttatttattttttttgaaagtttaataagtctgctgggtttgtttatattagtgtgtagaaggaaatgacgaaggtgatgaatctttccaatctataaattaataaattttgtatcagagtgtttagaaaaggaagatggatctttaaactattttgtatgcattacagataatgcgtttaattttgaaattttttctctatttgatgtaagatataagatctatcttttctatctagattgtaaattttggtctagtgtcgagggtaagt

SEQ ID NO: 176908 - DNA, 979 bp, Cannabis indica
gttcaatgaaaaaaaaatagtacaataccatgcccatatatactactaatataaaatgttattggagttcactaatatgagcagcttgaaaatatgtatctatcgttgacaaataataatgtttattatttccgattacgacaatttgcgtagacattctttttgtctttattatttgtagtgacaacacaaaggcaacgttcgtaaaattaaacaaagagactgagagagagacatttcagacaatgacaatttttacaattaagaccatgatagaagtgtataatttgagttaaattaacctaaaattataagtcagatattatctttgattcaaattttataataagtgttttaatgcataaaattaacttttctttttatatatatatatagaattgtgtaaaaaaattaataaaacattaaatttttattaaaaatatatatatatataaaaaaaactctattaaatatataaaaaataaaataatattaattatatttataagttacaaaagagtctctttaatttagaccaatttatacactactatatcatttagaattactcttttataaagatgaataaaaatatacttatataccatacttttataagcactctattattagagatctaattatgcttatattgtgtggttagtagccctacatcagttagaaacaatttttttaaaaaatatatatattcaatttattaatgtaaagactacgtaagatcgatccaatttagttatttatatgcactttaattattagtggtcaaaccccctagactatccatactacattgagactcgtctctgaatttgaaaaaaaaataaatggttatactttggcactaaacattgccactaaaacatcaatctaaaaatttaatattttttagtaagaatctaaaatataagggttaatttttttaatttttattattataaaaccgttttttttttttttg

SEQ ID NO: 176909 - DNA, 1179 bp, Cannabis indica
attctaaacataatattttcaaattcaaaattggttattttattaaatagtttattctttataaatcataagttagaaaaaagatattttatatcattttacttttgagacatttataaaaaatatttaaaatatttgaataaactagatatttttgtaaaaatttgaaaaatacttaatttgagatattttgacatataattggaataattattatttgtttattattttattgttaaaataataattgcctaaccatatttattttaaaatttgtttattttgttattttaattctattaaattataagattagaaaatgatattgaaaatatctttttggatattttcaaatcatttatcttataagatatttaatttaatcttataaaataattctaataaacctatatatttttaaaattagtttttttgttattttttttaaaagatatttaaggttgttttaaacaactctaaaattttaaaataattgtttagttaaataataatttaattatataagtataaatatcttatttcacatttgttacatggacattgtttgtttaatttaaattgtttattcaaaaactttttttttttaaaaaaccctattatttatttgatctaaattgctatgattaacttgttgacaaatcaaatgatccgattttaatcatagtccaattgtcaatagatcttattaataatttgttacatgtaaattttgtatatctttcatctgtgtaaacctagaaacatgatagggcccatctaaatcaatttgacctgtgtgagcctatgttttttgtaatgaccgctctagtaatgtggattagtaaaggcaattagcactaatttttattattttattattatttgtgaattaattttaaatgtggaccccaatatttagaaataaatattagagttataatttctcaattccggagattttattaaactctaggggtattatttagcttatatgtgaaatatgttaattttgtaatttttgctcggcgacaacggaaaatgcgatggatggctagattgatcacatgggtaagtttagaaccctatttcatagtgggaaatattttagagaaaataaattatcgggattgagcggggttatggaatttgaccattttacccctagctttagaaatacct

SEQ ID NO: 176910 - DNA, 667 bp, Cannabis indica
atatatggcgtcggttattggctaggaaccgacgccataggggtatatatggcgtcggttcatataaaccctttagcgtcgccctgataggcgtcggtagcgaatttcgcgaaaaccgacgcctaaagggctaaaaaaccgcctctaaagggtatttttgtagtagtgttctcattttattttctactctttttgcggctaatattttattttagtggataattactattttggatagtgtactgggttgataattaaatcttggagcttttgagaagttattaactattttattttggtattgtatttgatttgttcaatattccatacagtatctagaatataagcatgtaaaatttatttataatttttttgacatctacaacataactggtttctttcatcaagataacaactctagtaatttactctcattctatatattttctatttcttttgcggctaatattattctttaatggatattgaatgttttggtagtgtgttgatggtccagtattggagtttctgagaagtttgtaactggttttaatattagtattgtgttggtattagttttgatagtgggttgatgataagtttttgagctttattaaaaaatatgtaaaattttatatatgagtttttaacaactctataagtggtt

SEQ ID NO: 176911 - DNA, 531 bp, Cannabis indica
tgtttcttattgtatgcatatataatttttatgttttcaacagttgttttgttgttgtattgacttgttcttttccccaaacccattacttactgatcttctcatcttcatcatcttaattctcttcttcttaagttttaatttagatttttttcttcattttgtttgaaaaattgaaccacgttttctcaatcgtggttaccattacttcttgctcttcttatatccatcatcttcaaaattttcttcagtttcttaagcttcattttagattttttttttgtttgtgcatgtccagtctcaaatatcaattggagattttattcatcactctttgattttgttaaattttatatattttgttgttctatatgtgatattcgatgtttagtattatatacttaattttttatgtttcttaattacatttatatattttacaattttatatacattatagtacttaattacattatatgtgcaaaaaaaaaaaatatttacaatttatcataccttttattaacaatgagt

SEQ ID NO: 176912 - DNA, 1014 bp, Cannabis indica
  modified_base (420)..(420): a, c, t, g, unknown or other
ctttatcaagccttcatattctcaattcctatactcttttccatcatattatttctcttgttttatttgttctatctcaaaagaagagcttcaaataatattattaattctaataatattccttcacgtccaataagatcacatcaaactactacaacttatatttcttcggtaattaattaattaatttctttatttattctctctatttatttcatattaattaatatttattatgtgtatataattttttttttgtttattattatttattatatatagccatgtcatcggttggatttgaaggggggaactcaaagatgatcttccaataattttatttgatgaagaattgaggaaaaaagattctctgtaagttattatttctctcttatttattttatttttcaaaaaaaaatntattttcttctgttttttttttctttctttctttctttaagttggtttggaaacattagtacatatttagggaccagaccatgtgctcaacatttttttggtgttattatacataatttccaccatcaataaaattcctataattttatatatatgatataaagaataaatttaaaaaaaaaaaaaaaacacacgcaaataacaaaaaaatatataaaaacacgatttatacagaatttttaatatttttacaattttttaaattttatttatataaaatacgattttttttatattgtactcttgttattttattgttaattttttttgtttgtatattatttttatgttgttttaatgttatttttttattactttcatgtgatttttttttgttattttcttgtatttttataaaatactgtaaaaatatatataaaaaaattaaacctaaaaatgcaaaaaaaaattaaaaaattagtgttttatataattatccatattatatatatatgaactctttattacacccaggaaatattacaagattttgtagactttttttgacttagtttattctatagtttttttttc

SEQ ID NO: 176913 - DNA, 639 bp, Cannabis indica
caatgaagatgatacgaaatgcattgctcatctaaagttacaatgaaggagatagaaccaaatacattttcactaaattcccatgtgatcttcaagagaataactatattgttgtccaatatattaaatcaagtgtcaatcttataaagttattcacaaagtaattatcaacatcaacattcaaaaagatggtacgcgcacaagatgagaatgcatcaactaaaggatatctaggaatgccataataagggggagtaaatacaaattgcactcctttttcctcaaccaattttttgtcctattgtgttttctaataacatttttaatgagacaattattatgaacattcatggaagggtgttatcaagctcgaccttgggcataggcaggctaggtctgtgcgtagggtccacctagtctaggagcccaaaaaatcttctccttttaaaattatacaatttcttgctaattttgagaaataccattttttttttctaaataagggcccaaaaataatttttttcctatgacccactaaattttaaggtaggccctgcgtgttataaataatatatttgaatgttcaaatcaccaagttaaatttctaaattaattcttgtatttattaatcaaaaatac

SEQ ID NO: 176914 - DNA, 715 bp, Cannabis indica
aattgccacatatatatatactataacaaatgctaattagtatatgataagtcatctctctagctaagctgtcgttttcttgaatttattgttttttttttttttgcttaattcttgaatttattgttaatgggtgatatttttaatttgtaataatatatatatttttgaataaaatgcgtaattatataaaagctagaagggttagacctcatggtcattacaaaatagtttatctggaatgaaagacggatcaacaataccagttacattattggcaaaagcccacttaatcacattatgtgttgtaaaattacatagtttagggacaaacaaaaaattacaactgagcaaaaggtttgagagatgtttacattgaagcatatagttaccaacaccccaaatggaacaagttccttccagcatgttgatgactatcttagaatcactctcaattatcacaaacgaatattttcaaaggagtgttgactccaaggctaataaacaagctacaacttctccaattagtgggccagagaagttgaggatgttgctagcacccacaaaactgactccttttggtgtctagccaaagccaccacacatattgagtcactaccaactttaacgtcagagttgatcttgacccaaatcatctagaggggtggactaaacaaggttgcgtaacaaacagaaatagagtcaatacaatgct

SEQ ID NO: 176915 - DNA, 638 bp, Cannabis indica
aaaagtagtttgatttgttggacatagctagccctaggtgattaattaacaacggtatacacccatatatatatttatatatatgcgtgtgtaagtatattcgatcgtttttcacgttgtggttgagaataaataacatgactttttcatttattatagttaatatatgataactgagagactacacaatgacaaggtgacgtacgtacgtaggagaaagaaacgaagacacgcaaaggaaaagatgaaattattgtatatgccccacccttcctttcatttttatatcaatatatatttaattaactactttcacttatcacttgtataaaatagctagtactttttccaaaactttaatttttataaatatcagtttgaatcattgattttcaacatttgcccattaatctaagaggaaattacaagctttttactattgtacaaaatatatgatttttttttctaaaaaattatcttaagaaaaaagaaaaatgaaaaaaaattaagggtaaacttgatgagtaacaaattaccataagggagtaaatatttaccttatattgtttttctccagagctaagagatagatatcaaccaatggaatacatggttacttgtgtggatgaaaattctaa

SEQ ID NO: 176916 - DNA, 939 bp, Cannabis indica
cattaatgtacattaatgacatatgactatttaaaatacataataaatacacaaaaactaagaaaaatagagaaaaaataggaaaaaagatattaaaaaaaatctagccacatgggaaggttttggaactttcctttatatatatatatatattgatttgactattattatattaaatttatttaaatatttaattttgtaagagtatgggatatggagtttttaaattgtttttactttgccatggctgaattaataataaataaaccctaatattactcgacttagttcttttatcttatttttgagaggggatagttcttgttatcttgaagtttggtaattgaacaatatgatttgtacacccatataaataaaggattttacactatatattaaaattattaatttttttctttttcactatggggtagaattttttttcttcaaaaatattgtgtactgtgttaagtttttactgttattccacggttatttttagttattctattaatgtttttaattgatatgttttgttgttttataaaagacagtaattttgtaaaaaaatttatatagtagtaaaattgtaaatttttgactttttataaaagcccctataaataaggtcccaaaacaaaacaagcccaaacaactttgggctttgggccaaaaaatataatttctttttgagaaaattatattgtatacccactttacttaatttgttttaatttttacctcaattttcatatttttttagatatacccacttttatagatgatgtccccattagaccccttatgttatgtaaattatatgcaagacttaagtaagagtgagggtatattaggcaatccactcaaaaaaggggtatatttaataaaaaacaatatgagggtattttgattataggataccaaaaagtagtatttttc

SEQ ID NO: 176917 - DNA, 703 bp, Cannabis indica
gtgaaaggaattaaacaatttcttaatgtagattctttctttaatagatatataaagccaaaaaaaattaggcgtccatatatattatatagttttcaaagggaccacaataatgaaaggtagagaaaagtttcatattataacaatggcatttagtgaatattttcactaaaacctaagaatatttaattgaaatatatagttaatttatgtttatttgagtggccaaacatgatgtgggtcctaattatttttgtaatttttctcttgtgtcatgattaattttttttcattattagtggaagaattggacttcttggttgtcatgcatatatatatatatatataatatatgtatagtatatttatgtacatatatatactcaagctataccttacttttgataccaaaaaaaaagtaacttttgttatagaaatgtcaatgtcatcatcattttgtttgttatctttaattatgtatgttaataaatatataaatggattaagtacattaatttaattggatatggtcattattgtgatgaaacacttcactataatgattagaaaccaactaccaaatgggtatttaaaattagctataaattaattagataaattaatgtattatatttaagagtaattgactgagaatacatgtttaagtttaattctcaattataaataaatatttgagtttaac

SEQ ID NO: 176918 - DNA, 684 bp, Cannabis indica
gtcgatattttgttttgtccatttatttaaagatttcattcaagttgttaagtaaattctaatatataagttgcaatttatattttgagttttagtattgtataatcacgaatgaattgcatcaggtagaatgtattttttgtactatctaaatttattttacttttatttctatctaattttaacataagttcatactcaatttcttaagtaataaaactctaggatatatacctaatgacccatatgcgtacatgtatcatggatcatgagtcatcatggtacttaaggttcattttataaactacttatagtacttaccatgtataatttctcttgactttcaataatatttacatgttttatcattgtttatttgttcataggtataagtacgtaccaattggttcaactgaagtttggaaatatatattttatttttatttttattttttttattgatttctcttaaattttattattacagtgttggaagaatttcactaataattttttttattttatttctttagaaaagagcattaaagaatactaccaatcgatcaaagagaaaatgggagtcaaaaaatggttcagtctccacagcgcgacatcacattcgacgtggaatggtattaacttcttctaccggtcagattgagacatggcgtctaaagcattatg

SEQ ID NO: 176919 - DNA, 659 bp, Cannabis indica
cctgtcttccatgcacacgtacatttatggtcaagtcaactaccaaattaatagattgcatttttaaatgtcatcatcaactgctactacttctacttctactactactactactaattattattattattattattttaacaaatatatcaccaattatttttaaaagcagtttctaaccaaatttaaagtacttatgtccggtagctgaaagaaatgtttttttttattaaataatgcaattttattaatatagtaatcgattaaaataataatttgtactttaattggaacgatttagaaaaatgagttaaatagacaacggcttaattctcaaatcgtttaacaaataaaaataaaaattaaaaccaaattaaaaagattccaatatccgcagtataataaatctcaaaatacttatatttaattttatttacgttcaaaatactaatattattcagattgaagtagcaccaattatatgtatgtgtggtcatgtgttcgtatttatacaataattatatattgttataaaccaaaaatgatacatgttatatgaatatcatataactttttactaattattgtatatttttattttttaataatgctcatcatttatatatgtactaaaatttgaatatcatttatatctatat

SEQ ID NO: 176920 - DNA, 737 bp, Cannabis indica
tggacaaagaggtgtattgttacttagtcataccacttagtcatacctttcgagataaaaatcgtggaagccacatatcagcacatggttaactgaatgttcaaaaatttaatgggaaagagcatgaaagtttatatagacaatatgtaggttaagtccaaaactaacaaaaatcattcagatgatctcaaggagtgttttaaagtagtgaggaaatacgggatgaagctcaatcccgaaaaatgcactttcgatgttaagttagaaaaattcttagaattcatagtaaaccaacgagggatagaagcaaatactgagaagatataggccttgatggacatgccttctccgcttgacataaagaatacctgccttcagtcgattcatctccaaatacactgataagtgtgtcctgttctttaacattttaaagaaaattcaaaagtttgaatggaccaaggaatgcaaagaagcgttcaggaaattgaaagaacatatggccaagccgcctgtcttgtctaaacgggtgcacggacaagacttgtacttatatttggctatctctgaaaacgtgattagtgttgccttggtccgagaggaggaaaaaactcaacaccctgtgtattacgtcagcaaacgaatgataggggtcgagatttgaataggggtagaacggtaaatttatccatactcgatgtaaatcatttatagaggattatttgaattataacaataga

SEQ ID NO: 176921 - DNA, 884 bp, Cannabis indica
tttaaaaaaattactaaaaacttttaaaaaattttaatttttttttaattaatttttagttagtttttaaaagttttttttaaaataaaaagtaaaaaagacgaccatgcatgacaactaacagtcgacggcccggcctgggcagtaggcgggctaggcctgtgcctacgggcccacccagaccattcgggacccttaaaatttttttccttactttttaaaattattactattttttttaccgtattttagaaaaattaccactatttttttctaactataagggtccttaaattttttttttccctatggcccacttttgtttcagggccggccctgctaacagttttgtaccttatttttagcgtggttaaattttcttaaacttcttaaaattttactaaatgttttaaataattataatatacacgaccatagaaaaaataaactaataaagtttctatgataatgaaataaataagggtacattttaatttacacataataattaaatattaattttataataatatatatataaaaaaagtcacacaacaaatttgatgaagtaattgatgtctcttaagacaaatgcaacttgaaactttttaattatagtttcttggagctgctcttatagcaatcctcttatttaaaatgtgttacatggccaaacaagagtaaggtgacaccgctgtcacttggggggcctcgacaatcgacacattttgatttttttagtcatacattctgatactatttatttattacttaatatgtataattacataaactgttagaagatttcttttatggtggagcccactcaattttagtgagtgatattagatttaagtgttgtgagtaggaacttgaattttttt

SEQ ID NO: 176922 - DNA, 601 bp, Cannabis indica
acccgtcaattactatatatatatatactatagtaagcatttactaactactttttatttttaaatttttaattacaaaattaaaaataaaagtaaaattttattttaaaattaaaatatattctataactatttttgtttttcaattttaaaaaaaaaaataaaagtctgttgtgtaattttaaattttatttttattttttaattttattaaaatcaagaccgacaccaggtctgaggtcaggtccgagatcgagacaaggggagggtccaactctgggaccgggtctgagtttgattttcaaagtttaagttggggtcgtagtctaaaattttgattaagaaaattgtttaaaaacattttaaaactgatgttttttgtttttaaaatttagattcttaattaaaaaattgataagtaaaaacagttttatagaacatgattttgaaaaattcacttatttaattttaaaaataaaaatctatttaaaaaagtgttaccaaaccacacactatttaaattgttcgtatacctttttttaaaaaaatgtccataaacgtattaatttaaatccacccttatatatattggtcagtcgtc

SEQ ID NO: 176923 - DNA, 810 bp, Cannabis indica
atatatcttttatattaaatgtggctatctaacaaaaatttttggcttaacattttttttttaaatttttcctttaaataagttaacgttaaaactagtaccatgaaataaatcaaaaaagtattttttatttaaaaaaataaaattaaatatttaaatttaatttatttattaaatatgactttagataattattaaaaagtatcaatagattattatataattattttttaattagttatataaatcttaatttaaatttaaataagacgttaatttaattaattaataatacttaataataaatttattagttatattggttaaaatatctaaacttatttatttattttattatttaataaaattagttagatatatattttttataaataaatataaaactaaattaaattttatatatttataaaatattattaaattgtattagatttaattttttttattattattatttaaattaataattaagtaataataattgtaatgtattgtatattactaatacttaatatttatatatatttacattgttatatatgtaaaataaatatgatttataattattgaaacttaaaaaataaaaataaaaatacattgatacacttatttagtggagaatgaatttcctttgtaagttatttatttcaagatttataaatattaaatacttaatgaaaatgttttgccatatatattataggtgactcaactccaaccccagcccccaatccccagcccccagcctcccaaccccgacaacatcgtcagggcctataatctatgaaa

SEQ ID NO: 176924 - DNA, 582 bp, Cannabis indica
ataagtaaatatgattatattgaaatgagttttatttagggcataaaacccaacagttgaagtctaaacttctatcccgtagctctcgaagtcaacctgggcgcaaagttagggtcccctcccaggttgactgctatgactcaggtctactcaattccatgacgtcatccttcttgccatgtgtcaaacattgatgtccacatcaccagaaaaaaatttcgggttaacatgaccaaactcaaagttgttaacaccccttttttgtttgaggggatgataaccaataagtagttagttagaagattagttggtttaggctccaattctgttagttttctgttttcttgtaactacttctgttataacaaaattctcctctcttatatgagcctatatatataaataaaactttcttcctcacaatgtttatgtttttctcatttgttctgagactcaattcgtctttttacttctacatgctttggagctgctacattagttcaagtgaattttatgctttttatttaattatttttttattttgatatttgatagtcaataagtaaattatagtctttgaga

SEQ ID NO: 176925 - DNA, 712 bp, Cannabis indica
atgtgtgtttcatcccttttgcagtagcaaagtgttgggctttgtgccctaaataaaattctatttcaatgtaatcttttatattcaattatcaatagagaaacagatttatttcattacttgtttaatgtgttatttggttcatgtgatcatttatttgtttatttgatttataaattcatccaaatccttatcacattaatattcttgtttattgtgtcatcagcacagtggaaagtaatcaagattgtgtgattaaatgtattcctatgatttatcagtacacagggtttaactgatagaataatctacactgtagtttacttgcaccttggataagtgttatgtcctttccaggatattggttaagtaagcttggattagatgcatggagtatgcattggaagggaccgatattgaacttggactagatatgataaacttaccataatatctattcaattcaatatcacctaattgatcctagattaagtgatctgaatcctgagatggttaggttctagttcagttatattatttgtggtcttaaatctgttcgttaaagtcgaccaagtggttcttctcgtgacatataggttaaggacatggtagttcaattaagtgggagtgttaatcatagatacggaatctatagcttctatttagatatagaagtcaaacggtgatttccttcgagcttggcataacaaag

SEQ ID NO: 176926 - DNA, 467 bp, Cannabis indica
cccggctggaggaagaagaagacacccctctgcgaagcccactctcggcaggggcgcgtgcgcggccatccgacgtcatttttttgacgattctttttttctagcattattagaatttaatttttgatttttctatgattctaatttattttttgacttcgtttaattactattattttaatgataattatgcagttaaaaaaatattaaaaatatttttttgatgattttttgaaatctgtaaatcatagacaattatttgggtttcttctcatccagttagacatagtcactctcttatttgatttatcttgactatgtaatctccaccaatactctttatttcacatctttctattatttgttgttcaaaatttttaaaacttgattgtttgatgtaaaaataatgtgttatgatagactactttattttttttattattcaaatatattaagcaattagtatt

SEQ ID NO: 176927 - DNA, 1252 bp, Cannabis indica
gatgaatctttatgttcacttaaattaggacgagacgagggtttaatctgcaccaacaataatataaattttatgcattaatttcatatatatataaattataataagatatatatgcacacaaatttataataaccttataatggtaagtatggttcttcaacgaagggtgatcaaatgcaggttgtttgaagaaatcaatacaatcgtaaataactccatcttctctctgcatatatacacatgtcaaattataagcaaaaatgttattttcatacaataatattttatatgtatgtatatacaagagtatataaaataaaattatatataatattaccttaatagtctttattggtggtttattcaaaagattaagctctttctcaatttccaactcttctagtcttgatgttttgtggtgtgtctccaaaagcattacaatagtatgaaatataacacactatagtaattaggaaaattgccctaatagccatggatgaatgtgtttctgtataatatccaaaatcaagaaaataatattgaaaataaatattaattaaacttaaaaaaaaaaaaaaaaaaaaaaaaaaaggaagaaagaagaagaaaggataccttgaaggcttatacgaattagttgtgaagatgaatagaaaaatgtgtaatatatatacttaaagatatggccaaattaagattaattcttatcagaaaacaatattaattactattaatttatccaaatattaattctatgatttccaatatatgtattcttatcttattaattttaagtttttggatttggaaaataattaataaatctgatattttgtaaacatggtataataatatacaccaattaaagcatatattttttttttctttttaagctcaaatccaatcaaattctaaattgtaagataaacataaaaaatatcaattaggtaatttttagatttgattgtaattaattaaaaaagatatttgattttaattagcaatatttattatttatttatgaatcaatccataaatcgtgactagtaaaaagaaactaaaatggtttgtattcatgggggagttattggcatataaatacgattttaataatcatctcaaaatatataaatatatatatatatatatatatatatcagattactggattttagtaacctgatagttataaataattattattattattattgttttttttaattgtgtcgtactttttttttttgtt

SEQ ID NO: 176928 - DNA, 687 bp, Cannabis indica
gaagaaggtgggcccaaggtgaacgggaacgtgaagactcaagtggccgagaaattgaaggacttatctgaactcgtgagtaattgtctggcgctattttctggaagtgttaatgacgatttctcgggagttccgattcagaacaagaggaggttattggcggctgagaatgaagaggaggacaatatctcgggagatttcccgagatggttgaaacgaaatgataggaggctattgggtttacctgtctcggcgatacaagccgatatcgttgtgtcaaaagacggaaatgggacttacaagactattactgaagcaataaagaaagcaccggagtacagtgatcgtcggactattatatacgtgagggcaggaaggtaatttcacttgacaacttaaattgactgatttacggtaaaaatagacagtaaaaagtaaatatgataactatctctcgtgcgtggtagttgcatgaaattgagttttcaaacttttgcttttttgataaatttggttttattgaagtgattggttcgttgaattcgtctgcgtaatcataagacctaactataaaccatgtgactacatttagttaagtagttgtattttaaattactattatacccttttctttttgtgatttagttttttctttttttactatggaaaaaaaactaaactttttga

SEQ ID NO: 176929 - DNA, 610 bp, Cannabis indica
atatgtcgctaaaggagaattgcgaggcaacggagaaaagtaacacataccttagcttacaataagcaaactaattgtaaaagttggatcggctcgaagaacaaaaatgtgagatgaccatctcactacgaggaaacttcctatagtttcatctaactaacaggagcgaggctcataaccctggcaagtcagaagaattctgtatacccgcgatcgacgtaagacatatcttgtcgacctaagaaagaagaatggttccagctcaccattgggatcactacaaccaagtttcagtcgagacatctccagattcaacaattaaagacgtgtttaatacacgatattcttgacccagtaaaagcgagaaaatcacagctatataattttcaaaatcatacaccgcatttacattttgtgaaatgtaatcagatcccacgattttagggatgatgactgtaatcatattttggtcagctttgtaattaactgccactatgcaattataaatagtggcaaacaatctcaaaaaagggacgaaaaaactacttctggaagaggctctgaaaaaataactcagaaatctgaataagattgactcgtggattatgca

SEQ ID NO: 176930 - DNA, 678 bp, Cannabis indica
aattatggtttcaaccaaggggttacgtcgggcagagtttccaaaaacagtttcctaatcagcaacaacaagggttctacccttagaaaaatcaattgcagcaaagccaacagtttcaccaacaacaagcttctagtggagggtctgattctcagaaagatgcgtttatgcaattcatgacagagattaagtcattcattaaggtcttagaaacaaagtggagcagttggcctctcaaaacactaacatggctcaaggtaacttgcctagtactactgaagtcaatccaaaagagaactgtaaggcaattaccttgagaagtggtaagaattatgctggtctaagcaaagacaagcctgagaatgaagaagatgatcaaccagcacctacaccaaaaaagaagaagactactgatggtcttcaacaaaaagaaacttctcctcctattagtatcaaccatcacataaagattccctatcctcagagactgcgcaagaataacatggataagcagtttagtaagtttcttgaagtattcaaaaagctgcatatcaatattccttttgcagaagcccttgaacaaatgtcaagctacgtcaaattcttgaagaagattttgtctaagaaaagaaagatggaagaatttgagactgtagctctaacagaggagtgtagtgc

SEQ ID NO: 176931 - DNA, 625 bp, Cannabis indica
gtgtataaattaaaaagtcatgcatgcaacaaattatttgaaccttatgtttggcgatcagtgtgtgaaattttttagaatttttcgaaaaatttcaagatgtcttaaataactacaatatatacgaccataaaaaaattagattaaaaaattctcttggatccaaaacaaatagggtgcatcagtacattctttttaggaggttcattatagaattttctaatattatatgataaataatatatcttattttattttttttaaaagtaaaaaaactaatagaaaagcacccaacaaataataaatgataataaaacttaattagttaaattaaaaatactttaaatttctctaattttattattattattattgttgttgttgaaaaagtattaactaatttatttaaaataaaaaccatcacccaacccgtatacttatagcattttttttaacaacaattaaatattattaacataatagaaataattttaagttaatttttttttaaaaaaatagttttaagttgagtgtgttgttaacaaatagtttaaatatgtattttcaaaattttattaaaatatttagctatgttttttttttttagttaaaaaaaaaagtaaaa

SEQ ID NO: 176932 - DNA, 652 bp, Cannabis indica
gacccgaaaaacctcggtcaaacagttacaatataaaaaagtatgttcaaaacatctatttacacgtgtataaattaaaaagtccatgcatgcaacagattgtttgaaaccttatgtttggcgatcagagtgttaaaattttttagaatttctcaaaaaaatttcaggatgtcttaaataactacaatatatacgaccataaaaaaattagagtaaaaaatcctcttgcatccaaaacaaatggggtgcatcagtacattctttttaggaggttcattataaaattttctaatattatatggtaaataatagattttatttaattttttcaaaaaaaaaactaatagaaaagcacccaacaaataataaatgataataaaacttaattagttaaataaaaaatactttaaatttctcgaattattattattattattattattattattattgaaaaagtattaactaatttattgaaaataaaaaccatcacccaacccacatatttatagtattttttttaacaacaattaaatattattaacataatagatatagttttaagttaattttttttaaaaaaaaaatagttttaagttgagtgtgttgttaacaaatagtttttatatgtattttcaaaaaaattattaaa

SEQ ID NO: 176933 - DNA, 673 bp, Cannabis indica
aaacctaatggtagatgtagttatagtaagatgacaaattttgtcttttttcataaaataaaatataaagaaaataatacctaattaaaaatgttaagatcatatatagttgggtagtagtgtagtgaagtagctcaacctcatcacatggaaaaagcaaaagtggaccaatgttttgaacaactgaataaaccactcgagtgactcaatgagagtctcacataagtgtagaccatatatacatacaaatatatagtggaaatttcacacacacacacatatacatacatatatatgtctatatttatacagctagctaattgtggcttctggtctcagtcacacttctaagcattacttgtaaagagaaaaggaccacattcacatttagtaagaaaaaaaaaaaaaagaagttagaatgtgtcaatcaaagttatcataaaatgaatgagtgagttgagccagccccacacagcctagccatattatattttgtttccctttactcacactcattcatcttagagaatcaaaatctgtcattccaaaacccatatgagataaaacgccaaaactatagaataaaagaataaaagaataaatttcatcactagaccaactaaccctaaatttctctttcgcttacatatattattattgataatagactaat

SEQ ID NO: 176934 - DNA, 563 bp, Cannabis indica
tagtagcaacttaacccttgtatattttacttcataatcatcttaagtattactatcccttactaagaccctaagacctaaaaaagattttgatatgtaatctagtattaacaaaaaagccttgcaatgctcccctacctaggatatcaaacgtttcctttggaaattatcacaacaaagaaataagcaacgaataatgtttttaatgtatccactatgactaacctttgaggggtttacttaacgcagcgtggactatattatcttttgacaatataacaacacctaatccaactagactcgtggtgtgctcaatactgttgcatccaccataagtttagagtgtaaactctcttcttgggcacctctagaatttctagccaaagctcctctattcttttcattagtttagagactttttttttggggccatccttcattgaaatgatcaaatcataatgactaattatccatttatcataaaatattattttttaaaaaaaaaaattacattcacgtttaaagatttattttattgtgttttataaaaataacaaaaaaaa

SEQ ID NO: 176935 - DNA, 524 bp, Cannabis indica
attatctttttcagcaaataaaaatatgcttcttatatattaaaaaaatcacattaaatagtaggactaggtgataatggtgtaacttttatgatcaaacgattatcagtgatagttaaaaatgatttttaaactaaatctaaaataataggaaattactccatatactatttttaactttttttttcttttcaaatttacagtttttgttgctccggtagttgctatgtgagttgttatacggattttgtttacgatttaggttgcttcattagttgctatacagattctgtgtaaaatttcgtaaaaatgtaaaaaaaaaaatattttaaagtataaaattaaaaaaatttaaaaataaataaaagaaaaaaaaagaaagagagaatatttgatggttccatagttataaaaaggaataaaattgtgattattattatatagatataatttaatataagggaggagataaatgtaaagaaagaaaaaaagatagcgtgtaagtaaatacatgaagacagaga

SEQ ID NO: 176936 - DNA, 859 bp, Cannabis indica
tgcatacacaccaattgcaaatggatcatatattcatattactttctcaccattctcgcacattgatttgtaaataatgtaacttggtcaaataaacttaaagtaggtaaaaaaatgaaagaaaaaaatatcaactataaaatttttaaaaaaattatgtaaatatcactcatatttgactaaaaagtttttaaaaaaatttcaaataatgtcactccctatcttctcaaaataacatactaaaaatgagaaaagacagttccaattctacaataaaaaacctaatatagaattaaataaaattgcaacttcaaatctataagcaattgaaagagcttgaatctaataaagttaaaactaattaaatagtatgagtcaatatgagtcataatcgtattattcttttttagatatctaaactctctagaaattccaaaaataatagcacacaccaaataacaataaactcataacgttcatttaaaaaaaaaaccttttttttttgagtgtgattccaaaatttaaaactaagtacactttttatactacacaatggtaaagtccccatttaaaaaaaaaaaaaaaactcgttcgtacgttgttttagatagttctggttgtctcgttggaagccacagaagaaaataaatatgcatgacagcaaggttttcatcagcaaaaaaaaccttatttaggataaattaatgagtttattactaatttctacaaagaaaaacatatatgcatgcttcatcaacatataaaataaacaattatacacatatattataccttaaacaaaacaactatatacattttttatatataaatacaaatatataagttataccttttctat

SEQ ID NO: 176937 - DNA, 592 bp, Cannabis indica
gttgatggtcttcgcttgagtttcaaacacagactcctgtgtaccatcaacgtccaccgtttgttccacatccatctcaaagcaaagaggagctttaccctcattaatactcttgaagtatgcctcttcactggggccggggaaacaagcacttcttcaccaccaactagaaaacaaaaaagaaaacacggaataaattaaaactgtagaaaagaaatacaaaaattatgataatcgacaaaaagcagcacaatgtcgctacatgtcgataacatgtcgcgacatatgtcgcgataagcgatgcagcaatttcttttgcgacatcgcataatgtcgctaacatatcgcgaacaatgtcgcgaatgttcattttcaaataaatttaaaaaaaatacagaacagtaaagaaacatacccgactgttgaataacagtgcaatgtcggttgccttgacatcttgtttccgctggccctccggtgttttccagctcaacattctggggaacttggtcccgttgcagtgggcatacttcttccccaacttctcaattgcttcgtatgcccagtactgaaaggcaggtacatagccact

SEQ ID NO: 176938 - DNA, 1194 bp, Cannabis indica
gaactataaagatctgtctattatttacgatccagccaaaaaacaaaacaatgacagattaagtacattcatggagacttatttttatttaattgaaatcacatttaataattaaattaacacaaaagccagaaaaagaaaggtagagagattaataaaatttaaatcataatttataatccaattaagagaaaacctaaaaaaaaaaaaaaacagaaatagataattgtatgcaacagaaaaatatacactcatagaagaaacgcctctcatatagataaattgagtagaatatctcgcatttagaaatagctccctttttttcaattctaaagttaattttttggataaacgtgcataaaataaaaatctaaaataataataaaaaaaaggatgatcagaccaggtgatgattccaatgcctacatcgcgattcgccgagtgtaaagagatgaaggtagagcaacaaagagtttagtcagagaacttaagaaaatggtaagggaatggttttgtaaaataaataggcaatagaaatcttgataaaatggtatgggaaaggttttattaaagaaaatgccaattaaatgtaatttaaaatttgaagttacgaaaactgtaaaggcaaaggttttgtaaaaaaaaaaatctcaaaatttaaagctaattaaatgagaagaataaaatcaaaaactcatataagctaaaaaattaagaaaaagaagattaggaaaaaaaaactcatataagctgccacataggaatcgtttgtgcattcctttaaatcttcttctatagccacaaatatacaagaataagttgctttggtactgactttgctgaatgttatatttcttctatgaaaaattattgctttgtgaactggaatttttgtaagatataaataagaatttttttttcaaaaaagttatatatattttaattataaagatcatagtccactaattaaactcactctaataagtcacaaattagtttaagtccactaaaagaaagaaagaagaaagcacttactcatttctctaacgttttcaaatatgcaaactgtagatttatgtataagatctctgagaactatgaaaagaaaaataaaattgcagtacctatcaccaatcaccaatagattatttgttagaaattagaattttttttttccaaaaaagcttaatctat

SEQ ID NO: 176939 - DNA, 720 bp, Cannabis indica
ttagtttaaactattttgtttttttttttacataataaattattctaatttaattttttaaaaaataataaatgtcatgaactaaaaatatatacaagaaaattttagctagtaattaatttttaaaagactaaaaatataaaaacctcccacagttaaaatttctttagtttaggagagggaaaattaatgagcaatatattatgtttgagagatcctatttcgatcatttacttccaacttattccataaagaaaaaaaaagtaatatacccaaagacataataaaatatatataattgacatgggaatttataacatatactatatattaacttacaatataattaatttacaaatttctaaatgatttttactgctaattaaaaccatatatatgcatatatattcatgtaaggaaaagaaagaagcagtagttgtgatgatgaacaaacctacggcatggactgtgttgagctgcatcatcatcagaattatgaaagccacaagaaatatgccaaccatgaaacgaacaaaatgaaccatactcacatacatgtgtatatatatatatatatatatatataaatactttatttatattcgtatctttcacttaattattaatagcaacacaacttgatgaattcttggctatgcatgagtattatatatatatatatatatatacgcgtggtagtggtactgtaccaaataaagt

SEQ ID NO: 176940 - DNA, 1261 bp, Cannabis indica
agttgaatccaaccatatcaggattaagatccatagactaagatcaacctttgatattgagttagaaagatataacgataagtttattatgtcatatataagacaatatccgtccctttcaatgtatactccatacattcgatactggtaaactttgccaatgccctggaaagcataacacttatccaaggtgtaagtataccttatcaccgattattatgcattctaaatccagtgaactaaaaaatcacgagaattaaacttttgaacatataatcatgattatattccactgttctgatgacactataatcataaaaaaatatatatgttctagacttaataaaatttgtacattaaatataatgatgaaataaatcatgtgaaccatgcaacataaaagcgatttcttatctttattaattagtaaatctgattatattgaaatgggttttatttagggcacaaaccaacaacctcccacttgcactaatataaaacaaaaagtgcatttcaaataatctcaacaccttgatatccagatcaagtgtaatatgtagtattctctttgtaataggatctgaaaagctgtattcaatagaaactttctccaccattaaatttccttagtcaaaaaatccttcgtattgtgtaattcctctctatatgtctactcctctagagatacttaattctttactttttggcaactacttttgtgatagtcaggaagtaacactagtaggtaactaaattattggtacaaagtctaaaattgtatagaacttcccatagtcttaataagtatctttcctataaatttaacattcaataccactggtagagttagagatttcagattagtttttacacttctccaaaatcactactccacccccagagtaagcaccatctcatcagtagactttccagccttaagataccaccattatcgactaacatatagttcctctttttgatcttaagattcattttattatcttccaatgttcccttcctggattaatctgatacctactcattactcccactcaacagcaggtgtctggtctaatgccttttaaagcatacttaagaccactcactcttaatgctaaggattcttccttggcctttatcttttctagaatagttgagaattttccatggataagtaaatctatgtctagaagtcaaaaacttcctatagattgccgttagaaaaaaaatacttcagcatcttactaaagtaagttgcttg

SEQ ID NO: 176941 - DNA, 713 bp, Cannabis indica
ttgaatttgtttgattttcaacagagttttccaattcttaaatcttcaaggcagtcatttttattcttagcaaaaatacccaaacttttctactaaaatcatcaacaatggacagaaatatgtttacctccttgagttttaaccttgctggctccccacagatcagcatgaatgtattcaaggacagattttgctctgtagttgctagttgagaatttgattctatgttgctttccctgtacacatatctcacagaaaggtaggttagcatgagtatagttatgtaataacccttgtttagataattcaactaaaccttgttcaccaatgtgtcccaatctagcatgccataacttggattctgaattacatttgtcaacagcagcagcatgtgctggtgtgacagtttttccatcaagataatagagaccatgtctcttaatgcccttaagcatgagcaatgaacctttagtgatcttgattacacctttgcttgtcttgtaatcataaccttcatcatctaatgttcccaaagaaataagatttcttttcagatctggaatatgcctaactttgtgtaaagttttgaaagtcccatcaaaacttttaatgacaatagatccaattccaattacactacatttgtgatcattccccattacaacactaccaccatctatgcttttgtaatccatgaaccagtccctatttga

SEQ ID NO: 176942 - DNA, 583 bp, Cannabis indica
ccagcttatgtggcataaagctctatcatgccatatagtcgaaagttgttaaactttttgatccatctcccatatggaatcattgtatacaagtgtgggaggtggagctttggctttcccctttcctttggattttacgactacccgaatggagcagttcccagagtagtctctaggacagggtcctgttgaagttcccaggcaaaggctgtagccggcacttcatcaatatttacctccccggtgagagcaatagttagattttcctcaatgaccactattggattttccttaagatccactgcttcaagatggaattcgtcgttgatatccatcactggaaaaacaaaaaggaaaggaaaaataaagaaattagacacccaatatccagatgactgtataggcatcgaggacgacctcccataaatttccaggagaggtcccccaacagaccccgtcactcccataaaccccatccctcgccaggcaacttaaagcaacagccaggaacttaggaataataccagaacaagattcaaagaaacttcctgaaatcaagctcatttggagtcctaataactcc

SEQ ID NO: 176943 - DNA, 568 bp, Cannabis indica
atatagtccatgcaaacaataatggaaccaatttttctttttatatatataggccatgaattcaatttctctaccacttttttttttttttttttttttttcagaccggtcacttacttaatataacccatttatttagtaaatttagaagaactaacttatataaatgtggaacaatatattcacacagtgaataataatttatatttaaagtaaatattatatatatactcacgtgctaatattttatagttaagttagacaccgtcttattatatactatcactacaataaaatttatcaatagccgcaatattattagcgaagggaaaaattcacccctaatagtggtagcattagcggcggaaccaaaatccgcccctaattctacttatttaattttttttaaaaaaaaattattagcggtagattcccccgctaatagtattagcagcgaaccccaccgctaataatattaaaaaataaaaaaataatcgttagaattattagcggcagggcattaatagcggtcccgctgctaataattgtatatatacccaaccccgac

SEQ ID NO: 176944 - DNA, 812 bp, Cannabis indica
agttttaatggttttgcagcaaaattgttaccacatgaagtgaaaaaactatcaggtatatatagttaattagttaatagtttttatttttaaataattaaacacattaatttctgaaaatgattatattttattttcagaggaacgtggtgtgatatcagtgtttcctagtacaaagcgcaaacttcacacaacaagatcatgggatttcctaggaatgcccgaaaccacaaccaaacgaaactatcgtactgagagtaatataatagtaggagtgttggattcaggtttgtacctataatataatattaatcatactatatataattgaaaataattagattgattataatataagtaaataaatgggtatatattctgactctcaggaatttggatggattgcccaagttttagtgataaaggttatgggcctgccccagctaaatggagaggccaatgtgtcaagggggctaacttcactggctgcaataagtactataccaatcttctctttatgtttttgctatgaaagtcgtatatatcagaaacaaagtacatattagagtaagatctcgaccattcattactaatcagacaatactgtagaatctttaatggtcttgcactattggaagagtactccatcgcccaaggctcccccactcacccaaaaaattttaaaatttttaaatgatactataatttatatcaatatttataattttttaccatttgtatattataaaacacaattatttacttcaaataagtcttttttgtaagtgttattctattaagaaaacatgctc

SEQ ID NO: 176945 - DNA, 749 bp, Cannabis indica
catgacaaacaatcgccgacgacatatgctaaacttttttcagacgagaaaactcaccgacaaaagctatttttttcttatagtgacatgaagaataaataaaaaataacactgactcgtgaaatatagtaaattttaaatacaaaatcacgtttctttatcttaagttattaaaaatattttagttttattgatgatgatttattattgttaataaatttgtgtgttaacaaacataatcaatacaattaattaaatgtgactaatagaaagtttacattgctcaatttcaaaataacaatttttgaataagtaaatatttaatatttaaaaatattataaaatgattaatgaagaagatgtacttgaagaaaataaaataataaataagcaaaaatatacaagaatcaaattctacatatttgtttaataatgatgtggtggtctccgggatctggaactatattatatggagaatctcgttcacaagacttagcccggatagtcaaacgagaaataacatctatattagttatagaatgtgatgcacttaattttagtacaagtaggtgattattgagatttatgccttaaaagtaagtaattaatggataatgtattatagaatatatgaaatgtagttataagataaaataattagaagtataattaataaatatttaaaaatttcttatttaaataaaaatggtataatcttgtaatgtcgtacaagagaattaaaattatac

SEQ ID NO: 176946 - DNA, 1417 bp, Cannabis indica
ggatcaagaatcatgaatggcataatgtagaactcgagtctgattgtctctcaattgtccaagatattcgaagtaacatcaccatggtttcgcctcttgggagagtggtgatgggctgtcgaaagcttctatctattttaaacaatgtttctttattttttattaaacgatctgctaatatgactgcacacagctttgcttcttttccagatcgagttttcagtaggagggatgttcctactgaattccgctcttgtcttttggctaatttagcaaattaataaaattctaatttgcattcaaaaaaaaaatattgaatatgagtggccctttttgattgcagtaaaaatttacttttacattaagaaaaaatatacatataaaaaaaataataataataatacattagcttatataaaaatattaatttatctcaactatcgataataataactttcgaattgtaattagttataatttttttaagtacttaatgtaatttatattttgtttagtttttcgatcgcggggattcctcgtctagctctcgacatatgtagggatagaaatggagaatcaatggaattaaaataataaaagcttggggacatttaattaaggctttttttttatttaaattgtaaattttttgctaccaactctttaatagtagcatattattataccataactttatcaatggattctttaaaaatttaggtaatacctatatatgtgtttgtgtttggttaattaatctttttcctttgtaggattaattaactacctatataaaaataaaataattaaaaatccaaagctatattagtatttttagatttaattaagttggttttagataaaaacaacactacaacaaaatctattatataggtatttatgttatcaaagttttcacatagagaaagtttctgcaataaataaaatgagagtagttgctagtgctacttaatttttttagttaactgcaataattaaaactacaaacactacaaaatttcactttaagtacgataaaatttgtgattaaaagtaaaaatttcaatgataatattttaatattttaaaatgcaactatatatagatagaaacataatgaaaattaattcatttcaattcgatttcattatccccaaccgaacgcgcactcttccatttgtactaacctcttaatattattattttttatgtatttatttttattttaatgtcaaagatgagaggaagtagttgaagaaaaacaagaagatcattcacacattattcaaaagtacaattaattgttgaactagttgtttatatataatgagaggtcatgaatctattatttatatattaattgagattattataaacaatccttattgtaagcttaatatataatatgatcgctagg

SEQ ID NO: 176947 - DNA, 1188 bp, Cannabis indica
ccagccatttttcaataaaaaaatattgcgatcactgctcctaactctctattttatccatacaccattgtttatcctcattttttcttttaaatcttttaatttttctcacccaaattcacatatacactataaaattaatttattttagaattttaaggtaaaatgggagtttaggccaacaattttttagggttttaaaagaacgatggtcagctaatggcagtaattttgagggttttgaggttgtctcttagctttcattgaggtgtaaattactttaatatatgttttacattacattgcactttttttttttttaagtgtgtgatataggattcggatacccacagtggtggtagaaaaattgatggtggtggctggaaaatcaatgaaagtgctcaaaaaatttgtggttgtgattgaaaaatttagtaaacatttctaacatttaattctatctgaaaataatattgtttaaggattttattcttgaaaacctattaatattgtatataataggattacgtgaatttaaagttagaaaaataattgtttaattttagagttttttggattttacggctcaaggtagtattaaacggtggctttggtttagggtaataaaatatcgtttttttaagaaattaaatacttatgccttctgcagttattatgaaataactaaagacataggtccactatacgtctttggtattttcgagacctgcatgtttccctaacgagtgttcggttctgagttttttttttttttaactaggtagatagaatagcgaaaaaatcagagataaatgcaatttttctagttgtgacagctaaaaattgaattaaaaaaattagataattagctagatttttttaatattattttccataaatagaaaaataaataaaatctactaacaaaatattctctaaaaccctaaacacaaagtcaacatcgaaatataatcaagaaatgtaatcaaaatatatatatttcttgaaaactaatattgggaaaacaggatctttcaatattctaagaactaaaaaataagtttttgttagttttatggtactaaatcaggtacgcaactaaagaatttatgattatgattatcattgtaccatacatccaagatcaacataagtgtatatattaaactaaaagtaaaaaatgaaaag

SEQ ID NO: 176948 - DNA, 526 bp, Cannabis indica
tggttcattcttgcaagtccttcggttgtgtcctcttttcaagcattgtgtgcattgattctgtgttgctttctccattgcggtcttataccgttgttttcttggccttcctgctggtcttttgtgctttggtggcagtacttcaatttgtctaatatgatcaggtaactcccatgagtctcggtcacctattggaaacacagtttcttcgtatgttgcaaggaaggcttgttttgtgtagaaataagagcagaaattgtagcatttgaagtgtctttttgatattactgccattgcatgagaacatggcatttcgtcatattggaatctttgacatgtgcatgtctttttttgaatgtctactatgtacgaactttttaactcattgactgtatatatggcatggtttgatgtttcaacctggaaagttataggaaggtaactgttaagtatttttcacaggttataatgaagtattgttgaaaagatatattacctgcaattttttactgcgatctaatttgtc

SEQ ID NO: 176949 - DNA, 995 bp, Cannabis indica
ataacatttaatgaaataaagcatatatatagttcacatgcctgattttctttccacagtttcttaagtttgcatttcaagtgtgcctttatcagaaacagttaccaaacacctgtcaataagaacttcaatggcaatgttaaaatcaccacaatcatccaatatgtctctcaccaaatattttggataacctcgaaagaaacacgctatatcaagaaatatactctgttgtttagagtctagcccatcaaaacttatttttagtttacttgtaacgttttgatcaggatctacaattatcttgtttagcaaactttcccataaatctttgttttttgaaaataaataataataataataattaattaagacattaaaaaagttgaccaacaaaaacttgtttaacaacaaaaacttggccaagttgattgagatttagattccaaataaaaaaaacgaaattaaaaataaaaaattcagatcgatcaaatttaaaaattgaaaatttttcaaaatttgtaaactcgcaaaagaatcatatttttcttcatttaacttttaattcaacactttgtccttatgattttcagtttataaggagaaaaaaaataagaacaattattgataattttagtattttttttttggttcagctttagttgtttcaaaaaaaaataattttcttttatgtctatggagtcgattctttattttaatatttaatctgaatatttagtgttaattatatgattaattaatgaattagtaatgtcaatccacaagaggtgaagttgacaagacgataacttgttgcttagctgcatttaatgattgttaatattaaattattttttgaataagacaaatttttttaatcaattccagttataatacgatacacttaggatcacattattatcatggaattgcccaattagaagaagatattaaatgtctcacaaatggggtctttttttttttttttttttaacttt

SEQ ID NO: 176950 - DNA, 1142 bp, Cannabis indica
gatcatttatatcattattcattattggctacatattttcttatttatttgtgtaggggagtaggggtgttacttcatttaaaagtcttttcacgataaaaacaattaaacataattaatgaaccaaaacttcataatgtgaacaatgtcattgaaaaaataataagggtaattattattttggatattgtgttttgtaaaaattattaattggatcttctaattttattaaatgataaaatagatcttgtattttctaaaatgatacaaataggaccctaaattgattttttgtcaaagtaaaatttaattataatccgatctaaaagtgtcatgataaatctgtttatattttctgcattagaaattgtctttaagttggttatattaaaaaaaaattagtcaaaaattaagctaagggtcctatttttaccattttaaaaaatatagagttcattttgtcatttacaaaacacagtgtccaattgataactttgttaaaacatatggtccaaatagtatttaccctaactaataataataataacgaacaactaattcccaacaaaagaatagataaagccttatctatctatacaattttctctatctacccgaaaacgcatgctgagctaattcatgtacactcaaagtcaatcgtaaattttagtgggtacataaaaaaaaacaaaatttggattattatttagaagaaaaaaaatatgttatctttaaaatagaaatttgactttatatgcatattgtaggttaaaattaataactaaaacttaagctatttaatattggtagaataggcaaatttttatgtgtaccccaaaatattcccctcatttcaaactttctaacttctctctatttccctcttgatcgttctctctctttccctctcactggttctcattgaaataacgcgaccatcgccaccattcgactgaccgagagggccccatttcaatctgactaacaccttgacaatcccttcctcaactgcgaatgaagagaccacaaccactaatggagaccacaaacgtagaccacgaatggagagaacatgaacgaagacattctctctaattttgtggttttttttttttgagtcggttggatagtgtccgatatag

SEQ ID NO: 176951 - DNA, 723 bp, Cannabis indica
taacatcaaacatctcaagaatatcaagattctcaaaatactgaaagctcatgtagccaatattttgatattcttcaaagctaagatctacaagtgatcaatttgactattaaattattattttacttaatgttcttatttttagtttcatagggtgtgtttggaagtaactgtgtaattactaggtggggtaattactagagtggtaattacacaatttagtaattacactatattttaaaatgcaatgtgtgtttggatatgaggtggtaattacatatgaattcctaatatcttgtttgacaaaatcgttagtaattatatgagaaaataatattttttaatagctaatgtttaatatggaaagtttttagttattacacagtgtatacatccaattctcatggggggccatgagaattggagagtgtaattagaaccctttaattacttccaattacacagttacagtgtaattacatggtcagacaaacacgccaaattgtgtaattaactctaattacacacaaatccaattacattgtggctttccaaacgcacccttaatgttatgctgtttttattttattaatattagtaatttttattgttattttgtatatttaaatatggtagtattttaaattaattattatttttgttgataaattttaatttgtaggactgaaatataagattctattttaaaataaaattaaataa

SEQ ID NO: 176952 - DNA, 830 bp, Cannabis indica
accaagattacccttcttttgtttgatatttactaattggtttcacacaaaaaattacccttttttgttggtatttataaaaaatatatattgttaaagactatttgctacatctttttttctttttatgcactatacttaattacatatgacattaattacatatgacaattgtgctaagaaaatagattagatatgactattactatgactatatattatcaaaataataataataacaatacatttgactttttgaatcatttcactgattattgtattgcactattctctcttactttatttcaataaatggatagtatacaaaataattcttatttacttcaataattatgattatataattatttaaattggatacttcattactatattttaaatgaaacttgtgacatgttcccacttgaaatttttcgtttttttaaacaaattattatgacatgattgaagtacaacaaaaaaaaaaaattaataactggagtagtcatttctgaatttaattaaaaattatcatttgttacaaaaatttacatattaaaatataatatcatagataatataaattttatttttgaaaaactcctatttgtatacagcttagagaacatattttatcaagcaaacaaaataagatttaatacctttcaaaaaaaaaagatttattatgtattataatttagttaaactatgctacttaaataattaagacaataaaatttattttttagtggtgttttataagtaaagtttatcaaccatgctaaatattagatatcagccaaaattaaacccactataatacacatagg

SEQ ID NO: 176953 - DNA, 627 bp, Cannabis indica
ctgttaatgcgacaacggcgacaatgagtccgatttttgccacttcccaaacaaaggggctatgaagctgtaattgatgaagtgagctaggattgatgccacctttgatatgttttacaattttaactccatttttatcagcttttgctacatatacaattaaagtggataatataactgataacaatggtgcaatagccggcaaccaaaatagtttcttgttctttttaccctgcacaatttcacaaacacgtttattactatttgtgaattactcagtacaatataaatcaattaaataattttaaataacatcattaaccaacaattgcaacaagttgtcacctttatgtgttattgatgtcctcattaattaagtaatcacccaattatatattaaatttatgtgctttaattagctatataattaggtaattctgtaaaatgctacacttgttcattaaaataataattaaacgagcattgttatttaatattttagattacttaactccgtgacatgtcattttttaattgcttagcaattctcgtattaataatttttttttggaatgatcgtattaataattaaatcaaagtagagttcaataataaaatgcaccatat

SEQ ID NO: 176954 - DNA, 760 bp, Cannabis indica
attccattcctagtcttctgcaatggacaatttgatgatcgaatgaattatgaaaattatgaagctagtggacattacatttcagtcaattgtaactatgaagaattacaacggaagctgaaagaggtcctggaatgcaactaaaaaaacactattttgcaacaataaatataaattgtaaataaacaagtatacaaactataataaaactataaaaaaactaaaaacaaactgacaagcagaaacaactctacgaatataaactacaaacatctaaatcgaattgttacctaaaaaagaacagcaaacaactatacctaataatattcccaaaacacatcatacataaacatattaaactattaaaaaactagaaaaaaaaaaaaactaaaacccactgattagagacactaaaacaaaaacaaatgtttcaaaatatctaaaaaaaactagaaacacaaacagaacataaaacacaacaaaaatgaaacgaaagtaataagaaacaaactaaaatgccaaacccaagaacaaaataaaattgattaaacaaaattaaagtcctaaaaatccaaagaaaaccaaacgaaattttaaaatgaaaaacctaaaataatacacaaaccaagaaaaaaccaaaaacgaatagaaataggaaataacaagaaaaatagtttaaaatagggggaaacgaaaaataaaaactaaaaaccaaacctactgttacaaacttacggcagaggcgactagctttttctac

SEQ ID NO: 176955 - DNA, 886 bp, Cannabis indica
tgttcaaaaaataaataaaaattagtatttttacgtgtcctgtgtgaaataattaccatttcaattcttttttttttttttatgttcaaaaaaaaaaatcaattttttttatatataatatacataaaattttaaaacaaaaattacagaaatataacaaattttcatttttagtttttcacctcaaatttttaatttttttaattttataatgtggtgaaattttttaaaaaaaatactgtgtaagttgtattatatgtactatattaaattttcacaatattttcgagaagattttttagtaacagtatttttataaaaaataatttaaattacagtatttttgtaatttttttttattatttatatttatttataattgtggtctgatttttcattgtttttagtttcttttttctttttactttttaataagcaaattatatttttgtaatttttaagttttataaacatacttttataattaaaaattatagaccataaaattataaaataaagatttttgaaaaatttcttcttatttaatataagttttttttctcaactattttttaaatacaattatttttatctaaaactgcaaacatattgtttaaaagtttcacaatgtaaattattttgaaaattctccaacatagaacttctaaataaaaaatttctaaagctaataagaaaatattgttgttaaaaaagatataaattaaagttaagtagaaaaaaaaattaatataaaaaaaaaactcaaatccaaccaaaaacttttctaaaagttattctctgtacttttattttttccaaacatttttttttacctgtacccaaaattcaactttttaagcatagctttaatttgaaaaaaaaatat

SEQ ID NO: 176956 - DNA, 739 bp, Cannabis indica
caagagaaggacattcggactcagatcttagtgatactctgctacagaaaggatacaagggttagagatctgagtagaaggagacattatattccgctgcagctactgtaaggttcatgatactttatatgtgtttatttcatatcattttagaagttcatatttaggatgttaataacatacttgttagtaaatctagatcctggtaaaataattccaataggatacaacttaaatagaagttaagtcgatcaaataaaaatggttagaaaaacgttacttcgatcgtgggtacgtttactgcttctataaaatgtatttaaaaaataattaactaataaatgaatttagatgaacttaaaattgttcatctaaattcacaccttttgaaataatctgatgtttgattttctgacgctcgtgagattggatttctacggatttgtcatccaccatttgatacttcaggaagcgactaacaacatattttttagttatcgtcttatcagtgtcatatttcttttgtaacgcatcctaaatttcactggctaatttatttgagttataataattaaaaaaaaaaagcattagataaatcgttaagaatgaaattcatacagaaaaagtcatttttaacccatgaatctaaatccttctgttacttcttgcatccagcctctttttccttattagtggaagattcggaggcaacatgctttagaacagtgagaatgaaagt

SEQ ID NO: 176957 - DNA, 555 bp, Cannabis indica
catatctactaaattatgtctttcaaatttttgacatgtattaaattatacctcctggactttcatctatattagagttctcttactaaaatgggataagttgtgtattttttattacacattaatcaaatgtaactgtaaaataattttaattgataaataatctcttctctaatcaaagtaccaaccttacataacttttcaaaattagagtctctaacacacataataagataataaggatatgatttataaaattggtataaattaaagagtaactaaagaaaggtaaaaattaaaataggaaataaaaaattaatatatagtgtaatttcctctactaaaattggataaaagtccttattaaatccaataatcttaatagtttagaggacaaaaattctaattagcttttttatacataaatattcaaataaatacaaaaatattataaaaatacggatttaaagtttttttttaaacaataaccactacaacaatttagtgcaatagcggtggatttattagcggtggacacaatccgtcgctaataat

SEQ ID NO: 176958 - DNA, 1154 bp, Cannabis indica
gttacaattaggatattagggagttttacttcctcagagagaataacagaggtttgatagttacagatgtttatgcgcagaaaaataaaattaatttagtttaaattaagaataaatcgttaactttggcagagagaagagagaaaaaaaaaattaaaaaagtggtccaataatttctcataaatcaagaattctgttatattggcacattttatatagaatagatattaaagaatttaatatatggataattgtcacgttaataaaattaaataattttaatgaataagatgagtgcactttaactcgctcaaaaatgagacagcataaatctttaaattcaaaaattttaataattcacaataaaagatattaacaacctgaaaaaattaaaagtatgactctatatgtgtatattaaaattcaaataacaaaaatcttaattaatcaaatttaaatttcttaattattattttagtctatgaaagggtaatctttaattcttcttagcttcaaatattccttttaataataatacaataaagttaacatattaataattgtatactaatttttcacaatatttacacccaaaattttataaatacactttattttaataatttttactttacatagaatatatattttttaattatattaatttttttaaaaaaaaaatattctgtttcatactcttaaaaaaaatatatttatcaaataaaaataaattatattttaatgttataacaaacaaatgaaaataaaaaattatgtaagatgttattaggaaaaaaaattatgcataatttaaaaaattatgaaaatgaattttcacaaaataatatgagaaaaaaaatcaaaaaaatattgagaatgatatttaaaaaactatttttagcttaatttttttaaaaatattaaggtgtacttaatattttatggggtattaataaaatttctcttaatcataatattataaatttaaataattgtttacattaactaatttaattatgccacgtgtacaatgtatctacgtgggtaatccaacacagcacttaatagttaaaattagatgaaaatattacattgctaacagaatatgagttcaggaaattttacagtcaaaaattggattttggaagttagtg

SEQ ID NO: 176959 - DNA, 745 bp, Cannabis indica
ctgatcttcatataaatacactagtcaaacttgttctcgatgaaacccaacagtgtcacaaccttatcaaacttcaagtaccactggtgagatgcctgtttgagaccataaatggatcatttcaatttgcaaaacaaattgtcatttccattttcctcgaagccttcagattgagacataaaaaatttgctcactcaattctccattcagaacaatagttttaacatccatttgatgcaactctaaatcaaaatgcgcaactaaggccataataattctgaatgaatctttagtggaaacaggtgagaaagtttcagtgtaatcaataccttctctttgagtaaagcctttagccactaaacgcgctttaaacctttcaatctgtccctttttatcccttttagtctttaaaatccacttacaacctattggtttgaaaccatcaggtaataaaactagctcccatacaccatttttcttcatggagtcgatctcatcatccgtagcttctatccattttgaagaatgtggactattaagtgcttcactaaaagtgagaggttccacaaaatgaccaagatcatattctccttctccaagataaacaaaattatcatcacacttgttgacttcttttgtctctgagatctcttagtaggaggtacttctggaataacttctctttgattgtatcattgttttgtaaataacaatctttactaaactggaatttacttctaataac

SEQ ID NO: 176960 - DNA, 1153 bp, Cannabis indica
gaaaaatagatataattttatattaagaaaataaaaacgaaacagttataggcagactgacctgccactaatagtagtgactagctagttatgaatctcacactagttatagtgcggagtatcagttcgcgctagtagcaagtattacctaggggttaatagcaaagggtctcgccgctattactcttcctgatggactgagggattattattggtggagctctttgcttctaataacgataaatgttgtagtgttagttactaacattacgattcgaacatccttttataaaaattcgatcgggatactattttattatatgtgtcaatcctgcttttttatttagttatgttttaatcaaatattaattaatatttaaaggcaattataatacttattataaaatatcaaaatattttaaattatatttttttttttttgtaaaaaataataacgcaagcttttattagctcagcaaaaatcaagctacaagaaagtcaagcttcccttcataaagaccctttaaatcaagagctcattattagagctgaacatgaagctagggaggagtataatcaggtttccaaaagttataattctttcttgtctcgaaaggaaaaaatgaatttgtgaaaggatggtgatattaactctaaattgtttcatcaaggtattaagatgagaatattgaaaactactattttatgttattcattattaatttggaacatgggtatataattatcggagacagtcaaagaagctttcttagagtattataattagctacttagctcaagcttagaaaatagaagaactgttattagtagaattgtgagacaaggtccaatcattaatgataaccaatctttgatgctactagccttatacagaattagaagtcaagagtgctctgtttttaatactctaaccttgattcatgtttgtcatagaatatgatcaagtattgaacatggatcttcaatcaaccaaaaaatcttactttgatgttctttacaatgttacataaaaatcgaagtactaagtagaatagtgtgggctattctcaatacccttaatttttaaaaattagatagaagaagaaggaggaggagagagagagagagagagagagagagagagagagagaga

SEQ ID NO: 176961 - DNA, 764 bp, Cannabis indica
tttttgcatcttttgttggttttggcccgtatttattcgtactttttttaaaaaaaaaggttgtgccgtgccacaagaaaatatgggtcgtgtcgtttcgtgccaatatttttaaagggtaggcccagcacgacccgtaagctcgatattttagtgtcgtgctttgctcgtgtcgacccgtatttcttaaacatgctaacctattttcaaattcgagcttaaattaatactttactttttcatatatattttttacaattactaaattatatgtatattttaaagctttagttatatttatataacatttgaatattttataaataatcatataaaaaaattattaagattttgaatatttacttataaatactcaaatttttatatcacactctataaataaattaatatatcatattaattttccatattttaataggtttaattatagaactataatattcaatattatatttaagttttattatcattttaactaatttatatcgataaatttatatcttattattattattaaattataaatttttctaatatgtcgtgtcatgtttttgggcttgtcacatttgtgcttttcaggctggtttattcgtgcttgtgtgttgagcccttcgtcttctcgttccatgtcatgcttaaggcatattttcgtgccatgtgtgctattttgtgcattgtgtcatgtcatgcatagcctattttttcgtgcttagcgtgctcgtgccttttgtgctcgtgtctag

SEQ ID NO: 176962 - DNA, 1230 bp, Cannabis indica
aaagatttgaagaagtctcctcacttatttgttgcatctttcacacttcatgcccttttattttatttatttattttttattttttgctgaattatcattttacttcttttatacctataccacaaaatcagtaagatgaaacttaaaaaatgaattaaaagtaattatggtacgtttgagaaaatgaggaagaatttgaatccataatcttcaagaactcaaagacaaagtacccatatcccacttttgttgttgttgctgctggtgctcacaagccaaaggctccaaaataatgccataacaagtatcaaaccaaagaaacaagaacccattttttggaaagaaaaaaatgattttctctaatttttttttaaattttcccctgtattggtagtattgtttatatcaatgtatttatcatatatacaaatcattaattttagaaataattacgtaattacattttcacgtttaaagaattttttttacatttttacggttttcaaataaaaaaaaaaacaaaaaaactatataaaaataatatgaaaataacatcaaaacaacaacaaaaataacataaagataacgaaaaattaataacaaattaacataactataaaataaaaataccatattttctttcaataaaataaaagaaaattgtaaaaaattttaaaattctataaaattatatttttataattttttaattgtttttgtttatttgtgaaataatcccttaattaaattctataatgcaccttttaaaaagggatacactgatacatttttatatgttttagtatactaaataattttttagtcaaattttttctcagactaaaaattttttctagatgccgaaacaaatagaggataaatgagtgttggtattctttgctaattctctttagatttcttctcaggattctaatggctaatccagaaaaaggagtgctttacaacaatatcccttgtgattttcttgaggacattctctcaagactcgatgccaaatcactcaaactatgcgagtgtgtctccaaatcatggctctctctgctacgacaccatatttcatcaatctccacctacaccgtcaactgcctcgtgttgttttccctcctacaaaaggaatggaaggttcgatccaactttatctatttgtaattgggaaaaattttgttgagtatttctctgcacaagttttcctttttttgagtatgaat

SEQ ID NO: 176963 - DNA, 720 bp, Cannabis indica
ctactaatattaggaagagagtattgttcttactaagtatatatatctttaagagaaagtaagtaaagtagcaatacaaagagcaatatcagataactgaaagagaccataattttcttttaccaaaggagactctgccacgtcatcaccttcttcacctgatgatctttctttaaacccttcttcacaagtactcgaggcctccataaccgcgctcaaccaaaccctagccgtctcataattctgattcataaaagcttcaatcgcctccacaagagtggtcaccgcatcagaatacaaatccaagcaatcctttaggcgaatctccaaaaatggatccaaatcatttttagtagtagctacaataatattattattattatcttcgagaatgttcttgatggtgagaattgtagaggaggcgttgtctagagcgagctccatggcgaccagagctaggccttggagatttgtgatggcgtcggtgattggaacattttggagtgaagctctgcagaaattgtagctgaatacccctgatttctctgcgcatttcttacatgtttggtttattaataatgaattggttgaagaataatattgatgatgatcattacttgctttattatgaggaataattgtgagaataatgaagaagaaacaaataggagttttgatcatcatcattttttttttctattatgaaaatttcgtattaag

SEQ ID NO: 176964 - DNA, 600 bp, Cannabis indica
gtgagaaaatgaaacaattaagacaaaacgtgttgtgtccaatggacccttcatagccttaattagaatttagcaattaattagtacttaacatttgttggttctctaaaactcgaagctattgcttgttaaagttttgagaaaatagtactttcatattccagacttacaatggttcagttgatcttataattataaattatatatatataaataataatgtttcaatttggggttgtgttgtagggttttcaatggaattaatggggcaccatcttcatcattagtgaacggtcctgatgcaacctcgaatcctctcgatcatgcgtctctctactccccacccatgcatcttcatttataattttgagttttcttttaattatttgactaatttgcatactgaaaagttatctaaaaaaacagagtaatgctatagatgctaaaaaacagagttactaagttttggtcaaactagaaaagctatatgaattttaatccttttataattgcttggtggaaagcactaaaattttgagaaagctattgctattcattaatatatatatataaaatatatatatatattaattaaaaaat

SEQ ID NO: 176965 - DNA, 798 bp, Cannabis indica
agagacttttatttaagaaaaaaacaaaaactattagccacagttgtttgcttgttcttcttatatagtgtctgacttttgagttcagtttcatatctttatttgaaaataaaaatccgtttcataaatacttcttttgctttttttgtaaatggacaaaaattttgagagatggtatttatgagaaagtactttcaacaaattgtccaaacaaaattcaaatatgatttactcgaaaaagaaattctgacaattacatttcattttctctcaacaatagtggtcgacttatttcgttgagttttaaataaagtttgatggatttagattgtctatcatggaatttcttttttcccaataaacttatcaactaatgaacaaatcttgaaacctggttttaaaacaatgtagaatttacatcaattaaacattgtcaaaataaattatatcaaatcttaaactcaaaaaaaaaaaaaacaaaaaaggtggggtgtactaaatttcttgttatgaaaaggagagatggagaacaaattggactatatttatttaaacaaatcagatattataaataaattaaaacaaagttggggcaggaagttgcttagcaccttctcttgtcactttctcaacattttgtatctttaccctccatactattttctaccatatttcctacataattgtaattatgagtttttgaaataacgattttagaatggaaatttacataaatggaaatgagtagtggttcaattttggaataattatatatcacactattttttttaaaaaaat

SEQ ID NO: 176966 - DNA, 800 bp, Cannabis indica
catcctcttcacacactcagccatctgccatttacaaagccacagatttcgcacccagcaaccagcgttcaacctccgttcatcatcttcaatccccaccatctcgagctgtcccgcctgactcacaacaccatagttgacccaaatcgattcccaccagcaactgcatctcctagccatttcctccattcaacccgagccacctccaagtcgataccaacccaccagaaatcaccattgtccagtcgaccagcctgcaaacgtatcaccatttcccactcgcctgaactccaaccgttcaactcagtttaaccatcaactaagtcgaagctccaccgtgaccaaccccaccttcgaaccaccaactcacctgaacccgtagccacagaaactgcatcatccaccccttaatcgcacaccattcgaacccaacagaacccatctcagcaacactcagttcaccatcttcaacccgcaccatctcgagccattccagtcgaacaccactcaacccgatccattgctaacccagcttctatttgtcgagcccttctagcaatcacccttaaactcgcaccacccacgacttcaccagaacacacctccgagcatcatagtccctgcacatccacgaatccagcagctcgcacgaaccaagcatccacctcatgtccatccatgttcgacagcaagaagtcaagagtgagcttttgaattttaattttgtttttggagaaattcttggctgccgtatatagtgttcatgtgtggatgttttaatttggttaaatctgatagtt

SEQ ID NO: 176967 - DNA, 705 bp, Cannabis indica
gatctagtttcaaagtaagagaagctgttaaagaattcgaaaatggattccatggtgatgccgtcgaggagttctgagctggcaccacaccaggatcggagccgaccgcctgagacgagttgtcatcgggggaagccattgacgcaagtcaagggctctgataccatgaaggatttaagcagaggaagaaaagagaagaacagagtttgttcttgcagagagaaaatgaaaagaagctcaacttttattaatgaagtaaaggtgtttatatacaccaagcattacaacagaaccaaaacaattacaacagaataataacaaaacaaagcaaaggaaaataacagaactgtaactaaccaactgtcaaaacagttagttagttaacaacatttattagacaactaataaatattttcttaaattttaattttaaagaggccaactaataaatgtttatcaatgaataaattaaaataatatctggtacttaattcaactcatcttatttcggttttgtttaaacgtattttggttttctagtgctctagttaaataagatcaaatcaaaagtaatctaaggaaacaaatctcgaggaaataaattgaaaaataatcagaaattaaaaaaattaaaacgtaacggtttaagttactatacaatagcgttgatcataatactctacactgagagtgcaaatttaaaaa

SEQ ID NO: 176968 - DNA, 1077 bp, Cannabis indica
ctatgcaatatcattagtcatttgtgaggtattatcttgtgctagtgttaccaaagatgtattatagtaataatattattgtagttatataaatatttgattttcccaattgcaaagagaagttccaagtggaacctattttaaataaatataataatagattgaaaaaaatagtcaaatgtggaaatttgtgtatacttgtatatcgagctttgaattcttagaagacgtgattggttatattatgttttatatgttaaaaacttgtattttgtttccttaatgatgggtttttctcctaatttgaaggagcactatcattaaaaataagatttaaaattatgtttattagtcttgaaaagaagaaagagaatagaaaataaataaaaagacaaagtacatattaggaaaaaaaataattgacataattaattaagtagaactatacgtttaaatgggcacattttttatttctatattggtggaataaattattatttttatgaaatattctaaaaattattatttgatagttatatagaataatcaaatcaaaattaataattattatatatagcttcggattcttagaagacttttgttaattattatgttttaaatatattaatttgactcatctactacttacctattttttccccttaatgattgttttctctcctaatttgaaggagcattataattagagaatatgattaaagaaaatgattatgttatgttttccaatcgaatccacttatttatatacatatatataaaataaagtttgctaaagggtacgtaggaaaattacttattaacagaaataaatagaatagaaaatgtatatttggataaaatagaatagagaatagtttgtggttgaaccaattaaatctttactgttttggttattatacatttataatgttttaaaaaataaaacaaaaattaggcacggtagtacaattctcctgtttatttattagtcaaaattgtcgttcttaaaattattgtcgtttttatatatttatgtcgtttactcgtttttcaatttaaagattatggaatcgaaca

SEQ ID NO: 176969 - DNA, 516 bp, Cannabis indica
gtttagccttgttatgctttgtatgaattatgccatttatgattgctactaatgcattttcctttttgaatgtcaattatctatcttattgctcgtgggaacatgataagtattgagcaccaataggcattggccggtggctatcttacaagttgaattttaaaagtacatttttggaagatgtatatcatgaaatattattagaatgcatatcttaaaagcatttgttgtgaatttcatgattttattttggtaatggcatagttatagtccataaatttctacttgatagattctgagcttaactcacaatagattggtcttaatcctctttcatgagttgcatcattttactactcgagtaaccactgcatttttctacacctagacctcaatacatgaatgttgcataagcagtgcagatttctttcacccttttaatggtaaggagttctctttgattttcctttttgtggaccggtgcatttgggttgatataaatatatatatacatat

SEQ ID NO: 176970 - DNA, 711 bp, Cannabis indica
atattggccaaccaagtggcctactgatcctgaagctgcagatacaaacactctctcacccttcttaggtttccccacttcaaatagcccagcataagctgtcaatccactaaaccctaaacccaaatttaaaattaataattaaacaacaaagaattgtgttaggtactctttaaaaatcataattaattaacatgaaaaatgtggctggtgagttatgaaataaaattaccaaatactccaatttgatgtgataatggaaaccccatatcgaaagagtttagtttcctcaacacatattcagatgcttttaacacactatagtctgcccatctagtcgttcccacaaccaagtcatcctccttatacaaaggattctcagaagctaccactttggccaccccataagcactaataatctgtccaatttcgttaatgcatatatagatatgaaataagaatatttaattatatatattgtataatcaccatatcagattacatagtacaagtatcaacagacgctaaaaattttcacatggacataaaaaaacaaagaaaaacatttgtgatcgcttagctattttaatgtgccaaacattccaaaataatttaaaacagtcaagtatatttagatttttttccttatatattttaaattatttagacattctactactttcaaaaaaaactctaaataatttactatat

SEQ ID NO: 176971 - DNA, 653 bp, Cannabis indica
gctggaatgatttgggaaatgaaaataatttggcaaaaataagttcttgtgccactgctcttgcatcttgggggaaggagattatagggaattttaagagcagaatcaatagctgtaaacgtgaattgaagatgttgaagaacaagaaagattcactgtctatccaatgatacaatgaagtcaagaagcagctttttgttgcccttgatcagaaagaagccttttggaaacaaagagcaaaacaattttggttaaaggaaggggaccaaaatagtaagtattttcatagagcggccagcaacagacggagtcacaaccgaattacaaagctgaaaactgatagtggttgttgggttgagtgggagcatgggttggaagatgtggttgttaattatttttcccagttgtatacttctgatggtagtgcttgtgaaaaagtgattgactgcattcaacatcgtgttactgcccaaatgaatgaggagttggctagagaggtttctgttgaggaagtaaagcgagctatttttgacatgcaccctaataagagtcctggcccagacgggatgaccccaacttttttccaaaaatgttggatattgtgagcaaagatgtagtaaaccccgtccaacgttatcttgataaaggggtaa

SEQ ID NO: 176972 - DNA, 977 bp, Cannabis indica
tgttattacttttgttgttgtttaaacatagatgcttttgtttttaatcacaaatttgagtttatataattttggtatttagatatcatatggtattcaaataaaaaagaaaaaaagaaagaaaaaaaatagaaaaaaaatttaaaactgttatatgaccaaaattgatagatgtttctttattttgtttttagatacaatttggtatattttgtgtgataatgatagatgtttctttattttgtgtaaaatccctatattttctaatttttatttttttatttttcataaacatgttttattgctatttatttattgttgttttcttttattttattggggatttacttttattttatttattttttttagagttaaatttaggaaactttgttctagttaattaattaatagagtacataatataaaacttgtacactatttttaaaaaaaattctaactactacgaataaaaaaaaaaagaaattaaaaatttaaataacaaaaaaaaaaacaaacaaattttgtaattaggagcggaaggccggtgaaacctgccctataaaagagatggaatatagaaaatgaaaataacacatttcctttggcgggaaaaatcaaatctagcgtgatctcgtatcttactctttgaatttgggagtgaccgagaagtgagaatggaagatactcgaagcgacaccgtcttcgattccctcaatctcaatcctcagcttttcattaatgaagttctcaataccgtcgacgacttggttgacgacgctttcaattacttccaccagtaagcagtaactccctccctctatctatatacatatacgtatacatctatatctatctatattcttatgtatgtacaaacctgtagtccatatgtatgtgtataaaatattgatcattaattttcggtatactccagacaggcttcatccaatctgaaaactgatggccccgatagg

SEQ ID NO: 176973 - DNA, 855 bp, Cannabis indica
gtgtatattcttgtacacatgacatgtttatattggtacacctaatattattatttaaaaattattttaaaattagataaaattataaaaaataaattgaaaaataattttttttataatttaaataattttatatttttaataataatattatgtgtactaatataaatttgacgcgtgtacaaaagtgtacaaataagcagtctatattgacagttaactgtgaaaaatagatgatacttcaaatttgttagcagttcaatagttttaaggattttaccgtcaaaatttaaatttagaaagttaagtgtaagtagagtgatagttaagtgtaaaatgtttacccctgagcactatacaactcatcaaaccattctttgaattgtgctctttggcatattttttttaaattaaataagaattttatattctcagggatattttttgaagaagaattaaaaagaaaaatgtgtgcctaaatgtgggaagcacagcagagcgggcatagtgtagcatgggctaataaatgttatctgaaaataatccaaatgcagataatatatgaaatggatcgatcaacacatgacccaaaaacatatccacattatacgtacgtgcatccagcatagcccaaggccccatcaaaaaacctatattgaatagataatattccctgctgatctcctacgtctctcaaaatattaattcatataattataacattacaaaatgaataataatagctataataactggctgtaaccatataaatatatctggttcattcatttgtatggtgtatagacataaataatcatcttcttcaaataccactatgtatatgtatatgtaatt

SEQ ID NO: 176974 - DNA, 705 bp, Cannabis indica
tttaatgaccttaaaagttcagggggcatgatttggtacatgtcaaagttcagggggcaaacctaattagccttcaaattattagaaaacagaacagaagatttatgtttgctacaggtttggcccgaccattcttcataggtagcaagacattttaaaagttcttcagcttctttctcattggcccgagcaaaaagaatcgtattacttgatcaaaaattggccctccttgcacagtgattaatctccttatttacaggtttctcacatggcagttatttcttttggacttatcttaataactattcatgaaacgtgcataatccccatgtttcatacaattataaagtgtgataaaaggcataaccaccaagtaaccgtcacttagttttatccaataaataatttttgttctccgagaaaccttcctaaattatgctgcttatgaataacttttaattcttcatgtgagtttttttaagttcatctcgtattttaaatatttttacgtggtgactcatctcatcttcgtatatctcgtattcatttcaatgtccaggctctatacttagttatctttaagatgattataacatatgctattttattctcactggctctctatttaacattaatatcttttgtaattacctttaattatcttataaggtaagacttaaatataaaattgcttctataaaaaat

SEQ ID NO: 176975 - DNA, 646 bp, Cannabis indica
gccaaatcagagttccaagagacaagttcaatatccattgaactccgcctcccaccataattgacaattcgaaacaaatcagagtacttgggcacaatcctaatcaagtaatcatcagaaaacccgaaattccttttcagctcattaagtttcacaacattgagtctgtgatttgtgctcatcatcagcaacttcgccaatcgctgcacaagcacctgttcctgcatatccttgacagtttcttcctcctccaccaaagccatcatccttttggttaaccgacagtaatactcatcatgttggagaaaaacctcaaagcaacaagggtattttttgacccaattcatagcacttccctggagatcaagggtcttgaactttttctggaggaatctcagtggtagtatctgattcgggtatcgaaggactatattcttaatttgattattgactatccatctacggtttctagagagagctgattcaagatcagggtccttcttcattgaccatagagaaaaacttcgacaaaaatacttaatggagggtttatgaatcaaacagttcagatttctgatatgcatcaattacttatcacaagactgtctctgtaaaatgcacaagaacactgtcaaataaagtgtaa

SEQ ID NO: 176976 - DNA, 615 bp, Cannabis indica
cgaatttggattggcctaaaacattggatgtggtctaatgaacacccctagctgagtctgagacttacaccaagttatatatttccttttagtctcactttcttcatcaacttgttttggtatctatggaggactcttttatgattagcttttcatttttctttttactaattagataaattctaacaagttttgtttcatctatttatttgtagagaaaatgcatatcaatttcttgcctttttttttcttaatgagcatgtcaaagtcttcatctttttaagtgagatttgttgattttattttttatattgcttcaggcgaaacccgttgggggtttttcactaatttactacaatttattatttttttattaatgattctattttttattcttttttttttttttttaattttcttactctatatgagctctggcctttttgactgtttatttaggtttttattgatatttattttatttatttttttttaatttgaggaggttttattgatatttttggttgtgtatatatatgataatttttatttctaattgtcttaatttattttagtaaatagtaatctctttggtctaataagtggaatagctga

SEQ ID NO: 176977 - DNA, 509 bp, Cannabis indica
actttaattctcaaaattctttctagtcatgaacatataccaaaatttcagcccgacctcttgcttgggtcgtttagacccgttttcctgcaacgcgggtcacacggacccgactgaagacctggtcagaatttacaattctaacgaccaaaattcatgttttcaattccaaaaagatgtaaatgaaataattaagagatccatgtaagttttaggaaatgaaaacatgtaaaaattaaactttaatttcaataaaaatgggtcgggtccgaatgagttcttacaaaaaaaaaaaaaaattccaaattttgatggttttcaaaaccttttcatgcatagattaaatgtataacatcatatgaaaatgataaggctattaatattgaaaaacgcatcaaagattcaaagaaaataaacaaattcttgaaccaccatcccggaaaacacgtaaacacgtgaatatatatatacatatataattatgtacagtaatttaattgtttaaatac

SEQ ID NO: 176978 - DNA, 665 bp, Cannabis indica
aaataaaaataaaaaacataatttatacttgtctcttctcaaagaactccaaaatcaaatttttatgaagagaatagaagttaacagacaaattttttctgtaaacttacattttgacacaaatgcaaagcaactagagatttttttttcaatcgtacatttttttggaacttttcctaatgcaactaaatctcaccaaatgcagcttaagaactttgcttcagtacaattccataaaattcatcaaaatttgtggtttacattttattgtactgtatcaaaaataagaaactgctttgtcaaagagtgaaccaaaaaaatttctctgtaaaaattattgtttcatcaaactttgtggttcacattttagtccaaatgtactgctgaatagatttttttttttgaaacagtactgctgaatagattaataaggtacattacaccatctagaccaagagcatggacaagtacaaaagaaatctagactaagagcatcatcaagtacagttaagcaaaaaaataagtttcagtccaataaaattcttgccagaaaatttgtagtatatttctttgacattccaatagaaagagaccttattccaattatcagcatgaacaagctcatactcaacatgggaagagtatgccatcccagtcatttttgt

SEQ ID NO: 176979 - DNA, 745 bp, Cannabis indica
gtaaaaaaaggaataaaaagacatataaccaatttgatgagagaatatggcttcatattactgaaaaatggatacaattaacaaaggataaagatatacaactggaaagaagtagctacactggaattggaaatattaatttaaagaataaattaaaaatatacatgtaattcataactttgatacactccatgccttcttgttctttaattaaagagacataattcattgttcatgcctctcttatggatgaacttgtagttgggtactaatgaagtaggtccatcttcaaatttaatggaccaggaaaaaaaaataatttaacccttatttagaaaaaaaaacaatatattattttttaaaatcagtaaaaaaatatatatttttaacagaaaaaaaaattaggctcctaaaataagtagaccctaagcacaaacctaaccgcctacaccaaaagcaaagcctgtcttgaagtttttcaagctagaatctcttccatttgcatgtagttatagtgtcgcgagttactttctcaaagattttttgtagctacttttttttgtgcatgaaaaaaaaggaatcacatagtaaatctttcctctactctttcggtaggtttgacaatctcgaaaaccacatgtcagctactcattctgtcttaatttgattatcaatatgcatcttattaggatgacaccatcacacaagctagtctcccataggatcaagtcaatcctttgaataa

SEQ ID NO: 176980 - DNA, 734 bp, Cannabis indica
atgggttgggcctgatcagtactcttgtaatttggggcccaaattttacttccacgaccaaccgtacttgggcccatgacaatttgctggggggatcttacaaaaatacccatttcttttgtctcttttacaattttacaatctttactattcttttttttttacattttcactatactaagttttcaaaaatactgtaattaagtttcaaagatacaaaaaggtgactcacgatagactctcccgaagcttgattaacaatatccaaagtgttcaacatgcacaatttacccaagaaacaatacaaagtaacacaataataaaatactaagaacttgttggactcaagttcttcacacatcaaagaaaacactttctaactttgaacagtaatatagaactgatacaccaagagagctaaccaatactaacgacttaatgatgtatttatacactttagaaaccctctatgttgtggtcaagcaaccaagagacgatcaagttataaaataaaaaaattttccaaaaaaaggaaagtacaaatctatttaaacagacaatcaatttgttcaaacaaatacagaaaacttggacaattttcaataaatttctataaataaataaggtcaattttgataacattaaatcccataaaggtttctggtaagaaatcaaatccaagaatataaatagataataagttcttaaaaaggaaagaactaaaatcaaatatt

SEQ ID NO: 176981 - DNA, 763 bp, Cannabis indica
gctacaatctttataacaatggcattcaccaaatctacaaatctaacatcagactttaggtattaatttattgatgttcttgacaattaattttgacaaaagaactataaatattgtttaaattaatactacactacggtatttgtactatattttgaaattgactatgtaacaataaagagttagccatatcaaaaaatttgttacctgcaggacttttctgctatgtaagtctcaaaaggaatgaattcaactcttgtgattgacaaaggggaatatgctaataacagaagaggaagaaagttaaatttgccaagattataaattaaatttcatactttcctagtgtttatcaaggttgattaactgttactaaacaacagctttcttatgaaacaagaaaataactatataaaacaagttacacctaagaccttttattctaacaaaaatactggagttagggcatgcaatatatatccaagttcaaagtgagtcaactcaacttttccttccatatagcttttccgtaaatgtatcagttgatggtatcaatatctatattagtgagggtaatatcaatcgtatatatttttttagaattttaacttctaagcctaaaaaattttttttatttttgtaaataaaaaattaaaaaaaaaaaatacaccactaatttctacataaatcaagaattaggttatataggcactatttatatagaaaatagatattgattatcatgaattaattgaatctcttg

SEQ ID NO: 176982 - DNA, 546 bp, Cannabis indica
ctctcttttccttgtcgaatgtttgtttctcggtgggcggtggtggaaaatcggagcacaccccaatcactcaagaatcttacaccattataatgggtaagttgtgttttaagcattttgttagactttatgtagtttgctttcgttatatgtgttgtatttattggaactggtgttttttggtctgaaatggtagagatttggtagatctggttttctatcgaaatttgagtttcccagatgttatcgacagtttatcgatagaatatcgatgctatgtcgatattctacgaagaaaggtcaaggatgaccattatcgacatgttttcgaccgtttgtcgatatcatattgataaaaaagcaaattaaaatacataagttatttaagaatttgtcgacattttgtcgatagtatgtcgacattaagtcgaccaacattgtcaacaatatatcgatggaatgtcgatatattgtcgactttaaaggaaaaaaaatgaaaaaaaaaagacgtttgacataacagacattaaaaattccagaaaaaaa

SEQ ID NO: 176983 - DNA, 525 bp, Cannabis indica
ggcaccaccacatcagatggtggtgcattgactccaatatcagaggtaatgtcttgaaacaccatgggatgctcattagagaaaggaaacgctttcttgctaagccttggtgttggtggtgcgtaccgaacagaggtagccggagctgacgcaagtggctagttaagtcgaaattgaagcctgaggtgattgtgatggtcggactttagatgcagcaaaggccttggacgatgatcctcttcgggtcttcaccatttttcctttttgcaaagaactgaaactcaagctaactcacacactaatttttagagtagaaagcacaatgaagaagaagagaatagaaatcgtgtgggtaagagaatgtgggtgagaaattttaataagacaagacattaccttttttgaaattaaccaccataaagtagctttttttttttttcaaatgaacaaaaaaaggaaacttaaaacaagtacccactcacacacgatcaaccaacaagttatgcctttttctttttttttttt

SEQ ID NO: 176984 - DNA, 664 bp, Cannabis indica
ttacattattgcatgatttattagtccctttttctttttgttttctttggagacagacccagagaacatacatatgtcagttttgttaatttacttcaattttatgttcacttgatttatttttggccgttactaatattcttttggcgtatttgttttccttattggctatggaataggttcaccgtatgaaccaagctcttagacctcaacatggaacttttgtgatgtaagttgtaccatataacagagcgaattccccttgttcggactttcaagggtttcttttgactgcttgagaggtttgcttgagatctttaactaaaagcacaatctttttattaagcataaagtaaagattgatatgaaatatggatttctcaggcttcatgaactttcgcatactcttttatatagatttgatgaaatatatgacagtaatatgagaagaatgttttatatggacatcacttcactcctaaatccagtcctatcattctaattatgtatgtgtgtgtgcccctttccgaaactggatatattagatgcatttttgtaggggtctcgatagcactagctgtaattttttctcatttcactacatgtctctacaaggtgaggttcaaactatataaatagaaacataagcataacttagtttcaa

SEQ ID NO: 176985 - DNA, 620 bp, Cannabis indica
gccgcaaatttccctaaaaaatatgactaatttacctcccaaggaaaaattaaacttcaaaaataacctaggggcataatggtaattttactaatccattaaaccaacattctaaaaattctaaactagtccggaataccctcaaaataatccatccattaatgtcgtgacatttctgaccacatcgtgaagtttccacagtcgccaagcccaaaaaatatatttatttcaaaaatggtatcctcgatacccacatatctcaatataatcttcgtaattaataaattacgctttatagaatcatttaataaatcctcgctaattaccctaagtaagatcataatcttacttcattaccaaaatatttacatatttaataaaatatgtctaattaaatactatattaattttcggtaatattacacttgttgtatgtgtgacattttcatggtattcacacattttatttggatctattttgtttttaccttcccttatacactagaggtggcttcttgtaatgagatgtgttgctcctagctcggcagacattctcgaatgtgtctactagattagtatatttagaatacagggatttatatccttaccttactttcttc

SEQ ID NO: 176986 - DNA, 1000 bp, Cannabis indica
atttatataaatattttaaaaaattaatatttatattaaattagtgataaattagtgtttaagataaacaattttatattattcaagtatttttattttactattttaattatttattaaataaaaaatatgacaaaatattttattatatatttatgatatattcttaattatatatgatatattatttttttttgctacgaattatttatttatatttatttattattatatattttaattttaatttattattatatatttttatttaatttaagtttttttttctaaaaggaaataaataaaatagtccagtccattcttaaaccaaacacaggattactttcagcataatccaatcttgtccagtccagtccaatccttttcagtccaatccagtccaatcctgcgtaccaaacgggcccttatagtagaattgttaatatttatagagaaattataatctattttttctttttcttttgtgtgacgagatatcatttatagttacagtaaatatttatcctgtatgtatatttaattttttttgtgaataatttataaaattaacactagtattcaaaataatcaattgcatatatatataaaaaaaatagattcaagtataattaaatgtttaaattatattttaaatacaataaattatttaaaaaattaaaaaacaaagtgaaatgcttgctatagaactataatgtatactcttatgtaaaagtttgggttatatataatttatttaatgccaaaaataaagatactactgatcatatggataaaagtgacgtcctactatataattttaccttaccataccatattacaaaataaaatttacataatgaatcaaaaaataaataaaaaaaataaaaacaataatgtcaaacagagacaaaattttcaattagtaaaaaaataataatataccgatttttttttgtttgcttttatagtttatttattatatatatagttgtattaatag

SEQ ID NO: 176987 - DNA, 599 bp, Cannabis indica
atacttttatgtgctttaatcactaaaatacttcttacactattacttacacaatcagacgatggttgcttggtggttggttgaaggttgcatcagacgaaggtttcaatttgttagcaaaatgcttatgcaactattatgaaacatgaaaaatcataatagtgtttccacgtacgtaattctatctacatattacttcatgatttaatatgaacaaatttaccttaaaaattcggaaaacaacgaaaatatactaggataaacatttcactatagtattaacgtaatttttttttagattatacttgagttagctggtttgggaactttagttcaactttttgaaatctgcatttcatggatctgaaaaattgatgtcaaaacattatttttatgcaaattaaattagattttcagttaaattttagtttcgtagtagtttttctacattttttcatgaattcgaaacagccgctgttttgattgattttggtcgtcttcttaggtgaagtcgccgaaattaatggtggttctctttctggttgaattttcgttttggttgctccgtggttgcgcgatggttgccaaggaagcatgga

SEQ ID NO: 176988 - DNA, 815 bp, Cannabis indica
atcaatgactcaatgtgaatgatataatgtgactggaactaaatttaaacgaaatacatccctttctagaaatgcacttttcgcatttggtcacttcgagaaattaataataataataatacagataatgatgcctatcaacgaaaagagatgtataatactctcgaaattttgttgtaatatgatgtagtagtgagaagaatatcaccaaaagtaaagggaaaaaacaaacaaacaaacataccatcattttgtccaaaggcatgcatttatcttgctattctaatcatcatgtggggataatgtcttaaatttccactaactttaccacttaaataattgaaacccccaaatatactttctcacttttggggatgacaaagaaaaatgataatcaaactacagggttttattttcaatataagttttttggggattcagtcaattaattttgaagctgacaacaaagctatgtacttcaatccatttgacattgcaggtatatgaccctagatcctcattttttccctgaagacttaaatcacgttaaagtaaactaaattatcatgttgctgactatttactgccaatgatatctaactcatgtaacttttttcttttccttttttactatggtggacctattgatcactaatctttgtcgttcaataaaatataagtttttaaaatatgttataatgcaccaaaaatccacaacatcacaacatattatatcccaattaagtcttactatttattttaataattatgtaatgtaaaaatcctactacctatttgctaaggcactcgtaatg

SEQ ID NO: 176989 - DNA, 547 bp, Cannabis indica
ctctctctctctctctctctctctctctctctctctctctctctcattgaagacttaagctttatatttttactgttttgattgctattaaatattaacattacataaaatattaaagactactagtgactaatgtcaatataaaataccatctaatattattatttgtataattaaatattaagttatatatatttttatttaataattattaagtaaaataattataattcgcaaagaactattttataaaagtttgtttggtagatcgtataatgatcctatgtatatttggataaaataatatattatattaattattatgataaaaaaatttaatacaaagtaaattgtattatttaacacataaataatactccgtattaattattattatattatttataaaggatctggggtcaatttcaatctccaatacagggacctagaccggatccagattggacttcggatctctcgaactcgtaccttagaccctaaacctggagcctagacctgaaccctagtctccgaactccaaacccag

SEQ ID NO: 176990 - DNA, 503 bp, Cannabis indica
ttttttatctatacagtcttaatagtttggttgatttacaagtttctctttttattattacactttgagatacaaatttcatatttatataatttgttaaaattaattctataatctaaaattctaaatatttatatagtaataatctatctgtaatatttttttaaataattgtttttctgattcatttatttagtgagttaaacatatcaagctgattacacaaaaatagtatggcaacataataaaagatacttagatacactactacaaaaaccccctttagaggcggtttttaagccctttcagcgtcggtttttgcaaaattcgctaccgacgctgatcagggcgacgctaaagggtttatatgaaccgacgccatatgtacccctatggcgtcggttattagctgggaaccgacgccataggggtacctatggcgtcggttcctagccaataaccgacgccatatgtggcgtagcaaccgacgccataggtacgcg

SEQ ID NO: 176991 - DNA, 953 bp, Cannabis indica
aatatactacctttcagttatttcaaaatatatatatgtatactacctttcagtttttttaatatattattgcacataaaaacggtatactattgtgcaaaataactatactaaacacttaattattcaaggttataattgtaattttatcatcaaatttttaactaaaaggatattttgttaattttttaaaaaaatagacatttattaacttaattgttagatttagggtcattttgcatcttgttgtgtttttttttctttccttttttcctatttagaaaatgaaatattgaaattaaaaaaaaaaatctcaaatgtagaagcttttttttttttttaaaaaaaaaaaacaagaaactagaacttggttttttttttactgcagaagttgttttttttaaaaaaaaaaactgatgaaatactaaaatacttttattaatgtaataaattaataattctatataattaaaaacgaatatcttaacggttagaaatacaaaaactcatatataaatggaataattacataagacacctttttttgtaaaatatttctatttttacgtttaaggaatatttttttcttacatttttactgttttctaaaaaataatacgaaaataacataaaatcaacaagaaaactacataaaagtaacatcaaaataacatcaaaaaataacatacatataacaaaaaaatcaacaacaaattaacaagattacaacataaaaaagaccgtattttatgtaaataaaatcaaaaaaatcgtaaaaatatttaaaattccgtgaaaccgtatttttataatttttttgttatttttatgtttttgtgaaataatccctatataaattttacttgcttcgtagaagctttaatacttgaccaccaatccactaccaaaaaaccaatcaccaacccaagaccaaaattaaaaccagatacaaa

SEQ ID NO: 176992 - DNA, 906 bp, Cannabis indica
  modified_base (768)..(768): a, c, t, g, unknown or other
cataaaaaccctattgtaactaacggaacaacttaaaccgtaacaaaaattcatatagcaacccacatagaaagcaccgaagaaaccactttaaaaacacaaatcgtaaattaaaaaaaaaaaagttaacaaaatagtatataagatgatttcccttataataccataatttaatttgaaaataatgaatagtatattaagatgtaagcaaatttttctattaagttatgaagtaagcttttatactttattgttaactcattagtttttttaaaaataaaaaagacaaaaaaaaaatagatttaaaggtaacataaggttgctgaaaaataaccaaaaatatcttcaacaataagactatataagtattatttaggactcgatgttttgcaaaagtattactatcgaaccttttaatttaataaatgacaattcaaattctgtatttatcgaaatagtacataataattttttcaaaatctaattttagtcaatttatatgtagacaatttctagcacaaataaatgttattttgatcttctattttttgctcaaggtattatattattctattttaaaaagtgtagggtccaaatattatcattcaataaaatagataaaccaattaataacttttactaaacacattaaccaagcagtattataccctaatatataacctaaaaaataaattcatagtttaaaagtaagtagctgaaataagaaccgtaaaatattttttatcaatatatattttactattattntttataatttatgcttaattttttatttacagtttttacaaaattattgtttcaaaaatacatacttaatttttaaaattacaaaaaatcaactttctcaacaaaaaaaaataaaaagtagaagaaaacaacgagaaa

SEQ ID NO: 176993 - DNA, 542 bp, Cannabis indica
tatgtttgggcataatcaatttacgccaaacaattcttgcctaatcaacttctttgtagcatccagtaagtttttgttaaaaaaatttagcccagattctaccttttttgacagcaagctttagattttgatcgtttgttctccctcggagcctcaacaacacacttgttgtgacttgttagtgctcaaaaaaaaatgagatttttcataaatatagaaaaaaaatttaaagtttatttttatatagcataaaaaataatataaaaaacatatgaaattaaaaaaataaacaaatttaattttaaaatatgggaaacaaaacataaaaaccataaataaagttgatagaatttttaataacaaatatcgcctgggcagacattgtcattaaaaaagtcactgtcacccgaaagttactggaacaatcaccgtcgctgggaattcgccagaagagtcatcgatgccaagaaaataatcaaaaaaagtcatcgaagttgtcattgtcgtcagaatagttatcagagtttccatcgtcattggaa

SEQ ID NO: 176994 - DNA, 314 bp, Cannabis indica
ttttgagcatggcaaaggctataaaccataggggaacaaggaggggaagccttggaattcttaggtctattgtgggaaagcttcagtcaagtcttttgtccagaggagtgaaacaaggccattttgttgtaatagctacagaaggtcggaagccaaagaggtttgttgttgaacttggttatctcaataatcccgagttcttgaagttgctaaagcaagccgaagaagagttcgggttttcgcagctagaataaataaggaagagaatatgtaatgcaaaaacaattgcaaaatgaaagtactgcattgcagtg

SEQ ID NO: 176995 - DNA, 589 bp, Cannabis indica
aaaaaaattaaactagtttagactgaggaataatttacaaacaataactaccctattagtcttggttataagattcttaatcctgaaggcgagatgatgaaatggtatgaacaaatatggagtaaatataatttctaaacacaaaattattttttggttagcaatacttgatggattacaaactaatagactctagaaatttaacacttgtcaagatattgttagcctgatttgtgattttaagtaatgaaaatgttaaatacttatttttgattatcactatatttgtttgtgtttagggactatatcatgaattaacttgattggtcagcccataaaaggaacattgatagattattgagatagatctcttgattgcatatcatttttttcttaagtctattcaatggctcttactacgattgtttaccatgtttgaaaaaaaacgaaattcaactttttgaatacaataagtttctttcaattagttggttgaaaagaaaattaaagagatagtgttttcgatattgtttaaaaattaaagtatcatgatagataatggtttgatttgattgtgatcttgtataga

SEQ ID NO: 176996 - DNA, 626 bp, Cannabis indica
atttggtgtaaaacttgggcttcaataacccgtcaagcattttgttctctgcaaaattctgactttaccagaaaacttaattgaaatatgttttagaaagaaagatggcgcctttactttatgcagaatagtaaagagaataaagattgaacatttgtataaataaatttctttaaactactatggtaacgaaaagaatgactgtaagtagcaaaaacaggaattgggtcacgtcaagaatcagcattgaagaaaacccagtaacgaaagaaaaatttacttctcttggagagaaccaattaagaagttggaatgggaaaaaaaaaatgggtgaagcttctcaatataaaaagaagctcagaagctcacatagaagaagacgaagacgaaggtcaaaatgcgttgaagagggtttatagcagaagaaatagctgagccagaaggaagaaatggcgtagagaaagaaagagaggaagctagagagtcaaataagagagaatgtagaagaatgattctgtagagagatgaatatatatattatataatttttaattaaattgtaattataataattattatccaaaaataataaaataaaagacttagcaaaagaaagaaaaaaaaaa

SEQ ID NO: 176997 - DNA, 764 bp, Cannabis indica
ggtccaaaatagtatttatccttgaaaatatcctttcaaaatatatccttagttttttttttttttttttttgaaatcaccttaagttaatagttaataatttaacttggctttcttgggtaaacaaggatggcagcttatctctaaacctaattctcttgtgtctcgtatttttaaggcaaggtactatccgcgaggctctttcttcacagctaatattggagccaatcctagctatgtttggcgtgtgttcttaaagctcgccgttttggtggttaaaggggtttattggtcgtaatggggatggcacatgtatctcggttttgggagatccttagttacttgatactgtgaatcccttggttatctcatctcactctgctcttattggtgccaaaggtttgtaatttattctctatagatggtacgggctgggatgaagagctgctagcagacttgtttgagcagcgagaccaagctttgatcttctgaactcctctgcaacaggatcgtggacaagattacctcacttggataggagaaatttttggtttatatattctcaagaatgcttacaaaatggcacaagatatgcatggtgagaatatccaagaagaggcagtgattgacagtttttggaagaagttttgggggttgaaactccctccaaaaatgaaaaatctagtttggagagttggacaaggttgttttccaaccatggttcaacttcgtactaaacgcatggaggtgcctgctaactgtcc

SEQ ID NO: 176998 - DNA, 748 bp, Cannabis indica
gttgtattgctttctcgcatttgttaggacaaaagcaatgaaaaagataaagttctgatttttgagcctatgcaatcctttggtaggcctttggttgatgttagtaaggagataccaagaatcaaagagcagtttgtattttcatctagtttgacggatgtggctttgtgtatgcatcaagaagcctttgatgaatggttttctattggttataggcctggcaatgtataagttttttattctttgtttatatttttagtttatgtaattactttaagtttttaatgtattttatatgtgttaatttcacgaataacaagttcttgaagagatatcattatactgaaaagccttttgattttgttgttgctaaaattgatcacaagatgtggttctacgatttattaatacctggaaggaatatatcatgttcggttagtcatgtttaaatattattttttttaactttttcgttataacttaaatttgtgtttttggattctagtaaagtaatgatggaaaaaaaaactactcatttttatttagcttttatatacaagttttaattctacagcactaattaagtcttttaactagtttagatggtttgagcaaagtatttaattaatttgtgcttttatttttgttaacggttaattattagtttgttagtttcatcttaggaagtatttttctcatacttgtataagaaaggaatgcaaataataaaatattatcaaaaatgtag

SEQ ID NO: 176999 - DNA, 529 bp, Cannabis indica
tttctcctatgttctgaaggtctcacttgtcttattaatgaagcggaaagggctggtcaaataacaggtttacgctttggcaacttagctcaacgactttcccacttattttttgcagacgatagtcttgtctttcttgaagctaatatggatgaatgcaaggtgattaaagaagctttagagaggtatgagtccttatccggccaaagtattaattttgataaatctgaaatgtgtgtgggctgcaaaattgatataagcttagcggagaaccttgctgcctgtttgggagtcgccttggtcaaaaatcatactaaatatctgggtatgccttcatttgtggggagaataaaagcaagtctttgctaaaataaaagataaggtggaagctaaacttcaaaggttggaaaatgggtctcttctctcaagcgggtaaggaaatattgatcaaagttgtgatacaagcaaatccttgctatattatgagttgtttttagaattttcaaaaaggcatttttgaaggagatag

SEQ ID NO: 177000 - DNA, 981 bp, Cannabis indica
agaggaggacaatctcctatgtagaggtcatattctaaatgccttgtctgataggctatatgatctctacactaatactaattccgcgaaggagatttggaatgctttggaagcaaaatacaaggcggaggaagaaggtacaagaaaatttttaatttcacaatattttgaattttcttttagtgatgctaaagatcttcttcctcaaatccatgagttacaaatcattgtgaacaagttaaaggttctcaagattgagcttcccgaggcattccaagttggtgcaattgtggcaaagttgccaccaacttggaagggctataggaaaagaatcctccataaaaatgaggattattcattggaagagatccaaaaacatatccgaatcgaagaggaatcgagattgagagataagggaaatgtgaaagaacctaaagatgaggtttctaaggccaatgcggtctcaaacaagcatcacaaaggcaacaacaataataaaagtggtggaaaatatttgggtccaagaaaagacaatagccaattcaaagaagtgagaggccattgttttgtgtgtggaaaatttgggcactacgcaagagattgtaggcatcgtaaggatccaatgaaaaatgagattaataccatagatgatgaggaagtgattatggcatagtcatgcttatattgttttgtgagatgattgtctatgtattgacatatttaaataatgcttgtgaagctataaataaataaagttcatttcactttactctatgtgtttggtatatcattttgagaatgagaattttgtgtacaacaaatttacaaataattctattagtttgagtatattgacatgttaatatatatgtgagatatataatatatagcatgtatatattatatatgttgagcatgtaatacatgatatatatttgtgatgagtaatatttatttatgagatgcatatataatatatat

SEQ ID NO: 177001 - DNA, 550 bp, Cannabis indica
taactttttgatggcaacatatattgtttctaattaaatatcatctctaaaaaaatcactaaaaataatattataggcttaatgttattatatcacaaatttttttttttttactttttattagttgtgacaaaaaataataacatataggcttaataatattattgtatcccaatttttttaactttttgttactttgacaaaaaataagatttaattgtttttttttactattgagttgttcatattggtctgagctattcacacgatgtaggtaatgctagtttaattggttaatcatatctccaaaaacaattaaatttgactaattaaccactaacgattaaaaagattaattatttttcacaacatcacaaagtcacttagaggtgttgggaatggattaatgctatcaaggcaatggtaatgtgaaacattaccttgtttgttttgagtctttaacctttataactacccttgaggaggataatgttgatactttaaaaaaaaggtagaattgaatcattaccttctattatattaatttgaa

SEQ ID NO: 177002 - DNA, 1093 bp, Cannabis indica
cccatgcattgctggagctcaatacactgggttgctttcctccagtttcatattttttttttgagtctgttacttcaatatctgattctgtctacctacagtatctacaaaaccagtgtcacttgtttgaactaaaacccaatatattattattataattattattattatgttgtttgactctggttttattttatgatctacaattaaccctcaactgaattgtttttcaactcttttttttgtctgcagagttgactcgtaacttctttttttgcacaccaatgaaagcttctcaaatatctttatatagcagtagttttcgcgtgaccctatacacttttacagatgagaaaaagaaaaaaaaagttgactggagtgtatacatctatgaaaaagtatggcaataaatccttaaaaggatttctttttttaatcgaactccaccatacaccattatattaggttggcatataaagagtcgataaaagaccttcgaaggtaccactgatgcttccaatagcctgttgattttgtaggtaaacaaaatctcgataacttagtacagtattactttaccgttggaattgcaaacttctttaatgtgatatacaatttcatataatatgtagttaggaggattagggatataaatatatttatttatactattgggtttgttagaatgacaaccagttcatctctcattatacatctgatacttttattttctaccaatttattttgctttatttgtttaacttactctgttaatcattattaaagaatgttccaatcatgaccaatcatatagttttttctctctaatgaacattattctaggcaagcacagaaaatgtcggataattcatgaaaaggggttaaagaaaaaagatactcttaataaaataagtggtgggtttatatttaacttttgtttctttttaatctttttctttaatagaggtcaggtatggaaaccgagttggcaatgttgcaatctttttaatttttcttatttgcttttgttaggcttgtggataactatatgctacaaacgcgtttattgcgaatctaactttgtcatggttag

SEQ ID NO: 177003 - DNA, 710 bp, Cannabis indica
atcaaatgagaaaaatgagaaaagtaacatcctccaattaagtacaataatcttcatctaacccaaaagctataggtaacactcttatcatctatcaaatcagagaatgagttacaaacacactagatgatacacataacacaagtacacaattgatagaattcacaagaatattcgtttcaaaattaaatagtgtgcacttgaattaaaccttgttgagtgcccatcgcaaactgagatagacaatcattgcttgcaattcatttgaagagtaacatcctttcatagattttgagtagcatccttcacatcccttttaagcttaactttatattttagttgtgtgaaattattttaaggaagaactacagagacagcactgcaattttttttaaaaaaaaaaaataataaaaaaatgaaaaaatatgaatatttatcatacgaataatagtttgtaattattttgtaactatttttttataaaattataacatatgtatggttataaatttataaaatccaatattcgaaaaacaaaatgatatttaatttacagaggaaaatcaataaagttattataagtagactcaatgttaaaaaaaataatttaaattaatttttaaaaattattttttaatattttttctaaaatttctttttcaacatcattttctcttaatatcaatagttattttaattttaatttttct

SEQ ID NO: 177004 - DNA, 576 bp, Cannabis indica
taattataatgtgattagtgctcaaaaaagaaaaagacaaattgtaatatgattagaaaaaaaaaaaaattgtaatcgtaatatgattaggatcggctacccgatgttaattcaatttactaacgtttgatcacataactactaattcaggttgtaacttgatacctaaatggttataaaattagcaaataaatctataactataataaaagtgacaaaagctttagtcctccatctattaatttacaaaaaagtccctataaaattagcaaataaatctataactataataaaagtgacaaaagctttcgtcctccatctattaatttacaaaaaagtcccttaactatttaactattttgaaagagttagtgtctttctctctcatcacatatatatattatatattaacgatttttttttctaaataatctatttataaaaaatacataaaacatatttaattttattaacaacataaaataagtttattatgtaattacttttctactataataacactattggtaaataattattacttaaataaagaaatataatattatattctcattc

SEQ ID NO: 177005 - DNA, 581 bp, Cannabis indica
ttatattacatatgttacatgtaatgggaagtgtttatattagaaaattaattaacactttatgtagttttataccattttgtgtataatatttaaaagaataattatttatgaagaaaaataaaaaaggagttaaaaaaataaaaatggtaactaattatcctaaattgtttttccatcttttttattttctcacaaattaaaaaaatatattttgttaaattttaccaaaaaaaaacataaaagtgaaaatttctcatgtttaaatcacatatatgtatgatagcattatatatatacatatatacgcatattttttttttttacataatatatcgatattttttttatgcggtgaacagagtcacacatgaatatcgattatatttgttgtttgattcagagaaaatatagaaagagaggcctgcagattacaaagacataaatgaatttaatcaatcataatggccaataaattaaagttatgtttattgttaataattaatattgactaatttctttggttgactattctactatatcatcttttatgcttattaatggcgtaccgttgtagtaat

SEQ ID NO: 177006 - DNA, 650 bp, Cannabis indica
cactaaactcatcctttctttcttttcttgtcttttttttaacatacatttctaatgactgaatgactgttctggttcttgcaattgatcacagcatcaatagcttgtgtttctcaaattttaaaaatttgtatcggtttaacagggcgaagtggatgttgtttttgtgaacacaattctgtctggggttcagcaaaggaatttggaggcaagtttttggtactaactatttagagttatgtaattaagaaaaccaacctccttcgctgaagttgaagttcagtttctccagcaccactaataaacccgcatccaccacttcctctcctgctggcaaaacatatcagatcatagtctttcaatgcttaaaccttttttttacagcttagaaacagggcgatgtatttacccccgggcactaacaacttcagattctccagaacttccaaaagtaaggcgtccatctgagccccgtacacgaacaagtctggtcttcttatacgatagtgctgctaattcagcctataagaaaagtatgtccttcaatgcaaacccacatgttgaaataaaactttacaatatgcaagaaagtctaccacaacaccatacctcaacttcctctttgtatatgcatgagcattaataatctc

SEQ ID NO: 177007 - DNA, 563 bp, Cannabis indica
gtcaagttcatcaccttgagggccaagtggaggccctagaagcaaaggttgttgcaaatgtttctctttacgagggatactactttgatgatatttttaacacatggtcggccaatggtggggctgtcagctttaaatgggtagcctttgataaaaacgaagttggtttcttagttggtgaatgtgagcagcatgccaatgaggctgctctctacgacatcgactttaacttgaatggtgatgtcccgaacgtcggggatgttgcaggctacaaccctgagcatccaaacatgcctgctcttgaagatgcaccaaaaatgactgcgacacatatcaaggagcttctgtaaaactagatagaagttaattttttcaaggatgttatctccttttttattagtatttagctttagtgtgttaaaatatttgcgataaataatttaaaataaaacaaaatatagtaatttatgaaagtaggataattgtacaattttatttaaataataaataaaatttaatgcctatttgaaaaaaatttggtcattaataccgaaaatatattt

SEQ ID NO: 177008 - DNA, 1219 bp, Cannabis indica
ccttcaagtggcggtttgtcgttctcttttggccgatttgccgctagtctcaattaattttgttaaacgttctgtaaacaaagctgcacattgtcttgctcgtagctcttgtttgtatccagatcgtatttttagtgaggatgatgttcctcctgattttctttctattgtaatggttgaatcttcttattaataaagttaccattttccttcaaaaaaaaaaaaaaactccaatttacattaaaaaaaaagtagatattaattaagctatccaaaccaataagtcccccatattttaaacaattatgttttaattaataaaactagagttatataaattagagttaattacccttgtgcgagtttggaaattcagctaccaatcctttataattctctctttgaatgaaggactttggtttaaaaaaaaaaaaaaaaaacatttgacaaattatataaaaatacataattagaattaactaacttgaagagagagtatatatatatagtgaaagaaaagtaccaataaatctactataaaataatattaaataaaaattatcattatttttttcctgtatttttttccattatatttaattaaaaatcaaataaatgctaagaatcaataataaagaagacaaaaagtgctacaaaaaaaaatctgattgaagtttttcccaaaacacctaattttctttttcttttcttttcttttctttccctttccctttcctttctttttccaaattttcctgagaaagtgacagttcagtaatcagtagtagtaagttatagggtcacaacaagccagcctcaaagaggtttcttctccttaaagtctcatccacaagcttgaaagtcttcttaacgagcttttgatcgagcgcggtggttctgtagatcttgaaaactcggtctactctatcgggagctgtgctttgaaaaatacaattcctcaaatttcttcttcacaaacctgaaatgaatggagagatttgaaatagttcaaattacttttccgaggaaaaatctcgacttacgatccccgcttaaacttttacaatactgcactagaaaactatagcaattgctaagcacatcccgagaataaactacgaaccttttacttgggatcatgaataatacttcaaaggtgaaaattaagtgtggcgattcgtgttgttgtgtcatatttgtgttcgtgttatgcaaaaag

SEQ ID NO: 177009 - DNA, 576 bp, Cannabis indica
atttattaatttaattttaaatttagagtcattttgtatctcaaccttttgtaatatttgactgtaaaagatgtgtgtattttttctttcctttagggctcgtttggaacgccgtattaggtcgtattgtattgtattgtattatattgaattgtattttatgcaatatttttatgtaaaactatatgtggtattaacttttatggacacctaaatatataatattttagtataaattaaagtttaacatagtattatataaaaatatgatatataatccaattcaatataatacaatacaatacaatacaatacgacctaatacggcgttccaaacgagcccttaatgaataaaagtaattaaaaacaaaaataaaataaaataaaactaaaaatttaattgaacttgatttttcagtaattcagaaagtgagagaggttgaagagagaaaacaataaaaaacaatatgtttaatggtggtttcaatcaataatgaagacctactccattatagttacttgtatcaagggagagataaaccctcttcagtattggcagcactagaacaaagcata

SEQ ID NO: 177010 - DNA, 680 bp, Cannabis indica
atgagaacccagatctcatgatgagaagctcgaagaagaagtacatgcacaaagaaaacaaagcagagagttagatcgagaacaaatagaaagaaaacaacaaaaacacaaagtgtaaagaaagaaatcgagtttacctggtcgatttctgtgacaggaagctccaaagtttgtaaaacaaccttgtgatagtggatatcaagcttctatctctgagaagagcttgacagagacgtagcccagatttgggtaaactctgaaacaaatactggtgttttctctccttgtttttcatttttctttcatctaatctaagctattgatgtgtgtgggtgtgaatctgggtttcagatctagaatcgagcaagttctcaaagagaacttgctctgctagggtttcgagtttgtgagtgtgtgtgtgaattgtgtctgagtgtttgggattctagactcttctattgagtctctgaatcgaagggttcatacgacatcaagtttggtgtcgtggggttctgaacggtgccgtttagtctaaggatttacttagactaggaaaggtcatttttgaccttgatgctgatattgttgtctttgttggtgtagggttaaacagtaaacttctacattgtacacttttgcttcaaatggaatttacagagattgagttgatttgattctta

SEQ ID NO: 177011 - DNA, 920 bp, Cannabis indica
ttattcaattattaatttgttaaattattttctatttcaatttctaattttaaatttttataattattatttttttttaaatataaatgttactactctattgtaaaaaaattagtttaacttaatttcttaatatattatttttatcagcaacataacaacttaaaaatcaaaaacccaaaaatttaaaatctacaaaaaataagcaatcattgcagaacaatatgtgcacaaaaaaaataatctacacatccggtcgcagtacatttaatcacagattctacttcactacggatgaatatttaagatattcaaactcttctatatcatgatgtacacatataagtgctatgtattttctaatataagaaatgtaaaaataattacaaaacctttgaaatgcaaaaagattattatagagactctactgggcagcagcgatccaatgcagtaagcaaatgaacatatatttatatacacacaaatatatatataaacttatcttatttaattatatttatacacacacaaatttatatttatatatataaatatatatattaacatatacacaaatataaatatatatactcacacattatatacatattcacatatatatatatgcacaaacaaatatatatttatataaataaacctaaatatatactaacacaaacatcatatacatcttcacatatatagtcaaactaaaaatatattttaatatacaaaatacatattcatatatacatatttttgtaatgaaatcccaaaacatcactattctcaaatatattttacccaaattaacataaactaatttttcaattatattcaatttgtagaaaaattttacaaaaaaaaaactacaacacacacacacaacaaaaactttaaaatacacacactattcaatc

SEQ ID NO: 177012 - DNA, 618 bp, Cannabis indica
gcaagcacccatgtgtgcatagggtcgtggcattcactgagtccacaggcaacagaaaaccgtgactggcatggccacatagagtttgttcggatgaaaaccaaaagttacactcaagaaaacaaaacaaaacaaagccaaacttggtcaaaaaaaaaacttttgcatggtctgcaggcgcccatgtgtgcataggttcattgcatccaccgagtccacagacaacaaaaaatcgtggcttgcatgaccacataggatttgtttggatgaaaatcaaaagttaaactcaagaaaacaagaagacaaaacaaataaagtcaaactttgtcaaaaaaaattcttttgcatggtttgcagacgcccatgtgtgcataaggtcgtggcatcaactgagtccacaggaaacagaaaccgtggcttgcatggccacataggacttttttggataaaaaccaaagttaaactcaagaaatagaaacaaacaaacaaagcaaacttggtcaaaaaaaaaataaacctaacatagtccgcaagcgcggctgggcctcggtggttgtggctgagatgtgcttctcaatgttgagagagagagagagagagagagagagagagagagag

SEQ ID NO: 177013 - DNA, 723 bp, Cannabis indica
accatatgtactacaaagactaatgtttttgtttttgttttttggtagggaaagaagtgcactcaaaaattccaattgtacaatttagggcatgaattattagggttttttttttctcttttatttcctttttctttgtactcttgatatgcaaaatattcaatgtagagggatccaatataatttaacaactatttaattatcatgggtaaaatatgattgtttttaagactgaacaacaagcgggttgactggatttcaagtttgcaggtttcgagcctaaaaactggaacccaaattcatccgttcaaagaattcggactcacaagtttgtcggtccacgagtttgggttgatcgttgacccgacaaattcaatcaactctcggtcaacatttttgcttttttatcaaccaaaattctttagagaaaaaaaacatttataagccaaaataaaaatataaattcaataatccaaaaccaaataaatcattcatcaaacttctgctctttgttttatgatgaacatgataataaaaactaaaagtatcaaaataaattgtgactaaaaatttatagtccatacattctgtactagctattgtctaccataaaaatgtttaaattaaaaaagtatttataaatttaatttccatatgatttaaagcataagtctttttaaaataatgattatagtatagtatacatatacatatctccaatat

SEQ ID NO: 177014 - DNA, 819 bp, Cannabis indica
ttttttatatatatattttaactatacagaatatgtttttaacacttattaaataatcaataaacttataatattaatttttactaattttttaataaataaaaaatttctaagtgattattcttttatgacaagctaattattatactaacgaaatataataatatattgatgataaatgttgtaactaattagtaattttaaaattaatttgatatattgtagtataaaataagtatatatatttgtaaggtctcattaatattaaacggttgaacattaaataaagttactaaaaaaaaacattacactagcattaaattgatattcttaccccccacctaattatataattattattttttttttggttgatggtgattttagatcatataataagaccatatatatatatgggtatgctcttaatgggtattacccatgtatgggtattttattcttgaccattggatcaaatatctaatggttgatatttataatcattaattaaatattaaaaaattaatatttcctattttgttattctctatattcctaaaatagataaaactattaatagaaataaaaaatttataaatggaattgttatttaaaaaataaaacacactaaaaaactaacaaattattttttttaataaaaatcattttaaagattaaaaaaaaaaaaagtagtatatttatctttttataaaatttcttcaaactagaattctaaattgcattactgaaaaacaaaaaaaataataattttaagctttaaactgtaatacatataaaatgtataagatttttctaact

SEQ ID NO: 177015 - DNA, 806 bp, Cannabis indica
cttgtactaaataattttcattttcagaaggtttaagtttctttcctatactctaatagcaaaagatataattttctttttagaaaatgctaactagcaatttttaagcaccacaaaaaaagtagatattattagtacattctaatattaaatccacacattttgagcactgcaccctacatagttttttttattttttttaattaatgccttatgcagctcttcaataatgcctttttatgcagcttttcaataatgccccttgcctttttcatctcaataataataataaaaaagaaacaataaaataatggtgtacagtgagtaaggagattcatatcatacatatattcactaattcccttcacagaacataaactgtttttttcgttttgttttctttttggataggagatataagtataacctgttattgtctccagaataatcattagaggtatacccatacccatgcccataccaatatcatccactattggataatattcaatctaatccaattgaatcgaaccaatccaattcaatcaaattataaaaagttagatatccaatttcaattggattgaatcggttattggacgtcattcttaaaattcaattaaaaactgatcaaattcaattacatttatatatattaaaaaatttatttatatttatttacatataataaaaatatatattaattatatttttagctaaattttaattttaaattgtaatttgtaacgtttaattgttttgtaatattattagttttcattgattgtttgtgttttattttatta

SEQ ID NO: 177016 - DNA, 726 bp, Cannabis indica
gttgcttaagaatgatggagttatgtctacacatgatgaagataccgggagttatttcgaaaacactggtgtccactgcgtcttgtgccctcgaattcctgatggtggacaaggcattattcaggaattgaaggtttccaccatgtttactcatcaccagaagacagtggttgtggatagtgagaatatctcaggtgatggtggaatatcagagaagaggagaattgttagctaccttggtggtattgatctttgtgatgggagatatgacaatcctaatcattcaattttccggactttgaatacaacccattctgatgattttcatcagaataatttccgtggtgcctcaatagaaaaaggtggaccaagacagccttggcatgacattcattgcagggtagaagggagtattgcttgggatgttttgtgcaactttgagcaaagatggatgaagcaaggtcataacaggacttgctttttgaattgagaaagatacaagacacttgtattatacctccatctcctgttatgttgttacctgaagaccatgagaattggaatgttcaattgtttcgatcaattgatggagggtctgcttttggtttcctaccactccagaaaagctgctcaagctggtctgtaagtgggaagatcagataattgacaaagcattgagtatgcttatgtcaacgcgattcgaagagctaagaactacgatctaca

SEQ ID NO: 177017 - DNA, 702 bp, Cannabis indica
atacaatcaaatgcttcactgccattctctttctcaactttcttcttcttctttattttttttttttttttttttgtataattatataaatcacattatgctacatacagtcgatgccttgatatatatagtggccattggccaccctcatttatttaattaattaggctttgcatgcctaacaatttatataaatacatcattggaaccttctacattaattactaccatctactttgtaaggttatacttaataaaaaaacaagtaatccatgtgcctaacaattatacatcctaaaattattggataactatgtctaaaaattaaataaccacacaaatatatataccctcatttttcttatataatttctcttccatttatctaatcaaattgccaccttcatgaatgtaatattttggtacatagtttggatgtgtatatatatagggggttgattttgtgccatgttttgtagaacacaaaatggtttcttgatattgtagcactggtcccacgtatttaaaatgtgtaaaattagttagtggaggtaattacaatcggttatttaataaatttatttttgttttattttattccgttttaataatatcaagcacaaatcaatttaaaagttaacatgtactctaatagacgtacaacaagttgtggtcccggttcatatgttaagaggataaaat

SEQ ID NO: 177018 - DNA, 657 bp, Cannabis indica
tagtgtttaccgagattttacaaactaaattaaagaagaacttaagaaattaaatggttgtcaaaataaaatattagggtttatgccatgaaaattctgtaaagacatttctaattatgaataagagttgaacattttgatatatgcatgattgttaagttattaatatttaatattaaataatttatatataaatatcaaaataattccttattcatacatgagattgcgacttgtattgtacagaggattaagatcacttagctatgaataaaatagtcagcaacatactaagtttaggaatatttactcaatggttactagtgaggttcactgttgcccattattcggtgtaagtaatctcaattcagattactaatgtagcatgacatctaagtgaaggtgttatgtataatatatattataaatgacaaggactgatatgtaattaagttgtccttatcaaacatgttatttactataaatacctaattgatattataatgatgatcaatggtagatcggcataaatcttgggtaattataatatcttgttcatgttattagtttctttgattgacttattaagtagaaattatatatgacaagaaacgatatgtaattaagttgtctttatcaaacatgttgtttactata

SEQ ID NO: 177019 - DNA, 785 bp, Cannabis indica
aaaaaaaaaaaaaaaaaaacaattgacacaatatagcatcctttcatataatattgaagcacctagaaactagtaacattagtattatgtattagtttgaattataatgaatatgttttttgtgcaaatttctcatttatataagatatataaaatgatttaattgtgagataacgtttattcaacatgtctaattattatatttatgaaagtagttagagaaattatttgaattttttgaattaatgtgttatgtataaaattgtatttttgtaaatgccaataattatactaaatttcagtaaaaacacaactgtaacattctgcaacaatagattgcaatcctatcactgcagaacacagattttcagaatcaaaatagaactagaaataaatattgcagaatttaaaaacttgacacaagagaattttgcgtagtattagtgttctttcaaacattactagtccacgaggccatgcacagagaatgaaatcaattaataaagtatcaaatattacaaaagcaattgacttaaacaaatttagactccctctagtgatttgtcgcaaccttttgtaatccaccttgctaatctgatctctgaaacataccaagtagtaaacgcccttaagctattgatgtgtgcttacttcctcttgaaataaggcttaaacaaatcttctcccaaagatatatactcgcttcctcatgaaatgagattcgaaaaagtcttctcccaaagatccacacttgttcaaagcttctcttcaacctattctatgat

SEQ ID NO: 177020 - DNA, 1260 bp, Cannabis indica
aataattaaaatcgatgcatacatgacatcagttgaagattacgtagtcccctaagcctacggattgcctccccctataggctgaccctggtctatgggcccccagtcaatgtatttcgtgtattcaccctattaagggggccaagggtacatgcaaaccctagtgggtcagagatatacccgaacccaaatcctagcctataaatacatcattttacccttaagccaagggttagaaatcaattgtgcaaacactatagcaagaagctagggttcataatcttgtaaaaaccccattgtaatatattaaggttatttagcccaatacgtttaactcgtggactagagttcactaacacctgaaccacataaaaatatccatctctaatttttattgcttatttaatttcccaactcttattgtaattattttttgaaaatctcggtaaatattttagtgaattagatttgttctttagcatatatatagatccaagtaaaccttgaaaaaaaaatctacaaagtgtatgcaataattatagccattagataaaatagtatgcgagggaccccacaagtcagacacatgaagaagctgaaatggttcaatatactcaattaaggatgcttttattattaatatctacattataactatcgagaaccaattgaattatccgcagagaagaatgccctaaataattgtgcaaaatgaaaatatcataaaaatctttaacactacaatttgaggaagtgtttgcttcaactttagtaacaaattgtgtactgatcagagttttgagatgaagagacagatgaaggataagaaggagtgttggactttgatgataggaactggagttgagatgcatcaaaataaaataggccattttgatgtgttcccaacaacagagtacaaagggtctcactatccttatcgaaacataaatcaacatgaaattcaaagaaaacattattatgtttggaaaattttggaaaattcaagagatttttagtaatagcaagggcatgtaatacactattgagtaagattgatttgaaagatgacaattatagaccatgcttaattgacaaacctgtgccattatcaacgaacatctttatggggccatcatactaaaaaccatgagagagattaattagatgcatctagggtacagtgattggttgctccaaaatatagataccaattggtatcactttcaactactataatagtaaattagcctacacatgact

SEQ ID NO: 177021 - DNA, 617 bp, Cannabis indica
atttcttttgatgaaataatgtagaggtatttattcacaggtcaactctttgtctgcttagtaattttatacaagtcctctgtatctaatagtagtttagtgatcaagatcttaatgagcgtattcgctagcttctattttatttttttttgctatccggtgttcttatatatgtcttgaaaatgtaggatggcaatgaagtatttttcaggatcaaaagaagtacccaactgaaaaagcttatgaatgcatattgtgatcgacaatctgtggagttcaactctatagcatttttatttgatggtcgtcgccttcgagctgagcagactcccgacgaggtctttctctcattctcttaacataaaccttagtgtttttttcatgaatgaattactgatgcagttttttatatgtgcgtataattgcagctggaaatggaggatggtgatgagattgatgctatgcttcaccaaactggaggtgcttcttttatgtaatcataaaatatggcgactctagtagtactatatagtgaactactttatgtggatttggttatgaaggattaggtgtttagtatcttttttattttctttttttaagacttgttctagtat

SEQ ID NO: 177022 - DNA, 543 bp, Cannabis indica
tttttttaaaaaaaaagttagaacgaaaaaaaaagcaggattgtaccggcctataattggtttctttatttcctctagtttttcagccattttcagcaaactatcaaagtgacttatctctctcaatctggctcctcttatcgaagcatttgtcttgctgctgccaggagctcgtcggcctccactgtgctagaagtttttcatttaaggtaagatttcttttctactgttttgtttgtccctcacccatttatctttcctgggtattttttactttgtcatgtaattcaaatatttgattttgtttttgttttcatttttttatagatttcacgtttttaaaatctaacaatttagatttgggttttcatttttcagctttttgagcttttgggcttttggagtctaaacatcactagtattggtgattgcctctcactttgaaaatgtctttttctgccttctctttttgattattagggactcatcaaaatattttagatttgatataagtattcaatttaatcggtcacttgtacaatg

SEQ ID NO: 177023 - DNA, 647 bp, Cannabis indica
ctagtggttgtgatagtatgtaagagagtttgcaaaaatgaacaaaattaattacataaaaatataagccaacattaattttgttttctagcacattccagtataactactaattcaaaattgttgtcaatttgtcatcaccgtatcttacttgtaactatcattattttaaagttgttgtcatcaccgtatctcattttgtgtagtcgtcactattattcacaataatgttactctgtccataaaataaataagacaataataagttagctactcattattatacataagtgaatcatattatgttataaatttatcacttgcttattccaagtaatttgacgtgatcaattactaaatggatttcgattctcgaagtaattttcaaacatatataaccatgtatacatttaaaataaataagtaaattgtttttttaattataattaaatattaaattacaataaatttacatcaatatttttatattttcataaaaataaaatatatcaatttttttttattaaaaaaaaagtaaagataagacatgaagaagaaaagagcaccataataaagtataagatcttaacaattacatgtattattgtaacatgtaacatccatcttatagaatctttatatagact

SEQ ID NO: 177024 - DNA, 862 bp, Cannabis indica
attaataaaatcttccaagtaaataataaatcaatataaatagtgaccattttactgtcatcaacaaaaaccattgattagttaaacctaatagaagtaataactgtataaatatattgttagttaatgaacactgagctgtatggttactggtagtattatagagtttgttgcatgaatgtaatttttttctttcttgccttggtttgtcgactagtggtatacccttgttcattcttgtatatatttcctcgaatattaatgaagacgacttattactggctattccatccttctcttttttactctaacaaggtatcatagattttttttaacactaacatggcattatagaattttttttttgttctctgtacaaacaacaaactcaaagttgtacttcaccttccataaatgatagcaccaagctgtccctattttcttggcataaatgataatctcagtctgtcttgtttcttatcctctcactactctccctaccactcatggacacaaaaagtctgtctttttctcatggtggcagagctacttacaaacttttatttttttttttctaaaaagtaaatatcggatgtaactcccaaatctggacaaccagaaaattaaaatatctagcctaggaaactagagcgtgccaccacaccatttttctcggatgttagtgggatctattcctattgggaaatgagtaaaatacattatagttttcgtcgattatttcattaagtgagtcgaagcgtaaccaatgaacacaatcacctacaagaaggtcttcaattatgtaaatagaaaatattgtatgttgttacggtctttcgcacaagatcgtgtctgacaacag

SEQ ID NO: 177025 - DNA, 843 bp, Cannabis indica
caaataactccctcatctgacggctgccgtacatcacggattacaatccgtgaaagtacaataacagaacaaaatcatatcccatgtatttctattttctgtattaatattaagattccttttatcattttaaatgatacatgccaaatggattttttagagactactgtggaacactttgaatagttatatatagtagctctattttttatactaccgtggaacactttgaatagttattgaagcatttttatttttttaattaaggtgctcgaatagttatagtagatactctatattcttttttttttttatcaaaaaaaggatcatttagacttcagagtgatatagtggttattactaattatatatttggacaatataaattattgaattttttttattttttatttatgttttacaaggaaaaagatatatatatatatatttatatacttataattatggttgttgcaatgcaggggaagtgattatatagggaagattttgttcaattcaatagttattagtaagatattagtttttttttaagttcaaatggtatttgtttagttagtgtttatttatttatttatttattttaattgtgagattcataatttccatttttttcattattctatcatttttagctttttgactcccaaatatttggaagaaagttaaaatatttataatacatggaattaattaatttactgcacatgcatgcatactgtttcacgtacgtaaatacgtaccttggttcaaaaaaacaatacctatgtaacgccctaaatcataaacggcgccacatatgtgtgcttttattaattagtttat

SEQ ID NO: 177026 - DNA, 884 bp, Cannabis indica
atatgtgcagatcggcatacagaaaaaagaaagtaaacaacaacatatgtttcaaatggaaatatgaggttctttattcttaatcacattgatattggttgttttctcgtctctgcttaatttgattgttgtgtaatttgagtgtcacaacaatgatacacatatttatgtggtatgtataaaagttcaaccaagcatatttatttgggaaacttgttaaaagtcaaatggtattgaataaaataataaaaataaaaattagtgtgaatgaaataaagtatatgcaaacttcataactattttttttttatttaagtatatatattacaaccatattttatctgggactcaaacttaggacttccaacacaaacacttacgtataaccacttgaggctaggttacaaatagaattaggacatggaattgatagaattctataaattttaaatctactttaattaatatataaaaatgtgttttctttataattgatcaagctgattgataaatttcgttttctatttgaagtgtatatttaactaaactgagtaacggtattatcattgtacaatacatgactaacaataacatgtcatacacttaaaaaagagattaatgttcttaataatataactacattggaagaaaacaaatcattaaaagtataaacaacgagcacaaacaatttcgaaagaagaactaaggagtccaaaaaaaaaagatggccagacagactctccatgttttcgagtcaaaaaccttgaaagtctttctcaagagaactaaatggaaaacctttataatcacaacaatcttgaagattgattggaatattcacagtcaacttgacacaatttggatggactttccatatgatattt

SEQ ID NO: 177027 - DNA, 606 bp, Cannabis indica
tttttttttttttacttattatctatgtttggtcgaactattatgactcatgtttcatttttggttgtctttggctccttgatcaaaaaaaagtagtatttttttttatttttcggttacaactatggagccttgttttaggggaagttttgtgtttgtggtttttgaactttttcgttaaaaattttattatcttttatgtgctagtatactttcatgttgggagagtatttgctatactatattgttttgtttcttacacttcatgcaagttttcttcttataaaatattttgtcaatcaaagtatcaaagagggagattgttaattctatttttggtatctttagatttataaaaatattttataaattgtttttttttttaattttggttgagttgtattttttcctatatatttatatctaattgatggatttttattaggtatgaaaagttactagtttttctatatttggaaagtttatcataaaggtaagtttatgaataaatcaatttctatctctcgagccgtgttaatctgatcctatagagttttctaattggtttgtatcagatctcttgtgaagaaaatcaaagtaagactt

SEQ ID NO: 177028 - DNA, 661 bp, Cannabis indica
ataaaaaaaaaaacaatttttttaatcttttttctctttgtgctttttcttttttctttttcttcttcttcttgtaaaataccctaaaattaaccaccctaattcttcctctctctcctaataacaaagatcaaaactcttcaccacacaattaaccaccgcaccaccactcataccatcattatcaccactgcaccaccactcacaccaccattatcaccaacacagtcagccacaaccattatcacatctaccaaactaaaaaaatgtacagatctaaatttaaaaaaatatatgtataaaaaaatatttaactacaatgtttatttcttttgcatcttcaaaaattgtggtgatgggaaagacacaggtccgacgacgacgatgacaacggcatgggatctcagtttatctctttttcacacattctccctctctttcttttttcttcgcagatctgtagatcgatagcgggcagtgacaataacacagatcaagggttggggttttctgagttttgtggtgcggggatcgcgttttctgtggtggccttcaacgggaacggtcagttgtggctatcgaagctagatcggatctgggttcttcagagtgctccgccgatttatttgatttttgggggcttgtgagagtagatgggttc

SEQ ID NO: 177029 - DNA, 1268 bp, Cannabis indica
gaacgttgatgacgactctcagccacctctctttggacacaatgatgctgtatggtcgggacatcacccaccatttacgtcaagctgtgagtgccatctcttttttgcatcatatttaacttaagtcatctcttataattactgtagagtgtgcaaatcgtgtcctgtcgcctaattaattttcatatcagacatgtcttgttttttactagtgcctaattgttatttttatgttttttaactttaactcacaaaaacttgtgaggtatttggaggtatttgggtagacaagctaggcgtgcgccttaggttcttgaccgctcaagcctcaaaattgtgaaaaaaaaaaacttattaatatatagataaaaatatgaaataaaaaaaaaactataacaaatattatttggtttaatagtaaaaggttttactttaagtcaaaaggtcaagggatcaatctttaatctctactttttattttttaagtaaaaaatgttaaagagattaatctctaatttttatttttttaaaaaaaattaatatttaatgtgtaactacgaaggtttaaatcttagagttcttaaaatttttttaaagctttaccattatactaaagcattagaacaaccattttaataataattaaactatatatataacgacttcaaaatttaattttaccttagctatcacatactttaggaccagccctatttgagttgtgtcacctaaaaatctgtttagctacttttagtggctggcattgtagagaaagagagagatataagttaaggttagtatttttaagataagttagatgtacttaaaaaattaggattttggatttttaatttttttttaaaaatattttatgtgataagttagtgttaagtagatcgtgtcatgtttactttatgttttattttgatccacttcaaatatattttttgaccataattcgtgaaaattagtatcatattaattcaagttgtggttattgtaaaattcatcacacttttaaaaaaaaagtagtttaaattctaaaaatataataataataacttaaaatgttgaatacagacttaaatattcaattacatggaacataaattactcattattttcttaaaaaataaacaaaatactatatatagttatgtgatcaagaaattaaaatttttttaaaaattatacggagaatacgtatctatgtgacgtcatgattactcactagcacgtagtaactattttcaatcataatctacttt

SEQ ID NO: 177030 - DNA, 531 bp, Cannabis indica
tattattattttatagcgtcaatgtattagttggtcaacgatacatgatccaaagtttgaaacaaggaaatagagacactagtggggaagggaaaaaaaacgaaacatatccaaatctatcaaactgacttattatgttatttgaaaatttagaaaattattaagcgttgtctcaccaacttatattatatataagtttgacacatttttgtatcattttttttcttgtatttttctcatgtaataagataacagaatcattcaaaaagaaaataaagaccaaatgcattatataagtattcattcatatgcataagttaaattagcaaatcatttccttactgcatcaacaagcaggtgattgagccaaaacatcgacatgtaaaagttcgttaacaagtttcatactcatgaataaacaaacaatgacactacattccaaatcaatttttttatttgaggggagaaaaatattgaattcaatttataggttcaactttcataacttactgaaaaagaaaaaaaaaaaaa

SEQ ID NO: 177031 - DNA, 787 bp, Cannabis indica
atacaatacatacaattaaagtaaaatcaactttaactcaatatataaatatattagagcttattttcgtgtgtaataatgaataaataaaacattaattaaatcaataaaaattaatttattagaacaacataatgaaaataagggacttcttcatttttacacttcaaaataatttttttttttttgtattttttacgaaattctgcataataaaaacccctattgcaactagcgctgcaacctaaatcgcaacaaaaatcgtatagcaacccacatagatatcaccggagaaaccactttagaaacccaaaccgtaaatttaaaaagaaaaaaaagttaaaaaatagtatatggggtaatttcccaataatttaattattttttttaattagctcaataaacataatatataattgtgaataagaaaataaaaaaaataatattaaattatttctcatttgtaaaatatatagctctagtttattagtaaatcaaaaataataaattattaaattcaaagctaaaaaaaaataagatcatcaattaattaaaataattaacataacaagtatttctcaaaatataaaaaaaaatattaattaatttaaaataaaaaggaaaataataatacatatatactaacaccattataacattagtgactttaaatttaaaagtaagtatcaatatacattaaaaaaaattagcatgtacactgtatactcttataaagtatatttacaaaatacatataattgtagttttgtttaagttgatgaaaaac

SEQ ID NO: 177032 - DNA, 643 bp, Cannabis indica
atcaatatggcataaaaagtaaatgccactaaatatgatattatctaacaaatcaaactataaatatggtttaaaaaaaaaaccatataaaacattaaaaaaaaatctgaatttaagattcataaaaaataaaaacttaattaaatttccataaaatatattaaaatttctttcatatttatttttttaaaaaaataaaacaaataaaactatagtgatcgccgaagttgtcactcgtgccggaaaagtcactaaagtttgctactggcaccggaaaactcgtcagaatagctgttggtgccggaaaagttgtcggagttactgccggcgccgaaaaagtcgtcagaattagcattgtcgctggaaaaatcacagaaaaaatcaccaagaaactggtttcttgatgaagaaactggtctcttagtgatttttccagtagttttaccggtgataatgccaatttcgacgactattctggagtttgatgtcggtaccggaaaagtcaccagaatagttgccgacgtcgaaaaaattagtcgaagttattgccgacgtcaaaaaagtcgaatagaattggcgttgtcgccagcaaaatcactagaaaaatcaactaagaaagtggttttttaaatcaagaaaccga

SEQ ID NO: 177033 - DNA, 523 bp, Cannabis indica
aaaaataaattaacatttgagaaggtagataataaaagttggcaatctttaattaaaaggccgaaagtaaacctaattacttagttgctatactaaatttaatattaaattaataacaaaccaatataattttaacactaatattttttctaaccataaaaatgtatacacatatgtactcgtatcatattgtacacataatttggcaattagatgtcaacttggagtgacagtatctaaatatatgtacatgtgtcatatttttattagcctaaataattttatatatttatataattttaaaataaaaaataaataaaaataatgtatttttttttctatacttatgagatttttaataaaaataaaaaattaaaagaaaaacaaaagaaaccctaaaattcaaattccatctttctctctaccatctatatcagattatcttccccatgtgacaaatctccaacactaacatatgtttggtaagaaaaaagaaaaagaggaaggaaggagaaatgaatcg

SEQ ID NO: 177034 - DNA, 852 bp, Cannabis indica
ggtattttatttaagtatcaaactaaatgaaaactaaggaacagctaagtatctgatatctacaagaataatttatgacagacacttcaacgccaaaaggaaaaactatgagaagccaaacaaaagctagaggatttataagcaaatttttaagataacttagctaggagatatacacataccatttacagatgttttcttgtagcaatgggcagcatcaacataagcttgggctgcttcatgtttgctttccaactaaaaaaacgagaaatagaatatcatactcatgtatttgaaaacaaatggttaaattacaacaaaaaaaacactaaatctattaaacaccaaacacacaaaccttcacatgacagtttgccaacttgatgtatgttgatccagctctgtcccctaatacacaatatctataggtattagaaaagtaataattctatgaaatcctgggtgaaaaaataagtattaatataagcaataatttagcaaagagttcttgcaattactttcgtattttgaatgagctttggctaaactaatattgaagtttacagtgacagtagatcaccttaatactattcctcattcaccaaacataaaataaaaataaaaccttgatacaggtcaggtttaattagttgccgaacaaataaaatcagcaaatgtttctttattccacataataaatttttgtaatatttagaattttctcgcaagatcaaattccatagctgcaaggccgattctacagaaaagaagtcaatctggagtgcaattctaagatcgacactgactgaatctattgttcaaaaaagttgcaaatttgacctatctcttaac

SEQ ID NO: 177035 - DNA, 1134 bp, Cannabis indica
atttaatgatatatatactaaattttaaatttttgtattttttttaataatataagtaattgttttactatttctttttttattacaaaaacagaaacaacgtaacaaaataaaataaaataaaattatcatataatttcttatttaataaataaagaaaataaatatatatatcttctagcattatagtgaaaaggaaaatttgaaatttttttacacaaaattaaggcttacaaaaataatcaataaatctatagaaaaatgattatctatatgatctcaaaatcattgaatcattgtcttgtagtcgggacaacattaatttaaactgttgtcatcaccgtatctcacttatagttgctatttattcaaattcattattgtcatcatcgtatctcactacaccatttataaacgggttacatgggtcgtatttaaattttatttttggacaaaatattaaacagattgtgttcagtatatacttgtaatacatttgttgacacgacatgactcatgaatacaaattgccaccccttttgatgagaccggactatcttctaactatttgtatcattatttaagtcggtaaaaaataatactttatgacaaaaaaagagaaatattttttttaaaaaaaagttgagtttaggggaataaaaaaaattacaaatgaatatgaaatactatgaaattattaggagtagacattttctatttatttttatcttaattttaggaatagacttaattaaagagatttttaaaatttaaattataataattatttattattaattagttaaagatatttttctaatgctaacaaataccatttttcgtatgatacatgtaggaatttttaccgttttaaccctacaccaacaaagccacaaatatcagtatcaaggtcaaaagagacctttcccagtctaagtaaatccttagactaaacggcaccgttcaaaccccacgacacaaactctgtgtcgttttgaacctttggttcaaagactcaatagaagagtctagaaaccctaaacaccaaacacaacaccctcagcctctctctgattcgaaaccctagcagagcaagttctctctgagaacttgctcgattccaaaccctagaaa

SEQ ID NO: 177036 - DNA, 654 bp, Cannabis indica
tctctctctctctctctctctctctctctctctctctctctctctctctctctctctctctctctaatctaatgttgcctttttttttttcaggcttgcagtggtatggtggtatgatggttgtggtgcaatagtgcggtggtgctttttgtttaaaataataatgtctaaatgtggatttgtgtatatttttttgtaaatatagtttttatttgatttttggatttttggtataaatatgattgtggtggtagtggcgttagtgcgacggtggttcaagtttttttttttttttgcttcaattatcaaccgcagtggaaaaccaatttttgtcgatgtagtattatttgttttggttatgaaccgaagaaaaaatattttggcgttggttaataagtgaagtaaaaaatatatgtatttgtgtctatagctatagcatcagttacaccaaccgaaacaaatttctttatacttcacttaaaaattcaaaaaaaatagtttttttttttttttttttttttttttgttgtagtagtagtagtagtagtgatacaagttattaggtaatttgatgacaaatatgatgatgcacaactgagtttaatcacgagtatgaatgacgagaattgaagtttaaagatttcaattaaataa

SEQ ID NO: 177037 - DNA, 1227 bp, Cannabis indica
aaatttgttataatagtttgaactatggtcctctgtcaaattgcctgttatttggtctctttatgtatataaagttgtgttcccacttaatgtatttattttctaaattcagggtggaaattcaaaacatgagtccttgggaaatgagtggctgcaatctgggaattgtccaattgctaagtcttaccgagcagtcagtggtgtccttccacttgttgcaaaggttttaaagcctcctgcaggcatgaaatttacctgcccaccagcaattgttgctgcccgagcagctatatcaaagactgcattcgcgaagaacctccgccctcaacccttaccagcaaaagtacttgtgatcggattattgggcatggcagcaaatgttcctctgggaatatggcgagagcatactgaaaaattctcaccgtcctggtttgctgctgtccatgccgctgttcctttcatagggatgcttaggaaatctgtgttgatgcccaaggcagcaatggcatttactatcgcagcatcaatcctgggacaggtgattggctctcgggctgaaagatatcgcctcaaagctgtagcagaaaaaaaactggctcttactcaaactcatgaatcttctggcgtggctctaactcaaactcatggatctgttggtgagtctagccagttacaggtggtcagtgcaaaagtcggtcattgtagtggtgatgcagagtggaattcgatttcccttcctatggcaaggtcttcttcatcgacagatgtctgctgatcctttcatatcttcgagtttttataattgatctgttgtaatgggtaacttggcagagttcagatctctgttctttatggtgtgtatgaagaaaggtaaaaaagaaaaaagaaaaaaaaaagaaagaaaaaaagagatataagatgataatgagactacattatttcattttcactttctcttgagtggaacttcctatttcagtttattcacattttaattctgtatgaaataaccaacgtttgtcaagacaaatcagcagcaataactaaatatattttagggtcgaatgagcccattttcttaattattataccctgatggagacacaatgggcacaaaattttacccaagtttctaaactattttcacaccatatatgtaatctaatcctcacgattaatttataacaactgtcaacaataattaaaatgtatttcagtaaaaatttt

SEQ ID NO: 177038 - DNA, 508 bp, Cannabis indica
aatagcttgttccaattgactttatatctatccggaacgtccttccagcttcgttagccaagaagcgtagttcatacccggagagctttggagctaacttagagatctctctgtaaggaactaattaagactgttaagtcgtaaccaaattaactacttagttaaatatccttgacctataaataccaccactatatcattatttgtaaaagatgactgagaatacgattgaagagagtttcaattgggaggtatagagagagagatatatatagagaagaaaaagagattgagttttcgggtttcgtattgtacttgtgttcttacttaatcaagaaagaagtttacgatggtttttcaaaactggattaaagtcatagatctcgataatctatcggacttgaaccagtgtaattcttagtggattttatggttttcttgcttcgttaaatttttctgttctattttcttttctcctcaatttttgaactttgttgatattgtcatt

SEQ ID NO: 177039 - DNA, 596 bp, Cannabis indica
atataattaaatagtcacctagacttatacaattatataatatactctaattataatttataaattatactaaatagttatacacatacatactttatgaaataacttagaaaaaataattaaataatttattatcatctatataatgtatttaaatgattatattgaaatatattatagtcgcaccgggttacatagaccaatattaggatatactttgaaatatactatggtcgcatatagtcgcacttagtcgcatagaccaatattaaaatacaaatttaaatagactatggtcgcacatagtcacataaggtcccatagacacatattaggatatacttgaaatatatttggtcgcacagagtcacacaaaagtcgcaccccaccctagtggttaataaaatgaaactttagcgtcgcacctcagtggttgaattctataacctgctcgcaaatcggcgtcgtagcacctaccagagcgtcgctgcctccaccttctgcctcctgtccacctactagagaacgattagagtaaaccgatagctggggggaggagagagagagagagagagagagagagagagagagagaga

SEQ ID NO: 177040 - DNA, 764 bp, Cannabis indica
attccacaataatatacaacacattatcttgtataataagttttgacataagttaggtatagatttatttatatgtatatggatgaaaatatacattttattttcaagggatatgctaattaagttcgaacctttatataaatctaacacattatagtactatattattattattattattattattattattattattattattattgatgtgtagaagtgatcaaattcatggttgagttgaagaagtgttaaaataataaactttaataacactagcatattaataatctgtacatttttttcaaagttttctagctaattaaataataatatgatttcatatatgtgacaagattcatcatttgacaatttcttacatgaaaggggaactaaactaattccaactctcttcatgtatattttcacatatattcagtactaacagtgaataaatcaactatatttgaaaaataataataatgttaagtcgacttaatttcaattatatatatatttatataggaatgactcttggtaacattattggtcaacaactcaactacccactaaactatattataattagtataataatattaattatcttcccacttgaaatgcttgtgaaattttcaactatatcaccttggtctaaccaatacaccacccacgaataacctaagtgatctcctaattacaagagccagctcacccatataaatataatagcattatcaatagatagtacaacacaacaacta

SEQ ID NO: 177041 - DNA, 918 bp, Cannabis indica
ataatcattaaaatagtggattttctttttaaaacattaaaatagtggaattgattttataggagtatcacattcactatcgttgttagtaaggatgcacacggggtaaagaattagtggggaatgctccttctacttttattcccattaagaattttaatctctattttcgcttattcctcatcgagaatgaggcgaagaatcccttaatgggagcaggaacaggacggggaatctcctataaaaaaataaaatttataataaaaatttaaatatataagaatattaaactacaaaaaattaaaatattagacattaattataatttagtaaactaataattatccaaaagacaatttaaaattcataaaaagaatactaatatactaaaaaaatacaaacataaattataaattataaaatattattagaaatataaaataaaatactacacgagtcttgtcaggacggagagtgtgattctcttccccgccatatttaacattcagagacaaaaaatgtcaaaaaaaaaattaagcttaaaaatataaattttttacaaaaaataatattttatataattatcatttttttttaaatccacttaatgactagtgggcttcaaaaataaatccaatatctatttaccttcccatatttataataacacaaaaaaaatacataaagttgaaaaatatctattttttatatctattaatcaaaaatacctttatattatatttcattaaaaatgtacttatttttgtgagtggtttgtccaatatactcttaccttccatttaaatttagtactataatttacattaatctaaaggggtataatatgaacatcatctataaaaagtgggtatatcttaaaaaagtataaaaaaataaaagataaaaattaaaaacatg

SEQ ID NO: 177042 - DNA, 1344 bp, Cannabis indica
atggtcttatttagggtgcatatataaataaatatacataatgttattataactaatgaaagttgatatatatacacttaattatatatcaattagttccgatcacacttattaattttaataattatatataactttattaactagactttgatcagtaccagctcacccatgactgttgactaattactcatattataataattatatatattcataattttattttaattataatttttattgttaaaaatgtgtttattgaaaaagtgtgtatttgcgtggaagaaggaaaagggtaattacttcacctaattttagattcacggcttgtctatattaattcaacacttatatatgtattaattaattaacacaattaatctcatgatcatatatattatattattaattaatatgtacaccaaaatattttgctgtgtaagaaagaaaattagtcaccaaaatattataggataatgttttatttgacgtattaaaaacgactttatgtagagtttttttttttttaatattgtgtttattgttttattctaggttaataattaatgttattttcttatttatatattttatttataattatttgctaaaatattatcatatccaaaaagaaacaaaattagtggatatgaatatgaatatgaaatttgacttcattagatcaaatttctgaatctcaacttttattttgcttataaaaaaatatggaagcccattgttttggttacaattttagactttttgaggagtaacttttaaaaacttttaaagagagaaaaaagaaaaaaaaaaaaaaatgacaaaaaaaatagtaatatttttaataaatataattatataaaaaataaataagaaaataataataaatatcgacataaaataaaataataacacattattaaaaaataactacataaaattatttttaatatctctactaaagtattatttaatattatataatgtgaatatttttttaaaccatatgaatctcgatgtaattaataatttaaaaatattgtttagtagtagcattaattactcaaacttaaattatatgattaaattatttaatttaagcacgtatatatgtcgattcaataacaaatttaatttgagcattaagttgagatactataagatatcgatcttcatcccttgatttgcatatcaaaataaacaaatgagaatatcattaattcattaataataatcttattatttcatatatttacaaataatatatataaatttatatatatgtgtggcatgtgggaaaaggaaaatatatagggtaggctaatatgcaatatatattac

SEQ ID NO: 177043 - DNA, 649 bp, Cannabis indica
ggtacatatcaaagttttacgggacattgatttttattaatatcaaagtttgggacatgatttttataaatattaaagtttgagaggcacgatttagtacacggataatcaccatattaacaaaattaaatgaaattagacaacaatctctttaaattcaacaatctcaatacatcagaaagaacttttaatgaccttaaaagtttaaagagcatatttgttacgataaatatgatgttggaatatgctaactcgtgtcaccttagttaattttaagaaaataaccgattagtaataacgttagaaagtaacattagatatttaatccaaaaatatttaagtatttatgccttaaataactttttttaggcatcaaccttcccaaagtatagcatatattttctttttctatagaaatttcttgtatgtgtagtttttctttcttttttccaaaaagagggtaaacaataaaaaaaatcagggttttgaacaatggatgatccacaagccactattcacaaaccaaactaattgattttttttgtacaaatagattctaatcctaaaacacttgtaaaaaaaaaggttgagacttgacatcatgatcatctgttgtaaaggtactatttcactcttctttctcatcatt

SEQ ID NO: 177044 - DNA, 698 bp, Cannabis indica
gttaagatctagtgcgtcactatgggaggaaatcatcaaagccagggtgtataattaaacttgacttgcaaaaagcatatgataccattgaatgggacttctaggaagagatgctcagagaattcaatttcccggataagtttgtaaatctgatcatgacatgtgtgaggacccccaggttctcacttatgttcaatggcacaatgcatggatactttgaagctcaaagaggactgaggcaaggggatccgatgtctccccttcttcttgttgtaggaatggagtatctttcccgaatattgcaatgaattggagctaaaccagatttcaagttttttgacaggtgtgcaactttgaaaatgaatcatttgagttttgcagatgatgttattttattctgtcatggagattacaaaagcatctattatattctccaaggcttgaagctattctcttgtccctttggcttacaaccaaattcggctaaatcagacatatattgttgtaatatgcaagatagagaagtgcagcgtatagtagatgcattgggttttagcaaaaaagagatgccattcaggtacctcggtattcccatatggtccaaaagaatttcaagcaaggagtgctcgatccttaaggaaaaaatgacagctagaataaagacttggagtactcaaaatttgtcatttgcaggtaga

SEQ ID NO: 177045 - DNA, 716 bp, Cannabis indica
atgtaattattaatacctttttctttcagggaatttctttaaatacgatgaaaaactctaatgctgtaattctgtataatattgctgtactatgtatattttcatatacgttaacgtacgcaattaattacataattctaatccaaattaggttctatttggtcaaaggactatttcttccttgtcggctgaccacttaaaaagttaattaatttacaaataattaagattaattaatacatatataaatttcaacaaaataaatctttttggaaatcaattttatttttttaaaaaaattatttaccaataataatgatttcaaaatgaataagtaataattactgtgaccaatttattatttggatataaaattaagagaattaggaagaaaaagaaaatttaacgtaaaattttaaatttcctaggtgtgatatatgtagatgagttatatataagagatttttttaaaatatatttataatgattattatatataatatgtatttgcatgataataattacatataaatgtcattaacagtgggtgtatatgtagcttaatttcgaaaatccacaatggaggaggattttgatctaggtccaagagactactagaaaaccaaaattagaagctacaattttgatgatcttataacttaagattttttactttttcagatcacgtgttttcattaatggcaatggaagtagac

SEQ ID NO: 177046 - DNA, 712 bp, Cannabis indica
gtatttgtgaaataatctctttaaaattaccattgcataatgcttgtttctacaaataccacaacgtatcaattctcttgaaaaataccaaaacccaaagaaaatagcccatgtcgtatttttcattgaaatattttgaagggggcacaaagggaaaggaaagggtcctcttcgaaaaaaaaagggtttttgtttttctgattagcacagtaacacagcgtagaagggtttttggaattggcattagcaggcagcagcagcagacgacgacgacgatgggagaaagagaagaagctttgaaagtagtggagattcccggcaggggaagatcactggtggcatctcagccgctcaagggtggccaaatagtgctcaaagactctccaatcattctttactctgctctacctctcatccctgcttcttcttcctactgcggtctctgcttcagaaccttgccattgccgccgctagccaatgccatcgtgccccaactgcaactcagaacggttctgcaaccacaactgtctctccgcagcctccacctccactctacaccccttggctctgccaatcactgctccgtctccgccaccaccatcactcttcctcactctccctagagccaccaactccaagctcgtttcctattagccgctcacaaccttgctaacctctcttccccccacttccaaactctgctctctcttca

SEQ ID NO: 177047 - DNA, 695 bp, Cannabis indica
atgtcattaaccaactcaactgacaatacaagaggcccttttctatatagggttttagctaaaacccccaaaactgagggattctttgacaataaagggttaatattggaaacccatgaatagaatttgaatgaatttgatgggttttgttgattatgaatgatgcttacaacaaattgagagttcaattggggttttgaaaactcgtggttgagtaaaaaaaaccagtctttactcgaaagaagttgagctatgtattggtgatcaattgaagaagttggcgttaaaaggtggagtctttctctggaatttgatgtgattgtatggctttttagtagctagattgctcagagaagaaaagcctctcatgtcctttgagcttgagcaaataattagggttaggttagatgaagaagaagatggttagagagacttgaaatggaaattgattattaccatgaaataaatatatattgaaatttgccaaaccaaaaataaaaacataataataaaaaaaatacttgaaaattgtaaaattttggtgaagttttttttttgggacaatacccatataccatttttctttttaaattacactttgggttagctatagtgttgtttagttaatttttatgtcagttattatgtggatgttggttgcgatttattgctctattaattgctgtatgagtttt

SEQ ID NO: 177048 - DNA, 669 bp, Cannabis indica
taattattttagttaattttaaattaatcttaaccgtttaacaatgtaatcatcacgattacatatttgatataactattatgacatatttcataaatatatatcaacaatatatatgtgaatataataaatacttacatatatactataacacgaatttacttagtttagcaaattaaatttacatacgtctacaataacaagaagtcaatttttatttttattaaggggagacgattacgaaaatcaagagtaaataatatctatttctgtacaggagaatcaatcttaggcaaatgtgataacatagattaagttagttttttgtgagtatttagtaaataaatcagatatattagatggtgtaaatttggatgtttgaatataagatcttatgattagataagctggtgaaagatcttaatgaattacgagcttaatatttatcatgcagaatgagacttgtcaatgttataattagcttagtaaaagtggtgtgatttattagcacggtggaataaggcttgtgaaatgatggttataagcttagtgaaggtacatgcatggtgtgatttaaactattggagaagaaaatatatttcattgaatggttgtgtgtaagaattaagaaatgagtaataagatgggatggtttggagaatttttttc

SEQ ID NO: 177049 - DNA, 622 bp, Cannabis indica
cctagtgttcatctaggttctagttgttctatttctgttcttactcatcctagaggttgtgaagaactacttgactgaacaagagattggtcttcggagaagacttgttaaagccttacttcgggaggaagtaagcactcacacttcaaagacgaagggagttcgggcttgaaggtgtttcaagaagtcagattcataaagtggattacaaaggattgcggcaatactttagagggagtctaaacttgtttaagtcaattgtctttgtaattttgatactttattaattgatttcattctctgggcgtggccccgtggactaggagtgttcgtgagaacactgataccacgtataaatctcttgtgtcaagttatttatttttctgcaaatattttatattctgcctgttcagttttgctgtagcagaattactttctgctgctgcaaacgcttacagtttttatattttcttatatacaactgacatttgcaaaaacacggtttttcaacttttgtttggccatttgggttgctagaaaggagttggtttggcaacaaaaattggtggaagcttcagctatagttgcttctgcgaaaagttatcttgatcaatgttggaat

SEQ ID NO: 177050 - DNA, 1004 bp, Cannabis indica
atgagagtccagagcacagagcgatagtgaattctgaaagggataggttttccatacccttcttcctcgatccagcacactacacaatggtcaagcctttggaggagatgactgaccacaagaatcctccaaaatataaaccatataactggggaaagttcttcgtcacaagaaaaggcagtaattttaaaaaaattgatgttgaaaacattcaaatttatagtttcaaaatatctaagtgagcagtcatagagtaataataataataataagagatgatatgcactcatagagctattctataattgattagcgatgtactataatatttaattaaagtaaaacaagtgagacatattgagttatattaatagtaatatattatatcttaaaagcgtgttagacactataagtgctcttggcataattatgacttgtacaaacatcttacatattatgaagtctctaatcatttttaaaaagttttttttttgttttagaacaacattttataatcttaaactcaaaaaaaacaacacattttataatcactttaatatttgcttttaatttatattaattttttcaatcttttttcttccttctcatattttttaaaaaatatacctataaaataaaaataaaatatatatttaaatactaagaaaaaaattaaaataaagaattatataaaattttattagacaaaaatttgaaaatgtatatatgatttaaaaaaattgtgaaaaaaatgtaattataataattattcatattaagaaaaaaataatgtgaaagataaaatttagaatttgttgcgagctgttcgagactaggaagaaatgcctccaccttcccaaggtgaccttcttcatcgagattagtcaatctcttataagttagcacgaatggtggtgagaccccatcaagcacccttcagacttcgattgtttaaaggtcgagcctctgtgtatttctcctaaacataatctcgacctgctact

SEQ ID NO: 177051 - DNA, 799 bp, Cannabis indica
ttgagaattgagatgagtgatgaagaatcatttatttttaatggggtctaaaaagaattaatgggtattttgtcactaataaaaatgaaaaaagattattttttccaaattattagggatgttaaatatttttaattcatgaaatttatgttagacatgttaaataatcaacaattttacccatcaaagtttgactattttcaaattttgatttgtgaacttttatgctttccaaatttttgttacataaaaggtttaagattttgctttgtttttataataaaatcacatcaaatataatatttttttaattacgaaatcttattgcagagttatatcattttgctatttgttgataagaattgcaagttgaaactggcctagagagccctttactttgcacgagtattaaagggtaaaatcatgatgatagttaatataatagtaatgtatgatttaactattttaccaaataaagacaagtatagtaactttccaagtctttgatctagttagtatgttggctagattggtcacatcatatattactacactttctctccactttaaataaggcaaacaacaacgttttgttgcaaaacaacaatactaatattaatgacattacataagaaaataacattagtcagcaggtaagaatatgtacattttttttttttttagtgtaataaaggtagtgttaaaaaattaaagcaaaagttggaatttatggtcattacgaataagttaggcggtattttcgcaacatccaaacaactgaacttattgtgggtgaaag

SEQ ID NO: 177052 - DNA, 536 bp, Cannabis indica
ctatttaattaataattttaagaaaatagttaattataattaattaatttaaaaaaaggaaagtctacatattagtaacctgctattacagttcaaaaaaaaaatgtaaccattaaatagtcacccatatatataaataaattttgcattttgtaattatgcatctcacataaaatatatattataattttatataatttatagtattctaattaaaatactataaatatagtatttaaatttagtatggtttcaatatttagaattctttcaaaagtttagaatttatttacatataatttgtaatagtaaatattagtaaaaaaaatgaataaaaaagagcaaattaaaatattggtatatattctctcaaaaaaaaaaaaaattggtatatatatttttttcctaaatgataataatttgtaatttaacacaagtatacaagtattgtctaacctttaaaaagtcaaatgtccattaatcatatcatctagatgaatcgaaagcctgggccaaataactcacgacaataaaat

SEQ ID NO: 177053 - DNA, 647 bp, Cannabis indica
ataagaatgcatcctggttcttctatttggaggagatacagaattcaggtcaaaggaatcatgtgggacttggaacatcaaaatctcgaagttcaaagaaaactacttttgtttctggtgaaattttgccttctggtatgtctgttccaacttccctgaaagttgttgcgtcaactggctctgttgagttaacagatcagttacaactagcaggtaaaatagtgcactattggagatgctcttagatgttataaatattgtagggtttttttttttttattaatataataatctattaatatttataaacctaataaaatattaaaaaaaaaagggagcattaaggagtggatacatagaactatttagagtgactttagagtatcatgtcagcttcttatacttcaattttatattgatatgttgatgattttgagtttatataattttagtatttagattttatatggtattctaagttcatttacaattcaatttttttacttaaaaaaaataaaaaaataaaaactaatagatgaatgaaattaatagatactctttatttatttttggtaggaattgtatatatgtttgcgatatatttgatataatttaatataatacaaatagaatcaaacatttataat

SEQ ID NO: 177054 - DNA, 522 bp, Cannabis indica
gtctgtcgactcacagtttatgttcatgtgtaggtaaaggcaaggctgtagctgatggaccgtgagcgagcttatgagattgtacatgtcggggcggttaggcctggagcgtacgatcctcgggacagcacggctgagatttttgtaactgtcgttagacgactttcattttgatgtaaaagttaaacagttaaaacgtttgtaaatatttttataaatcgggatcccgagacttttgtaaaatggtttataagtttaatgaaaaagcaaaattttaattaatcacgtttttccataaacctcgttgattagcaacgagctgcacagtacgtttaaaaatcacgtaatacgcctaagatagttagggtgttacaattacacttgatcttctccatgcaatatgagattgcacaatttacttggtattttcccttgtagatcacgagactactaattgtcacagatattaaatcaatacatgcatattaaattttttttaattagataataatgttttttttt

SEQ ID NO: 177055 - DNA, 707 bp, Cannabis indica
aatagttttgtcatagcacctatagatcggattattattaaattttattttgacaaaaaatcagttcatggttctatttgtaccattttagaaaatacaagatccattttgtcatttaacaaaagagaaggtccaattaataatttttacaaaacacaaagtccaaaatattatctaccttcttaaaaaaaacaaatttgctagaaaaatggttttataaagtatttcaattttattttatagttcctcatataaggattttttattttttataattttttttagatttatgaaaagagtaatttgctgcataaatatttatgtttaactttttttttttaggttaaatcaccttagcttgtaatgcattacttcaacttccatttacaacctaccagcacttttttaaggtcagcaaatacaactatttaacaaggaaaaactgtttacaacttttcaaaccaatttatatgtttaacttccagttatagataaatacttaagtttaatttttaactagccggtaataatatttaagttatatttcttgaaactttcgtatgtacctaactgttaaatgtaaggcaatagtcacgtgacaataaatcgaaaaaacaatttctaatacaccaactaagaaagtagatatatagataatgagttgacacttaacagtaatcaggtacttacgaagttttaaaaataat

SEQ ID NO: 177056 - DNA, 624 bp, Cannabis indica
agaagagtagttattcatgtttacatgatttttcaaaaaacttgcaggattaacaaccgtcatgaaactctgaataatcttcataacataataaccacattgtactccatccggctgctgtcgacacgtgtattggttgatttttactggacccttgtttcgtatatttttttcgatcctgtacatgtccacagcactaaacaaaaaagaaattaattaatgaattgatttgtaacataatctaaatttaaaaaattataacttacttttggatacatttcataatatcagttcggataaagtcattcgtcgagtcaagatatgcaacactttgagtattggcatgaatcataattgtcaaccagtgatcactacagaacaaaacatgttaattcagtcaactcactaatcgatccattagtttgttacatttattaatataaaaacatacttactctgaattccacggacataacctaatgcaactaagaccggatctttttctttgggatcaatcacgtacatatcacacctcaatctcttcatttgcaaacaaaacaagagacaaacaaaatttattttaaaaagaacttaaataattatgatataaaaattaaacatgca

SEQ ID NO: 177057 - DNA, 617 bp, Cannabis indica
aatagtcaatagaatctaaaaactcaaaatcaatttcataatataattatataaaccctaaaattttaatcttataattctctcaatttctcaaaaattttagtcataccagatatcaatagaaaaataatttcataatgaataaaatgcctaaacttttaagatcgaaaaattaaaatttcaacataaaataataatgaaattaatatatatataattgaagaaaattaacgtatacatttattatatacatataaatggttgaattaattataagtcttaaatcatatacaatacgcaatctgataccacatgttagaaaaatcaaataacccaagatattaatttgtatataatctacaacacaataagaatagataataattaggtatacatatctataacaattataataatttgatagtgcaatactatcaactaagttttttttcctagatttttaaatcaaaagcagtttaatttataattatcaaaagtatacaattatgatgaggcaatatgtatttatagagttacggaagaaatttagctaaataattctagttagactagacttgctcatcaaaggtttttgcgaactagaaaagctcacaatt

SEQ ID NO: 177058 - DNA, 580 bp, Cannabis indica
aaaaaatcagttcagggtcctatttgtaccattttaagaaatatagagttaattttgtcatttaacaaaataaaaagataaattttgcaaaatacagaatccacaataatatttaccttaaaaaataaaaatgtaccagcaacatttttttttttcagaaaaagaattagaaaattaataaccatacaattgtaaaataataataataattaaaaaaaaaacttaataaaccagtgatgttccatgctagggattgtttaaagaaacgacatgtcgttttcactttacaatttttattaagggtcaaaccccgattcgctctctaaaccctaaactagttctttctcactcgcttgaacaccctgctcggagccccatcaaaagaaaaaaaaaaaaaaaccttcctttactgagaacttacaatgaggccttcatggcgtctgttacttctccgatctcgcgttggcccggggtctcgtgtctccgtacaccgctcgtactctcaggtaccatcttttcccaaccacgagtcctttcgatgtctcacttcactcattcacactggttcgctttccccttc

SEQ ID NO: 177059 - DNA, 514 bp, Cannabis indica
ctctttgctcgaccaccaccaaagccaagaagaaccaacaatttcatccttttttttggcattcagtaaggaacctaggagtttccaagaagaggtaagccttagcaccataatcctttagtttttttttaagtttgaagtttggtttgattgtgcaattttgggttatggggttgttagggttagaattgtttgtaatccagtttctaagcttaattttagtttgaatggggtactagcaactggtttagggttgtggggtgatggatgcacaagtttgagtttgaaaactcaagctttgttcatccatggcatgttttgattttatatgtatttttgaatttcattgattggaatatgttgtgggagatcaatataggtgttctgaaagttttggtgaagtttggacatgatttgtgcaagtttggaattgtttggggaaacctggtgcaaaccagttaaccaatttgccaggtcctgtaaaaccggttaatcagttttggcaggttccccg

SEQ ID NO: 177060 - DNA, 520 bp, Cannabis indica
aatcgaaggaggtattctatatagaacatccagaataaataataatagagtatcaattttaagcaatagagagagatcgatgaagactctaaggaaaccattcttgtttattttagttggagaatccagatgaaattttgaccaacatgaaaatcttgtggaacaacaaaaaatggaggtcaatagaaaatagtcctttaaaatagatttgataggagatggactcttaagctaagcttcaatcatcctaaaattcctatgatatattagaaaaataaaactttttttgctggacaaataaaacctttttttctgttacagtgaatgaatgtgatttaaacataaaaagaaacaaatgtataagaatttttaattaatattttatattatttttataatttctaaaatattaactttcccaaatttataatctctaacacacaagtacatattatattatttgttacattctaaaaatacatgtacatcaaaagtgaaaaataatatctgtatctcatga

SEQ ID NO: 177061 - DNA, 510 bp, Cannabis indica
acttcaagatactctgtgtgtaactcccttatgtcagggccttttgggtacaatacatataaaaagaggtatgtttcaatgaaaaataaattagaggtaaatttggttaattgattaataaaagaggcattttttaagttaacactgatttggatggattctaggtgtatacacaaatgaaagaagattacaaaatttacatattacaaattattttttggacctattgacaattgcactatggttaaaatcagattattagatatgtcaacaagtcaaccatagcaatttatatcaaacaataatcggttttataaaaaaaaaagtttgaatattaaataataaataaaatacgcatgcaacaaattggatagttggttataggatttatttaatttaaattaaataattaataaaattaagtttcaaaaaatctaaataattaaatattattttagaaaagtaaataaagtaaatgaatttagaattaattgtgcaaatttgaaaatt

SEQ ID NO: 177062 - DNA, 873 bp, Cannabis indica
ataataatggaatctacaggacatgagattgagacatttctctctctttcttgtcactcccataaatcttactttgaaatatataattttagaaagaagtcatggccatgcatgaatatgactattgtacctcttttacctttaatatatatttataaatatagcaccattatatatataaacattttaattttgaattgaaactgactatagctcttgctgttggagctatctcacattgaatttgtctacttatagagaaacacctctattattaacattgaatattcccataatagtgacagcagtgatggtgggtcaatgaattttcacattgaattttctacttctggcattgtataatccatacagtataaactatttgttctctaatgattttttctccctttccaatgaatccaaaacttaatttaacctatatatatttatattaatgttacttatactctttctcaggacacattctacagttgtgcacagcacagagataaatatatagaacatttcaattttcaaccacaaaacaaagtatatattatttgaatctaaatagtcatagttatagccatagtagtagtaatagtactactagtactatctgcaagctcaagatgcagttagttttgttttgttggaaagttagagttagtacttagtaataacacatcatcaaagattcaaacattccaaaactttagctatggttaattgtagtacctaatctaaattgtaagccgtggcattaaaaaaaaatgtaaatatatgtgaagaaaatgaatccccaatctctccatccaagttggtgaaagtctaaaaaaaaggtgggtcgtgagagaatgatgaaaaattgaa

SEQ ID NO: 177063 - DNA, 601 bp, Cannabis indica
aaattgatatggtaatggcctaatgggatttggggttgagcacgtggcgagtttgctaacaaaggttttgcacacgtacgccctcgtgttgtgtttcaatgtttgcttttttctagaataagatcaatattatagatcatactatatatataaacatacataaaatatgtttgtggatgataagttgttagtgttgtgattactataatgcaatatgtaatattcttgtgattattaatttattttcatagtgttgaacgatgggggcaagcttgtccatttccctctaaaaggggagaaaaagctataaatccacgaagtttttttttaaggaacaattatatataatttttgacacataatcaacgagcttggtgtatgatcgcgcatgaaaaactgaataatcgtgataaaaaaaaaaatttaagcggtatactaatttttattatttttttataaaaaaattgtcatgtggtattttactttttacttgtatttttaataagtttctatattaaggtatagtgtgttaagtttccattagtgtttattagttgttctactttgttttgtagttgttatgttctgtgttctactggta

SEQ ID NO: 177064 - DNA, 615 bp, Cannabis indica
aggtcaaaagaggatagaaaactagccacccgcctggaacaaaggcctaagtcggctaggttcccaagcttcgagagggtaggccaaggtcctatgacgtagccaagaactggtcagggttaccaaacccagacatgaacaatgtagctttgtagggtgaaaccctagggctggccaaccccatgattaagtcctagtaccgtctgaggctcaagtatgatccgtagggccatctagggttaattttgaatctaaatgtttggttttttcaaaactcaaagatgtgcctcgtgttctttatgactgaaagagtcaagaatcacaacgaaggccaaaattgaatcttttccatcagaaaaacacacattatacattctaaaacaatcatgtggatcaacataccaaaacgattacaatctaacatgagaataaaaaaagtttctaaaagcttgatgaggcatatatggagagagaagataaaatatctaaaagcatgccatgttaaaagcacccactattggaaattattttaccaggatcttagatctactcacaagtatgttgtttaacaccctaaatatgaactttctaaaacgataaaataaacacatataa

SEQ ID NO: 177065 - DNA, 599 bp, Cannabis indica
caaatttttttatggacgaaagaaataaagaatttgacaaaacatccatttaatcaagggttcattctagttttacccattactttaacccctcatcattagcttttctatttatagaatgtcaattaaatattatcaaaaactaaataatactcttcattaatttattaatcaattattgatcgatcatgacaactcatcataaactatcattaattgtcaatattcaaataattattggatacatagaaaaatatttttacatctcacaaaataataattttattttaatattttcaaaaaaaattaaacttaaaataattattaaaatcacttttaatatttttttaaacttttttcttctcctactattttgtgttgatttcaatactgattttaattttatttattttataattttttttaataaaattttacataatttttcattttaattttttgtttattaaaatttattattattggatagatccaaacataatagccacgtaatgtacttataacaataattaataaattgcaggattcacgtttttgtcagataattaatataataattgtatcatttccagtctttt

SEQ ID NO: 177066 - DNA, 511 bp, Cannabis indica
agtaactacttaacctacttttttttttgaatgaataacacttaacacttaaatagatggaaatgtaaatgactaaaaaaaatctaatttggaaaattttaccgttaaaatttgagttttggaggttaagtacaaagaaaaaagaaagtgttaaaaattatgccacaattaactgttcaaaaaattaattagagtatataattttgtatactgtgcgtaccatatagctacttataattaatttaaaagcataattacttttatatataattctttaagttattctaataaaatatttctatactaattttggtagaccattaattatatatttgttatcatgtatcacatttataagttaatatatatttttttaaaaaaaaaaattagacaaaattactgcgtttaatttattttcattctttgttataaatatggtcactacactaaaattacaaataagttacatttgatatgctgacatttgttaaaaaatgttacaaaaataata

SEQ ID NO: 177067 - DNA, 659 bp, Cannabis indica
gagacttatagtcttgacaagtcagaagctgacattcgaatgatggctgctgaagcaccctttttgtcataaagaactgtgattgtcaaaatgaagtgttatgtcttcaaacaaagaaagaacaaggcgaacatcatcaacctcaaagagataggataaaagctccagctcgctatcaaggtcattggtaccaagttcctgtcgagacatcccataatattatgacttaagacgtgtttaaatacacgatcattttgaccaagtaaaagcaggttaatcacagttgtgtgattttcaaatattaaccgcaattatactacatgatatgtaatcaaaccccacaattttaggggataaacgttgtaaagattactgtcgactctgtaattaactgcctactatgtaagtataaatagaggcaagttagattaaaaaagggacgaaaaaatcataagaaaaggggccctaaaaaatcatcagaaatctaataagattgactcgtggactatgcagaattttaactgcaaaaccacgtaaaaatcctgtgtgttcatattttccttttctttaccatctttattttttttagttgctaagtttacctaattctaggactcaaatttttggttaaatgtaaaaatctgcgttaatagttttgt

SEQ ID NO: 177068 - DNA, 525 bp, Cannabis indica
atgttaataaatgctctatagggacaagcaaaaaagtacactcgagtatattgcaatagtatgatccacgtatcaaaaaattcaacattagtctcacacaatttcctaagatcaaaccccccaaaacaaaactaaaaaaaaacgatacttttctcaaaacccagatggctaaaacatcacatttctccattcttggagcaaaaaccaatcttgagcgcataatatatcaacatggtaacaaaaacctcagaagtaaaaaccgccatggaagcttccaaaacggagggaaaagaacaaaaaaaaaaacaaaaaaactacaagcatatgaaagaggacaggaaaatttaaacaagaaataaagaaacttaaaatcaaaaaagagatctttcattggatgaaatagtcaaaactcacggttttggagaagtcttcaccaatggatcgtctagagaagattgtgattgttgactggtactctgaaatacccccatctgtaaatctagctaataatatgtgaacaaagag

SEQ ID NO: 177069 - DNA, 564 bp, Cannabis indica
atcgataggggggaagggaaagacctgtgcgagtgatgtttagtattgtatggttttgacgaatggggtactgccacgtcacaaaagagaagcaggttcgttttttccggtgatttgtacggatgacgtcatcattcacgtggaattttctatatatttcttctgattttttttccccaaacaaactaaccaattgtctatgattattgtacatttaaaaaaaaaaagaaaaaatctaccattatttttacagaaacgaatatagagttgttgggtacttttatgtgcagtttcaatgaatttcttcttttgcatttctttataaggaatcataagttatattattctttatgtttgccttatttaataataaaaatatttattttcaaaaaaaaaaaaataataatgaaaatattttaaaattaattaaatttcacttttaaatttcttttcccaattatttgttttttcttttttgtaatagaaatttcttttccaattataatttattttgttgtaattttaccttttggttagtatacgtcttaagtttttttttttttt

SEQ ID NO: 177070 - DNA, 1203 bp, Cannabis indica
actgattgggatggatcctatcatgttactaggtttatatacagatgaaaaaagattacaaaatgtacatgttacaaattatttatttgacctattaacaattggataatggttaaaatcagatcattggatctgtcaacaagttaaccataacaattaggtcaaacaataataggttttataaaactagtttgaataaaacaataaataaaacacacacgcaacattggatagttggttataggatttatttaaattaattaaattattaaatattattttgaaaataaattaaattattaatttaaaattaaacctataaatttaaaaattagaattataacaaacctaaatatttttcaaaatttttaaccaatttctcaaaaaatttatgttatttttaaaagaaaataaaattaaatatctaataaaataaaaatgataaataaatattatttatctacttttataatttaatttaaataaaataacaaaattttaaaagtttagatagaatatttggttggtttttcaaaattatctagattattttattaaaaatatatattttatttcaaattttaaataaggtcattttataaaattatttaaataatgaaaaatatgaaatatctcatcttaaatttaaaatgagataaaataatctattttttttttttttaaaaaaaaagataaccaattaaacaaaaaaatgatgtagatattatatttttcaagttcgaaatttactaattaattaaaaaattaattaatttcaaattgataattaaatttgaaatatgaaagataaaatatacatacaaaattacacacaaaatctacatataaaattacacaaagataaaaatctacacacacaaaaaaattaaaattaattccttgaaaaatcatgaaaaaatgaaaaaaaaaaattaaggatttggtgcagatggtatgcactgcataccatccctgcgcgcaggggatgaggatcagtcaagaaatctcggagttggagactgtacgcagcctgtccgcgcacgcacaagccccattcagactagatttgcttatcacgactgacaaaactcaaatagggccttctccaacccgcgtgaaccccagtgacacggggtgtccgcgcgcgtaaggaggtgatgccgctcctgattttttttttttcaatttttaaaattcatagct

SEQ ID NO: 177071 - DNA, 565 bp, Cannabis indica
ggatggtgcttcacttcaaataatccttggcatcttggagggagaatagtagttagttggaaaccaactagctataatgttaatattctaagctgttctagtcaattggttcacttgcaagtttcaactgtggatatgaaggaattattttatgtaactttcatatatgcctttaatgatgaagatggaaggaagaaattatggcttgatcttcaaagtttatctaccgtgaagccatggattgttatgggggattgttggaaataattttaccaggatcttagatctactcacaagtatgttcattaacacccaaatatgaactttctaaaacgatgaaataacacatataaagtttaagaaaccttacattagggtgcagcggaatataatgactccttccgttcagatatctagcccttgattccttctgcagcagagcattatcaatatctgaacctggatctctttctctgaatctttgatgctaaacctctctgctaaagtctttcttcacgatctctcactatgattgaggtatcacttgctgtgtgtgggctactct

SEQ ID NO: 177072 - DNA, 563 bp, Cannabis indica
ataatgtaattaaatattaagtctcacacattttaattttattatcacacaaaatatttaaaccagtagttaactattattatagcaaaaatgctttcatagaaaaggtagtgttatattatttgttataatatgatatagatcaaaatatttaaatgtgacctattatatattaatatgagattaatatatattatttgtttaaggttatattatatcatgtatagtataataatacacataaaaatcataacatatgaggagttacaaatataaaaatagattgtaacttaaagatcacgataatatgtaattaagtgaattattacatatagaagttatagaatcaatgtgatgagtttttagttgttagaaactgttacaatactcaaattatatcatttaaatgagtattatattggagaaagatttgactcaaagaggagttacaaaaactaaatattgagttttctaaaaacagttattttatggttttttatggttattttttgaacatctggaactagttttttgaaaacgtccataaatatacatgaattgat

SEQ ID NO: 177073 - DNA, 615 bp, Cannabis indica
atagttgttgtaatgctagtgaggtaactcaactataatttgctttttagaaactatttggcaaaacaaagtattttacagcaatgagactaaagtaaacactcgcaaaagaactagaaaatacctcttttactcaattttgtaaaagtgcataggactctaatggttggcacgatagggatagcaacctaaggcaggggaaagaaagtcataattaacactcaaatagagaaataaagaatatttgttcttgagagaactatcactatgaaatactaaaaaacaattttttatatactatcaagatataattaaaccgtgtctcaagtaatagaaaatcagtccctacaccgttactagagaagctcactgtcataagacaatgcttagcacattcaagtgtaacagaagatccaaacatcaaaagaccaaatgaatttttaaaatcatgcgagtcaaattaccaattaaatttcagccattttaaaatgctggaactacatggctaacacctgcagatttcagcatgaacgctacaagtgacatgaactaaccaagaaaaaaacaacgacacgacaaaccttctatttaataaaaagaatttggttttatgtg

SEQ ID NO: 177074 - DNA, 749 bp, Cannabis indica
tgtagttataagttacactattattaattaataataatagatgtagaataggagttactctattgaataataataatagatatttagttaaaattattattaaaaaaataaataaatgaataaaaattaagaaaataaagaataggatagaaaacacatatagattcgccacctcaactccctaatgctttcttatatatatatattgatgattgatattgatgattattttctaactgttgattgatgtaatggacatcctcttcaaaatattgaaagttataactcagttattgagtttcaataaatcacttgggattttaaaatactataaatgtatttcatgggcgagttaccatataagtgactctaggtgttcttgctgccctttcaaatttatttaattcccactctcccattttgattggatcttctttgtttactgtcatttggttgcagcacatagagctagtttctcctactccacctgctgccgaggtctcaacttttgacgtggtgggtcctgtgtgtgagtctgctgatttcctgggaaaggaaagagaacttccaaccccagcccaggtaacaattgttaaacttgaagtaaatgatcaaaactcacccatattcggaagaaaatgctatttaaatattctattcatagtagttttccctttacttggtcttttcttgatataaagtttcactatgcagggagctggtctagtagttcatgatgcaggtgctta

SEQ ID NO: 177075 - DNA, 583 bp, Cannabis indica
aaaaaaaaaaaaattaggactattttcaccaccatggtttccaactgtaatcacagtccttagaaacaatctttgccttcgtcgttaacttatccaccgttacaacgcaccggactttaacggaaagtgtccaagtcttaacggagcccaactttagcttaacgggaacttccaccgtcaatttcaacggtactttccctttcttctctccgtttcttaacgccttcagaacggaactcgtcaaatcaatcgctggcccctttaacgctgcctttaacaccgttacgttgttcgacggctgataaaacgctgggatagctccgttaccgagcaggatatcggagtagtacacagaggcagagctatctttcccgtagtatattccaaccttatcgttagggttttcagctctaacggaaacatcgatgactggagaaatcgtaggagtcggagacgagacattgattcctttaatggcgaagcttgtgacgttgtatttaggcgattcaggtttgaaaacaaggtagagtacggcacctgtaatgccgataagaacgacgaaaacagcgaggagtaggagaaa

SEQ ID NO: 177076 - DNA, 1245 bp, Cannabis indica
tatagtccacgttgcgttgagtaaacccctcaaaggtttagcatagtgggtacattaaaaacattaatcgttgcctatttcctcattttgtttatttccaaaagaattttttgatatcctaggttatgagagcattacagggtttatttgttgttactagattacatatcaaaatcaaatgaaagagtttagttgctactagccaacctttagctagttctagtaattttataggggggtcttgttgtttagttttggtgtttgattgattttgatcagcttgaaaattttaattattaattttttctggttttttgatgtttttcaagtggaattttaatgttacaggctgaaactttaatcctattgtttggactcaattgggctcatatgttgtggtcttccaattcatgcaggttattcagattcgttagctttggtgacggcattcaccaatgagaagatgtattttcaacgaattaggaacgttgtttgaagatgctatagctttattgtttaaatttctgggggcagttttgtcccatgtggctcgctctgagattttatcagcccatggcttagcaaagcatgttctatggttagacgatgagctatcctggttcgaggaggttccagcaccggtggcagacatttacgtaaattcatgagtgattctaatcactttgtaaaaaaaaaaaaaatatatctaattattaacattctatcacgtgattagaggaatagagcaaatccaacactaactaccttctaactacgttggtggacccttattttttctttttaattataatacttttaaactgaccaattaaaattataaaaatgtgtagtagtaccagcaatgcaaatatttacatttaaaaagtttataatttttttttgataatgaatctcattttttgacaaccacgttaactagcattctcattgaagttgcacttatacctttagataggtaatcaattagattattctttttccaataataataataattactaataagaaacaccacttcccttttctttttttttttttttttttgtttaaattagaatatcatgcacttaattgtactttgtgtactttatttgatattgactttctaatagttaggaagagaaataaactaaaaataaaaggcttaccaatttgcattgatatctaaaagtgatgttaccaacttatactaataaattgcataaggtgttagagatgtataga

SEQ ID NO: 177077 - DNA, 587 bp, Cannabis indica
aataaccataaagtttgtttgtaattaaattttgtttaatttatagttcaattactttttgataatagaatataaaaaaattaaaatgttgctttttaatttcgatcattttttctattgatgataaaaaaaaatatatgtttctcacatattaaaatgaccatcttaaaaaataagatccaatgatattacttgtgagaaacaaatgagtatttttttttagaatcttatcaaaattacactaaaaaaaagcttatattttagttacttttaaatataaattaacacattactttttaataacttatcaaactagttggtaaattaaactttatttacattgaagtttgatcattatttacattgaagtttgatcattattttcttaaatgaatatagttttagtgtacaaacaatcattaatatggttagaattttttaaaaaaatttaatagaaagaaaaaaaaaaataagagagagaaaaatatacattataataatagtttatctttttatataaaaaaaaatattacaaaaaataaagaagaagaatgaaagaagggaagcaaattaatgagaaaaagtat

SEQ ID NO: 177078 - DNA, 740 bp, Cannabis indica
atgatatgtaatataatgtgtttattaaatttaaatacaaattttaaataaatatgtatgtttattatttatttttaccattatatagtttgtacatataaattaagaatatgtttctcacagttaataaagtgtatgataaattgtaaatgtattttttttcacatataatgtaattaagcactataatatatataaaattataaatttcccatcatataacattatttaatttccataaacacattttagtcaaaatttggtaaactcggtccgagccaaaatacctaattgtaattatactgcactaatttgtcaaaaattacatgtaaaattacaaaatgagcacactataatctcttagcacatagtatagtaaaattacaattttactcttaccaagttataattacaaaaatgtccctatcacataaatgagaacttaaactttattattcacatagaataaaagataattaattatatgataatataatcccacattaatacttaattaagttaattaagatttctaatctatttctcattttaggatattacaaaatttctcaaggaatattgctctggggcgataagatcgggaacacaaaatggaaattgaaagggttaaaagtataagccatccaacatcgtaagggtcttagacagaaaaatcagtcacaataatactctcataaaccttgatagatctcttaagcgtaatgataatgtcgaatagg

SEQ ID NO: 177079 - DNA, 331 bp, Cannabis indica
gtcatcagtctctatgatcgatgcttattggatcaatgcaaaactaggtagaataggcgatcgaacatgcatcagtggaataatgggttttcctatatcccatctatttaaaactgttgacaaaaacactctatatccaacgatttagagcaactcacaattcctttaccgttggttctaaattgttagctatagtgagccactattgttgttgattttaaacggacacaataaaaaaattatattaatctgagatatattttagatccacaccaacatacaacaataatgcaaacaatctcagatccacactataccaacaacaacaata

SEQ ID NO: 177080 - DNA, 929 bp, Cannabis indica
gtacattttagacttttttaatatttttataaaaattcaaatcatcacaatatataataaaagaaaacataaattatcaaacattaactaataatttatatttatagatttattgaaaaataatattatataacatttaaccaataacttagtttaaataatgaaatgttatgaattatatgacttaatttcaatccaaaacatgggattatatcaaattaaaattagaagttaattaattaatttattttacaataaaattttaatttatttagtaattacattttaactaatactatttatttgcaattactttgaaataattttatttattagtaaaattagaaagacaaaaattaagtatttacattgacatcatttttttcttttcttttcttataattgtttgttttgctgccagctattatcttgtgttgtgtctttttgccgccctctttttattattattattttcttttgtcttttggtacttttgatttggttttttttttttttttttttttacttaatttgtctgatattatatatattcttttgaaaatttttattttgcttgaattttttttggaagatttatttaaaatttcatctggtaaatattatttattcaatcaaatattaattataataattgctagtataattataattaaaatgtgaattaatttactatatattgtataactattaatggtattgacacttttttttatactaggtgattgttacgtgccaagccacgtagtgttagttttatttaatattttagttttttatttgaattaataattaaaatagtataatatttgaacgatttgttttaataaaaaaaaaatatgtgtcagtatatttagtaataagtaaaatatagttattttataataatgtatgtattaatagtaaaatgt

SEQ ID NO: 177081 - DNA, 738 bp, Cannabis indica
attcaagatgttccaggaagctaagaataagatctaaaactttcatgttgagcttcaagtctagttctacctctaagcttgttgaaatttgccattaaattctgccttgtaaaatcgagctcaccggcttccattattttctatcaaaatatgctaaaatccctccaaaagactctaaatgcatgaatagtctttaaaatagcccaacaaattaaaatcacactaattaataatttaaagaatcaatttaagaatattaatacataaattgatcatatttataagacaaatatggactcatcaaattcccccacacttgactcttgctcgtcctcgagtaagttaatgataaaatgaatgatgcttaaacaaatcggtctttatgaaaaaagaaaaaatagtttcaagaattgtacatccctttataattccaagaaaaattacttttcctggaatttcaatcattagaatttcaactcaagataaattactttacaaactcaattttttttgtgtgtatgcaatcaactcatcatattactaacattcaaatcaattcatgcatgccaacaataaacacatctcaaaagaaatgtgtatttcaacgaaaatctacttcataagcttaattatcaaaccattctccactaaatataattatacacaatctaaaaatcaataggactataggcttataatgcaaggctagggtgaaaggtagatagagaatgttaattt

SEQ ID NO: 177082 - DNA, 963 bp, Cannabis indica
ctatctgcaactcgttacgacacgcaagcaacaataatctaaccctttgcctttaaagtcatcaaaatccacaaatacactctaatttgttaaatcgaacttttcagcttctattatgttccatcgaaatgtgttaaaacacatcaaataactccaaatatgaaattagcggttaattatgccaacaaaatgaaatctcattaattaaaaattcaaagaataatttcaatcataataacacaattaaatgatcacatttgtaaaatttaaggacttatgccacaaataaatagcacggacatattttcccttaaacaaacacaaaaaagcaataagatgaatatccatttgcattttcaataataccctctttcatcaatgcattatatagggacattatttatttatcattttttataaatattacatgagaaaatttacataatacactacattttaagtttttaacaaacgttttttttttttaaagtattttatgttatttcaacgtcacaacattactatatttccgtgtaagtaatagttttttctagaacaacaatacttaacataagttgaaaaatacctattttttgtagctattaatcaaaaataccctcatattatttttttattaaaatatacccacttttttgagtggattacctaatataccatcactctctacttaagtctagcatataatttacataacctaaggggtctaatggagacatcatccataaaagttggtatatctaaaaatatatgaaaatagagataaaaattaaaacaaattaaaaatttcaaaaagtccaaggtaaaaaaaaaactcaagattccgtaaaaacgtaaatttttagttgtctacgggtatttatgaaataattcatattacatatcattcactaatcaatttgaagttatttgttatcgtacacatgtttttttaaaataaatggt

SEQ ID NO: 177083 - DNA, 543 bp, Cannabis indica
aattatattccttaaatacatcctcaacttataaatactcttattctttttttttttccctgaaatgactcttatactttacctaaaagttatatattctttcttaaaatctatatttctattttttaaaaaaaaaaaatcataatgaaatattataattttttttgctgaataatgaaagattgtaattagtaaattcatactttttttgacacattaaattcatacttaaaatggtgaaacaaaatttatttacaccatattttaaaaatttgtttagcatctttcggaaaaaagaaaaacaaaaacctccaaatataactgaattaattgcttcaaataataaattattatgttttttcttattaatttaaaataaaaataaaacatagggtaaatacaaaaagatctatttactttgttaaagactgacattctcaatttattctaagaaaaaaaaaaaaacgaactgacattctcatcctataatgtttgttttcttaatttttatgtatatggtaatttcattccaatgacaaatag

SEQ ID NO: 177084 - DNA, 566 bp, Cannabis indica
ttttttttttttagaagaatatataacaacaaaaattatgcaacgaaagtatatatgatattacaaaataacacaatttgcttcatataacgacccactaactttacaaatgtacaatgtgatatcattgtatataattattactttggtacacaaactatttaattacattaaaataaaatgtgaaattctgtaaccaaattaatttttttagtaaaatgaatcccattaaatagaaaaaaaaaattaatatcacatgtagctagtgttttagtataaatttatgtgtgtacacatacatacaaaaaaaattatacaattcaagggtatctcaagatgataagaggtttagggcaaaattttttaacgaggtctttcccttttataaaaattaaaaataagtattaattaaattttaatgtagtatcacttttaattcttttatctgtatataataaataattttttggcacctaaactaactcgataaaataatatttaattattaagatcatctcttttgaattgatacatattttagtacttttgcaaataataataataat

SEQ ID NO: 177085 - DNA, 570 bp, Cannabis indica
tactggtgccaagaaatctactcctaataccccatatgatattgaattgattcgtacatcaatttttgctttgcctttttttttttttttatattgggagtgattttttgatgtctaacacgatagtatatgttggtagagaacattatgagtttccaatatatttgcttttaattaacaatatgatgtattatttattaaaatagcctttggccacaataaaatgaaagttaataccttcttcttaatgactatttgaaagagatataatttcttttcttttttttttttgcagcagaaagaggaattattttgaatgtacttgaaacttttaacatttaccataaaaatacttcataagcaaacctcagagataggtccaattaaaaaactaattgtttatcatatacaaaaattgaaacaccagtaagtaatggagaaaataattaattacaaaaaccaaaatctggtttacgaaccaagatttatctatattctattacaacaccatgacttggggatgggctttcagatgactaaagtcttaaaaaattaactgaaaaaaaagtt

SEQ ID NO: 177086 - DNA, 814 bp, Cannabis indica
tagtatagttagtttttttagttttttttttttttttatgtaactaaaacttattctagtaaaaataataaatttattttttggttgttttataatttatttatagcttattttatagttgacattagtatttatttttttgattgttttacagtttatcatgtagttgatttataattgttgtgtaggttgtatttttaatttttttagttatttttttaaatttttttcattaaaatgtatttttataattttaaaatttcaaaaatatatttttataaataaaaattttacgtcctaaaattataaataaaatatttatataaaaaaagaattttttaaaaattcatttatacaacagttgacattttcatcacctctgacgtaagaattcgtgtaatttttgaaacataaatattcgataccatacacacaaatgaattgaaatattaataaattaaaactcaatgataattaattatgctatgaggaatttatattattataaaatataattctttttgtataattatgccagaaataggacgagtacttccattagctaggcataaatacttaaatttaatttttggcgataataatatttaatttataattttagaacttttaatggtaggtactcaactgttaagtattaagtaaattgccacgtgttaattcctgattggtccaagtcgttaaaattttatttttttttaaaaaaaattaatttaaatataccaataagaaaataacacgtgaataacgacttaactaatatttaacagttatactacagagtttcaaaaatata

SEQ ID NO: 177087 - DNA, 659 bp, Cannabis indica
gtgcatttgtgaaattaaccattagatttaaggaaacataattaggaccaaacccactaacgcacgtatcttaatatagacttcatctaattcaatgaaattcgaaaagtggggaatggtgtaaccacaagttgaccactcaaatcctcttaccaaaaatcctatcccattctctatcccataaaatactaatgcgtctattacggtggaaaagtagtccgactatcactgagtgagtggctgagtggcatcctcttttactttttgccatatttttacactaatcctaacgtaacgtttgtggatccaattttggtcaatttgcatgactcagtcatatgggtctcagtctcccattatagtgcgcaccaacttgtttttgtttaaaaatacttcgccctatataaagccaaactattaaaaacaaaaattattaccttccatccttttggaatagtataaccggcataggaaaaatcagtaagagcctctctgaaaagttccttgaagaggaggagtgaatctcataacctcataaaccacgttccatgaatacttcatcttgcttatgtcatcccattccaataattctcctcctttttttgatccccaaatctccttttgctctgtttcatatattcccatgcacatcacaactt

SEQ ID NO: 177088 - DNA, 571 bp, Cannabis indica
gaagaagccgagttaatggactcgagttgggttgatcctcaactactttgtgatgggaaaaatttaagtgtaagaggcaaagttggagcttttggtttattggttttagcctcagataacttgacagaacaaactgcaatcttctttcgcatattcaaaaccgataagagtgagaagaagaagtatgttgttctaatgtgtagcgatcaaagcaagtcttcattaagaaatgatcttgacaaaacaacgtatggagcattcgtagacttggatcctcttcacgagaaaataacattaagaactttggtatgtaacatgttcgtaatttaaactaattagggtacgtattttgaccattctgaacgaaacaataatacttcaccgatagaggtattgataaccgaaatttgtgtttttttttttgtgctagattgatcattcaattgtggaaagttttggtggtagaaggaagaagttgttatcacaactagggtttatccattattagcaattaacaaaggagctcatttatatgtattcaacaattggaacaaagagtgttaaaaatctc

SEQ ID NO: 177089 - DNA, 935 bp, Cannabis indica
atggaatatacattttgttttagggagtaatgaatttacaattcataattaatttggctaaatggagaatatggaataatatttcatttatttgttttctttttattagtattttcctaatttgattatggtcataatacatataattaatctgtatctctttttatgtcattaaaattgaatgtgctttcatttttttttatttagactaacaaatttaggcaaaatggagaagagagaagatgataattccattcaaattcaaattaattgtcttttttttagttaataaaaattcaagtcaattgtgatcataatcaggtataaaaattaaaggtttatataatatgatttcataatgaatgaaggggtcataattttcaatattatatacaaaatttttgttgtcaaattaaatcaagctaaatgtactatctatataaaattattcatattcaattgttttttttttttttttttatttattttttttttttagttttgtatttttctttttgagacagtcttggactaccatcaaagagaagacctcttagaagggggaggacctaaaaaccttgtattaatttattatttccttcatgcaatataagagattaaatacatgaatgatagtggggccaccaaatcttgctaatatttagacaataaagtatagcaagtagggattttcatcaaactcctcaaaccgcttgcactgtaaaaaaatgcagtttgaaattctttgcggtgtggtcgcagtttgattttttcttaaactgcacagtgcaatgcgatttgcagttttgaattgttaatatgcggttcaaaccgcacctcactgcacattagaaaaatactaatttttatatttatttaggcccaatatgtgaatgtctaatccaaaacccactaacttattgtattaatgttgt

SEQ ID NO: 177090 - DNA, 730 bp, Cannabis indica
ggttttatttgttttcattttttatgtcgtttaattccaagatccaaaatacccagatgctaatttttgttgaaatgctataaatttcgcttgagattttcatgaaaaagattgaatttttaattttttttctctgccttttttaatccgaatctattggattgatgatgtggttaacgatataagcaatcttggtttatgcaacaatgtttttttttcttttttgggaaaatgcattgggctttacagtttataacatttgtgggataatgtaatttttgtacaaaatctgatttttaaatttttttttggtactttctaagcataatgattcaaaatgtgttctatgtttgattttttttttcttttcaaaatgttgaatagctctattaaaagtttgtttcagcttttgaagatgaaaaagaaattgcttttatttgtaaatgaattagatctcaagttttttgactaaaccattttcttggggttgttcaggttaacaatgggaaggagtttaagtccaattctaaagagagagttggcaaatcttgataaagatgctgatagtcgtagatcagcaatgaaagccctcaaaacttatgtgaaagatttggattcaaggctaattccattgtccttgcacaagtttctcaaactaaagaaatcggtttgtcgtggtgaagtgcacgatttcattgtatgtaagttcttgtctcgggttcagtggtgt

SEQ ID NO: 177091 - DNA, 660 bp, Cannabis indica
attttttttctgttttttttaatattttttttcattggttagagtatttagtgggggtggtaactgttttacccctctttttgccacgatgtgacagttttttttttattttttgtgttttatgtgggttggcaattacaatttattggttatatatatttggtgttagtttgtaatgtaaacttattaacttgttttgttttctctgtattctttgtttagttttaggttatatacaatggataagtcccctgatacagtcgtctatgttaagaaaaggaaaatgggtgaagtaaggtatgtttttatattttcatgttttattttgtttgttgttttctgtattttactgtgttttaatgtttttgtgttgtttattatctgctactcaatgttttcaggacattattccttatgttgatcctggagttcaacagaaggattctcatcaatctgttttttttttcaaaaatttaaaggaccaggtatatacctggtttcttttgtttattggtgttaattcatgttcatttattctgttttggattgtttcgttttattcttgttgtgttttataactggtttttaaccagtttttaatattgtattttttattttgttaaactagattgagcctggtaatgttgcgtttgttggtgc

SEQ ID NO: 177092 - DNA, 783 bp, Cannabis indica
gtatttatattatttcgtagttatttttaaaaaccataaaatagtaaaaaaaacattctttagaacgtaaaatataaatattttacaaaaatggtaccttatgtaattactcttttaatttaattaagataggatatttatttccatattttgtatttattgagctaatttttttttttaaataaaaaaaaaatttgatcgctgagggtaagacaatacattaatcattatataaagagagtatttttttctaactaaaaaatcccaatttttttttttatttatagtgcatatcttattaactcattattaactcatgctcttcagtattatattggtctacagaatcattaccataaaaatatcacacatttttagattttggtaaaattaatagtaataccaaatcataaaaacggttttaagttcaagtgacttaatctaaactaatcactaaccaaatcctaagtaaactccaaaagcttgtattctgacttgaaagtaaaaccaataaaatcaaacaaaattgagaacctgctactaaactaaagatgaagaaacaaaacatcatttagttatataaacccttatggaaaattaaaaatgaagaaggatgaaagcagattaacgttcaaataaaaaccatcttaaatattttttaaaaaatatatcatataaaaaatatatctttaaatgttaacaaaattttcttgcaaaaaatatgtattaacaaaattaaagtaaatccataactacccttaaagtagtataaaatattttaat

SEQ ID NO: 177093 - DNA, 830 bp, Cannabis indica
ttctatctcagttgacttcgtttctcgtttctgagaggttactttgttgtgacttgaattgtaaaggaagaggtatttttattattaatatttttagatagtataaatgtttatatagcggctgcacaatatttatgtaatattattattatttttattataaaagagaaaaaactcaaaaacctatataataacaaattaatactaaaaaattgtcatttataaaagacaacaatgtgataaaaaggaaataaataaacgttacttatctaaaaaacaaaagaaaaaactaattaagatttttgctccctgaactttgacatgtactaaattatgccccttaaacttttaaagtcgttaaaaatgcccctgaactatcgagattgttagatttaaggactttgtctaatttcattcaattttattatttcaataatttttatgtactaaataatcatgctctctgaattttcatccatgttagacttttttattaaaattggacaaaactccttaaatccaacaagttcagagagcatgattaaatacatatcaaagttcaggaaacaaaaattctaattagccaaaaaaaaaaaaaaaaaaaaaaacttcatgtactttatggatgctcatctccacaaccggaatccttaaacacttctttgctcttaacgctggtcatcatctactttatctcaaaactctccattaattaattttgtttaaacatttaagacttcaaacacatgttcaaattaatatggacatcaaattgtataaatctacaaagatatgtggatccaaacgcagaccatcttcggtctacctac

SEQ ID NO: 177094 - DNA, 484 bp, Cannabis indica
atcccattcactccaatatctttcttcttaagcttcaaaatctaatatgatatagttcgattagtagttaaattggaccagttaaattttaactcaacatttgatttttaatattaactaaaaataatttaaataaaaaaattataaaaattaaactatatgtaaattcttagagtttttttaagcatttcttttatcgtgtgtaataaaattcatgtaaaattaataaacaataagagaataaaattcaaatattgtttgattatataagaataaatataatatgtttttttaatatatattatatgtatgtaatttgatttgatcagtaaagtgtcactcaataaattaaccaatctaaataaaattcaattattcacacccaatctaattatgtatattcaattgtaattgtaatgcatctaattttttatatttagattgaattaaattagtttggatcattctcacccttagatactaa

SEQ ID NO: 177095 - DNA, 510 bp, Cannabis indica
aaaaacaaaaaacaataataagcattggcaacatctcgattcactcaaagaaaggagcttgataacaccaccaccaagccaccaaccttgagagactcgtcgcccgtttttgtttgggtcctcaagctcggaggagacgccgtcgtttcaaacgccggtgcctccgatgccataggtctctaaacctcaacaatgaagaagaccccacgcttttccgtacccgttagcgtcgtcgttttggttatagctttcatttacttttcaacgctcttcctcttcatagagcaatggtttggtctcttcacttctccagggataatgaacgccgttgttttcacggctgttgcaattatgtgcgttttcaactattctgtatgcctctacacggatccgggtcaggttccatccacattcatgccggacgttgaagattcagaaaaccttgttcatgagatcaagcgcaaggtacatcaaactatttattttttcattgaatttttctaatggggt

SEQ ID NO: 177096 - DNA, 916 bp, Cannabis indica
atgtagatattgaattaaacggatgaatttattgatcattacatctaattcaattaagatattgtatgaaagtatgatttattctattcacttttaatttgagaattgaaggggttttgattgggcgagaaaaaatcaaagaaggtcttttggtatatctaatttcatttatttttataaaatttctttttattcagcttgccttatatcaataactcgccttattaataactcaatcaaaataaatacaattaccctcaagaataaaatgtttgttatgcttaacatatttagtttgatctgtatctgtcttaattctgccctttcttcaagtagttttttcatcgccaaattgcccgaggcttacgcttttttaaatcatagctgacactaaaacgtgaccttgtggattattactgccaatttttgtagattggtgactagtctgcatcaatcctaaatttttaaggacttttgtcgcaattatcccttaaagaaaaaatcctaactattatttaaaagattcggaatgatcattctatttactcatgacaaaattgaatcacttagaaaaataagagcattgtgtataatctctcccaacaaatgattttaaactaaaaaaaaaaaacgagactttgaagtcatctaatgtattttttcgagttcatgaaaagaaattaagcctttgacacattaagttgtagcaatattttgcttattcagtttgtatgagaacttattagatctcttttaacttttaagaacaatcattaaaaaagaacatatatataataagattattaattagcactaaaataattttgtgaaatatatattgggatgattctttgtaacccacgcaacatgtagaggatgcccaccacaccaatccccattcccaattggaaaacaa

SEQ ID NO: 177097 - DNA, 620 bp, Cannabis indica
agagagagagggaaggagcagggagctcccttggttgaacggggaacaacaggaagagaaaaggagcgaggagttcctcgcacgagaggagctttacctgcacctcggctcctcctcgtgctagctcatcctctcgtgtgttgtctcaccttgctagtcggcttcctattttcttgcccatacattttttcattctcattaatttatagatcttcaaaatttatacttactaatttttgaaggggtcaacaagttataatattattattggtgtaatttaatatcgggtgctacttattttactttaacaaaaagtataatcaaactatttataagacgtcaccttataataatattagacatcttagtatcctataacattgcttataacattgcttttaaaaacacacatacaagttacatatgagaaggtgtaccagtaccaaaacacatttttagaaccccaactattgatttttttatatatattaccattttttatacttaaaatcttcaaattatattacttttttgaaacaatcacaatatttttaccccaattatttttctaactttttaagtttgttcaattttaaacatgcattgattatctatatact

SEQ ID NO: 177098 - DNA, 685 bp, Cannabis indica
cattctttgttcactttcgagatttttcctctgaatttagttttgtagttcaaataaaaagcactaaactttagagacctaaatctcatcaaaaggaaaaaaaaaaaacagaaaaaaaacttcatagacctaaaacgtatagcatgataggggaagtacacagtgaccacttgctattgtccttttcgtcaacaccatttctaacccaaaaattcagagaaaaaattaacgatgaaagacaaatgttgaaaaatccaagaggaacccagttggtacttaagcaaacactcttcattcaagctaaacccttttactattcactagttacaaactttactagaaaaaaaaaaaaaagcaaacaaaatatatatatatatatatatatatgtttttgtagaaaaaatatattagagctatatcaaccataactgaaacaagttattaaaaaaaacgtaagaaacgaagaaataggtacgtcacaatactggaaagcagaggcgaaaataatggagtctgcgttgagacttcacaatttattttttactttgtatgatctagagtcgggaaccgaaacgcaagaacttagaaccagaaataggtgtggtgtggtacgtgttttttagttttagtatagtagcgacgggcggaggcgagctttatgggcgtctgtctctgtctgtcagct

SEQ ID NO: 177099 - DNA, 532 bp, Cannabis indica
  modified_base (287)..(287): a, c, t, g, unknown or other
ctaaattatttatttttttataattttactttttcttaacatactcatttagtacattgtgttttgttaaaatacaaattttagacccttatgttttgaataataattaattggtcccctttatttgtaaaaactcttcatttgatatccttaattagtgtatttaagatttccttataccaaaactactctcaatttaatatttaatttgattattatattataattatttaataataatacaaaattaattaatctttttaaaatcatatattaatttaaaatanaagtttttttttttttttttaaatgacatggtgatgaggacaagggaggttggcgtcaacaatgtcgaatctgggtttgagcgagcgtcgtccttgtgatggcaagttggaggtagctttggtatgcgaggttggtgtttcagacttttgggtcggcgttggtgacgaaggcgaatagtgaacctaattttcgactcaatagctcaaaggttagtttgggggtggagttggatgttactttacaa

SEQ ID NO: 177100 - DNA, 668 bp, Cannabis indica
ggtttgttgttgttacaaccttattaagaaaaccatcactacttactaacttttcttcatttgatcaatcaaaatcttgtgttctttcttctgtccattttcaacagctcatacttggttgcggtttttcgttgatgtactttcttggaaacactgttggttggaacaccttagctataattggtatgaaaaagaaaattgaatttgattaattctactaataatgtatctttaaacaataatctcatcttgttattatcaggttctattccatctcttttgcacattttaggattgtacttcattccagagtctcctagatggctggtaaagattatatacaaatacaaatacaaatagttgagagaaaatgattcatcaaaacttgttgttcatgattttttgtgatttttttttgtataggcaaaagttggtagaaataaagatcttgaaaatagtcttcagtatcttaggggaaagaatgctgatatttacccagaagcacttgaaattaaggtgattttctctcctctctttgccaacttctcaataactaaaactaagaaaagaaatatttgcggcataagtacccaatgcagttaagctgtaatttcgtcaaatttcgttagtatttgtgttttaaattggatacatgtaaggtccagatt

SEQ ID NO: 177101 - DNA, 868 bp, Cannabis indica
aaactatagttgagcattagattagttattttttttttgttatgttgtgtatgggagacgttttttgaagtgggtttttacgaaaaaagctgggaaagttaagaacagagtaaaatcccagatgagagagaaaattttcccgggaaacaaacaggggaagtttctgggtttgagggaaataagagattttagaggaaaattttgaaaacccagatggatctgagaggaaagtttggatcttgatcgaagaaaaaacttaagaatgatcaaagaagagaagaagagaagagaagaggggactttgcgtgttgagggaatggaatttatagaaggaagagagttaaaaagaccgacaagttgatgcaatttttattattattttttaaaaaattagggaatattttaattttgggtaagtctatattatgcctcttaaaaagtattttggtagaatttttttagttttttaattatttttcttttataattgtatatattaatagttattttagtaccaccgttcaatttttagaaatctcgaataatttagaataccaagaataaagttaaaatattttattatatgtgtggttgttttttttttatcatagttatttgaattttattttgggcactataaattattcataattttcttaaactaaaaaaaaattaaaaaaaaaacttttctcagtactaaataaatagagaaattattttattatattattttttaattttttttaattttaactagtttaaattaatttctagtagttactatgtgaattgctatgtgaattttaattataatttaaatttacttacgttagttattatgtgattttttttaaaaaaatttaactta

SEQ ID NO: 177102 - DNA, 887 bp, Cannabis indica
attttaaatttttgaaaagatatttaaggttgtttcaacaaccctaaatttttaaaatttagttggttagtttaataataatttaattatataagtaataaatatcttatttcacatattgttacatggatatgtttgttttattaaattgtttattcaaaaactttttttaacaaacctattatttatttgatctaaatttctatgattaacttgttgacaaatccaataatctgattttaatcatagtccaattgtcaatagatcttataaataatttgtaacaagtaaattttgtatttctttcatctgtgtaaacctagaaacatgatagggcccatccaaatcaatttgacctgtgtgagcctatatgtttgctattgggtacataggaaactcatttatttctagatatataaatagactaggttgctaaaataaaagagaaaattaccccaacatacactcttttaaaattatttataaaaatacgctttaatatttaaatgctcaaaatataacaaattttcaattaatattctaatatgcgtataccaaaactcctttcatttcttttttttttttttctaacctaccgagagtcactgactcccttcttctattttattttttctttaaattctcttactcaattctttgctaacacaactttgctttttcatttatatgcttttttgttttttttcttttctagtaaatgacattttacatatctctctctcactttcttataattttaattttattttatttttttcaaacttttataaaattttttggttttcattcaataattatttgagcttaaaaattatactattgtaatatacttttaaagtaataatcatttttgactatgcgagaca

SEQ ID NO: 177103 - DNA, 882 bp, Cannabis indica
gcaaatttctgcccattacttcagctctttgtgttgtttgtgagaatgccatggagtcccataatcacttatttatagattgcatcttcaccaagaaggtaattgcttgtgttgaaagctgggctggtgtcctaagatggccgaagtatttcagcgagttgcagcagaggtgtttcccagccaaaccagattttgctgagcaggttttgaatacagtctttgcagccactctttaccacatttggagaaacagaaatgactgcttgtttaatgctatgtgtttgtcagcttcttgtcttagtaaaggtataagaaatgtggtccagactagaattattggctttcattgtaccagttttaagaagaaagatagatatgctttaaatgttgtaaatagctggtaggttttttgagttggttggttgttgccgccagcttttgtctttgtatttggttggttcttttgaataaaaagtctcattttgttcaaaaaaaaaaaattatatttttattggattttcttttgtgtagaatttgtaacacttgattattttgtgtatttatttttataatattttgttctcttttattacttagaaatgttgttgttttaattatttgaaacttttagttgcattacattgtaacgatgatatgtttatagagtattaagcttatataaagggtgatattttatttttacgtatttttttcttcatatttttatgttaatattaaaacttaagtgtgtaactagatatccaattaaaaaacgaatccaatccaattagtacttagattagattggattggattttgaggtctaattggatttgatcggatgaggagaaaaaagttagattggattggatgcccaccctt

SEQ ID NO: 177104 - DNA, 934 bp, Cannabis indica
ctgtgacactttgtgttaaattattcaaaaaattgaattacatgtatttttgtggtccacacttcatgtttaaaggtcttatattgttgatatcaatgaaatttgtcttgttttacattgcatatctgtgtttggtgtacggttatattttaatcattgattttgttgttccctccagatgtctatatctaattctaatatctacttttatggctctaacttgtggtaaggttttttatgatggctctagcagaagtttaatcaactgatttgtttttgctcgaattacatcactattttcaaataatttgtggtgtcttcagtggttagattttatattctgtgttggcttattttaaaaactgtttattagattttagaaaatataatagtttatgtgttttggataaacgactcatttttttagttaaaaatatttatttttatattttgaagtcaatacaatgtaattttgttttgtattacgagatcttttaaatgtttttagtactgagtatgcctgctctttttttgactgagtatactttctcttggttttttccattttatatatgtttatcttgctgacttattactaatttaattattttgcaggtcctaagaactacgtggagcttgatccctatccctactaaggaatagggtacgtaggcaactttttataagtgcagctccaaactaattttcaaaaaatgtaatttgtaaaattgaaatgcatcacatcattgatgctcaccctatatggtggtattttctcgttaggtaaatgtgccacattttttttctgtactcatttggcttctatctaattaaagctggcatgtgatggtggtgttcccttctcactttttaactgatacattgaacttacggtgtagttttcctttcttgaaatttcatgtcgacttatggt

SEQ ID NO: 177105 - DNA, 740 bp, Cannabis indica
aaacatatatattatatataggctttgcagctataatagtaataataataataataataccctttggttattttttttttcagttttaattgctttgtagactcagtaggaatagcagctttttcttttatggtgtctttattttttttttctcttttatatttggttgggttgattatttgagattttgtgagattttgctcatctttccatgattacatccaaatgggttatgttatattttttgaattgctttatggaggagtgctaatgttaatttttctacttaaaaatatatgttagaatatttttttttaattttttatggcggtgtttgttataacattatcccagttaattttttttaaaaaaatttgaatagtttataatactaaaataagtttgaaattttttgaacacacgtgacagactaaaatattaaaaattttattttcaatattgtaaattattaagaattttttaaaaatttacaaaaatgatattgtaactataacgaatatttcaacatgtcattttgaacgtgaaaattgactaagaaattgtaatcagcaatctctaactttattttacttattagtaaggatgagtacactttataaaataattatatttttttatctgtttcggcattcaaatttttttttattatttctgtatattatagttttttggtaccaataatttacaatcaaaaaaaattgtttaatgttttgttgact

SEQ ID NO: 177106 - DNA, 515 bp, Cannabis indica
aaaaacttaatatttacaacaatatattaactataatgtacacaataaaaaagataaatcagaattattactatttggaaagaatttgataaagttaataaaattaaaattgatgatttagtactaaaatctttaatttctattatattaaaattatacgttacaagatataaataataattattatatattattattaatatgtaactgctaggatttaaatattataatatattattactataagtaactctaatgactacatcaaaagtcataatttacttatatatattaattatgtgacactatttatttatttgtgagttatgagaatgaaaagacactaactttaattaaatattacaatattattatgaaataacaaaattctacatatattaaaagaaccaataaatttactattcactcaaacgtcaacttaaacggtgcgttttcctacatatattaaaagaaccaataaaaatcctacatataaaaatcctacatatttagaa

SEQ ID NO: 177107 - DNA, 543 bp, Cannabis indica
atctctatccaattactctcaaaaaaaaaaaaatggccactggtcattttccatcttgaaaaataactaaaaattcttcaaagaagaggttgttatgttaaagataaaaaaaatcctactttaaatgcaaactactaaatgaaataaagagagttaggtatacttacaaaatgagtttgatcacttagtgatggcatagatggcataaataatcccaggaagatatccaaacaaagtcagcaccaaacagatccagaattcaacctgaaaatttatacataccacataatcatattagcaatatacaatttttgatcatacccattttcttcttaattataattaacaagtaattaactaataattaaagattaagggtgaatatataataaaattacttggcatccaaacttaaggaagacaccaagaggtggcaaaatgatggccaaaaggatatctatacaggtaagtgtgccctcactcggcattttccctcactttctgggtatgtatttttctcgagaaaattattaggcaaattaa

SEQ ID NO: 177108 - DNA, 933 bp, Cannabis indica
ctccaaccaaatgccacctaaagattttaaagttgcttttcggctttggaagctccataaatactttggttggataactagtgagttttagcttttagctctagaaagcttgaagctagctttaatatctttctcaggataagcttcttgagaagctaattctaaaagcaaaaacccaaccaaataggtgtgttttgttggacttctaattttaacttcttagggatcttagtgagaaagttactaaagttggcatctcttaaaacggtttctttagagttgaaaactgaatcttactggttaaccaatcaacaacaaaagtgtttttttggagcttcagaagctcaaaagcaatttttaaaagcctagccaattaggacctaaacttagttttatatattcaaatagattttattgtagttacaaaatatcctaattagtatatgtatatgtaaagagagagaataaacctgtatctaggagaccaatgatagcaccatcaccaagttttgaaatctgatcataatgggtttgataacgagatgagagttgaagatagtcccaacttctagttgtttgcaccttaaaaagttgattaggtatgacttgagccacaccaggtaactctacaataaaaccaagaaaaaagaaaatgaaatttgtaatgattgaaaatttgtcttcttatatagttaaattttgtccttcaatgattaataatatcaagcttcaaaactcttctcaatttgatttattttccattattattgattacttttactatatttggatacatgacaatgtccttactatacaaagctttgaatttgaggtgttctatgagtttttttttttactgtgtcatggaatataacttatgacttaacttcaaagggtacagttttctttgttttttgcacaatgtaatgatta

SEQ ID NO: 177109 - DNA, 730 bp, Cannabis indica
aaattccaagtttaagggggagtgtcaagacagttaattatgtcagttagttgttatggctttttgttcaattctgttacagtttctgcttggtttgttttgcttagttttagctcagtgagttttgtatataaattgtactcctcagctcaagtgggaatgagaataacaatctttccttcatactctttctctgttctttcctctcttctccttcctctcttttcttctctttcttctgtttcttattcttaatttgtttatttgtgtcaatggtgagaaaagcttccaacactaacaacttatatcatttataatgaaatacatccttagagctggatccctacattcgattgtataccatctcccattagaattattgtaagatcatagactcttgatcaaactccattattaaaatacattcttagagctgcatgctaattattcaaccaaaaattgacatgtaaaaaaagtgagttgaattgtgtttattggaacaatcgttagagagatgcatcaagtcacacaagcaaaagagcaagtacacaaagaggataagaatttatttatagcgcgtgtgtattcaattacaatttccaatattattttagcatacacatacataatattaaaaacatttttattaatttaatttaaattcactaataacaccatatgtcgatacttgatagtgtggcttagctattttctaattaaaatatgtaaa

SEQ ID NO: 177110 - DNA, 576 bp, Cannabis indica
attaacattactaaaaattaggttttcccgttttttttaaaacagttagctaatgtattattgttggtatctattactttcgcctattcgaccgtcgcaaaattgggtagaataggcgacaatttaaaacagttgaggaaaaatttaccgacaatttaaaaccttcgacaatagtaaacgctatagacgaagattttgcaccatcacattcaaaaaaattgatcgcctaatcaacccactcccctcccagtgttatcatttagctttcccaatacaaggatcaagaccatattccaatacaaggatcaagacaataacaagatcattatcaagattgaagttggcaaatttacatcaaaaactccaaatgggtaaggagtaaaaagctaaaaaaacaaacctcgaaagcatgaacaacaggtttgggcatacgctcatctctccaccaatatcaaaattttgcaacgatttgagtttgagcactccacaaccctgaaaaatataaaaagagacacaaagatgagagagagagagagagagagagagagagagagagagagagagagagagagagag

SEQ ID NO: 177111 - DNA, 638 bp, Cannabis indica
ataaattcaatgtttatttttagcggtataagtactcaatgtttgtaaaactgtaattttcttccagtttcgtcagtacaaactctgttttgaatttattaaaagaacatttagaagtaactgatactacatatttctatctagactcaatgatcaagaatttaggccttatatatgccatgtttaagacaataacagatctgtactaacaaaattagagaaaaattacagttttacaaacattgggcacttatactgttaaaaataaacattgagtttatgcggcttacaaacataaaactttaggtacttacgctgctatttaccctataaaaaattatgttaaataaaattttattttctatatatttttaattattttttctcatactacaaatttatatacatttgatataaataatttataatatttttgaattatatttttatcacttttttttttctaagaacaaattatagtttataagataactctagatttatgtggtttgttaataataaaaacataaatacaaatataaagatttttaaaacaaaataaaaataaaaagttaaatattaattatttaatatatttcctcaactaaaaaattactctctaactctctcattcgtct

SEQ ID NO: 177112 - DNA, 756 bp, Cannabis indica
acaattcaatataatacaatacaatgcaatacgacgtaatacggcgttccaaacgagccctaattgtattatttgttataggtgaacgggcttataacagcgactagctacatataatatctcaaagtatacacaagcttgcagtactctctcatttgttgatttgagaatatttcacttaattatttggtaattacaagttatatatttatttaaaatattatgtgtgtaattgttgaaatgtcagtgtctacgcatgacaagtttcccaatattgtttttttagctcatttgagttctaattagacatcccaaagaatttcctaatatataggtaagttaaaaatgttgcttcctagtgtgttgcaagtctttgacagtatttaaaaaagtgcatgttatcttatgcttacttaaaaaattagggcaatacaccttacaataacactaatattaaaagtgttgttatataaaaggaaacactttttatgggccttttaacacatgagtttcttgagcctttaaggcacatataaaaatagataaattagaaacactttatataacaaggattgttgattaagtgttgctaaaaataatttttgtagtagtgataaaagctccccttttatgggccttttaacacatgagtttcttgatcctctaagacacatataaaaggaacattatgtttagggtttcatttattaggtcgatctttccctcctccccgctctctctctctctttcctatct

SEQ ID NO: 177113 - DNA, 666 bp, Cannabis indica
tatcaaaatgctgcatgatatgcagcctctttggaacatatatacacaccatactacttatttggagcctccttggagctgctcttagtgataataagtttttctccaattaaaaggtacactataattgagtgctcaagttatgatgttgaaacaattcttactattatatcttctaagcagtaaatgaaatagaatataagtgtttttaaagttaattgtaatgttgcaattttttttatcaattttattttaattttttttatcaaacgatctaggaattagatagctgatttttaagctcacttttttaattctagtcatggtcgtgtctttaatgagaaaggtatctcaattgaattataaattattattttaattgattctcatatataaaatttcatgatttgttaaaaaaaaaagtagtttaaaattattgttttgttagttacatacaaaactcttgttaccacatgaaaaaaaaaggaagtgataacgtatattcttttaatcatttttctaaatgtttacgttaattattttacttatttctattaatatataatattttagtattaattttaaatttaagtataaattttattttcattttttacaatttcttcataaatctctttcttcttactattttttttgttttttttt

SEQ ID NO: 177114 - DNA, 688 bp, Cannabis indica
tatatgtaattaattcttgacatccaaatacaaattatattttagaattgaatggaattgcactaatatgtaattacgaaatatattgaggccggtcaagaggatcttcgagtgcacaaattcatggatggaattgttgagcttcttttttatccacgacaaccttcaaattcatcaacaacatgagaaatccatctctattgaaggtagaactaggtgtgagatctgaaggttcgagttaatgggttattaagtatccagttttctttatgttatatttactgttgtatttactgtcagtgttagtattttacttcactaacagattcatgttctttcctattttattgcttagtgtccgattgttagttgagtttgttggagttagttaaggtggttaggaattagctttgcaccgccttgagctctggcctcctatatatgtttctcctctgtttttcttcaatgcttaatcaataaacaacattcaaatcttgtttcttttccgcattatggtatcagagcagggaaagatatactttccctgaatcgatccaatcgcctccgttcatcttttccggtactggcgtcgtgttcttgtgatcttctccgacgacctttctaccgtgcctccttctctgttcttctgtctttcattcatgtcgaatgaaaaatccttccacgactc

SEQ ID NO: 177115 - DNA, 552 bp, Cannabis indica
ctttactgatctaaataaggcgtaccctaaggattctttcccatcaccacacatagacatgataatatatgcaacaactggccacgggttacttagtttcatggacgctttctcaagatacaatcagatcctcatgcattcaaatgaccaggagaagacaacattcatcactaaacgatgaatcttccgctacaaattcatactctttgggctcaagaatgcaggggccacgtaccaaaggcaagtcagatgttcgtgaatatgttgggtgatacaatggaagtctacataggcaatatgctagtcaaatccttaggttcccaagaccatcttgatcatccacaacaagcttttgaggtacttgaaaattataacatgaaattaaatcctacaaaattttctttttctgtttcttcaagaaaattcctaggctacatggtcactaagcatggaatagaagagaaccctgagaaaataagatcaattcaaaatattcaacaaacaaagcacatcaaagacatacaatgcgtaaatggatggatagccgcacta

SEQ ID NO: 177116 - DNA, 666 bp, Cannabis indica
gtaactcttaattcataagtgttttacccattatcaatatgctataatcattgtactaatttcaatttaaaaaaaaggactttttctctctggaacactctggtaggtatgagaacactcttctcgtttgatcgtgttttggtccctgatatggggattttggtccacccatactgttcatgtggtggttttccttctcaaggtttgttgattaggtgtcttctagtaattaatatgggtattaatttctctgcatctctgggtatttctctctccaatcccatttgttttatctggaacatttattgcatttggtatcatttcctccctctcatcttctccgatagtcatttctcattaagtttctgccatttttgcattaaaaactatcttttcaccttctattttgccattggaaaccgtaagatggaggcggatgaagatcatcaaaatctttccctaatgaaggctacttcagctaatgctagggttatgattatggatttctcaaaagtcatttctagaggatattggttttatctatataaggcaagaaccaggtataattttttatccttatcaatccttcgcttgttctcattatctcttttcttgtactctttgctttttagtatcatggatgaatttctgagtagtgtttctagt

SEQ ID NO: 177117 - DNA, 655 bp, Cannabis indica
attgatattttcttaatagttatttgtagtttcttaaaaaatgaaaataagaaaagaacgttcaaatgctacctaccaactaagcaaattttgcagttttctgtcatggatgatgtggaacttttatattattttaccgcaacaatggtttttatatgcagtcttagtcaatttattaatacggtgatgataaagatatcattaaattccaaaaatgagtaccttggcacttagtctgtgctagtgacgtagtttgcatttagtaagagaaactataatttttacttcatcaatttattaataaagtgataataaagaaaagaaatatcataaaattttacttcatcaaaaaaaaaaaaaagagaaactagaaattttacccctattttattaaaagaaaagcaaaatttatacctaataatctatgtactgttggatttcaaaaaaaaaaaaaatactatgtactgttattatcttatcgaaaaaacattatatatgtactattatctcaaatttaatatttatgcattgttaaaaaaaataaaactaaatgatatttatgcaaataaaaattcttggaggtagatatagaatcgacggtagttgtagttcgacaatgtagtagtagtcacgtggaggaccattacgcaaaaga

SEQ ID NO: 177118 - DNA, 626 bp, Cannabis indica
gttagctattctaagtgattaggggtggaccatcccattgtcaatagataagaaagtgtttgttcaaacaaatactacttttctaagataatgactaagtctgaaaatcaagtagcaaataaaggagatatttaattcttgattccaaaagtgttctatcatcttatatgacatatgatgatcccactgcctctgtcttgtcatgcttttttttttgttagcttttttctcatatttgactttctcttaaaattttcattaatgcttaatgttatactaggcaatctttttatatgtatatatatatatttatatatatataaattgttcatgtatatatatgcatacatcgaaagaccattgcttatgtccaaaattttaaacttttattcattgcattcctacattatataaatatatacattattttgatattggatttagatgatgagatttttttaattttaaatttccagatctcacatagaaatatatttttttataaaattttattttggtgagttctttacaaaatttttaagttttaatctttctatatattcttatactggtggtttaattagatatctcatatttgttgttctcctctatagagacattgttta

SEQ ID NO: 177119 - DNA, 521 bp, Cannabis indica
gtaagttacactattgcctagcatacttggcttctgtttgttttgtagtaagaatgagaaggtaaaattatttgacaatttctatgttctcatcacatgactggatatagtgaattttgaccagatatgcagagaaagttatcattgtgaatcagaatgaaaattgtctatggaatcactgattatttcgcatgactttttcatttttaatattttattgatatgcataagactttatttgtcattacttttgtatttgaaagttgaaatgttttcctttatctagacatgagatatctttggggctttacttgtagtcttctttccatttcacttgaagatctacaaagtactcgtgtgatattagttagtaaaggcattggtattttgctaggtagttttattaaattggcttatccccttctacattggaattcttaggccagcttctgtcctgtgtttttttaaagatcctgcccatctttgtttataaatatgtactttttttttaattttttcct

SEQ ID NO: 177120 - DNA, 741 bp, Cannabis indica
  modified_base (660)..(660): a, c, t, g, unknown or other
ttaggaatgcctctaaatattctcgtctttgggtttcaggtagctggaatattggattcaattctgcacaacacttttagaattattaaaaaagttgaattagggaaaaacttttgagaggcaagtaaagtttcttgagtgttatcttccagtaccaagtttagtgagaaagttttgttagatggtgggggcaaggtattttattcattgtcacaacagttctattttacaatctgcatttaacatgcaatgacaattattgtgttatattgcatgaaaatcattaaatttggtagattattttacaatctacattaaacatgcaatgacaattagtttgtgttatattgcatgaaaatcattaaatttggtagattattttacaatctacattaaacatgcaatgacaattagtttgtgttatattgcatgaaaatcattaaatttggtagattatatattttcataactaccacaaggatatatactaagggtgtttttgaaaaaaaaagtattttaaaaaatttgtaataaaaaatatttagtaagtgttcaggaaaaatggtccccgttgcacactcttgcactatctggacagattccgttcatggacgagctattggaacaaggtgtagatattgatttgttgataaggcaagnttaaaactcgattagttctacttttacaagtttcatttatcaatgctgaaattcctctaatggtaagtcctcatggaatct

SEQ ID NO: 177121 - DNA, 605 bp, Cannabis indica
gatgattgtaagagacttcttcaaagtctcaatggtatttctatttcttttgttttataagtttgggggccaaatgacagactggttagcttgttttcgggtacttatattggttgtatttacaattgtttcggctggattacaaactattttgatagctaattctatttaatgaattaggaatatttcaaacataaataaataaattagtgaacaaaaaataataaataaaaataagtattttttcttttactttgggaataaggatttgaatttgacacctcatatttgagagtaggagtacttgtaacggtctaagcatatgatagctttaaagtatataatataattaaattttttttttttggatgatttcacaatgcacactcatgcacctctacttgttttggcatttaagaaaaaaaatttagtcttaattttttttttaatattcatgtacgttatagctatttaagatatcctataaaattttgagaaattcagaataatttacaatataaaaaacaatgttcaaacaatctattttacacgcgtataaaattaaataatcactcgtgcaacacactgcttgaacacaattttcg

SEQ ID NO: 177122 - DNA, 713 bp, Cannabis indica
tttactgttcttttggtcttatttctggtaacttaggagtttttgtataattatttgaactattgtaattatgtaagtcaacttgtttgctaaatttatcatttttgttattcttcaagtatcaaatttgcatcttttattctcaattttaattctgagctaactgggagaaaataaggacagagtttagagtaattagtagtaattttttgtttgatttttcttgttatgtaatgtggttgcactgcacttttgaaccttatatgttgatattaaacattctcattcttcttgtttatgaaatgtgcttttatgcaggcttggacgcacttcctaatattttacagaagaagtatgctttgttaaaggatctagataaaagtttacaaggtataatttgaatatcaccattaagtgttgtagagagattaacttagtaataaacatacagtgccttacacttttgtctgagttcattgacattaaggagtgattgatttgaactttgaaatagaactagtataccatgaagagatagtgaactttgatttgattgagagtgtatgtattgtatcaccaaatatatttataaatcaaaaatcactattggttttaaatgtaatatggtaataaagtatatttttactattttgtagtatttttctcttctgattcggcctaagaaattttatgtatttgagtcagatcttcag

SEQ ID NO: 177123 - DNA, 628 bp, Cannabis indica
tacagcacgtcaatcacgtaggggggaatgatggttttgttagtttccctctttcatttttttctgtttagtttttcatttcatttcaaaagttttcaaacctgttgagcgaatataagggttagggtttcgtcttcaataatattgtttccttttagctgtaatggcgatccttcgatcgtctagttctccttctctgttgcctttatctgattgtggtgcaactgaaaaagatttgtcaatgtgtgtccctggtggttcgaagccctcgagttcaggaaagagtaagggttttgctgcaaagaaaaaacgagataaggagaagatagtcgagaaaggaaaggcatctgaagatgatcgtgttgtgaaaagagttaggaaatgtgctgctctggattctgattctaaagatgagttacatggatatcttcaatggagcaaaggttatttttctttcattttaactttttttgtttttcattttttagtttttttttttaactatatgttgcatgttttggagttgttctttatatcgtttttttttttctttttgtttgattttttttttatatttatttttgattttcgttgattttttttggtatttgattttagtttatttttt

SEQ ID NO: 177124 - DNA, 1023 bp, Cannabis indica
ctttttctttttaatttggataaacacaaagttttccagtaaaacatatcaatcaaggctagctgtatgtgacttaatcattattcatcatagttctatttacactacaaaaaatatttactggatttttttattttattttttgtgaaatgcaaatattaatttaccgatttaaagtaaacactattttcccctgaacatttttgttttgcaaaaaaattattgaaatataaaaaattaaagaaaatatcttctctaattacaatttgctcattttctttaaaatattttgttgatgtataatgtgacattaatctgatttagttgatcaagagccaaaataaaaaataaatacataaacaatagtctattgataaattataaaagtatatgtaatttttaaagttaatatttaatgttaacaaattgaatttgagaagtttaaaattgttaaataaattagtgcaactatacctgtaattcatgtccacttaaataaatcatttaaaaaaaaataagcaaaatgtaatcaaatgaaaatatttataacaatttgtatagtttgaagaaaattttgcaacaaaaaaaaaattaaaggacaaactctaccaaaatcatagttgatggggaatttttttatttactaataacaatttgtatccaaatattatgtttcaatgaccaataatttttgtaggttgtgattaaaatgatattagtcaaaaatatatatattatgaccaataaaactatcatcaaataattatttttcttttcttttgtagtgacttaacaattataatttttttttgaaacataaaaatctattacaacatattttcagccatccatatacagaaaattagaggttttttttcaaaaaagttgatatgataagctaggtgcgttggattggggacccaattatacgaatgaataataatgaaaccatttaagatcctccaatgtaaatatgaagctgagttggatcttacgcatgaaggcatatcagaattggactac

SEQ ID NO: 177125 - DNA, 749 bp, Cannabis indica
ataaatataagaaaaaaaaataaacaatcatattttatttttaagtatttgaaattttttaaaatgtaaaaatgaccttaaataactgttcgtgataattaaaataataaactaaaaagctatggaaaatatcaaactccctaaacaattgtttacggagagtgtacaataaactaccaagtaatatttagttatttatagttcgaatcccgcttagcatcaacttgggaaaaaaggatatggatatgtaaaggagaaaggtgaagtgaaatgtaagaaagttgaaactaaaaagaagaaataagtataaactatagataaaccttaaccttctaaatttattttgtttattttattcttcatttgagtatacttttatgcaataaccaaatcgctcactttaaccaataagaaaatttgtcgtttttctttccttattgacttagtttctatatatttgcatggcttttcttaataataataataataatcataataataataaaaataataataataataatcagaagttaagagaaagctaaaataatagcagaacaaaacgacttgattatatttaaaagtagaaaattatgtcacaaaaagtagaaacatcccccaacccaccaggaccaaatcaacaccgtccaacacatccttattttaattactaaatacacagtattaccccaaagcacgaaatcaacggtccttacataatacacgtcatcatctacaatgtgtacaca

SEQ ID NO: 177126 - DNA, 738 bp, Cannabis indica
ggtaatttttcaacttggtcaagcctctctagttttctttcatatttttgtgaatattgttcatttccttagttttgagtattcatctcctctgattcaatcctcaaccccagcacaacagtaattaagccccaacaacaaaataaaagtttatatcgtaagaaggtaagaagagaagagctttccattcattgtgacaaatttatataattaaaaaattcatgaatatactcacggttgtgctgttcaactctgaaataagtctgcttttaacattattggatactactgttcccagctgttctccgtgttgcttaatactctcctccgaaatctgtatgatatgaactcatgagcccaatggtacagctaaattaggaaaaaaaaattactattcagctacctcggtgagcaatagcgcagatgttttatccaatatctcttcaacaaatctgttgacattagctatatagcaaggggggtttactcctttgactggcttattttttgcattttgcggattgactgatggctttgacaccttatctgcattttccaaaaaaaaaaaaaatgagaaaaaaagctttatcagttcatacagtagaaacttcatgatataattgtgcctgaaagtacaaacttaatcacttggcaaggcaagaagctatgacccataaagcatcaacctctgtaccacctaaatatgagttttctcttatcatttttttttttttttag

SEQ ID NO: 177127 - DNA, 815 bp, Cannabis indica
aaggtattattgtctaaacttccagggacatctctttctcatattcgtcgtaattttaatactgtagctcatagattggctaaacatgtcctttgactagatgatgagtcttttttggttagaagatactcctcctaccatttgtaactggcttccaagatatgtttaatacaagttcttaacaaaaaaaaatgctattttgaaaaatgacccttattatatgttgttgggaagtaaatggatcatcattgaagatgttaatgggcctttgggcccaaaataaagacccaaaactgaactctctctctctctcattctctgtgagttcaccgtagtagcggagtttctcacatcggtcggcgacggagttcctcatcctcaactcaaaggtatctcagtattctctcttttctcaaactctcgtgatatgcatgctctgtatacttagattgaataatattgtcaaatcaaactagcaacaatcaatggtgtcatttccctaattaattgctttgagttcctttatctaaaacccttggtaaaatgtgtttacttgcttccattttttagttttttaaattaaagattggtaatttggggatttattagtgcttaatgccctttaatgaagttgatttgttactaagagcattagtgcatttgaatgagaattttatacaatcgtattataacatttacagtaatctcttgaacttgtctttatgttcaatcatcatagattttcatttttgtttgttttgatgaagattcaattttggaaatggaaaatgtgattgaatgaattttttttagtc

SEQ ID NO: 177128 - DNA, 510 bp, Cannabis indica
ttttaattcatcaaaagggtggcaaggaattgacaaaataaaacatagcattcatcataccattcatcaataaaaaaagaatttaatcacatatcatcaccgcaaaacataccattcatcataaaaaagttaaacacataacataccaaactaagaaaaaaaaaaaaaaaaaaaaaacatacttaacacataaaaatcaaaaatgcactaagccttgtcacacatactaaacaagaacaacaaaacaaaaaaaatgagaaaagacaccacaaaaaatgcaagaaaattaatttagtggaggtccgatattgttagaacaactgaatatgactaaggtcttttactctgtatgtattttactgttttattgtttactgtgtacttaggtagttaaaagtctgttatggtctgttacaattgattccttatttttcggttatgatttgttgtaatctgttcaaactcttcatctataaataacagaagtctagccaactgtattcagttgag

SEQ ID NO: 177129 - DNA, 836 bp, Cannabis indica
aggggtttcgccacaaattgctctcttgaatattcatttatcaataaagaaacagatttatttcattacgtgtttaatatattatttggttcacatgtttatttcatgatcatttgtttggtttataaattcatacaaatcattatcacattgatattcttgattactatgtcaacacagtggaaactaatcaagattacgcgattaaacaaagtcctacaatttatcagtacataagatttcactgatataataatcaacaatgtagtttacttgcaccttggataagtgctatgtccttttcagggtattggtaaagtaagattgtattggatgtattgttatacatcgaattggaccgatattgaacttggataagatatcataaacttaccgtactatctatctaagtcaatatcaccaagttaatcttagatcaatgatctcaatcctgagatggttaggttctagttcaattgtattttcttatgttctttgaattgttcgttaaagttgaccaattgaatgggaacgctaatcatagatatagaatgggaaatttcattaattgaccctaataaaataccccatttcaaaatatataccctccactaatttatacaaattaattccactattactcatttgtacccaaaatacccctcaaacttaattttcctattctttctctctctttccgtctttccctctttcactctctctttctctctctgtcgtttgctattccctctctttccctctcttgttctctctctgtcgtttacatctttcgaacgttactccacgacgacgacccaacgacccaacgacccaac

SEQ ID NO: 177130 - DNA, 1564 bp, Cannabis indica
acagttctttttttttttttgaatatattattgtaaattaatcactagtgtcatccaaataataacgggatggaaaaattctctgtaatatctcaaaaagctaattatgaataattaggatttatcatatatgatgggttaactaagtagtaatgagtaggattataatcttgctaacttaatttagcataaattataaattttgttataagtagataaataagcgtaatttattaattacggagatttagttgaaatatttttaagttcggcaaccttcgagacccaattagaggccaaaaatatcacaacagtattagttagaaatattgaagggattgttgacataagttgattttaaaaataccgaaatattttaaggtactcagagttgaccaaataccctaaaattaaagatttcttagtggctaagaaatcataagataactattaataataaattttttattaatattatattattattatttatatataaacctattcttataagtttatatatattatatgttttaaaacataaacgtatcagtaaagaacgaaaaaactaaaatcctttcttctctcctttgtgcgacgaaactctctccctctttaatctattttttttttattttcaacttcgaaacctaacgattcaagcttcggtgtaagcgggatgtaaaatcattgaagaaggagagcttacggtaatgattagtttcgttttaagttaaaaacaattagttttatatagtggctttgtgatttagtagtagttaatggagattctaacttcgttgaatttttatttggtaactatgggacaaacttagatatttacttgttgaatttgaggtgattttgagttagaatttgagtttggaactttttaaagcttagtccgaatgttaatggcattttccatttaagggcttgattttaatttctgttatgtaaggatcattgtatctatggtatatatgtgttctatgaagtttggaatgattcagataggttttgggagtgttttgatgagtgcaaaatttaagattttcgtgtttcaccgtttttggaaattcttagaagatcaaaaactgtatttttgtcataacttttcactcgagtgtttgttttggacattctacatactgttttgaagcttgcgacgagatctaccatatggtatatgttttagagccaaaatataagttttattttagtgtatttgtactatgggatttagtaggaaaccctagggtttcctttgcaactattaagcattattttgggataaacacttattggtttaccgttgttgtgacgtagggccaagatcatcagaggtatttctccacttaggttggccaacatacatgaatctggattaaaggtaagaaaagtatattgtaaagcataacatgttatatcacaatacaattaatattattgtgaattgatcgatattgagattcagatatggttattattgtcatataatgaaaaagatggcttggtatgtaatgataatgtgatgataccatggatgtgatatacgggaccc

SEQ ID NO: 177131 - DNA, 812 bp, Cannabis indica
gaaaaaaaaaattgtacttattattattttagtttttaagataagaatcaacgattgaaatatgttcctttttcaagacccctatacatgaagaaagaaagaagaatgaaaaaaattatttcactattttgtgaatattattagatgtgtgttttcctctactatattatatatatttattggaaaattctacaataagaatactttatttgtttatataatattgagatattttgttagccattgattaggttaatttttgaagatttaaattatttattatgaaatagcatgtacattatggtgccgtttggtaacacttttgtttttcaattttttaatcacaaaatgaaagtaaaatttttgtttttaaaaaatttatttttgaaaaacaaaaatgcgttctgtaacaacttttgtttttcaattttaaaaacagaaaacaaaagtgtgttctgtaaaattcatttttatttttattttttgattttatttaagtcgggtctaggtccggggtcggattcgggttcagatcagaagccgggttcagtgccagggccgtggggaggagatttggtccgggtctggtcgtaatccaaaagattgattacgaaaaaaaactgtttaaaaaaatattgaaagtgattttttttttgtttttaaaattttgatttctaattataaaattgaaaagtaaaaacagttttatagaacatgtttttgaaaaatattttcacttttccacttttaaaaacagaaaactgattaaaaaagtgttaccaaacgccacctatataaattaaaaaagtgtt

SEQ ID NO: 177132 - DNA, 584 bp, Cannabis indica
cttgaccacaatcgacaccaaaacttgatctccaatctccttttcatattttttaatttaaaaggtctcctcactcaaattcgtgattttctcctttaaaagtgaagacgtaattctatttgttatattattttataatataataagtgtagattaaaatgtagtaatatatattattatgtgaataatatgtattaagtgtttggtaaataaattgtgtaacatataatttatttaacctaaaattgtaacctacactttataacatggagaggagttacaaagttaattgcttttgtaacttcttttggttgatcataatattgtgtaataaaagagatgttacacaatttgatgataggattcaaatggtttgaaatatagttgttacaaactatattaatgctcattatatgagagaaatgagatggtgagtttgaattctaagtgtgatcacctaaacactatataaaggagtctaatgtgctcatttgtaagagatgaagttttctatcaaaaaagcactttgttagaaaaccctaaaaggcttgataattcccaaagctatttcctagagagttccc

SEQ ID NO: 177133 - DNA, 1151 bp, Cannabis indica
tccgatgaatttctcggaaccgatagatattccggtgatttttttggcaccggcagcaaactccggctacttttctgacatcagtaacaaataaaattaactaaataaataaaaacattaaatatgggttttaaaaacctaatttacatatatataacatatcaaataccataaaaagacctaaaaataaaaaatatcatataaattggtcaaacttaaaagtgtcatatttaacataagaacttttaaaattccatcgtaagtgtaattttctctttttttttttactccgagttttggtggattctaaacacgggcctagccaaccttaacttagcaccaattgtgtttccaacatttttcctttccccactacaattcatttccaaccttaactttcttctctaaatagtaaatattaacatgatattattagaatgagaaatgctaaagggcaccagtagtgcctaacaccctcctatgtgtcaatattgttattggtctaactaagtatcgggtgtcttataatttaatataaataatttttaaagaagtattgctaaatcaatcgcaacgcaacatgtcgagaaaggtgttaggcaccactaatagctaataacattgctctattaaaatcccatgttatagaaaattgtgagaattgcactaaaacctacatctaagtcgagtgtaaaggaattatatgtatttttatagacagaacgtggctctataacttcaaattatgaaacccaacacaataataataataataataataataataataataataataattcattgtttattactttatattactagctgtatttgcacagaaaattaattattaaatgccctttgaatacatcacttatttaaactgaaacaaacacaaaacccatgttgtttgtatttgtcaaaaataaaaataaaattaatatggttaatttaatgcttttaataaaagttacatgcccccacccacctaacctcattaagctgtaatttaatgcttttaataatttttcattatgttaatatgaagggtgtttaatgttttaatgtaattttttgtctcacttttcactaccattttttgaataaacccctcataattttaaaaatgacttatacagatcttatat

SEQ ID NO: 177134 - DNA, 1352 bp, Cannabis indica
gttgagattggtgaagtcgatgtaagttctccactttccatttggtttaggcaccataatagggttggatacccataccaaatagaaagcttccctaataaagttgttctcctgtagtctttccacttcttccttgagagctttggaacgctctttgtcaaggagcctgtgttctattgtacaagcctgaagtttactttgtctatgtcgagggcatgagatcaatcatgtcctcatgcgaccaagaaaaaaaaacttcatgatttctcctgaggcaagccatgagcatctcactcaagacctctgttaagtttattccaatcttgacaatttgtcaggttcgctatgttgaggggaaagttctttgagatccttggttggaccaactccagagttgatttccccaaaatgggggtacatatcatccccatcttgggaatgccgtcatgtgactttgggtgccatctctgtcatctttatagttttaactccataggtcttcattgtctctccgacattcacaagagaggtctgctcgtccctcctggtgccatggtagcaggggtaggtcttgtttgttccctcagcagccatagcagcagaggagatcttcttggcaaagtgataacaaaatgttataacactcatgggtagttccttgattaccaatgagaaccaataccagctgccattaagaacttgacggacaaatggtacactgacgagatagctcgaaggtcttataggactggccttccgagcatcatgttgtacggagacttcatatctaccataattaacgtggccttgatagtggtctactttggggcagtgctaactgtgagcgacattttggtcttgccacatggagtgatgtcagttatatttaaactatacattagctgcttccatggttcccagtcttctaaggtcaaacccattctgatttaggcttacatgaacaggatgtttgaggacactctatcatttatcatcgccgtggccaccatcatgttggctattttaacctcaacagctaaggggtcattgtgagggtagctgacatgataggagtctaattctccgaaggttataggtttacatccatagcattgagacttgggaggacgtttaataacctccaggactttggctcttgcatacctttctaaggccttcctcaaatttctagctaggtgaaagcctccaatcacgatctctatcctgcctgctactggcgtaagcaggagaggtgcattgccccccatctagagctttaggtcatacaaaccactaaagagcaacatgctttttttggatgagaaattctatcttatcccgcaactaatttc

SEQ ID NO: 177135 - DNA, 659 bp, Cannabis indica
atacgactagagtatgactagcgtattgagtataggctgatattatggtcaatagtactattgtttgaacgttcttgactcagtatcgtgtaggacgcggggaggagttacggttaggagtatgggcacctaatcttaatcttgtttacatctatgttatgattatacttttcttactgagtctatcgactcacagatattatttgtatgtgtaggtaagggcaagactaaggttgagcagccatgagggtgagcggatgaagattgtacatgtcgaaacggttagacttggagcgtatgatctttgggacagcaggctgtattttaaaggttgctaggcgacaacttttgtattgaatatttggtaacccaattgtaaatattttaaatacgggattcctggttgtgtaaaagatatttatttgaggaatgctaattacaacctcttagtcaatctccacgtctgaaattacatgccaaaatatttttttttcatagtggtatttgttatagttacagtataatccttgtaaatttttgaacaatttcgaatagtttacagtttaccacgcgcgttcaaaaaacttcaaacgtattttcggcactgtaaattattcgaaattttccaaaaattaataaagatgatgttgtaagcataa

SEQ ID NO: 177136 - DNA, 971 bp, Cannabis indica
gaaaatgacattaaaattgtacgaatttatttgtacatgcttatatcagttgaatggcctagtcaaagtcttctcttttgtcatgaaagtatttcagaagttgtaaagttaaactaataagttaaaaagatttaattaaaaactgaaataaaattaaaaataaaaagaaaagaagaaaaaaagagagtgaaatgatggattgattgatagaagtcaatcctagacctaagcaacaatatataagaaactagctttacaattaaaaattaaaaataaaaagaaaagaagaattgttatggaaaaaaaattaaaaattaaaaactgaaaataaaattaaaaataaaaaattaaaaactgaaataaaattaaaaataaaaaattaaaaactgaaataaaattaaaaataaaaagaaaagaagaaaaaaaagagagtgaaatgatggattgattgatagaaaatgaaaaaagagagggaagagagtaggatttgattgatgatggatggaatgatgactaagtggtatttgtgtaataaaaccaactttgtaagtaaaaatgtagacataggcgtgtatgagtaattttgtaataaattgtgtaaaatggatttttcatgtaaaattttctatattttttcttttattattaaatttatatactatctcttgatgattaaatttagaaaaaaaaaaattcatataaacttatgtaaaagaaacaaatatcaaataaaacaaacaatatataatgtagctatattaaaattatgaaattttctataaaaactcatataactaaatctaaaactaatttatcatatactacaaaatattttacttttagtcacaataaaacttatgactaaagtaaaaaatttgtaagctaattataaatcaacatttatttgtgactaaaatattcgtgggtaaaagtattaagttataaaaattacaatttgttgtggctaaata

SEQ ID NO: 177137 - DNA, 680 bp, Cannabis indica
tttttttttttttttggtcttgtcttaatttgggtatgataatattgctttcggaagctcctccatgtgagcttgcgggaaaaaatgctgtatgttttcgagcatttttagggaacatatgtggtcaatattatgaatttttgaagtcaacacttggggagtctggctttgtagattataattacataagcaaacagcttgactgagctagagtttttttttgtctttctttttttggggtggggggcttaaattgtttgtggaaaatgacaggttttactgtctaaattaagcttgtgaaattaggttattgattgataaaaatatcatatttttgtttcagtgtatatatataagtagaatgaaaaaatggctttagctagtgcagttagttttgagctgtacttcacagtttaaatcccacattcaatgttaaatttaatcccttcacttgattttgtttgggattatctttaagaaagatcagaactttactgttgtatggtgtgttctgttttaaatggctgtggcataagtgatggtatttattgttcttgtttcatattgataggtctccagcagagtttgaatctctatcggaagagtcagatatttctggcaaagatcgttccttttcaaatggaagtcctcatcactcgcttgatggtagtacagagttt

SEQ ID NO: 177138 - DNA, 689 bp, Cannabis indica
taatagcttaaagatgcgtcactgacatctttagagtaggtgctctatcttattccctttctagattaacttcttttgttatatcatcacttgacattgtttgttttgtcttcaggcttgtgttagttatgcctacaccatggataacaaacacaagaaggtggtggagctggaccagaatcttagagttgctgaagaccaagttgttgttgctgaaggctaagtgactgctttgaaggaaagagttgcttctcttgaggatgaggtgaccaaactcgaagatgtagctaaaactgcctagtctcgtgagagcactttgacaaagaacttagaaattgcttagaagaaagcttatgatctcgaagagtcttctcgtgatgctttgaagaagcaaactttcgtggctgatgacctgagggacaaggtcaaggtctttgggaagaaagtaactacccttgagaaataggctacacttgatgttactttctataatgacttatgctttgatgccatttatacagcctacgttgccaacggtaggtgtcattcatttaaattgacctgtttccttagtaacgaggtgccaagcttcattgagcagtgttggaagtgctttgctatagaatctaatgaagaagctaactttactataaatgtcggtgaacaagtcctagaaacttcaggagttg

SEQ ID NO: 177139 - DNA, 708 bp, Cannabis indica
caccagagccacggtaatgatttactttcatgaaatatgaattaaaatgatgttctgtgttgatttggatggcttcatgtggtttatgtgttgtaaagaattttttccatgaaaattactttttccaatttttgaaaatattttattcggattctttgtgaaaaataatttgttttttacggaattcgattccgataaaaattgagaaagttatgaattttggaaaatcgggtgtccatgggtgctcaatcgcacgcatcaggattcggacaaggaaagtcgtgtgcgcgcgtgagcctcggtcacgcaccctgctgtccacccacgatcaccctgctggcgcctagttttctcgcccagctcatcctgctccgcgcgcagaaggctgatttgcagcctcctggggctgcacgtgcagcccttcctaggcagccagcacccaaattgcgatttttgcgggatttttccccaaaaatccgattttttatgggattgttctcgaaatctgatttttccaattttaaaaccccaaattaaaataaaatactatttttaaatatatttgaacttaaatatcatatttcaagttaataatatttatttttagtaactattattaatattgatattttgaggtttaaatttaaaaattgattattttatttttcaattaagggtaagatttaaaaattggttaatctctttaat

SEQ ID NO: 177140 - DNA, 603 bp, Cannabis indica
cctattctgtactcaatttcttctcgatataattagtcatacctctttttatctgcacttttgtaccccatactaattttaaggtctaattaaatacacaactaaatgatattttaggaatttacatatagtttactttattactctcagttccacatatgcaagactaaaggtatataactaatggataagtatagtcgttctgtgggttggtcaaagaaacttgaagtacaacaagagccacgaatcgtaaaaaataaaagatcttataaagattggagtgtggaagaaaaagaaaagaggaacaagcgtagaagagaactgtatgcaataaaaaagggaaacatggctgagaaaagagatggaaataaaacaaatacatgtgacaattatgttagaaaccatggaattgttattagagaaacaactgattcagcatgccaagcacagggtactcctgattatggtatgagtatgccataactaatttgaagtcaactaaacatttctatgttaattagttgtttctatatataagtaatatttattatttggattcctttttgcctttacaggaattttttaaatagttagaaatagggg

SEQ ID NO: 177141 - DNA, 613 bp, Cannabis indica
tatatatatatatatattcaagagaaatagcatatcacactaaaagataactacttttagtgattaattttttagtcacaaaaatgtgacttttagtcacaataaaaagttatttgtgattaaaaaatagtatttggatacaagttgtcactaatttagttttagtcacaacaaattataatttttgtgactaatatatttagccacggacctttaagtcacaacataggaatgataatttataattagtcacaacttttttacttttagtcacatttgtgactaaaagtaagattttttgtagtgtcaaaaaatattgttaaagagcaaaaagctcagaatggggccgagaactagaaataagaaaatttaaacaattttaacatgcatgaaaaattaactccatgttacaaaatctaaaataattaaaatctttaggtgatatgatgatttgatttttcaactttgagtttacagaaaatgagagatgaactaataaatttaaacttttagaaggtaaaatcaatggaccacacactttttagtgttctactccaatgaaaataaatgtaaacaaaaaaataacacaaattaacacgattacaaaccattt

SEQ ID NO: 177142 - DNA, 665 bp, Cannabis indica
  modified_base (578)..(578): a, c, t, g, unknown or other
tagcaaaactacctatactttatattttgcgatactttaaaaaaaacatgaaaacaataaaaaaaaaaaaatacaaaactacagtctttacgaaattttcaacattttttacgattttttagattttatttacatgaaatacggtcttttatgtatttttatgttactattcttgttattttattatttgattttttgttcatttgtatattaatttttatattgttttgtatgttattttttttgtttactttctatgtaattttttgtttgttttctttgtgttttttattagaataccgtaaaaatatatataaaaaaactttacaacataaaatagtaaattttttattaacaatttgtgttttatgtaattagcccttatatttttaactaattaacctacctaaattgagttttggttgacaatactagccaaattccatttatgtttagctatttatccattcagtctaaagaactatgttatgccacggtgaacatgccacagtgtatacaagtgaacacgtttgtatacttattttttttttacgctatatagtagaaaaataataatntaactataactgtaaaaaaaagaaagagaaaaaaaaaaaacaaaaaaaaaaaaaaaacaaaaacaaaaaactaaaaaagtaaaaatt

SEQ ID NO: 177143 - DNA, 783 bp, Cannabis indica
aatatggctgaaaaatatttttagacaattagtaaattgtcaaaagcatccttgtttgagctatcacttaaaagttattttaggtgccattaccaacttggtaaagggtgattcttagatataactcatctagttcaagtaataaataaatagaaatttagactatattgccttcatatcaagcttatacaaaatagaatcaattagatacgagacttccaagtttaacattaccatatcaaaccaatataaattctaaatggaaatccaaatgaaaaaacattgaatatcaaaagttgcaaaaaatatttagtttcaacttaactgtgttgtaatacatcataacgcatttcaagttgccaatctgtcataatgaaacaatgaaatatttagcaaaataaacattactacctcaatctcggtagccttaaaatcctcctgaagaattgattgcaaggcagaagttgcagtctgcaaaatttcaataattagacacaatacaattctataaatataagaacatgataattttcttgataaactgcataatcaaagttgctacatgccctttattcaaaaacaaaaaagttgctacattccctacagaaaacactacatctaccatggactgcgcagtttggaaaagataaagaattcacacttttatagccaacattgcactaaagtcctaaaattagaatttaaatatctctattgtgaaatcatagctgaaatgatcagcgtgtggtttgctaggctaggaattatcatacacaaagtaga

SEQ ID NO: 177144 - DNA, 767 bp, Cannabis indica
gataaggaaatccttaggtcaggaagcggtgtacttgcggaatgaagaaaaccctagtttctacaagggtagagctccaaggggcgaaaaaagtaattgggttatgcatgaataccgccttcaaaacaaccatcctttcaaccactcaaaggtaagtagtaaatattctcagttagttgataattgttagaccaatttttaattttaattattatatatattattacgcgattaattaggcaatttaaggtaactaacatcacaaaaaactatatatgtaaatgcaaactttaattactgtcattacaaaaaaaatttactttcagtcacaataaaatttgtgattaaaaataaaaaaaattgtgactaattataaattattatttgtatattatgaccaaaaaatcaccatttgttatcactaaaactaatttagtatgtatatttaaatactatattttagatatatatatatgttgtgactaaaagtcacatttaattagttacaaaaattttatattatgactaaaagattagtaataacatacaaaattttatatgttgtaactaaagattaccactaaagggaacttttttttttttttaatttgtacccttttctttatttattatatatttattaataagtataattatatatatagtgtttttgcatggatttgataataattaagatcatgcaacgtagaactagctaagctagcttttgtaatcaattattgctaattaatacttattatatatat

SEQ ID NO: 177145 - DNA, 578 bp, Cannabis indica
agagagaaagggcagtgagaggtgtagagagatgtgagggtcgagctgggaaggttttggagagaaaccgtgctgccattgatgagatttgagggagaaataaaaaaaataagataatttatgggttgggacgagaatctggcaagttcggccacctattaacaaagtggaaataaaaaaattaaaaaatatattaactactaacaaattacttcatatatttattttttttatttatttattctttaatttttttttttttttttttagagaaaagctattaatattaatgaataagtgcatttacaaaaatagctttaatggggctaggacaaatagccctccaaaccatatcagtatccactcgcaaggcatatctagctagaccatgagcaacgaagttggcactccgtgaaacataactaatagagatacagggaaaagaggacatatgaataaataatatcaattaattaagtcattgaattgcccataatgttatgaggattattgacatcttgagagacggtgagagcatcagtttcaatgagatgaatcgggcaactgatttgttcaac

SEQ ID NO: 177146 - DNA, 1050 bp, Cannabis indica
cttccaaatattactcacttggatggttaagtatcaaatcattactcaaatttgctagtttactttgattgcttccctcaacatacttattaaatattctaatgtcaatttcttgctaaaacaactcccttgtttgaaagaccatagaatttaccaagacatgaaagcttaaaattaaactttggtccatattctcttcttcatatagaatctttttcagttttagattgatctgcttgatctcgataatcagaaaatatgatcaagcaacgaagccaactttagtagtgaaggaaggtgttaggatcccacatcgactaagtggctgtaacgtaaggctaatgatatatttaaataatattttaaatgttcattcatttttattattctctacgtaaatagcgatataattctgcttgaggttgatgacttatttgatttttattaataaaatgtctaatgaaaaaaattacaaaaagaaagtaatttatttttctaataagtaaaaaaaaatcaaacataatatttaacaaaggaacatatatagatatataaatatattagcgtgacatctcacattacaacgacagatttggatagattctttagagcactagaaatctcatctgctgatgcttcaccatcaacgaaggtgatgagtggagtttcgggcggaattatatcatctttcagataacttccagatgttcttagtagctcttctgaacccttaataactactcctttcataattatagttttatgagcgccggatatcatctcttcgtaatcggtgtctccgctttcgccaaggaatacaaacatgtttgccacatttaatttccaacgcacaaacagatacctaaatatcataaaccaaatattttcaaatttcataatctgatcaaatttattagttaaattaaatacaatacacaattaattagttattaaatgaaatatatattagcatgatttgcacaacaagaaggcggcgacttttattgaaaggaaacatttagatgagaaattgataactatgtgttgtaa

SEQ ID NO: 177147 - DNA, 1300 bp, Cannabis indica
atctggcaacgtccatttttgtttttattggtgaactagtataaaagaataattaaggtaattggtttgagttattgggggagatatattagggtataaataatcaaatataacagaacaacgggagaaagtgtgacacactactttagagttgaccgtttgttacgttggaatattaaaatttgattgcatatatatactgattcgatactgtatatattttagaaaaaaaaaaactctatactgtatatttggaataggattagattaaattgaggtttagcgaaaaaaaatatatatattttttaaaaaattataccctaataaaactatatattaagaaaagattaaattgagtatcctaatatagttttaaaaaggattaaattgattttcctaaaaaatatatatttttgaaaaataaaaattataattttttaagattttaattgattaaaagtaatgtttaatattattcaaaaaaataatgtttaattaaacaaaaatttaaattaaaataattgttctataagtgaaataatatctttttttctgaaaaagtcatgatataaataattcattttttttttttttgaatagaataattcattatttttaaaatttaagaactcgttacttttaattaaaatacatattaaaaaataaaaagtttcctttggaagtattttaagaggagaaataaaaaaattgatttagagtttgggataatttttgttcaatcactccaagtccaaatccaatataatatacaataattaaattgtccaataatatcccaccaatatttatgtcatgcaccaaacatgatcacagatttagctaaataattggataactaatatagtatttatatgaaggatgaaaggaacgttaagcatgatcatttaattttcttatatagcaagcagtgaatatgtcaggataacttataagtattcgtaaaaaatattaattataaaagccatttaattaaggggacatcgtgagtcaaagactcaaagtggagaaattaattaattaattaaacaatttcaattattatggaaactaatccaactattaaattctcattatattttaaattatgcatgtgcagtattttatttttcacctcgatccaactagtactaaaattattaaaatatgtatgcttaggtgatatcgtgattaattaagaccatcatcgtcttatcaggtgtgtattttagtttagttagtataattggagtactgtgtagcattgctattatataggtgtgtccaatactatataatatat

SEQ ID NO: 177148 - DNA, 898 bp, Cannabis indica
taacacaaaaatgttacatgaattgcatttttgaaacttgctcatttaaaacttatactactttgacagaaaactatattgaattggtaatttatctaaaaaaatagctaaatattatatattaatttgttaaactacctcattaagtcaaatattattttgttttacttgcatgaaaatgattaaatttcattcccacttcctacccccccaaccaaacataacctaaaaggtcaaaatacaagttccaaagtaaaatcaaaagatgccaattttcagaccaaatcatataggaggagaaaggggagatcatgactctaaaaaacagggataatcaaaagataaaatatgcataagaaacatagcactaagctcagattcagtttgaaaaggaattaagagagtacaatacaacaactactcaggtgattaaaaataaaaaagtgggcattttaaagaaacctaaattatagcaatgtaaaacactatgttcgataagagtaataatgctcattacttacataatctgacataagcagtaaaattgaaagaaccaaaaatgtagcaaaattaaagaaaagatgaagaattagaacaaatgaaagatttacaattaccagaacttgaactccgggggagtcgtgcatttcaggatcatcacataatgtagttacttacagagattgatttaaaacacataatgtacaattaagcaaccttaacaaaatgcagagctaaagcaattcaatttcactaaaagaaaaccccaaagatacatacaaatcagtaaatagtacacaaaagaataataatgctttgcctcaaaagaaaataacaagctggatatcatcacaagtttctgttggatgatctattatcatcacttggatatctgctg

SEQ ID NO: 177149 - DNA, 541 bp, Cannabis indica
taaacattttccaagtgatagaacaactacccctgcttagaattgaaaaacaccattaaagagccaagcttgagttctaaaactcaaagcttgctcaatcaacaaactacatacgaaaacatcctcaaatcaacctatataaacattatttaactacagagaacataagtaaacaccaacaataagaacaacaacaaaaatctcaaaaacatgcataatccattttctttaaaatcaagaaactaaagagggagttgcttaaaactttaccttggcttagatcctcttaaatcagctagaaatcatagaaaaatgcagctcaaaagtcagaaccctagctggttctatagggtttcgaaaagagtgagagagagagagagagaggaaggaaagagaggaagcctttcttgattttgtattttttgtaaaaaagatttaaatgagatgattcttttgttttattaataaaatatcagcataaacaatgataaaaatctgatttaacataaactcattatagacaaaagcttatggggaaaaa

SEQ ID NO: 177150 - DNA, 770 bp, Cannabis indica
ataaatgcaattatatatgtctgtccaaacaaagcaggtaatcttctaaacaatatttctcccttaatttctaaaagcatatcctactttttccttattttaactctttcacataatatcattttaatattaaacagaatatatattttagagacttcgatctttcttaaaatatttccatcaaataaagcatatttttatgggaaagatctcatcacatcattatatatattaagttgaagttacgtgcaattgcacgtatattttagttctctttttttaaatattataatttataatttttataatatataatattattgataattttttttttgaaaggattgataattttagtgtactttttaaaatttttaagtaaacaaaccatctcattttaaaaaaaattaatatataatataaaagaaaaagaaaaacagtgtgtaaagtttaaaaaataaactcttcatttttgtttataatttaagataattataagaggtgtttctaatcttgtattgctttagtgactaattttattagtataatgaaacaataattaataaataatagtaaatattccaataagataattgtctttaactcatttcattttcatgaaatccgctaagtacatagactcaagaattaatagtcctgttatgtgaaaatattgtgcaaattaaagaaataattatcatatcagtagtcactcaaagaatgtattttcacctgtaacccctaaagaaaacaatgagtaaaaaaataac

SEQ ID NO: 177151 - DNA, 856 bp, Cannabis indica
cataatatttctaaagtatacattaattaacattaatatcttattacaagagagattaaaacaaaaaaaatattttatggagacctgttagtttccccctttatataatggtaaagttctttggtctaggtctcttcatctaaatgtcatgccttatcatgagagtttgcccttggtttgaaatttataggaagttgtgggtctcttctctgtgacgccaagctccacaggtttgtttccacttatgtaattcgtaagtatatattggatgggcttagttgttggagatcaaataatcatttaaatggtttaagtttacctataaaagacaatattttttatggtattttaggtaatgcagaaacatgaaatgtggactatacatatataaatagatgtgtgtgtgcatgcgttggtgtttttatattggttattttttttgatgaagaatatatgagatatttgattaattaatcatgtatcttgcagtataggtcaaactactcatctaaaagaaaagactaaaactaataatactcacttatattatatttcttattcaattattacacacgcatgcttcaataaaaatagtttatcattataacattcattaatacatcatatatattgaaaatattttgtctttaactgtttataattgaaaatattcattaatacatcatatatattgaataggttttttttttttttttaatttttgtaaggatctaaaaagagaagttttttttttcactgaaatctaagagaagttgtgtagtcactaaatgagttaagacaattttctcctttatttgactactattgcctattcatttccagacacctccaataa

SEQ ID NO: 177152 - DNA, 1203 bp, Cannabis indica
atgatgtgtggctccactatcaataatccaagaaattttttgaaataaaagtttgttaccagccatgtttgaagcagcaggggcattgtttaggtcatcccgagatggtccttggctcaattgttggctgagtaaagagatgagctgctggcattgagtagtaaggtcagcctgagtgttgttggtggaattttctggtttagagcttgttgtaacattactggcagcaacttttcctttgttagctttctttttatccccataacctggtggaaatccatgaagaaagtaacatttgtccacataatgtcccagtttaccacaattagtgcaagaaggcctgggtttctttgatttggggttggtgatggatgaagagggacgaaccgatgatgcaagacaggacaaatcagaggaacctaaggtcctttgtctctcttcttgaactatcatagaaaacactctagataggttgggaataggttcatttaggaggatttgggctctcacaggggcaaaagattcattgaccccggttaggaattgtaatacttgattttgattgtagtaatcaagaaacactttcatagcaccacaagaacaagcggcattaggttgaaattcttttagctcatcccaaatggatttgagcttggtaaagtatgtggtgacggattgatcaccttgttgcaaacgtgtgagttgggtttgcaattgaaagattcgaggtccattaccctcattgaatctttcttgaagatcatgccacatatcggtggcaagatcgaaatacatgatactttgtgctatttcaggtgacacagagtttacaagccaagacatgaccatattattgcaacgattccaagagttaagaagggcgttaccagattcgggacgaggaagagtgccatctatgaaggcagatttgttctttgcattcaaagccatggttatacctcttttccaagactgatagtttgttccattgagaacggtggagacaaggaggaggcctggatgatcggctgaactgagaaaaaaaggactggaaatgtcctcatgagccaatcgatcaagaagtgaacgcctccttggttgagatgaatcagctggtggaactggagatgaatgaacaggttcttggttgtcttcctcaggttgagatctgaatcgagagctcagaatgcgagttgaagccat

SEQ ID NO: 177153 - DNA, 766 bp, Cannabis indica
ttggagtgatgctccgtggtaggcggacggtcgcagtggcaatggcagtggccgtgctatcgtagtaggagaggggggattagtaataggaggagcattatagttaaatttttacagtgataattttgtgataggaggagcatcatagtaaagattaggactcattaatgtgcacacttcaattattataaatgatatatatattatttagcggggtttgtatctctagatttcatcttaagaattatgaggttctttaaaattaattgacaataaaaaaaaatttatccatcttatggtattattttcacatttacatatcttaatcaatgtattgtgtgtaatttaagaatgaatatatcactaactcattttttaatttggaagtatcaagttttccaaggaatatatattcaatgattttatgttttaaatttttgatcttgatggaatttgtgtagtcgtcatcggattggaattaatctgagttattttagtttgaataataaacaaacccacaagaatccagcaaagcaaaaacaacttatgtttttctttattcgactcttgggtattaattaaatttagtattcaaaacacaatacaccggattccatgtgtttttagctggctaccacaccataatatatactaaactaataagatatggtttcacgttgtcagatccatttagtagtaataattataataattaattagtgtttctcactgatgtaaatatggacggaactttttaacacgatat

SEQ ID NO: 177154 - DNA, 586 bp, Cannabis indica
gtattaattttggggcacatttcaaattatgtagcgtacactgtatcttaatcaattataactaaagatttaatagatcttagtgaaaaagagataatttggtgttgatttttttcttctctcttgagaattattgaaccaacttctttggttcaagggaaccctaataataatgagtaaccctaccatgcaaatagctagtgcgcccattttataagatagtgaaagaaaagaaataaataagaattggttcgatccaatattccacacagttgatcatcgatcaaaacaaaatatgaaatttatataaatatgaataggaaaatttagcttaatatcctttaaatataaagtatgatcgacttttaattaaggatacttttgcagtgtaagtagtgggagtttaggctatttttttcaaatcaaactgcatatggggtttttacaattattgatcaaactgcaactgcctcacaagatctttaaaacgtaaaaccacaccgcaaaaatacggtatagtgcggtgcagtttatagcgatttacactgttattattatcaaacattaaattattaaaaatttaaaa

SEQ ID NO: 177155 - DNA, 596 bp, Cannabis indica
aatagtgcctaatagcaatgcttttaaattttcatcctaaaaatatagtttggagtattgtttctttttttaattcatttttcatagagatattgttatagttaaaacattatccttgtactaatttttttttaaaaaaaaaattgagtagtaagtgtcgtaaacaagtttgaaattttttgaatgtgcgtggtaaataaaatatcaaaattttattttagatactaaaaattatacataattttcttttacaaatttgatgttgtaactataacaaatatcaaaataaaagaaatttaagaaaaaaaaaaatattttcaaacacaaaagttaaataaaatataagaggttaatgtagcaaccaaaataacttaaaggatccaagagccttcataatgacattgtctaaacaactttattgttttgtaatataaattttgatgccaattttcctttaataattttcactttttattataatccatattccataactctaacaactgtcccaaacaaaaggagaaatctcattccaaataaacaaggggaaaaaaaataataagggagaaacatcacttatcataatcatcatcatg

SEQ ID NO: 177156 - DNA, 522 bp, Cannabis indica
ttgtaaacacctccgcattctatcatttaagaccttggaactgtttctattttcgtatgattcgttaaatttagccacaaaatagatcttgaacatggaaactacaatgacatttttttggcttctacttctgttttccttaaaaggtttttggagaattctcattctctttgatcctttcaagatgataatctatcaactaagggttctaatttccaaatagaacaaaaaaaaaaaaaaaaaattcaaaatgcttaaaaagtacaaataactaacaaagtttacttcgtttttttttttttttcaaagtttgtaaactttctacatagtgtttatttctttattgtgaaagaacccaacatgttgtttaggtaattgcattccatagtcttttccttatttttgatctggatcctaattctcaaattaataagaacatatcatggcaatgatgtcatatagataatcttgaaagtagtgtttgtgtttagtcattttatgaaatctttgaaagatgaaaaa

SEQ ID NO: 177157 - DNA, 571 bp, Cannabis indica
acaacttctccaagttaagccaaataagaattgtaaaattttttctttttttttaataataaaaaaaaaagaatggtaaaattttattttgaaactgtatttaaaaaatgattgattctccttttattttattgacaaaataaattctgtattttttatatgttaattagaatttttgcttcctgaactttgatatatattaaatatgcgctttgaacttttaaggtcgttaaaaatatccctcaactattgagattgttcgacttgagaatttttgtctaatttcattcaattttactatttcagtgattgtttatgtactaaatcatactccagactttgatatctaccaaatcatgcctctgacatgtactaaattatgccctttgaattttcatttagactttagacttttttactaaaattggaaaaaaagtcattaaatctaacaatctaaatagttcagtaggcatttttaatgacttttaaagttcaaggggcatgatttggtacatgtaaaaattcaaggggcaaaaatcctaattagcctttttttaaatggtaaaaatgg

SEQ ID NO: 177158 - DNA, 736 bp, Cannabis indica
tgttctggctgcccatggatgcatgatgattactaatagggggtttgttgggttggggtgagtttgtggtgatgatggtgttgtttggttggcatgggcagttggactcttaagggcctttagtgtgaatgtggacgagcttcttgctatgaggatgagactaatgttgacatacccttttgaatttagtcttgctagtattaattgtgattcaactgtggatatgaactgagtaaataatcctcatttaaatgttagtttaaaaatctattattttagatattacttctttaacatctgttgtaggtagtagttcttgtaatgccgttttgcattctacgaatggtattgtttacttttattactaatattgaaaaaatttatttaaacgaatgcttactcaaaatttttgagttgatttatcttaatgaaatgattaatttttttttttttaaaaaaaatgaaaaattttatagtatatatcctataaacaaaaaaaaaaaattacaataaatacataatgaaaaaatcacataatacttttggttttatttttagtatttttacactacatactgaaattttaatttttttttttattttttaggcaaaaattttttaaaaaatactgtgtaagttttatactatgtactgtgttacatttttactgtttgttttacaatttattttttagttgttccactattattttaattgttatgttttcttgttttac

SEQ ID NO: 177159 - DNA, 755 bp, Cannabis indica
acgtaactttttactagtagatatatagatatatagattaatgatttaggttaggtcgtagtcttattggttgcaattttagattaaagaagttgagtgaagattgagattgcttcagtctttaaagtttagtgatttgaatttttacatctatatcatatcttttgttcgattatatgatttggtttgttttgtgaattttttaatgattagaatggttctttatgtcattgtatttagtggacttctaaacaatgtatgttatgaatatgtttggtttttagatcttattattttttggtttatttttatgataaaaaataaaataaaataataaataataataataataataataaaagttgactattttgtgaatagattagatttttttaattttagcttttgtattttactgaagtcattataaattatttattttagattgtattgttatttgtttttttttaagtaaaacgaaataatatttgaaaatattaagggccagtttggcacagctgtgctgtggggaaaagcagctgtagctgtgctgtgggaaaaagcagctgtagcagaactgtggaaaaaagctgagctgagtgttggtaaattataattttaaagtgatgtgagctgttaagattctattacaataatgataatattttaatctagtttcattataaatttacaaaatataatataaaaaaaaataatgttaatataaatttttttattttttatttatatttttt

SEQ ID NO: 177160 - DNA, 1090 bp, Cannabis indica
aaaatgatagaagaaaactaaaatgaatatctgagtttagggtattttgataaaaagaagagaaaattgtaacttaattgatgttatcattattttctcaagattaatcatattaaatattaaactaactatatcataagacaatgacttgttttcttttcctctgtaagctagtattttgtgtgaaacaaagtggtttctagaagcatatgatgtcctcttaagatttaaaaataacaataatataggtcaatccaacaaaatcaaagtttgagtgtacaaaatattgaaaagtcaaaatatattaaatgggaaataccattccattatactagaatagcatagaataatatctcaaacccataagtaaacttttttttaagtaataagatatgtaaacttaaaagaatgagaatgatatcaggcataaaatgaaataaaatttaataaaagtatgtttatttgaaataatttttttttttactatattttaaaatattttatttagttctttttttatttcattctttttaatattcccgactaaagtacaacttaacggtaagtttagattggcaaaaaaaaaatataagaataaaaataaaataaaatttgatatatataaaaataatttttaatcttgcatgagaatttttttaattattatttttaaatggaataatcaatttaacaaaattagaaaataaactagctatattatttaataaagcgtctaatttattacagaaagtgaagcatttgaataagttaagattaaaattaaataatcaaactcaataaaatgaataagaagcctcaatataagtcactaatctagcagttccatcaaactactctttttgttttttttttgttatgtttatgcttaaattatatgactgcaaatctacagaactcattcatttatatatatatattattaacttatgttgtaacatcaagtatactaactataagaattcttaataagaaaaattgaaaacaaactagtaaaattatctaataaaactcctaatttaagtaaaaaaagtggaacatatgaataagtcaaaattaaagttaaaaaatc

SEQ ID NO: 177161 - DNA, 806 bp, Cannabis indica
taatgacaccaaaaataggatggcggaggtactgaaagagttttttagagaggtgtaaattaatccctgttttttcagtgatgaaagcttgaatgaggaataatgagagaatcaaaaattcaaaactggttgtagggtctcatatcatatcaatcctttcacgtggcgaacttcaacctcatgttcgataaggtaagcttatatggcggacgagagagtattgcggtaaaacagaaattaaacagtaagatatagtttagtggtaaattatactttgaaacccaatatgctatattatatgtttaacactcttcataatattatttctcaaattaaaagtattccaatttcattaagctgtacgactcatgtgagaaaataaagttatgggatgaattatttgacattattaaaatcagtgtgttgtactgacatgatcaatcattcgatttcacatttaatattgtcattaattctatattgggttgtgacggttgcagtactagtctgtgctctggttctagttaggcgccatgtgatcgccattaagtttggcccctaaaatgtaagaattcatacaagagtaatgatatgtgtacacatcattactgttcttagaaataacaatgagcaataatatgaacgtatatacagtgataattaagaagatttgtatattgggttagtcatttacgaaacctcaattataaacataatagctagaagaagaaatgctgaaatattgtgattctaaatatttgtattttagtgtatacataattacatatgagctgtttaaaaatatg

SEQ ID NO: 177162 - DNA, 1225 bp, Cannabis indica
aacttgagtagaaaagctagctagagctagctaagccaacaaccacaacagcaacttccttattgatagtaatattttcttggactttattttcttcaattttgtcattattattatttccttgagcttgattaatatcattattggtcgaagtagtcaattggtgtagaactacttgatttagttcagttgggcaaacaagtgtgctgattttgaccacatcaataacatgttcagataattcttgaagcttgttttgttgatcctcaactactaatatcacactctttttggcattcttgaacacaatgtaaagtgccatttgagcaatgccaaaaaagaaccccaatacatttggaaactgtgtatatatataataagacaaaaataataataatatattaataagtgaagtgaaatgggtcagtcagaatttatttatatatatatatataaatatacttacagctatattatagtccttgagtagaagaccataaagaaccacatgactgcgcctaatgtcaagaaaaatgataactggaatggcatgaactcaacgctcttggttttaataacttgcctctgcacatatattatataaaatattaaatatatatatatataatttaatcaatatatatatattatggtattatgtacgtaccatgatacaagtaaggtgacgagcgaaaatacaccgaagattaaaagacaagacagatccatccaacggcttggagacgtttatcacctttggctaggaaagtagtcaacacaagcatcaacccataaccaaaaacattcaacaacataagaagcttcacagtctcaatctgcattaatatcaatcaattaaataattaattttattaacatatatataatataatataattttttgtgatctcaatattaataatgtttaaataaaatatgaatagtcggtggatcaagttttaataccctagatttcttgggagcataaaagatgaacaaggcaatgtaaatagtctcaatgacacatccaaatgagtttatagtaatgagaagcaaagcatctttcttaagcaaggcatagtatatccacaacattgagctcagtagtgcaatcacgtatggtagcgattgaaacccttctgctgatttcttcttataaatcttgtgaaatgttgggctgtaaaaaatataacataaaaatccaaatttaatgttaatatatatg

SEQ ID NO: 177163 - DNA, 882 bp, Cannabis indica
aagcactcactgatttgaatggatactatcacgttactaggtatatacacagatagaaaagaaaattaacaaaatttacctattataaattatttatttgacctattgacaattggactgtggttaaaaattgatcattggatctttaaaacaagttaaaccatagactaatttagaatcaaataataataggttttaataaaacaagtttgaaataataaacaatataataaaatacacatgacaacaaattgcatagttggttatatgatttatttaatttaaattaaataattaattaaattaatttttgaaaaatctaaataattaaatattatttgaaattaaataaattaatttaaaattaacttacaaatttaaaaattatcaactaactttttctaaatttatgttatttttaaaagaaaataaaataaaatatctaataaaataaaatgataaattaatatcatttatctaattttataatttaatttaaataaaataacaaaaattcaaaagttggcaaaatttctggttaatgtttcaaaattatctagattattttattaaaaaatatatcttactttaaatttaaaataaagtacattttattaattatttaaatgtataaatatctaatcttaaatttaaaataagataaaataatcaaatttttaaaaataagataaccaattaagcaaaaaaagatagatattctctgttttcaagttcaaaatcgactaatatctaaaattaattaaaaaaaattaattaatttcaaactgataattagatttgacatctacatacaaaattacacaaaaaattcaaattaatcccttcaaaaaaaaattgtatttgatacggatggtatacaat

SEQ ID NO: 177164 - DNA, 1353 bp, Cannabis indica
attgaatatatatgtgtggtggatattagacatccaaactaatttctttccatttcattaatattttttttttgggggggaggggaagagagagaaaaggagtgagtatactttactaagctttaaaatcactctttaattgaaaaaaaggtaattgttataacccactgcactcaattactcggttagatttagtgatttaccatggcccagtaatatttggttgcctccttctaggtggagcttcattttcatgtggtaattatataattacatatcttcaattagcaaccaaaagttggcaatttatgtccaacaaatttataaatatgagtgtgtgtgtgtgtcaaatgtgatctttacttcctagaatctcgaaaacttgagagataaacactatgctctttttctctaaaaaaaaaaaaaaaaatatagtaaaagaaaagaataaactatatatacaagaaattttgagcttgcccaattttaaaagcagtaatcaagcaatcagtagctagaataatccaaatgacatatgaataaagctaataattaattaacatcagttggtacatgtaatcccagttagtcctattgttttaccagaattatttgtttcaaatgactgaaataataattaaatgagtggatcaacctgaactacactgacagcacactagtttttttcttcttttgattaattttggaaatccatccttagtctttatcatgcatgcgctttcaaataaaccaaacaaaataagaaaaaataattataatataataaagaaaaatctgaaaaattatatttgagaacttctaaacaagtactaaataaacttaagtcacaccaaaaataattgagcagtgacccattaatttaaagcttaaaagaatagacacatatctaaacaactttctttttcttctttttattagagagagaccattggggcagtcaatgtgtttggcccatcaaaatagagtccccattccttgttgtcgggacagtgaaatgtgtggtgtctcacaccactcgtgcattgataaatagattttgttcaatcctatattaattttcacccttagttaaaatctctaatttactataactacgtacaacgattttattttataatcagtctgacttacatatatatagtaacaacgtaatcaaattgtattgctgtagcttttctcgtattttatatttcctatattaagcatgctgtcactaactgagattttgaaaaccaatagatcattagtccagagtcctcttattgttgatgatgatagtttcttaaaaaccatctagctaggcatggtcaattttttctgtcactattgata

SEQ ID NO: 177165 - DNA, 757 bp, Cannabis indica
agttctgtaaaaaaagtaacttgcttaattttttccatactatccaataaaaataattccagaaacagaatcgcaattatttttcacgaaaattcacaaacatcaatcaatcatcaaataacactcaatacaacatgataccatccaaaaacaaacaaacaatcgttttaaagtccaaatttcttgcaagtaaatcaatttaccatggctctgaggccagtttttggaattattttaccaggatcttagatctactcacaagtatgtttattaacatcctaaataagaactttctaaaacgataaattaaacacatataaagtttaagagcaatgcccaaagactcccatgcctttcttggtggaaaaaaccacccgcgatttccgacaagtctttattgcatttttagagcaagaagcggaactacaagaaaaaagaaattctatcatggatagatttctttctgagcacatcacaacacttggagtcagactcattctcacgatagctatttttggtgcttttaaagctggccaagtttttgaacaaagtattatttcggaacgtatacatgagtataatctagagaaactaaactaaaaaccgaagaaaaactgcaggctttcctcatttgttgtgccctttgattgagtccttttaaaagcccaacggatcccccaaggggcgtgtctaactacctcatgatagcatccacaagcactgaattcgcctagaatgggtgcatctttttgctatc

SEQ ID NO: 177166 - DNA, 740 bp, Cannabis indica
ataggaatattttaaaaataaattaaatttttcatgtactaatattaatcttgcacttaaaatcaaaccacaaaaataatttaatatataacaagtttgtgtggacttattccgttgttaatttgttcgaaaaaaataataatgagaatataaaatttaatattagtttgtgtgaatttatttgagaattttatcaaattgtaaatattttgttttttttatcaacatgaattataattatattttttttctttatatatgaaatttgtgaattatttagttaatatattatatatatatatatatttttggatgctgatgcacctcttaaaaaataagagtattgatgtacctttttgtatttttaatataaaataattataatttcatatttttttcacctaatagtgtatattataatcagttaatatactttgtaaaaaaattttaaaaaaattaaaataatttataatacataaagtaagatttaaattatttcgcttataaaataaaataaaaaatcaattttcagccggttaaataattattatgaaattcgcaaatataaataaaattaaaattatctgaaaactgaaatcaaagaaggtgcacgtaatatatctatttttacaaaaagaaaagaaaaaaaagaaatccttatttttatttcaaaagaaggggaaaacgtagtaggtattagggataacaaagaaaagacttagtaaatgatgcattgctaa

SEQ ID NO: 177167 - DNA, 964 bp, Cannabis indica
ctaatctctgaatagaccaaaagtagtgaactccctttagctaatgatgtatgctcacttcttcccaaaatgagtttgacaaatcgtttcccgaagatatatgctcacttcctcttgaaatgagactaagaaaagtcttctcccgaataccaacaattgttcaaagcttctcttcacctattttatgaacaacaagagtactttacacaaagatagaaaaacctaacagaacactctaagtttttacaaaagacactcttttctcacaaacactacaaaaaacaattacttttagtgacaattttttaattacaacataaattttttgtaacaataggtctaaatcctatgctcctaaaataatttccttttaaatatacacaaattttttgtagtaatttttaaaaatatagcatttttttttttaaatacgagcacaataacataatttttctttggcctacaaaatatgaacatgaatagttgtctctttgtctattttattgggtaattcttgtagatatttggggaagctttaatgacatgtattgccttttgtattggatattgtagacccacggtgtgtgtcaattagaaaacaacactaatagtctaaaacaacaaaaatataactacaaagaaacaaaaaaataacaaaaataaatatcaactttcctcactatatttttgttcttacgatttttttttacttagtttttgtacaacttgatttatttttttattctattacattatttttttttctataaaatttattgttaaaactttattctttaaactttttttttatcttttcttttttgagttagtgatagttaaaaacaactatcaactcaaaaacaactaaaaaataacataaaaattaataaaaaaaaataaaatgcacatatatacaacaaaaatattatctggaataaactaaatatacacgataaaaaaattc

SEQ ID NO: 177168 - DNA, 848 bp, Cannabis indica
ctcttgttacaaagagcataaacacaaagatcgtgtgatcattgctgaatgctaggatcgtaggattgaagaccgtatacaccgatagtggaatcgtgtgtatgccacatccacgcaaggtgatccctgagttatagggattgagctggtgactcacgaagtgcttggttgaattcactaagtgttgctcattctgcatgtctcattgagtattacttcatggacatgccagtgaggcatcctgctcggcatgttgatctgaccaggtgctctaagtagatgccacgtgtcaccattcttgttatgccacgtcagagtaccaattttgggatccgaccaggtgctctaagtacatgccacgtgtcaccattcttgtgatgccacgtcagagtgccaatttcgggataacaggttattttgttaaatatttaattgcttgtaaattataagttagaaaaatgatattttatatcattttacttatcagaaatttataaatagtattttaaatatttaaataacctagatattttttataaaaatttcaaaaatacttaattcgagatattttgacatataattaggatattattatttgtttattattttattcttaaaataataattacctaaccatatctattttaaaattggtttattttattattttagttttattaaatgtataagattaaaaaaaatgatattgaaaatatctatttggttattttaaatcttttatcttattagtatatttaattgggaaattatcccatatactatttttttaacttttttttatttacggtttgggtttaaaagtgcttggagcgctagttgcaataggg

SEQ ID NO: 177169 - DNA, 611 bp, Cannabis indica
aatactcatgatgtattcccgacgatttttaagcatgccttatagattatgatttttttaaaggggaattaccgacggttaaaaactgttgcactataggataggcaacgatttttaagcatgccttaaaaattgtaattttttaaaggagattgtcgatggttaaaaactgtggtctatactatatgccatatttttaaaccatagccacggtttaaaatcgttgcctatagtgttataggccacaatttttaaccagtgttgacctcaaaaagtgatctactgacagcggggttgtatgaatctgatgtttgccacgtattatacaataagaacagtaaagtaaataaggcacgaatttttacagaggttcgatccccttagttagcgggtaatgacctactcctcttttggttgtattgatacctagagataatactatttatatcactatggatgagatttgatatagctctctgtaagattacaaagcatggatcaagtaggcaagtttctattgagagaatggtatagccttagaggcatgtgagagaggaagagagaaggccctcttgggcgtgtacaagagagggagagaatagagattaggg

SEQ ID NO: 177170 - DNA, 910 bp, Cannabis indica
caacatcatgtggagaaatctcttggctcaagcattttatcaaatatcaattcttctcacactacaatttaaaggcaaatcgatattcaacgtaaatgagaaggtgaaagacactttgatcttcaatacttttgttctatgccaagtcttcaacgagttcaatgcaaggaaattagagaagagaaacgtgttcaaaggaattcataggaacaaactgttcttgggaatcatcgccataaccatcgttcttcaagtattgatggttgagtttttgaagaaatttgctggtacggagaggttgaactgggcacaatggggtgcgtgtgttggactcgctgccatgtcttggccaataggttggattgtcaagtgtatacctgttccaaaaaatccactttttagctacatcaaattactaattgcatataaataagattttaattgggttcttcacgtgtgtaaaaatgtaacattattcttttgatttttttttttttttttgataaatttaaagtatttgtaatatttttgtcaaaaaaaagtatttgtaatttttgaattagcatataagtttatcttatgaacacattaataaaaaaatttgtttaattctttcttttttttttctagtggaaaatttttttttttttttgtaaagaaaatgaaaatattctattaaaaggcacaaaatttaataggtcacaaaatataaagaggagttcaaaaaatataacaactaaatccatagggagctccgaccaccaaacacgagactcatctaaaataaacgccctctttactagagaatgagaaatggtatttaaagacctattgcaataagaaaatgataaactaaggaaagatttctaaacatgagttatatcattaagcaatataccaaattcattat

SEQ ID NO: 177171 - DNA, 615 bp, Cannabis indica
cttgatttttctttttcgaacttcaaattttagtttcccggttcttcatcgagtttttatgcctgaaaagcagattgttcaaccatagaagaaattagtgagatacaaaatgattcaaaaaaatttatggaaaacaagttaaaagtaacatttcgcgtagtttttgcttatacttttaactcgaacactcggtaaaatccttgaaagagcttacttaagccaaatggaatcttatatgaggagaagttgagaatatgaagtaccctttggcctttttttcttattcttttttttttctttttgtaaaattatcgtttatataaaagatagaattcgacctcatagtcattacatataatgttcgctgaaattattgataaatctatcatactagttaaagttataattcaaaaataaattagatagtttaatcacattgatgcatatgtaattactaatatcgtccaaaatgtagtacacgtcccttactacattggctaagtcacttaccatttttcttagttgatgatttggtgattcatgaagaaattaggcattgtcaaatttaactataaatgctagaatcatgtcaaacattgaaattctttatttatg

SEQ ID NO: 177172 - DNA, 656 bp, Cannabis indica
attgttacccaatatcatgacaagtttataatgcaccaggaattaaattatatatagatcgatcgaattcacaaagtaataaaataaataaaaataataaagtcaacagtttgagatttttgttaataatttaattttatcaatgctcattttctctacatgaaagataaaatgtccaagccccaagatttcaaaaggtgtgactgtgagtagtagcagtgtattaaatatttgaccaaaaaccaggacagagcagatctactactattttttcttttccttttttacctattttcttattcaattaatcatataaattaatatcaaccttatatatttatttaatttaatattcattatagaaaataaatagcagtgctagtaataaaaccacccaattcaattcacacatgtcattaaaaagaaatccggttcctaaccaaaaatatctgaacttataacaaatatctattttcttaattaaaaatattattcaaatataagggagagaatataattatttacgtgtattttatagttattaaaaataaatgctaaatattttaattttttttagtcatagtatacgtcaactgaaagatttgaatgtgtatgttgagaagattattccgaatatgatatgaaatgatatagct

SEQ ID NO: 177173 - DNA, 594 bp, Cannabis indica
  modified_base (557)..(557): a, c, t, g, unknown or other
acatcacattttgatgctgtctgattggatatgaatccttggcttcctcgatttgagggaacccgcttcatctaccattatttctgatcaaaaaccctacgactaaatcaagtaatcttcaaaaaaaaaaatgacagaagattgacataattaagtatacatttgtcaatatggctaacctctatattctcaatatggcgagatcgaacagtacaatatcctacagaagtgtgcatcgctaatcttagagtctccattaacattctctcgtttgcttctccatcctcgaaattctatctagaaggtggtcgaagaactgaaactcaatgaatcccatcaccaccacccatacggagatcacattggagaagtctacaattccaaagctaaatatattaaacaaaggaaaaaatgtaggagagaaaatgatgaatcaaaaagaaaaatgaatttaaactttgggacttgtggtatagcattgtcaaagattgagaatgtaagcgagaatcccttcttttcaatttcttgttcttgaattacgagttttttgtttaatntaatctattatttgtgatgtcagatcgttgccctgtc

SEQ ID NO: 177174 - DNA, 699 bp, Cannabis indica
aatatgatatgcatccctctcggaaacaaataatacttcatccttaaccttacacaacccaacaacaaaataaaattattattattatttgaatgataagattaattaacaattaaaaattggttaatcatatatagtcgtatatatcaagaatatataaatatatacatatataaacatgccgggaagtatgtaacgatcccatatctaacaaacaacacattgtgtgtgtgttgtttttttttttttaattttgaagttgtttgacaagtagtatgccaataaagaatcgtgagagcaattttgaagtttttctaggaattttccaccattattatttattatttattatataataatattgtaagcatgtatagatatgttaatttccgaccatgacaaaaatctatcaactacttcattattgtgtggaatagagtcaactaatataaccttctagtaacattatgcatatgtaattgctgacagcaattcttaaaaagtactagacactattagtattaaaaagacattaattagtattatttttatttttcatatcgttattagtataataagtattaatctttatataatatatataatataatattttttaagaaaattattgttaatagtacgagtgtctaagagcaatgcttatatatttgagtaatttgcggtaaaaacccttcacta

SEQ ID NO: 177175 - DNA, 673 bp, Cannabis indica
taatcgtatagcaccacatgtaaaagcacaaacacgtatgcccaataataatcctctaagatatatgctcttaagttgacaagtgaaagctatttgtaataaagggtcctaccaaaatgaagtaaaattataaataaattaagttggaagactgactccacacatagaaaaaggtaaagatccacttcttatgccacttaattaataatgttgtctgtttactatgttatattagtacaaaagtctgactcccaatattgatatgtcatacatatatttcttagtgaaaacttagaaagttaggtccaacaaatcaattgaaggcttttattacatataaatgaggagggtgtctagtagttttttttttttttgcatgtagtattaacaataattaagtattaagttttatataatttaatataataatttttagaacatatcgctaactaatcgaaagaaaatacgtttatatataaagtgttatacactataaaaataactatttttagtgataattttttagtcactacgtacataaattttttatgactaaatgtgacttttagtgatgacaataaaaagttaataatatgtgactaaaatataatatttaaatagaaattatcactaatttagttttagtcacaataagtattgtgattaaatgcac

SEQ ID NO: 177176 - DNA, 716 bp, Cannabis indica
aatagaaaaaattaaaattaaaaaaaagttattacacaaaaaactaaaactaaaaaaaaaaaaaaaaaagcattacgaactcctatggctacgattattatgcaataactgctgtcataagatccttatagatggtgatgcttatttcataataaccatcgccataagggacctatggtagcaattagggtccgctatagggtggagcagcaaggacccacgccctatgcctcccacccagacccaaaagatcctttaacaaaaatgtcccaaatttaatttttaaatatactatattttgtatttttaccatttttattgaaaaatataaccattttctaaaaaaaaaataccttatttattttttaagattctacattagatattttattaagaaaaaaaaacccaattatattttcaaaatattatatatattttatatttttaccattatatatacaaaaaaaaaaaaaaaaaataaaaattttcatataaacaaagtaaataccattttagactttgtgttttgcaaaaattacctattggaccatctattttgttaaatgacaaaatgaatcctatatttttctaaaataagtaaaaattaggaccatgagcccaatcaacaattttattttttaatataactaacttttatgataatttctatcatgaagataaattgtaaccagttttgtcataacatctctagatca

SEQ ID NO: 177177 - DNA, 850 bp, Cannabis indica
acacgtccttcagagtccaaaaaggagacccactgcaaaagttggatagtacttaaacacaaaatattataacaatatccactcatgttcagtatctcttctgtcttctcaaaaaaaaaaattaaattcagatcaaaaagcatgcacagtatgatcttctataaatccctaggattagagagctgtacaaaaatgtgataatggcatgctttcaggcattcggtccacccaaggtccaacagaaaaatggtggcccatgtgcttcatcagggcacgattgtggttgtcgggctggttaaacccatactagcgctactttatctaactgataaaattgtgatacttacatcctcagtcgtactcgtaggatcttgaatggtgtgcattccatccagatcaattattgattattgcacaagatcaattagttaaattggtgattagacatgacgaaatctccacaacaagacaaatatactcgaaattagaaaaagaaaagtagatctcattagattgaatggttggacgaataagctgaacataacctctaaattattctggtactagttttcagataaggttcttaccagttaccactacatttcacccaaggatccatagaaaataaatattcttacttggatattcacaaaagtagatcaggtgcattaaggtctttacgatttgtaagtatacaaggtttcaaacttttaaatttctgtaactgtgtaaaacactccagaaagggcgcaatgcaaaactataaatagaatgtggaatcaattaacggaacagaagcatgtatggaacagatacgacattggaaaaagtaaagaactttcacgaaaaa

SEQ ID NO: 177178 - DNA, 546 bp, Cannabis indica
ttttcactaaatttctaacatgagatcccattactcttttcattttaataaaaagaactctaataattattgttctgaaattcttaacacattagaaatagtccaaattataaatcaaatatcatcaaatattcaagggtgatcatactatgctcaatatagttaattagttcaatatttttttccaaaataattttttagacatcttcaacatgccttgttaaaaattactaagtcaataatttcaaaagaatgatattattgtaaaaaaataaatagtaatttattctacactattatttttttcatatacaattaattaactacattattaattaaacattttaaccataaatagatagtagtagtagtagtagtagtagtagtagggggtgtaatctaatgatcaatattttatggttacaatcaaatgagtcaatttaattgtatagactatataggagtggtacataatatttggaagcattattatgaaaagtctataggagtgatctaaacaattaatgcatgtgcatgcacactagc

SEQ ID NO: 177179 - DNA, 758 bp, Cannabis indica
ttataaaagagttgagttttgatattagtttttaactcgattactaaatgggttgggtttagaccatctccaatgggtgatgtaatatttctgttaaatttaggctacaaaaaataaattaaagttatatttggctcaaattttataattatacttcaatacattagaggtaatctagtacttttaaatttttttttttaaaaaaaaaaaaaaaaaaaaagtagaaaaaacgtcaacaaatatattaaattttgattgaaattgtacagaattcttattaactatataaataaaatttaaaaagttattaaaggcattgaatgacaaatgagtaaataaaaaatgagcattgttattgagtatcagtagtgcctaacattatctagaggtgacgccctataattcattagcgatattctttaaaagttattatcttaaattatatgagactcgatacttaattgtaccaataacgataagacacggagagtgctagacaccacgagtgcctcttagcattttttataaaaaatgatatttattgtgatgtaagttttgtcatactatattttgtgtcaaattttgtacaacttttagcatgtactaaatttagatcatatatatattaagagtttaattttgctaaaaatatatttatacttattttataacactttgttagagatgcttttagactttgactattactttagaaactttaaagcctcgacgtgagacgaacaccactcatgagcacg

SEQ ID NO: 177180 - DNA, 1007 bp, Cannabis indica
attttactagataataaagttagatcgagtaagattttgcaaaatcaaaaattaaaataagatgcttgttgaaatagagagacagaagtaatatattttttctaacattaaatcagatcttaacaactaatatatacatcgaattaggaataaatacaactaattaaacaaattagtgcttaaaaatctagaataaaacaaaactgaatctttctcacaagaacaaaaatatagtaaaatacaaacaccaccttacattaaaaaaaaaaaaaagaaaaatgctaaaagttatcgtgatagttagcacaatttattatattattattagtctaattaattattgggtctcaagtaatttaattaaaaaacactaggccaccaatgccttagctcataaaataaaatataataaaaataaaaaaatattaaaaaatactagttgtagctagtaccttcctatatgtcatattgatatttgtacatttaagtatttggtcccatataatttactataataactttggaaacttcgatagtagacccctttaaagggtcgttctgatagaccctattgtggacattgtctcacatggaataaatggtaaaatattgagccatatataaaaacatgcgttactccactcaaactcattactaattggttttgagatggaatctcataattttcaacagacccctaatgtgtttcggcaccgaaaaaaatttagtcattttttttttcataattgcgtacgttataattatttatgatcacttaaaatattttaaaaaattctaaatagtttataaagtcaaaaataagatttaaagagttgcttatcacacgtataagaaaaaacagtcgtttctgtaacaaaatatgtaaattttattttcggtattgcaaactattcaaaaaaattaaaaatttacagctagtattaaacaattataacatacatgatcataaaaataaaaaaatacaaatttagaaaaggtaacgaccg

SEQ ID NO: 177181 - DNA, 684 bp, Cannabis indica
gtagataagtttatttatgttaagtgtagttgaataggaggcataatttcaaagtccaaccccttattacaaggaaatggatgatgacatatataatttaaatatatactttatttgtatttatttttttagtgaaaaacattaaggacaacaatgtgtatgagagcacttctttttcttcttcttcatatacttaatttgtatgttgtgtgttaattatttgtgattttgagagatctatgaggtttttcaatgactttattagtaagaaatctagctagttaattagccatcacaaatcgacaaattataattatctagaagaagtccaaataaattattaggtttataattataaggttagaatgtaattatttttaaaaaaaatatttgacactaattaaaatagggatagggacactaaaaaatttacatcagcctactttttgttattaagaggcaattacactagttggaaagttcaattgcaaccagtgaccttatccaatactgaatctgaatatatattgccactacaaaaggagttaaggaaacattatggttgaaatgatttatggaagcactatatattctccctaagacttgttgatggtgcccttaggtgatctatcacgggagaagatggatcgtcgatactagctagctcctagatcattatttagg

SEQ ID NO: 177182 - DNA, 1090 bp, Cannabis indica
gcaggaatactgtcactttgtcgacactaccacatacaatttattttacaaaaaaatggacaatctaattatatgcgaacccagttagaatataaagttcaaaatacaaatattacactgtctctttcaaagcgaagaaagattaaaatccacttattacgagtatctttatttttcttatctataactttttagaaagatattatcttcaattatcaacaatttagagattgatttttattttttatttttattttacacatatttaagttgtgttttctttagcatttgaacataaatttttagtttaattttggataatcttaagaacatattacacttaaattattaagctttcttaaacactaatatattgcatccagtatttactttttattgttaaaattataaattacattatttagatatagataataataatctcacctaataactaatatattttttcttcaattattaattgtatcgtttttaaataaaataaaaaatacctaacataaaatttagtatacgtgcttcgcacgtaattttttactagtaatataaatagtccactataaatatttctaatattttttacttttttcttacaaaataaatgtgttactccttttttgtaattggtggagttataattttttaatatatatatttaaattaattctaaaaatatcaataataattataatatttgtataatttaatattaagtattatataaattgattagataatttttagaaaatatggtaattaattgtaaaatggctagcacagccctatacatacatttatgttgtgaaagatattttccccagtcaccggagaccggaccactcatgatgagtcagtcagtcagtcagtcattggatataataatataataatcagaactaaaaaaactacttaaaactaatttaaaaaattcatcggcatcaacaaaaatagagtggcatttcagcttaatgccacgtatatttaaccaataatctcctacttcacgaagaataatgcaatcttcctcctcccaagaattttttttagaaaaagctgtatcctaattaggccc

SEQ ID NO: 177183 - DNA, 538 bp, Cannabis indica
gacctaatacggcattccaaacgagcccttaaattgcaattttgtgaccaaacgattatcggtataaggaaaaacattttaaacttttgaataaaacaaaaaaacagaccacatgtccatgtattagctacaattgagtaagaaaaataagtgtaatagagagatatttacttttgttaaggaaagaaaatatccttaaattggtgtcatctgttctattaattattttataagtacacattatttatacctatttaacacataataaattccttaaaaaactctgttaaattaatacatgtaaaataagtataaataatatgtcctaaaataattagtaaagacagaaaaagcacaccaatttaagacaacaatttttttttgcagtgttaaatactaatatagtattttaaacaataaatacatttacgtttcgagatattagaatataaaactatcatcttgcttatacactattttatacataaacatatctctcaaatttacttatgtacatctatttttattttttattttt

SEQ ID NO: 177184 - DNA, 701 bp, Cannabis indica
cctcatcattaagactaactaaacttgtttcatagaatttgaattcaattttattattgggtccactaattcacataacataattatttgataaatgcatttgcttatgcaataaaagaaaaaaaaatcgattgtagtggttattgtttcaatgattactactacatggccatgtcggctgttatggattcatttcttatgaataataaatatatatatatacatttatatataaaggaacaattcaattaatgcttaatgggaatgatttgaattgaattacaaattttaactgctctcgatagaacgactcctgaaattgtatgacaaatcgtagtctaattattattattattataattgtatatatgtttatagtttttgtgattaatttttaaaatcatgtgatctaattatgtagttttaatcgatcactttttgacaattaattatcattaatacaagaaatatatatatatatatataaaaaaaaatacataataatatttaggagaaatctaaagtaatacatatacatgtttttgtgttgtatctacatttttttttctatctttctttttttttaaaaaataaaatggatctgcattgtttctagccttgataattataattgcaatatttttgttatgagggtatattttgtagttttaagatatcttaagggaaatttgaatttatat

SEQ ID NO: 177185 - DNA, 615 bp, Cannabis indica
tataaatataaaaatttctttatataatataattatagggacacgattttgtcccatgatgtactttcacggaatgtattccgtggtacattagatgggtctcagggtacattagatgagtgtcagagtacgttactattttttaaccctaattacccctagatcaatctcagccctcagataaaataactccctcatctaacggttgtcgtacatcacggaatacattccgtgaaagtacaatcacaagacaaaatcatgtccctataattgtaacatttaactaaattttaatatgtggtggaaaaatttcatataaaaatataatattattttagtaatataaaattaaagtattaatagtaatataaaattaaatgtaaatgataaatataattttttttttaaaaaaatttgtaatttattttattttactttgttgtaattattatttctttatttaaaaaaagtaaaaacaaaggagagagaacaagagcaaccgccaatctaggtaaacaaggtgtacataccagtcagtcatgcaacaaacctgtcatcttctatttctcttcgtacttctccttttttccacctatttccttctcttttcctact

SEQ ID NO: 177186 - DNA, 717 bp, Cannabis indica
tagcgagacttgtcccatcagatgaaaagcataatcctgtcactgcatctccatgacctttcaaagtatttacatcaacggtgatgcttctattttggtccttacagtactcaacaaaacaaaaaaatttctaatataaatctagactcgatcaaacttgtactgacctttagcttcgccttttccaactagttccttcattttctcggcaaccaaataagagagtgaataagaaggccaagtaggtagcgtaccttgtcagaagcgtgagagtgaggtttggagtgggactttttggagatagtttggtgaggccttgacgatcggggtttgggatcgggttggagctctggtttggcaagagattgaacatcggctcttcggttgcggaagtaattggcgaagaagaggagtacgatgaaagcaccgagaatgagcgaaagggccgcaattgggatggcaggatccattggcttagagcctagagggtggagacgatgacggaaacgacgacgtattcgggagacggcactgaaatggaagttttggggaagagaatatgtatcagttttgcagaacacagatcaatagtctaccgcatacgtgtacgataatttatgcaatctgatttattttttttaaagaattatgcaatctgatttaattagtgtttttttttatttagtggagtggagaaagtttaattttttttttttt

SEQ ID NO: 177187 - DNA, 643 bp, Cannabis indica
cttcattaaagcaaaacacaaatccatatacgtactataaatacgtaaataataataaatttaatagaaaaataaagcttaaagtaaaacattgaactacactacttacaatttatatatgttctatcttttaaaatacctcccacatgacagtggctcagctgttttctctatattgcaacatcttaactataaattaatgaggatacaatcatctcactttaatttgagctgagaaatcaatatatgccttatactaatttttgaacttggtatcagagcaaaaataggctaatctcatggcaaatccaaataatattactccagatcaatagcagctcaaaggctaggaactattatcttttgaaagaactatccaattacaaatcttcttgcatctataaaagcatttaaaagaaaacaaattcaggtgtcacctgagtgggaactctggcgggtaaccaatactccttttgtactactatagctaggtttcgggtgtcacccattctcgatacattatgatgcttttattaatatatgtattacaaactaaataaaaaattaaaccctaatctaaaaaaactaaaccaattgctttgtggttccgtaaaaatgtaattcaaaaaaattagtaaatata

SEQ ID NO: 177188 - DNA, 1138 bp, Cannabis indica
actttgtatttttgataccgatctaatgaatcttatctctgggcatggccccgtggactagtaacaatctgaaaggattgttgaaaccacgttacaaaaatcttgtgtgtttttacttttatgcactgtttgtttttctgggtttctctggagttacagagttgcattctgtaactacagaaaactgttttcagtaccagttttattattccgcatttaattaatcatttaattaaataatcaaactgggaatattaaaatacgaaatttcaggttttttaaggtaccaaacacaactagaaaaggtattatattgttattggtgtattttaatatcaagtctcatatatttttaaataatatgagaaattgctcatcaaatataaaatgtcatgttaatatagtgttggtagaactgagcttgggttaaggctggctaataaatgcaggcataagacttacctagtcttagagcccaaaaaaattatttgaaaaacacgcatatttttttagtaattattagacttggagctcaataattttttcctatttaaaggcctaattagtcttagaccagtctcctaagtgttggacatctaaagatcggaaatgaaattttcaatttttttttttttatatatatgagataaaatttgatccgttattactttctcctactagataattatatggaactatttaataagttttttttattgaaaaatgagtatattaatacgtgataacttagtcccttttaataagatttaagagactaataatgacgaaagtaatataaatacaactttaagtatttagtcttctagaaaaaaaaaacaatgtatatatataaatgtatgcaatcaaatattagatattaatgcgaaatagggaaagtgaaagagaaaattattattgagaaaaacaagctatatatagctttacaccaaaacagggaaccgacctttactaaagcttaacataaccactttgactaaactaacaactaacagttgagatatttactgacacaataactgaattaactaaatatactaactgatattctaatatcccccctccaacggtggacagtatatgtcatgaacggacatcttggcaatatgagaagagagag

SEQ ID NO: 177189 - DNA, 707 bp, Cannabis indica
ttattcccaaattctaacatgatctaagatattcaattaattattcaatttactgttatgattttctatctttggtaaacttttgttttttttttgttttttgtttttggactttgctttggtggatttgacactgcccaacgcccatgctacggcgacgtgaatttcttcttttttgcatggaattatttgttgtctcattaagtagaggctaaatgctttacaatgtttattatatgcatttggttgacttgggataacgacaacttagtattattggattattgtcgttagtatatagttaaggtatttgattaaatgtcttaatagaaaaaatgatagtattttgagaattttgaatgggcgatatttgtgttaattagcagtagtaattagcttcgtcgtcagtaaaatgtataatgtagtaaaaatgtgattaaatgattcactacttgaaacatattgatgaccttgaggcatttgctatacatatgcaatatgacaacaatatattgttatattatttgatataatataatatagattataatatttaaatgtgacaaataatatattaataggatattaatatatattatgtgttagaggttatattatatcatatatagtataataatacacacataaaaattgtaacatatgtatgagttacaaatctgaaaaatgaattgtaacttaaggatcac

SEQ ID NO: 177190 - DNA, 722 bp, Cannabis indica
aattatgttgctaatcaattttattaggtcaaactaatataattaacctagcacagttatccaaatcaggcaaatgggccttcacaattggggttgttcatgtgagggggggctgggtccagtatgtcgtacccacttctaaggctcccaactctcacacaaggcccaaaagagaggaatttaaccttaaaatgaacaactgttattaattgaataggctcattaactaaatgagcctaaataaaatctatcaggttatgacattttatttagcaacaacaacctatatgtatctataatagaaattaaacatataggctcacacaggcacacagatttggatggatcctatcatgttactaggtcatacacagatgaaagaagtttgtaaaaattacctgttacaaattatttacttgatctatcatcaattgaaccatgggttaaaatcagatcattggatctgtcaacaagttaaccatggcaatttagatcaagcaataataggttttagaaaacttacaaacaatctaaaacacatactcctgcaacaaggttagatttggatagttggatgtaggatttatttaattttaaaattatatttcgaaaaataaatattaaaattaaacctaccattttgaaaaattaggttttgggtaacctaaatgtcatttcaaaaataaaattgctaactttccttttaaaatttttacttaaac

SEQ ID NO: 177191 - DNA, 639 bp, Cannabis indica
taattttcgtaaatttcccgaagatatattattaaattcatcctatttatgtagatatgtatatataatatatattaaaagagttgaaaacacaaagaaaagagaaacgaaagttggcctatttttctcacgatgtctttcaataaagggctacacacattatgccgccagaatatttttgcaatgagattctgcacctgacgttggtaggcccactatggccaagtgcagctcacttaaaattaaataagctaccaccacaattgtagatttcagttcagcacccgaaatagaaaaatgaaaaaaatgaaaaaagtgaaaaattgtaaaagaaattcaactttgcttcctattaaaaaataaaaaaaaaaattctacaatacaatttttttttctccatgaagaatacaatcttaagaagtataggtaccaaacaaaacacaaccaaattagtggctttttttcctactaaaatagtacacttttaaaagggatctaccgatacattctttatcaattttagcatatgagagaattttttagttaaagtcttctcatgattgtctacattataattatttaagatatcttgtaaaattttaaaatattcttatatatttaacaagccaaaaataggat

SEQ ID NO: 177192 - DNA, 627 bp, Cannabis indica
gaagaaaaacagtatccgttatccacatatatattattggggtccaataaattggaacaagatgctctttagtaaattaattaatcaataatcattcttttttatatattatatagttaactaagttaatagaatctagctatatatagagcccactatccgttgatgttattagtcctgaataaatatgatattgattaattaattaatatagttttcagaacatgccgcccgccggagaagctccatcttcacttactgccctacacaattttaataaaagcatttttattaggtaactaatattttaaaatattgtcatataattaattagcgacttttttttttgtaatatttattaaaataaaaaaatactaaacactataaataagtgtcttcttgtatttctcttttaacaaactcttctacaaaatagactatttcacaaattattaatagctctgctctctaaattcataattactgaaataataaatggttataaactaagagttattgataattaatactaaatattgctactaaaatcctttaaaaaaatcaattttctcattaattaatcaaaaactaagaacaaactaccaaattttgttaggctaaactagg

SEQ ID NO: 177193 - DNA, 864 bp, Cannabis indica
acggttataaatttcaaccgtcagtcgtttacaaacaccgttagttattacaaaaattaattaacataacttccttcagtgttttttactgtttaacagttaaattccctaaaagaaactgctaatttaatttgttgattaataacaatattctcttctctcctttggtctcgtcgtttgtgacgctatatatcgtttctctcacgttttattccctcttattttttagtccccactcagtaaccacctctctactactcttttatccatacttctctttctctctctagccaatatttccaaattccttgttcttcggttctctacttctccattcttcgcttgtgcattttgctctattcagtacaaatggaaactcctccttgctccgatgtgtgggagctcatctctaaggatcgccgctctctgaagcatgttcatgacaacgtgcatggaaacatctatctcgaaccggtactatcaactttcgtttccatagcttcgaatcttagttttcgtttttgattttgttctttcgtattatcatttaaataatttacttaaatcgcttttggtttgaaaaagctttaagtgcctctggtatatctgctgaagtgtgtttcgatttttcttccgtgagtaataatattgaaaatagtatttattagattttttttgttaatttttctttcctcactggtttattctgttgtttaacaatttctttcaattagttattataatcgacgcttggaagtctttttgatgtatattttgatttttaaggattgtataatcgattgatgttcttatatataaaactagaattgctgtattttattcgtatactgtttgtttaaagat

SEQ ID NO: 177194 - DNA, 403 bp, Cannabis indica
cctcactcgcacgctgcttaggaaaacttcccaagagatcacctatcctaaaattaccccaggtcatgcacgcttaattgtggagttctttcgtgatgggctaccgaaaaacaagatgcacactgttgatataggtagtatcaattaatcaatccatttaagccctcttcaactgtgtagtcccatacctatacaatcttagaatcatcccacttgacattccccaggcggtgtgggattgcacaacttacctggtattttctcttacggatcacatgactattgactatcacagtgaggctgagatgcttggtgaggccgagatgcttgtagggcctagatgaatgggactgtgatggctgagatggagtctttggagatggtggtaagatgatacttaagg

SEQ ID NO: 177195 - DNA, 1034 bp, Cannabis indica
agaaacttaagagaggcgcatgaccccgcaagccctttgggctccacctattatcatgctagctctcaattaaggtaagatcaatagaataaatagaatttcgcaaaattttttatattattatttttataattaaatatcgagtcttatattttttattttatatttattataaagaatcgttaattatttgtaaaatacaatcacataatagtattagacactactaatatttaatatcaatgctaatctataatccaagtaatttcttattcagttgtgatgcgagcagtacaattttgttattttattagaccactttgaaatatgttttgaactattttgctatccacattccacatgcattattagggctaagcctaaacatagtggggctaggactatacacttattaccccaactataaaatctaaaggcaatttttaaaaaataacattcgataacgattatgtgttacctcaacagatgtccacttgaaatcttataaaggacgtccttgaaaaggagccctaaggttaacaactagagaaattatccacgcatcaaaaacaaaatattgactcttgtattacattttttgttggtgacacaatacgagatgtgaaacgttaaaaggcaccactagtacatccaatatgaaattgtagggatcacaagtatgtgtgtacgccaatttttgacatcaatgacaattctgaggagcgtattattaagtttgtacacccaaaatccctcatgcaacggtatgttatcaacctttttcaactcttgaaaaactactcgaggattaaggactcttccgtaccttatactttaagataggcccataagtcttgtatttacattcacccatgtgtaatcctatataaagcatctgattagtggataatttagccttgtaatgcaatgtgatcaatttacaaacattaatcctagttgtaaaattatttgtaagaattcctactttgactaggatttgcttgctactatgagaaatgtttctatttattttg

SEQ ID NO: 177196 - DNA, 595 bp, Cannabis indica
gctaaattgaaaatagtactaatacacgatatgtactagcagttttgaaaattggttagtcatagctatcaatatcaaaataagtatagtatagacttactaactagactatttccgtttttgtaagttttattttattaagacttttattgcagtggatgaatttgttagaagttctagaattactagcccagatgtcggtcattttcaaggggagggaaacctccctgtaattcccacttatgttaacataaaccacttcaaatctcttaaattgataactaatcagattgtaatgggtttatttagggcacaaaacccaacaaactcccacttgcactaacataaaacaagttgtgcattccaatcaatctgttgtcttgatcttcagatcaagtgtagtatatttgaatccacccaaacttctggaaccaggttcataaatcattatgaaacatccttaactatatgctttactcatcaaggtatactgaaatccttactgcttattaagtacatctgaacaaacagaagacatatctctcatattttaaaatttggaactgagataatacagtgtagaattttcttcagt

SEQ ID NO: 177197 - DNA, 970 bp, Cannabis indica
taaagtccttaaatctaacaatctcaatagttcagggggaatttttaacgacaaaaaagttcagggggcatgatttggtatatgtcaaagttcggggggaaaattactaattagcctataatttttgacaagtacaaacattaaatattttgatactaaggtgacgaattcgtaattatttatgctaatatatatttttcattttattttgagttgaaaataaaatttgaattatgattattattatatgttttatgtttttgaacaaatagttatgttcttttattcttaaaaaattatattaatttttaattgagagcaccaaatattatttaattattttatttttaaataataaattatagatatgaagaaaattaaagccaaattatttactaaggataatttttctattaaatattttttagaaggtgtgtgagaagaaattttaaacatttataatgaggagcttatttaataaattgggtgtggaaagaaaaagaaaaaagtacgtatatatacttgtttggattgactgaataattgatgatattgtatgaactatgaatatgaagagcacaaatcattttaattaactaataaattttgatcaattatatatgttgattttataagaattgcactcatgtaaagcaaaaccaaaagttaataccaaattacctatcttaataatgttagcaaatatataaacattaaattatatagtctaattaattattagagtcaaattatatggttgatttgattgccaagtggccaacataacaaagtcacaaatcacaatcaatataaatatatataagaaaaatgttctagacttttattggtcttagctctagtttcttacttactaagaaaatgccacgtaacggctaaatccttctttttctgaaactcttaagtgtttggcaataatctttttctttatctttttttttttttaaaaaaa

SEQ ID NO: 177198 - DNA, 764 bp, Cannabis indica
aaaaaagttgactttcaagaaacaattttgactacctacctagtagggtattgaactcgatacaatttcaattccaatcataactagctaaacacagtatccatataaacccatacctgagaatcacgcattttcgtcttcagttgttgaatttcatgattcacctctgctttcctctgaaatgatttaatttgatctacatcttgagactgcatcagcaaagaataacagtgagaaaaacaacctcaagagtattttcttcaaaggcatttttaaataaccaaccttatgaagcgggtgtgaatatagctttttttcaagctcctcaatttgttttgaccaactcgacaatctcaggatcttcaatacccatgtcctgatctcagcacaatccaaagatggcaatatttttaaatataatgctgtaatgattatcttcctaaatgtaataaatgtagtaaaatggatatccgtatttgttttctggggtctacaataaaataacactaatacatctgatagttaccgctacaggattcaacttaggaagaccttggggaaaacgagttcccagctcctgtactgcgagcagaatgctttgccttgcttccaatggtcgcagatctggaggaatcgatatccttagtctgctgagagcagaaatcaagggtagctgaactggaacctagacaaacatatatatgcattaggaaatctaaatattaactcaaccacaggaatgatagattaaaccagttacactt

SEQ ID NO: 177199 - DNA, 516 bp, Cannabis indica
gtaaactttttgaagatttatactgtattttaatatcaacacgtggtattttcggaacaactaacgaatatgttaaaatgaggactaacaaacttacaagaatctcgagtttaggtactattatcgttcttttttgagcctagagatttatgtgcatcaaagttaacattttagaattatttaccttaattttcccctttttatattaaaaaagcataaaattattttctatgatctgatcccatctttaataacactttcacttttgatgcaagtaaatttccatttgattaagggtcaaatatcaatgaatattacatccaaaaatatattaatgaatgttctttcgtaaaaaaataatatcaaagaattatttgttctaatattttttttaatcagctttttgtttattaaattataaaaataaaaaaaaaagttttcaaaatcttattctataaaactattcactttttaattttttgatttgagcatcaaaatttttgaaaacaaaaaaaa

SEQ ID NO: 177200 - DNA, 614 bp, Cannabis indica
atattattttatttccttaattagaaatattctaatagaaatatctcaaaaaaaaattaaaatgtcacaatacttcaactattgaagaatcagctccaattttttttttctctctttttttttctacaattttctaaatataactcgttcttacatcttttccatctccttatgtaaaaaaatttaaattacaggccctaaaacttcagaaatagggttgaaatctatcaccaaaaaaaggaaatggaaagaaaaaatgaaattaaatgatagtttttcttatgataattttgttgaggcgcacatacccaaataggggaaggtttctactaagaagaaatctaatattgttaaaggagagggaatcgaggggagtcctattgttgttggttaaaaggggaaaaatcaaaattctcgtttgatcgagtttgatatggcatacaagtttaaatcaactgctatgcaaccatttaaaaatcaatatgtgcaatgtattaaagaaaacatttctccttgtatgagttttgaaaaaaaattaaaaaaaaaaaagaaaagtcaaataaatttctttttaatatattgtagaacctatatctaagaatactctatttaag

SEQ ID NO: 177201 - DNA, 786 bp, Cannabis indica
gtaccctctgaattttgatatctatttaatcgtgctctataaactttcatccagaccaatatgtataaaatcttagaatttttataaaaatattagattttagataaaaatttacgattttactgttacacataattttttacaaaaaatattgtctttttataaaacaaccgtaaaataacaaaataaaacaattaaaacaacagtttaacaactaaaaacaaccgtagaacaacagtgaaaacttaacacaatacacaatataaaatttatacaatatttttttttaaaaaaaaaaggtagaaatttatcccctaaaatctttgatgaatttattttattacgatctgtctgcattacgatctgtctgcccttatgtgtttgtggaacattttctatcatttatgtagtacatagataggggagttatggtgccccattgtaggctactaatattaattcatataaaattattgtctgaacaaataccaaatgtatcattaattaacattgagtaacctatttagtacagagttactttttgtaagtactttttcttgctttttttgcttaataaatgaatttgtggacatagatattcttgttgctctagtacatgcaaagaaagagtaacccatttttagtatgtcatataatatacaattatgagtattaattacaataatcaaccatgtcgattgttgcgttgaccaagcccaggcccatctcaagcccattagagattttgggccaaaaaaatctaattagattatgggaaatttacaa

SEQ ID NO: 177202 - DNA, 661 bp, Cannabis indica
aatgggttgggttggggttgactcgcaccgactcaaaaagcttaattggtcgagtcaggtgaaaagataatgggtagggtcgggtcggtagcggaccggggccgacccaacccatttacatccctaaattagagagatttctaggctgaattatttcacaccgaacagaatatagttatattgcttaatcatacaattgattctccagtgtaactttattcatcttttttcggcaatatattcattccatactttatattttaacgaaatacacactgacttaatgtttacaataataatttttaagtgcttaatagtttaagattatatacactctattactttagattatttaaattagaaaacaaactgcgctttgagagtgtagttgtttatcaaaatttaaattcttttttaatatatataatatggtactattttgtttgatgataaataacatataattgtatcaacattgaaatggaataatttcttgtatatcaagtgctccacataattttttataaggcctcttcaaagattacatgttatacaagttactttagagtttagactcaaatcaaattggtatatttcaatgactcacatttgttatatcaaagcatttacacaaattggtgtagactacttaaccattttt

SEQ ID NO: 177203 - DNA, 512 bp, Cannabis indica
actataatatataaaacatcagaaaaagaaatattatttttcaatattccaaaaatagaatacattcttacaataagagcatgaatgatacccctaattaggaaatttcataattaaacaaaatataatacataagattgttacacacatattataaaaaatagtgacatatatttatagggctttaaggtcagactttttggacggcctaagggcactacccacctttttgtacctaaattaagctaagtggagcatgtggaacccatctgatttttgtaaaattggggttatatcttatttttctgtccacttagaaattatatattttttcaaaaagaaaaaactaggattatatttctctctcccccacaacaaaataaaagaattaataaaagagctttttatgtatatctttcaaagtatttttcaaattattctaagattaattaaaagcaccttgaaaaaaaattacatacaccactttttttttattatatatatataatata

SEQ ID NO: 177204 - DNA, 614 bp, Cannabis indica
gccaagtgttctaaatgcatagaaaatgagctcaaaatgccaatttcaaaaatacactataattttccattctcttgcgtttatttgactcattttcccatctcacacttttttcttagccaataaattgcacattatctagtttacttttctacccttctcatatcccacctacctcgtttatgttagaaatttctagaaaatattaaaataattaatttattgactattttaattcactcactttggctataaatagagggttttgaaggcattttgaagatatcatcccaccacattctacaccacctacacataacttactccactacctacttttattttctctctttgttagaatgcattttttttataagcggatcctctgtctaggattcctgtccattttgttgtccacccaattaaaatagtccaaatcattaatgaattaatatcaccattttaacatctatctttccgttaacagtaacgttaacagtataagtattaatatatattattatttgcttaataaatgaggagcttttctcaatgacatattagtgcagtgggacctagctatgaaatttttaaatttgattcaagtgaaaaac

SEQ ID NO: 177205 - DNA, 517 bp, Cannabis indica
aaataataataaaacttaaataattttcgtcagagcaactcttacattttctaatttcaaataaaaaaaaaaaaaaactctaacatattatatctttatatattaaaagtgcctatctaacggcatttcttggtttaacattcttggtttaacagaatatacttaaaaataaaagaatattctgttaaatttaacgattaggtttgatctcccgttaaaaaataaacccaataattaaacccaaaaaattaaacaatcttttaaatattaataatctctttttaaattaaaaaaatcatcttagccacatatctctctaacaaacctatcttgggagaatattaataatttttttatttattttttaaaaaagaaaaatatagataaaatatctagaaaagataatataaaagaagattgattgtgttggcttagagatttttgggcttgggcttaaaaaaataattaaaaaaaaaaagatgaaatgggctgtaattagtatttaccttatatgttt

SEQ ID NO: 177206 - DNA, 679 bp, Cannabis indica
tagtaagtttgtgcatttttctccaaactacaaatttagaaattcttttcaaaacaaaaaaaaaaaaagaaggtaatttaatactacattttaataatgtttgagaatttctctcaactaaaaagttaggaatttttttgtgtaatgttatggtcataaacatagtttaatgcatgattttatatatatatatatttttttttacaaaaaggaagtttcaagtttgaattttcctcttcaaaatttaaaaaaaaaaagttaattaaattatgtaaatattcaatatttctttttttgaatacttcattcactaatacaaattaatgttcaatgattaaaaacaaaactacaacaaatattatatgccacaaaaattatcaatttattttttgttggaaaaatgatatatgaggataagttatgtgataatatgttaaaaaaaaatgatcaacttgttctccaacaatgagaatggtctaactggcaacacaattattattattatcattattattttcatgaaaaaacaaaaactaaaaaccaaaaaaaaggatattaatgcaaataaaacataaatcatttgtgacttggtagatagggctttgttaggaaaccacaaattatgggatcaatcgaaccctccaaaattcataattgtaaacaattgtaatttttatag

SEQ ID NO: 177207 - DNA, 554 bp, Cannabis indica
gttgcttttatttttatttaacagaagacaaaattataaattttatggctttttaattatactgtatgtgctaaaatataatttttccttttaatgagtgtttttataggaaaatagtaattctcataaaccattttatttttaataataaattattttatttttaatataaataaaaagtcacccagaattttgttatatatgcacataattatttgcttaaaattattattttataaatatataagaatataattatttgcttaaaattattatggtagtaaaaaatatcattatgttttttttaaaaaaaaaaaatatattgatattaagattattttattttgttataatataatgcaaattaataaattaattttttttttctaaacaaaatcttaatcagagagaaaagtgtgatagagaagagaaaaaaaacaattaattttttttttttttttagttattatttatgttttaaggttttgtattgtgtttcttaattatattctattataaaataaatttagctcaaaaacgataagataggagag

SEQ ID NO: 177208 - DNA, 891 bp, Cannabis indica
tactaatatatattgctactaaatattattattttatactaaataaataaataaataaaacaaaccttacattaactaaaatttaaactaatttctaactatgtatgtatagtaaaatatttgaaattttaaaatgatcaaaaagtgactgaaatttgaaatgagtactttttattcttacaataatttaaaataaatattatagttaaattttaacacaatatcgatcttaattcttttattttcatataataaatattttttttgccacgcaagctaactcaataatgtaatatttaattacttaataacatctctattgaagtactatatattttagcacttttgtaaaaataaaaaaaaaaatagtgtgtcaaaaattatatcaatttcttttactagtttgtactttaaaatgctactatatatatatatattatattagaataattttataaatatatatactaaaaataatatttactccaaaatattatattcttatgaccaaataaataaataaataaaataaatcaaaccaagcacctcaaagttcccaatatttgtatgcttaattgcttatcacttgtgctatataactttttgttggtaaatttattttaccaggatcttagatctactcacaagtatgtttattaacatcctaaatatgaactttctaaaacgatgaaataacacatataaagtttaagaaaccttacattgggtgcagcggaataatatgactccttccgttcagatatctagcccttgattcctttctgtagcagagcattatcaatatctaaacctggatctctttctctgaatctttaatgctgaaacctccttcttgctgatgctctttcttcacgattctcctcactatga

SEQ ID NO: 177209 - DNA, 1065 bp, Cannabis indica
gttttaccaacaatttaattttttgaccaccttagactttaaaaaaaatatcgtagtagttttaatatttaaattttatttttaataatataaactatttaaaattttacaaataatcctaaataatgaggacatacataattacataaaaatctaaaactcctaaacaccaagacagatagatagaatttgtaccgaaacactccttgggtgtagacttaccctattttatttcaggacagtttttatgtttttgttacactttactatcattaacattatcttcttaactctttttgacatttgatatgaagaaagaaaaagccccatatatttatcgcaactattcttagattcaaacattaaagtcaaaagcataaattccaactacgatttgtgatacattagtttactaaacttaacttgtaactaaaatgaaactaaatataacataatagcatggctttaaattaaattcaatcacttaatatgagaaaaagaaaagaattatataaaatttgggatattggaagttgaatgaaagacacaatttatgccattcaaaatgagcaaatcaaatattcacatgaaagagcaaaacgacatcaatatccccaaagtttttgacatttttctgtacaaagtgcattgacctaaatgtccttaacttggcactcaattcccaactaaaaagaaaaaaaagagcattgacatccaatgtcaataaaataaaaaggcccccaaattaaagaaaccaaggatatttatgtgatttcacatgtcatgataaagtaaaaaaaaattaaattaaaaaaaaaaaagaaattaagacgtactcacataacccaaacccccaaattaaagaaaaattttcttttttctttttttttttcttcccttcttctaagttcttccccccattcgatatttttatatatataatataatatttttttttaattaaagaaatttctctcaacttaccgtcacagtcatggctcacgcgccaatccttcggtgaccgacgcgagtttctggagattgagcttcacgacagtatcggcg

SEQ ID NO: 177210 - DNA, 624 bp, Cannabis indica
  modified_base (173)..(173): a, c, t, g, unknown or other
gcatgcgtgagttttttttatattatgtgtaattgattatttaaaattatagttttggattaccatgaattattcagaattttataaaaatttaaccaaatatactactataactacaatatacattatccaataaaataataataagttataattttgtaaatgacaaaaanaaaaaaaaaatactcctataataaaagcaacaataattcagcaaatattaccgagtttcgtaattaaggagatattcagttcacccctattactttcatcttttacatatgttaattcaaaccatcaaattcttatcttaaactatatatttcaacattttcattattaataaatgaatacatcatcggtcaatgaaggccagtcattttcccacttaaaataattttttatttttattttctgtcaaaaatatacttgaaattgttacggttccctaattgcacaaaaaaaaattcaatatctttcccatgagattcacactcataatattatatacttgatcttaaattgacttgtaataatatataaactctaacatacataatataagcagtataataattttgattatcaaattcagaatttaagatttgattaaatctatatact

SEQ ID NO: 177211 - DNA, 583 bp, Cannabis indica
agatttgattaaatctatatactgctccaataaatacaagataggtataataacacttgtaattttttttttttaatgtatccctgaatttacgtagttgaaaacaaaattgaattaaagttttctaattaaaatatcacattttttttttcaaattcagagatataattacaaccaccgactctttttaagaacatttatttttttcttaactaaatcattactttaactaataactattaacaccaattgagggattacttttaataaccaaaagaaaaatgtggaatttaaatatttaaaaaataaaactaaaatgcctcaccaaaatagttttatgtatttatttaagtaacatttgataatatttttatttttaaaattttgattttaaaaaacaaaaatacattctatagccgacttttgtttttcaattttaaaaacagaaaataaaaatatattctgtaaattttacttttagttttcattttgctgattttatttaaattgggttttggggtactagggctagagtctggattcgggttccaagatctaagttggagccaaagtccaaaatatt

SEQ ID NO: 177212 - DNA, 802 bp, Cannabis indica
ttacatgcacaatttgtataggtggtgatgagatatacacagtgaaagaaaattctattctgacatggaaagatttctcaaagaatattatatagtctttcctattttatgtcaaatagtttattatatagttttctttgaaggagatttgtgttatctatacttcttgtaaagtttttttggtttctttgtatatggtaattgatgctatgttttggacaagtagttcatactgcattttttggggggtttttttgcgatataggacatgcaatgcagctaaaggctactacttatgggggtacattgtagcctaagttagaggatttcaagggtattcggacaagttactagttagatatattatgtaaataacttttgttaaaagaaatcatataatcacgtgcacactttgtataggtgatgatgagatatacacagtgaaagaaaatcctattctgacacggaaagatttcccaaagaatatggttgcagtattactattacatattgcaagtttttgctattcttatggatagaatatcttaattagttttttctgtgtagaatatttactagttcacctttcgtaattttcttgtacatacataatatgaaccataagctactagatcatgcaatgcaaatattgttgtttcaattgaataatgtaaactaaagtagactgaaaaaatggggagttaggtggcataaagataaggatgagatgaaataaataaaactaagtagcttagtaaacttcagtgtttcaaactaacatgctatttattctctaggcagg

SEQ ID NO: 177213 - DNA, 741 bp, Cannabis indica
agaatatgttggtgttttcttttcaactaccgaattttgtgtagtctttccacgcaagaatgatagtgtattatgcctttggaggcataaaaggcttgaagattcaattccttagcgttgtctaaacgaattgccttaaatgtaagatgagaatcatatacgttgaacatcaaattaagatttaagcatatatatccaagtaaaccgagttttgtcgtctactatggtgagaaagtatttaaaaccttctatgctaatgatatgaaaaggatcccatatgtccatatggactaaatcaaagattcgtttggcaaaatgatgattggaaacaaatggcaatcgtctttgtttagctagttggcaaatgtgacaatgcttattattaaaggaagtagagttttcactctttttattgaaaaaattggaaatgtacatagaagggtgaccaaggcgattgtgccaatggtttacatgtttattatcaaactgaaatgaaatagcattggctgcaacttgttcttgttgcagcaagcatagctttccatatttttcaacagtcccaatcaccatattccaaaaaagatcctgaataacacaagagtttttggaaaaaatgatggaattagaactgttagtaacaaggtcagaaatagatatgagattgatcttgaaacttagtacatacaatacattataaaaggtaatgtaggagtttatgtgtactgtacccgattttaagac

SEQ ID NO: 177214 - DNA, 663 bp, Cannabis indica
tttggacttggaactccagcgttccccatctcacataacacgtaccacccatataacaacttataagacggtggaatcaactggaaaagagcaattctgatctttgtgtagtgtttcgcaaaataaatcctcaggggtaagtgtgcccagcttgagatgtgagcccagctccaggcgttgaacccatctgtgcttcaggaagaagattctcctgtgacttataacctgttccacaccagtctaggaatgttactgactcctccctcagtagaaaatttctccatcatgccatacaccttgaatttgttgacgttttaatccatctcccaaatgtactagctatacacgattgaggctgggggtggagcctccaccttagcctttgtcttggttttcttttaatttcctttaaaagcaacttcaagggtaggatcttgttgaggtccctctgctggagcctcaacctttacttcctcaaggtccatgacctcaagattaaactcgtcgttgagaccatccactggaaaagaaaagaaaaaagaaatctaaagaaattaaataaccctatatcttaaggacagtaaggataattggggaaggcctccccaaaaacttgctcggattggacccatcacctggaagcgtattccttacagaatgttg

SEQ ID NO: 177215 - DNA, 598 bp, Cannabis indica
tcatgtccttcaaaatttttgatatatactaaatcatgtcccttgaactttcatccatgttagaatttttttactaaattagataaaaatccttaaatttaacaatattaatagttctggggaatttaacggaccaaaaaagttcaaagaaacataatttaatacatgttaaagttcgggaaaaaattgctaatttagccttattattattattattattgttattattattactactattgtttattttttatttatttatttatttttttttttgaggagatactattttttaatattttaaacaatatcgaaagagataaaccgtgaatttatattccattttgttattgtcaatggtcaataagtcaattatcccgtgtctattttacaatattatattcataaacatgacgtagcagtgattctgatgattacgtaagtcttacgtcactttacttggaggcagtaacatgaactttacatctgtaagttgctaattaacaattgattaattaactcttaaaaagatttggacacaatgaaaatgccagagcaattaaatactcaattaaaatgatatgatttaacaaaataa

SEQ ID NO: 177216 - DNA, 863 bp, Cannabis indica
acacacagattaaattactaatataatcttattagcttgagaaaatacaaaaaagtaaaaactataagatcactttacacacacaagtaaaaaaaaaaaaaggttacaaagttatacataattgaataaaaagttaaattttaattaaagtgaataaagatatgtacatattaataggtaaaatactaagaaagatgttaaacatcataaatgatgacatattgtcattagagcattttaatatcgactctcacagattttgatttagtaaataatatgagaaactgttaaccaattataaattaccatatctgtaagtattaggcatcttaaggtggcacataataatattctattagtaataataaataaataagcaaaaactaattgtaaaaaatattatttataaaaaaatcattcataaaaaaaaaagaaaaaaataagatcataaaaaaacacaaaatgacatattgtcaaatctatttctatataaaaaatttaatataatatttgttaggatgcaaaattcatatcatcataaatctaaaattttattatttacttttatgtcacttttattattttattagtatatttagttatagcatttattatgaaatatttatattctactcttattattttacattaaaaaattaatgataaaattattattttttatacttgtaataaaaatattaaattttgcatcaagttttgctgtttactgaaattttcaaaaactaattaattagagcttaagtatgatataaaataataaataatacacacataagtttttacgtggttcagtctgttgtattagtcttacaagcgtgtgttgaatttcacaagtgtttaca

SEQ ID NO: 177217 - DNA, 1018 bp, Cannabis indica
cattcttttgagttttttttggcacaatcgctaaacaaattttcgaagttaatgatgaatatgatgacacagtcgtctttagacatctcaggtgtcacagtcacggatagccacaaatgatgccgacacaacaaatatcacagattccgttaaatttttttagatgatgtcgacaccacaagggcagcaatatcagtagacattgcagatgatactaacacaacaagtgaagcagacatctcagatgatgctaacaccacatggggcagaaggcatctcaaatgatgacgagtttgcagatgccgccatactacccacaaatgtcgaatgttcctagagatgcttgtgatgatgacgacgctactacaaatttcttttagaatctatatttaagtttaatgaactatcaattttatgtttattgatattttatgaacacccactttatgcttttagtaagcagtatttaatgataatgtaatgtttgtaactctaaatatttactacaaaaaatatttacttttttacttttaattaaataatttaatacattaattaattaaaaaatatttaatgtaatttaattttaaaaaaaccataacagatttatttatttagaaaaaaaaataagcctaacagtgacgacaatgtcgtcattgataatacaatcaatgatgacattatcgtcattaatttcccaaaatagtaaaaaaaaaaattatttattatcaatgagaacattatcgtcattgataattggtttcgctaacgactttaaatgtcgttattgataataccttttaccgacaaactattccaacgatttgtcaccaacgatatgtcgctattgataggcattactgacgaaaaaacccacttcactgataaaattcatcctcattgatggctataattcttgtagtgtaaataatgtatttaaaataaaagataatattatataaaagaattataactaattttgttaattagttatatatatatatgatatttatatttg

SEQ ID NO: 177218 - DNA, 778 bp, Cannabis indica
acaatatgaactttaaagttttaaaccaaatccaaatatgtatggaaacaaagtgacactttttagataagtgctaattacaacctctcagcaaaatcttcacttcaaaaacatatattaaaattgttttttcttttcataacggtgtttgttatagtaacaacatcatttttgtaaaattttaaaaaatttcgaatagtttactttgtttttaaccggttgaaaaatttgcaagcaatgtaactataacaaacgccgccataaaaaaataataatttgtcgtatgtttacaaacgcgaagattgacaataatataaattactcgggaatttttttttaaatttaaaggtttaatattataacaatatgaatactactgtgacaaaaaaaatcttaacatatgtttttggacgtaaaatttgacaaaaagatcgaaataagaagttaacggtaacaatcttcattagcataataacaccatacctcatactaatgccagatgttatagtataagcaatgccaaatccatacatggtcaactggagaagaaagccacaagctaaagaattgttcttccctacaaaaaccattacaaatcacatcaacaccaagaagccatgagttattggattatattacatattacaaccaagtaaagaaaagggatgatttgtttgttacccaaattcatatcaacagcttcaatgtaggacgatttcgagtaggaccatgttcggggtcgggtggatctatagagttgcagagaagaaatgctgag

SEQ ID NO: 177219 - DNA, 196 bp, Cannabis indica
gtgttagttttttttttaaaaaaaaataaaataattataatcaaaatatattttttttatataaaaccctaattttcaaaaacccaaaaataaaacacctcatctccttccctctctctttcttgattcctctctccccctctcgggggtgggcgcccagcgagaaccaacagcctcgaccccatctctctctctc

SEQ ID NO: 177220 - DNA, 919 bp, Cannabis indica
gtagagagaagtgtggggaaggtagaacatacccaaacacaaatttattttatggttggccatgttatgaaggcttcaaactaaggaccttctgtacaaacacaatatttgtactgatcctagttgtggagattgcgggttaggttctcaaacaacagagcatttattttttctctattcaaaaagtgcctattgtcttgatggtgtgaaaagatggctgcaatagagaacttcagtgtaaagagtaattgaccttgtaaaatggattagaagagcaaaagtaagaaaaatgatgaagcatactttcttgttgacgctagcttctctcgtatatcacatctaattttaaaaatagacttagtgggattagtttaaaaaggcgactcacatagataatgaatggattgatcaattataattatatttttttttgtttcaagtcgaataggtactgaattagtttgtaaggttaacaatttgaaaaatatataatatcacagctgattcataaaaaaaattaataaatttagtataattatgtattttatatattttttaaaacaaatttatttgtacatgaaaataccctaatatatatatttgttttagcaaataagtcaattatattacaatctctatattgtacataaggaatttcaacatacaccatgattattttttgctatacaatattttacgatattaccttggtctcaaaatcttcactataccattttgacataagttctcaaactaagttctatcattgtctcctatttttttttatatatatatatatatttagactataaatccttgtaattacaatatatttagcaaattgaaactaaacttataactttttgctacttctttgtgccaaagtattttgtttttagttctccaaatcatatataca

SEQ ID NO: 177221 - DNA, 622 bp, Cannabis indica
tagtggtacctagtaataccgtaaagtaacacactttgaatgattagctatatcttatcatattattaaattaaattgtgtggaatccaatatacttaattctactattagtaatatagagcattgctattaggcaccagtggtgtctaatacttttttcgacatgttgcatcgcgattgactagcgatactccctaaagtttttatattaaattatatgagacacaatacttagttggaccaatagcgatattgacacataagaaggtgctaggcactactggtgccctttagcatttctcagtaatataatatcttcgaaggtctttttagcatctaaaagaccaaattgcccttatgattttccgtgatgtaattttctctagttatgaagaagaattactctaatccaaattacaatatatggtgcaaaccaaatgcagagtacattaatacaactatacaagcatatgtttctaatttaatatcaatacttgatttatttgaaactttaagttaccatttggttagaggtaatgtaatggaaaaaaaattattttattttatttgtattgtatttaggtggcgtttggttaaattaatgaaatggaataaaaataaa

SEQ ID NO: 177222 - DNA, 624 bp, Cannabis indica
caaacacatacaacataacttgacatagaaaataaaaatatattaaaatactaaatacgacgcgatctgcttaatctagaatttgacattaatttttaaataaaaataaataacaaattaaatgttaataataatataattttgtaaaatatatatttagtgattcaaacgttaagttaaaaaaaaatatattaatttaatttttattaaaatgaaattgaaattttttaaaaaatatagatctatataagtttttttaatagaacttcaaatttattgttttttttataactctaactttaataatattaaaagacagagtaagttaatatgaatacgatacgattttttacatagtaaattaggattgaaaaaattaaatgtgagtcagaaatagagatggaaattgggctgttaatgtacggaaaataaatagagtagctcatgctcttatatatgactcaatactttgccatttattccatgtaggacaatatccacaataacatataaaagtagttcaattaaaatataatacgaataccacatgcgacacattttatcacctctaagtgcttgccacaatattttctattttctttctttgagggaggtagctccctt

SEQ ID NO: 177223 - DNA, 1343 bp, Cannabis indica
  modified_base (1262)..(1262): a, c, t, g, unknown or other
cagttttttttaaatcaatattttagactctgatcccaacttaaactttagaaccgaacttggaccaggcctcaaacttggacttaccaccgatcctgacctctctagacccaacttaataaaattactaataaaaaataaaaataatatttacagaacacacttttagttttgttttaaaattgaaaaacaaaaatggttatgaaacacattgtttttacaaaaactaaaaattttacttttatttttatgaattaaaaaattaaaaacaaaagtgttaccttagtttctataacagttacaaaaagtgctatctaaagaggacataagatgtgagttaaaattagtttttataacagttacaaaaaagtgttatctaatgaatggataacactttgcaaaaatgatatcgtttatatagtctaaattctcataatcaataagaatgaagttacctacctaaagtctccacagctggaatggtcagtggtgagtctgaaaggataatctatattagagatactcccacatgaagaagaataacatatatgttttatattattctttgcatagcaactaattccatggagcattaatgttatgaccaccaagactagaagaagaggctgtctgctatacattttgaatggtgggaaagcttctgatcatactgtttctccaatccattaattgttgttcttataagtatgtatatatctctcttgacataattttataaagccacctaggccaacttggaaacttccaaagtatacgtaatcataacaatttgtagttgttttgttgaaattaataaagcaaaaaggtcctgtccagaaatagtctttatgggtagctcaacaacttccttattatattatagggttaagttaaacgatgattttacttgatgatattcttgacttgagaagaagatgagatgaaagtgagcttgaattgatcagaggctcaagagtcttattcaatatatatatatatatgtgaatgagtacagttacatcatagcataaggctgtaacagattacagctgtacaactaacatcccaactgaaatgtctaactgaaagtaaactgaaaataacagactaaactaactctaactgtctggcctaaactcccccctcaagctatgtttggtattaaccaaattgagcttgttacataaaaattggaaccttggtgaagacaaaggttttgtaaagatgtcagcagtctgttcatgagtagggatgtagcagtntttacaatcgttttctgtctaagtttgtcgtcgagtgtagtgtacatctaattcgatatgttttgtctagtgtgaaagcta

SEQ ID NO: 177224 - DNA, 778 bp, Cannabis indica
aaaagccatggctgagttgattctgtctccgattgctgagaaaatcattggtggtttgggatctgaagctgtgaaacacatctctctgatttggggtgtggaggatgaggttgaagatctcaaagaaaccatttcaacaatccaagctgtgcttttggatgctgagaggaaacaatctcacaacaaccaagtcaagaactggctccaaaggctgagcactgtggtttttaaagcagacgacttgatggacgacttcaacactcaagctttgatcatgtctcacaacccaatggccaaccaggttcggattgttttctattttcaaaaatattttttttctaacatattatattttatatttttactcacatatatagaccttaaatctggactcggatttcaaaccagacccggacccaggccctgatctagactcagacatcagacttgaaccccaattgtaggtcgagactcggacacgaaccccaaggctaggtctgaggttcggggtccaagtctaagttcgggcaaaggtccgagttcaggtccaggtctaggatctgaaataggataagttcggtatagaatattaattttttagtaaaacaaatctaaaatagtttaaaaaatttgagccaaaactataaattttgaaatgacaaaaactatctttatcctactttaaatacaatttaaaatttaaaacacagtgaaacaatctcacacacatctaaagagtgaggcaacaaaaattgctttgcttctataatggtcaaat

SEQ ID NO: 177225 - DNA, 861 bp, Cannabis indica
aaaatggtatttgtccttgcaattttttattctccttttgtatagtttcctacggagttagatgtaacaaacaaaagaaaagtacagaaactaacttgaatggctatgtctttattttagaagcctcttgtctaattaaatcaactttttattattattattattattattattattattattattattattattattattattattagaattttcctacaccccagacagaactatgatacagtacttatatggttctgctgttaattatttttcttgtaaaatatttccattctaattataaaatttgagattatacatctataatttagagttgttcacggtcattaaattattgccaactagcttaagtgagttatataggcttttgtaatgtactaaaggtctttggcacagtttttaggaaaaggaaagttttttttgaaaaaactgttttgtaagtttttagaaaattttttacgaaaatagctaaaaattaaagtttacaaatacaatctaattttttgaatgaaggctaataaatttatttggactaaaaatatattacttatttattctatattaattttttttttaaaaataaataaataatatttaaatttttatttttttaactttgaaaatatttatatttttaatattaacatttcatataatttgagtttttttatttatttaattttttgtatttcgcttacatgtgataaaaatagaatttaaaaatactataattattttaaggaaattatcttaaatactattttttctaacttttttttcttcaaatttatggttgggttgctacggtggttagagatggaaatgttaatgtacggggaa

SEQ ID NO: 177226 - DNA, 632 bp, Cannabis indica
catatataatcttttccaaaaaactaaaagtgataaacccttgtcttataaattaacgactcatatatagaatatgtatatattaacaaaataaatcgaggctatagaagtttaaaatcaaagtagtagaatcaaaagatcttcccaccttcatgaatcatgatgaggtcaaaaaagagaaaccacatgccaaaagacaaacatataaatatatatataatgcatatatatgctgtatacatatataaatatatactatatacactcaaaattccaccaacaatgactaagtataacaaaaatggtttgtttataggaaatcagacaaaaaatccaaacatagaataacaccaataatagctttaatgggaatgtggtagtcactataatgatataagcctagtcaaaaacaaacacatacatatccctttacctttttattttacttatttattattataaataaataaataaataattttactaccattgataaagtaataaaagcaaaaaactaagctatagcacacagagagacaatctcaaaacaattcttctcgcactaactctaccacaccttcggacaaacaaaagctgcctaatctctctcctctcctctctctctctctctc

SEQ ID NO: 177227 - DNA, 1161 bp, Cannabis indica
ccattagcatgtaaaattcatacaaacataaatcacttcaaattttcttatattgataactaatcagattataaaggattttatttagggcacaaaacccaacagaaactacattgaaaagagcatgaagagccttagagttaagtttgccttttccatttcttcagtactccaatcattggtttgtttaatcttttatcccttctcatcaattacagagggaggagaccatccctcagaaacaccatccaaactctttcatcaaccgctttcaagaacacccttatcttggttttctagtaaggatagttagctccttcaagcataggaggatgcgagatggaatctccttcccaaaataactccatttcctattaatctgcaatcatacacacagattgagaaacaagcgtaatacttcgagatgagactcgaagccaattagttttccaaaaaatcaagaacaccgaaacaacaaaacataagaaatgagcaagatctaaaacaaaagacacacgactacttaaattgacacgacgcaccaagatctcaatctgaataacaagataggttctgataccaaatgtgaaacctaaatatcttaatttcttctaagtatattttagaaataaaacttgtctaaaaatacaaaaagaaaattagtaaacacatggaatttacaagcttcatctgaccctagaaatgcattctaagcgactagtgcttaggttcccttgaactagggtaataactttcattatgaatcaatcaatctacaatatccatttctggttacaatttccaaatagtaatcgaaaattaattcatacaaagactaccctacaaacttaatcaccgatcaagtctaaccatctaagttcctttagacatctaaagccaagatccccttctttcctcacaattgatattccttcaacaacttaatttgaactctcttcagagagaaatagatcattgattctcctttagctcttgaagatctaataaagaataacctacaaataaaccaagaaacacaaagaaaaagttctaccctagtagaccaaaaatacaagagaaagtctttcaaagacgaagagttagttagaaaatagttaatcattaattatatactaacaactctactaaaacaatctaaac

SEQ ID NO: 177228 - DNA, 1066 bp, Cannabis indica
cgacgaatttgataagttgtaggccccgcctaattataccaaaacaaagattaaactatattattttgttttgtaaattatgcattacaaaatatttaacacgactcattcaatataaaattaattgatatttttctgaataaaaaaattctaaattttcatatttatttaatccctgtctaattattttaattcataaatctcaatcatgtaaacaaaatgaaataaaaaaaatctaaaaatatttatataattaaccgacaagaaaatatattatataattttaaaaatatatactaagtttaatcccctccaaattttacaataaattttgggggttatattatatatttttataattcaaccaaataaaaaaatgatttaaaacgattataagtctataatacacacttaaaggtttatttcagtaaattttatctgtttcggtatttaataaagatttttagaacgttacagttatagagaatcgcctgtaagaaaattgtgaatactttacaatatcgataataagattcaaatattttattatacgtgttgatgctgaaaaatggtcaactccgtatcgtctgataagcgatagcgacaaataaaaaataataaaaaataaagagaacaccacaatttatagtagttcactccccatatcacgatggtaatgaagctacatctacttagagcttttattatcacaaaaaattaattgccttacaggagaactcaaaaaaaatgactaagtctagcttcactttacaatttctagagagagaagatctgaccttgtagagagaatgaagagtgtgaataatgagttaggagagctctccttttataaggaatgaggtccaagtaaattacaataaaataataaaaaaaatcaacacaaaatttgttgggaaatccaacactatctcgaaagttaatttttaagcctgaatcttcaaatttgtgacagggtgtgagacacacttagatccatcttgaaaagaactttaattgaccatttaagcctcatcatttggataaaaaattgagagaattatggcca

SEQ ID NO: 177229 - DNA, 647 bp, Cannabis indica
atagacatatattagcaatttatgaattgtaaacaactcatggaattatgaaattgtaactaacttaattataataataaagtgattttagaacatttgaaaactgttaccatctatgaaataaaactaataagataatcgtaggaaactaaaatcaagagactcaatcgtaaattggagacagacatacaattaaaaaaaaaatcatataatagactgttattagtaaaacacaatatatatgtacttctccaaaatttaaggtataataggaagaagtattttctaagaaataatatgttccatacacattgaattgactccaaaaagatgagaaacttaaaaaaaaattgatattataaattatgtatttcaataaccaaaacaaacaattaattctttttcaatatcaataatcaaaaattgtagagcttttatatatataccaacggagtattagagtcaattcagtgccatatttatctctaaaaagtagagaaaccacaactttacaatgataaaaaaataaataaatataaaaatatgtatgttatatttattcatagcataaagattacttacaagagattagatgttaaacttacctcttcttaaaaaaatcgatgatgtagaattgagaaatgctt

SEQ ID NO: 177230 - DNA, 561 bp, Cannabis indica
ttatattttgtttataattgtttgatatgcatgtaaaaaacaaaatttgtgaaattattatatcatccttgcactattaatataaaatttgtgtttagaaaagaaatttagtaatttaacttatacatttcttttctatttataaaatttttctctctacctttttccttactttggaggaatgggcataaaaaatattttaggttttattttaaaaaaatataatattttttaaaattaataaaaaaaatatttacttttaagaagaaataatttttttaggcctctgggctaggtgggctctagacatagacatagcacacctatgcctagaatcgagccagttagtgagtttcacttaaagatttatttccaaatttattttatttcctatagaatgtttcatttttcttattgtttccacttttctattttcttttctttttttcttcctattttcttttcattttttgttaagaatttttatccttcttcgaacaagtataaacatattaaaaaattaaaataaattaaagttcgagctcgtgatgaagtattgga

SEQ ID NO: 177231 - DNA, 1147 bp, Cannabis indica
atatattttaaattatttagaaaaacgtacttagtaaaaagttcccacgcttacaaactaaaggtctcatttttttcttgtgtgcatgaccgatatgacattctatttgtattaaatactattttagattttatgttttgcaaaagttattaattaaactttctgttttgttaaataacaaaatagatcatatatttttaaaattgtacaagtaggaccctaactaattttttgtcaaaataaaacttaataataattcgaaccagagatgttgtgacaaaattgattacatttttgtatttgttcgtattaaaacttaccttaaagttggttatattaaaaataaaattgttgaaaatttgagtttagggtcttatttttataattttaaaaaatatagggtatattttattatttaacaaaacaaaaatctaattaattacttttgtaaaatacaaatttaaaacagtatttagcttattttgaggtatcattattctttggccaagctatactgctatacattcaaatatacataataactctccagcaaaaaaatatacataataacttttgcaataaataattttttatgattattattgctctcccgctatttttttttttttttttcattcatgtttttacatttttattcaattatatattgagttaattacattaaaaaataaaatttgatcaaagattattgcatagtttgtgtgttggtctattctgaaaaattaaaagagagattctggaaatttatgagaatataggataaaacctacatagatatgaatatttattgatggaaagtccaagagaaaaggaacaagagagcaccatgtggcggtctacatctaagacttaaaacacagaagggagaagaccacgctctattccttctcaaggccgctcttctctcagtcccataattttaccgtttaaattttaacatgtattaaattatgtccctgaaattttaaagtcgtttaaaatacacctcaactattaagattgttggatttaaggacttttgtctacttttagtaaaaagtctaacatggatgaaagtttagaggtacatgatttaataacattttaaagttcgagagactatgatttgtatatatatcaaaaattt

SEQ ID NO: 177232 - DNA, 576 bp, Cannabis indica
ttaatttagtaggaacgaaagttacaaaatgatagaggatcagcttacaaaaatatggtgactaaaatatattcctgatgtgtgtcgtgtgtcgtatctaaatttactaattattttgtattctaatacttaaaattattttagtataaaagcaagtaagggtcgatcccgcgaggactatattatccgattattcaaaaattagtaacaagaattaaaaagggggtttgtaatataaagattaaataacataaactagaaggaaaataaaatgtgatactatgatattaaagaaatagttaagggttaatatctaccctcaataatcatccttaatttcttataacgaatgttatttcaatttttcaatcaaattattaatcttgcaaaaaatgctaaagcagtcaattattctaatctatctattgcaagtaatcaaggcgaagcactctataattaactttttatctaattatgaagcatataatttatttgacttatttaaagctttgaattcaatggagatagattaatctagacaataaattaatggagcatataattcatttaacctaa

SEQ ID NO: 177233 - DNA, 827 bp, Cannabis indica
atataggcttgtacatttggcacactgagaaacacaaactcaatcaactgtcggccaagagtgaagaggcttgtttgctttgctttgctttgccttttgctagttttggattttgtgtgagcaacaaaaaaagtcacatttcttcttctttcactactctaactttgtttttgagccgtttgaattttgaatatcaaaatctttcttttttgaacgtttgtgtgttaattaatgagtcaaattggttggtatatgtggtccatattcatctacaacatttttgcatagtcacacacactaaccatggtcactaagaagtactgaaaagaaaacatgttgaagtgtcttttgtaataattgcgagatttaactcttagtttagtgattctaatatatgaaacgcttattttttttaaaaaaatagtattatttatattttagatttaattttagtacttaaatttaaatttataataaataaaaatttcacctttagaactataacacttattaaatgttgatccctgaattattattttttttaaattccttcaaattatagaaataactacaaatttatttcttttttacaaacagttttctgatataataacacgtttactatgcagtattcagaattaaaataaattaatgaagaaatgtaactgaataaatgaaaaataatcggaatcaatatttataatatgttctttactaaatttttttagaaatggaataatagtgatttatcttgtttactttattaaaaaacgcaatcggaaagcttaaattgactaaattgcccttttgagttaaactatagtaca

SEQ ID NO: 177234 - DNA, 849 bp, Cannabis indica
atcactgttgactgaaaataagctgaatggatctaactttaataaagtggaatgagaacattaatattgctctcataggagaaagtgccttgtttgttttaactgagccgtcacctgaagtgcctggggacaatgcatccaaagctgtgaaagaaaagtatgagcgttggcagaaagcaaatgacaaagctctatactttatgctttctagcatggttgacaccctcaaaactcggttttctaaaaccgagaaggctgctgaagttatgacgaagttaaatgagctattcggtaaggcatcacttcagtcacgctttgacgcgactaagaagtacattaatgcacggatggaacctcatcaaaacgtgcgtgaccatgttctcctcatgtccagttatttccaagaagcccaggatcatggtgctgaaatggacagtgctactcaagtaagtcttatcttgaatagcctgactccagcatttctaccatacacatcaaattatgtcatgaataagaaggaaattgactttcatgaattagtcaatgaccttcaaacttatgaaaatttgattggaggacccaagaagaaagggagtaaacctcacaatcctgggaatggtaatgggacgatgaaacctgaagcaaatgttgcctctgcttcaaagcccaaatcgaagaagaagtggaagaacaccaagaagcgaacaaaagccatgaagaataaaaaggctgctccttctggtgatgctacacttaaaggaaagtgtttctactgcaatgagaaaggtcattggaaaccccagtgtcctaaacttcttgcaaagaaacaaggtatttccatttataaac

SEQ ID NO: 177235 - DNA, 1177 bp, Cannabis indica
ggtaacttcaaaggactacaagaggtaacatattgttatcattacaacacgcatattgatttaataaataatataaaaaattactaaccacttacaacacgctacattagtatagtattggacactttaaagtacctaataataatgctatttaaaaaattgataaatattaactcggtttatatatttaagcgtttttgttagttaagcccaactatcgttttacttacaattaatttttcagtgaaaataaagttatagtggagatagtttagtcgtaaaaaaaattgataatgtaaaaaataaatgacatcttaaattaataaacacttaagtagtttagtagattttaccaccaaattttaaatttaaaaagttaagtgtaaataaaatgacagttaaaagtgattagtaactcattattttataaaaatctaaaaattaacttagtaaattatattttattttgccacaaaaaagaaagtacaagaaacaaaacataagactaaaaatataagaagaataaataatataatgttttgttttagaaagaaaaaaaaaagtaatagtaatgtaattttttttttttaaataaatagtaatgtaattttaattttgtagttgaatacaaaatccaaatattttcccaaaaacatgaaagagcacccgccaaaaaaccaaatcttactcaaatttttaaaatccaaacaatccttctcagaatccagtctccaccgtccattcccctcttcccacggatcgactcatccacgtcatcaatccgcatctcaaactttcaaccaatcaaaatctctttcatccccatataaatatcaaacaaacccaacaactcaattcattcaactcattttcattctcattcattcgctttctctctccagtttctctctttcgaaaaacttcagagttcataacaatggcgccaaaggccgagaagaagccagctgagaagaaaccggtggagaaggccgagaaggctccggcagagaagaagcctcgtgccgagaagaaattgcctaaggacgcttctggaaccgcaagaagaagaagagaacgaagaagagcgtcgagacttacaagatctacatcttcaaagttctgaaacaagttcatcctgatattggaatctcgagcaaagctatgggaatcatgaaca

SEQ ID NO: 177236 - DNA, 712 bp, Cannabis indica
tatatatatatattataggataagtcaattcacttactaagatgagagtaattgatctctctgccatttttggtcatagaatcaaaattctttagcggatatttatatatatacatagtcaagaacaattatctccaaacaaaccagatttgtggggttatagcagttacacctaataataactgcactacttcataaagttgaaatatataagctttgtacaaaatccacacaacagttgcaagagttaattactatcgaatccataaatatttatatatctacttttacaaaacaaacaaaaaacacaattctcccaactttaaaataaataaaacataggtacaagtacaacatatgatcatgagattgagatgtgagagactactcatcatcaaaagccaaaaagtgtaatacaacttataacaatatatataaaaacagaacactacatataataatatataaaatattacattatattgaaactttaaaccctagatgtagcagtaactggaacatgatgagcagtactggtcttgaggccggggtcggtgggtaactccgggctcccgtgaggccggtaatcggtgtctcggtagcccgggccgtacgttgctgctgaaacccggcgactgaagcaacagacgtacaaaagctcagtgaagctaagattatatgaagccttctaacaccctcacgtctccaacct

SEQ ID NO: 177237 - DNA, 1259 bp, Cannabis indica
gcattaagtcaagtttggttacaattaatggcttcaacttggttatgattaggttgggccatatcccaactctactagcaatcataaaaataatatatgtatataaaaatgtaaatgtacttttggttcaatgaataatgtgtgaaaatattaataatatgtatatctgaatatgaatatatttatgtgcattaaaagacttatcactaacatagcattgttccataaatatataccattattcttctttcttaccagagctagaaatgtttatataatacacaatattcttaatgtatcgataaggcaaatggcttagtactaagcaaacagttgtctatttaaagataaagtagctcaataaaataagtatggcttagattataatattttttggtataagtgttttaatcactatttacttcacttgtgattctttttgggtgcttaatttcatttgcattaaccaacatttattataagagaagaagattataaatgatatggaaagggattccattttcaatccaagattagaaacaattattttaaattttacttcatttttattcttatattttcattctttttaataaaacgtcactttaatatttatttctttgtttagtgcattataaagttttaaaatgttattccaatagaataatttttttatcattttggtagaatgaatattctattttaaaataataataaaaaaaaaaatcaagtccaatactagatgaataaaagaaaatcataattttttttattaaatttttttaattgcactatttaattttttttttcatttatattcctatttttatttgtttatttccattcatattctttattcttatgtttgtatttttcattcttcccgaagcaaacctatgtatccctaaattatgcattgtggcttaatcgtatcatattagatatcattcaaatcaaaatggagactattgagtatataaaaagtatctttaatgaagaggtaaaagtagtgtatgttatttttaacattttggcaaaatgatacttccatgctaaattgctataatgttagatatgtgttaaatttgaccgccacaaaatataatatggattatatttgtatcataataaatattatcttttttatttaatcttttttgccattaatgaatataatttacaaattataactttttaatatatatttaaaagaatatatatatacacttatataaaaaaattaaataattgttttcgag

SEQ ID NO: 177238 - DNA, 808 bp, Cannabis indica
gtaccaaacgggcccataatatacaatgatagtctataccaatgttataaatattatttaaaatatatttgtatatatatgaactaatattattattgagtgacttgtaaactaaaatattacagaaagtaacgcttcacattttttttaaataagaatcttatctaagttaaacattattaaaacaaattattattttattttatatatataattactcttattacatttattttagttgttaaattattattaacgattgtgattaatttaaaaaataaataaaattgcattaaaaataattaaataaaataattaataaaatatctataatttaatattaaccttgattttatttattttcttataaataaaaataaaaaatatttatacatatacttgtgaagaatatcttatatatcaaatattttaattaaaaattaatttttttaaacgaaaaattaagttattttaagtatataattaattataattattttgagtataaaaataaaatttttaccaattaataacatgttataataggtcataataattatcatataaatatttttaatgtagccatgaatattcactcatatatataatttatgagaaatattactacaatgttatattgttattaatgcaattaaacattaaaatcttatataatttagttttaaataatttttaaaaaaattatacactaattaatgaattaaaggagtcacctattggcaatgttaggcactagtgtcctaaaacaaactctatatatatgtaatattttggtgcaatatgattt

SEQ ID NO: 177239 - DNA, 657 bp, Cannabis indica
gaacctttctttccttcaccgaaattaatccatcatttagttggtgttcaaggtgctgcaattctttcgagctcattccacttaagtcttcgcctaacaaacgactaaaaaaaacaaagattagatcattgaatcattattattatttttcatttttaggatctagcagcatcccaagaattgtaaattccaaagagtacatacgattgttttcgttgtagctttgcaatttcatctttcaaatcatcaacctccttagaatcttgcttctgaaaagttacaattacaagcatcatgcaatattgtattatcccaattaatattggttcatgagaacaacaccatagcaataacaagagcccttttagatttatattatcctcaaacaaagtcaatatcaggtgaaaatcattaaaaaattattagagcctgcatttcaaattaatctacaaatgccaataaacattcccaaaatctatcaagattagttcacaaaatttttgtacttaatatataagctgaatgacaatacaatacaaaaaatcaaaatagaaaacatgtacatatatatttattctacctttcttcaagtagttttatcatcgccaagttgcccaacgcttacacttttctaaaatccaatcgtggattttatgc

SEQ ID NO: 177240 - DNA, 479 bp, Cannabis indica
agtggaaagtggaaaactaatgaaattaattgttggttccacaaggatgacatcccatggatacttggtattcttccaaatacaaatagatcagattggataacatggagtttaaatgcaaatggaaaatactcggtcgctagtggttataaacttcgctttcaaaacccgaatttagctgaatgaaccaataactcaaaaactaaagcttggtggaattttgtttggggatctagactcactcctaaaatgaaaaacttcatttggaaagttttttaataactggcttccttcaaagatggagttggagaaaaggggcatatctttggatactttttgtgattggtgtaaatttcaaagagaagatacaagccatgctttatggagatgtcctcatgttcatcacatttggaagaagttgggatttgataaatttccttccccaaatgtgaaccagcctgctgatgtgttatggtggc

SEQ ID NO: 177241 - DNA, 715 bp, Cannabis indica
gtttatattaaaatctaaatgtataaaatattaaactgtataaaattaaatattatacattatttattattaaatatatttattttcatctcaaacacaatttaaattttataaacaaatactattatactaaatatataaacataaattataaataaataatgttgttaaaaagataacaaaaatattaaatggattcttgtcggagcaggaagtgtcattcttatctttgtcccgtttaatttttgggaataaaataactccagtccctaacacattccctatttagacaaaaatctctgctcctattagagcaagttcccgtaagcccccattctacgagaataatatgtattcttatgaaatttttggtatgttacaaatatgattctaataaaaaaaagtaacaacgtaactttattttgatattattttattgttttgtttttttattagttgttaagtatgtcaactaagtcgattaaataccaagtaaatatacgtaatatatttttttactacttgaaattagctcaaatggttataagagggtgtgtgtattggaagtttggagttctaatcttaaatatgcatagttataatatataaatactaaaataaccaaaaaaaaaaattataattttatatgtactcatgctcatatctatcaaaactcgtagcaatttcgtgttaaaaaaaaaatcaaatagtacat

SEQ ID NO: 177242 - DNA, 730 bp, Cannabis indica
aaatcttaagctatattccaactcaagtagtaaataagtgttattttttattttttattttttaaaaaaaaaagcaaatagtgaataagtgattgcatattaattagtgttgacttttccaaaaatataaaataatatttgtgtctttatcatttgatttaaaaaaggagaaatattaaaaagtaccaattttatctaatatctttcaatatgttaatatcattattattccaattaaatatcgtgtctaatataatttaatgtaataatttttagaaagtattactaattaatcgtcgcaagacaatatatctaaaagtgctaggcactactagtatccaaaaacaatacacttaaaaaataaatacatttgatagaagcaattgaaaattttgaatttaggcacaacataatctatcatgatctttatcttctcatatcatcaggtttttcatccaatccataatttattggcatgcatggttgaaaatagcgttgtaaatattggttaaacatttttaacaaagcaagaaattggctcaagcctcgaggtaagaccaagactaaacacgaaaatatagatttaaacataacataacataatacttagtacaacatgacacaaaaatatgtgcttagaagattattaattgttttgattgtaacatagataattcatagtacatctatatcggagatataaattgttctatataattaaaagtgcaat

SEQ ID NO: 177243 - DNA, 433 bp, Cannabis indica
taataaggttattatattatatttttatcaattttttatattatattggattaagtaaagataatccaaatcataattaaattaaaaaaaacaaaaataaaagaagaagaagaagaataaaagaaagcataataagtttgagtgagaaaagattgaaggaaaacaaaagcaaaaaataaaactaaaaaagaaaaaaagaaagaaaagtgttgagatgccaattgagtaataatcaaaccaagtcagaaaaagatggtttgaaataagatgatgttgtttctttttaagcaaaagacaatgaaataagaagaaaaaaaaataaagttatatatttatttattgatatatttaaagggtcattttcaagaaataaaaaataaaaaatgaaggtcatgcatggactcatctctatctcattactcatttttccata

SEQ ID NO: 177244 - DNA, 630 bp, Cannabis indica
atgtattgaaaaaactataactaactaaataaatacaacaattttttttttaaaaaaaaaaaaaaaaaacccgtgctaaacacggctatatttttattagtttataaaatatataatttcttcatgtgtaattttttttttcaaaaatggaagcccttcatttaagttcaaaagttacatatgtatataaattattcgtatatatatatatatactagtaaaaagttacgtgcgaggcacgtatactaaattttatgctagtttttttctacgttattaaaaagtgatacaattaaaaattttaaaaaaaaattattagttattaggttcaacatcattaccctgtgttcatttttaaggaaaaaaaatatatttatgaaataataatttgttgcaacgcgagtacaggcaaaattcagaaaatatagcatttattagtagagtattgacaatttcaacagtaaattaactgattgtatacttttttgtctgctaacattaagcttttgatatttgagtggtgaactcttatttgtccgcttttcaaattttttctaaacactctcattttattcttccaactttctgtagttggagtgatgtccttaattgttgtatatagtgtagtca

SEQ ID NO: 177245 - DNA, 524 bp, Cannabis indica
aaataatacaaaaaaaaattaatattatatgtagctcgtatagtttttaaatatttactaatatacaaataagaattaaaaaacaaaaaaataataaaataaaataaagcaagtaaaatttattaaaaaaacacgagaaaaaaaatagtaaaaaaatgtacaaaagacttaaagaaaaagtattttaaaaaggcaaatgaagttaaaaaaattagagatattttttaaggggaaaaaaggtgagagattaaaaaagagagagagagagaaaaaaaatgacaaaaatattaataataggtattgttatgctcatatttcgagccataaatatggatatgacacatgaaaatttgggcgtgagaattgtggaaaactcggtaataataaatgaatcatcttgaagggataattgattacgatcaatatcagtctcgcattacgcagtaagacagtgagacaagtaacgtatggcgagatgataatgatagaagtctactcgggtgtaacaaatccaaattgtattg

SEQ ID NO: 177246 - DNA, 937 bp, Cannabis indica
tattcgacagattaatttaaaatttatataattgactaaaaatttaaaaaaataattacaaaatatatggacacaaaaaaaattattttactctgtaactttttatttacaaaataacacttcaaaaaaaataataatttaaaccattttttttatgtagtttatttataaattgtattattattttgtcatgaggttgtttttctagttaattttgcttgttaattatatagtttatttataattaccgtgagtttgaattctcattattttttagtagtttagtatttttgctgagtaaaatgtatatctgtaattttaaaactttacaaaatatttttgaaaacttcctttaatttaatacaaaaagccacattacactaccaaaacaaatttcaattagggatgaaaattgcacttgtagtggggtctgcgggtaccgacccctaatgaggtggggatttcttgcctaaatgaggaatggggcactttctatccctgaatattatgagataatagccccatttctgtttaatttttatttttagatgacattgtctatttcaaattattaacataaataatattttaaaaacaattttacatattttattcataattttattttattttttttaaaaatgagtccccaatgggtaatattaggcacagttgagctagctagctttttagatttactagcaaaccaagtttgaacagttaaaaaatatcatgccataacctatcatagtccatggattactaaagtattcacattcttaaaaaaataatattgtagatgaccgagttgaaaatatccataaatttcatataagaaatgatcatatactatttagtttagattttttagtattgtatccacaattagtggaggagggttaaaatatttcccattgatattttaagattaaagaga

SEQ ID NO: 177247 - DNA, 583 bp, Cannabis indica
taagtctttggacagtaatattaattgcaagcggtactcttgttgtagtgatcaaatattgacaataaattatgtcaaacaatatgcaatctttggactaacaaattgttcacataaaataccttataattgtcacacatttatcaccacaaacatgcatgaaattcaaccaaatattaactcacctttgggttagttaataaatttatgaatcacatacacacaattatcataatatttttattaaattaatctacacaaaagaaatcactttggtgatattttgtttcaattaatttaattaaatattagatatctttaataaactttaaaccaaaatttgaatttaattgttactgaattattattattattattactttaaaattattatatattaataaaataataataataataatcataataaaacaaaaaagtctaacaaaatgcaatgcaatgcaattctttaaaaaaaaaaaaacaaataacagaaagtacattcaacgcataacaagcttgcaggtttatatacatatatgttgagtcgaaaaaaaagaaaaaacatatataatcaaaactt

SEQ ID NO: 177248 - DNA, 1435 bp, Cannabis indica
agttgagaaggaattattaacggtaaaaaaattcatgaatataattttgtacatattgaaattcgtggaaaaaatcctcattagcattttattaatggttttgatgagcaaattacttatttattattatattaatatttatctaaaatatcataggggattcggaaaaagaaaattaatatcagagggcaaaggggccgaagggcgctatatttaatattgaaatcgctgtttgtttgttagtcgacgatcgaggtctgagtcgtggctcctccttaatcttttccttctgatcatcctcttcctcaagtaaatctgctcaaaccctaatctctctctctttccacatatatacatatatttatgttctcctgtatactgttatgtttgcagacatttttacagtctttctctgaggtgtttatttattcttgtttcttctaaggttgagtttgggtttttcttttttgttttgtttttgaatctatatttcaatctcattaccagatgtttgttttcttttttcattgactggtgtgtctgatatactgaatagtaaatactgtttcgaaataaagaaagaagtctgcttggttgcctagcatgggttttctaaactgactaatttccagaatttcactacgtttttttttttcttttttatcaatagagttttactattttggtaataatgtatatatatgtatatatatcgttgtttgtttacatgcaagtatgtatctgcagtatcagaacaaaggataaaggatagagaaggtttatgttaattaagagttattgctgataaaactaaatccagcacaaaacattgatgagcacaagaacaagacctatttgtgccaattttcgttgtatatttaccttttctgaacatggttttgagcctgaaaacaaatcaaccagaaagaaagaattttgcatgaactgcttattgagactactctccctaatttaagactctttataacccacacacaacaactccgatttagggttttctaacactcttttcgtaagaacaaattgggatattgggtttggtaagcctaagttgtgagtcaagtaactaggcacaataggctagcctaatgggtgtgttcatatgcctcatgctggttagtatgttaagtccatcctccaatggctatatgcaatactatgcaactcaaaatggtttaaacttttttttttttaagaatagctagcctaaagatttcgttagtgtgttcacttgatttaattttaagtttctaacaccaaggcaagttaaaaatgattatgcaagtctatttataaaggatgtgtacttatttggtactaaatttagtgctgtgtgctttcaataatgtatatatctggtaccttctatgttttgatactctgcattttgaattgtacatgttgatattttgaa

SEQ ID NO: 177249 - DNA, 681 bp, Cannabis indica
tatacttcaagatatatgcaatagttttatcgatgatacataatctttagatatattgattaattatataaattttctctatcatatcatagaataaacaataagaaatacaatatgtatatgaatatatatatatatataaattcaataataaacatataaaaacatatacatacatatataatctatagatatatagaataaaaaaagggatcttcaaattgttttactcagataagtagatttataaatatatatttagtgtatcgtgaccttgaaacaactcaagaacttcaacaaaatatttaccttgaagcttgggtagagactcgtgcttataacgtgttataaaataatataaaatatataaaaaagaaaagaaaaagaacataaaagagagaaaaagaaattgaacgagaatttcttaattgtttattctaatgaggtgaactttatttatacaaaaaatgtaactaaaaaaatgagaaactaaatcattaatgtaataaaagaaaaatacaatcaagcattaacatttacagtgataattaatttgtggatttggacatccataaataatatttgataacagataatacaattttatttttctaaaacaaaaattactacttctaacttttgttgatttaaaagttactaaataacaaaaatattaacaaa

SEQ ID NO: 177250 - DNA, 713 bp, Cannabis indica
atatataattttaatatatattatagaattaaaatttaattatataaaaatatatactataccaaacccatttttaaaaataaattcttttgattttgttataagatagttacgactaaaaattaaaagtataaataatttaaaaaatatttattattataataattatttaattaattgattatcataattaaaaatccaatcaaatttaaatttaaatttataattgttctttatcttttttactcaaattatcttaacaacttcacaacatttataatttttgaaaaatatcttaacaacttgcattttaatttttttttttctaaagtgcagctcaaattttgaatctcaacaacttccctaaatctacactatttaatatttcatatttcgcagacaaaataaaataaagacctttaacttcttttttccttctttttgaactttgttgctaaactttaaatgaagaatctaactaaaattgcatttaagtttctttttttttttaaaaaaaaaactttacacgttcaaaatctacctataaaaaaatgaaagtaaaagcttgtgtggttttatccataaaatctattgttttaatctagtgaaaaaaaaaaactacaattaagaaatatactctatcttgcataaaaaaaactaaatttagttaatgtgctagggtcgaacgtccacctttacatactactagaagg

SEQ ID NO: 177251 - DNA, 568 bp, Cannabis indica
cctactatagtcatgtcctatataatgacaacttaccatttgtcaatttctcttctgtaactttgagcccagaaactgaagatagaactgcaatttttttttcaacatgttaaataaagacaagcaaataatagtagtaccagttgcaacatattaagccaaaaaaaaaaggagctaccataaataaatattaataaaataaggaaagtgacctgagatagcaggagtcaggacaccatctccaatgaccatacaagctccaaaaagcacaacaattaaaagggcagttcttaaccttttatgcttctccaaaaatctcttcaaaggagatgaaccagaatgttgagaagaagaagatggcccatatttgtaggcagtgagctcttcatcagctgcttgttgattaggaagcaaactaaacttagcatggcggcaaagcaatgagtaaagagcaaaagtcccacctgaaaatgaattgaatagagaagttcagaaaccctaaactgaaatgaattgaatgaaattgattgattgacacatacctcaccacttatcatcagcactgagc

SEQ ID NO: 177252 - DNA, 687 bp, Cannabis indica
gttcaaaacaactgtaactaaacacgcttggtcaaactccatgtcactaaacacaaacaccctcttaaccatttcctctgctttcaactttccattctccaccactaccataattgaaattactaaaatcatcatgaaaatcatactcaaaaaccagtttctaaaaaatgaaggaaaaattaacactaaaaccaacaacaatccaactgtaaagatgattctaaaggtatgtctatacgtacatctcacagtactagtactcaatcttaccaaataaagtttcattagcattaatattaccaaaaaccagtttctaaaaaacattcccaaaaaccaaccaaattctaaaaaaagacacaacaacaacaacacggaatatcaacaaaatttaaaaaaaaaaaaaaaaaaaaacaaaaaaactaaacaacaacattagtaaaccaacaaaacaaaacccaaaacaacaagaagacacacattcaaacaaacagaaaaccataaaataggagaaccgacaaaaaggaacatgcaaaaagaagagaaaaaaatacagagaaatgaaaaatatgatcaacatgcaaaaaatcctaaaacaacactaagatcaatagaaaaataaccttaatagatttgggagactttacaaactcttgctccaactcaaaatcagagtcggagttctccacc

SEQ ID NO: 177253 - DNA, 570 bp, Cannabis indica
gaacaaccctgaatgattataaaaacttttggtatggggggcatcttattttttttttatataattatttgttagagacactcatatccaccatttttttttttttggatatgatctgagaagagagacatgttcaaaaaaaaaaaaaaatccattattttttaacttcgccattaaagaatttctgaatctcaacgtctatttttcttctaaaaaaataatcaaaacttttagttttggttatagtttatgttctttgataaataatttttaagaacttttagagagaaagacggaggagaaaaaaagagaagtgaatgctaattttttaaaaggaaataataatatttttaacaaataattatatatgtaaaaaaataataaaaaataatatttaatggacataaaataaaataataacgtgttataaaataatatagaatagatgagaagaaagaagaagagagaaagagatagtgaataaaaatttctcagttatttattctaatagagtgaacccgtatttataccaatacaagagttaataagaaaagggaaaccaagaaaaaa

SEQ ID NO: 177254 - DNA, 917 bp, Cannabis indica
accattcttcaaagacactaccattctcacctcataacaccatttctctctgcgaccgctctaactcggctgactcccgacattcccaactcccagtccacggactctaactccgagatctccatctcctttcatgttcgttgtcatcaccataaggtaccattttcttttaatgatctgaatttcggtttaactgtgaattttttgtctaatctagtggagaatgtgtgtttagagaattttgttttggtgtttgatatattgaatgctgctgcttcgtcatagtaactagtaatttggccgtttgtctttctctttctcattcatgtgagacattttaatctgttttcgttagctcttagtctattaagttttatattctttagcattgatcaattcctaacaaattgatacatattcatcctgtgatataagatttcgaagaagatctgtgtttatctttttgaaacatattggtgatctttacacatcacaagaacgtttagagtaatgcagtttagtaatcaagtacagtgatggatcaccctggcattttacaactttaaatcacttaagaatcaaactggctaattttaattaggagtgtcttatgcgtatcataattcatatgcttggagatcaagccctgaagcacattgcattacccagcatttcagccgagcatgtacacaaagatcatcttagcttgaaggaagagtcaattacaaacctcaagtctaatgtatacagtatactcacagcagccaaccagggttcaggccacatatctcatgaatttttccaatgaccactttggctgctggggtcacgtaaacatatatttgatcatacactaaaagttagtgttcttccttacaatcaaaagttaagcaccttgagtgaaatcctattctaac

SEQ ID NO: 177255 - DNA, 695 bp, Cannabis indica
ccgtcaaatggttcgagtttgcagatttcgggctcacaggttcgcgggtttgggttgaccgggttggccgagtcaactggttgaccgatgggttgacccggtcaactcattaatttattatttttttaatcaaattttatgtgattttttctatatattaaattaaacatatacgtttataacgccataatttatattcgttatattaaaataaaataaaaagtacattaattttaaatctaaaatacaaaagtcaaactacaaactatatataatatattatagggtatataccattttagacactgtattttgcaaaaattaccgattggaccctctattttgttaaatgacaaaatggaccatgtattttttaaaatggtaaaaataagaccctgagcttaatttttgacaattttttttttaaatataactaacttgaagacaattcctaacacgaacagatttagaaaatataaacagttttgtcattcggattattattaaattttattttgacaaaaaatcagttcaggatcctatttgtactattttagaaaatatgggaccaaaaagaacgagggtgaatgaagagggtggttcatcatcaaatccttctcgggccacttcaaagccatcttttgataagacccgatttgtaagtcaagcgacgcaagagaggttcctcaatttga

SEQ ID NO: 177256 - DNA, 791 bp, Cannabis indica
cattctaactttttaatttaattttttatttatggttattatatataatttatacttaatttaattatattaataataaaataatatatatataaattatgctaaaatacaaaattgtaaagctgaaaaaaaatcataggaagaccctatggcgtcagttgttttacccctacagcaatttcgccaaagtcgacgctaaaagcccttaaaaatcgcctctaaagctttgtagcagtgtcaaccaatccaaaaaagctaaccacaaataaaagagtgtttaggaacattaactttgttccaaaaaaaaatgaaagatttaagaaacccatttgattagcatttatgagtttttggtatatgtgatgaataatgcatgcccaaaacagttttaacttttaagattgttcttcgatttcacaatctccctccaagaccaactagcattataacattagtaggaccaactcatttgtttttatatgatcttttgaaatgcattgataagtgtcatatcattgaacttttcgttttacatcaacaaattaataatgatattttttttttgtgtgagtgaccataagatgagaaaagagaaagagagagggagaaaattgagaaaacgtggtgttaattttttggttgagaaatgctaaaaggtaccagtagtacgtgcttagcaccttcctacgtgttaatatcgctagagcattgttattaggcactagtggtgcccaacaccatttaaaggtggcaccccacgattggttagcgatcactacaagaaatgtcac

SEQ ID NO: 177257 - DNA, 610 bp, Cannabis indica
tataactttaaaaaataaattttgttaaagaaatttctaaataacatttaaaaatatatttattattaaaaattttatatgatgatatgatatttcctttcattggtgagcaaagatggcatgcatctaatatatagaaaagatatagcattccaaagcatactttcattacttggttaattgcttggaatcggctgaggagtcgggacagattacttaaacaaggaatgcatgtaagtggagtcaatatgtgtgatttgtggtttagagaatgaaatacatgaacatcttttcttccaatgcaacttcagcaagcagtgtcttcaggaaatacttcattaggcgggtatgggatcatatcaatgtaagttcagaggattaattagtcaactggattcggagatgcaaaggtagcaagttaaggaaagagatttatactttgatttttaattcttgtgtttactcagtgtggaaaataaggaataggtgtctttggtatcatgaagtgctcattgtgttaaattctgtcaaaacagttaaaaaggtggttgtaaatagaatatatagtcttgatattagaaagatggcggatatagatagaagtcggttt

SEQ ID NO: 177258 - DNA, 759 bp, Cannabis indica
tctcggggaggaagcttagacagaagtgaacccaaacaggtgtgggcccctactccacctttgccggtgcttccagaggcaaagaagggcaaagggatgctcgcacactgtatgaaccggctggttcctgaggttagtgagcaactggctggtgatgacaattactcttctttggagttgctgatgggcggagacttgaaggaattcactagggtaagtctttcttgacacttccctttaatattctgtacttagctcaaatgctaaagttttttctttgtgcaggtcggtctgaagttggcctacacatactcccgggctaagtctgccgcttcctggaacacaactctgtccaacaccctgagggcagaggtggacttggccaagaaggacgctgacgatgccagggtagagcttggagctgttcggatggatctgggtgaagccaacaagaagctctttactgcccagaagaagatagctgagatgactaatgatctcgaggtttctgaccgtcttgaaaagaccattgagactatatctgctgaagtgaacagtcttcaggatgagaagacttctcttcgagtggttcttcgtcgggtggaggaggagaagaagtctaaggaggaggagctttcggccgaagtggcgaggctgaatgagaaggttaatgctctggagacagttggtcttaagctcttctatgacttttggaaggctaatcctcaggccaactttgactatttaggcggtgctaag

SEQ ID NO: 177259 - DNA, 575 bp, Cannabis indica
attctacttaaattaaacaaataaaaaaaaaaaaacctaaactaccctaattccctcacgccctcctcctcctcctcctcctcctcctcctccttcttcttcttctctgctaaaaaaaaccgtaacctaaacctaacccaaaccctaattccctggctataacccacctcggtcttggaaacaccaggaactcgatggagaatattgcttgttttaatatctcaggcgaaactaactgttcttcttgtaattggtcatcatcatcatcacgtccttcatcaacaatatcaacgatgacgtgacattgggattgcatttctatctcggctggtggtcgttgtttgtattgagcgttgtcaagtctatctaaaaaatcgacacggcataaggggtcaagttatgttgttcctgagccaaccaccaatgcaatctgcgtagaatacatgatcacacttagggataaagatacacatttttttcatggtctagtaatccactgaaaccactacctcacaattccttggctttactgttgggtccaattgggtatgttgggtttgattactgtttgggtc

SEQ ID NO: 177260 - DNA, 629 bp, Cannabis indica
atggtttggaaaaataggaaattgtaaaatatttttatgataatttaacccctacaaactaacaaattattcaatctatgcatactagacaatttttgaaactgcaagggcaaggagcatgggtttgttctagatgagttatctcttaattcccaacaattgaattattatgatcctaggtctagattaaccagttcaccaaaaagaggaggaaagtatgttgtaaaagatgactttgacataagatcatcaaatgaaaaagtagagtgaaaagtagaagccttagtgatgagtcaaactatgaattctcatgtgcaacctatgaaagatgtttgttctttatgttctagtacatataacaatacccaatcatgccattctttccatgattttttttttaaagaggccaatgctttacatttgtatggtaagacttttgatagtccattctcttccacttataatccttattggagaaaccatgcaaatttttgagacaaaattagcctcagattaaccaagggcaacaatttaatatgccaaaccaaagtcatgcccaacaacccagtcttattctcaacaagaaaactgtaattcgctaacaattaggcgcgatacctaaggtgatt

SEQ ID NO: 177261 - DNA, 954 bp, Cannabis indica
gcttgaaactcctagctcaactagcgcttcgcgccttggcagggtagaaggactaattcagtctattgggccctagaggagctatagactgacgttagtcagtttccccgctactcctttgtcttggaggaagggaagataatgacattgaaacaacagcgtattcttggcaagatccgatcggaaatagccatagaagaattataggaaggatatctcttatcaatattcaaatcgtctctttttcacaatcgccgatcgaaagagtgcaaccatggcaagcaagacgcgaatagagctgtctttcacaacaggagagaatacttcattgaagtccacaccctctctctgactatagccctttgcaaccaagcgtgcgaggaacggagtgaaaggctacgctcctgaaggcctttgaaactctctcaaatagggttctagcagagaccgctgaaactcgtgttttaatgcccgcctactgctgcatgtagtaaggactttgccgggtgtaatggatggaatacattgatagaggcatatgaatatgttatcccaatagtcacgatattcatcgcctctgttaggaatagcaggcaatctcagattaggataaggattcgcaggcgagacagatattgaattaacagaggaaggaagaagtaaggcaaggtttttttatccctaatgatctatctcgcttggctaatatcttgtttgctattcctttcagatcatagtgaaagattgagttaaagcccatgcatgaccaatatcaagtgggttgggatctcttcttggaagaaagacgaagcggagatctttctattcatgaaagaatgaaaatataagaattcgagtgactcacaggggaaaatccagattgttcctaaacgggtctcaagcaagacaatcccaggtagtggacttaactacatcactgccagactcaatcca

SEQ ID NO: 177262 - DNA, 527 bp, Cannabis indica
tattcatattcattgcatgttgtaaagataaatgttatgctacgtagtttcttttttttttttttctttttcttatattcataatctgttgcacatgtagtttttttttttttgttttttttttttttttttatattacacataaaataaattattttgtaaattaataaaataaccacaattaaaaaaacacgatgaggacttttaggggtgcaccataaaaaacactcgttatcttttactgtgtagaaatatatgttagcatctgcaacaccaaattaaaaagagaaggtaaaacaccatttgccaaaatggctggctctccttatgtcaacgctgatttcccctccatattaaaatgaattaacagtaagcgatttgcttgtaatgataatgaataatgataacatacggaagcccgttgagaattccaaatttcccttttcttttttgcaaagtaactcatgtttggacatagctatttttaagtaatatttatataaacaccatattttttaaagtgtgga

SEQ ID NO: 177263 - DNA, 728 bp, Cannabis indica
attgcttctgatttagagatctagggaggaagacttagttgatagtattgcactatcgaatcgaagtaactgctatggatcgaattgaggtaattgctatggatcaatcaggtacacatacttaattattatatattattattgagttctatgttatatacaaattgatcttgggtttatcattaatttttctaacatgtggtatcagatcgcctattgtatatgatttataacttataatttgtataacaattaatatgtatatgttaattttcttcaattacatattaatttctttattattttatgttgaattttttgtttttcaatcttaaaagtttaggagttttattcatcataaaattctctttctattgatatcttatatgactaaaatcgttgagtaaattaagagaattttaagaataaactttagggttcatgtattttttatgaaattaattttagggttttttgattctattagttattgactaaaattgattgtgcaaatcttattaatgaataatccacaatagttttacatcatttatttttcgaattggatgagatataataacaaaaattatatattttagtttcttagttttttagatttgagtttcatgtagatctctcaattttttttgaatgtttctactccaaattaaatgcatgaatctattagaattagagtcacgatcgaaaccactcaaattccattcaaa

SEQ ID NO: 177264 - DNA, 1116 bp, Cannabis indica
ggctctattggatgcaaggggtggacttgatccaatttgaagcagtattgagtttctaccccttctgatgagggtacaggtaagtctccctttccttgttttgcatgacacattggggacaatgtgtattctaagtttgggggaggggacttataaaaaaaattaattgttttagttattctgttctttttagttattttgctttagtttagtctttttatttggttgttagtcgattaaataaactgaagatagttgtgtgctgctgttaattgtgatatgtcctgaaattttgaaactgtgtgcttaattctgttaactctttggattagtttggatgcttgtgaaacctgtgtatgaatgtaatttgacaatctgtgaaatatgttataattgttttactgtggtttgtggtaagattgattgaatagcttagaacttgcatgtcttattcttttgaggcgaaatccttgacaacatttactaggaacatgatttaggcagtttgtttggatagtttgagcctttcaagcctaccataaaatgaatatcctttgtgaacccttttgagcctaaacctgttttgtttcttcacccattgaactaaaagatgtatccacactgttgtttttgtcctcattacattttgaatggtatcataagccttaaaataagtttgggggagtgaaatatatagtgtgtgaaaggatagaataaagaaaacttgtgagattgagaaaggtaaaagaagaaaaaaaaatattttgtaaaatcagcatcacttgaaagaaaagggaaaaggaaagataaatgtgactgaaatgagaaaaatatagcaaaaatttcagtgatgtcgggtgaatgaaaaaaaatagagaaatttttctcattcgtggttaattgtgtgaacacttcaggaaattttaatttatgggaagcttgtgggttataaaggtgcttatgatatcttttgccagaaatacttttcagtactaaatgcttaagcccgaaaattttaccctgcaagacctattgattttgaaaagaatgttgtcaatattagtggagagaggtaagcatgcaagcatactggctatcggattgtggaatgattgg

SEQ ID NO: 177265 - DNA, 582 bp, Cannabis indica
aactgaaagtttgggtaagtgatatccttggaagcttagtcagcctcctaatttctcaatttcgtagtacagctcatttggcattcttatgaattgcataaacttatcttctgatcaaatttcagggcaaaacacacactttatattgtccatcttgattaaacatcttgatcacaagaatgttcttaaagatcaaaatattcagttggacattgttgatgttgccacctgtcttgctcagcaaacagatgttaaaccctccgtggccataattactgcattaagtgacatgatgagacatctaaggaaaagtatacacttttcactcgatgattctaatttgggtgctgaagttattcaatggaaccaaaaatatcgggcagctgtagacgagtgtcttgtgcagttgatacataaggtgcactctcaccttacaatctttcatgtcttttttaaaatacaatgctgcttgaattgaatcaaaattatacgtagatgacttgccattgttattttggcaggttggagatgtaggtcctgttcttgaccagatggcagtaatgttagaaaacatgtactgca

SEQ ID NO: 177266 - DNA, 881 bp, Cannabis indica
gtcaacaaaaaaattatgttgtgactaaaatattgtcactaaaagtacctatttttgtagtgttagtatatatatttaaattatgtgtatgtagttcacataagaattaattttttaatattttttattataaaataaataaaatacaccaactcaatatatttctaaaaaaaattaagaaattagaagtttgtgtcttttttttaacagtactaaaaaaattaatgtattttatatatattataattttttataaatatatataattaagttcagatgggattggatcggttactttttgaggtcaaacaacatccaatccgcacaagtgcggatttttagatttttcaatatccaattcgcgcaagtgcgaatattcgcattttgcggatttgattggattgaatacttagtgaacacccttatataaaatctctaatctcttcttttgtatttttggtttttagtttttaaatcaatttcattttttggatttgtttttaataacttctcaaaatccaaatgctatgtaaatttctgtttcggattttttgtcttttgttctattatttcttttgttttcaattcttaggattaaattatttttagtttcttttacataaagaagaaagctatgattgggcacattgacatgactttgttcttatttggaaattcagttcactcgaatactagctgaattgtcaagcaatgactccaactaatgttttttttacgaaaagaatgtacaaaaatttaagagcaactttgcggcgaaattctcttatgttttaatttttatacatttaattctcttatttttttatattttttttttggtggtaaaaccttcttatgtttatttttctttgtaaattttg

SEQ ID NO: 177267 - DNA, 668 bp, Cannabis indica
ttcttgcctctatttatttattttttttcgtatttctctatttgtattttttttattttcttcattagtttggaagaattacgttaaaaaaaaaaaagtcaaaaggccagagtaaagggattttttctatccaaaaaattttattgtatatcttaattggatactaaactaatttataggtcacacacataagaaagatatacctctaaaaatctataatataggaaaaaaaaaatgtttttgtcccactaacatatctataaaaagaaaaatagatcagtatgagcaaattaagtaaataataaaccatgaaaaattttcttttataatgtaataactataatttatttgtaatgtcaccattgctaatagcataatcattatctctaagtttcttttaaaccaatagaaacgtgaatcggcaaggagacccgatttccgtgctgctatttggtttggtaataatagaataccttataatgctgctccaatatcaaattcatcagcagaatttcaagtatctgcaaacatttgaagtaggttagattatgcatgatttaatttgatcaattatcatatgcatgctaatgatattctcagtatgagaacatgagcatctatcttggtcgtctaatgactgcatatttcatctatcaaatttcatgaat

SEQ ID NO: 177268 - DNA, 701 bp, Cannabis indica
ttagcacgtagagatatgcgcaaatgacgcttatatgaaaatgtgatatatatgagaaactagaatctgggatttaaagttattactctaaagtgagtggttattggcttagggtattaccagtaaatgttaatatgtaatgttatgccatgatatatatataaatgtatattgaagtaaataattatgtgttcaagacataatcaggttggactcggtaactagaaccgagatgaaccgttctaaggccttaatgtaaatagacgtgtgagcgtaacacgtaggtctatgccacatagacataaataggcgtgtgagcataacacgcgggtttgtgtcatacagaaaaaaataaaaatggcattaatatttatgtgatgtgtatttatgattatcgatatattttactgtcttgctaggcttggctcacgggtgctctactgtgcaggaaatggtaaatttgtttctaatcagccatgagtgtgggagctgggcaatgaatatacatgttcgggccacactagaccaagcaggttggggtctaccagtgttgaaacttttgtaactctactttgccacttaggtcggctaagggaaaagacttgtaatattttgtaaaataatttttgggatcccgaaacatgtaacttttgtttgtaaggttaaaattattacaagtttattttcattccgttttcgtt

SEQ ID NO: 177269 - DNA, 757 bp, Cannabis indica
aaatatgatatttttttttttaaaaaaaaccttgaaaatataaaataaatcaattattaaggataaaaaataccataacaaaaattaaaatcgtgatttttaatagcaactacagaagctagtttttttttttagtaaaaccaaactacaaaagttaaaacaatacttgaaataattttgttcatgcaataagttaagaaatctatatattcaaaattggtttcttaacgcattccaaaactcatatataaattttacatacttctcagaactctaagactcgaccttcaacccactactaaagttaaaaccaacacagtaaccaaattaaaaccagttacaaacatctatctcgacaatcaaaccactaccaaaacagtcactattcgataagataaaaaaatagaataaaaatatttgctagagttattatcatcatcagaacaatcatcgaaaaattcatcaaaattattgttgttactagaaagtcttcacagttagacattgaagttgtcatagtactaaatcttagaactaattacgtaaaatataataaaagcaataattacatacagaaactagtttcataatacaatcaactaattatatgacacataaaaaaaatgaaaaagataaaatcaaatgcgaaaattaattacttaaaacaaatatatatatataccatagaataatttaaacaacgacttataaattaaatcacagaaactaaaactaattacatcaaacaacttagtag

SEQ ID NO: 177270 - DNA, 679 bp, Cannabis indica
tggcaaaattgctaagtgggcccaatccaaagcccatggccggcacacttaatgggcttttatcatttatttttttattattttaatgccaaataattctaacctaaacctaggtggttacctataaatagatagtgatggctctcattcacacttaactttgtgaacttctgtcagatgaaaactgagcctctatcttttctctataggccgaacctcttccctcttcttttcttctctaaatttcgaattccttgagtgaatgagtgagtgcccacacacatcaagtggtatctcaatcatagtgtgtaagactgtggaaaatcaaccaacaagaaggagattcagcatcaaaggaaggagagaaagagatccaggttcagatattgataatgctctgctacagaaaggaatcaagggctagatatctgaacggaaggagtcattatattccgctgcacccaatgtaaggtttcctaaactttatatgtgtttatttcattgttttagaattcatattaggatgttaatgaaacatacttgttagtaaatctagatcctggtaaaatatatccaacatgaacatgttgctttgactcctccatgatttccatctgaacaaacctcttcttctacccaataagaattatggcctctattatgttactgatgtaataat

SEQ ID NO: 177271 - DNA, 1034 bp, Cannabis indica
agtcacattttaaggtaggaggaaggacaacgtgaaatcttaggatagtaaaaagaccaaaaaataaatcatgacaatattaaaaatgcatgttttctgaaacgtacgtctgtttgtcttaaactttattcttcttggtttaatcatatatgaaaaaaaataaattaacattatattgatcatataaataaatcatatgaaaaaaaaaatattaatccaacaaaatatatcatttacagcatatttattataaaaaaaatattaataacattaatcgattaacataatttgttattgcttacccagatattctttattaaacataaatatatagataaattgtaaaaattgtaactaattgatataacaattagggaattttgaatttatatgtatatatttggtgcatattaaattttttaaacacaagcttatcaaaaattaaaaaaaaaaaaaaaaaaaaaaataagataaatgcactatacactattaccaataataccctatactcccttctatctcttctaactctaccattaatataccgatggtggtccaatggtggctgaatttaattactagattgtgtttgagtcaattgttcacagctttctatgggaatatctcttctttcaaatttttaaatttttttttaaaaaaaaaaaagaaagaaagaaattgttataacaaatattgtattatcctctaactactattataatttattactattaacctaaaaaaaaaaagctaccactataaatataaacacatgataattaacccaattaagattaaatgtattctcatttgaaaataataataatatagcaaaagctataataataacattacaatggaagtagtagagcaaatcctccacatgaatggtggtgttggccaaactagctacgcaaccaactcctctcttcaagtatgttcattcaatctttctttataatcctgttgttttaacttttacattattaattaatattcgcgttgttttgtaataaaaatataatagagagaag

SEQ ID NO: 177272 - DNA, 676 bp, Cannabis indica
atattacattatatgaccaaataattaagccatactaaatgacaaaatagaaaaaccaaaataataaatacatactaatctataaaaatagaagaaccaaaattacatactcatcttcgattaataaatgttaacatagatatgtaatagataatatatgatagataatagatttcatgtcatgtggtactttcttgaaattattattctgaaaagcttgtttcaattatatgtaataattgtcttaacgtcatgtactttcttaaatgtatgtgtcatcgcttgtaattatgcaatgtaaactcagttggttaataatcccatctatcaattataatatgggtccgaattcaacatcacatctggtacttgttcacgtgcatagcacatgaaaccccacaggttttgcatgaacacaagcttcacttgttggaagtgggagttttgatcaagggcaatgcggcccataataaataagaccaatggcccctcataaaggaatcataaacaaaaccctaccctcagccttcttgtcctcttgtttggtatatttaagaccatattttgaccacgaaaatgatgctttctagggtttcatttattattttcacactggactattcaacgctaatgcagctccagcccataacagctctagtacaaagtctccttacta

SEQ ID NO: 177273 - DNA, 746 bp, Cannabis indica
acaatcgtgaaataacaacgaaaacttaatacagtacactgtataaagcttacacagtatttttttaaaaattcagcctcacaataaaaaaaaattaaaaatttcaatatataatgtaaaaacccctaataaaatatgtactactatagtggacttatgtatagtattacctagctatagtatttaaatatatttaccatcttgatacatatttctatatttttatcttctcattgtttaagaatttgtaaaattgtgctagttttccaattatttttatttataatgaattctagccaataatgtatggaggtagaatatattggatgtggctttagaattgatatagtaatacatgcatttttatatattgttaaagaatgccttattattaagataccgtcttataagtggttaataatttttttgttatgaaattaaatatatacaaaaaacgatattaaattatactaataatagtacaacatcttaaatgatattaagcagtgctaattttgtcacaaaaattataatttgttgtcactaaatgtgtttttagctacaatatttgtgactaaaactatatattagtgtgataaataatttttgttgtaactaaaagtaatatttaataagaaaaaatctatattgtgactaaaattatcaccaaaataacattttggtagtgtcagtgatttttcatgacacaataatgtaacattgtttcaatttttcaaataattttg

SEQ ID NO: 177274 - DNA, 619 bp, Cannabis indica
gtgttgctcaaaggcttttcctttttgaattgctcttgcaaatggccgttggaccatgggtaggtacaatggtgtgcatgccttgtactatggcctgacgtgggggacaaaacctggcgtcgtaccaggaaaagtatggctgtcaatcctatattctgacaggtatggacggagctctcttgcgacatcgtacggagatacaactcattctaagtccttccgcaacccatataggtatacccaaggaagcccccaacctccacagggtgctttacttctgctcccgagacttggagttatcatgtatgttgacgctccatgtgtccctgccttgagtggaggtatccttcgcgaaagctcctcgcgagagctggggctgaaggcattaatcagttgatgattatctcaacttccttggttaggttccatgtgtcaagcttacaaaaatctagacaacatttaccctcaagcttccgggtcgactcgcagtctgggagcttgtagtgtttctttgctttctcatgattggtttctaacacgtggtgtagcttcagattttattgtgtcacacaaatggttgtcaactggtatgtcattgacaaaggatatcatttgcatt

SEQ ID NO: 177275 - DNA, 588 bp, Cannabis indica
ctcaagaattgagcttctgttgcgtaattaacggggatatcgtacaacccttgatttggtagttctttgtatattgagtggctttatttttttttagttttccatatccaatttcctccatagtttccaccaatctcctctttccttttcctccatcatcatacacctcttccatacctccttgttttggagatactgattcaccttcctggttgttaattcttgcgcttggaccccctgttcgagttgttgcattggttctttgtgagtgcttgcctctgttagcatatgttcaatcccccccgtcgtgctctttggcagtgatgcaaacgcattagaatttacaggagcagtttcccactctgttacattcttgttcagcggtcttccttgaatgtttgcttgccccataccagttctttttccttgaaagccatctctgcatccattgtctgtcttcaaccatactccatatgcttctacttcttcattctcctccatagtgatcttaattggttctttattgcaatctttaaagctatggccaattctcccacatttgaagcacatgaatggcaattcatcata

SEQ ID NO: 177276 - DNA, 611 bp, Cannabis indica
tgtttcttttacagtaaaaaaaatagtatttctatcgcttaactttcaccaatacaaaattttatctttttttattaaaaaaattaattttaaaaattataatattatattaattttgaaaaaatattaaaaagcttcaaaaaaatattaaattaattacaatatattaattttgtttaaaaaaaacttaaattattcctaaaacaaaaatttcaaactttattttatttataaacacaatcttaaaaaattaaaccaaaattattaagaacctaataaataatttaaataaacaaaaaaaaatttagaagaaaaaatcaaatttttttatatttataaactcatatcctaacaaatagagaaaaataattaaaattcaataaaaatataaaattattttgaaaaaaaaattagaaattaaactaaaaaaataattatatttacttaaacaaatctaatattttttttctaagtaaaaacaaaaattgaactcaagttttttttttttttttttagtttaaactaaatagtactaataatcattgtataactgaataatagtcatacaggcgtaaatagctaatatacaaccaaaacgaaataaaataaat

SEQ ID NO: 177277 - DNA, 700 bp, Cannabis indica
actagtgctacttccatgtcctgtcctggattgaaaagattaatatcgggaaacttacaataatactgacttttgatccaatctttataaaaatactaccatgcacacggtaaaaattacttttatattatcttggccatttttttttttccttttatactgtaaactaaatgcaaaaaaaaataaaaatgagacccccatcttccacacccacggacataaccactataggaacaccagaacaatcggaaaacaaccattaattccggtgagattgagaaaaaaacagcgaaattgaattcaaataaataattatggcaaaacaactgtaaaacaacactaaaacaaatcaaataaaagaaattaaaaaaaactaaaaaaagttactgcacaacctcaatacccaatataataacagttatatttgcaagcccaatctttaaaaatcaggacaaaaaaatactaaaacaacacaaaataaatgtaaaacaataagacagatataactacttagaaaaaaataaaaaaaccaacaatcaataatacctacgcaagatgggacaagaacagtgaaagtacgacggttaaaaaaataaaaattaataggtaaaacgaaaccgtaaaaccgaaacaacctaaaaacaaaaaaaaaacgtaaaacgaaaataaacaatagtaatactagctatataaacttaat

SEQ ID NO: 177278 - DNA, 538 bp, Cannabis indica
gaaatctcgttattttttagttgtttttaatttttgctgaataatgtatatttttataattttaaaactttacaaatatatttttataattaaaaatttcaagccatataactataaataaaacataaaagaatgtatttttaaaaatttcccattttgttatctagctagaatctacttgttaatttagttatagtgttacatggtatcaaagtttagttatagttgtgcaaggtatcaaattttatttattctctgtttttttttttttttcataaacaaattttgttattaattgacaccctaataaattatagcctcaatatttagtctctccaactttccaacttcctcagtagagctagatcgacttagtggcttcatttttagatctttattacttcaaatggagaggagcatccctggttacgtcttcacaccaaattttagtctctcgctctctctctcactgttatcaacatttccagtaaaaatgttctgggcttttgaacatggaggtggcaaaatggcccaattg

SEQ ID NO: 177279 - DNA, 569 bp, Cannabis indica
aaaaaaaaagttaaaaaatatgaagaaaacaggcaactgattatccttacttggtttttctatgtttttttaatatttttctttaatttttccatagcaaatataaaaatccataaaatttgtaatttccttacattattttattcttatacccaaaaaaaaaaaagaagaaactaagcttattttctgaatgatttaaatatatttatttctactaattatttttctaaaaattatggtgatttaggggtctgcctttttggttacatgatattcctggcattgtttacagaactgataatgaacccttcaaggtataaataaataaataaatatgaatatatataattcaaattagaataatgagacaaaaaaaattagatttaaaatattattgtctaaaaatacaggaacaaatgcaaaggttcacaaataaaattgtaagcatgatgaaagaagagagactttttgcttcacaaggtggaccaattataatatcacaggtaattaaattaatattaacaatgcaataattataaaatctcaaccaaaatttagccatttttcaa

SEQ ID NO: 177280 - DNA, 679 bp, Cannabis indica
ttagtgtattttgactttgaaacaattcaagaactttaacaagatacttacattgggtcttaggcagagactcatgcttgaagcttgggcagagactcgtgctgataacgtgttataaaataatataaaataatataaagtagatgagaagaaagaagaagaagatgaagagagaaagagaaagtgaatgagaatttctgagttgtttattccaatggggtgaacccctatttatacaaatacaagagtgagatattaagaaactaagaaaaagggaaactaagaaaaagaggaatgttgattacaattaatggtaataaataaaagatttggacatccacataattattaatatttataacacaaacaataatatgctaagttttataagttagattttcattggttagatgttataagttagaatcgatcactaattatattaaataatcgatttatgagagattcaaaagataatcatataataataattttttgtaataatctatacattttttcaaaatattcatctttgtcaccaaccaaataattgaagagattgtccctcatctatattcttcacattctcctaaccttttaaattaaatgaaaaaaatgacaaactttattaaaagatgaatctatatccagcccaccatttactattaatctgttacaa

SEQ ID NO: 177281 - DNA, 705 bp, Cannabis indica
tattccatcgtgtgattgttttctgactcacttgaaattgtaggatgtaggggtgtacattttcctcatggaatagactggtcggagaataccgctaaatggggttgaaatttttcgtctaaataaagaatggggtggggacgaagattatttttgtcttcaaatgttaaatggagcagaaactagaataacactcccgcctcgataggaacccgtttaatatttaaattattttttattaatattttatattttataatgtgtttgtttttgtaatttgttaaatattttatataataattagtatattaaatattgaataatgtttaatttttaatttttatatatattaatatttttatacaaagtaaattttcaaaataaattttattttcatatgtttggagattttctaccctgtcttccatggataataaagatgggatagggataaagattaaaatttctcagtaatttactgttccgtctgcatatccttacttgaaagtataatacaatcgtgtgtagtacttgatttgaacacgaagagtactccttttgttttcaattgtatattactctaagatatatttattttagagatagcatcctattgtggataatattttctatgtttatatatatatttaataagtaaatagtaagtaataatattataaattatgtttcactatatgatacatt

SEQ ID NO: 177282 - DNA, 662 bp, Cannabis indica
acgttttttctttactaatactattacataataagtaaattcaagctaactaattctacgtaagtggtaataagtagtaacttttaccaattaaaattatactattaataattgtctacattagtatttatcgtacctgatgataattcatgtaacgaagcatttcgtttgcgatgctcatcgactaaatatggtattaagatgacccataatataaagacacataacctacataaatatgaaaaagttaattatcatatagtttatattatatatttataaaaatcataactaaaaaatatttattatagatataataataatattaccaatggaggaaggaagaataatatgccagtattctcagctggccaatgtccatcactagcttgtaaagcagaaacaaaatgcacagctctcttcaatgtaatcgttgccttttcatatgagatcctctcattatcttcaattttaataccaccaattctttgtttgaagtttttctctttcaaaaactgtataaatataataaaaatgttgtgacttataatatgtaactattgaaactcttaagtaaaataattaaagtgaaatattagacctgcattcgccaaagaaggtcactactaggcttgactcgaaaccgatggttgtagaaatta

SEQ ID NO: 177283 - DNA, 1049 bp, Cannabis indica
tacgaattctaaacatcaatattaaaataccaacacctagagatgacaagagtaaagtaatatatatattatagtaccatatattccacaaatatagtagagtaaagcaactaacctaacagcaaccaaaaaaaaaaatcctaaagtaaaattttgtagctgatgttgtttgtgtgttaacttacctaaatactgtcagcataagtagcaatatttattagttgcctccttgacttatatattggagtccactcttagtatcataaaaggataaataatttccttctacagaagaaaaacacttattatgagtccttgattcaaccaagaggttaccattatatgatactcttcttgtggttggatgaagcttattggagacaatatgcgcacactttggttagccaagacttccaaagtccaaagagagatgtttagtccaagaatcatccacatcatatttcttcataacccatacttgaacacattttgatgaagttaatgagttagtcatcagaggtagacaaccatatacaagttaaaaatacttcgaatagaagtgtgtttatagtttaaagatgaatagggtttaatgagcttaaattctcactacataaattaaaagcaactaccatataattaataatgtaaattgcctaatgaatagagccacttagaatcgatagaaaagagtctcaaagctcatagtagaatcattatatgaggccataagtgagtggtggataatttacatccacgcactataaaaaatgtctcttttgctaacgcaattcattactataattatggtgatagagagggaagaatgtatggagttggagggagttttgtttaattggttgtgcggggttccgaaaaataaatagaattatttaattgttgtaggaacaaattacaccattactggctacccacaaacggaaataagaagaaaagtaatcatctcttattaggcgtgtgaattatagagaagagttagatgaaatatgattgaaattttcctaatatggtcatcatcgcagaaaatg

SEQ ID NO: 177284 - DNA, 803 bp, Cannabis indica
gtataggtaatgatttctctacatttattttgttttacagaaaatcttaagaaatcttagttttacagtctaaacttacatctgagtgattatatataggggatcaaaaattgatcttcaacatattttatcaccgaaggttaggaggaggttctttgattgattgaagaattttgagcttgtgcgagttgttgaagacgatggctaatttagttttaaattcttttctctttattaagtttcgattataaagtcactattcttagcttatggtgttgaaattagattttgtgtattttgattttgagtccaacagaatgttttcaattccgtttattttcgtttattttatatttttgaaattttggattgaattcccagttctttgcattctgaatttcatttgtggagttcaagctttagtccgaaacaaaagtcatgtgagttccttaatacgagccagtgtttcattcatgtgcctgtagcttgttgaatggattggtcattagttaagttttggtctttgtttttgattcattgttgagtggttagattaaatagaaaccagttacctttatcggtttgatctttgtattcattaataccgaatcaaaagttcaagcattgatctttgtaaagaatccatttactttgtgttgtgtttatgttgttactattttacttgtttgatttgcatgttttgttttcctggtaaactctattaattttactttaaagcttcattttgtaaaatagctactatgaatattcagacttggcttggcttattctttttatttcat

SEQ ID NO: 177285 - DNA, 544 bp, Cannabis indica
ccccggaacccgaacccgaacccaaacctgaacttggactcagacgcggacccgaaccccgaacctgtagttagtgttgggtcgaatttattgaaaatatattatctttaatacatatcaatatcaaacatagtcttttataaaataatactagcgccagcggggcagggcagatccttttataatcttgatcaggttagattatagccggatcagatccgacccgacccaattgacactcctagttcctctaacgactgtccgctatattagagaatttgcctctctttatgtaatgatttgcgttgataattaatgtattgtttcggttaaaaacaaataggggtctcgttaaaatctaacaaataatcttaaattaaatgattttagtttaattatatgtttataaggagtcatcacatgtgcatgtaacaattttttttttttacgacatttttagtttcaatgaaagatattattttccaagaaattaaaattttagagaatatatactgattgttatatatgatgattgttatatatg

SEQ ID NO: 177286 - DNA, 571 bp, Cannabis indica
aattattgtattgtatgttctatgttgggctgttcttgttgtctttggatgtgatagtgtatctagtccccacataattgagaattattcaatatgtacttatcatagagatgtgttatcagcagtgagaaaatcaaatatagtcccctaatactactatactagtactgttcagttgaaaattaattactctttgtaaagttgatcgattcaacgtaatatgttatgtactaaagtgttatatatcttatgttaaataattatacgcccaattaaaaaatgagaattggaaaggggtttcaaaagaattaaagctgtcgattaattgttggagagagtttaaaatgggcatagtttataaattttgaggtaaaagaaaagatgtaaaggaaattaattgaaatagaaatataaatagtaggagagttgtctacttttgatggggtgtgcttgtcttttctttgttgataaaaacacacccaatacaccaaaacaagctgtcctacacattttagttttacttatttctgacccattaattaaacaactcacaaaaaacctctctctctct

SEQ ID NO: 177287 - DNA, 705 bp, Cannabis indica
aaaacttgaatagaagaatgcaattgcaattttattatttatatcagtagtaaaatgttgctagctttaaagaaaacaaaaaaagagtaacaatttctaattaactaacttcctaattaattattatagttaatagattagatcgatttcaattagattttgaaattaacatgtgataattgatccaattagaatttaactttaacctttaatccaatttaatatttttttttataattaaattaaattgaatcagttcggttaatttcaagtggattagatcggatccttggcacacctactaaaccattgccaatatgaagatatcttcagccgtcgtccctgataatgatcgaaaccgtaagtcaaataatgtactcaatcaatccattatctgtcccaaatgttgccctccccaccaagaacctgcctagtggaatcccactgtaggataaacaaatctcaaatagcattattatgtctacttacttaagtttatttcttataattaattttttttttttgtgtaagttttataattaaaaattataaaagaataatttgtattatataaatatttaaatttaattttttattatatataaatatttaagtttaatattttatgaaaaataatactaagtcatattttaaaattttaatagtacacatcatatcaagtcatcatctcgtattatttttttt

SEQ ID NO: 177288 - DNA, 743 bp, Cannabis indica
ggttattcgttgaaagcatttaacaccgtaagatctcatatgataagtattttgtaagttttcgtctctattagactctcccctacggtgactacttagagataaacttacagaatatgaaacaatggtggaagctcataaaatgagaataaccttgactctcgcctaccgggacaacgttggattctcattttgatcgaataaaaggttgctaaaatggtgtccattttagatgagctgactactctattcaactaatgttatctttgactctcgcctaccgggacactgtatttcattatgttggaaaccttggaaaataataaatatgtttagtttttagtatttttgcaaacatatttgctttgcttgttattttctgaacttgtgtatgaatttattgaaccaatgatttatttctatttattgatatttgtagtgtcaaaatgtacaacccacaccccaatcctcatctagaatatgcctttaggaatgaacttcaaagtgtgaagatgactcctggtcagagtatcacttcacacttgctcatgatgaacatgaaattctagaaagcagctatgctgggaattattttatctgaagagaagagttcattttattctcaacaacttatcacctaagtttacctaatttgtgattaacaaactgaaaactacgtccgacatagacaagctggacgctgattgcgtgcttatgaatggacactgtcacttgcatggaga

SEQ ID NO: 177289 - DNA, 1460 bp, Cannabis indica
agggcctaattcgaagcccaaaggatgttgtcctcgtcaaaaagtgcacaaaaaaccatgtagaacatgtcttggccagccaagcctttgtggaggacaaactagctcaccagctcctatgaaggagctagtctgtcacttgatgccggtttcagtgtcggggtctctgtttgcttaggtgttgacttggtcttcttattggtgagttgtactgccacgtagcactgattttgtccatgtaagcatgccacgtcaggatgacaaaaatcaggataacaggtagttagataatattaaaattattaaatctaacaatatcctaaaatatctcaattcaaaataaatatccaactaccttttaaatttctagcttatttaaataaattttaataaattaaacaaaataatacgataaaatgatataatatcttaatttgaaaattaaaatatttctaatatcacacttctaaccttataatttaataaattaaactaataaaataaactaattttttttaaaaaaaaaaattagatatttatagttagaatattatcaattttaatattaaaacaataaaaataatagtatatagcacgaattttagggtttaaaaaatcctaaaatatctaaattttattatttttaaatttctacaaaaatatttaagtattttaaatgtatttataaagtttatatgtctaataagtcaaaaatgataaaatatctaaactaaaatatttctattatctttttttcttaacttattatttaaactataaaaataataattaaaaatatgaattttaaacttgaataattatggttagaatatttataaaatatatagactaattttaaattttattaatatttaattagcatataagataattatcatataatattttaattaaaaaataaaattaattaaaatatatcaaatataataatatctaatcttgtaaaatcaaataataaataaaatcaataaactaatcaactttaaattcaaatcatgatttaaaaataattagaaatagtaaaatttatttatttatttatttttgtaagggaaaccaatataggtttaaataataaaggtaataaagttacgcaactaataaagaattttctctcatctataaaagttcattatctatcttaagagcatacagagatacctcaaaaagaactggataatagaactttaatatcagaaaaaaaaatctcaaaacttagtgttgtgacttccgacccaccaatagaacacctaaaaattaaagaaaaaaaatataatatatagcaaataattaataaaatatgaaattttatataaatattgtcacatagaattcgcttatgtaaagactagaacttatctattctcatctccattgttgaaggtgatcgagtacaatacatctgatgtgttattattattagattaaactaaccttac

SEQ ID NO: 177290 - DNA, 795 bp, Cannabis indica
tttttaaaaaataattataatttcatttgtttcagtaattttttattttggttgtggtttaaattgtttcgttagttgaatatagtaaaattgactttagtaaaactttacaaataaaaataaaaaaaaaaaaaaaaaaaaaattgttttaaaaatagtaaaaattaaaaaatttaaaaaaaaaaaaagaaaaaaaaagaagacattaaccctctaaacactcatactataattttactctttaaattcaaattttaatggtaaaatttttcaagcaaatttaaattgtcatttatttctctctccactcccagactctatttcctcaagtcagggccgtctcaaggtgttgtgtggcttagggcaaaatttgaaacggagccttttttttataaaaaatttaaataaatatttttttttaatttttgctcaaagatatcatttattattgaaattttgacacaatataattcactattttatctctatataataaataatttttctaacacataacctaacttaaggtaatatttgattatagttaatagcatctttattgaagttttatataatagtatgtcaaaaaaattgttaattttttttaatatatgttataagattttataaatttaaaaagataaataataattaataaatgtactttttatttaatttataatattcttgttagttattttttaaaggctaattatgacttttgcccctgaactttgacatgtaccaaatcatgcctcttgaacttttaaagtcgtgaaaaatgccccatgaact

SEQ ID NO: 177291 - DNA, 532 bp, Cannabis indica
aagtctatttttaatttactctttttctgacatttagtcttgagagaaaattttttatattatatacttatggatatatatttatgcactactaccgactaaaatagtttaatatatattttttaagttattttgcataaatctaaaaggataatatattgcataaattacttagttcacaattttaatagaaaatttgaagatgaaatcaataccaaactcttaactactgatagtattttttgagatcattagcattccatatacttttgggaccataaatctatttatgtgtttgagtttaaaagtttcggagcatatctcatcttcaattctataaggtttgccaatttgagcctagcactcctactacagacaggcccggccctgggcataggcggcctaggcctgtgcctatggcccacccagtccaggggcctaaaattttttttttcctcttttaaaattatacattttttttaccgattttgaaaaataccaccttttttttaacataagggcccaaattttt

SEQ ID NO: 177292 - DNA, 586 bp, Cannabis indica
tgccaagatattgtgaggcactatggaaggaagcatacctctccatcttgtatggtgaaaaaagacttaataaaaacttatgatactcttgattggagatttatagaagagatgctcaatgctcttcagttttcccaaaaattcattaaacttgtcatggtatgcatttttactcctaaattttcaattcttttcaatggttcaatgtatagttattttgcttccaagaaaggtctttgacaaggaatcctatgtcgtctcttctctttattataggcatgaaatacctttcaagattgttggcaaaggtttccaaacagacaaatttcagttatcaccctcggcgcaaagatttgaaacttactcacatttgctttgcagatgaaatctttactttttttttttttatttttttttctaaaagtgtatattcattctattatgctcctgctgagaacagttcagaccttctcaaagactttggggctacaagctaatgcctctaaaagtgctatttattgttcaagtatgactgacttggatattcaatatatacttgatgcttcgggttttacttaaagtactt

SEQ ID NO: 177293 - DNA, 697 bp, Cannabis indica
ataaataataaataattttttatatcatgtgttttgcccttattaaattttgggctctctgccattagccacgtgtatagttatggatataactgtggatactaataattgttgatttgatcatttgaagtaagaaaattccaaaatgagatagagaagtacaacaaattggttaatactataaattgaagaaaattgatcatatcaataacaatagctctttctactcatgtatagtttgcaaacctgcaaaacttatgtaggatttttaccgttttaaccctacaccaacaaagccacaatatcagttatcaaggtcaaaaatgacctttcctagtctaagtaaacccttagactaaacggcaccgtattaaccccacgacatcaatcttgatgtcgtatgaatcctttgattcaaagactcagtagaagagtctagaatcccaaacactcagacacaaatcactcacacactcacaaactcgaaacttgctcgattccagaccctagaaacccagaaagcccagaaaaactcaaatctaaacacacacacacatagcttttaggttagatgaaagaaaatgaaagataaggagagaaacaccagaaattgtttacagagttcacccaaatctgggctacgtctctgtcaagctctctcagagatagaagcttgatatccactatcacaaggttt

SEQ ID NO: 177294 - DNA, 875 bp, Cannabis indica
tttttttttaaatgaaaaagatatacttactacttagtcaaatactgaattgaaaatggggtaaaatagaaaagagaaagttgctatttttaggttctaagtccttttttttttttgaatgaaatattaatcttttttgaaaatgaaatagtaacttcattgaataattagcattcagaatacaaaagggagattaactcgtcccaagcattatactcaaaaatgctacgaccagagagaaaacaagagtgcctagccacaacatgggcaactcggtttgctgatcgtctaataaagcaaagcttaacattatttagagaagagaataaaacttgacagtcatgaataatcaagccaaaaatagaatttaaggattggttactacgaatgccttgcacagtgagcatgctatcagtctcaatctcaacatcagaccaattcttacttttaatccagctgagagcttctttgactcccattgcttcaacaacttccgcatcatatgtacctctgaaatagcatgatttggcctcaacaagcttaccgaggctatctcgagcaactatcccaaaaccataagagttatcccgtggaaagagtgcagcatcaacatttatcttgattttatttgcttcaggtgtagtccagcgctcagctccatctcctctattatccaaaaatagagaagataaggaagtgttatcttgagcgttacgccaatgatcaagagttattcgagctgatgcaatcacttcggttcttgaggatactttatttttccatacaacaagatttcgggccttccaaattgcccaacacaacatagcagctcgtgaagcaatctcctcatcaaggttcataagagctttctcaaa

SEQ ID NO: 177295 - DNA, 562 bp, Cannabis indica
gacttcacccaattagaataaactattaagaaattctcattcactctcacattctctttgtcttttctcttctcttatttctttctctatattcaatattattttatgataaaaattacattttttttaaataataaaaacttatttttataaaaaaaaataaaaaaattataaaaataaaaaacaaataaagatgtaaaaacttcgtcattttttatatttcaaaaataattccttacttttatttaagatggtcctacatagacttgccacatataggtgtgtgtgaccattgtgctgtcatttatggagaggaaattacattgtatactcacattattttatatactagttaacgtaaccgcgtctcacacgattattataataattaattgaaacataatttaaaaaacaattagaaaaaaattaattttgttttgattttttttgttgtttagtttgatggtttttattttattgttataattttattttttaaaaaacaaaaataagattttttttttttgccaggacatttgagttgccacgttggatagttgag

SEQ ID NO: 177296 - DNA, 540 bp, Cannabis indica
tatatatatataaaaaaatactattttatatgctcttagctcatattaaacttttcccaacttagaatattagatttaatttgggtattattatactgcaaattgtacaatggtgagttgcaccaagcccatttctctggacatttttgtgggcaacactgtactcttcactcatctgcagtagttatcagtgtttaggcttacagttttcttcacgcgctttaaagcgcgtgatatctaatctaatgaggtattattatatgtttgatgtgaggtgccaacttgaattgaaatatctctctcattacattattcatgtgttattgttattggatttttacttcttctttttatgaaaatacaaatattatcaaaatattatacttgtgagttgatacttttttaaattaattatgtcacattatttaatttttgttgtgatgttttgattcacattttagaaataaaataagaacaattttttttttgatcttttataccacatactcaaattttttttttttttttttttttttttta

SEQ ID NO: 177297 - DNA, 551 bp, Cannabis indica
gatgatgagccgagtaataagtcttcttctttcatgggaagacacttgtttctgttgttgttgttgttgttattgatatttccatgaaccattgttggggaactgaatctacaagaagtagttgtggaatcatttgtgtgcaaattactacctctcctttcttcaccacgtttcctttcttcaaacatttgttaaacacaaaagtttaaacccagaattttctcctgtccaaagccaaaaaaaaaagtctcatcatgcttcatgatgaagaaaacaaaacaaaaatttgaatctgatattgtaacaaaaagaaagtgaacatacccaaataagaagttttcagatcaaaacaccccaaaaaagttcacaacaaaatttaattaaacaaacccaattgaagtataaattttccaatgagaaataagatgaacactatgtataatatatgtatgtggtttttgacaaagacccttttgatttttttttgtttttggagtaagaaattaataaagacataaaaaaaaaaagcaactcataccatatatatacat

SEQ ID NO: 177298 - DNA, 644 bp, Cannabis indica
tttgatgtgatgtttggtgatctattcccggactatgtggcaatcgatgtcgatgtgttttgacgctcatggaagatggcattctcggaaatgtgtatggtagcttggttttcacagtaaagggttgcaggttgtgagtgtttgattccaaagtcagataggatgttgatgagccaacttgcaaagatttatccaacttgcaaatcttatgttcctggccagagatcatgaacccttcgggttgatccatgtaaatttcctcttctaattcaccattgaggaatgaagtcttcacatccatttggtgcacaactaagttgtgtatggaagctagtgaaattaaaactctaatggatgttattctaatggctagtaaaaaggtgtcaaaaagatctacattctctctctatctaaaacccttgactactaaacgagccttgtatttgtcaacagttccactaggtttcaatttctttttcaaaatccacgtacaacctatagtcttgcagtctggtggtaagtttacaacacgccagattttattggtcacaagagagtccatttcatcatctatggcctcttgccaaaggtccgaatctaaagaagacaaagcttctcggaggttagaagggtcctcctctaag

SEQ ID NO: 177299 - DNA, 596 bp, Cannabis indica
gcatgtctttctacaatagtatttacttaatatactaatttttttaagagtattttcacatttatactttccaatctattttttttactcttttttattcattaaaacttttataaattttttttattctttatatttctttaggggaattaccccatatactgttttttaactttttttaattcaaatttacagtttgagtttctaaagtggttgcagcgctagttgcaataggggtttctgtacgattttttgttgcaatttaggttgcaacgctagttgcaatagaggtttctatgtaaaattccataaaaatacaaaacaaatattttaaagtgtaaaaatgaaaaaaaaaaaaaaaaaaaaaaaaaaacaacttttctttattttctttttcttctttcatgacttctttcttcttttttacttttattatgttaacttggctgtattttttttatttctcttctctctatcatttttctcttttcaaattttctctctcccatactaattttttttatctttatatatttattaaaaaatatataataagtgtactatttttattattttttttcattaatttttttcac

SEQ ID NO: 177300 - DNA, 627 bp, Cannabis indica
attagtgggtggtgaaaattacaagagtaccaattatttctcaacaggtgttgaatttgacacatgtagatatagtcctgttaaaatcttagtaaaatatgatttgttggatgccatttttggcattgggggaattaaaaatatagataaatattcatggttttgaaacgtcattagggacacgtgtttagttatcctaatatttttgaaaataatgcttaatgacaacactaataatgtttttgtagatgcatgttatgctatgctatgctatggtgcttcaaatctttcttttatttgtttattaatttagttacttgagtggactgtgatgagctgtgatagtaaactttctttctttcttcttcttcttcttttcctttcatcatagttaatccttcaactcatcaaagctatataatatttggtgatgaggaggattgaagttactaacctataatcctttcttaagttttttcttttttgttggggtaatggtaatagttatttattaataacttaagaattttggattcaaattcatgttctctttttattttcactcttctctaactagtctatagaacttgtatagcaattcataaaaattttaatgtggttggtcta

SEQ ID NO: 177301 - DNA, 873 bp, Cannabis indica
ggctttttatagcctttggcccttagtcttgatccaacttgtcataactgacagttaggtagttagttagagttagttgctaacttcttggccaaacaaaatagacctctattagtgaccaaactccacaattatctacctctcttcgctccttctttcacattgaaaggtttagtgttatcttttatgacattttacttttaatgaatttttttatttttttattttttatactttaaagtagtttttattttatagattttagatagtaatcaatcggacaattgaaatggcaactaaattttatataacataccaacataaattataattttaaaaaaaaaaaataatatatgaaataatttctcatatggcataccaacatgtccaacaccaacaagatgtgatgagagaagtcacgtgctcatcatccgaaagatgagtggtacccacttgcacgtgcgtggtgatcccccaccagtcacataaacaaatagtgaagagcttttcaaaggcaatcgcatgtgggtgacgataagaaacacaactcacagtagaagatgtgtaaaagctatgggaccctaaaaggacgaattctcttaaattttcaatagatttctgggcctacaaggattccataggattcttacaagaaaaatgttgtgaattgtgattccaatcatgtgatccacccattcacataaattataaacttatcttatatatataaatttcaattattatttggtttgttacatgtgagtattgctagtgttcagtgtcattttcatactcccactatatgaataacatgatttaatctttttttcgtttttctaaatttgagaagcttagctaagtatagaacaaaat

SEQ ID NO: 177302 - DNA, 697 bp, Cannabis indica
agatttgattaaatctatatactactccaataaatacaagctaggtatataacacttgtattttttttgtttttaattgtatccctgaatttatgtagttgaaaacaaaattgaattaaagttttctaattaaaatatcactttttttttttcaaattcagagatataattacaaccaccgattctttttaagaacatttatttttttcttaactatatcattactttaactaataactattaacaccaattgacggattacttttaataaccaaaagaaaaatgtggaattcaaatatttaaaaaataaaaactaaaatgcctcaccaaaatattttatgtatttatttaagtaacatttgataatatttttatttttaaaattttgattttaaaaaacaaaaatgcattctataactacttttgtttttcaattttaaaagcagaaaataaaaatatattctgtaaattttatttttattttcatttgctgattttatttaaattgggtttgggtttagggtgtggattcgagttccaaggtctaagttggagccgaagtccaaaatattgtttaaaaaaattatttccaaatatttcaaaagtaatttttttttattttaaaattttaattctcaatttaaaaatcaaaaaatattctataaattagtatatgccaagttaattggtgttagac

SEQ ID NO: 177303 - DNA, 524 bp, Cannabis indica
cagcctaatgataaaaaagaaaataaatgacctgtatcgacaaatatcttcatattcatcaactctcgaacacggggatcgtgaaaaatgagaatgccttccaaaattatcacgtctgaaggatttacctgcagagcatattgttgaattcagggtcctcaaattcagaatagtaatagagataagaaacatactgataaatgcatgcatgcacatatttgtgtaatgtaattactgaattactttaattctctttattcttctctatagtatgacaaagaggcataaaaacagaaagcagtacattaaaccgatatgttaagaaaaaaaagttacccttctatgctggttgtttttgtagtcttttaaagtcatattttggaatatctacggcttgcccattcctcaacttttccatagaagctaagagtttttcggtatcaaatgcatctgacaataaaagcaagtttgcatcaaaagacatgaaagagacagtccgcaccagataggagaaatacatcata

SEQ ID NO: 177304 - DNA, 658 bp, Cannabis indica
ttaaactgaaccgaaaaaactgaaaccgactgttatacatatatattaatttcatttaagtttttttctttttttttttgtttttatgtattgtagttactaataatatattattattattttattaatataaagttaaaataataagataattagtttttgaacaattaatttgtatgtttatagttgtaaaatatagaataatgtatttataaaataaattggatcattattttttttaaaaaaaaaaacgttcggtttgggcagtttaaaccgaccaaaccgagtttcaaaatggtcagttttaagataggatctggattagtcggtcggttttcggattgcaccaatccaaaccgaaaaccgaattttggattttatattaaaaaaaaaccgaccgatactcagccctagttcaaacctccttacccacaaaaaattgtatattaaaattatgggatttagattttttagttccaccatttgatctaattcaatcttatgtttcatattcgctcaatcttagataggcggttaggcctctgttagggtaaagaaaaaatgaatttttatactgtatacttaaattttaatttttttcaaaaataatgattttttttcaaaaatactgtataagttctatattgtgtactgtgtt

SEQ ID NO: 177305 - DNA, 851 bp, Cannabis indica
caggaaaccaacagtaccaatcgtagtaactttccattccaattcaaatataaccctactcacaacaaccattacacaacctacactctcttccattgctcttcagatcggttttgccaccaattcagattggttccttctcatcacgagattgatgtaatacgaggcagttacaaaaattgcaccaagatgtacgacactcgatcgattccagacagcctttacaatgcgggattaaagggaaatcgcgactttgttacactgaggtggtccacacctgattgtagagattgtgaagccaaacgcatgggatgtcgattcaaaaacaacgcccaacaacatcattatcatcatcatcatgacaacgttgaatgttttcatattccaatacattggacaagtaagtaattatatattattaattcatccaatatctcctcctttttagtaatattatattttgttaattttgaccattattttttatttattttataggtacagaaattgctttgcgagttatgagaagtactaaatgtgagtaattacattatatctattttatttcctatagatatatgatcaaactcataattattattttggataatgctgtaagcagaagaattaaaaacgactttatttaaagtcatgtttttaatatatgctattgtttctttttatattcatatttaatattactttcttatttattttttatatataattatttgtgaaaaatatatcattcttctccccaccttctttcttcttctctctctaaaattacttaaagtcgaagtcaaagaacaatgcacaaaagacttttgtacctctctctgctctctgat

SEQ ID NO: 177306 - DNA, 506 bp, Cannabis indica
ggtcagaatgcaatcatcagttgttaattctcattgcttttggtaaaaattacacctttaatacttctttgttacttttgttgtgctattttgagtgacggtggctttataatgagcagatgagatttcagttagcattgttaaaattcatgacttctggtaggctgacagtggtagcttcttaggaatacttgtacacattaattttgattttgctctgtttttgactccatatctaagatttctccttggtagtgagaatgttccttcaagtgttagttattcttaattttgtaatatttgaactggaacaaatgcaacatatattataaccttattattattgtttccaatatgtttttactaacatttgtagtttaatttaaactccattatactggacataaaagttaaatttaaatttattattcaaatctctctaaattaaatattatttatttttgattcatttatttccttccgaactcataatataatacttaata

SEQ ID NO: 177307 - DNA, 713 bp, Cannabis indica
gggctcactcacgcctccatcttcatatcatgtatctaacattttatttattatttgttttttcttttattccatataaactaataatttaatagtttttttgaaatatatttaatattaataatattagtacgtcaacctaaaaaacatattaataatattaaaaaaatttacaatacagtcttttttagtctatttttgtttgtatgatttaattcatataaacgtgtgaatacgttttttatattataaattattggcaaaatttcaaaattttaaaagtcttaaatgaatataagtaatatgaatttgtgtccctctccctttgtaattttcctttttttcacgcgagaagaagcgaatatttatatggaatggaattgacaatgtgggtgggccacatgtgtccttaattgatttctgatatgggccccttttttcttctttggaatctcaagtaaatgtgcccccatgcctatgcttaatatgtcttttttagggtgaaattttaactttttttactttttttttgctgtgggataatttttttaaaaaaaaaatactgtgtaagttatatactgtgtactgtgttaagtttttactgttatttcacagttgtattgtaattgttttttgtaaaaatatgtgtttcacagtaaaattgtaaattttggttcaaaattcaatatttctgtaaaatctttttttttata

SEQ ID NO: 177308 - DNA, 1089 bp, Cannabis indica
gatgaggagaaatgaagtccaagatacttctttgttttcacaatttggttttgtccatagaacctttctagttggcatttcccgcctctcggaattgatcatttttgtaactaataggagggggacgttgacatcacgaaatgttttcttgccctacctcggccttgccttgtttatgtagttatcggtgtatagttgattagtggaccaatttcttttttccctggctcagatttttggaatgcccccaccttatgatttaaaatcaatgaattgggagagaaatgggaatgaatcgatgctttaaaggcttactcgacaaagcaatataggattctaagataccatattaggttttaccaggagatcagtaacaaatcaggtgtaacttgtaagagcttttccttaaccatattgtgagaactgaggaagttgatcaatttaagtttactcaagaaaggccaaagaagaaaaatttgtggtggctgataataaaatatgattctaagatttattctaaggggttaatttaattacattgacatctgtcaatgccagtggtaattaaaatctgtattccaaaaatttattgtatcatcacgactttttcttacaaaagttctccaattaactcagttacataatctactcagtttcttgttacaccatccagttcattattaaagaacaaaataaggtactcacttgagaattattgtggagaaaaacttataaggtaattttgatgtagttatttttttatttacctcgcaagacaaactcgtacaatacaaacattagtaaaattaaactataagaaaccaaattagaataaatttcaataatttcaatattaactaaaacagtctctgtcaacgacaccaaaaatttaacaaaaaattcaacacgcaaatatacgtaacatttctatgtaataaactcacctgagtgagattgattccacaaagattgtagctaagtagcaaataattgaatctttgtttctatttgacaaattaataatttgaatgacgattgtaattggttaataaaaagaaagtaaaaaacaaacaggcaattaacaatgat

SEQ ID NO: 177309 - DNA, 506 bp, Cannabis indica
gattagtcttctctatgtgacatagttttgagttattttagtcttgtctctatgacatagttttgagtatttttagatttttctgtgtgacataagtttttttttattgttggttcttctttgttctttaatgactgaccatcaaattgctagtggtaaatgggaataataaattctctgcaattaaaaaggttgttaatagtgcagttacatacattcacaatagccgagtgctcaagctacgagatagaatgaacttgctacaacaatttctattgttgtgcctcttaaacggtagatgaaactgaatatatgtattcttaagattaactgtgatgataataactattttctttaattttatttttagtttgttttttaatcaaacaatctaaaaattaagcgactgattatttaactcatttttttaattataatcttggtcgtatttttaaccgagaaaatatctcaattaaattgcaaactattattttaattgattgcta

SEQ ID NO: 177310 - DNA, 523 bp, Cannabis indica
aagttaaaggaaggtgaaaatgacgtgaagtcagcctccacttatgccctaaggcacatatttcttacaaaaggtcgttgtcatttatttcaatatcagatttagttatgagcataaataaattaaacttggccttaagttagggactctctgaaaattctctttttaaaaatacatatgttttattaattttaaaaatattatatttttttctagataagtaacgagattttgttatggctcaataaagatcaacaaacataaaatcaataattatataatatgtaagaaaatttatataatttaagtgtgcattgtttatttaattaaaagtgatgatatgtagacaataaaaaattattaatacacacttaagtagctattttttttaattaattgtatttatttgagatgagttctactaattaagaatagggaattactttaaatattatttttaatttacatttgagttgttccgctagttgttctattaatttttatatagattgatatgtgtatt

SEQ ID NO: 177311 - DNA, 623 bp, Cannabis indica
atttagaatattattaattaaataatagttacttaaattaattcgaagaaaaacaataagacaataaaattatatattatttttaaattactagaaaatttatataaatattttaaaaaattgatatttatattaaattagtgattaaattagtgtttaagataaacaattttatattattcaagtatttttatactactattttaattatttattaaataaaaaatatgataaaatattttattatatatttatgatatatacttaattatatagaatatattattttattttattatataatttatttatttttatatttttgatgcgaattattcattttttatttatttattattatatatttaattttaatttattattatatatttttattttaatttaagttttttttttaaaaaaaaaaaagtaaaataaataaaatagtccagtctattcttaaaccaaacacaggattactttcaacataatccaatcttatccagtgcagtccaatccttttcagtccaatccaatccaatcctgcgtaccaacgagtcctaaaagtattatatattgatattctttaattatatcaaaacaatataatattaataaaaaaa

SEQ ID NO: 177312 - DNA, 1292 bp, Cannabis indica
cctgtagtcttactatcctgtattacgtgctaagagcgcctatcattttaattttcacttctttatttttattaatctatgtttgatatttttcaattatgttgaaattgtcaaatacttatttggacctatttctctaggcttcagcttgcagtgacattttaacacttgggatactcttgtaggtagcttgcagattgaagtgtgagggtgagtgactagtctctcatgtaagatcatatatagagtaaaaacctattaaaacgtcttagagtacttaatacgaaagaagaacatgattagcttattattttttaattttataataaacactatataatatactggttttctattatagtattgacaaagacaacatattgctactacgtaactgaattatatgtatgcttgcttctttgttatttattatggttacttaatgccgtgatgaaccatctactgttactaaatgctaaagtctatacacggtacatacgcttaagagtttgttttttttttttttatttttgtttttaaatatcaattgttttaaagagcaaattgtaaaattaaaaggaaaataataattgatgtaatgaacattctttagaagaaaaaaaatcaatcctagaattatatatgtttttcttattagaacacagaaggatgcaagcaagagcgttctgagtttcttagagcatctctaatgttaatatttttttaaaatgttaaaaattttcatattatttaaaaatgtaatattttattttatttttctttcatattaatttttacactcttagttttaaaacttgtacattattatttaatatattatttgttttaattataaatattgtcacgttacttatatacttaattttttatttatttattttaaagagatagtatcaatgtcatgtggtgacatcaatacaattttttatgatagcacatatttaactccaataatatattattcttatattttgccaaataagaaatctatataagtatcatctaaaaatttaatcattgaagatgatcttatgagtagcaaaaaaattcatatttactgaggctacttgagattcttaacatcaaaattatatgtatattagagtaacttacgataaaaatacttaaattttcacatttgtagcacttaaatatctcagtcattttttttagaggtttaaaaatatccaagttcaccattttattggcagccgttactactctcaattatttgtcagctcttagttggtccattgaattataatggtgcc

SEQ ID NO: 177313 - DNA, 950 bp, Cannabis indica
atatgtaaaaataaataattttaactttgaaacaaataaattatataacctataaatttaacatatagttttaattattcaaatacattaaaacaaagaattataaaaaaaaatacattttataggaaagaatatttaaatgatttttttataattactttacacttgataaagattgaaaaatacaaaaatataatttgcattcacttgaataaaaaaattataactaattgggtaagaataagttcatcaatcacccacatagaaaataaattaggctaacattgtaacaaataaaactaaaagaatattgatctatttaatatgaaattatatcactcacaatagtttctaaaccatgtaggacttttgtgaaatgactcttacattagtaaaaaacataaaaaactgtagaaaaaaatgaaaaaaataaagatatattcaacaaaattaataatagtaaaataaaaaattctaaaaatatatatattatgtttatttgatagaaaataaaggatatttttttttaatattttaaatatttgacaaagatcaaataatgcaaaaatatgtaaaaataaataatattaattttggaacaaaaaaaatatataaaatctataaatttaacattcagtctcataaacatatataaaaatatatatttaaagagtcttattactctaataaaatattatttattaataaattaatatagttttaattatatatatataaattaaactaaataattatataaataagtaacttttatatgaaaaaataattaaatgattttattaataattattttaaactcggcaaagattgaaaaatgcaaaaatgtatgttgcatttacttttaaaaaaattgcagctaattgagcaaaattaagtttattaattactcacataaaaaattaataatattaattttggaacaaactaaa

SEQ ID NO: 177314 - DNA, 759 bp, Cannabis indica
gaaacacacaaggaatctgatctctactaagtattgtgactcaagtagtggaccctcttcagatgaataagtaatggacttatgtggcttgccaactaagtggcaagccaaatgggatgatgttagctatgatgtcaatgtacacaccagatctatgcattgaattttatttattttttgttgaaactgaaatgctctggtgattttctggttacatatatattggcttgactcgaaaacattcacattacatttggtacttgaatttgatgttgatcttcttagtattttttctctgtttgtgttctagacttcgagtatatatactgagtttttagcaaggttgcatatcatattcgttgttcgatgctcagttagcggaagaaaggggatagctagaaaatttgtccttgtagctaagtaaatttgttggcttattttggatataacatctatttttttttttgtaacatataatatatttcttgtaatatatattgttgtaaaataaatttagacaacactaaatttatgcgattattcaaaggtgatttgaatatccgacaataaacatggaagtactcatagcgagtgttcaaagagttgtacaaaatatattttattatatattttttaaaattatatatagtggttttagtagcctagtctacttttgtaaaagaaataactcttttgctctatatattctattttggttaaccctaatctcctttgaatggaggtgacttcatctactta

SEQ ID NO: 177315 - DNA, 552 bp, Cannabis indica
tttttttttgtaacatataatatatttcttgtaatatatattgttgtaaaataaatttagacaacactaaatttatgcgattattcaaaggtgatttgaatatccgacaataaacatggaagtactcatagcgagtgttcaaagagttgtacaaaatatattttattatatattttttaaaatatatatagtggtttagtagcctagtctactgttgaaagaatactctttgctctatatattctattttggttaacccatctcctttgaatggaggtgacttcatctacttataggttgtagatggtggctacaaattgtggttattatgatagacctttacaaaattataagtggcttattaattacattgattacaatagttacaaaataaatgtaatctttcgtttgaatgacactgaaatatgcttaaccgtttatatcacgattttgactagttatgcgatacccgttttttctttagcgaaacatctctcgcgtgagaggaaaaatttattccaataacatgtatatattttaaaaatatataat

SEQ ID NO: 177316 - DNA, 706 bp, Cannabis indica
tcacaatacatgcctaatctagtaggcgttacacaagtaatctccaatcccacttccttttctctattccctctctctctctgaattcttgttgaaataaatgaggaatggtgtacgttgttggtatccgagtagttttgattgatttttataactgagtagttaaattagttacaacttaataattgaaataactaattatgaggcttgttatttataggaactaattctacatactggaataaaaatgttccaataaatacataaatgaaaaagctcaatcttatgttcaaaattatttaatattatttttatcaagaaaataattataaaattatatgtttattagaaaaaatctttatactttatttagtctgcagcacaccaaacatagtaatcagtctaatccaattgaattatagtaaatagttgaattcaatccaatcttatatatcaagcggggccaagaggactatactcttcaatactcgcactatcactaaacaatcatactctagaatcatcattgggtgacacatttctgatccaactcaacccttccttcacactaaaagcagcaaccaaatttgaatttatagagaaaagccatcaatcagctcacaaaaatggtcctgaatgaaaaagtcaacctgagcactcacatctcatgagctaaaatagttcaaaaagtaaatatatatatata

SEQ ID NO: 177317 - DNA, 810 bp, Cannabis indica
atcctgccagtagtcatatgcttgtctcaaagattaagccatgcatgtgtaagtatgaactaattcagactgtgaaactgcgaatggctcattaaatcagttatagtttgtttgatggtatctgctactcggataaccgtagtaattctagagctaatacgtgcaacaaaacccgccgtacttcgtagggaaaggtagtcgacttaatttttaagttaagtaaaaaggttaaaacgggtaccggaccggggccgggtccttcgtcccggttcccggttcgtccttcgtagtagtagttacttactagtagtaaacttaaccgtaccgggaacggtacgtccgaccggacccggttcccgtttcggtccgggcccgggaccggaccgactactacttacttaaactttaaacttttcgtcccgtacccttactaacctttaaccgtttacgtaggttaggggtaaggtaagttagggtccggtacccttaacttaggttgggttggtacgggtacgggtacggacggaagtactaggggtttcgattccggagagggagcctgagaaacggctaccacatccaaggaaggcagcaggcgcgcaaattacccaatcctgacacggggaagtagtgacaataaataacaataccgggctctacgagtctggtaattggaatgagtacaatctaaatcccttaacaaggatccattggagggcaagtctggtgtcagcagccgcggtaattcaacctccaatagcgtatatttaagttgttgcagttaaaaagctcgtagttggaccttgggtt

SEQ ID NO: 177318 - DNA, 634 bp, Cannabis indica
agatgttaaagcaattgctcgtggtacaccaggatttaatggggctggtcagtttgattttactatatgaataatgctcctttcatgcaacgaatattcctctattattctttttaaagaattgattggatttgctgacatgtttttctacctccttttattcactacaagatcttgcaaacttagtaaacattgctgccattaaagcggctgttgaaggtgctgacaagctgactgcttcacagttggagtttgcaaaggacaggataataatgggtacagagcggaaaacaatgtttttatctgaagagggaaagaaggtatgggtattctttatgaagcaatctagaatggagtatgaacaattggatcagttaatttaaatttgctatctactattttacaagaaacaaaacatttttaaatgtataaaggaaaattacttgaaagaggatcattttatcgaaagcaaaaaaaaaaaaaaaaaactacaaattaaagcaaacctgagcataaatgaactagagcaatacttaactgtcttttcccagccatgagtatttaaggtagtcactgaaaaatccttaattccttagtgtaagactagaaacttaagtcattttatttgtgtggc

SEQ ID NO: 177319 - DNA, 650 bp, Cannabis indica
tttttttttttttcagataataaactgttatatataacaattatacaaaaaaaaaaaaaagaaaaagaaaactagttatatataacaactaaagttgtgatataacagtacgtaattgagggagagtatcattcatccgaaaacaatttgtgtacgtagattgtctctactaaaagagtatactgctaatttataaatattaacattatgcatttgaaagttatttattttattttttttttaaaaaataaagtgatagattaatcggaaaattagacctcacggtcattacaaatgatagtctttggtatcgaggaaacctccacgaaacctgaaatgttttggggcagcgcccatttagccacattatgggcagcaaagttacaacatctaaaaataaaagaaaaattacaagataaaaaacacttagagagttgattacaaacagagacataattatcaatattccaaaaatatgtttattaattattatatgtatagtgatatcatcaatttaattatatatacatttatgggacaatatatgtttttttacgagacaaaatattagccttatagtattttcttttaagtccttatagtctctttttggttctatccagattaggaaattgatgatgtgtagtaag

SEQ ID NO: 177320 - DNA, 601 bp, Cannabis indica
catttacccacttattttgttgaccatgaatgagtgggtaagagagaaagaaagaaaatggatagtgtagagagaaagagaaaaggaagaaaagatgaatttttgttatgtgatgggtaatttaggatcaacgaaacatgaacactaatttaaaatgcgttcagctttgggtttaatttttttttttttgccaaatataatcatgaaaaataatttccatacaaaagatatgaaaggcatacacaattttacttttgttttggaaaaaaaaaaaaaaagataatgattaattgtgtttgtgcgtgaggtgaaaagataggttggatctgaaatcattggtatcaatgcacatgcttttttatgttgtgagtgcaaaaccattcaattatcttcgtcactatgattaatttgattactcatgaccgaataatgcaacaagatattgagtggacattttttattttaatttaactttttttatatataaatatgctttttatgtcacataagacatatgcttcacctgaataagacaaattacaaaatcctattttatataaaagaaataaataataataataattaaaacaacatctaggct

SEQ ID NO: 177321 - DNA, 714 bp, Cannabis indica
cacgacttgatttttatctcttctactttcttttcttgattatatattgtatgtttatgcagatagagacgaaatttttgaaaaagagaagacaaagatgatagatatgatgatagaagaggtttatatagaagcttataatcaccaaaaagttatttaagagaaattattggtgagaattgatctgatttttattgaagagaagttgcataaaaattatttcctccatttaatattttctcaattattttatactgaaaatgtataatatcaaaattaatgcacacttccattcaataaaaaaaattaatacccgcaacaataaaaacaattagtctttatgtttaagaattttttgagtgagagttctttactttgtcaaaagatgttgagttagatgaaaattcttgaaatagcatattcaattatttgaaattttcttatagagattatataaatgttcttaagaacaagacaaattattctagtcatgatgataatgatacaaaaatagttattagcttttaaaaataacttttagtgttattttatcataattttttttagtgttagttggttgagttgcatcatattatctataataattatttattttcaattgttatacaagtctttaattgtttttttaatttttattttcaaaacaataataattaaagttggaactaaaagatgatattttcttaagttaaa

SEQ ID NO: 177322 - DNA, 1137 bp, Cannabis indica
agtattttatatttgaacacttattttagttgttttaatgtgacaatataagtatttttatttgagcacttaatttagtagttgtattaaatttgaatgcttttattattttgattattgtaatttttattagtttttttatgtatattttaaatataaatataaattaattataaattacaaaattatttttttaaaaaaaaaataaagaacaatggtcgcgacccttgtggtgccaactgctatggctgacaactttcagcatttcaagtgggcactacacctgtcgtgccatttgttctggcagttggcacgatatcatttgtggtgccggttgtcacattttggcacgaacctattggcccgatcaaaagagcacgacacgtcgtgccaatataatggtgggcactaaaaaataactttgttcacactaatattttagtcgtaccaataccctttttttttcttgtattgttaattttcaatgatattgattattatttgaaaagaaaacataatattaccgtgataatcatctattctattgtctaaattttgaaacaaaattaataacagtgaatggaaattcaacacaaatgatagaaagttgttcattgtggaaatatgagccaatcatcgaaatatttttcttcttaaaaattaagaaattagtaaaagtgttgaaatattctttatttcattatactgtataacggtttttgcattattttctccaaatctttactttccgatttagtttagcgtattaatctgattgaattcgtattactttgtttatttgatttgcaagtatttcatattttagattcaatccaatccgcataccaactgaaatctaatttaatatgtgcaaattagatcggttatttacagtaacggacctaaaactaaagttgattaaaagtaaagatgtttttactaggatttgaacccttaacttttgtataagataaattaaccatcatactaaaattaatattatatttatatttatcacatttaattataaacatatgttataactaataactaaaataatttatactttttttttatttttttttttctaagggtgactgccccgcccccctccccctctcgcttctatgtgggtcc

SEQ ID NO: 177323 - DNA, 659 bp, Cannabis indica
tatatatatatttttaaatgaatcaattttcttaataaataattttgttatttacttcaaatatattagttaatgaaattaaatattctgcataaataattttcaattaccattaacgttctcataatttaaaatattaaaattattagtgaaagaaaaaaaaataaagaaagaaatcacttactcagttttccttggtttcttactggaggaaggatgttccttgacctccaatcaaactctacatggtcttcccttccaataataaccatctttttctctttgaaacacctaagatttatttaataaaacaaaataaattgactgaagttaatatataatttatataaataccaaaaaaacaaaactaatataaaaaataaaacaaagaaacaatatatatatacacaaaatcctgcaaattgttcttacagttttgaagaaaacctctagcagcagttcaccaaccagtctaagtcccgtagccgacgaacaagatctgaagcccgtcgcctccaatccaaccttcgcccaacctgatcaaagaactatatatataattatagattttgaattagagctttttattttcaaatcaattaaaaataaactatatatatggaagaagtatcttggtacgaaaaagaaaaagaaagaat

SEQ ID NO: 177324 - DNA, 1239 bp, Cannabis indica
aaataatattttattatttaaaaagaaaataataatataaatatatttttataaatacatgaattgagcaaaaaaaaaaaaataataataaaaatatattttttaaattaatatgcacttataataaatttaaatttaaattgtaatattaaaaaaaaaacacaatttatattatacaaccatatttatatataacatattataaattaagataattttgttataaatctagatcgatcacaataatgatctaatcaataataataataaggactaggtggttgttgtgttgtacctaattattgtatatatttatataatttaattaatattgagtattatatatagatatagacattttagctgtgtaatagcccctactattataatgaatccatatacttctattttaatgtacagtagcttagctcctagctattaattttttgttttttgttttttttttttttgttaagtaactaactatttttgtttttttaattatttaaatattttatgtgtatatatactatataataatagaaaatatagttaatatgcgtgatttgaccaagtctagtatttcgtattaattactgcggtcagtctgtaaagcattcattattatgatcatcatcaacggctttcatgtgttttaagactattgttactggacactaaatagtatctaatattttgttataaatggtcattcacgttagtaatattaataatactaatagcagtataataacaaaacgttactaaagcaccaataatttttctaataattttcttctttttaattacttacgtggcatatgccactttctagccgttgtcagcaatttcttatataaatattacaatttttttttttgtaaattttgtgttaaatttagttaaaaaataaaattatatatatttgaaataaattttataattatgctcaaatatactttaattaatataatatttttaaaaaaattgtaaaaaatctataaaaatattaaattttattcaaagtatataaacaccctattaaatatgtaaataaaaaaaataaaaaatgatatttattgatttattttaatgtaaaatttgacgcatattgttaggctatttttagcctatattttggatcaagtttatgtgcgttttttactgtgttaggacggaattacgcttgttttctatgttttcaggttctttagaataatagaggtctcgggatgcaaa

SEQ ID NO: 177325 - DNA, 595 bp, Cannabis indica
gtctatactctttctggctttattctctacacagtcgctccatatgttatcaaggtccgtttcttcgtaagaatatataagaaactagctttacaattaaaaattaaaaataaaaagaaaagaagaattgttatgtaaaaaaattaaaaattaaaaactgaaataaaattaaaaattaaaaattaaaaactgaaataaaattaaaaataaaaagaaaagaagaaaaaaagagagtgaaatgatggattgattgatagaagtcaatcctagacccctgacgtgtaagcaacaagtgtgatgcatgaaaatgtgtgtgcaaagtggtaaaagtgtaataaaataaacttgatgagtaaaaaagtaacaataaccgtgtgagggtatttcagtaataaagaatgcattttgtatttatggtgtaaaaatttcaaaaaaatataacgagggtggttacaataaaaatgtaaccattgaaaccttctatatatattatataaataataatgttctatctcttggtaatcctttgtctatgatttctctttttaactctacatatcaatatggatgggtggggttgggaaattagggatat

SEQ ID NO: 177326 - DNA, 576 bp, Cannabis indica
attagtgtgaattgaattcattttgagcaaaataatagagattgaatacactactacatagcatttttcactaatatctattttatatataaaatgtggctatataacagaattcttgatttatgagaaattattgagtgacttttttttaaaataaaaaataataataacaaattattagatgttgccacgtaaaggttcagcatcatgtagttagttaaacctaaatatattaatccacctaaagtgttgcaattaataataaatttgttcatattgtttatttttttattaaaaattattgtcaaatttttgatatttagaattagttaaattttaaatattattttaaccagatagcatttttattaattccgaagataaatttaggacgaataataattttttttaattactattacaaaataagggtaaataccattttggaccatctgttttacaaaagttaccaattggaccctgtatttgttaaatgacaaaatggaccctgtattttcaaaaatagtacaaataggaccctgaattgcttttttgtctaaaataaagtttaattat

SEQ ID NO: 177327 - DNA, 897 bp, Cannabis indica
gtcaagaaatgacacattatgcattctaaaactatcacgtaccaaaaagactacaataaaacgtgagaattaaagaattttcaaagcatagaaaagcttcaaagcaataatgttaaatccaagtaaacaagaagagaacgggatttgaaagcttacccactagtagaaaccttcgagaaagatggtggaaagctttgatcatcaaaataatgaaaaaatcatgagtgttggaggataatggggcgtcaacctcaagggaaagtgaagagctttctttacttgctttttgaagagagataatgagaaatggggaaataagaagtgagttactcccataagtttatatagcttctgtgggaccctctctcacttgcccttgcaacatgcaacaaatgacatgcagaaatgtaatatcaattttttgccaaggaatgtgatcagacaagcaagagcaaatattttgaaagctaaatatactacaagatctgcctggttaaggctacatcagtcaaaacgtagttggaaagtctctatcagtaaaggcatctacacagggacttgtggggtaaattttatccccatttttgctcacatgacgtggcatatccacgtggccaatatccatgccacgcagagtacaacttgtcaacaagaaggccaagtcatctacacaacacttcaattgataggaagtctgagtacctaagagggatgaaaagacgatgaactgactaccctgaggagtctaccaagccaccctggccggccctatgaccagcataggtcgatcagcctctagctattgtaaggcgtcggccagtttgcaccgtggaaggtacatggccagccagcctgcacctggaggcacttggtgcgcagcttcatctgagacagcag

SEQ ID NO: 177328 - DNA, 514 bp, Cannabis indica
tagcaaagtcagtgatgcgtttaaaatgaaagattggggcaaagctaaaaatatttttgggatagacataaagagacctaaacctggtgtgataataatttctcaagcatcatactttactaaaagtactggatcaatttggcatgatcaaatgcaaaccagttgcgactcctcttgctctaacattttaagctgttagcaactcaatcactaagcgaagatccagatagagccaagatgagcaaagtttcctatgctagttgtgttgggagtgttatgtgctccatggtatgttttaagaacatgatatagctcatgctatgactgtggtaaacatgtacattttagaccttgattctgaacactaggaaatactaaaatggacaatgaggtacctaaagggaaccttaaataatggtatcgtgttcagtaaggagaaccagttcaaggaagaaagtaattggttacctggattcagattttgctgcaaattagataccagaagaagcctaac

SEQ ID NO: 177329 - DNA, 970 bp, Cannabis indica
tttactttccaatgtgttgacaacacaataaacaggatcaagtatgtgaaaagggtttcagatgaattcatacattatgtacatataatcatgaaataaatcatgtgaaccatgcaacattaaatgttatttctgatctatattaataagtaaatttgattatattgaaatgagttttatttagggcataaaacccaacaggaaatggagaagaaatatgtgagaagaaataggtgggcatgtgggaaatagaaaaaaaagtaggtgggcacgtgagaaatgtggcgagaagtaggtgatgattttttaatggacccttataggcgaaggtttaaaaccgtcgcctataagggtccattaaaaaattacattttattaaaaaacgtcgcctattttgtttactacgattttaaaccatcgggaatactaaatttttcccgacagttttatatagttaatttttttagcaacggtcactgaaaaaaatcgtttttaggaccgtcgtgaattctgatatttgtagtagtgcaaccctctcttctaagataaaaccattctcatatactaaatcaacaactactcatcaacatcactacttcaattaccataacaaccattaagcacttattcttcatatttacctattcaaatctaaactaatacaaatttattcttaaaccagcagtggtattgttagaaataatagagagattacaatggaagaataaaataagatgaataaaagactaagacaattacaattctaaacaaaatattacaaggacaatatattaaataaagagttacaatcccaaaagcacaaaaatatacaaataaaagaaaaaaagttaacaaactcaaaaaactcaaaagatataagtaaaatgtaaaactatataaaaagcatatatatataatagtgtatatatatatgatatagaatatatatataatagagtatatatatata

SEQ ID NO: 177330 - DNA, 689 bp, Cannabis indica
atgttaatttaggtaaacaacgtgccttaaaataaggtaaacaatatttcattagataaacaacatgtgttaatttaggtaaacaacgtgccttaaaataaggtaaacaatgttccttaaaataaggtaaacaacgtgccttaaaataagataaacaacgtgccttatttagatttaggtgtttacctaaaaagtcatccaatattaggtaaacaaattgccttaaaataaggtgaaaaaagcatgttttttttaggtaaacaacatgcgttaatttaggtaaataacgtatctaaaatgaaataaacaacatgcctaaaataaggtaaacaatataccttaaataacttaaactatgattactaccctaaaacatatattatattgttatttgtctaatttttataaatgattacatacatagttgatgacaatgttgttttaataaagtaaaagaaagacatgaaacaattgttgaaatataggcatttctctaaacattgcacatgaaaaaaatttatgttcttagaattctgaaaccatatagtataaaaatgtcaatattagctcctacaaagtaagcatcataatatatttatatcatcaaaaacataaatgagaaccaaatgtgtaaaaattaaaatgaaaaggtatgtctacagtcttaaaaagtgtggtcaaatatttga

SEQ ID NO: 177331 - DNA, 556 bp, Cannabis indica
gtataacattgtcttaccatgtcctaaattaaggtttgtattcttatgctttgctaatttataattatatatttctatgatggatgcagctagttcagcttcttctcaagtcttcacaagacaaacgatttgtatgtgaggcagctgagaaagctttggtttcaatgactacttgggtttccccaatattattgttaccgaagctccaaccgtgtctcaagcacagaaatcctagaattcgagcaaaggcatctatgtgcttttgtagaagtgttccacgattggtaaggaaaagacactaaatacattcatttactcagctctttaactggtgatctttattattattttcacctgtttccaactcaatgtttactgggattctcttacgcagtttatatatggtttctatgtacttgtgcaattcttgtattatcagttgcttttgtgaactaatgtttttgcataccaatagtactagagattagtctaataccatatataggcatatctgcgatctgtgttcttctaaaaatttctttaagcggtagcatat

SEQ ID NO: 177332 - DNA, 629 bp, Cannabis indica
atagagattggtttcacatgttgtgaataccctttactgttttcatgagatcttttgattaaaagatgctcagataattgtatttgattgtacatgattgtggaatatcaataaacttgctgatttatcaaaaaaaaaattatgtaaggattccgaatatgaaaatcctcaccatcaaacaagctctaaaatgttatttgtttagtagtttgattttgtggaaccaaagttgcctcttatttaaatattatctatgtaattaagtcatcattgatgcctcgcagagttttttttttttttttttctaaatactttgatataatagtagagtgatactcaaaattctagaaaagaaattgtttaaagtaaccaaatcaaaaaaagaaaaaaagaagaattaaaataagtcacatatttttacacaaatgctaaagaaaattattcattcttaacagtaagatgatatatagtttaagcataagtatatttgttgaaatatacagccccaactaaaaaataaaaagacataacaagagatacatgagatatgttaccaagagtaaatctataaatctcttttagtagcctttattaatggtcccaaaatagctctaaattggatttgcaac

SEQ ID NO: 177333 - DNA, 584 bp, Cannabis indica
aattaagagggaaggcaggaaaaaaataaaaagtttgtatagaaagaatgggacaaaatctatttgagttgaaatccattatggtatctgctgtaacaatcaaagcaatctaacaatgtgggtaaaatttaagaactaaacaatggtataataattataaaatggagttggagaaaagatctcacaacagtctgttgtggtaattgagcacaaccaattaccaagacaaatgcaatgaaaaactttgtgtcaattgaggttatcgcacatgtagtcagtgtcacttcgattctttctcttatgtccaagctacccatctacataatcaataaaaaatctttaaaaaaaaattattaaacttaccaacttttaccatcaacaataaaaatagcaaacatgtaaactatataagtattatgaaacacatatcagatctataaatgaaaaatgatataatatcactattcttcaatctctgcactataagtactaatcattatgtaacttatatagtttatgtaagagcccaatatagatgatgatataaagaggacaaaaactataaatacataatagatgaaagt

SEQ ID NO: 177334 - DNA, 714 bp, Cannabis indica
tttttgattttaactcagttctcatcgactttgaccagctgaatatcaatgtaattcagttcaaaatagatatttttaagaaaattatgaaaactgcaccttgcaggaatgaataatttcagcacaaacaactgacatgaaaatcttagttttttttttcaaagggcttcaaaggagtttaaggatctccaacaagatttagaatccttaaactaatctttacaagaggagaaggaaaagaaaattttgaaaagaaatgaatgttttgaaaaattaccttaattggaagaacaattgaagaattgtggaaagcaaagttttcaaactccaaattgtttgctttagccatgtggaacagatgaggaaagagaatggaggagctctctatttaaaacaattgatctcctgtttttctaatccaacatggagctgatttataattaatttttttttttaaaaaaagtacaaattgcacccttgaacttaacccgggggcctagggttttcacacagtgcccaagttgacgtcctaaatagggttttagatttcgagtgcatattagtaaaagtgactcgaactttgtacttctacatgaataattactatcacaaaaatattttaggcattgaaattagaatcggaacactttcaattttgagcacccgaggcaccaggttcataggacacccaacgcctaggttgacgtattgtca

SEQ ID NO: 177335 - DNA, 791 bp, Cannabis indica
actatgaaatgtggaatgacaatgtaaaaaacatgcatttctctctagcaatttaagtaccaatatgacaatctttgaatgtgtacatttcattttcatttcattttactcttaactccaagaaagttgaggatgttacaattgtttcatagaaagccttttagttactcatttataatttttttttacacactacctaattcttttttataaaaacaaataattttttacaaaatttcgtgaaagccttagcaccatgtacagtattgttgtgaaaacaacttaaaaacaactatttatatttttgtaaaaaaactaaaattcaaatttataaaagtgttcaaaaagaaaaaaaaaaagagtagattcatattttttaagatttttccatttataatacataacacttattcggacccattcccttaggaccatataagctattatgttgatatgatgatcaattggtgtctcaaatagttccctttttcattggaaattcttaataaaattgtcaatttttggggttttttttttacgaaatattgaattttggtcaaaaatttataattttactggcatataattttttttacaaaaataatatttttttttataatacaatcttaaaacaataaaagaaaacaattaatagcaacagtagaacaactaaaaaacaaatgttgaacaacagtgaaaacttaatacagtatacagtataaaacttacacagtatttttgaaaaaaattctaccctacaataaaaaagaaaaaaaaattaaaaattttag

SEQ ID NO: 177336 - DNA, 682 bp, Cannabis indica
ctatattctccagactttgatatctaccaaatcatgcccttcgaactttgacatgtactaaattatgtctcctgaactttcatccatgttagacttttttactaaaattagaaaaaatccttaaatccaacaatctcaatagttcaggggcattttcaatgaccttaaaagttcagggggcatgatttggtacatgtcaaagttcagggggcaaaaatcctaattagcatgttatgtatttttttattttttaagttatattttgtaattttttttatttaaaaatttgtttaatggctcctcttaaattttatttttgcatattaatccctaatcacaatatttttctgcctttgcccctaattatgcaggcatctcaaaaaggcgtgattggaatatcattggtggcgccctggtatgagccgtattctaacgcaaagcacaacctaaatgctgcaaaacgagcccttgatttcgtttttggatggtacattattactactatttcatactatgattatatatatatatataggtctttggttggttggtaagttttaaaagtttattttaggtttatgtaaagtttaaaaatatttgtattgctgttgtgtaaataatgtaatttctaacttttaattactaaaaagtattcttttggtaatagtaaaccaagttttaa

SEQ ID NO: 177337 - DNA, 566 bp, Cannabis indica
gctcactaatgtcccgcttcgaaataatcctaccaaccaaagaacttcctccaaatgacgccactgcatcagaattttcctcccattcctcctcctgagcaactcccagcttactagtcatagctacaatgtcatcaacatcggctaccgcatcccccatcatcattaaactaatcaacagccacaaatgaaccatgaatcccaggtcaaaaaccagtaacaaagtagtccctcatacaataatttattattttaagattaatcaattgtatttttagagtgagaaaatatcacttttggtaattaatgagattattagatgaaaactcaataaaattgaaaaattaaaggatgaaagattaaatacaaaaaactgccacattattaggtggttatttataagttatttcattattatttattagtaataataatagataatatgtgttattaatgtaaatattttatatagatttttaacttaaaaaataaatgaaaaaataaaaaacaaatgacaaatttgagaaaattaaaaataaggtagataaaactcatatagggtgcca

SEQ ID NO: 177338 - DNA, 512 bp, Cannabis indica
aggatctttggtttcaagatgagcactagcaagactcttgatgaaaacctagatgaatttctaaggttacatattgaattggctaattctggtgaaaatgaggctttaagtgatgagaaccaagccatcatcatcttaaactcattacccgaatcctacaaagaagtgaagaatgccattaaatatggtaggacagaaattactttagaagaagtaatttcagccttgaagtcaaaagacttggagatcaagaatgagaagcatggaggttctaatggagaagtaaacttcagtagagggagacccaatcaaagaaaacatggacactacaaaagtaaaagtcacagcagagatcaccacaaaggaaagagtcacaacaagggaagatcaaactcaaaagaaccaactgatcctacgggatgctacaactgtggcaagccagggcatttcaagagagattgttattttctaaacaaaggcaaaccaaataaatataaaggacagggagaaaa

SEQ ID NO: 177339 - DNA, 627 bp, Cannabis indica
gaagaattggcggcattatctctacggagagagatgtgaaatttatactgaccataagagcctcaaatattttttttacttagaaagacttgaatctgagatagaggcgttggttagagttggttaaggattacgactgtgaaatcctttaccatcctgggaaccccaatgtagtggatgatgccctgagcaggaagggtcccgggcaggtaactagtatgatttagatttcacctcggttagcagaggacatggtcagatcaagcatcgagtttgttgtgggcaaagttcataacttgacagtgcagtttgatctgttggaacgaattaaagctgcttagttagtttatccacaattagtaaacatcaaagaagagattttaactggtcaggtcagagactttacagtgtcaaatagtgggatgttgtaattcaagaccatagtttatgttccaaatagtgcgaaacttagaaatgaaattcttgaagaggctcataccactccatactccttgcatcttggcaccactaaaatgtatcaggatcttaaaccctactttggttgagcgaaatgaagagaatgtggtagaattcgtttcgcgatgcctaacctatcagtagatcaag

SEQ ID NO: 177340 - DNA, 542 bp, Cannabis indica
ctctctctctctctctctctctctctctctctctctctctctcgtttgtaataatttgatataaattttatgtgattttgagaaggaaatttgggttaatatgattcaatggtttgaatttagagacatgatgtgaaattcaataatctgagactcaaaactcaaacttagtttctgggttttgataaagcttgtttctttaaactttgtgcagacttctgtggcatttataagccttgtagctgcagctgttccaactctgtatgtaagtttcttctcttttggatcccagttcgtgattgaatagagctgtttgttagaaagttatatctgaaatttgttacgggatttttgaaaatgaaaaattaaaggggagttgtgtaaaaatgtgtgtgtttcttctgctctgctttgtttttggcaagaaagaaacagcaagttttattgtcaaaataagcaatggaagtgtaaaatggtggagggttaggtacctctgtttggagggtaaggtactttctccgtcacgtttacatattcttaag

SEQ ID NO: 177341 - DNA, 727 bp, Cannabis indica
tgttaaaaaatgctccctgaactattgaaattgttggaattaaggatttttgtcaaatttcattcaattttactatttcaaaaattgtttatgtactaaatcatgctcccaaactttgatatctaccaaatcatgtctctcgaactttgacacgtactaaattatgccctctgaactttcatacatgttaaacttttttactaaaattggaaaaaaaaaatccttaaatccaacaatctcaatagttcaggagatatttttaatgaccttaaaagtttacaaaacgtgatttggtatatgttaaagtttagagggcaaaaatcttcattaacctttttttttttaacatcaaccaattgtctttttccatctcattaactatttggactaaaaaataataccagatctacatattaaattgatcattttaaagtaagctccccaataaccccattgtcaccgggttaagttaagattttgctttatatattatatatataaaatataaatacagatatatatagatcattagtggaaaaacacaccaaaaataataataacaaataaaggggaatcccacatttttctcctcacatttctaaatatggctcatatatatatttctctctctcttgttccctccaaatccgaataacagaaccacctgaatgaacaaaactctcaaaataagaaaaaaagaagaaaaaaaaaaaactaacaaaaactt

SEQ ID NO: 177342 - DNA, 590 bp, Cannabis indica
tgaaaatattcttcttttcaggggaaatttttacaagttttttccttactcttacactcgttagttatctgttaaaatctcaacctacacatctccaaagatcatgaaatttcacggggcctagccaagaccgttgtgcatcacttttctcttggacacgttgagagaaaaattagttttcttgcactaacgatcgttttaatcgaaatagtgaaaatctcacatttctgatagtggtacccctttgtgaaatgtggcccggaccaatctcggaattttttttggccactagtcacaatcaatttgtactactaagaaatgaatatgaagaatggttttgggtttgaaaatttgttgaaatgcccctaattgaaaatattcttctttcagggaatttttacaagttttttccttactcttacactcgttagttatctgttaaaatctcaacctacacatctccaaagatcatgaaatttcacgggggcctagccaagaccgttgtgcatcacttttctcttggacacgttgagagaaaaattagttttcttgcactaacgatcgttttaatcgaaatagtgaaaaatctc

SEQ ID NO: 177343 - DNA, 745 bp, Cannabis indica
ggctgtctgatgcacatgtatataaaaaaaaacacacacacttagcaaaggaaaaaaaataaaagggaggaggagaatgtacacttgagaaactaccttcattcccgagatagcagtgtccttcaaaattgaatcccgtccttgggaaatatagaaatcatcatcaggttttttgacggcattcgaaagagatttgaagcagttctcggccgactcctcaaataggacatctttctgaatcctaaaagcaggaattctgtcccactcagtctgggcacgtgggggatgggtagctaaaggtggggaacctcggctagagggataagttgagggatgcactaaaagaggaataaggcaaagttgagaagacgacggagcccctagaagagagagagagaagtccgagcaggaaaagtaggcgaagggcccaggttctggcccaaagtagctgctagaagattcttggactgagaagtccccccggggttaggaagtttcgtcaggactgagcccccagtagttccctcggcttcgccagcacccgacataatcttggtgaggacattgagcagtgtcccgatggcctcatctgtggctgagtcatgctgagatgacatgccaaaatctgactgattgacctcctcaatcctcgcagctctgctctctttgctttacttttcattttggagactttgccataagcctcttccgccgagcagcgctttgagcctcgatctcctcgaca

SEQ ID NO: 177344 - DNA, 586 bp, Cannabis indica
ttaatctttatacttatttctatatgtttcttttttattctgaagataccataagctaatatttataaataaattttagtcaactttaattaaaagcaagaagaagatgaacataagtagtttagtagttaattatgcctaatccatgagtaatttcaattaacttctctatatactcatacagagcttattttggcatactttctttacaatgaattttgcatgaaaactcattttctattaagtcttttacaaataaggtattttaaaaattgcaattagataaataccacatttagaaacttagtaaagagcaattttggactaggcccatccaaaaacttgagattcggcctaataccttactggattgggctcataattgggctaactattgaataaatagacagtttaaattggtatttttcattaatacaaatcttaacttggcagattttgacctaaaaaaaaaagataaataaaaaacaatgagaggaacataatcatattgaaacatatatgcttaattgaaatatttgtttcgtgccaaaataggattaatcaaatgtagatcaaacaatgaata

SEQ ID NO: 177345 - DNA, 843 bp, Cannabis indica
aaatattaacaaaaaaatgcacttcacttgcattaaaaagatagaataacttatctttctcaaaaataaaaaaaaaaagatagaagaacttgaaaacatacgaggattagatatcaagcccataagtttattctacagagagatttggggttccatttcttaagggtacacgcctatgaatttgtcagctttttgatggcaactagagtggtcgtgggagggtaaagtgattaagtaacggaggaattgagaaggaatgagagggatcatgagaaatgtattgtaattaagcatttgtccttgggagagttgaggtctcttggatacctcactcttctagtttcttcttatcattttcctttattcaatatcacatactagatcggccacttattgcgttagaaagcgtcctaaatttaaaaaaaggcacattaaacaaaagcttataagttggatcttgtttatttggagacattatttttttttcactgacagtttatgctttcttcattcaaaaggagaatatacaagaaaagggatagatacgtacgcaattccttgagcaagtgttgtggcaattttcattctcatggcccaatctaaactccgaccacctcttggtatgtggtgcagccatttgtccaacggcccattaactataaactcgtaaacaatgtagcggtcaccatgattgtagcaacatcctttcacggccaacaaatttggatggtggagccttgcaacccttttaatttctgaataaaactcatgttttctttgaaaactggacctcttcaaccttttaattgccacccttgaaccatcaggttgaagtccgctata

SEQ ID NO: 177346 - DNA, 766 bp, Cannabis indica
  modified_base (727)..(727): a, c, t, g, unknown or other
aagttaccatcgcccaagttgatatctgggggcacacttgtgctcaataaagctttttaggtgttgtgtcgtcttagattcatcacttggtacaagtacctggcccaagttgacattctatacccaggtgatgcacaccatcgacaccagcgcccaagttgatgtattacctagagcgcatggttttatttataaaatgacaatttcattttgggcattatgtttattttgcactaagaataaggtgtaagacttgtgacaaagtcaaatctcattttggtttatgaatctacgcccaagttgacatgttgcacccaagtgatcttcgatcatcatcacttggtgtgcaactgagcttcaatcaccaattttgtatgatttttttttttctttttaaaaagaaaatcaaatttttattagataatcatctcaattactaaacaaggtaataaattaattggattaaatttttattagataatcatctcagttaccaaacaaggtaataagttaattggaacacactccaaattgaaattataattaggaaataatacaaaaattttaacaaatttagtgggccaccgtattagctcatcgtctaataaaaaaactaagaaataattttttagtaaatattttgtattgatttctctaatcgtatgtgatgttgagaattatttgttcaaatctagttataatctcttacatcattgacttatgcatnttagctaaaacgatcaaaaatcaaaaatgtgtcactctg

SEQ ID NO: 177347 - DNA, 544 bp, Cannabis indica
actctatagtccacttgagtaaccatccagaagcatcgggcttttgcaaaacttggtgcaagggttggtcggtatagacccaaataggatgagcttggaaatagggccttaactttcttatggctaagatcagacagtaagtaagcttttcaattaaaggatatctaccttctgcttcaataagttgtttgttgatacaatagacttaatgctagacattgttttcttctcttatcagcacaatgctcacaacatattcagtgactgccaagtatatccctaattcctctccatccaatggttttgagagtatgtgaggctttgtgagttgtctttttagctcctaaaatgcttttttcattcctctgtttattcaaacttcttgttacctagaaggatgttaaagatgggaacacacttgtccatcgactttgaacaatctgctgatacggtatcaaccattaagcttgtactctttgtttgttagcgatttcatatataggagggcttgtattttctcagggttggcttctattcctcgagc

SEQ ID NO: 177348 - DNA, 784 bp, Cannabis indica
aaatactcacaatgacatagaatcaaaaaacattaaaaagcaaatttatactgcttgcaaagagaaagtttctttacttagccaaatgacaaatataacagtgaatgtttttgtgtttgccttatgtgttggtttttattttgaccactatttagattttgggaattttgtctctgtctctccatctctatgtatatatatttggtaaaatttattgcaattacctttcctttgattaaataggttgagtgccccttgcactactcattttgtgtaactggaaattggggttttttcaaggaatcttcagccacatgaaattgttgaacaagtttgaacaagatggaaatagttaattgtaaattgtttaataatttgtcttaagatgaattatattctcttagggcccgtttggtacgcaggattggactggattggactgaaaaggattggactggactggacaagattggattatgctgaaagtaatcctgtgtttggtttaagaatggactggactattttaattatttacttttagaaaaaaaaaacttaaattaaataaaaatatataataataaattaaaattaaaatatataataataaataaatataaataaataattcgtcaaaaaaaataatatatcatatataattaagaatacatcataaatatataataaaatattttgtcatattttttatttaataaataataaaactagtaaaataaaaatacttgaataatataaaattgtttatcttaaacactaatttattaac

SEQ ID NO: 177349 - DNA, 605 bp, Cannabis indica
atcctggccgatgtgttgacaacccgaccaagctctctttgagactttgcctttttgataagaggcaatcttgcaaggcatgttgatcttctttctacctagctatcatcttggtaatccgaccagacgcttcctaaaaggtaatatacaataaaaatgttgatatcaaacttttgtgggaattgctcctgcccagaagtcccacgttatgctaagtgtcagctagatgagaccacatgcaattgctacatcaagtggataaaaattgggataacatgcatgttaatgaaagatattatttcatatcggttcaaccatgtataatcgaattatacatatcacctttactatatctatccacacatgtgatctgaatcaaaactacacacaatattagagtatagtgtatagtaaaccgtacttggtaattctatattaaagatgtcttactttactacgttatcgacttgttttattcatgatgtataatcttaattctcttgtacgaccttacaagattataccaactccatatgaatgaggaatttttagatatttattaattatacttctataattaatgtatttatttatcttataattac

SEQ ID NO: 177350 - DNA, 523 bp, Cannabis indica
atctccatcaagattaatgttttatcatttatctgcattatcttaataatcttgcattttgtcaatgcagaacatgagattcatttgtcatattgattgaaattcaaaataatttgtaaagtataatttttttttctcccatccctctttttgcgcattttatccggcatgaaatttgaaggtgagaaaatatcttgcatgattaggccaagccaagaccaattcaatatataaaaccacaacctttttaaaggagataatagggataacaaaataatttcaattaagtatatgcagatatgcaaatgaatctcaagttctgcattgcaagattattgagttggatacaagaattaaattgatcataaaaggaaaaaaaaaaatgaagaaaatgataacagagaacacgtgcttaactagtgaattagagagttcatacaatgagttcaatcaatctacaattttctgcatacggtttatgaaaagaaaaaaacaaaatagacacagaaaatatactctaaag

SEQ ID NO: 177351 - DNA, 796 bp, Cannabis indica
gctataatcattttatccgtattttttcttttaaataaaaactataattatgttcgaaagaaagttggttaattgaaaaaagtacagaaaaaaaaagaggtttctgagttgttggccacttcccatgccataatagcattgtttcaatgttttaattaagaaataattgttttcattgaaaagataagatgtgtctaccttggtagagtttctttctcgagtaccccatttttggatttttcttctgttttacgaataattaaattaaacaacttttgtttaagtttgccaaaaaagtatttttaactttatcgttatccaaaggactaaataagagccaaaaataatgatgaaaaggagtgatgtgttggtgaaattgaaattgaaaagagagatccaatggtcgaggtagctgggcatgcagtatccctaaacccatgcctgtcctcttctgttcttctgttgccatatgacattgacatgtgatgtagtcgtagactagtaagtaattaagtcactacagtacaattatgaccgttgaatttaatatacacataacatcacaataataatttttactttattattatcatgctcgtaagtaaaataatccacccaagtgaatgagtagagtacttactactaatttgctttcatgacattacaacattaattatagcacgacttaattaatttagtgaaaaaggactaaaatcaacacaaaacaaaatcctaagctagaaagagatgaaagatcaaacaattgaactcacattacaacaacaacaacaacaac

SEQ ID NO: 177352 - DNA, 717 bp, Cannabis indica
tgatttagtacatatcaaagtttgaggagcatgatttggtagatatcaaagtctgaagagcatggtttagtacataaacaatcactaaaacagtaaaattgaatgaaattagacaaaagtccttaaatttaacaatctcaatagttcgaggggaatttttaacgaccaaaaaagttcagggagcacgatttactatatgtcaaagttcagggagaaaaattactaattagatactaaaatggcaaaaaggctgatgcaacttgctcgggctcatgaactagtaccccttccttgtttttaattaattaaattttaggaattatattacaaatacacaaaacaacaaaaaattataaaaatacggttttacagaattttaaatatttttacaatttttttgattttatttacagaaaatacggtgtttttatgttgtactcattttaatttgttattgattttttgttatatgcatattatttttcgttattgttttgatgttatttaaatgttatttttcatgtaattttcttattattttcgtgtttttttttatgaaaaatcttaaaaaatgttaaaaaaaaattctgtaaacattaaaatgtaatttttttaaaaaaaatatggtgagtcatgtaattatccttaaattctattctaagactttccagttcggatacttgtattatgcaatctttttcttattctttttttttt

SEQ ID NO: 177353 - DNA, 518 bp, Cannabis indica
tacgtactagtgtacgtgataaactactagattagtataggtataaaatttagacgtgggtagaactaactttttataaggtaagggaaagaaaaaaagaagataatttcagccttatgcatgggttattcttcatgtacgtacaaaaaaataaaaaataggtaatatacaaaaagcaaataaaagagagagctacttttgcatttcaattttgagtttatatttacaataactaaaaaaaaaaaaaataacaacaaattatgttatgttactattaatgtttctcatagtcacaattgaattgctatttgaaagttgaacagttaactttacaactaccactattttccttttttttttttattaaggatataccattttctttactacatataaaaaaattaacaaataaatcacatttctatatttcttttggttaactagtaatatcttcgtattcgtaagcataatttaatacctgaattcacatattttcacaaagaggagatctcaagttt

SEQ ID NO: 177354 - DNA, 551 bp, Cannabis indica
tatagctttattgtctaaatttaccgggggtcgagttttgttcccatgtggctcgctctgagaatttagcggcccatggcttggcaaagcatgctctgcggttagacgatgagctatcctggttcgaggaggttccagcgccggtgggcgtcgtaaatttatgagtgattgtaatcactttgtcaaaaaaaaaattataaaaaaaaataaaataaggaaataaaattaaataagaacataaaatgaaataatgacacctattaaaaaacaacaactctgcaaagtcatttttaatacccatttattgaagcattatccaacattaattggaacaacacgtgctatgtaatctttttggaagtaaatatataattttttattaatttgctaaatcaattaaaagataagattcttcctcaatagaaacatcgctcttgttgaacactcgaattagaagaacaagatgctcaagcaaaactttgagcaactatcattaataaaaaacaaggaaccattgtgtaaagatggaagaagtttacgataatcttcta

SEQ ID NO: 177355 - DNA, 533 bp, Cannabis indica
catcaatcaatttataattttttctttatagcccaaaatccaaatacaaaacatgttaaacaaacatcataaaaaaaaattaaatataaaatttctattatatatatacacttgatatatagtgagaatatagtgagaaaatttctataacatatataaacttaccaaaactttccatgaaaatgccggcttggaggagcggcggttgcaggtgcgtcgtgcactcaaaaaattacacttttagtgacaaccttttagtcacaacataaaatttgtgattaaatgcgacttttagtcacaacaaaaaattatttgtgactaaaacatagtatttaattactagttgtcgctaatttagttttagtcacaacaaatattgtgctaaaaaacacatttagttacaataaattataatttttgtaactaatacttttagccacgaactttttagttcacaacaccaataatggtaattttataattagccataattttttaactttagttcacaaattttgttgtgctaaaaataa

SEQ ID NO: 177356 - DNA, 611 bp, Cannabis indica
attaacattttcctggtattaaccattttttaacgttatagtatccattctatataaaatgtggctatataacagaataattggtttatgagaaattattgggtgacttttttttttaaataaaaaaaataacaaattattagatgttgttacttaaagggtcagcattcatgtagttagttaaacctaaatataattaatcttgcaattaataataaattttttcatattgtttatttttttattaaaaattatttttaaattttgatatttagaattagctagttcaattttaaatattattttacattaaatttgaatgttttgatagtttaactagatgaacatattcattaattctgaaaataaatttaggatgaataataatttttttaattactattacaaagtaaaataataattttttttttattaaaatcactattatatactttcaaattttaataattatcacatattattaattttaaaattataatattaaaaaaaacaaaaaactaaaataaaattaatataccttatttttgacaacgtaacatttatatatatctaataattatattggttacacatatatattaaaaataaaa

SEQ ID NO: 177357 - DNA, 634 bp, Cannabis indica
gtgttatatattcccattaataggtttgaattcttgtatgagtttatatatatatatatatactttgaggaataatggtcccaaacaacttatttcaatggtcttctgtacacatgggaaactccctgttagtggctgcgattattcatacatttttaattaaaaaatgattttgttatgtttagatataaaaccttgattccaaatatattaagataagattttatgtatataattaaaatttgatatagtgctcgaattttatgtccttttccaaaaataaaaagaaaaaagaaaagaaattcatgttatgtgtatggtgtggattaatgcaggctttttagactgaatgaaaaataaaaattcatgttatatatgcctttcaaaagacaaaaagacaaaaaaaaaatggtcataaaattaattataaaataataaaataacacaaaatgaaattgtgaagaaaggcacataaaaaaatagtaattttttattagaaattagctaaattaataacaattaactgtctaatatttcttagatggcggttgataaaaaaactaaagtaaaatcaattaaaaaagattataacattacagttaaaaaacctaggtggtggtggtggaggtgagtt

SEQ ID NO: 177358 - DNA, 551 bp, Cannabis indica
tctaatataattttattcatttagatatatgatttactcaagcttggatcgttagagaatagtaaagagtttctagctttagcatctaggtcaaatcatttagtaacatatcacgaaggtgttgtagtgaatggtgttcattttatggtagctgaacgtgatatgaagcttaccacacaaaatagcagagtgtctgtggcaggatcagaaggatttaattgttagagtaatttgcggcaaaacccccccaacttatcaatttaattgcaaaaaaccatccaacctcatattttggtgggaaaaccctccaaagtaatgttccgtttacatttttaaggtgtcgtctgtctagcctcgttaagtcctaattttgtccacgtggcaatgacaggtcactaaaaaattatcctacgtggaaatattttataaataaaataaaatgagaaattgaataaaaaaaaatttaagagtaatttgcggcaaaactcccccaactatcaatttacttgcaaaaaaccatccaaccttaaagttttttggatggttttttg

SEQ ID NO: 177359 - DNA, 708 bp, Cannabis indica
tttttagagatctggggttttgaagatgtttttttttatgagatggcaccatatcaaatgttcgtctaatactagaaactataatttgtttataggttttgattaataagtttactggaaacaaaaagaaagaagtatctgaataaatggttagagataatattattaagttatcattgaatattttaagtgttaggatctatagaagaagatggggagtgagctggatttgtagttcatgtgaaagaagatggtaaataaaagagaactggtttttttttctttttaaattctagtattaatcaatttttattttacaaatcattataaattagttttgttttgaaattattattttgactaatacaatagtgacacatggcatccaaatgaaaaattaacagagctgtgaagtgggtaccaacaaagcagttcgttttgaagatttaggtatttatactgctattttttgaatttgagtatttattagcaacaaatcaaacaatttgagtatttatgccacaaattttccaataataaactattatttatataaaataaaataataaaataaaaataaaacaaatccttgggtgattttttttttaaattttatattcaaaaataagagaggttaactctcacgttaacttcaaacaaattgaaattaaaccctttaaccaaggaaaatattaccactttttttct

SEQ ID NO: 177360 - DNA, 1168 bp, Cannabis indica
atcacatattggtaaaaaaatatatcatcacacatattatcataacaaatattttagattaataattaataaatattatcaataataatataaacatagtatttatacataagactacatttaattacaatttcgtttatttttttaaaaatattttttaataattaataaacataaatattatttaaagtgtttatttaaataaataaataaatttagggaattactttatatactattttttttaattttttttcaaatttacggtttgagatttctaaaatgattgcagtgctagttacaatagaaatttctgtacgattttttattacaattttaattgcaacactaattgtaaatgagaatttctatgtaaaattttataaaaatacaaaataaattattttaaaatgtaaaaaaaaaaattccaaaacttaaatattctatttttaaaattattataatattttagtaaacaaattatatttatcatcataataaatataatatattaataataacattatactaatcaaatgtttaatagtattgtttataaaaacataaataaaatttatacatctacttgtatataaataaaaattactttcacgtcgatttcacttttatttttttcttcaattttattatagtattcatatagtggttctatctaaaaatggggaaaataaaaattaaattaaaatttaatatttttataaattttctaaaatatatagagtaagttaaaaaatactacttttattaattaattaatcaaatttatctttaattttatatttaattcaaatatactttctttctttgtatatgtattgtactcaaaataccctaacataaaacaattatcttgaagtgatagagacaaaattgatacaatattaaaaaaagaaatagaaatgataaaactttaaaaaaaaaaaaaaagaaataaaagaaaaaatgtaagagtttaattttctcaaaattatatatacttagtcctcttggaagattggacctgtcattattgatgacccataaaaacagaaggtactcatgatgggctattagcaggcctagtcttaccaactgggctgggccataagagctctcgctgaacgagatgtataatttgtgaactcaaaaacagttttcaaattaatac

SEQ ID NO: 177361 - DNA, 647 bp, Cannabis indica
atacttaaatagactataacgtacatagaatataaagaaaaaaaattagtactaaaatttttttctagatgccgaaacaagtagaggtacatcaatacacctcttttaagtgtgtggattgtaaaatcactatttttattttcttatcttttatatataattttatgaaaaaaaaaaaaaaacaggggaacttctaatattatcaaactttctctctttactctccttctctcatgtatacaatacacatatattggataactgtaatgattcactattaagatttttagtacgacatattagattattatgctaggttgataatttgataaagtaattaatagataaacgaaatcatttattcattatcttcattttgattgtttaaatataaacaaacactcttctaagacattattattgttaggtaataaaaccaaacaaacatttttttggtttttttttttatttagcgataactattatcctcgtgatgattgaactatttacaagtttggatctatgaaggaaaggaataatgtatgaacatcatttccttgtgggccaaacaagaatccagttctcttatttataagttttgataactaggaacttcatatataacactacaaaaaaaaaaaaaaaaa

SEQ ID NO: 177362 - DNA, 656 bp, Cannabis indica
cacgtttttttttttagtaagtgatgagtgagaaaataagtatataagaaaaactactccatttagtttttgactctacttatagctgatggcaccatcctactactcgtacagctgcatacataatacaaaaattacattaaaatataatatatgtcttttgggatgaagtgtgtcacttcaatattttattattgagcttaatttgttcagctatatatgtaggaaagtgaagttttggttttaatcttttagtgccacatggtggggcttcatataatattgtataggtccccaattttcagccatgatcttccctagtatgcatagtaatgcttgtctcataaagtgaaggaaatacctcagcttttctcttttctccttttcttatatatatatctttcattttattttaggttagattaaagtgctttatataatgaatctcactacaagtagtgatggcagaaggagagattgaaggcgggattggtgttctaatttttctatcttcaacactattcagtcaacaagtggacaaaacctttggtaccagaaaaaagaaaaaaggtcaaagcaaaagttatcacattagcaaaaagagtacttcatcaagacaaagaaaaccccatttaaaggaaactaagtgaagtaat

SEQ ID NO: 177363 - DNA, 639 bp, Cannabis indica
aaatgatcttaggtggcgtttggttggaggtaatgaaatagaatggaatggaaaggaaacaatttttattccattcctttgtttggttgcattttaaagtattggaatagtatttcaatggaatgctctttccaccattttgataggatgactattccattttaaaaagaaaggaatgatcattctaatgtaacaagaaaaaaatttaattattttttatcaattttttatgcattttaaattttattccattccattcatattcttattttcacattcccattctcattcctattcctatattttcattcctcccaaccaaacgccttaatgtcgtctctagcttttatgggatttagggattttttttttttaaattgcccttttatttgagaaatatataaaatttaaattgtttttctagtaaaaatttttggggctttatgggttaatgtttaaaagaaaaagttgtcggggtgagagactttgggcaatgacttcgaccgctctaccctaaatctagccctattaagcataaaagtcagaaccaaaatagaaaaaaaaaaaaaaaaaaaaaaaaaaagaacagaaattagacacacaattgtagagtttcgaagttttccccaaattatggcg

SEQ ID NO: 177364 - DNA, 971 bp, Cannabis indica
ttaacagaatattcttttatttttaaatatattctgttaaaccaagaatgttaaaccaagaaatgccgttaaatagacacttttgatatataaacatataaatatttaatgtaataggcagatgacaagtaaaaaagtaaagaaaataaataaataaaaaaaaaaacagtacacatagtataaaaaatatagtaaaaatataatattttccttataacagtaaaattgaaataaaataaaaaaaaaacagtatgttaagtaaatttccctatgtatatatatggcatagaatcttaattacactaattatggtatttttaagaaaaaacttaaaaatatgggaaaatgtcattttatttaaagaggaataccataaaaaaaatttaagtttgtgtttttttttcctttttaaaaaattaaaacactaaaataaattaaaaataaatttcaactgtagatactgtttgttttacagaaattaaagctgagattttttttttttaaaaaaaaaactactgtgtttctttttttaattttttttttgttagaaactaattattttattaaaaacacaaaaaaaaatcagtttcatcaacatcatcctaaaaaaaaacaatataaaaattataatctaaaaacgatataaactttaaaaatcagtttttatcaaaaactaataattacattaagaaataaaaaaaaatagtttcatcgacagaataataaaaaaaaaatataatctaaaaaacgatactaactttgaaaaccagtttcattaatattaaaataaaataattatttcattaaaagagaaaaaaaaaacagttttatcaacaacataatgaaaaatacacaatgtctaataaccaaatttttacaatcgatactaaatttaaaaatcaatttttaacagtcattgtttgtacatgtgacatattttattggtcttacaacatcttcaataataatat

SEQ ID NO: 177365 - DNA, 589 bp, Cannabis indica
aaaaagggatgatacattcctcatattatcattgacacaaacaaattaagtaactaatatttaattgcttgaatgatcccatgtaaataaaagagaaaagaaaaggaaaaaacaaaaaaaaaaaaacacaggggaacaaaggatccacgtgtgaaacagaaaattgggtctcatgttattattaccaaatttttttatttttgattttttaagagaaaataaaattaattatgttttagctttacatgagttgttggggttctcttgcttgggattcctacatccgtgtgggcacctcatagtgttttggatattagtgccacctttttaagaggctcttgtgtgtattttcacttcgttcaatttctctcctcctatctatctatctatcttttatacaaagcacgctcttgttaaagagaaaggtttttgggaatcctatgcctcttccttatattctcatagttaatttgcttcttattactttgtcccttttgagattacaagattcccaattcttaccatcatcataccctaatgtgtttagatatatggttaaatctcttcctcatcaatactagtttttcat

SEQ ID NO: 177366 - DNA, 510 bp, Cannabis indica
agatgttaagtgctaagtaacgtatgttaattttattttaatttttaatttttttaatatcataattttaaaattaataatattcaatgtattgataattattaaaatttgaaagcataaaaataaaaattactattatacttcgtaatagtaattaataaaaattattattcgtcctaaatttatctttgcaattaatgaaaatacttatggttaaactatcaaaaatttaaatttaatttaaaataatatttaaaattcaactaattctaaatatcaaaatttaaaaataatttttaataaaaaataaacaaacaaatttattattaattgcaacactttaggtgaattaattatatttaggtttaagtacctattgttattttttttattattaattgcaacacttttggtgaattaattatatttaggtttaagtttcctattggtaatttttttattattaatttcaacattttaggtggattaatatctaataatttgttattt

SEQ ID NO: 177367 - DNA, 500 bp, Cannabis indica
ggtttcagaaagaaacatgtagataagaaggaagatatcatcccaagaaaaaaagaaacaacaaacaaaaaagaagcaagtcagtgaatacacgaatctacatgtaattttgaatatcaatttaatcaaacaaacaaagcatacttgcaaaagaatttgagtcatgcaccaccggaagccagacataacagcagcaagcataacaagaatgaaacccccaagctcaaactctgtttcctttgcaactgccaaatgaaaagataaagtgttctgagaactacaataacaacttttttaagtaaatcaatagcatgtgctgcattagactaaaatagagagaagagaacagcagacagcaagcgaattagtaaagctgaaactacagaatcataatgtgctaatcagtgttccaagtcaaaaacataaatgaaaataaacaaagtaacaatcaattagtgcatgtttcctcacctcttaaaaaacacattaagaaaggaaac

SEQ ID NO: 177368 - DNA, 593 bp, Cannabis indica
acaactcttacatattcttccaatcaatcgataccacttgggaacccaacacaatgaattggaggaagttaattaatataaagttgcatgtgttaacatatgtgtaatgtatgtccaacactttatattaataaagtaagtatttcacttactttattaatataaagttgaattgttattttttttttttgtatttaagcgtttatatattacaaccatgttttacctaggactcgaactcaggacctccaagacacacacacccatctatggctacttgagctagcctcaagtgggttaacacttgaattgttatagttttaaattaatgggtctcatttacatcagtgtgtttgtgaggaccacttaattaaaaacacttgaatgatgtcttttagttatatagataatagattatagagagaggaactaaaaaactgaaataactatatatataatatattatatatatctgaaataaatatgtaactaactagctattgttgtgttgtctgaaaactcttacatatttctacttcatcataaatctatataactaatcttatataaacacccctctctctcaatatata

SEQ ID NO: 177369 - DNA, 1109 bp, Cannabis indica
tttatctgtgtctctttccctgttagatctttagtctcaattttttttttcttttgtagatattttcaggacagacctttcttcttcttgtttttcatacgagtctttctaagattattgttgtatctttcagtttgtaaagtcctaaaagaattttataggaaaaagaaaagaaaataatagattgtttgtaagttataagtaagtttttgtatataggagtcgtattcaatctttatgagcttcgactagttagtcaagataatgacggactggagagcatcttggttgatttgcgtttccgattatgaggtctgttcgtgctgagcttttgggttcagggtggtttgggtctgtccacgcgtccgagttcgaggctgagttgactcgcaggtcgactcgaaggctcagtgagtccagcgatagggtagtaagtccacgagtcaaggcacttgggagcctgggccctgcggcaatgccatcggttggcatgagaaggaccacaagggtgtttggggtggtaaagggtgcagatggagcgagggtgttgaggtcagggaggcggctctcggccgaatctgggtgagactaaactcagggaggcataacgatgggggatgactggtttaacgttgttaagagcaatggtggcaaaggggggtggtggggggaggcctcagctatagctggtctgacaatgataagcccatgagaagccccacagcggctgaatttgaggcgcctaaaaagcccccaaggaaaagttctgtggctgctttggctaaagtgcacgacacagataaaatgtatggaattgtgtacacccgaaagaggaagaaaagttgcgagagtcgagcaatatcggaggtttcgtgtgatggcaggtttgggcgtcttttcaaacgtcgacagagaaggaagctaaattgtggtgtgagctcagatgtggtagctggtcattctgatggacgagaggtgattaacgttgctgttgcttcatcccttgataggaatctttgtgctgttcgttttttgtattctgttttggtttacatgacgagggccagactgagattaaccgatctttttgagtttctcatctccgaacc

SEQ ID NO: 177370 - DNA, 630 bp, Cannabis indica
agtatacttgtcttttttaccgttttttaggtgttttctgacaggtcggcgcagtatagtcacaattgggaatttcaggccaactgagttcgtggccgaaaccacattttttggggatttttatatttggcatttattgtatacatgaatattctaaagattatttgagtaatgtgatatgtgaataatgactttattgcccttgactgcttatatgtatgttatatggccgtaggggcattattgttattttgacatttgtgttatttgtaacaaaatgtaattattaacaaattagaaagtagaatttgtggtttttgctcagccccaaaaccgaccctctccctctcactatattcattttctttcactttgataatttgtcaaaatttggtttgattcaagcttggagttgtgaaattttgtgcttggactttggaagagcttaaggtagtgtttctaccacttttaccttgaattttatagctgtaattttatagtgaaaatatatgtgaagccattgattatgttcttgaaattgcatgcttatgagatttgagttgattatggtgttgtagttatagttgtgtttaaagttagtagatattactttgtgtatggtttagattg

SEQ ID NO: 177371 - DNA, 519 bp, Cannabis indica
ggtagacacaaaaaacatagagtaaactacagtgaaaaaattaagtcacgaaaatccctaccagttggatcggcatctctggccatttgagtgcatctgaggtagccagatcagaattagcaggactaacagccagtataatacacttttcttgcctaatttgggtcattatcatttccctgacccttgcctctatatcactaggctgatctccaacaggaactttagttatgccaggtaaatcaacaagcatcatattaggtactttcggagatgaaatctttaagagtatttgcttatctgaaacccctttgttcaaccctgctcctctgtcagtctcagcctatcaatcaaaaaaaagcaatccaatgaccatacacaagaaaggaaaaaaaaacaaatgggggcagcatagggtgtgtgctttctcaaaaaaaatatttagaaatcattggaagcatcttatggatgatattagttaaagataacagtgatattgcttgagaagatttatcaagc

SEQ ID NO: 177372 - DNA, 793 bp, Cannabis indica
aatgtatataaaaaaagggatattggcggctaaaccacctgaactttacggtttgtaacacttaaccaccaaaactgaatttttggcggctaaactacctaaactcccattccgttttgctctgcacacctccgtccaaaaatcaccgttaagtgccacagtggactgtccacgtgtacacacttgtacacgtggcaaatttttagtggtccacgtaatattaattttttaaaaaaattaaaatatttaaaaaaataaaaaaaaatcagaattttttttaataatttatatattaaaaaatagtttaaaaacagaaaaaaataattaaaaaataattattattttttttaattctactttttttttttctttcttcttcttcttctttcttctttcttctttcttcttcattttctgcaaaatccctcccagccctctttctctccttctcctcctcctggcgtcatagttgatcatctgcccaaaatccctaaaaatcaaaaatttcgaaaccctagaaaaaccaattcatatcagattcagatcccaaacctttgatctgaatttgaaagttctcaatgtcgtgcttagccctctctcttcaacccgatgagtctccttttctcaaccgagacataagcccccagatccatgaagagagggaaacacgagggagagagagaggttggggtgttgggttctcgaactggaggaaggtgggtcgtcggggttcttggactggaagaaggtgacggttggggttctcggactgtagtgggctttggggttcgaa

SEQ ID NO: 177373 - DNA, 550 bp, Cannabis indica
tgcaagtatggctgctggagtttcttccccaaacttctctgcaccttctccatggcagcaacgatttctaagccagcttggtttagagggagaggcttcgaatctcaaggtttatgctctcttctctactgctcttcctgttgtcataatggattttaatcaattagttattgtttttatcatatgatcttaccattttcgaaggagctggagttaaatctctttttcattttcaagagtttttatgtgtttccacgccccttcaagagaccctgaaaaataaataaattccttttcttttcttaagaacacatacaagattcgtcactacaaaaaagataatagtaactccaccattaactctttcatttatgaatttcataataatagaaatgcatgtcctaatgtaggattggtgccaacagttcatcattgaagaaaagactcgctaagccgagatcactaactagtatgtggttattggcaagaacttattgaatccatctttttcttaaaatcatgggctcaaataactctctctctctctctc

SEQ ID NO: 177374 - DNA, 599 bp, Cannabis indica
ttaaaaaattgtgaatgagagatttacgatacttatttttttaaaattaattatataataatgttcagattttaaataataaattttattaaaaaattaaaaaataaataaatgagtttcaagtaattttataaaagtaataaattttttttaattaggagaatcaaaagagaataaaaagaattatttaaaaaaattagagtgacacatcaccattttatatttcacatttatattaatatactagatgagaattacgtggcgaaccacgtaaatattagttttatataagttctagtgatttttgtttaagaattcagtaactaagcaacgacaaaaacaatggtagatagatctatttaagtttttcttatttgtaaagagatttgagattttgaattgttctgatttatttgtttataaaattattgaaatacttgaatatttattggttctgattttaaattgttctgatgtattcatacttgaatatttatattgatgattgttaatgaaattagtgtgtagctttatgtttctagaaaataaaaagtattttttaatatagagtttaaattttatattgatgattgttaatg

SEQ ID NO: 177375 - DNA, 723 bp, Cannabis indica
aaatttataatgcctaggagatcagctaaaagggtctataccacctcaacacagaaacgtgactaacataactttggagtggaagatgtgtgtaatgactgctttgattttattatggaaattagttagatatttaagggtttattttaatctttttttcatttatgtgcctcttagtagataagtaggggttactttcaaaaattatgcctttaatttttattttctcaacttatggagatttatttaaattctaggtgtattgtgtatgttatatatgaaaatttacgtttttcatatttatgctcgataatagtagaatgcgatgatttggccaagtagagtcacctaggtgatgtatcttagaattagcaggaaatagttagacacttggattgtcaggattaattggggttatgatttggaccattttactcctaagttattagattacttcttagtgaagtaaagggaaacgtagtctttcttgccttatgatttattatttggaggtaagtgaatttttttagtaaatcctttgattatttttttttattgtaagctgaataaaacaaagagttattgtggataaaaattagataccttctctctcttttgttcctctctttctcggccaaagaaaacctaaggggaaaaccagaaattcttcaccctttttagatcataaattcaagaggaatccaatagaaatcaaaggagtat

SEQ ID NO: 177376 - DNA, 648 bp, Cannabis indica
aagttctggttgactatcatcatgtccttctctttgatgcaccccgtttgccatggattctgaggtgcctcgtcctcggtgttttcttcttcatctgtatcttgagttgtaggtaactcaacatttgctccccatttctctgcaattcatcttccatttctttagaatctggtaatgattccttttgtgatgaccaccatgatgatgtttcagttgaagaacagagtaaatatgcaggggtgaatcagtaatttcttttctgttgtatttccctgtcactatcatcagaatattccctcaatgatttgggaataattctgttatgattgtatttgcccttttgtgattctgtagccttgcgtgtcactgtgccaatggccatttgtaatttccaagctttgcccatgaggctataaatatcagaactctactcactcattttctgagctgagatttacattttacactgtgtttctcttattcttcacttggtatcagagcaaaccctaggctgctactgccatggccgatcccacctcagctccacaacaacgacaggaagtagaaggttcaggcgatacaacctctgctacacctctaccgaaaacaccaactcgagcgactgcctcgaatcaacctgcatcgatg

SEQ ID NO: 177377 - DNA, 556 bp, Cannabis indica
aaaatgcaaaactttggtcaattgatcttatttttagtaatggcatcaaagacagcagatgaagtagaagtatatttatgaaaagaatgacaaaagaaagtcttcaaaggtttaacaaaataagacataaattacctaatagaaaccaatgctgagacctaaataaaaagactaaaactatcaccaactaacaataaacctaaaacaatcctagttaactagataatatgaatatctataaacattaattacccaaacatctcgttccactgtccacataaccaagtgctatgatttccaaaatgcatctctccttatgctttctttctttcccttttttttttttttattgctttctttcagttggaaattcagtatttttttggcgcaacttttgttttcataactctctatagcttcttttctttaatttgtttatgatgatgccaaatctcatttctctctctctttttttttttttggttacttacataaaaggagagggtagcttttatttgagtagtgttgtagatttgagaagaaaaaaaaagaaaaa

SEQ ID NO: 177378 - DNA, 615 bp, Cannabis indica
aataaaatctcttcaccttcgaagcaattatatacaaaaatagaaatgaaatttaatatgttagtagatagatgcgcgaagctctcatctgccaaaaaaaataaagcaatttaaaaagttttttttttttgatgattttttttttggatgaaaaagcaatttaaaaacgttattgatgagcaatatatctaattcacaatcttatttttcttagcctaaaatgaaatagcagaaaaatccatatgaaagtctaaacttaaaacaagaatcaaaacaaaaataatagatttgaaaaaaaattctcggtacctctgtgaacaaataaggaaacccctttgaagaaccaaagagagcaaatgggtagttataagattaagagataggaaaaataagaaacagattttacagatgaaaactaatacggcaaaaaaaaaaaaaagaacacaaccacgatacaaacttagtatatgtccggtcgacaacggaggagtgttgcgaaatagagcggccgacgatcggaagtcaccggagaagtggaacgagttgggtaggcactgaagaaaagtagtagaataggtttaagtaatgaaaagacgtgaaagtaatgaaagggta

SEQ ID NO: 177379 - DNA, 673 bp, Cannabis indica
ctaaagataagtttttttttaccattgcacacactaagggagagctaatctaatatatcttgcttcaatttttctttttcttttcaaaataatcaaatatttgatatcatcaaaaagagggagattgttaactcaaactcttaggtctccttgctttgatgattaataatatttgattattatttttctaacgatttgttgattttatagcacaattaaaaggtaaaataaatttgtctaagataaaattaactccaagggtaaaatggtaattttactaaaattctcgaaagtgacttgaattggattcaagactcaaggaactcaagacaaggctccatgaagatttatttatatttcctagtcttgtatagtgattttcaagtccatactcaaaaaagttttaagtacaaattttggttcattaacttgtgcgacaagttttctcaccaaatgatataaaaattttcaattgactttttaaatcacatatcatttaactaagagaacaaaattagaatttttgaaatcagataattgagtaaagagttataaccgttttagttcaaaaaattggactttttgccactgccaggaattcggtcggccggttcccaaacggttaatctgttctcctaatctcgatttaatgatttagaaatggtgaaccaga

SEQ ID NO: 177380 - DNA, 517 bp, Cannabis indica
aaaaaaaaattagtgacttataaattatcaatctaattgggctccatatattgagaattagaattcgtgtaatttgatatcaacttacaacatgatattacaatataatgtgtgaatttgtggtgttataactttttatctccggtagcaatatgctcatacataaaatatatagctgatacccaaattgaataatatataatgtgctgacttgaaattgcatcagcctgcaaagaggataagagtgtgggacaagagaattagctcatcatcgatcctttttgtttacaactcccatacgtacgtacgtacaaatatatatacgagtatatataattaatttcctgctgttctacacttgcgcatgcacaaaacaatcattctagcactagggtttcattttgatgtttcccgaagacccgtgatgacattatagctttattttcatatataaaatgaaccaacataatacattaatttgattctacatacattacccttatatatatatatatat

SEQ ID NO: 177381 - DNA, 417 bp, Cannabis indica
gtcaaaataatttccaatggatgaaattatgtaacagatttacaagattttgtatccaaatgggtggagccatggtgtgtggttacttagcttgctttctcatgatattaatcacatctttctctgcttttaatttattttcccattattcaccaaaacaatttctcctcttaaagcccataatctcatcttcatgatctactcactaatccattattattattgttaattaattaattacatatttaatgtgtatgtacatgcaaattgcaaagactctcacatctattccatctctatgtataattagaagatttggttattaattaatttaatagcatgattgagtatatagagaaaatgatttgcatagattgtactaattatgtagggttcaaaaatgtttaaatgctttaa

SEQ ID NO: 177382 - DNA, 575 bp, Cannabis indica
aggcccactgatggggtaaaatataatatttattgactttgggccaattgggcgaggcccaattcacgaagagcatatgtacaagcggggaccatttgaggatgtaagatggcggttaaagtagggaacaaaccctgacaaggtggggccctttgtctggacggttacgtgtactcttgttaatttattgttgatttttttttttgttattgttttgatgttattttcatgttccttttatatagtttttttattattttcgtgttgtttctatgaaaaactgtaaaaatgtaaaaaaaaaaaaaaaattacttcaaatgtaaaaatataatctttttataaaaatagtatcttatgtagttatcccttaaaaaaaaatatattaaatgtagcaaatatggtgagaagatatatataaatcttcctaaattattattttctagatatttaattattgaaaatgaggattttgaaatggtgaggtttaaggtgtgtgtgatttgtaataccattaaaatctcacacattctggtacaagataaaagagtcttggatttttttttgaagaaaaaaaa

SEQ ID NO: 177383 - DNA, 730 bp, Cannabis indica
gcctatgtacacatgaatagtccaacatggcacttaacacctaaaaatggatggaaagagctaagtgctaaacagaacatgaatttatgggattttactacaaaaattttgaattggggttagttacaataaactaaatacttatgggagttatgccgctaaataacttctattttttatttattaaaaccacttatttgtacttaatattactgaccgaataagactttttaagacattaaatatctttctatgctattaaactctctactgctattttattgtagctccatcatgtcagtaggtgatttttttttttgatttatttatatatatttatgtaagccaaattatgtaattcctaatctactttttagggatttcatccttcacaaaggacaaaataatagcaagttgctttatttgatgtgcttgataggtgtactgtagtttcaagtcactctaatcggtcatggttataaaaaaaaaagtattttatcaaatgaaatttgtagaaggttggatttttttgtaatttgtcaacttatatgtacaatattgtaagttaattaaatattttttttataaaaaaaaaaagtaaagagaattgtagctttaagttgttggattgtatttcctaggaaaagtgtttttttttttttttttgtaaggagctacaacgagactaaaaaagaaaccacaggaagtagcaacccaaagaagagaaaca

SEQ ID NO: 177384 - DNA, 688 bp, Cannabis indica
tgtagagtctgattgcttagtcttggtttcggtttccctaagcgttctttttttttgaaataaactagatttcttattagataatattgctagtttgctctctaattttcttgagacatctttaattcatgtttgacgtacaactaataaaactgcttattaattaattgtgcatgcacttagggtggatagtgaatttagcttggattgagaattttccttcttttcttattgatatattaaactctgatggttgttaatacgagtttaatttcaaaaagaaaaacaataatagtaaaaggcaatgctaaaaccaacttccctactttatgtaagcccgttcatcaaaaccaatttcgacgataaagttgcaaagtatatgaattcatgaaaaacaatgttcgaacatacattgaagaagaccacaccgaaaagccacacacagtttttttcttgaaaaaaaaaaaattagagttcccaagactcagaattctcagaataattgtttataaattatgaactaattatagcatacaataaaatacagaaatttaatggtttgtttacattgaactcagctggacaaaatccatgaaagcaattttggcataaatcatcaagcgaaagttcataatggtaaataaagaaataacttgaaatgtcaagctcaatactggaaaaaaataat

SEQ ID NO: 177385 - DNA, 576 bp, Cannabis indica
gtaagtttttttttttgatagtgtacgttttagttattaagtatattctttaaaatttcaaataatttaaaacaaataaaaaaaattacaaataacctattttattttacatacgtataaaataaattattgaaatactgcattttatattaaataattaataaacaataatttaggtaatttttttagagtaatttgcgacataatctttataagtgcttaacttattgcaactaactcccaattttaaaattttggtggtaaaactcccaaaactcgtgttctgttagcaattgagattttccatctattttcatctgttaagtgacatgctggattatccacgtgtacacaatttacacgtgacacaattttattggtccatgtaattattattttttaaattaaaaaataaatcattaaaaaaaacaatttttttttcttttcttttctttcctcagaatcttatcatatttttttattctttttcttttcttttctttcttcttcttcttctatcctgacgtcctcctcctctgacctcttcctccaccgctctgaagtcccacacacgca

SEQ ID NO: 177386 - DNA, 543 bp, Cannabis indica
aaagaatttgttggtttaaattcaaagtatggaatataattaagttttgcaatgtattattacttttgttattatttcatatggatttttttatataaatatatatttattgaataattctatagtgcaactataaaagagccattattagatacttttatcggattcggtatatatttagaagagttttaatccaattttcatgattacactccttgtaattatatttatggttcatttggaaaatgatagagaattaattgagttaagtgtaattgtaataagggccttttttatttttatttttataaaattctacataaaaacttctgttgcaactagcgctgtaacttaaattgcaacaaaaaatcgtataaaaattcctattgcaatttagcgctacaaccactttaaaaaactcaaaccgtaaatttgaaaaaaaattaaaaaaccagaataattccccttgtaataattacacaatttattgacacttttatctaataatttaaataaaaatgtaactatgtaattggattaatt

SEQ ID NO: 177387 - DNA, 692 bp, Cannabis indica
atgtacgttcttaattaattaaatacattaatattatttatcttttttatgagaataatgagatggttagattagatatatcatatatggtacattatatttatgtaaatgtttatatttatatgatctctctttaatgtttattcatattcaatttaattaacaagagaaagtggccctttagccagatgatttcttctgtcaaaaagtgtttttatttggacaaaagaatttcaaaatataattattaaaatataaataattaataataaagttaaattataattgatcgaagacagaagaaaaaaaaaaacttatatatatagttgttgtagtagtagtgtatagaagttagctacattggcttttttaagttggaataactaattaatattttatttttaatttaattttgttatgggaaaattataaaagaatataggcagtaggattattaagtatgcttaaaaaaataatatgctacattgtataattttgtggtaacatatttttttttcgaacttttttatttttaaaaggtaaaagcctataataatactttttagatacaagtgcttttttttttgttttgtttttgtttttgtttttgttttttttttttgttttttttttgtttttttttcgttttgattcactatgtcatggtatgttattactatactagctaacta

SEQ ID NO: 177388 - DNA, 733 bp, Cannabis indica
cttctgttgacaatattttatcctctacccttaaaagagtttaagaaatcgcaaagctctgtcctattttccttgcttatttcataaactacgcccaatttaaaccagtgtatatggacctgtgaattaagcaattaaggaaaatggacaagatatggtatgaccccaaacttcagcttgagttgttaagaaaccataacataatttgtaaatcctaaagaatagatacgacaaaaagatacatagttcaataacaaaaatatgaagtttaaataaataagttaagtagcattcagcacaaacctttaagatgaataaatccaccatgaatgtcaggacatctctccaaatccagcttttccaagttaactaaactcgagaaggcacgcatgccttcagcagttactgcggtgctctttttaaaactcaaagaggtcaattttgagaatcctacagaacaaggttattgcatgcattcgttaggaactgtttaagttaatcctttttaatatatatatataaaaaaaaaaataaataactttaagtaagagatggggggcactagacatggaggtgataagacatagttgaaattgtaaatggagaaagaaatatagaatacttaccaccaatagtgattaaagtcccgatattctgaaaagttactgacagcaattcaaagtcaactcttggaggtctgtgcattgtttgagagaagccaatccagtataag

SEQ ID NO: 177389 - DNA, 1171 bp, Cannabis indica
gaaagaaatgaagaaaagagatttaaaaaaaaagggaggtgaatatgtgattatggtgaaagagaatcagatttcatttttgattggatttaaaacaaggtgcaatgctttgaaattgcacaagacccttggtacatgtatcatcttcttaagtccccctatgactaagagaccagcattagtattttttattctcatcctctgtttcacgttcttacttttggttagaagtcatgataacatgttccttttcttccaatcagattgcacaaactatgcaaattccacttgcttatgcggaagacattattggcattgaaggatctaatattgcatacattcggcgtaccagtggagccattctaactgtgcaagagagtatggggcttcctgatgaaatcactgtggaaatcaaaggcacctcaacacaagttcagttggctcaacaactaattcaggtgcttattaaaatcaattactcactccctgcacaatcaatgaaatactagacaatttagcatatctgctcatttcggaatcagtttgaaaaagttgaccattcttttaacttttgaaaaaaaaaaaaaatataaacgtatagccatcgaaaatttcattgcagcccacaagaacttagatgtctttttgcttatcattcatatattgtttggcttctttccaactgtggagacccgaaccttggtcttcttgcaatgtgaatgtaataatgaatggtcaaatcattgattactacatctgcgcaacactctaatggttgaattggtgtgtagtgcaagaggtctggggttcaaatcgctgcctgggctaatctaactaatatgagtaaatcacttaacggttccttgggagcttgaatacattaggatttattttttttgcctgcatccctttactaaataattaatcaaccttcccaaagaaagcaaccgatttattttcgtttgatgtttgattgccgtgagagaatggtgatgctgataatattgaataaaaaaatgaataatgacatgtctattcatgtgttttacaaaagttaattttgttttgttaatgacattttagatcttgcattgttcaaaatagaacataataatatcttagacctaaattttagttaaaatacgacatagtaacaacctgatctgaaggt

SEQ ID NO: 177390 - DNA, 826 bp, Cannabis indica
gtacgaaaaaaattatttttttttttcacgcttttcacgatcaattaaaagaataatgctggtactaaactaaaattgaaaatactaacaaaacaatcaaaacaaaataatacttgggctgcctcccagaagcgctgtgtttatcgtcatgcagctagacgctgagccttgcacttcaaagtggcgccaggatcatggcggacttggcttggtcaaactgacctcccaagtagagctttaacctttgtccattgactttgaaagttgttggactttcaccttttaactccaccgctccataaggaaacaccttgaccaccgtaaatggtcccgaccatcttgatttcagctttccaggaaacagtttcagccttgaattgaagagtagcacttgctgtcctggttgaaactctttccgtattagaccttgatcgtgccactttttagttctctctttgtatatcttggcgttttcataggcttcgttccgaaactcatctagctcattcagctgtaacagtcttttctcccctgcagcttttagttccatgttaagagtcttcatggcccaaaaagctctatgctctaactccaccggtaaatgacaagcctttccaaacaccaaccgatatggggacatgccaatcggtgttttgaaagctgttctgtatgcccacagtgcgtcatccaacttccttgaccaatctttccttgatctttgcactgttttctccagaatcatcttaatctctcggttagagatttcagcttggccattactttggggatggtatggtaaagcagttcgatgtcgaacaccatatct

SEQ ID NO: 177391 - DNA, 658 bp, Cannabis indica
gatgtcaaaatataacttaggcaacgtaaagtatatcccttggatattttttacacttacccaatgtccaggttgatgccacatgtcaacctaggtactgagatgccaacctggaagctaggtcattaattgccttcagtaaaatagccataactcactcaatatttgacctgattattgcgattcaacttgcattatgaagataatttaatgatctatcaagtaatgtctcacacttcagtcgcaattctgaagttattgacctcaaatttcaccctaaggcaattacaaaaataagctctaagttacatgcaaggtcattttgaactttcagaaaactactcataaggtcagagcttctctctctagaaattaaagtttctgacacttagcctttttctgtaataccatcttgagaaataaaaactcgaagtagatgtagctcaattactgccgtgattcagggagtgaactactataaatttgttgtctctcttataattacttaacatctgtttcattctcgccaatctaacaagcaagtgtgacttagaagtttaatctaaatttctgagtcaactttttattatcttaaaatcaatttattaatcatgttgtctttaaaaaaaaagtaacgagttcgaagatgatatgtata

SEQ ID NO: 177392 - DNA, 572 bp, Cannabis indica
aaataaaattatcaatttattgattcaatccaaaatgagataatataatcataatagaaaaaaaaaaaaattgaatttcacctcttcctggcaaacaaaaccatagatgatagatcccgctctccttataattttggttaaagttgtttatttttagggtatattgcggtgcataacattattataaggggatatatcatatatgtaacatttttcattataattattaaattaatatatgaacgtaagacttaataataaattttcctcaaaaaaaaaatacttaataataaattagataacaatacatatttatttttatattttatttttattttaccatataaataaataaaggtatactagttataccgttaaatatgtgaaaattttgttatatacccacttattcgttttaatttttatcattatttctatattctttaagatatactcacttttataaatgatatccctattataccattagattaaatcatgtgctacatttaaatggaaggcaagtattacgaaatcaagagaggaatgaaaagataaaattgtgtaaattg

SEQ ID NO: 177393 - DNA, 869 bp, Cannabis indica
tttcattttctttaagagatacccactattatagatgatgtccctattatacccgttaagttaatgtaaaatatatgttaaacttaagtagaaggtaagggtatattatatttgagaactcactcacaaaagtgggtatattttaataaaatataatataagggtatttttaattaatggaacaaaaaaagatatttttcaatttatccctaactattattatgactaaggtgggctaagttttcacctaggctcactcagcccaatacttaacttttttaatttttagaaatggacatattctttaataattttaaaaatatcactttctttttattaaaggacgtataaaatctggggtgattctacaatgcacctccttaaaatgaatgtattgatacaccatcaacttgtttcggcatccagaaaaattttttagtctaattttctttcatatttatgtacgttatagctagttaagataacctacaaaattttgagaaatttcgaataatttacaatataaaaaacaatgttcgaacaatctattttacacgcgtataaaataaaatagtcacgcgtgcaacacactatttgtacgtagttttcgacgtgttaaatttttctaaatttcttaaaattttatagggtgtcttaaataactataacgtacatgaccatgagaaaaaatttgactaaaatattattttgagtactaaaacaggtaagggtgcatcaatgtattcattttaagggagtgcattatagaattccccgaggcttattttgattgattatgtacctggaagaggacgaagttaataaggtagagaataaggcgtgggcggttgaaccagaaaaggtcgtcc

SEQ ID NO: 177394 - DNA, 914 bp, Cannabis indica
gtttcaatcagttgggtattactcaacttttttctatcacagttgataatgcctcgtcaaacgatgtagctttgagaaaagtaaaggaatatttaacaaaaaagataaagctttagtattggatggagagatgtttcatatgcgttgttgtgcgcatatcttgaacttggttgttaatgatggtttaaaagatatgtcttatgccatatctagcataaggaatgcggtaaggtatgtgagatcttctccagctcggttgaagcggtttagagaagcttgtaaggaagcaaatgttgaatcaaaagccttgctatgtttagatgtggtgacaagatggaactccacatacatgatgcttgaagcagcattgaagtacaagagtgtttttaagtatatggaaggggatgcatactacactaagtattttgaagaagaaagagtcaatggggaaaaacttgacggcccaccagaagctagtgattggagcaatgctgaagtatttgttaaatttctcaactctttttatcaactcactttgaagttcagtgggtcattgtacgtaacatcaaatcttttctttcaagagattttgcaagttcaagttgagctcaatgatatgaaggctagtaaagatgagttgattagcaaaatggcggggagcatgcaattaaagtttaacaagtattggggcaacgtggagaaggttaacttgttgcagtatattgcgtctattttggatccaagattcaaacttgatgtggttcggaatggtttccggtaaggttttgacttttttctcatttattctcttttatttatttttttcactataattactataatattactataaatcaatattactattttaagctttttttctttatatttactattgtttttaaatgtttttc

SEQ ID NO: 177395 - DNA, 932 bp, Cannabis indica
ccttaaaccaataggtaacaacctttgcagtaagatatgacaatcatggcttttcaacccaaataattttccatctttcatgttaacatttcgagaaatatttcctgcatatccatcaggaaattttacagattttatgaacgtacaaaattcttgtcgttcctttgccgatagtgtataacatgctactggtttcaaccatttattccctttctttttcatgtgtagctgcttccgaatatttaagtcttgtaaatcaagtcttgccttttcagtatccttagacttcccatcgatactaaatattgtaccgaccacactctcacatatatttttttcaatatgcatcacatccaaattatgtcttagttttaacttaggccagtattctaactcccacaaaatactttttcgcctccagtttgttttgttttcataagatgcatccttcatttgttgcttatcttccttaatgatcttatcatttttccctggcctacatttccataaaccttttactttgtccaagatttcatctcctgttaaaattcttggagccgaacgtctttcaattgtgccatcgtactctttatccttgcgccattggtggttcagactcaaatatcgacgatgacccatgaaacatgtttttcctcttactcgaaatgaagatgtgtcttcctcacaaacaggacaagccttatacccttgagtgctataccccagacacagtaccatatgctggaaaatcattaatcgtccataatactgcagcacgcattgtaaaaatattcttggtcaaacaatatcaaaaagtacgcacccccatttttcccaataactcccttgacgctcatcaattagaggtcgtaaaaagacatctatgtctttgcctggagcactgggtcctggaattgtaatgccatcattcg

SEQ ID NO: 177396 - DNA, 760 bp, Cannabis indica
tatcctaattggtatacaattataattttgtaatttttcctttataaaagggatgaaagcaattcaagttttcaacaaactataagcaagaaataaatagagaaagaaagaaatagagaaaaagagatgcagcggttaaggttggaagttgaagattttgttacattggcaactatagtactatatgtcatcattgcaatctttgaagacttcattggattccgtaataacattctagctaaacaagcatggagcggcttggctacacttactgcagtcgttaccattatatatgtgttgtttgcgttgttaacaatttggtatggtcgtctaataacgatctcaccttataggggcgttgacactagaaaaatggagatagtgattataaatgtcttgttggctattttcactgggtatcatacgtttgtgtcttttcaacgaatttttccaaatttgacagagaacaaaattttgttcagaatgcattcaatatcgacattgtccattgctcttttattcttaaaatgtgtattcatacacatggattatatcattgagaattctaaagaagagatttatgtatcttcaatagagtgctcattgttaacaacaaataacgatgaaggcgatattgacgaccaatacctggaagacatttttctttagaaaatttgattgtttcttctttgtttctacaaattttagaagcactgttttttttttttataacattcttagagaagttgagttagttaat

SEQ ID NO: 177397 - DNA, 700 bp, Cannabis indica
taaatggactattatcaatttatcataattataaatgtatttaatttaatatatgaaagtaatgttatttttcagatatattttattttcagcaagtatatattattttctttaacatatgcaataatctatatttaatagctattctatataataaatatttaattttgtatcgtagtaatttttgtttcttttttttttttccttttgttttttaacagttcaattttgtgttttattatgtattatgtttttttttttgacaaattttattatgtattattgctatatagatatatatttttgagattgactttcctggtgtcaaatcaagaaatattaatatttatttacttttatctcttatttccactgaaacggatatgcattcaacattttgtccaaaagctacaaggataatgtaatagtttttttatgtagcaaggataatataacagtttgtttggtgaattatatctgatatttttagctctatttatattagatattgaattttttaatatatatcggatctaattaattttagctatctaaactgatctagtactcattaaatattagattggactaattttatccattgaatacatatgtatatatattagattaattcattacacctatttaataattttttttaagatccaatccaattcattcaatattttaaaattaatat

SEQ ID NO: 177398 - DNA, 710 bp, Cannabis indica
taaaaaaatttaacctgaatgaatgcaatacaaagatcagtttacaccaaatgacctaaaaattaatatatttaccacttgaaatttcaaaaggggaataaaagaaaccctaattttaatccttgtttgcccagagcatacatttaatagataaaattcaaattcaattcaacaaagcgaagaaaagaaaagaaattaggcctaccttgaatcaactatacgaaaaaaaaaaaactcattttaagtagcttagaaaatgcaggaaaactattaaagactagaacattgactcttctacaaattgaaaatttagatccaaaatacaagacaggactaatagttataacttcaactgaataaaacaaaatcaattttttttttaaaatgaagtccaatatcataaaccccaaaaacataaatttccactatctttaatccctttccccaattttctcagagaagaaacaagaactccgatttcatactaaagaaattgagaaattaaatagctcaatctagaaaaaaaaaataaaaaactaccgtaagtaccagagagaaatttgagatgatcggagaaaccctagaaccagaaacggaaagttttgagtcctggagaacacgattgaaaccggagacaatcttccgacataagcatctacagttcggtgtgaaccaaagagaaggaacgcaaaaaaaaaaaaattaaaaaa

SEQ ID NO: 177399 - DNA, 1078 bp, Cannabis indica
catcaaataccctctaaaatttagttgcagagcttcaaatagcaaagatgatcagcaagattatctgatagatgctcctgtatcagtaggtgatggtttctctttcagtggaggtacttcaattctactcacttctcatacaaacaaaaatcgaccctttgctttatttttgtgaaaaaatgtaagcttttgacaggaaaatattcggatggacaaagcccttctgatgaatggttcaagcaaggcaaaatagtgaaagctcaccctgttggtggctctggtgggaaggctaaagatccaatttttggacttgaaatgagttccacttctcaagtttcagctgatgttttcaggttatgattaattattacaagtttagatttagaatgtagagttgggcattgaaaattttgaggtttagaggcttagagtggtctataaatatgtggcatcaaatgcagggcttatcgattgaaacatcctctctctctctctatctatgattttgttacaatagatggttttgcgttgaatctggaagtgctgataatccttcggttatattagttcacggtttccttctctaggttagtcttcattatctagtttatgggaatcaaatccattaaaaaaatgagtacaaatttgctactcaaatccattttcttagtaccattattttatttaagattcacttaaaattttgatttggatttcaatctagtattgaattgattagttaatatacttgaaattgtttaacaggcctactcttatagaaaagttcttcccatactttctaaagactttcatccaattgcttttgattggcttggtgagatagtaatctcaacctcttcttatattgaatttggatattcattgcttgcattatatacataatatctcttgtcattctttacatttccctttcaggatttggattttctgataagcctcaacgtggatatggatttgactacactcttgatggtaatattttttactggtcttgattttcttttcatttagtattgcttaatacaaatttctgttgaaacttgtaatgtatttgcag

SEQ ID NO: 177400 - DNA, 981 bp, Cannabis indica
catcaaataccctctaaaatttagttgcagagcttcaaatagcaaagatgatcagcaagattatctgatagatgctcctgtatcagtaggtgatggtttctctttcagtggaggtacttcaattctactcacttctcatacaaacaaaaatcgaccctttgctttattttttgtgaaaaaatgtaagcttttgacaggaaaatattcggatggacaaagcccttctgatgaatggttcaagcaaggcaaaatagtgaaagctcaccctgttggtggctctggtgggaaggctaaagatccaatttttggacttgaaatgagttccacttctcaagtttcagctgatgttttcaggttatgattaattattacaagtttagatttagaatgtagagttgggcattgaaaattttgaggtttagaggcttagagtggtctataaatatgtggcatcaaatgcagggcttatcgattgaaacatcctctctctctctctatctatgtattttgttacaatagattggttttgcgttgaatctggaagtgctgatatccttcggttatattagttctacggtttcccttctcgaggttagtcttcattatctagtttagtgggaatcaaatccattaaaaaaatgagtacaaatttgctactcaaatccaatttcttagtaccatattttatttaagattcacttaaaactttgattgggatttcaatctagtattgaattgattagttaatatacttgaaattgtttaacaggcctactcttatagaaaagttcttcccatactttctaaagactttcatccaattgcttttgattggcttggtgagatagtaatctcaacctcttcttatattgaatttggatattcattgcttgcattatatacataatatctcttgtcattctttacatttccctttcaggatttggattttctgataagcctcaacgtggatatggattt

SEQ ID NO: 177401 - DNA, 627 bp, Cannabis indica
ttatttatttatttttagtaaatactattttgtgtatgttttataaagttactaattttattgaatttaataaaataaatttatatttttaaaattataaaatagaattttgaactcaatttttaataattttatttttgtaatataataatttttaatacgaacaaatataaaaaatataactaattttgtcaataatatgattattattaagttttattttgatataaaaattagttcgggatcttatttgtataattttaaaaactacaaaatttattttatcatttaaaaaaacagaagatacaattaataatttttataaaacactgactctaaaaaaatatttaccatttattaattattatatttttttattttttttaagatttgaggttacacaaccttatatattcaacataggacgcataaaaccatgaaaatgaccggcaactatttatttgagatgttccaagtgattatgtgtggttcaaaaatacactaacataatatatttaccaaaacaacgtttgtcttcactcttcataatgattgatgtaaatctatgaaaacataagggtctaaaagctagcgtttctcatttggcctccactctggtcccattta

SEQ ID NO: 177402 - DNA, 582 bp, Cannabis indica
ttgtaaaaaattgtgtgtgatagtaaaattgtaaatttttgcctaaaatttaatatttttgtaaaaaccttcttttttattggaaatcaaaggcccataggccatgttcacaatgggccatcaataagtaagaagcaaggtcccctactacacatcaatcaccttcggttcaaaacacacacatattttgggtttaaatgagacgaaatcgcaaattcatggttttgactacaaaatactaaaagtatacttttacaaaaaaataaaaaaaaaaaaaaaaaaaaaaaaaggaactaaccaaaaaataatcgtaatcgtaactcatttgaccaataaaaaaatttagggctgttttggcgtggttggcattttgaactttttcagaaactttcaaatttttttttttgtttgtaaaaatattagacctataatcatatgggccgggccggcatgaagtgagatgcagtgattgggtttcaacccttaataatagtcgtgtcgtgtcgtgttgtggtggtagttatctaattaaatctacattcttttgctcatagtgtattgatccacactaagtgtattagg

SEQ ID NO: 177403 - DNA, 530 bp, Cannabis indica
agtttttttttctatgaatcttaaaatatgatatgaaagatcctatattaataatatttactataaactaggaccgccttaaacattctggaggccctattctaatttgaaatttgacccctacaaaaaagaatacaatttataaataatatttttaaatattatcattcagttatatattttataaaacacaaaaaaactttagctattataaaaattattattaattctaatagaacaaaaaaaatgataagaaaaaaaatataaaaaatgaaaaaaataataaatatataacagtaatatattttatttttttacttaaaagcattaatagaattgaaaatagactttggaaattgggatggaagtgactaatgataaattgttagccctttcaaaatttaggtttataataaaaattattaggcattaaaaaaatatatatttgaccttttattttttttttggaccctgtgtaatagcccacctttcataccattatcgtcagtcatgctatacaactattatat

SEQ ID NO: 177404 - DNA, 795 bp, Cannabis indica
gttgcaactaagtatcgggtcccatataatatttttatataatagattttagagagtatcgctaaccaatcgcaacgcgacatatcgcaaaggtgctaggcaccactaatacctaatagcaatgctctatatatatatatagatatggtgaagaagatccacatgtaattttttcttcttttttcttaatacgtatacgttacaacatcaaaatcagagtttgaagaagaaggtgaagacgaggactgatcacaattataaactctatcagtttaataaatttgacaggtaatttataaaataaaaatgatatataacactatgtacaagaaaatggtgttttaggggcgacattaataggggtgataaaatgtcgctcctagtaacccgttattagcggcaactttctcatgtcgttgctaataattatcatcaatttttttgattttaagtttcaaattatttaggggtgacatttaatatttgggaattttttattgttatttttacacttcaaaatgtttttcttgcatttttacggaaatctacagagcaacttacggagtaacctaaattgcaaccaatattcatataacaacccacataaaaactaccggagcaaccacgtccagagcaacccaaaccgtaattaaaaaatagtatataaattaatttcccttaatatttttatagtggtgacacatcgtccctaaaaaattgattaaacaaatattttattaaaaaaatgttataaataaaatatataaaaaactggaaaaaatccaacacacaaag

SEQ ID NO: 177405 - DNA, 1145 bp, Cannabis indica
atttaggattttcgttcaaaactttgatatgtatcaaattatgccccctgaaattgagattgttgaatttaagggattttgtccaagtttttttttaaggaaaatttaacataaatcaaagtttagggaacataatttggtatatgtcaaattttaggagcattttggtagatatcaaagtttgatgagtataatcaccaaattagtaaaattaaaagaaattagacaaaagtctttaaattcaacaatctcaataatttttaacgatcagaaaagttcaagaagcgtgatttagtacatgtcaaagttcagggtaaaaatcttaagttaggtttttttttttttttaaaaaaaaaaaaaagaatgagctatttacgaaactatggggaaaaagtaaaaagtttacataaatatgatattttttaaccaagcaaactaaatatataggtatataaatgaaaaaatgccctaaaaattattaaaaataaaatcaattacctttcctactctacacttggtaataacattaaatttaagaaacctaagaactcttatgcaagaggccctgaaaaacactcagaaatctgaataagtttgactcgtgaactatacagaattttaactgcaaaaccacgtaaaaaaccctatgttcatattttatttttctatagcttttattattcatgtgttgaattatcattgtgaggctcaaatttggttaacaaaaatctgcgttaacaataatatagtccataagcaagtattaaattaaattcacagtattacccttctcgggtcaaaattactaaaatatccctggctcaccaacagggtcttaacatgtcatatttcataataatttgcatataatagattatataataatataattacacaatttactagttagggattgctaatccatttcataatcttagggtattacaaatagggtagttgtaatatcccaaaaaatataattatgtttaataagacatattttattaaatatggaataacatgtgtagcttaaagcataatgagtgagattataatcttaccaagctaattatgtaataattaaagattttaacggcaatgaatgaataagcgtaatttattaattacgaagattttatttgact

SEQ ID NO: 177406 - DNA, 600 bp, Cannabis indica
ctccttcatccttccctgaatcatcatataaaacatagtttctagtgtaaatgatcacaaaaggaacacactaaaaacagctttctaatccagttaagtgttaaatccaaatacctccaaaatttgatgaaagttggatatgtcgtcaggtctcattcctgaagggcagctgatgtagaagtatggctcaaagccatgaacattacagcacacactatgtcctatgaataaaaatcacaaatttaaatgatctcatctttgaaagtaattccaattggaagggtttaataaactaaagccacttgtacacacaaactccatgcgcaaacatagaataagatttattgcattcccaagaacttttctttatacactaaattggtaaatttctatgtataaaaatataaatgcatttaaataaatacaaaattatggccaaactgtaatggggggtttggcttctaggggatgggaatgtaaaaccaaacttatgtttggtatggttttagtagagggtttatatttgtgtggatcccatcccatctttaagattatttatggggtaatcccaaactcaaacacttcactttgagttttttt

SEQ ID NO: 177407 - DNA, 717 bp, Cannabis indica
tcacacaaatatagcatttactcaattaacagagctccatcatgggattaagttttagtagccactaaggtaatgtttggttagggagaaatgaaaaaataggaatagaaatagaaatatagaaataggaatgaaattgaataaaatttaaaatgtaataaaaaaaaattattaatggttccaattacgtccagagatgacacatttccatttcttagcttttctctcgtcggagctgaattttttcggccccaattacgtcatctctggtctcgttaagccaaacaagctatggaaatgtgttcacctcgttaagggcttcgagaatctttggcacaatcctccatgcacctcctttgaccaagaacccccaccatgcacgacggagctccagggggtcttatggtgacagatctgatggagcctcgagatcctctagatcttatttttttttcttagggatctatttctttttttatttgattttggagaatttttcagtggtaatggtaatggtagtagggttgtttgtggtgcgagtggtgaagtttttgaccattttttcaaaccaactcgcacatacggtttttttaatttcttaaactgcatccacaccgcgaaactaaaaaatcgcagaaattgcaccgcaaaaaatggtgcggtgcagtttctgcgatttggactatcaccaaataattaaattatcataaatacaat

SEQ ID NO: 177408 - DNA, 696 bp, Cannabis indica
ttatcttttgtaatgtttagggaaaattgataatattttgtaacgtttattattgatctgattatatttaaatttcttttgtaaattaatttgctgttaaaattgtatgattttttttttgaaaaacaaatatgtggaaagaaaaaacagtaatgataagtatattaattagtttagaatgaaatagagcaagggtcaaagatgaatggaagtttcattttactaatgctgaaagtttaagaaaaatattttaacaatgataatagtgtttgtttttttaactttaaagaagaaattatttatttattaaataaaaaatggtatttttcttttgtttttctaattttattaaagtgtaaagaacaaaatatttgtttattgaaatatgctaataaagaattgtttgcactttgagctgaagttattcttgggctttaaataaacacattatttatcttagcttgtttgtgctggaaagtatctattggtttggttggttgtttggttttatttttattttttaatttttttaggtacattacaaatatattaaggatatattagttggattaataatatatatatatatatatatatatatttttacaatgcacctttatctgctcctatatttgagagtaattttttagttcgttttttttgtatagttgtctgtgttataattatttaaaatat

SEQ ID NO: 177409 - DNA, 743 bp, Cannabis indica
aggtttttgtttctcaaatgcaaaaggagttcgaaatgagcatggtaggtgaacttacttattttctcagtcttcaagtgaagtaatcagatgagggaacgtttgtctctcaaagcaggtatgcaaagaacttggcgaaaaagtttggtcttaagaatgccaaacatacaaatactcccatgagcacaacattgaaattaaccaaagatgaacaagaagtaaaggtagatcaaactttgtatcgaaatatgataggcagtttgctttatctcactgctagtcatcctgacatttactaaagtgttggtgtttatgcacgatatcagggaaacctcatatttctactgtgaaaagaatcattggatttataaatagcactattgattttgggatttgattttctaaagacactaagtctaatcttatttgttttagtgatgctgattgggcaggtaatgcagatgatagaaaaaccagcagtggtggatgtttctatcttggaaacaatcttatttcatggcacagtacaaagcaaaactcaatctctctgtccactgcagaggttgagtacaatgctacgtgtagttgttgtacccaatcattatggatgaaacaaatgatggcagattatgggtttgatttgaaaactttagctattttcagtgataatgctagtgctataaacatttcaaaaaaatcctgttaaaacactcacgcacaaaagcacatagacatatgtcatc

SEQ ID NO: 177410 - DNA, 1030 bp, Cannabis indica
atgaatttatttcacttttttttttattttttatctctaaattaattattttgttaataaatttatcttcctctcttattttaattaataaaatatatttaaaaatataatattttaacgatgtgaaagaaaaaaatagagaaacttaaatatttgaggtaaaataaaaaaaaaagtaaaattttagtagtgtattttgaggataaagtagcgaaactgaatgatagagtagagcatatctaatgcctaatggtacgctcaattttctttaggtaaaaatctaaaatagagaactatttttattgttattactctattcatactccatactttagtaaagtatttgattattttaataatattatataatttgaattcgccaaatataaatttattttataatataataaaaaataatgtttttaaattacaatactattaaaaaagtttaagcaaaaaaaaaaaataaataaataaataataaaaaaaaaaaaaaaaaaaaaaagaaaggaacctcctacctaaagaacatttctagccatgctctctaaatacactccttggctaaattagagagtgggctttaacaaataagcttaaaccatataatatatgactccttgtaatagagaatggatagtgagctctctattttttttgtaaaatttttttaaaattaatttatatttaacaaattcaaattataaattattattaaaataatcatatactaactaaaattgagagcatgattggagtaaaaatatgactccctattttaacattttagctattttatctaaaatttggctgaaaaatagagagtatggtataatggtatccttttttttttagctaaaatagtttaaaaaaactaaaatagagagccatttttattattatgtgttgccctttattttgtccaaaatacgtggaccaaccagattgtgacacgtggattgaagaagcaagagtttgagatgattcgactaagtctccttaatcaaagggatcagcatttaacatgcct

SEQ ID NO: 177411 - DNA, 796 bp, Cannabis indica
ttttagttaatttttacaaaaatattggcacacggaaagctgttaaaaaatactgaatttttataaaacaacactgaaacacaaaacagaacaactaaaaacaacagtaaaataactaaaaaaataactgtagaacaacagtgtaagcttaacacaattatagtgtaaaactaacatagtatttttgaaaaaaatccgccccgtagtacaaaagtaaaaaaattaaaaatttcagtatttggtgtaattatccctataataatgccacattatgataggtcggcccaagtattgggcagtttaggctattacacaagactatttttttttttttttttaaaaaaaaaataagttaattttttttttctattatacatatataaataaaaagtttattttatttattaaaatatctttaaaaaaaagttggtaataaaattgtaatgcacacttaataatttttttttaaaaaaaattgtaatgcacacaaatttaaaatataatttttagaaaaaaaaaggtttaaaaatgtattctaaaaaacgttggtattggtaatgcgcacacgaattttgttcgtttttttttttccttcaagaccttcaaaatatttgggcagtcttgtaacaatttgttaattctattttaccttatttttatcttgtataatagggtaaatttttattttttattttaaaaaaagagctaaatatataagcaatattagtttatattttggccaaaattaacacaaattattaaatacgagatggtctagtaaaagtgttacttttat

SEQ ID NO: 177412 - DNA, 938 bp, Cannabis indica
ctcctcggttcgtcgattgggttcgtgggtttggttcgtggggttgggttcgtgggtggtcgacggcggcgtgggtttgttggtttcgtggtcgacgccgtgggtacgttggtctggttcgtgtgggttcgtgaagagagcgagagagagggaaagtctttgagcgagagagagggaaagtcagagagccagagagagagggaaagtcagagagatagtgaaaatttaattttaggggtattttaggaactttttcaaattagaggaatcaatttgttcaaaaaattaataggtataaattttgatattgagtgttttattagggccaaaatatgaaatttccctttaataagtggtagagttaaacgacagtaactatagacaaaaaccagtgtcgttttaatatattaatacattatacaaataatcttcttgtacttttcgaatcattttgctcttttcccaaatgtttgactattgatattgaccttgacgacgaacatgtgaccttaaattattttaaggaaaataaaatattttttttttactgaaatttaaaaatttattttcaattctcttaattatatttttttaaaaaaaatagatagttggatagttaacatgataacaaacaaaacttgacagtgatagtgtgaacataaatatttatagaaacaaaaattaagtttttttttttttttaataaaaaaaagagaataaaataaaaaggaataattacataaggcatcattttttgtaaaatatttatatttttacgttcaaataatgtttttttacatttttacagttttcaaaaaaataacataaaatcaacataaaaataacatgaaaataacatcaaaataacaacaaaaaaataacaaaaaataatatacaaataacaaaaaattaacaacaaatgaaaaaaatttaaacat

SEQ ID NO: 177413 - DNA, 868 bp, Cannabis indica
ttagttagtaccaaaaacatacgaaatgaaaaaaaaaaaaaaagaagaattgaactacaaatacaacagaaaacaaacaaaacaactatacacctaatacgaaaacccaaaaaaactaggcatctcttactctagaaccaaacagagcaaatagcacaggatgaatatgatcaggagaagcttcattttactcaagagaaaaccaaacagagcatctcttacttcaggagaacctttcttttctcaagataaaaccaaacagagcatctcttacttcaggagaagctttcttttctcaagagataatgaaatgaaatgtttacccaagcacaaggctatatagctatagactttagcaatatacctatcatgtggcatactacccaaatgactcgtccttaaactacaagacacaatagcataacaaaaattctaggattcaaagatcgccaaaagatgaaaaaaaaaaatgggtctttgatcaactataaaataaaattgaataatcaatcgaaagtccaaaaatccaagagcagagaatacaaaagagaccgcaactaaccttgatctgaagatcaccgcagcaggccccgaacgtatcaagcagtcgagtactgttaacggattacagacaccatacctgagatttgtaggggacgatcatggtcgggatcctttttttatcaagcagtcgagtgccattaacggattacagacaccataccagagatttgtagaggacgatcatggtcggggccccttttttccaaaaatggaaggatcgggcttcttttgtggtgaccaaaattaaataacagaaatattacaaaaagaaaaaaaaaatacgaatggcataactgccacagcc

SEQ ID NO: 177414 - DNA, 758 bp, Cannabis indica
tcgaaccgcgttgaacttttctctcattctggccctcctctcaaaaatccgggttcaggcaccgcattggttggctataatcccatgccacgcaacctacaatctaaccgtgacgatgcaccaatcaccactaacaaaaagccacgtcatgtatgaacagaaatgaaagaatcgtcgtaatcaaatccaacggctgaaaatgaatgacagatcatgtcagattaaacggtcggaaagtcggaagagtaagttgttgacgtggaagtacggcgtctcgtgaagatgccacgcgtcaaatcgaattgagaagagcgagaatgtcagtgagtcagagtcagagagctaaaaaccaaaccaatgagaatggctgctctcatcaaggtgtaacaaaaaactcgtcaatcataagtcgaccaattaattattaaataaatattttagaaaaataaataaaaacacggaaatcgaggaacgttccaatgaaatagcaacttttcgtggttccaaatgcgatataagacaacttttcttcaaaaagtcttattttgaaattactattgcaccctttgataaattttgctaattttcttcttctcttttttttaatctatccatattccatagaatcttgttatttgttttaaaagaaaattattaatatttaatggtttcttttttttttagtagtaaatattattttgtaatgttgtgttttgttaaaagttattaattagtactttatgttttgtaaaattgac

SEQ ID NO: 177415 - DNA, 727 bp, Cannabis indica
aaaaccgcctctaaaggggctttttgtagtagtgatgtctaagatataagcaaaaatagaaccggttctataacattatgaataaaaataaataacacagaacaactcaaacccgttataattaaaatataaccggttctataatataatgaataaaagtatataacataaaataactcaaaccggttataattaaaatataaccggttctataatataatgaataaaaataattaacataaaataactcaaaccagttataattaaaataaaaccggttgtataaaatgttataatgaataaaacaaataacacgaaataactcaaacctgttataactaaaatagaaccggttatataacataatgaatgaatatttttagggtagatgtagtatgggtgtaattatttggtcgattagaacatgttgaatgattgtttttgtttgagttattttatttaactgatatttttgtgtaagttttaatcttagttgctttatagaaccagtttttttgtcttaaatttttaatagtttgattcaatattactggtttctttatattatattttcagtttattgtatgttattatttgtgtttacttattttgttatggaactggttctttttatatttatgctttaagtatttttttggaatttcatctctatttttttttaaaaaaaaaaaaattattaaatcgggtttatgtaggtattttgttg

SEQ ID NO: 177416 - DNA, 578 bp, Cannabis indica
gtactttttttaggaaaaaaaaagcggtttcaattatcttatggcctaataagtctacaataataatatagtgccactaaatcttctccaaataactttcccgtgaatggagattaattatgtatttaattatatttatgcactattaaatattaatcctacttttatgaaagtcctaataattgatagtaaacctaaccttcttcctttttaagggctttttcaattaatcccatcccatcaaattatttgtccgtaatgatttgtccacatatatatttttcgtttattaattaatagtagttaattaaaaagaaatattgggccattagctaaatagtttattaatgtcaataattaggagtgtatatttacttacttattccatatgcaacttgcggaaagttagcaattttaaagtaatgttatatacacacaaacttaagttgtaaatacttataaatattaatcaataatatcattaagtaaagatcacattttttttaattgtgtagttgaaattaattacacattatggcgcataacaattacatgtaatttgagagtgtctcaatcat

SEQ ID NO: 177417 - DNA, 655 bp, Cannabis indica
cagtaatgtgagtcaaaatatagttcagcaatttaaataaaaatttaaatcaagtatgatgtggaactttgacacaaagatttcataaagccatcagcaagaaaatgtcaaagttttaatggtgtcaaagtaatgggtcactcaggaagtactgtcaaggtcctactaatcttaaaagcttaagttgattatagaatgttcaacaatgtttaggattagttgagcagaccaattttgttcccccccccccccaaccaaaaaaaactaaaaaaataaataaataaataaaaaatgtccaacaatgactaccaaggtgatacattgcaagcctcaaaactaacctagtgagcatatactagccagctttttggggggtctcgcttgagaaaaatggcggaatatttgcgggcaaagagacttcaatagaggatttatgggagaaggtaaaattctagatagcaacttggattaataaaacaaaagactttgaggtactttctttcctagatctttgtatattggggaaactttctgtattaattgtgttttagttatggggtttgctcccacaaggtctgaggttcgactccctcctgggtacctactgcctacatagcaattgctagagtttcttggtccccaaatattgcagggt

SEQ ID NO: 177418 - DNA, 943 bp, Cannabis indica
agagtaaaaaatgttgaaataatattaaaaaaacaattttagtgaaattacattgctatatatatatttaaatatatatgtaaagtaaaaaatatatatatttttaagaaaacaactccatgctctaattcatgtgtggatctacctatgtgtagcacgggtttcacttagttttagagagtcccacattgttaatgtgtagaaagataatagaatatataagaggaaggagctactcctccgattgccaatttatttaaagatcgaacctaattcatcttatccccaaattttaacatggtatcagagcagaaaaaataaacaaaacaaaaaaatctctagcaactatgcaacccaaaaaaaaaaatcgatcgaaatagggccaaaaaaagccaccaaaaattcaaaaaaactgatctaagaaccaaaagtctaaaaataattctacttgtgattcggtgatagtgagtcaaaaaaataaaaaaaagagccaccaaaaatctaaaaataccgatccaaaaagtagagcaaaagagccacttgtgatcagagatagtgaaccaaaaaagagccgcttatgatcgagttgtccaaaatggtgagcataaaataggcgccatcttgagggggggtgttagagagtcccacaatgctaatgcgtggaaagataatagaatatataagaggaatgggctactcctcccattgccaatttgattttgagatagaaccctcattcatcttatcccccaaattttaacacttatttatcgataaagacatattatttttgtagtgatatgtatttcctatcgtagtaaattgtactgagattttgtttaatttcaatattaattaattagttaacgtgtgaatatatagtgtgatgaaaaatttagacatcatcatactaaaaaattttatggactaaagttcacataag

SEQ ID NO: 177419 - DNA, 555 bp, Cannabis indica
tgattgtgggttgatatagcatgaaaattggtatttttggatgcattttcgtggctggaaactgggtttcctgggtttttaaacccagtagccgcggccatttttggcagcttattgtatttttttcgggttttgttttggtcataacttttgactcgggactccgtttgggacgttctttatatcgttggaaagctcgttccgagctctatctgaatatctggaatttaaatgcccagtttttaatttgtggaaatggattttgggattaaccctatacttgtgtatcccggaattgtgactaggattaccggcacttggtcaggagcacccggggatttggaatctccatatttgtgggacatcaggtaagacagtagttagcacgtagagatatgcgcaatggcgcttatatggaatgtgatttatatgagaaactagaaaccgggattagagttattactctaaagtgagcggtttattggcttagggttattacccaagtgaattgttaatatgtaattgttatgccatgatgtatatagctgtatattg

SEQ ID NO: 177420 - DNA, 1104 bp, Cannabis indica
cttactaatctttgtttttcattctagctcgaagaaggagaaaaagatctattaggggacaagagtacaagtactgtatgcacaagtatgttactttcattcttttaattctattatgaacgtgaaaaataccaccttttttttcaactaatgtttactgtttatttcaaagaggggaaaaacaaaactattgtttagtgtttactgtaaacttgaaaaacctcataatctaagcaaactactttcccatccggaattagtggatagcccacaaaaatatcgccaagaccaccatctacatgcctaaacgaggtgtcaactgtcaactaagctttgataaatccctattaaaattgtgcttccattccatcttgcaaccaccttatccataaagactgctatgttcttccctcaagtagatctcaccaaacctagcagttgctgtcctcacaactcctttctttccatttaaaataatagaggttgttgttgatgcatttcttctcaaatttgttttaatatctgcttttcgtttatgaatttgtttttggaataacgactacagaacaagaaaaaatatctgtgaacagtataaactaaacattgtgatggtgtgagtttcttaacatctcaaaactcagaatatttttctgagtacggaggatcaactctcctgcaaggctctataattagcccataacaactcttaaaataaacattgagggtgtgagtttcttatgaacatagtttaacataatctaccttagtgatcaggttataaattcttaaaatatctttactggtttgatgaaatttcgacattgtcttccttgttcttcctttttgtgattgtgtgactttgttgctatatctactttattcaagtacataattaagttgcattacaacagactatcgttgggagagagtcttgagggtattaagagttcatttgagtaaaatgagtgacaattatggctgcactggatcggtgtgaaacaatttcatcaggtgtttgtaaatttgaaagaaggaagatatgtgaaaggaaggatgtgtgggatttcgatacgactcatcctgttggtgtttcaatgttgtttt

SEQ ID NO: 177421 - DNA, 883 bp, Cannabis indica
gttgatttatgttaattcattaaccctagtttatgctaatggtttgaacaatgtaatgtttattaaattaaaattgaacatcagaaagttgcattaataggttgaatgtagatgtacttgtgaggagttcttcaatttagttatatacttgaaaattcttgaatttaattgcaagacaattatttgataaaatgtctcaaagagataatttattgaagctaaagaaatagttgaggaagcaaagaagcaaagttagactaatgatttttcttttgaagcaaccttccaaattacaagctttctttttattgatgtctttttttcttttctttcaatcaatgattcaatattacactgcacagagtgacactaaacacagagtaacaacaaaagttcaaaaggttaatgaattttgtatctaatagatatgtggtaattctcattagatacatatttatatgctaagaatgctttattgagaaagccagagatcttatagtaatataagctccatagtgtaattatatatgtaaagtagctcatgattggaccatgctaattggacaaatgatttgctgattggctacaccaaactatgatcgtttgaatattctggtaggctgtgttcatttcactgttaccagtgactttacttaaaaaacgtgtgatcaatggtagattatgctctagtggttttataatataaagcataaatgtacattttatatattactgtttttcctttttttttttcttttttctatttttaaagtaaaattaaagtttacattacatacaaaaagtaatgtttatatttatacaggacaaaatctatacagcttttgtactctactgtattactactagtagggtttcccttagg

SEQ ID NO: 177422 - DNA, 678 bp, Cannabis indica
atgatgttagttagttagtagttagcttagttaattgagtgagctgttagttttttgttagagagtttgttatgtaacaaactctttcctctttgttcaacactctatcttcatgtatatattgctctgttcatcattcaatgagaaataatgagatttcattcaattttgtctcattcttccaaaactaaaagtcataaagcagttaaaaaaatggtgtccatggttctgtctcagcctcttagggtaaacaagaattagtaattaaatcgacaatttcctttgagttactaatcatgatattgatacaaccacttaggcaaagcttgctcccaaaagttagcctgtgagaagagagtgtccaagtagttatatattacaaaccaatcccatatttaatcaatgtagtaataaatatttacaagacaacctccaaaaaaggatatttaatcttaaaaactgaaaaaaaaaatatattttaagaagcttagaggagtaatcatagtcaacctacaatcaatgtaagggaacaaggaattgaatggaatggaaatgaaatatttttatgagatacttttgttggcttaaatttaagacattctaaagcagtaagaaaatcatgaaaaagctaattgtgcaaaaggctatcttgaaagaaacaagaaatgctctcagaag

SEQ ID NO: 177423 - DNA, 1134 bp, Cannabis indica
attagagagatgatggataggaaattcactaattgggaattttatacaagttctgttattgttgagaaccgtattctgattatttagaggaaaagttttacttggatgattgttgttagagaggaccctcagttgtttcattgttatgtgaaaatggctggccattcaaatgctatgagcatcacttttttgtatggttttaacacaatagaggaaagaaaagggatgtgggattgattactcaatcttaatttctctgctaaaccttggctagtaacaggggatttcaactctctttctgaattggaagataggaagggtggcaaagagtaactttggatgatctcagggatgcaactaattcgctagctcaaagccacatggaaagactccttaagataggattaggatatacttggaaaaataatcaagatggggaaaagagaatctactcaaagattgatcacacatttgggaatgaagattggacagatagtttccttcggctaaagctcactacagctgggagactgttctggccactgttatgtgtgtttagatggccacatgagaaatagggttcaaacctcttaggtagtataatttccgggctgagcatccagactttaaagaagtggtccttgaagactggtatagaccgatgaaaagagagggaatgacagctttatgcttaaagctcatgcgattgaaacacaccatcaagagatttaatatagatagaataggggatggttgggaagatgtatcaagaagtcaaggatcattatttggaaaccagaatgcaagctcaagagcatactaatttgtcttaccaccaaattgagaaagaggctgccatgaactttaatgcccaagagaagatgtatcatagtttcttaagacagaggagaaagttacttggttgtgtaaaggatatgagaacaatgcttatttccatgcttttctgaaagaaaaaaaaagaaggatagaaaatagcatagttacttatacaaatgatcaaggagagatcatagatgactttaatgaaagtggtaaggcacttatagtgcacttccagggctacatgggaactagttcaaatcctactcagaacctgagatttgactgtgtgga

SEQ ID NO: 177424 - DNA, 588 bp, Cannabis indica
aacttttgaccttttattttaacttttaaatctcatacggttttctaaggattattattagttatatacattcctacatgaatataaaaaactaaattaaaagaaaaataatgtgaaattgagaatattctcaagtcccaactctaattcatcaacttcaaaaaaagtttcatttatacttttgatttaagttgggttgaattgaagtgcaaatatcaattacactcatatgctaaaagtaaaaactaataatgaaataatgtatattctaattatcaagatcaactacgtaacactccttaaaaaaaaagaaatgtattaataatataaactaataatttatttgtaaaaaaaaaaaataaatagctaataatgaaatgaatataaatagttaaactataatgtagtatataaaatacaacatatataaacgatatgtaatgcgaaaaatactataaacatatcgaaacatatatacaatgaaagatcgaaatacctcatgtcattgatctttgagcttcaatccgtgcgatagctttggtgttggagttcgggcttcctcgctctctcaactctctttagatggaa

SEQ ID NO: 177425 - DNA, 536 bp, Cannabis indica
aagtaatacacatttcgtcactcatatattatataggtattctgaattttaaaaataagatttatttgttaattaataaaaattgttactcatgtgtattcatcttaataatgagttagttatttttaagttatattatactattttattatttcatatacatttgaataacttttaagtttattttcaaaattaatgagtagggatgtagttagttatgatgtcgataaataaaaatatctcatatatgtaaccttctatattttgagtagtcatttttaaaattatatgttcatttttatattatattatgtttttaagataattttacattactttcatagaaaatataaatatatatatttattttactttatcacaataaaataaaataagtcacatagtttattaataattatttttcttggataagtttattaataatcatttgattatatattattatacacacaaaaataacacattatagttttaaaaatagctaagaaaattgtggatcatgatctttttgtcaa

SEQ ID NO: 177426 - DNA, 1174 bp, Cannabis indica
ataagagtatttatagaaagaattcattgagctcaagaaccaactcagtaattatactaactggttactaaaccaactcactcggtaactaaccgacaaaaataatttaacagaaatctaactaactcaattgtaacatgattcaatttattatatcgatgaaatttcgtacattttagtttaataactaataatatagaaaattgctaactctagtacatatatacatgcatgtatatgtattagttatataattacttacaatggggtttcacagaagtggagataagattggtcaggtgagagtccaactccattggcataaagattagtaagaagaactagggtttggttagtgagtggatcatagctgagtaatcttccattaatagataattgagaagaagaagaagaagaagagtctgtgaagtaaatgatgccatcatcagccacatctaagcctgctgttaacttaaactttacactctcagcttcatctgttaatatcttcatctcacctttgtcttttgttatgcttagtagcccctaatattaataaccatgtgttatatatattataatgtacttgtcaaaaacacataaaaaaaaaccctaacttcacattttcccatataggcaaaaactatttgtaaggttggccaataataaattttgatgaaaaaaaaaattattactaaaaaatagtaaaaaaatatttcggaagaccataatagtgcgcagggccggcccaagcagtttgggagtctcgggcaaaataattaaaattaggccttttattaaacaaaattatcaattaatacttcatttaattttcaaaactaaaaaaacttcataaactctaaaataggaaaaattatttagaatcatgtgtatcgagaccacaagatattatgatttgtttttttttttttaaagttgtagtgcatattactcttatgaatatttgtataaaaaatatttattatattatataaataaagggataataaaaaagggagtgatgataaaaggaagagactttgagctagattctgttatagcctattatcttatttaacttggcttaagattttagttaataaatattatagttatagcaaataatttattatttaattttgaaaaattttaccgtgtgaaaaatagagttcat

SEQ ID NO: 177427 - DNA, 619 bp, Cannabis indica
ggaaataaaacaaaacattgaatttaatagcttcatcaaaatattacttattttactaatttaaattacttttttcgctaggcaaatcaatgtattgaatttagaaaaaaaaaaaaggataattcacaaatacacaaaaacaacaaaaaattacaaaaatacggttttacggaattttaacatttttacgtaatttttttattttatttacagaaatacggtctttttatgttgtattcatgttaatttgttgttgattttttgttatatgtatgttattttttgttgttgttttaatgttatttagatgttattttcatgttacttttatgtagttttcttgttgtttttatggataaccgtaaaaatgtaaaaaaataattcattaaacgtaaaaatataatttttttacgaaagatggtgtcttatgtaattattctaaaaaaaatcagtggttgattataacttttctgttcataattacactttaaggtacaaacttcacattttttagaatttattaaaaattattattatttatttgagatttcagaatacaaccaattaattatttgactacaacaaaattaccctatctaggtcatattaatgtgtcttc

SEQ ID NO: 177428 - DNA, 726 bp, Cannabis indica
gaaggcttttcgggaggaggcccaggagaaggaggctcaggcggagcggaggcatcaggaagcactgaaggccaaggctgaggagttaagagctaaggatgatgccctgaaggccttggacgaggccgtgactaaggccaggcatgagcttagggaggccaaggaggtagttgaagatctgactgccaagctgaagtccatggaggagttgaaccaggctaacttgaagatgacagccaacctaaccgttgaggtgaaggagcttcgtgattccaaggatcagactcaaaagaaagcgaaaagagacgagctcctggcccccgttatctgtcagcactgcaccaaacgcttcgatgattgcgtctttatggcctggcagactaacgggcaaaaccttaagctcgacttctatccaaagcctgagcaggttctcgtccgcttctgggagaagaagaagagacttgacgccttgctggaggagcgtaggggtcctcgccttccaccccgagttgattaagccagtcgtttatcaccattgccattatcattatcttctcttttttttttcttttacatatttaacccttcttccctctttaagacaatttacttatgtttttatatatttttcttaaggggtagacacttaaggcccgtccccatgcccttatcttttttagtagcttttctttgggatttgaacactttatattcatgcttgaatac

SEQ ID NO: 177429 - DNA, 870 bp, Cannabis indica
ttggattcttcatcaattccgacatagcccaatccagagttatagatgatgtttcactcccaactataaagatatcctgaaattaattagaaaagtgtcaaacattttaaattcttacatataaccctacaaagaaacaacatttatcaatgaataatgacatgtatactaaaaatttccacacacaagatgcatattttggatatagtatttttattgggcaccaatagtatctagcaccttctataggttgcgtcttggttagcgatattttttaaaagctatattttctttaagttatatgagattcagtatttaattacattaataatgatatgacaccgaggaaagtgccagacactaatagtctctttaaatatatatatgagcaattctattttgaataaatatatatcattactcttttttattatataaatgtgtacgtacttaccaagataactgctttaatattttcttttgttacgttgaatccaagatctacattgttatgaaattttagaagaacatcaaccaagtcctcttcttttccacttttctcagttgatgatgatgatgatgatgacttttcattgatgatattttctagtatctttgaagtcctttaatttgaggctttcatatttagctcccttaccccatttatcaagaaagctaagaaaaggaaaaacgctctccaatttcaaagtcttcacagtagttgatagcatctttcacaatcaatatgaaactcttcatggtcactactttcttgccaaaggcagccctggatatgatgtcatagataaagctatgaccttttcagtaaaatatagccatagaatcagatctagcaactgcagctatctc

SEQ ID NO: 177430 - DNA, 883 bp, Cannabis indica
atgtatatctaaatatatattttaggataattacacagagaaagtaagggcttacaagaccgctagggtttcgagctgggtcaccttcttcgtttcttttctttctcgatcagatctcgcacgctctctctctctctctttctctctcaggtaaattttttctctctctagaactggcgcacagtgtcagtgcgtttctctctctctatccttatcttacaggtgtacggcggctgtgccttcgtgtggttcaaacggagtggacgaagcgtgtgggtgcaaccaaaaagagtcgtgcccgggaagtatcataaccccttgtgcgggccgattgacccacgctatcttaaagagcgtgaaatgcacggacgaataagatagaggtttaagcggttcgttagtcgacgtgcgagtggacttgcgcaatcactttatgggcggggagttaagtttgtaaatgtttgaaaaatattagcaggcgcttcataagcgcgtgagttatattctctaagtcggtggcggtggagtgttttaagtctccggttgagttttggtcgcgccgctaagtcggttgggggtgaggtaagctaattgttgcagattcaaagagggctttattggtttcaactttcaagattaaggcgctcgaatcggatactatctatgatccaagctttttaggctaaaatccaaaatggattttgggtttatgtccagtccacctttttaggcccacgtactccacactcctcaattcctttatcttttttttggttaatcctcaattcctttatttgtttaagcttttttatgggtgctttgtgaaaaaaaaaaaaaaatatgacttttttcattaaaaaatatgaaggaaaaactccatatg

SEQ ID NO: 177431 - DNA, 812 bp, Cannabis indica
tatttgagagaattttttagtctaatttttttcatgattgtgtacattatagttaattaaaacatcttgtaaaatttttagaaattcaaaaaaatttaacacaccaaaataggattcaaatagtatattacatacatgactcttttatgttttaagtgtgaaataaaatataaacactgctttctgtattgttaattattttgcatttcttaaaattttacatgatatgatatcttaaataactataatatacacgactataaaaaaaattagaatgaaaaattcttctaaatacatcagtgcacccattttataagagtgcattatacaagcactctataaaataagggatttttacaaaaatattagattttgggtaaaattattgtttttttttaataaagtactgggaaacaataaaacataataattaaaacaatagtggaacaactaaaacacaattgtagaacaatagagaaaatttaataagacaattgtagaacaatagtaaaaatttaatatagtatatagtataaaacttacacaatatttttttaaaaaaaattacctgcaataaaaaaaattaaaaattttaaatatatcgtgtaataaataaatctcttgttaattgtttttggtaggagggagaacgcaatttgttttatttaatacatcggataggtggtataagattttcgtaaaggatgggcttcattgagtccgtgagtccatcaatgatgaatggatgtacgtgagtcatgggccgactagcgtttgtgccatatctaaataattaagggtaagttgaaaat

SEQ ID NO: 177432 - DNA, 893 bp, Cannabis indica
ttttaggatttaccaaaaaaattgaatctttttcatttttattttaagagggtacaatttgatagttattaaaatttaagagacaaagttactaatttacaatgatacatcagtattcaaataaaataatgaaacgaaacctaacacaacttaatttatgttaatgtaaaagtttagagaattttttttgtgacgtagtgattagaatcactcataaatttacagtgcagatatccacaaaatgcgcaggaactctcctcgaaccaagatagttcatcgtctaatcgaagggcatgctttgtcaaaccatgaactgctaaagtaaacgagcaacatgagacaaaattgctcccgaaaatttaaacaataaagctataacgtcctcaaataatataccaaaaaagctagagcttcaacttgtaacatcgaaaattacataccaactcattaacatatcaaaatgctccacaaaatatctacaaaataaaataagataaaaaaaaaaaaaagtaaattagcccctaacgatgatattaaaactaataaaaaaaatctcaatagtaaaagatgacaattctcaaataaaatatatttataataaacttatcggcaaaactctctataacagtaggccctccacaaaatcaacctacaaaataacaataaaactctattaccatacaatttagtaaaaaataagtaatagtgaattaagtcaaatactcaaatttcaaaagtgaaaattttttattaagctttatattgactaattgctaattatattctttaaaataatatactttgtacattaattaatatattttgtctaatcgaaggtgtcggtcaaagagtgaaaaacgacaccgttcatacggatgaagattgaagaatta

SEQ ID NO: 177433 - DNA, 460 bp, Cannabis indica
tgtggcatctacctataagagacgtttatacactctctcccgcccgttccctttgtcatctccctttttttatacattttctctacatcacctgaatgacttgtttctgatcaccaattgccctaatgaattaatattcgaagtccttagccccaaaaaccctccaatctcaagctttatcttttcatctccttttgtcactcgcactactctcctcaccaaaatttatggcgagccaccattgttgagccaccttcttacaacaacaataggactacatagtattaattcatgttttattatgtttaagtctatcattttaattaaaattttggaacttgggctttggaggattgaggcacgggtcttgtctgcctatagtattaatctctcgacttctggttctatagattttgagaattagtgcattttaattttttgtttatattgtgctaaaata

SEQ ID NO: 177434 - DNA, 905 bp, Cannabis indica
agaaaaggttgagataatgagagaagataagtataaaagctgacacagaaagttgtacgaccagctgatggaaaggttgcacaaaaaacataagtgggcaaatacagaaaaactcatcgaggcaacatctttcactgcactagacgttagatagtccaaggaatcgttgtccaaaatcacgaagctaataaccaacagtaggaagacatctttcaagataactctgggcaacctccttagccctgtcttacatgctggaagaagctgcttgaccttgtctttggtggcttttactgggtaactttggaggaaaggtagacctcaaagaaggatcagcaatcacaagctggttgaccaaaggtggaccaaaaggaggaaaaggcagagtggtctgggtcgcatccgaggcaacccctatccaggtagttttggattggtctacccgtcagatgggctgctcgatagttgcttcaatagattcctcatcttggaagtcatgtctacaagagaaaatcaacaaggtcagaatacaaataataaacacaaaaagcaagtaagagtaaaagaattactaccatcagtttcctcgggatattctaccccaggaaaaccatctaaaggcccttcatcttcagaagaagactcactagggttgtcctcaatcacagtagccttgcctttgcctttatctagttggcgcaggccaagcaggtctcactaacccttgtcctttaggcctaattagaattggggaatcaccagcagtgctcccacgtgccagacgccactgaggagctcagtcctcttagtctttgttcgagtaatctcaggcaaaaagatctcgtcatcaaatttactcttctccttctcatttgtaggcctcttttccttggttttctctttct

SEQ ID NO: 177435 - DNA, 581 bp, Cannabis indica
attatatgtaaatttgggaaattttacaatgtatccacttaaaatagatacagatatactcttatctgttttagcatgtgaaataattttttaatcaaattttttctcatggtcattagcatctgaaataattttttaatcaaattttttctcatggtcatgtacgttatagttatttaagacatcccgcaaaattttaaaaaatttagaaaagtttaacatgccgaaaactacgttcaaacagtgtattgcatgcgtgactattttattttatacgcgtgtaaaatatactgtttgaacattgttttctatattgtaaattattcggaatttctcaaaattttgtaggttatcttaaatagttataacgtacataaatatgaaaaaaaattagactaaaaaaattttctagaggccgaaataagtcaagagtgtatcattacatcccttttaaggggatacattttggaatcaccctgtaaatttaatgtgaaggcgatgtaaaacgggaaatttcactatcaacacttattctacaataaggcgatgttaatattacaaatataagaatgatttgttac

SEQ ID NO: 177436 - DNA, 697 bp, Cannabis indica
atcggaggctcagggcagtggttgccaaaggtgcagtagcatgtcgtcgtcggagtccggcgtaagattttttttaatattttttagaaaaaaaaaatggatgagaaatgggggcaggaggttcgggctgaagttttatttagcttggaattttttcggcgcacttagggtcgccgacaaaaatcgaaccccaaaatatttaatgaaacacagcgtttcattaggtttaatactttttccgtagcatattagtgccccgaaaaaagtttccacgtaatttttcgaacacgtttcaattgggcgagaaattgaccgccaaaaaatttcacagcttttgctggcaaaagccaaaatcctgatgaaacgtgtcgcttcatttaatgtgaatactattgccggcgcaactcagtgcgccaacaaaagttttcacttccttttgcgcgcacgtttttcactgtgagggaatttgaccaccaatattttcaccacttttgctggcacatttacgcgctgacaaacgtgaaaaaaaataatttaactttgtcggcgcatttacattcgccggtaagtgtactcgaacagccaaaagttctcaccttttggcggttggtttgccaacatttgctggcgaatctatgttggtttgctgggaaaagttcctactgccggcaccatatatcgccggtaaaactgtgag

SEQ ID NO: 177437 - DNA, 1231 bp, Cannabis indica
atttcatcttcctttgagtcatcaatatatacttagaattctattttttaagatgatatatattatatttatttaaaatattttgtaaaattttaaaaaatttaaaataattttatgctatgaaaataaattttaaaaattttatctatatttaactattttattttataaacgtgtaaaatatattatttaaactctattttttttactaaaattattataaatttcttaaaaaatttataatatacattaaatattataatatacactattatatattaaaattataactatagatatcaaaaataggataaaaatcgatagatacattcattttttaagaggtgcaccaatttgggtttgggttgcatatgagacaaaattagctacaatttttttaaagttttatattgtaatttatagattaatgataaacaatgttttactgacttctttcattacattatgacttttgaagttaaaaaaactaacaaaatttactattatttttataaagaggagctcacaaagtatagaaaatttagatggctaattaagatttttatagcctaaactttaacatacatcaaatgatgttctataaattttttcagtcattatttttttttcactattgagattattagatttaaaatttttgtttaattccgtttcaattttattaacacgatgaatttgattgtttatgtactaaattatatcacccgaacctttgatatctacaaaatagtaccttttgaattttaatatctacaaaatcgtgccccttaaactttcatccacatcagacttccattaataaaattgaacaaaaattttaaatctaacaatctcaataattcaagtaaatttgtaacgatctaaaaaatttaaaagtatgatttaatatgtgttaaagtttagatataaaaatcataattagcctattttattaaaacttactcataaagttcaaaatctcttcccctagtgttttagaaaaaattgaaaatttccaggtgtaaaataatgggtaaataccattttagaccctctgttttacaaaagttaccaattggaccctgtgttttgttaaatgataaaatggaccatgtattttctaaaatagtacaaataggaccctgaattgattttttgtcaaaataaagtttaattataatccgatctaaaagtgctatgacaaaactgtttacattttttgtatctgttc

SEQ ID NO: 177438 - DNA, 1246 bp, Cannabis indica
taaaagccaaaaagaggcaataacaatatagtttgtagaaattaattaacaatggtctggttttccaagaagagctaggagaaagtctttgtaatcccctgaagtgtctttggcaatagcatcatcaagggaaatactgttcttcttgtagtaaacctctttgatctccttcaagtccttttcagctcttgtcactatcacacgtgtcactgagtcctcgtcagtgcccatcttcttcaccccatcacgcaacacctataattatataaacaaatcacttattgtatttttatctttcacaataaaaaatgcaatctaattttaacatatattattaagatggttagatttaagaatttttattcaataagaaaagtctaacaaagataaaaattcaagagacatgattttagtacatttcaaaatttgaagagataatttaatagatatcaaagtttagaaagcataatttaatacattgataatcacataattagtaaaattgaataaaattaaacaaaattcctaaattcaataatatcaatagttcaagagaaatttttaacagttaaaaaagtacaaaaatcataatttaataatgttaaagttctacgagtaaaaatcctaattaatcataaaaaaaaataattttttgaagttagtataaaacacattttccaaattgtataataagatggctttggatatagtaattatgtgtgaaatgaaaaccttagcatagtacttgtgggggtcagttatgcaacgaactgtggtatgaagtgccttctgaaaactgttaccagaatcacccaacaaatcctgcaaaaaaatatatataccaattaacattttgaaatctcattataaagttatgataaaaacacaaacaattttgatgtgatgactaaaaaaaaccttggaaatagaagttttgtggtcttctctgtaacgattgaaggtggcattgagctggggtttgctccttgtggtaagaatcctaatgagttcatcattgttgaaacagttgtctttgattgccttgtgaactatgtcagcttctgaatctgccaaccttgcattcacctctaccccattgtatcgataaccactcaccaaagccaccaacaacctgtttttgttttaatccaaaaagtaaaatataaataaatcacttactattaatcaaaaggcaataaattatatttaaagaaaatgttagacccaaaaatcttacatacataac

SEQ ID NO: 177439 - DNA, 903 bp, Cannabis indica
tactctgatatcagtgcctaggttgatatccagtgcccaagttgacatatgacatcaacctagatattgagtgagtaggaaaacgtgctgggatgtatttttttgacgcctaagtgatattttgaactatcacttagtcaatttctttattccagtgaactcgttcaccagttctcagagatgtttctgttttgcaaaattgggagactcgacactacccaatttgcaactaataagtcactttaccaaaaaaaaaatgaaaatatgaagttgtaaatttgacttatttgagttcataactcttgcttaatatgaaaaactagaagaatgtttgagacaaaatcgaaatcagatgagcaaaactcaacgcaccaggtcatacatcaacctgggctctgggtgctctttttggagcttctgggatgtcgttttgatacttacaaggttcttaaaattgaggacgagttctcctaccctgtttctgaccatgccggggagaattcttggagccaaattttcatttgagtgatcaaagccagtgcactaggttgattgtcaacctgggtgctaggcccctattctggcctccaagttggtcagtttctcccctgaaagtaattgtttccttgtttttaatgaagacaaagaaaattcttgggattattctttagtttgatgcttggaagtgccccaagtttacaatatgtcaacttggatgctaggtgcttggggcacctggtgctcaaaaatgaaagtgctccaaatatgattctaatgcctcaaatatgttcatgacatgtaaaattcatgtcctagtacaaagtttgacccattttcactaagaaggtcccaaaaactgaaactctagttggaatgttaacctaggcgcttggtgaaaccctc

SEQ ID NO: 177440 - DNA, 543 bp, Cannabis indica
gagaagcccaattcacgcaagctagcttcactctgtgcccgctttcgttcacaatccatctcgattttgtactcaatgtcaaagccctggctggcccagtgtggagcgaaatgacgattgtgacaatcaataatactaaagctgacacaaattgagaagggcttccatttctctttctttctttctttctttttctttttttggttgagttttggagttgggaatgtggtgttgagaatcgaaagtgtgatctgattatatactaggaggatgagggtgaagatatttcgtatatgatagtaatactggtggaaaattaacctcagaaattgattaagtactagtaaatattattttttacgcaagaatcggaacatatttcatacgtgggtggcctgattaatgcatattccccatcaaagacaaagaaaacaataatggtaaggggtgtgatttcgtcaagtagcttgaacatatacgtctatgttattttcgtaaaaaggaaaaccaaaccaaataataaaagctacttttaattatgac

SEQ ID NO: 177441 - DNA, 990 bp, Cannabis indica
ctcagatctgaaaaaacccaaaaccgaccgaggaaaaactaaccttcgacatattcccgactgcgggtggtggtcgtgcgtggtcggggttgctgttggtggtggtgggtggttgtcggtggccgggcgtggtcgggcgctgaagccgtggtcgtgcatggtcagcgagagggagagagagaagttttgatttttgtttgggatttatttttcaaatgggaggggtattatggggaaaaatcaaatgtagtcatatatgggcaattttaatagatatagatgtagggaaataattttagagtgttttatggatagtttttcaaattttccttttaattttagagctaattttttttctataataaaataaaaataaataaaattacattatttttagatcacgttaccaatttcattaaaattaaacatcgccatacacaacagatatgaactcaataaaaatatcattctcattaaagaaacgatgtagaaaagaataagagtctctaataaaattaggcgctatattactttttttttttttgaatgaaaggcgctatatactttattaatagtagatgaataaataaaaaacaaagaaacaccatttatcacacatgacattttttttttacaatcctcaacaactaactaaaatgggaaagcattgtaaaactgtttaaaatagccttagacaataacaagatagttagactcaaacaccatctgatcacatgtcgcatcttgatctaactgagatgacaatcacttcagccacacctgctagtgcaaaataaaattaatgtttttccttgcaaagtgatttccttggtattagaatatagtgtctcacataaaacaagtgtgaaaatatcgaatatagataactatacattatttatttgttttaagatagaatctaatgctaattatgagagcagacatcaaaagtaatgtgccaaaaaaaaaaaaaaaagaatagaactagat

SEQ ID NO: 177442 - DNA, 767 bp, Cannabis indica
aaattacctaatagtttttggtgcaaaatatctatttgagagatttgccaataaataacctgaaaatagagcattaagaattagaaaaaagatgaaaagaaaaacataataaaatcttcaaaaattaatagccatattaagaaatataaaaataaagcataaaaagttagaaagcaaaacaaaacataagaaaaacttaaaaattatgaatgtcaacaaaattttaacttatatatatagacaaaggaataagagctagaatacaaagagttttttttttaatagaaaaatataaatagttttagtaattaattatagacactacaagaaaagggctttttgccggcgcatttggtgacatgcgccggcaaaagttgtcgacacaaacaaatatttggaatcccaatttttttttgggtttacttttgccggcgcatatgtgcgccggcaaaacatatctataccggcgctatcaagttaaatgcgccggtaaaacgtgaaaacattaggcgcgagaatttgccgcctttgatttcatttttggggcgcatttatacttttcccggcgcacatttgcgccggtaaaagtaaccaaaattattggagggaaaattcccgcgtgggttttatgtggtaggtggggccacttttgccggcgcacttatgcgccggcaaaagtgttaagtgaaacgcgcgttttgccttaggtcagaaataattttttttaaatacttttaccggcgtcaattggatgcgccggtaaaagt

SEQ ID NO: 177443 - DNA, 631 bp, Cannabis indica
tttcttgttgaataattaaacaaattattattatttttaaatataatgatttttttatttacgagataccaatcctaattctaatagaatgatagttctctatatttaacgtgtaaaattgaaaagttgttatatttaaatgttaaattgtttttaattttacaaatatattctatctttaaattttcgtcgattctttttattattatctatctataattttttttgcacgtgattaaatttattagcaaaaattaaaaatttatattataagaattctattttttttttttataattaggattaaaaaaattatgcattttatgaaaaacaattatagagttattttaatttaacttttcaaaaaatattttgtaagagaagttaggacaaaaaaaaatgaataattacataaagtattaatttttgtaaaatttttacatttttacgttcattttttttttcttacatatttatggtattctataaagcacaagacaacaaaaaattatatgaaaataacataaaaaataatatataaataacaaaaattaaacaacaaaataacaagagtacaacataaaataataccaaaagttcgtatattacgtaaataaaatctaaaaaccgt

SEQ ID NO: 177444 - DNA, 813 bp, Cannabis indica
tctctctctctctctcgattaaccactcatatttttctctcgttagcggagaagacggtagtgctggcgactcagtcgcatagagagagggtaggggctagctctattttgtttcgtgttcaatgatggacaggagtaggcacttccaatgtcgaaacccttcttcttctttttcaaacagtttccacttcactgcctccagatcctcaaatcttgctccgtctacccctaaatctagtcccaataccgacgataatactctccatggatgaagcggacctagatgctccgctcaacaaggaccaaatgatccaaatgacctttccaatctttccactattgttggctgtgttcgagtgaatggaaatccaaaagaagaaaaaaaaagaaaaaaaaagaaaacaaagagaaaacacgaaaacaacaaaaaattataaaatacggtctgtacgaagtttcaatattttacgggtttagatttatttacataaatacgatcttttagtttattttatgttgtactcttataatttattgttgatttttgttatttgcatattatttttatgttgttttaatgttgtttgttgttattttttgttactttcatgttgttttcttgtattttatagaatatcgtaaaatgtggaaaaaaactttgaatattgtaaaatgtaaaaattttcaaaattgatatttatgtaattattccttaaaaaattaatcctagaattaattatttctcttcattgttctcctctcttattcttccacccacatctctttagggccgaccctgggtctaggtggcct

SEQ ID NO: 177445 - DNA, 749 bp, Cannabis indica
ttggttgcattcttcgtgatttgttgcatgcggttgagtatttacataatgaaggaaaaattcacagagacattaaaggttttcatcttttagtttgatttatttactgttattattgtttacataggtgcttttaggagtagctttgaatgttaaatacatgttttggaagtgatttttgtttgaaggtaatatattgattttttctcacagcggcaaacattttattgactgagaatggtgatgttaaggtatattttcctgcttagattatgtgtcagtcattacaataaaattcgtttgcttttagtcatcatggttacatttttttattgttacaggttgcggattttggtgtttctgcacaattaactaggacaatatcaaggaggaaggtagcatctttaccatgctcaatctctatttatgtttaaatcatcatgaatagttacgagttgcaaaagcttgagttcaacttaagaatatattcttgtgttcccttaagtgactatttttattatggaacatataccagacatttgtaggaacaccgttttggatggcaccagaggtaattcagaattcagaaggatataatgagaaggtatatttggaagcagatttttgaatcttttttacttttgtattttttattttattttattagtgttgtttttgtggatcctcccatgtctctccctctacatcattctctttgcttgaccattagcactttgggtctccttcgc

SEQ ID NO: 177446 - DNA, 638 bp, Cannabis indica
ttagcactttgggtctccttcgcgtgatgcaggctgacatctggtctctagggatcactgctatagagatggcgaaaggggaaccaccactagctgatcttcacccaatgcgtgttctgttcattatacctcgagaaaatccacctcaggtaatcaatttttatgccattcgctggttaactgattgtaaatatttaagaacaaggaaataattgtaaacataccagacaatactctacacaataacgtggtttttttgaattttcatgtgcagttggatgagcaattttctcgtccaatgaaagagtttgtttcattttgcttgaagaaggtacctgctgaggtatgtcttctatacctaaacagcctactgctgttccatttcttcgttcatgtgtgaatgcatgtatgcttaaatatgtcaaatgttccaaagtaagtagctggtaaagatctctatttttcagtttgaaggatgctgcactgctgtgtgtaaagataaagatcatgttctacatattgaggctcatgctattgggctttgctttttaaataattttgccaaaagttgtttgtctggtttttatacaccatatgtaaagttattcatgtgatttgtacaactgttttctctttac

SEQ ID NO: 177447 - DNA, 591 bp, Cannabis indica
actcccaacattgttccatgcaagtggagaattcccaaacaataaccaaatccttgcggttgaaatgaatgactgtagtaagtttccaaagatgcactttgatagagttagtcacgaaattgttccgaaggtgaaaaccaggtaactttgttttttgtagtgcctaattatttttactcttacttttacactaatttcttaatggtttctatatgcagtggtgattgtggcatttattctatcaagtatgtggaacatctaatgatgaaacgttccctaaatgacgtcacagataagaatatacagatgtttcgtgatcggtggtgcgtggacctattctatcagtaactcagttgagagaacagtggtgattgttgactgattattttttggtgattgttcacacatagttattgtcgaaaacattatgaactgttaatcgatagctttgcgataggtaattatcttttgtgataagtcattatcgacagattatcaatattttgtcgattgattcttgactggttattgactgattaattattgactgattgtccatggtgattggagaatggaataattatgtgttct

SEQ ID NO: 177448 - DNA, 812 bp, Cannabis indica
acatagcatttctccaaatgcaagtacactctgttgtagattatcatatcagtaaaaccctgtgtctgataaatctaggaaactttattcaaatagtcatgtttactttccaatgtgttgacaacacaataaacaggatcaagtatgtgaaaagagtttcagatgaatttatacattatgtacatataatcatgaaataaatcatgtgaaccatgcaacattaaatgttatttttgatctatattaataagtaaatctgattatattgaaatgagttttatttagggcataaaacccaacaacgacctagtttgataggttggcccaattagcctcgagaatagtgccaactgatttgagaaaaaggaaaagtatttggtgggattgaaccccaaaatcaaacatgatttgatgattaccacagatgacatgactacctatgctattatgatagagaaggcactatgagttgagggtgtagtagaatgcattcaggagtctcggagactcaaagtgttggtagagccactactcctcctacctctagctttagtaagggttgtagtgacttaaccacttattagaagatgaaagttccatttccgtccagtggctcaagtcaaaacaagaggttttgagggaaccaaggttctattaatggacagggtgggtttgagaaccaatacacttacccaagatgccccagttataagaagcatcatctggggtgagtgtagaggtcgagggatgtttttagtgtagtgtaactagatgttacaaaagagactgctcgtagctatgaaaagaagagc

SEQ ID NO: 177449 - DNA, 743 bp, Cannabis indica
cattaaatatgcatatgaataataattaagacacactcttttatacattattagctaccttgccatagggatcacatgcatcccaatcttaaatagtagtatatagataatgccatatatcataatgtacgtatagcctcactcttattatgtgcacaggcgtagccttcattaagttagaaactgtttagaaaaccagaaaatcttaaaagaatttgtagatttttatttttcaaaaaaccaaagaaagacctcaaaaataaacaaagatggcttcaagtgttaatagagcgcactttcaaaattttcttggggttttagctttggggtgggatttattggcggcatgataagtgggattgttgagaagtaagaaattctggaattggtaaggtgtccatttagtacctattcattctggcatatattgcaagatattctatggtcccttatcatttatgatgtaatgattgggaatattttctgtttggatatttctttgtctgattgttgacaactgtaaaagactcttatttattataaaaagttttcctcttgctctgatgggaactgagatttaacaaaatcaaaaatttctaaattctatattttctcttggtatcaaagccaacaatactacaacaaaaattcctattaatatctcttaacactactgtaaaaataatcttttgcttcaacttttaagtgacatataaagtttttgcttcggttggtgtaaccga

SEQ ID NO: 177450 - DNA, 720 bp, Cannabis indica
gaaaaggccaaacccgctgccaaccacaccagcactaatttggatgtaattcccactccaacatccaactcagatctgactacacaatgccaacaactcatttcactcctcagcaaacagttgactcaaactgctacccgtgaggattttaataatctcccacctgcttccaacatggctggtaagtcaaatccttttcccatgtttacatggatcattgatagtggggaaaccctgttgggttttatgccctaaataaaactcatttcatataatcagatttacttattaataaagatcagaaataacattttatgttgcatggttcacatgatttatttcatgattatatgtatataatgtatgaattctttttaagtccagaacatatgagttggttaaagattatagtgttgtcagcacagtggaatataatctttattatatgttcaaaagtagattccctgatttgtcagaacactggatttagactgacatggtataatcagcgataggtattcttacaccttggaaaagtgttatgtcctttccaggacattggcaaagtttaccagtatcggatgcatggagtatgcattggaatggaccgatattgaactttgaattagattttgaaacttaccgtaaatatctattcaattcaatatcataagttgatcctagatcacatgatcgaaatcctgatatggttaggctcaa

SEQ ID NO: 177451 - DNA, 787 bp, Cannabis indica
acctttgtttttggaaagaatgataatgaaagctatgggcttatagcactagctagctacagctcaaaacagagttagaatatcacttgttataaattgatgtattgttggttttttgaatggaatccgattaacttcattgttaaaaacaaactccacatttaagcaaatatcagagaaagtcacaaagtttaaacctcgtttttcaaggttgtcgtgcaaatagtcacgtgttcagaaaaatctgagcctaaatataatatgagcgatctaagtttgtaaatatttaataattttagttttttttttcttttttcgaaatgtagttttttttttattaacacaagagaatcaagtagtgtagatttcttcaccacttcttaggattacatattagccatagtaattttatacttcaatctgtgttaattgggtcctcaataaattactttaacagtttccatcaaataaagatggcatcacctacactaaattaccttttagccttcatatgggttcataatctcttttcaagaggagctatagtgagtttcaaatccttgagtaaagacctgtccctaatactacactacacaacaaaagactttgtcagttttatgtaccataccatagtaagaaaaaagaaaatgttttaaaaaatatatcattaaaaaaataaaaaaacgtacaaatatatttagagattatatctttgcaataaaccttataaagtaataagcttcaccatatatatagctggaaatatatatatatatttttggtgtac

SEQ ID NO: 177452 - DNA, 626 bp, Cannabis indica
atatctgagcgacttagatatacaagtttatattcattgtttcacaaatcatgtttgtgaagctgtacttggtttttttttttttttatatattacacagtgttcatttgttgagcataggaactacaaaattatatacagacgatatgcctcgctgttttccttgttggtgttgacaatgatgaagtaagcttccagatcttttgttatttcaaagtgctagcatttttagttgatgaaaatcacatggaatatcaacttctgttgtttcttaatcctttgaacttggaaatggtagaatcactgtttagtctcttcatacacataatttataaatgcctgaagaattggtctcttcttaatcttgtggatcattttaagagagaggatagtagtcattggccgttggtagggcaagaaatgtgacaacgttttttttttttttttaaagtaggaacctttcagatagaggtttcagtggttgacagttttaagttaacattatcgtgtttacagatagaaaggatgattagaattttaagcaggactatcaattttagtcgggggagatttcttttgtgaaacgtcttataagatattgcgttagtggtcatacacttcattga

SEQ ID NO: 177453 - DNA, 768 bp, Cannabis indica
aaataacaatttaatttactaatataaaaattttactttaattataatagaaataatcaaaatattatattgtacatcaaatcacttcatttagaaaataaaattagaaactaaggtcgaactcgtgcgaagcgcgactttgttacctagttgtatagaaatacaaattaatattattagtgatgggaatacaaaaagaatattataattataatcataatgataaatagtattgaaatggtagttataaaattgaaaagacattcataattaatatgtaacttgtgtatgtatattttttcttggacaaatatgaaagtctcaaaaaataagaaaaataggaaagaaaaaaaattataaaatgccacataaactaatacaaattaatatcattagtgatgggaatacaaaaaaaatgttataattataatcataataataaactggtattgaaatggaaattatgaaaattaaaagacactcataattaatatgtaacttgtgtatgtgtagtttttttcttggacaaagtatgaatgcctcaaaaaataagaaaaataaaaataaaaataaaaagttataaaatgtcacacaaagttatttgtgcttttccttatttatatatatagatatagattataattaatattaatcaataattaatatagtaaatgataaaagaaatagaattgtggtattattttataaataaaaacataactgataaagaattagagctttcattttagttgagtatagcattattac

SEQ ID NO: 177454 - DNA, 1200 bp, Cannabis indica
gatatattttaaaatatataaatataattagatgaccactggataataatttgatcggttcggttatctattggatcggatgtctcatccaacaaccgatctgatccgattcgattgattttttaaaatttacattcggtcctatccaattatgattggatatccgattctattgaatcagtcgattataattgaattggatgactttctaaacacccctagtagatatttcctacccccgaaatctagatacccaccccatgtgtaaccttcataaaaatattttttattcctattaaaactcctctaatacccgtaatcaaaaaaaaaaaaatccttgaaaatgagtcctagttgttgcgctacgatatgtttctcactttgtttgtaaaaaattataatttttttatttataacattgtatactgtaattattaaaattttacataatatttaataattctaaacaatttgatatgtcaaaaataaattattaaatagaaaaaggaataaataaatcaattttttctttattttattatgaaaatagaaaaagaaataaataaataaaaatgcctagatacattttaaaaggaatctttaatttaaaagaaaaaaggtagagattcatttttttttaatattaaaaaaaaaagtaaagatcttgatgagcaataaagtagggttattcaaaatgttaaattcaatccaattctgatgattcaatctaattttatttgtaaagtgcatatatttatatttataaggactatattgaattggattggaaaatttaaaatccttacggtgtggattggatgtttataaagaaaatataatttaaaataaaattaaataattctttatacatacaatattttttattttccttttcaatttattgttttatgttttaaatgttgttaaaaacataaaacaacaataatttattttatcttgtcgttaattatgtaaaaaaaaatattttaataaatattaattaaatcaatattaaaaaaataatcaatttaaaataactaattaaatttgtatttttacaaattagattagattaaatttaagttattatatgaatttaattggatccaaaatatgaaattcggattgaatgtacactaaataaaatagtatatatttaattggatgaataaccttacaacaaaataagggatttttttt

SEQ ID NO: 177455 - DNA, 582 bp, Cannabis indica
attattattattattatttgggaactatgaaagtaatttatcatcaaaaattaatgttttaagtaacatttttcttttgcttatgcaggccgaattcggaacatatatttcccatttgatattgagaatgatactgcgttgagcgttgctactgaaatggttaacgagcttgatatcactgaccaagatgtgatcaaaatagcagacatgatagataatgaaattgccattttggtaccagagtggaaaaggggattggccgtagaggaaaataagcattgctcagctacaagcttatgtcacaactgtgatacaaatggctccataatggattatgtaacatcagatagttcagctgccaagaaccttcaagtcctcgagtgttccaaacatggctctgcagccatccatggtcgatttgaagaaattacataccaagttgaagggtcttcagaacaatgccttgcagagggcgcagcagaacattctcgccactctcaaggcatccaattcgctgatatctgggcacagagagatgggccagaattacactcacaggggtcaaaagacatctactgcgcg

SEQ ID NO: 177456 - DNA, 711 bp, Cannabis indica
agttgtgtagctattattagatatgaaatgagataatagagcttttttcaattagaagattaatgtacattttactattaataacatacattattataacacaattatgttttacttactaaatatacaacacatattttattttttaaaataaatcgttcaaataattatactattttaattattaattaaaataaaaaactaaaatattaaataaaactaatagtacgtggcttggcacgtaaccatcacctagtataaatatatatatatacaaaatcttaaattagagtaattttagtatttggagaaattataattttttattttattttatatgatattgtaattataagtggtatttaacaagtttttaaataatttatgtcgtaaaaaaattaaaatagtaaattatacgtgtataaaaaaaattaattatacaaacaactaattatttaaaaattattcagaattttttatgaacaagtagaatatttgctataactaatatatgtaaatatatataaataaatatatgacttttttaggcaagaatatagtttttgctctcacttatggggcgtatatttttgtaaactaatatcagttagggctaaatatcgggcgagttgaccgaatttcagatttatagatttcaggtttcaaaaaaattatacccggacccgactcgtgaaatggttcgggttcgct

SEQ ID NO: 177457 - DNA, 605 bp, Cannabis indica
gatagatgttacgtgactttgttaattttatttagttttttaatattataattttaacattaataatatttaatatagtaacaataaaatttaaaagcataatagtgaatttaaataaaaacaaaaattactattatactttgtaatagtaattaaaaaaaaattattattcgtcataaatttatctttggaattaatgaaaatgctcataaaccattttatttttaataataaaccattttattatatataaataaaaagtgagccaaatttctcataaactattttatttttaataataaaccattttatttttaatataaataaaaagtcacccatgaatttctcataaaccaagaattatgttatataggcacactttatatagaatagatatagtttgttatatatataataaaaattaaagaaatttaaatatttttaattaaattaaatttaaaatttttcaacttaacattgaatcactaaatatatatttttgtataattatattattattataaattttttattttaaaaaaatcgtgttaaacgtatcacattcatgttaagcggctcgtattgtgtttgacccgtttttattt

SEQ ID NO: 177458 - DNA, 785 bp, Cannabis indica
atggaatagacccgccaatatgcccagggttcccgctgcaatatgatgagaagctattcctcccggaacaaaaggatcaaaaccttccacgccccatgctggatttacagcttgtacccttcccgttagtccataaggatcggatacccatattccaggaccatacaatcctgttacatgaaatgcgccaaaaccaaagcaagccacccctgagagaaataaatgaattccaaagatcttgggcaaatccaaggaggggtttttcctgtacgtttcgactacgaaaagtaaaatttactttacgtaagtaccctaaccctaaactaaccccaaaccctaagtccgaccgaagtaagtacgtcgtcgtaaaaacgtaaaaacgaccaaacgaaccgaccgaaaaacgaaaaccaaactaaatagttggtcgacccaaccgacgtacctaacccttacccgtttaaccgttaaccctaaacctaaaacccgggtttacccgggtttacgttaagttaccccgttcccgtggtatactacctaccaacccacccgaatagtagttattcctaaacgagtcatgaaaggtataacgaacataccttgtctccacattggatcaagaacagggtcagagggatcaaaaactgctaattcgtatagagccatcgaaccggcccaaccagcaaccagagctgtatgcattatatggacagaaatcaaacggccgggatcattcaatacgaccgtatgaacacgataccaaggcaaacccataaaaatacccc

SEQ ID NO: 177459 - DNA, 968 bp, Cannabis indica
ggaaaatacagtatggggtgaattttcttataattttattattatattttttggtcatttccactcctttttttgggcctatggtcatgttcaattttcatgggccattttattatatctagcctgttgggccttcttattgggctttacactatttggttaggctttgactattttattggaaaatttacaatttttccatttctttacaaaaatactaccacgactgaatttaattttttacttgtgttatttttataagttttatattgtagtatactgttatttatttatttattttttttgattttattttagtgttgttttacgtattgttttctagaatttatttttttaaggtgtgtgattcttttatgtttttctaagtgagaatataatatatatctgcttatgattttttaagtgattatatctgcttattgttttacatttgtttttgtattgttttagtagtttttttgttatgattttttaagattgtgcttgcaaatataactgctattgcattgagtattgagttttttactttttttaagcatgtttttctttcttttatttaatttgttttagtgttgtttcacagttattttgccatgattatttatttgatgtcgatttcatttatttttttctcaatctcataggaattaatggttgttttccgattgttctaatgttcctgtggtggttctgttcttgagtgtagaagataaagacttcatttttcttttttggtgtttacggtagaaaagaaaaaaaaaaatgccaagactgtaaaaaagaaatttacctagtatgacattatttttgtaaagataggagtaaaaagtctattattttttgtaagttttctattttattttcatgcccattttttccccgaaagagtgctcatgtaactgtttcccatttaataaaagctttaatttttttttttttaagaaaat

SEQ ID NO: 177460 - DNA, 578 bp, Cannabis indica
tgggaccccagtgagattccggaattggatctcgcaatgcatttccaccacgactttaaacatctgtctgaatgggggtcaggttggaaaaattatccccacttgtggtcttcgtcaaggggaccccttatcgccctatctgttcatttgggctgcggaagttctttcgagactcttacatgacgccctgactcaaggaagcattcatggcataaagctatgtagaggtggtccagttctatcccatagtttttttcgcggatgatttaattctgatggggagagccaatttgaatgaggttaatggtttctggaattgtctggagaaattctgtttgtggtcggcaacaggttaataagttaaaaacttctatattctttagtaagaacaccccgtcgagtatgagaagagaaatcaaggaaactttgaggattgattcgcctgaagggtgcatcaagtacttaggcttgcccctgttccgttcaagacaaaaggacgctgacttcaactttattctggataatctcacttcaaaactccagggttggaaggctaagtctctgtcaaaggcaggccg

SEQ ID NO: 177461 - DNA, 672 bp, Cannabis indica
taaaattgtgatacaattatgataagattaaataattaacagcattaaattagtacataaatttattatcatatataatttgtacaataaaaataagaatatatttgtaatagttaaaaaaatttataattttttataaataaattttttttacacatataatataataaattaagttctataatatacattattataaatttttctctaagcatatttcagttagaattggcagtcttaatcaatattactaggatacatgatagatgtatttcattcattaaaggccacaacataatttagtaaagatatgtatctaataatgacaattataaaaagcttctaaattttggccccaacatgtccatatatatatataacttttctctcaaataataattaattagcgaagaaagcataattaataaatatattattatgaaacaaataaataaaactaatttataaaaacaaaaataggcagcaatttttttgtgagactaaattgaattaaaataaaagaaatttacaatataatttgaatatcacacgtacatatataattgtcctttaaaaatacactcaaaagtggacattttatttttactaaactttcttgataaaatccaaaatatataaagtattatgagtttatactagaaaattctatag

SEQ ID NO: 177462 - DNA, 664 bp, Cannabis indica
atgtagatagagttacgtacgtacatggaaacactgttctgatttttttatgttgcataacagttgcataaacattttgctaacagttatttcgtctgattgaaacctttgtctgatgcaaccttcggccaaccaccagcaaccacctagaaactttcgtctgattaaaaccttcgtctgatgcaaccttcagttaaccattcagcaaccactttgcaagcatcgtttgattgaaatattcatctgatgcaaccacgcagcaaccaaactgcaaccaatgtctgattgtgtaagtaatagtgtaagaggtattttagtagttaaaatcacataaaaggtataaatattgtccacaccttatgaaggtacttttgtaataaagtgtcaatttatattttttatgtaataattccaataatttaacaaataaagataatttatgtaatatattatatatatttttttaaaaaaaatatataaatatgtttatttattttgtttggattaattaggccgttttagaaaaattttaattcttttaatatatttattgagcagttttgaatttttattaaattattttgaattatatttttcattcaatttattcaatttagtttcaacatttattcaagttgggtacttaaaaaatattttaatttac

SEQ ID NO: 177463 - DNA, 619 bp, Cannabis indica
attattattattattattaatgtaatttattattagatgatagtaaattttattttaaaaattaatataaaaaataagattcaaataaattgagaaatggtaaagaccatttcaagtgtcaatcagcaccacagactataataaaaacggttaaacactcacaacacgtgtcatatcagtatgacgttaaggtactttaaattttaaaatgtctaatggtaaaaataaattaacaaaaaaatgagtaaggggcagcaacaaaaaggtgacatattgatattgattatgtattttaaggtaactaataataaaaaaaaatcatatgagtacggtgtaggacatgctgaattaattataaattacgtaccgtagcatccatgatgaagataagggtttccttggtaaccgtctgagcatttacactgatatccaggtccattagttgagttaacacactcactatgttcagctacgcatgcatagctagaacgattcaacttggcctgttcacaagtcaagttcccaacaccccagtctaacaccatcctcggaaacttcttcttcttctttttcatcaaatccttcaaatccaacgtcgaaaagttatacgaaccactct

SEQ ID NO: 177464 - DNA, 881 bp, Cannabis indica
atactacctgaccaactcctactcctaggattaatttttgtgagagtctcacattgatgagtggaaacttaatagttaataccataattaagttgcatgaacctattccaattattgacaattaatattaaaaggaaaccatgtacatcttattatacacctcaccctattctattttctccacaacacttccaaattctcaacaattcttgcacacatatacttattatgaatgaaaagctaattaatttagtttttggttcaaaaatttggcagctttacaagcaacaaacagagttttttcaagaggtagaatacaagtttgaagaggatgcatctttgtggatgaagaagatgaacaactgctctaatgatgataatataattgaaatagtgacttcaccaaacaatcctgatgggaaactcaatcgagctcgtcttcaacacccaaatgccaaagccatatatgacagagtctattattggccacaatttacacccatttcagctccagctgatgatgatattatgctcttttcactttccaagctcaccggtcatgcaggcactagatttgggtaaactaatacaacccttctttatttatgaataaacaatatataattaatgacattattattaggcactttagagtgtccaatatcataccgatataccgatataacacattgtgagtagatgtagcctcttatattatttattaaatcaaactgtgtaacccgatatatatatatatatatatatatatatattaattgcataactaatatctatatggccactatttttatattcttctcactataaggtgtactttgctatttctttatttatattcatatgaataaatagtaaatttt

SEQ ID NO: 177465 - DNA, 768 bp, Cannabis indica
caccgcaaaaaaatgcgttgaatctcgcgtgcgttgcgtttgaattttcccaacgcgcgtgcggtgcggtttgcggtttggaattattaaaccgcgattcaaaccgcaccgcagcagttttaaattttaatttttatatttatttaattaagcccatacatatgagcccaacccaagcccataaatcttaggacaaaatccataactcttcacaaaccctctcttcttagcaacaaacccaagcccatacatgtgtattgaaatttggagttagaagtttgtgtttgtacatttatattgttgttggaatttaattagtttcaagtttattattttgatttaggtgtgttgttgaaactttaaaaagattattaacttattgttgttgttataacttttattagtctcaagtttgttgtattttcttaagtgttttggaataattatattaatgatagtttaattattttgtgatgacttcaaaaaaaaaaaattgtgatagttcaaaccgcataaaccgcaccgcaccgcatcattttttgcggtgcggtttttgcggttttttagtatcgcggtgcgggtgcggtttggaaaattggaaaaaccgcatgtgcgggttggtttgaaaaaatggttaaaaaccgcaccacccgcaccgcgaacacccctacattaaacataatcatgaaataaatcatgtgaaccatgcaacataaaagcaatatctgatttttattaattagtaaatatgattacattgaaatgagt

SEQ ID NO: 177466 - DNA, 902 bp, Cannabis indica
ttctgcagttaaaaagagctctacaacatttgccaggctaaactatataattatcaaacttaagctacagaaaaaagagagaaagaagagcaagaaagattaaaaatacaggataaacacaaaattgcaactaactcaccacattgactaacacgaaccaaacagagtcgagtgagtggatatcgatccaatctccatttctcgctgcagaacttaaaaacatcccatagtgccaaacacgataccaatccaaaaagggtgattggcatctggtacctgcaaggttcccaccaaaaacaaaattaaaaaaaaaaagtaaaggccactagacataactgaaaaattaatgattcgaaactacaactacctcccaaagaaacaccaaaaagatagttaaatgtaagatgaacataaaagtacttggtcacttttcttttactaaggaggaactggtttgttgatggaaccttgctttgaataagttgtcactgaaaaatgtgaatcactaatgactgagaagccttagctctataaaagataacaacaatatatgttgtcttcatgcaaaatactaaagcatttatttagcttttcctttgcatcagggatggggctagctcttagttgcacagatataatagctaccagcttcttcattctgctgtttataaaggtgcctcttctcatctacaactatttgtacttctcctcaattctcttcaattcaaatatgatcacattaaaaggaacagacggctactgctacatacttcacctcaacccagctaacataaattgacagacttagagggaatggcattttcagaaataccactacagattcaaactgatacctaacataaattttgagatgtcaacaagtccatagttcccttagactg

SEQ ID NO: 177467 - DNA, 505 bp, Cannabis indica
gtttaagcaatattgcatttacatagaaaaatgatataaaattaagaaacatagtcttaacagattccaatattaaaatgcacacatgaaaagcagtcaaaatgatagcttgcttttcttgacgctagccatcagggacctaaaaggcaagagcaacttacatgttttgaataaacgcagaaaaatgatagaatgatcagtgagaaaaaaattcaaatgaaaagaataaagaaccaatcttaaataaacaagtgcacacacaaatatcatacccatgaattcgcacagcaacaataatcttctccaacatttacagatttggagacaggagaatgcgaatgcaatcaaaatagttgtagatgataaaacttaaggtttaattcacggtaaacatgtagtcgaaacccatacatttaaaatggtatctcttcgtaataaccacatctttgattgcacaaatatttaattttgataatttgtgtcttgaatcaatgcttaattggtc

SEQ ID NO: 177468 - DNA, 706 bp, Cannabis indica
ataaagcaatccattaaaacctctttagtttttagacatcatatatatcactctattacaaaatgtaaaaaaaaaaaaaaaaaaaaaaaaaaaaaaaaaaccctaacttccatatcttggaatatcctattgcttcaaccataaggcccctaaaataggtcagattaataacattctctaatgaataatgacttcctcataccctgagtgtcagttacaaagtcatcaatatatgaaaattaagaaaagactgccaatgttaactaataagtgagtccataaacattatctttggtaaggtagcctcctaggttccagagaaaccacatcaaaaaatacatatgaagcaaaaagaggcactcaaccaatttgtataaatgctcattatacacggtcgtagttttcttatctctttcgatttccaactccaccatcttgtctatttcaaaattttacttccaacaaaaatgcatccacagaaaaatcttttgaatacatatagaaaaagttaagagttgctctgacttgcaacaagccctatcagagtctgcaagaccaacctagctcaccaatgcggttctttttttatcaaagtgaacaaataatacatacgatttgtaatgacagaaagaagaaaaaaagagccaaacatgccttcaatagtttaataagtaaagtaaataaataaacatggctccaaatgaaa

SEQ ID NO: 177469 - DNA, 913 bp, Cannabis indica
tgatttttacatgataatgttctggttacagcaaattttatttaaacttttaaagaataaatagagaattggggtaagttaaaaaatgcctcttttattcatcaattaatcaaatttacctctaattttatatttatttgaaacatacctctttttatatgtattgtacccaaaatacccttacataagagaatcacatggagagtatcttgaagtgacaggggcaaaattggtacaatgtttaaaaaaagaggtaaaaatgatagattttaaaaaagaaggtaaaaataaaagaggacaatataaaaagagtatagagtgtaatttcctcttttattttcaaattagaaggcccataacaatcattgggctttaaagtggccgcttaatgggcctaatcttctaacgaaacagagagtgagagagagaaacgagatcacaactcggttgcgtgcccggtgactcggtggcttggctcaccaccattttttttccatcttggactgtaattcagttaacattaacaacacaacagaatgaaaattctaaaccagagctacaacaacaacaacactcctcctccatcctagctacccatttctcttatgtcttaatctcctaaacttcctaacctaatccagattcatccatagtccttggatctgcaccttcggtttccatccgatggacatcctcttcgctcagatccaagcggaccttcgctccaacgacgctctccgccagaccggagcgctcctccaagctctgcaacattcggccgccggtcgagacatctccgttctcgccaagtccgccgtcgaggagatcgttgcttcgcctgcttccgctgtatgtaagaaactcgcatttgaccttattcggtcaacgcgtctcactgctgatctttgggata

SEQ ID NO: 177470 - DNA, 569 bp, Cannabis indica
gggatttcgagactttagagactttaatcttgcgcttttggccaagcaagggtggagactcctcacttgtggtgatactctgatgggtaaaatttttaaagctcgctacttctctacggggtcttttcttacggctactctgggttctaatccaagttacatttggagaagcgtgtttgaagctcaagcattggttcgggctggggttaggaaaatggttggcgatggctctactaccaatatcttgatggacccgtggctagttgatgatttgaatccatttatagaatctcgacatccagctcttgttggtaactgtgtaaattcccttatgaaaaccgatgcacttgaatgggatgatgaggtgattttggatgtgctaatcgagcgtgatcaagccttagtattcaaaattcctctctcacaacactatgtcaatgacacttggtattggatgaaggaggatcatggtttattcacagtcaagagtgcttatggccttcaacaacaaatcaaaggtacattgatatggctgccaactctggtttttggaagcaactttggcagct

SEQ ID NO: 177471 - DNA, 754 bp, Cannabis indica
ttgcattggtggtttcttcggtggtttttgcgtgagttgttatatagattttagttacaatttaggttgccttcgttagttgttatagaaatttttgcgtgtaattgtataaaaatataaaaaaattattttaaaatttaaaaacaaaaaaacttcttatatttttcccacagataagaatatcactacaagaattgtcacttttactatcacagttcgctactgtgttggtaaaagtaacttttaccagcacattttcgcaaactgcattggcaaagaggtcaaagttttactattgtacatttgcagtggctaaaatctaacttttactagcacatttacgcgctgggaaaagtcatttttgccagcgcttttcattttatgttggcaaaagttctaataccaacattgatttgccaactcctttttgccagcacatcacaagtaaattatattttaccagcgcaatagcaacttttgccagcacaaaaatatgctggtaaaagtgacatttcttgtaggaaatgatgcttattgaattggagttgttaattatgataatcatatcttgattcctaaacagtactactcaaattttcaacgtgttccgggcctcacggctgcatctcattgagactcaattgttgaattatttctttcttttttttctataataataatatcatcaataaaatgaggacttcattatgtgtatatatgcgtgattccaaaaagtagaggaaaagaaaagaaa

SEQ ID NO: 177472 - DNA, 551 bp, Cannabis indica
attattgggtaatttttttttaaataaaaaaaaaaataacaagttattagatgttaacacaggatgtagtagttagttaaacttaaatacaattaatccaaaaaaatacattcagaacaattatataaaaaatatgtctaactttttctaatacgtatacatgtatatataaaaacttttctttcatatttttaccgaccccataaacttatatgttatataaaatctttcttttctcccatatgcttattttcttcatatattcaaaacaattttcaacttatatattatataaaatctttctttactctcatttgcctaattttcaattgtatcattataaaataaatgaccagattcaacaatcatggtatgaaaatactattagaatactttatttatggaaattattttttaattaaagaaatgattttctatttaagaaaataaataaataattgattttctgataaatgaatattttatattcattgaatctggacaaaatcaattatgtaatattctatatatggtcagattttctatattca

SEQ ID NO: 177473 - DNA, 858 bp, Cannabis indica
aaagctttcctatttactttttttaattaattatgtattctttttctttttaatctttttctagtcatctttttacttttatacggtatcacctagtttttaggataaaagttgacgcgtgctggtggaaggaggacgcgccacttggcgcgttaggcaagattttcctttttaaaaattaattaaaaaaagtaaatataaaatgagctgaaaaaaaaaatcattggataaagtagatatctgatcattgttattttttttagaacaattatgattgaaaaaactaaataaccacaaatattattcactttaatattttactattttttttaatttattttaaaagaaatatattttacttttaagaaaaatatttttttttcttctttattttgctcttctttttttttttcatattgtgtcacaaatgttactttttctacaaaatatttttagataaaaatatattagatcaatctggaaaaaaaatattagataaaattaattttattaagaatttttacatatacaaatacacatttttaaatatctaacacaacctccaactaatttaatactattgtctttatcaatttaaagtgaataaaaaatataaagaaaatttatataaagtacttaaaattaaaattttttttattgattctgtttttcttttaattaggtttttttctttttttttttctttttctttttttttttaaaaaaaaaaacttaattttttactacgtttactttccctataatagtacatgtgaaaacaatatattttagtaaataaagaaaaaaataaacctctgtaattttgttaaaaaacttaacatagattcgtaaaaagat

SEQ ID NO: 177474 - DNA, 530 bp, Cannabis indica
ttttattttggaagtttcagaatgacctaaaaatcattattgaatgtattgatggtcttataaagaatggcaaagagaagagtagaaaaatgacattgtaagctattaacaaggaaaaaacagctactggcccttcgttatctcaacttcattttcttacaaaacatctacaataatattaattaccatctttcatatctctgtatatataaaacttaattattactagtaattatcatattcatatctctgtattgaaatgattttttattttttcagaaatgaatcatgatcatcatatgaagattttttatatatccaagtgctgaccaaatggccatattaatatgttttttgtatcttttccaacactttataccaataatatatactatagttagtttcataacaatgcatgagttagggtttttctattgattaaaaaaaataattaaaaaaaagttatttagcaaaaataaaaagaaattgagtgtgacttaaatcttatttatataaatatatttttgata

SEQ ID NO: 177475 - DNA, 565 bp, Cannabis indica
aagcagataccaccgcaatcgtactcgtcagagtgaagtggagcattgcagctgtcgccgtgcctaaccattgttgtcattgttgtaagccaaaattcccaaaaatcttatatcacaaccaaaaaaaatattaaaaacaaaaatataatacaatgtaactactacaaatataaaaaaaaaaaaaaattatacctcaatggaagctgataaagacaacaaaacccgtcagagcaatattttctgatctcacccctggcaaaaaacacaccacaaagatctaatttgaacctcaaaaccctacaaattttgccaatgttgatgtgattttttatccgaataatgaagattggaaaaaaaaaatgtaaaaaatggctaagaattggagttttaggtttggtccgacaagagggttcattgtatatcacaaagagaaagaggaagaagagtgttgaaatggaacgttcgcttcttcaaagtggattttaaaaaatcttgtctcttttgaatacctgtgtgctttccctttggcgggcctataatcgcaagtgaatcctttgtgccaaac

SEQ ID NO: 177476 - DNA, 515 bp, Cannabis indica
aaaaacaccaaaattaccaaaaacaaagatctccaaacatttatcctaaaaaataataaaaacaaaaactaagcataattctgcacaataaaataataaaaatactaaatataccctaaattagactataaaagtgcataaaaataacccttacactatggcagacccctcacactatagaagtatgattggagcacttcagtatcttagtcacacaagaccagatatttcttttgctgtcaaaaaacttagtcaacttctgaaatgtcccacgacagtgcactagaatgcaaccaagagcgtattgagatatctcaaagcaactttaaggcatggacttcatatctctcatagtgacagattgtctctaactggtttttagatgttcattcggatttttaactagatgatcgatgatctatagccggttattgtgtgtttttgggagattcgctcatttcgtggtcttcaaaaaagcagatagtgttgcaggtcaagtctgaatcaaatcaagg

SEQ ID NO: 177477 - DNA, 1231 bp, Cannabis indica
ttcactattttcacttaaataaaaactaaaacgtaaaaataaaagttataaacacttttttatttgaaaaatttacacagtacacttaacatcaaattttatatatatattaaaattttacaagttttattttttttacttattttttcttgtttttttttcttagaaataaacaatattttcacgttgttttcctgttaaaataatgtgaaaataacactccatatttaaaaaagaaattaaaatttgtaaaatgtaaaaataattgtaaatctataaaaatatagattttttgttatttttgggtgtttataaaataatcccttttttaatttcaaaaaaaaataacatgtttttttttttagattcaaatgtttaaatttaaaaataaaatataaaaaagaaaatattatacaagcaagcacacattttaagaaaattttttttttctatcttctctagtctaacaatttatttattaaaaaagaacttcaaaagaatagcaacaaaaatttattaaaataataaaataaataaaataatttcctacaataaaatgcattgtattagagtgaaactcaaaatcgtacttgataattggtgagaaaaaatttcttgtactatagggaaaaaacagtcggccgcacaataaacaattcctatatatgtgtgtctttgttgatcaattataaggagaagaatatttggacgtattaattataaaacatctaaataaataattagtaagaaaaaaattaaataaatcaataaacagtaaaatatcaattaaataatgaaataatctcctattctcatttcataaaatttatctacactctattttcttaagtttgagattgggtcaatttatttccctatacaatacggacaaaacaagcagccccatactagaattcccctatacatatatattaagttttaagttataacagtacagaacgaacgaaatgatcgaaaccctagttttctcccttcgacaaaaccttctcttcctatatccatttttttttattttcaatctaaaacttagcgatctaagctctggtagtagcaggataacaaatccttgaaaagggaaagcttcaggtatggtttaatttcgttttaagtttaaaaacaattggtttcgtataggagttttgtgaattagaatagttatgaaggttctgaccttatagaattgttctcgggtagtcatgggactagttcc

SEQ ID NO: 177478 - DNA, 581 bp, Cannabis indica
atattaaaccattagcatgtaaaattcatgcaaacattaaatcacttcaaatttcttatattgattactaatcagattgtaaagagttttatttagggcataaaacccaacagcttaacccatctcaacccttacttactcctggaaagccacgacatgtcacaccgggcttctatcaacttaatactgttgcggctctgagtacagatcaaggcaagcttagttttggggctgttattaaagattggagtggcagggttgttgctggtctttctattcctgctactggtgatttccagcctttgatggctgaagctttagcgctgagagcaagcctggtctggtgctatcatatcaaaattccaattgctgtcattgagactgctccaggcttttagttgatcggatttgtggacaaaagcgagatatatctgcactctcgaatgtagtggatgacattaggagttatctgttccagttatgtaacttcatctgttgctgaagtctctttatcgtcaaaaaaaaaaaaaaaataggtatagaactattctacactctccttaaatggatattttcataaa

SEQ ID NO: 177479 - DNA, 788 bp, Cannabis indica
ttattcaacgatcgagttattaaattttaagtgcaacctgcttagttaaagaaaaaatagtaacccacccaatgaaattggtcggttaatccgtccaaaccgaccactaatattttttttttttaattttacattcaattatcgtattttagttaattgtaataataagacaaatatatataaattgaattcaaaattcaaatcaagcacaataaaaaaaatcatattagttttaactttatattttttaaatagtcatataaattatatgatatataaaaatatataaatatatatataaaaaaaaaaattcttttaatttggttggtcgggttagttcgggttgatttgacagaatggtattattttcaactcgcccaatataaagactggacatgttatattttcatcgggttttaatttcagtttgtatttttcgttcagttatctcaatttgatttggacggattattcaatttaagtgatttacaaaaatttatgtataaccttttaatttactataaatttgacccttcaaagtaattaaaacaactgtgaaattatatgtgtctgtttgttttttcctgtgaaccttttttttttaaaaaaaaaaaaaaccaattactctggtgaaaacctttgtttcattagcttacatgttcaatgacatattatataagtcaataaaagacattaatgtattatctttttcattgcaatattgtaatttaagaacatttttatatttttaataaatatcatacagatccattatgactatataaatg

SEQ ID NO: 177480 - DNA, 645 bp, Cannabis indica
aaatctaaaaaaaggaaagtttacctattagtaacctgctattacaggttaaaagaaaaatgtaaccatatggttacaataaaaatgtaaccattgaatagtcaccctataattatttattgtaacaaataacctatatatacatattaattaaatggattcattattattatattattacactatttaaaaaaaaatgaaaatatataataaataaattaatgtactgtggacacgttcatccatatctatatatgtaacatgctaaaattcttcaaaataattactacattaaattagagaataatagaaacaattccttaggtatattttaaaattaaaaaaaaaaaaacataattaattaaaaaaaaaaagttagttctatctttttggggtacaattttgtcactgagaaaagtctttttgttgtttatatatatttttttggtaacattaatactatattgtgaagtcttttcaaactataaatgatagctagtttgttacgttatcttttttatttatttgtttctaattaataacaacattaattaaaattcttatctatataaattaaaaatgttgtatatattatcctataattgtagtgttggtattaaggtcatatatatatacatataaata

SEQ ID NO: 177481 - DNA, 837 bp, Cannabis indica
acgcaacgttcctcactgaccgtagtcccacgccccttaaccacgggacgtcgtccactcgggcatcgactggctccctagcctcattgtactccccgtagtttgggggttcaacctctgcctcttcgtctgcctcggaggaactgccaggacgtacatcgccctgctcctcgatctcctggacttcagcatccccttcatgatccccctccgcctgggcggctagatcctattcggcgctgggcaaagtggcgtgccgatagggctgagcataaaatccagaaaaccgaaaaaaccgctcaaactgacctatctaacaccgctgaaatcgaaaccgcaaaaactgaaaatcgaaaaaactgccaatagttaaaaccgcaagtggtcggtcggtttttttttcggtaccaaaccgaccaaaaaaaccgaaaccaaccatttaatcatttattactttatataaatatatataacgtttgtactgtttttagttttagattatataatatatattattactttaataatattaatatttaagaaataaaataaagtaataataataaataaaaatattctattctctctcatctgtcatccaacttccaatcaatcaaaaataaatcaaaatttttactgaccttcttctaccctctctcatctcctattgtcttatcttatctattatctaggtctgactctctaatgagtcttctcttctttctatatttcacataaaaaaaaaagccttaaatctgctagagtttctcttttccatccttattcgtccatttttttctttctttatcttaatctcacaaagtcacaactcacaaa

SEQ ID NO: 177482 - DNA, 532 bp, Cannabis indica
acgggcagacccactgttggtattgtgttgggtcagcagcaacatttccgcttatttatttttaaatgtattagcgcagatttatattagccgagttccacagctaatattaaaaaaaatatgttcatttgaattttaccggcaggcagcactagtaccagcatgatccagcttgtattatgcctctaaaaaattgttgcaaaaaatcttatatgcaagtatacgtgtcatattcaagtaataaactgaagagagggggggggggggggaggattctgcatacagtctctcttttttgagtgaatagtcagtctctcttttttgagtgagtttttgtcctgctctgtttttgtcctgctctgtttttgggtgcaatcgtttgtcctgtttgcattggtttcgttcgttttgttttgttcccctcatggcatccagtagtactgacatgggggatattgaggagcgatggaaagacatacaattggaagaagaggaagcagacgaaacctttatgaggaacctgatgcagaag

SEQ ID NO: 177483 - DNA, 577 bp, Cannabis indica
aactattaccttcataagctcaagatacaagacttagagactactttaaaatcaagtagattttcacttcaaaaagaggttaaaaacactagtatagtacctatccctgaatggagttaccttgatgactaaaccagggtaaatatcatcaagatcatgaatatgaggattctcttcaacaatataaggatcaccacacctttcactgattgtttgcagcgtttcgccttcgcgaacaacataaatttcatcacaaatcttgtgattgttgatgtgttttagtggcgcgaattcgctctcccttgattcgcagcagctcataaccaacaaaactgctaataacaaagcacagtacaatgaaactctatcagccattgctgtagaagatgaaccaaaaaccatgatgagatatgtatttttctgttgtatgattatgactaggtttagaggagttatatataggagaagggtttattttctttcttggtggttggaactaagacaacaagtcttggcaagaaagaattgaaatggttatcttctcaagtctaagtgtagtaggtaactgtccaaaaaa

SEQ ID NO: 177484 - DNA, 808 bp, Cannabis indica
ctagctttaaaaaaaatgacactggaccacttatttttgattgtcaatattgtatttactaactccatttattatacacactatactactttatgtttatttttctaattgagtttttatgatttttttttttaattctatttgagacatcattttttttcaataatatatatgtaatggacacctaatgagaatccttcccccagctgagtaatccccgccccgtccccactttaacttaaacaaatattgagatagctatgggacaaatttaggtatcgaatataaaggtgggagcaatccccccacccgcccgccccgtttatatccgaattcgttattagaaaatgaccactgatatccatggattatgttactgttgtgaataatccagggatattttgggattgaaaatcaatggtgaaacagagtcaaaataattatagtgcagaaactaatgaaacaaaatagatattgatatctttagcagagaaaggcatcaatcatgctgaaaaatactgttaaaaacatgtataaaaccataaagataagattgaaagtaggtggaattagtaaagtgattgaagaaaaagaacccttttcacaattaattctctctctaaaatcttttcagattactatacttgttttcattgattaaaaatgcaaaagcaaaatgatgatgaatgcaagattggattgttagtttaaacctttagtaaagagggaatcttgtgcatatgaaatttgtgccattactacaaagacggctgattgtaaatgacaattagtttatagtataatactg

SEQ ID NO: 177485 - DNA, 933 bp, Cannabis indica
atatttgttcaacaagtctttcggattatttcataaatatccaaaaataataaaaaaattatatttttatggaattctaagttttttttttaatatttttacaattatttttcttatagaccgttgtttacacgtttttctctaaaaatagttgttttcacgttgcaaaaatagagtataacattgcaatagcataataacaacgttaaaataatacaaaattgtaataatttaaataaaaaaaatgtaaaaatataaaaatatatatgttcttaggtgtattttatagttgagtaatatgcatcaatgcataagtttaacttttagtagcaaataaatacataagtttaatttttaatagtaataatgcttaaattatgtacctaaccattaaaaatatccacatgtcatttcttattgatatatttcaatgaatttttaaataaaaaataaaaatttgagatcctaaattaattaagaactgccatatgattattaacttgacatatatttatttataattagcaattcactttaaatatttacaccgtaactctatataatttttctaatattgtttttttctttatgttttcttgttacacctcttatatatttgaaatacaattagttaacctttagatagaaaaagaatacaacgacattctctcttgtttgtccacttggtcaatgtgataatggcccgtaccccgcatcgtatgttctatttatgggctttggtcttttaaaacccaatgaaggcccattatgtcaaagatgggctgttacttgttttaatttttaggggaaattacactctataccctttgggaaatttacacccttatattaatttttccatttattctttgtactgttacacggtaattataacttttgtactgtgtaattgttttttttttttaatttaag

SEQ ID NO: 177486 - DNA, 611 bp, Cannabis indica
aaagtgtgaaaattgagagaatagaaaaaaaaaaattagatcgacagcaaacctaaaaaaaaaaaaaatctgacaactagtgtcaaaatctaagaaaaaaaataatataaagttgttggaatcttagttaaaaaaaaattatctcatgtaattatatatatatatatatacataaagggtattgagattgtgtgtgaaagaaaatatttttattggggtgacatgattggagaagcttatggtataggcaagcctaaatgaccatttcaactacccttacctaaacttaacactacaagcctagaaatacctttttaattcttggttgtgcattggtttatatagtggagaatagtaagtattgcaagcatatggaattttgggttagtggattgatgattgtagttggcacgcataaagtggttcaattgttagttaattgcattctatggtttcatgagctgaatgaaaataagttgaagtttctcaagggtgtaattgaactgaaattctggattatatgcataagtgaaaattttcataatcatgttattgaagctacttgaaaattactcatgttttggagaatgacttttttaatgtttatttag

SEQ ID NO: 177487 - DNA, 592 bp, Cannabis indica
gtccatgttgtggttgaaacggatagtcttgtcactgtccaagcaatccgaagttctcaaatcatggggtcgacttttggtttaattattcaggactgtcgttctgctttattatctttgcccaatgttaatttatgctttgtcaaacgatcagcaaatcgtgctgcacattatgttgctaggcagtctcgatttcatgctggtggtagcatttctgattttcccatttcatctgatcttcagaaccttatgtattcagaatgctaatttatttcaatgaagttgatatttcattcaaaaaaaaaaaaaaacattattgtattattatttttagtttctgtaaatattatgaatatattaactattgaattcttagacttcgaaccaaattgtcaagatgttcaatactgatatacactgatatgctgtatatatttaattttaatttttttattatgaaaaaatataagataataataccttaggcaagcaaaaaaaaaaaaaacaaatgcaatttagtgttttttttttaatataaaattacttttttaagattttttaagttcgttagtttaattgtgttataattatt

SEQ ID NO: 177488 - DNA, 834 bp, Cannabis indica
ttagaaaaatgtctcatttttacattacatgggctagtgttgttccatcagttacaaaaaaaaaacaataagaataaatttcggcaaaaaaatgataaaagaaatttgagtttaacttaaatatttttcatataaatatatttttgatataatgtaaaaatatgtatttttttttaatattttctttaattaagaagataaattaagcatgaaaattcaaatttctaatttaatatattttctattggatcaaaattaaatgatttaatattttttaaattaatatttatagttaaatttctttagttactattaatgggtaatacccattaaaaagtattctatatatattagaataaatatcatttctaccccccccccaaactttttaccctactaaattttaccccctaatatatactatttgttacgaatagtcctcaaattataacgaatgcagaaatgtagtccttctgttcacttctgtttaattttgccatttattgacttatatggcagtattattttaaatttaaaaatgatgtagcaagacatgtggatattaattttgggtgatgtggatattttaatgtaacctaaattttttatttttatttttttacattaatgaattaaaacaacaaattaaataaattcaattataaaaagataactataaacaatcaaaccctaactgccctttcctatttcctctctcttcttcacgcccggctgtgttcttttatttcccctttgcaaaaaaaaaatgggcaaataaattgggcttcacgcatgacgatctttacgcctatgtcattaacctatgagtatcaa

SEQ ID NO: 177489 - DNA, 900 bp, Cannabis indica
aggaaagatttctcgatttagaatgtatatgtgtattatctattatattataatctcacctaataattaataatattttttcttcaattattatttttttagaaaattttttttcttcaattattaattttatcacttttaaataaaatagaaaatatctagcataaaatttactcacgtaacttcttactagtattatcaataacaaagaatttgattggtaacaagatacaaaataatattttaataaagagttaaaaatattatttcttttaaaaaaaatccaatcaatatcctaaaatgatagtatgacttgattactaaaaaagtaaagtatcatatgttgaaaacttagaattatataaagatggaaatctctcatagtacacttatattttggtaaatcctcttatctattttaacatataaataatttttttagtattattttttttcatgaatgcatacgatatagctatttaagattacatgtaaattttcaaaaaattctaaatagttgaaagtgccgaaaataaagatcaaatagttacaacacatataagaaaaaacagtgtgttacaaaatatttaaatcttatttttcgtcattgtaattattcgaaattttttaaaaatttacaagtgatcctaaataatttttaacatacgtacatgatcataaactaaaaaaaaaacgaactataaaaaagcttttctggttgttgtaacatataggggtttaccaacacctttttaggggatgtatacatagacttaccctataaagatagagtaattataattgtgcactaaaagagctcttttggttgttgtaacagattggagtctaccaacactcttttaggggatgtatcctagacttactctattaaaatagaat

SEQ ID NO: 177490 - DNA, 545 bp, Cannabis indica
agccaggcctcacgtaggagaccttaggaaaagcataaatgatcaaatatgaggacgtgattgttgggttttatgccctaaataaaactcatttcaatataatcagatttacttattaataaagatcagaaataacatttaatgttgcatggttcacatgatttatttcatgattatatgtatataatgtatgaattctatttaagtccagaacatatgaatttgttaatgattatagtgttgtcagcacagtggaatataatcttaattatatgttcgaaagtttattccctgatttgtcagaacactggatttagactggcatggtataatcagcgataggtattcttacaccttggataagtgttatgtcctttccagggcattggcaaagtttaccagtatcggatgtatggagtatacatcggaagggaccgatattgaactttgattagatatattaaatttaccgtaatatctattcaattcaatgtcacctgttgatcctagatcaaatgatcttaatcctgatatgtttaggtttc

SEQ ID NO: 177491 - DNA, 1112 bp, Cannabis indica
  modified_base (1064)..(1064): a, c, t, g, unknown or other
atttaacacttgaaaacaccattagagtacaatttttttaagtgtactaaaatatagcaatacacggtacttttttgatactccattagagatgctcttaaatggacaatagaactcgaacaatatgaaattcctttttaacccaaagaacaacaatcaagttaaaactcttgtaatccaaggtatgtataatattggcaatgccatgtgcaacaagacataagagatttgtctcaaataaccatattccattctaaagttaacaatgcaatagaaaacagcaaaatgtatgttaagttcataaactaagacaactaaacctaatggaaataaacaagaaaacaaggagatgaagttagcttcttttaacttggaaggtttacatgacataaattcaaaataattgaacttgtttttcttcttcatcgatatcatcaaaccgatacaatgaatgatacagtttcgggatctataccatatgtaccgttccatccgctatcatcacactgttagcctcttgtagttgctgaaatcatcaaattttacattatagtctagccattgaagaaataaaagaagctaaacaatgttgtatgtatgtatacatatatatatttatattacctctagtaggactgttatctctgctcttgtgaagcggacatcgatcctggagttgacagcctcctctataccgtcgatggataatgcatccaagtgattggtacgcatatgctggccgaatatagaattgaatgcttctattctgtaagacgaaacagacaaagatgtattagaactcgaagagtaggaaaactcgttgaataggggaaaagaagctatatagatacagacctctctggagaaagttcatcaacagattgggttggaaggtcatcatctatgtccatggcatcagttgttgaactgtgtaaagaaaaaattaagtgagaatcagtaactgaattgatttagctattgagcaagacaagacttgttacttaccctcctttaccggctgcaccactgtctggtctatcagtatcattttgtgggtcgaatcncgctcggcgtttgctctctgtttctttctcctttttcgttctctcgct

SEQ ID NO: 177492 - DNA, 767 bp, Cannabis indica
atgtggttagttttggttttgtaaggccagtatggctattttagttttgtaaggctagtatggctagtttttggttttgtaaggccagtatggctagttttaattttgtaaggtcagtatgactatttttagttttgtaaggctaacatgactagttttggttttgtaaagttattatatggctagtttaattttgtaaggtcagtttggtctaataataacacatcaaatgtagtgtaatcaccgtcaggaatggagatgaaaatagataagtatctacgtcagagaattctatgtgactatttatataaaatttcatattttattttattttatttataagggaaatttcatttttttattaaatatttattatgtattaattaatttctctttattttgcaggtgttttactagtggttcggaagtgacaactctcagttttgaggttttcttttctgatattatggttttattgtctagctctcctagggtatctctgcatgctcttaggatagacaataaactattatagatggaagaaaattctcctctggttgtgtaactttgttacctttgttattttaacctgtatcggttaccctacaaaaaaaaactgattcctaatatcatctccaaccatatatcaaagagattttataaaaatactcaattttggataaaaatttattatttactgttacacagaattttttataaaatattctttttataaataaccacaaataacaaaacaaaacaatcaa

SEQ ID NO: 177493 - DNA, 563 bp, Cannabis indica
gatttttgaaaatcagcaaaaaaattatgtaattttgaaagggcaaaatttttttttttggggcccctggactaggtgggccctaggcacaggcctagcccgcctatgcccagggccggccctgatataaatatatatatatattaatacacagtattgaattaaactaataatgtaaaaatattatgatagtcgtatagtataaatttatagttattttgtgaccataataatcgtttatcagggtttgtcttgtgtcatttagttggtcatagaaaaaaatatatttatgcttttatttagaaaaaatatatataattgtaaaaaaggataaattttttttggttcttggacttaagtgggttctagccacaatcctaatcgacctatattaagggtcaagcctatcatttatggtcgcacgttataattcataatcatttctgttatcatataaagttattttgttaataaaaattttcatgttatgtaattaatcttattgatttttagtagtgtaatatatgtgtggcttttttaaaaatgttgaataattaatttta

SEQ ID NO: 177494 - DNA, 1344 bp, Cannabis indica
agtcattatattccgttgccaccaatgtaaggttttttaaactcttatgtgtttattttcattattttagagatattcatatttaggatgttaatcaacatacttgttagtaaatttaaatcctggtaaaatattctcaacaactggcctcagagccatggtaatgatttactttcgtgtaatatgaatttaaaacgatgaattatgtttattgtgttgatttggatgtgttcatgttggtttatgtgttaattgatgaatgtatgtgatttacaaaaattttccatgaaattaatttatttttcgttttgaaaaaaaattatttggattctttgtgaaaaattaagcaacttttatttttacggaactcgatttcgatgaaaaacgaaaaaaaaatatggctatttgaaaatcgggtacatatgggtgtcgtgtatggtgcttgcacgcaccaagcacttcggacaaggagggaaacgcgcgcggattcagacatgcattgtctgattccttcggtcaggcccaccttcgtcggaataatttagataagcttaaaatttattaattgtcatataatacaataatttaccgtattctattttgtatattataaagtaacattttttttttaaaatcaatatatttttaatcacttatagtatttatgtatgaattatgaaagtatttatatatgaattatgaaagtattttgattgaccaagagaaaagaaacataaaagtttctttaaaattacaagaaaaaaaaatgtgtatttaaactttgaaatttttacaccaaaaatacaaattacacactttattacatataaacctacacacggttaaagcaacttttttaccttttctctatattttattacacatataccacatacacatcacatctatgcaccagtcacgtcaactcacctatcaaccatcatgcatccctcaatcacttccctctctctttttcttttgttttcctttgatttttttatttcatttcagtttttttttttttttgaaataacaaataacctccattgttgaaccttaactccccacgattcctcaaccattttccctctcatttttgttcttcaaaattttttcaactcccactaaaccatcccataacctttttctctctttctttttgtttcccaatctttatataaaatggatgtgacccgttcttcttcatctccttcccctgttcaaaaaaaaaattcaaaatgggtttgaaatcactagctaataaagctaagggaaaacgtccttttattgaggaggaagactctgattttgctcctccattaacgaagcgtgggagagctcctc

SEQ ID NO: 177495 - DNA, 660 bp, Cannabis indica
ttaatattggaggggtttaaagttgaagaagatagcccgataggtctgatatagggcccaatggccagtccgatagggcccgatggccaataaaaattgattggccatcgggccctatattggacctttgtcttcaacccagatccaatttttgcatcacgatgcattgggcctacatcggggatgcatcagacctgcatcgagcctgcttagaaaatacatattctaattcagaaattacagattaaaaaatactaacctttgacattgggtccttaggtcgtggtggtcgtggagaaaggggtcttcagtctgtcagttacgatggtcgtcagtcggagtcgtcatgggtggtggagaagggtggtgtttgggtcgtgggtcgtggtcatggtgatggttgggtcacgtgaagagggtagagagatggtggctgtttgaaaggggaggatattttgagaaaaagaaaaatgttgacctatttgactaatattaatatatatataggtttaagaaatttaattttaaggtaatatatgacaaataaaaaaaaaaaaataaaaatttcaccaaccctaaataatagctaataaattataaatgtgagctgtctttttcaagcattgaagtacaatattcaattccaaactaaagtaaaaa

SEQ ID NO: 177496 - DNA, 813 bp, Cannabis indica
agatagatagtgaaggatcaaatctagaatataatccataagtgtaaccatctgaaaagattggttagtctgtcattaaatgcagtttcaaggtgttatgatcaattgttatgtttggtgcgagggacctgaggttggcaccagttccttataccagagtataagcacatgttatgggccaggtatgagttgccagaagaattttatacttatttggttgtgacactcttcaatgttttgaactctagtacttaattctcatcttagccaacataatatttgttctttcctcttcaacacctaaacccatgttcctgaatgttataaataatcctggtacatgctgattagctttgtctccaggtttattgcattagtttcaagttccatctttaataggagaacagaacaaatttaaagctagtgatcaaagccttttcaattttgttagaatatattaaataaaaagggtaattgagtcattgtattgagggtgggtttgtgagtgagaatagaaactattcatataggtatgtaagtgaacgattgggtatgcaatgtattgagcaaatcactctttgcatcagaggggctaagggctcccatactttgtataattggcacaattcctactgttttggatactattcttgttgctgtttgtgtgtgttttgctactggttttgagtatttgagttagattgtttgttatttagattcattcacctggctttgtctcttttccttatgaaaaattacaagcgaaagccatggaggacaccgacccggcttgccatttttctttagctttgt

SEQ ID NO: 177497 - DNA, 657 bp, Cannabis indica
aggtatcaagcaccataaaagatatcatactgttattggtgcatttaagtattagctcccataatttttaatttaataaatgatttagaaacatgttaatcaattattgtatattcgaataatatagtattaagcaacttatggtgtcacatgacaataatatagtacaaaaattatttaccaaaaaaagtattacaaagatcatttatataaaaaaaaaaaaacaaaagataaaataaatgctaataatacaagacaaaaaaaaacgtattaatcaattattggatactatattggtataatattgagtaccttaagatgctaatagcaagtaaaaaaaaatatttactaaaataaataccatattggtatgataaaaagcaccataaggttaaggtgctaatagaaagtataaaaaaattatatactaaaaaatattatataaaaaaaccaaaaaaaagaaaaaaaagataaaaaaaaaaaaagctaaatgacaaaaataagtttgtttttgtattttataaacatgcatttctattgcattgatatatatttaattatttatatatatatatgcacttttattcaatagatcacaattttgtagcaaataagtaaagggaaaaagaataattgatagatcataatcataatgct

SEQ ID NO: 177498 - DNA, 662 bp, Cannabis indica
acaaaaacaaaaaaaatacaaagtctgattgacactagaattcaacaccagataatcttacaccaacacacccaaaagcttaaaattatataatagtccaaagccccagaagccaatttcaataaacatggtcaaaaaacaaaaaaaaaaagctgaatttttccagatcaaaaaacagaaaaataacaagaaaggaagcattttttcacaaacccagatgaaattcatggccacaatgcagcttagccgttgatctgccaccattatccgaaactaaatcaagacaaatcgaacatgaaatatccccagaagatggctgctgctgctgctgttgctgcggctgttcctccaaaccaccatctccaccgtccatttgatcatcacgatgatgatgaatatgagcagtactctcttcagagctcaccatgaccctctccttttcctccaaacaaacacccaatactcaaaaacaactcacccagaagaagaaatctatgtctttctcgtctctttctctctccgacctgtcagtttacacggatcagaccttacgtggactgtcttggaatattttcctttcctttttttttcgtttataattagataataatccaattctttttcttcaacttattacactaatatgtttttaacggttacaa

SEQ ID NO: 177499 - DNA, 721 bp, Cannabis indica
atccaccctaagtgcgtgcacaactaattcatgagcagccatattggccgaccgacggacatgaatcaaggacacctcaggaaaattggatagtagactagaaatattatctaaaagagaaccaaggtcattacaaagagaagatcttttaggaaaagcagaaatcacagctagacaatcagactcgataggatggagagggagaccaattccaagcgaccaatccaacgccaccataatagctattgccttagcttaaataactgtaaaatttcctacaaaaccaacatagaaacataataagcttcaccccaagataataaactaaaataataataataataaaagctaataaaatataaaataaattaaataacgagtttattatggacagaagggaaaactcccttcatccttacaatccacataaacattaaacccaaacctcatcataccttaattggaagcatgagaaacaacataaaaaaatgtgcatttacttattttgggtgcatttagtaacactttttttttaatttttaattcacaaaactaaaagtaaaatttgtgtctttaaaaaaaataaaaaatagtggtttctaactacttttgttttttgtattttaaaaggtagaaacaaaagtgtgtttgaaattttgaaaacaacacagttttctccttcaagtattgtacgcttgtagtggttgattgtccaacaact

SEQ ID NO: 177500 - DNA, 1028 bp, Cannabis indica
aataagtctgagcataatatttatttgattaaacatccttgaataagcattggcattgcaatacattgtcaggggctgtaggaacaagaaaagttagttgtttgaacaacactggtgggtttataattttatgactatcacacaccgaaaaatatgtacaatttcccccctagactatttgttaaatgtaaaatctcatacattatctatcagttataaccattgcacatgttgggaagggtggatcaactttaccatttttgactgaagatttcactttcattgtgagtttgcagctgaaggcctggcctttggtaatagtgtctattggatacgtttcgatgaagagttttctgaaaaggtgattattttctcccatttttactgttctacttttaattttatgcttccatgttttctcaaaaaaacatttatttttttttcagaaattcaaatcttcaagcccttttggcatcaagtacaagtttcacctagaggtatgttgctgtaccattttcttattctattgtggatagttgcttgtatctaaaaatatggctatgtgtcttatttagttcatttgattatggttgcaggatgcagtggattgtcctgaatatattgtgccctttcatgtcttcaaagcattagcagaagaggtatgtattgtagttgttggtttctatttcaaactagctgccaagcttaggtgacttcaaaatttcatcgaaatctgttttgtgcctgctggtgtatgtttgcccctccctaaaaaatgtgctacaatgaaaccaaagggctttgcgccaagaactaattatctgtttttttttttttgtacattttgattggaagtacttgagatacttattattctattgcatcatacttgaatatatgatttgagatgtgcataactttttgcagtatggtttggagctagttttcgtgaagaattcacatgattttgtacatgaatacatgaaaaggccagattatgtggagctcatgaggcggctgggtgcctt

SEQ ID NO: 177501 - DNA, 833 bp, Cannabis indica
gtactagtcttttttaaataaaaattggtgagctcatcttcaatattttgaccaaataaatgacgatcttcgtgaaaacatttattattattattattaaatatttatatttatatatgtatattgaaattatttaatgagttgagcaacttcaacatgttgttaatttattaataatggatttggaagtaagaatatataaatttttatatatatatttttttcaagttgagcacttagtaataattaatgtcctagcactaacttattatatattactaactcttaactacaataaatatctaagtacacacctctacaaaaattgtgttttagcaacccactttagtattcttataaaagttttaacacaatatttatagttgctaaaatacatatattattttaaaatatatatattttatttttttcttattcatataacatttgtcacattttcttaaaaaatatttcaataattgacaacactaaaaattgtccatcatacatggttcttcatcacattaaattaatgattttttaagtaaaaaataacttttttttaataaaaaattaaaaaaaataccatgtggccattgtttatattgaaaattaaattacattacataagtggcaagacaacttctagataacctccattagagatgctctaaaacaattgtgatgcttaacactgtatgtagcaccttgtaaatagttaacgatatctataataagtattaaatttaataatatggaatctgatacttaaattaaatcaataataatttaacacatctagataatatctttttagtattttttttaatatt

SEQ ID NO: 177502 - DNA, 900 bp, Cannabis indica
cggacagcagttggtacttcaagaagattttgagactcagggattcaattgattgggatgctcttgatagttcaggtcaaaatggtaaatttaaagctaaatgcttttacaattctcttatatctactggcacaattgattatgctacctaagatgtggcacaagttaattgttcccaagcacaggtttatttgttggcaggccattaacaaccaagtcttgactagagaccatctaagcaggattatggagattaacaacaataactgtcctgtttgtgagtctcatttagaaactcacgaacacattttcctttagtgttgttgagccaaaaaggtgatgctagatgtaaacacttggttcagttattcttgctggccgagtattctgagcagtggaagatttggtgtgagaaaccaatgaattgtttgcaagataggttgatgaattgttgttatggctgcagccattgattttctttggcaaaataggaactgttgttgttttaaaagctactgcaatgttgctggttttattagcagggaaattaagtatggtgtcaaatattaatttctcagcattttcttgaacaagttaaaggggatatgtatatccaaaatgtaattaaaggctggtagtttcttctttgagcggttgtattgggcaactggcttttgtttgtatttgtttgtcttttgaataaaaataattacattttttaacaatcacaatttggtcaaattttaccatttagattacctttcctagtaaaccaaataaagtaattctgatttcttttggagagtttagtaaacaacataataaaatattatttctaaattatttttatattgttaaacacattccaattgattttttgatttccagtatacagtttag

SEQ ID NO: 177503 - DNA, 897 bp, Cannabis indica
ggatgactcggaaatgtgcgttcgaagtggtgaaactagtgcagtattttcgtcactcccattagctattaaatcggctccgggacactgtccaacagaatcgatctgttcggttccaggtaatgctgattcttttgggactctctatcacactaagaaagatgtaatgaaatattaactatccggtatatacataataatattccaattctcttctggctttgatcaggtccttgtaactggctctttacaccttgtgggtgatgcattgaaattgatcaagaaataaggcatttaagcaggaagaggattggttggtctccctagccctgctctgccccgccccacagtaggtgcttctaaccttaactaggctggagaatagtatcacccctatcaattcactttggttcagctcaggtgcctctttggtcaaattatgttattgagttgaatgagagtaacatattccttctttttttcttccttggaagacctcatgcttatttgtgttgcttcatcaccttggtaaatctattgacaggaatatcccacattttattaatttattgaacaatttagagaaattattttagctcttatcaactatgtacttgagattttaaatttgttgcaaatttataattctttcgtcaaaatctatggaactactgaattgatcataatgttttttcttagatagaaaaataaaataaagtatggccgtacactattttacccctttagttaatcattcatgtatatatatttgtgctttaaataatgctaaattacaatagtactgatcattgagtaaattttgtgaaaattaattcctcttttacaaaacattcataccttttcttttattataaaatataaatagtctaatattat

SEQ ID NO: 177504 - DNA, 733 bp, Cannabis indica
gaaaaaaataaaaccatgttggcttttgtatgcaaagtgtcacctgccaatactccttctaacaatggcacctaacccttcgtgttgttgcctagccaaaaatttcctaaccaccggacgagggtctctaacaacagtctcacaattctcaatctcactaggcatccttttctttctttgtataaatatgtatcaactagttttgcactttcaatatcagcgtttggacaaaacaagaaaactatattagttttttaaaaaaataaaaggaaaataaagatgagataacaaagttacatatttgaaccgatttatacacgtttattagagatggggagagaatgtgctgtaagaaattttgaaagtcaaagtgtttaaggtgttggcgacccataagacccacatggactttgcttgagatcgggggatttgactataccatctttataaattatactaatttaataatatgtatatatcacgtcatcacaatgctgtgatgatgtatggaacttaagattacctactgttttttttctttgcattgcatgagtaccactacttacttgtttttttttttttaaaaaaaaaaaaattaataaagatgagtataaagtttttttaatcaatcatggtccatgtcactttatgaaattcaatgcgtatggtatggtaatcccaagtgccacacatatacatgatgtattgtatctatgcgagggaatgtattttg

SEQ ID NO: 177505 - DNA, 584 bp, Cannabis indica
gtggactaggagtgttcgagagaacactgataccacgtacaaatctcttgtgtcaagtgattctattttctactatttttatttattattctggttttggtttgtttctgcaaaactgtgttctgaagtaacagaattacattctgctgctgcagactgttatacagttatattttttacttggttttttttttttttttgtaataattattgacattagcaaaaacatggtttttcaaagtcgttggtgaactccccccccccccccaatcacttacttttctattatatctatattttattattgcttttacatttacatgtatttcatattttgtgttgtaactctagtcttctacattttttactttcttttttaaatatatttgtgcttagagttataatattatttacatctttttcaagtctttgtattttgttgcataaaaagtgtaatcatcttgataatattttattcatctcattaatttattttcttccattattgatttatatatattttctaacaaatactaattaccataatccattttggcttggcttttatttttttttttaaaaaa

SEQ ID NO: 177506 - DNA, 721 bp, Cannabis indica
tctatcagcatttgggaggaattggccttaaaatttcttccaagttctttcctcctgctaaggctgtcaaactgagatctaaaattaataactttatctagcaagacaatgaatctttttatgaagcctgggagagattcagggacctaatcagaaagtgccctcataacaggatagagaagtgaatgcatgttcacaaattctataatgggttgacagtaccaaccgtacactcattgatgctgcttctagtggagccttaatgaagaaaagtaataattaggcttatgatctactagatgagatggccatgaataatcaacagtggctaacagagagaatctaagctaagaaagtagctgttatgcatggaatggatgccattacaaagctaacaatctaagtagaagcactaaccaagttgatgatagcataagtaaaaccttggagaatcaagtgggatagttggctacttaaatggctaataaaacacaaggtaactttcctagtaatacaaaagtgaatcaaaaaaaaaaaaacagcaaggcgaatactttgaggactagaaagaactatgtcgggtcaagtcaacaaaaatcagatggagaagaaggtcaggatcaataggcacaagcactgatataaaggaaaagaagactactgaaggtctacaaacacatgaagcctctcctcaagtcaacattgagcatcatgtcaagat

SEQ ID NO: 177507 - DNA, 623 bp, Cannabis indica
tattcggatcttttgttttgcacattctttgttgaacatgaccaaagctttattatcccacctaaactaaattgtctggctttatatttttaaacaacatgtgtttcagcaatgaatgaaatgttttcctagtttgtcatgtaccaaaaatgttttattcatgattatacaaagataaggctttttatgggattacatttgacgtggaaagatatattgtgttttatgataaaactataatgtcaataaattataccaaagtggtaaaaactgtttttagggttttttactgtaagatgttttttttttttttgctgaaagcattcatttggggatgctgtaagatgcagaccatatgatcagtgcaccccacgaatgtaagatgttgctgcctcttcttcttctaagtttctttctctttcaagtatcgatgcacaacaagatgtaggagagcttccccactcccaatttttttttcggtttgattttgtttcaatattttatttatttttctcctatacattttaaataaatttacattttgatctttttagagatatgtattatatatgtatatttttaaaaccatcgcctatagtatagggcacgatttacaatcgtcg

SEQ ID NO: 177508 - DNA, 763 bp, Cannabis indica
gtgtgataattcctttaaattcttattaaatttaaaatatattaataaaattaaaattaaaaaaacgataaaaaaaaattctcacctgcatgggataaataatccctccctgctggatggaataaataatcctagacagtatgaggttagctggattagttattcagactttcaacatgcccaaacactggatttgacaaattagcctgtctaatccaatccaatcctgcgtaccaaacgggcccttagagtacgtcacatcacgtctctacctctattcttcaatatactttatcaagacaatcaattttatctattttaaatcatacttatacattaaaccatacaccactttctctataatattatatcttaaatgatgtattataaaataagaaaaataaataaaatgtaagaaagagataataataaacaaataattaatgttgaaataatagaaaaatctataaaattgaggaaaaatatttgaagtccaaaaactttagaaaattatttctacatgtaaagcatgaatatgaatgttgtttgagctaaaatgaagaatgatttagttgatcacctgatgtaacactattttatcaatttttttagctaaaaatttgaagatgagtgattttaattattcttaatttaatgttcctccacatatttgtaatccattaattatttttaatttaatgtttgtccacatatttgtgctttcctcattttttagtttcccgtgtatatgattttgtcaaac

SEQ ID NO: 177509 - DNA, 833 bp, Cannabis indica
gcggatcagacgcactataaataaaataatgcagattagattagataaacacccctaatgacatcttttgttggaaagtcaagaaatcaatagcaacatcaaacaaaagcattcccaccaaacaccatcttgcatcaatctcatcttccaccaaatcataattcaattccccttcttcatcttcacccacatgaaaatctaaccacctttcctccacctcttgaatcactgaagagcttgaactcataactcaccacaacacacaacaaaaaaaaaacgtagtaaaatatgtaatttgaagctgatgtacttgacaaaataataaaactttaacttacacaagacaaatttatccttgcttgattttgtcaaaaattgtttcaattaactatggtgggggcatgtcaatggagttctcaaattagatacttcaaaaattagcaaattcataccttaactaaattatttctcttcaacatgaaagtgaacccacaaatttgaatattcactcgaaagaatttaatcactgaaaataggaaaaacagattgtgttatgtttcactcattacctattttgtggccaacaattcatcatcaaattgagttgaccctgcaggaccaagtaccatcatcatgacgcttataatggtatgaatgaactaccctcattcattacttacaacactattcaaatattttactgaaaatgatgtataggaaatattcaaaactataataattactcttcaatatttattatacctaataatatatgaaaagtattaattacaacctcttagccaatcttcatgctcgaaatcacatgccaaaat

SEQ ID NO: 177510 - DNA, 580 bp, Cannabis indica
tggagttcgaattattcgtagttcgaactagtttacttaaaacttttttagagagtattttctaatataaatttccttttcaatatttatattgttttaatttaattttgtttaattattttcattcaaattaagtagcatttggttggaggtaatacaatggactggaatagaaaagaaacaatttccattccattcctttaattgtattttaaagtattaaaatatcattccaatggaatgcccttcctactatttttagtagaataattatttcattttaaaataaaaggaaagatcattctaatacaaaattttaaaaaatttaataatttttcatacattttaaattctatttcattttattctttcttattccaactctaccataaatttttttttgttgacatggcctttaggatagtggcctgacagctaaaatataaatccacgtaggcattaacaaggtcagattgacaggaaagtgattttgttaacaattgttcagtaaatttgaccataaaaaaattaattgtagagaaaaagtattaagggttaacagatgttgaaactaaggtca

SEQ ID NO: 177511 - DNA, 597 bp, Cannabis indica
attcctaaatataagataactaagactttacaagtcattttgcaattatgtttgctaaaatgcctcagagaaagttagaatgtttgagtattttctagggtgtcttacatttgttctattgctaagagttgggatctatatggggcttggacaagggaacatgtagttctagttgtatccaaaaaaaaaaatactttcttctcattctttttctgtgtgttctcaacgatagccattggtgaaatgtacaaattattacatgatcaactgaaacagctttctatgaaaaactgaaatagctaattctgtcgtagctaattatcgaatattgtccttcctagttgaatataaattgtacatttcttctagtattatttgccttttgtctaatgacaatgagggagcttgtcaaaaaattaaccgacaaaaaagttggagtgcaccacttttggtatcataggtaatagatatggcttctaagcatcagtgaaagattaaatcagttcattaatggctaacttggtcattaatagttgtcatgcggaatccaaacagagagaaagaaagaattaattatttttaattgaatcaagaaac

SEQ ID NO: 177512 - DNA, 839 bp, Cannabis indica
gtagtgtaagaaagaaataagaattatgtcatgtgtttgtttccagcacatgtaaggttctctcttttttttctttttttttttttttttttgtattaatctttttcctttttatttagttcacaagcaattttattttttatatatgatacaattataaataatagtaataattgcacttatccattgcttgactcaaatcaatgtataattattatctctatcttcttctaaaatgttaattaaaaaataagaaaagaataaaactactaacatgataccatctttaggaagattcatttgttgttattgaaataagttgaatggtccaattttatagctaaattcatctcccctaccttataattcatatatttccaatattatttcttttccttttattgcatattcattgggtaaaggtaggaattttacagtaataatgtataacaaaatggttgttttttttttgataaaattttcttcttgtgtgttataccactttctaaagatactctaatttgtaaattttgctcatctttttttttttttttttgtttttatttcataattatcaataaatgggatggacacatagtaaatcaaatccagaagagaaaaagacaaatgataaaatgttctcatttaatgacatgacaataaaaaaacataataataataatggtactaccatttgcctacaatagaaaatcctggattttggacttactcttcaagttgtattgtttctgacaaatctggttacttaaggcccatttagaaacttatgcttcttttgaaaataataattacactattaatgaagtgtgtcccaggaa

SEQ ID NO: 177513 - DNA, 814 bp, Cannabis indica
agtggtattttatcgatttatgatatataatatgatatgctcttaaattagaagtgatattcaatttatgcaatattaattaagttgtgcttttaacatatacatcttccagttgtaattgatggtgtagaagtgcaactgtattttgaattaatatcagtattagaataaaatttgcataactacatttctaccttaccaaactctatatatggtcatctccctttcagatcatcattttattattcattcagatttctaacattttttatttactaaattaatctttagtggtaatttgcctctggtggatattataaagtctgtttactaccgcgatcgcaatgtaataaattgagcgacatcatcaacatatcagttaggaataaaaaaaatacaagtctaggacgttatttcacttacctagcatccaggttgacgtcaggatgttaacttgggccctgaatgtcaattttgggactggaatgtcaacaaaggtgttaggtgctgaatagccttcagtaaaacaaccatagtgctctcaatattgatccgattgatgcgattcaactttgttttaaatctctttcaaatatatttcaattcatgtctcacacccatattgtaattctgaagatttcaagtcaaaaatttgtccccaagagaagtgtaattttttttgtagtattactcggaaacgatccaacagacgagattcaagctcaaaaaattaatgattcagcatcaaatcatcatcaatggacaagatagtgcatctctctctacattctctctctacgaaattaagtagctc

SEQ ID NO: 177514 - DNA, 771 bp, Cannabis indica
ttttatgtatatttataacaaagttgaatctatgcaagtgggtttgctataggatttaatgaccactatataacatggatactgttgacttcccttttagccaatgacaatgagtctaatttgtaagcgacaagtagtatcatacgagtgtaatataataaagcaaataaagacacaagaattttatagaggttcagccctgagcagtttcggtaatagcctaatcctcgtagtttgtattgacttaagaataaggagaatggttccttttgttagagctcttacaatcatatctctgaatatagattcttagacaagtttttcgaccatttgcccaatgagtatgaatcactatttatagggctataagcttgggaggaaagtatttccgttcttgttacaattgatattagtggaaagattgcatagtaaatacagaatacactaatcgtgggattcagacagcttgccatatctttgtgatctgatcccaaagttatagggatttcttcggtgactcacgatgcgaaagctaaatttgctaagtgttggcgtgctgcgcggatcgctcactacccggcttagaggacttcgtccgagtgaatgtatgtggtgtccactttggcatatttcttgtgagaaggtacataaagttgattccacgtgtcaccatcatgcgatgctatgtcagagtgcaaaaatcgagataacattttcccccaagtctgtacgggactttcgaagttgcgtgtagacttcatctgagatgtc

SEQ ID NO: 177515 - DNA, 860 bp, Cannabis indica
gaaactccagcatgatccgcaagaaccctaaatccaaaacacaacaaaaattcaatacaagacaacacacaaaagagtattcaatacaaatatataaaaatatatatgaagaaatacctgattcttgactggagtaacggcaccacgatctctccaatcaaaatcctcaggaagatcttcagtaggaagaatcgaagccttattcgcatcagaggggagtctaaggcggctcctgagtccaagaaaggtacgacgaaactcagccggagtaaggtcagagaaacgagtcacgccatggttagccgaggggtcaagcctctggtgacgcctagcacggcgtaggttagccttgaaaacctcgaacctgtaatcgtgctcctcctgagaagcgtaagactttccaaatttggtcttgaagagcgagaaatggtgatcggcaccgaggcgaatctcgccgacatcgtcaacaacctgtctgatcagagcatcgtcgccggaaagagcctccgccgctacgtaaacggcgaggagagagaagagaatcaccgagagagagaaacgtttcgccattatcaaaggtgtttggggtttgggtcccttaggcgtgagtgacccctttttataggtggaatatccagtaagttgggttaccgtgaatattatcctctacggtcggttttatctgtaaaatgaatctaaaccgtttatttatgtgatcaacgaaatgatgagttttaagtggtttagatttgtcggtgttttgtaccttgttgtgtggatgattcggattttgcttagggaatgaggttagtgaaaagagcgaatgggaatggaacacgtgtcgcgggttgagtgcctgt

SEQ ID NO: 177516 - DNA, 608 bp, Cannabis indica
  modified_base (16)..(16): a, c, t, g, unknown or other
ttgaacaaaaaaaaanaaaaaaaaaaaaaaaaaaaaaaaaagaaacaaagcttatcaacttgaaagacaaaaaaaaaaaatcaatcccaaacaaaatttgcgtggcgtggtacactaagcggactgaatttgttttataaaaagaaagtattaaaattttgatttaaaataaaaaagtattgaaattttcataaaagcaaaaaataaataaataaataaataatgtgaacataatttgctacaactctttaatgggataatatctacattttattttttttctaattttctattagtttaatttactttcccatggatgtcccaactgagttgctaccctacttggtagctgaatttgctagttaataaaagtattttccttaaaaaaaaaaaattacttccccatagtatgaggacaaaactataggtcctatcctaccctaggttttccctataactatatatgaaaactttctaactagtatagtaaatactgttgtttaatttacgtggttaaacaagaaaataattgttgttttatgtcaaatttggaattaatttatcatatcaaattaaaatagaatatattacaaaaatagctattattt

SEQ ID NO: 177517 - DNA, 812 bp, Cannabis indica
ggactgacagtatgtaaacaatcaatcaattagagtatcgttgccacgtttatactcagacaacaccactgccaagtacatgatacatgggaccttggccattcttttggaaccatttttttttttgtcggcgaaacttactacttttcttatccttgacagaagagctgaaaaaacttaggaaccttgttgttactgccaaagaaaatggtgtaaaggttgctccttctgtggtgaaaaaaatgctagaaaagaacatgttcttctttgggtttcttgacatgaatgaagggcctgttgcagagacggttaaccacctcacagaattacagaatgctcgtgttcaagttgcatacagggagtatgttatgttgcagattatcttactctttagctctaacattcacatgctggtgacggtatttcatatcttcgtgtcttctaatttctctgttccttttattttactgacaggttatttgctgataataggcttcaagacttactccatttggacatggtatgtacactaatgactttctaaactagcatcaatcattttctcgcttcttggaaggaatatttttcattctagtgaccattttttttcttttttttttttattatttttgtggcaacattgtaacttgtaagggtttctttttttttctttcaagtgaccaatgttgattcagggagtttgagagagtttataggatttagatgtaaacctagaatatctgaaattaattgttatgataatatctttgattgatttgcttatgatattcaatcttgtggcaactatctat

SEQ ID NO: 177518 - DNA, 1387 bp, Cannabis indica
agggctattttttcactcaccatcttctattaacttatctgcttaagctaaaactaatatgtccagcacaaactttcattttaagatttttctggatgttgattggggttcttgtagtgacactcgaaggtctatttctgtatgctgtgtcttccttggcagatccttaatctcttagaaatctaaaaagcagtccaccattcatcatcctctgaagcaaaatactgggctatggccaatgccacatgtgagattacctggttcttagccctctttgaggactttggcatccaccacaaagatctcgccatcttttattgtgataatatagccgccattctttattgtacgccatccacatttttgagaaccatatattccatgaatgaacaaagtatattgagattgactgccatgttgtctaggagaaggtctaagaaggcacactgaagctaactcatgtcaccaccaaaaacaacatcgctatcatttttataaagcttctatttcctacttatttttgtacacttgtaaccaagatgaacctaaaaaatttatataggtcatcttgtgaggggtgtaataaagacttagtttaggcccaatacatctcaacccattttattattgggcctttgtatgacatatacattcttttttttttgtaaaaacctaatcagtcaaagtctttttcggctgtacaatttcaatatatcaaaggtttctttctctttaaagtgtaaaagagatcccaacccaaatctgactgatctcatctgaagcctctcaagactcgagtgtcgctgcccaaattcgaccacccctggaagaagaagtagaagaagaagaactataaatttttggattacttgataaaataaattaggatttaatttttagttttttttgtttttcttaattttaaattgttttatttttattttaaaattaatttattaatgtttaaatatattaagttatgtggacttagtgagaccaatataaatatgacacgtgtatatgagtatacacataagcagtctatatcgataattaacaatagtaattggatgacaccttaaatttgaaaattgtttaatagttttgaaggttttaccaccaagatttgagtttggagagttaaatgcaagtgaaataataattgagatggtttagccgccaaaaactcaaataatatagtaaagaaaaataatctaacaatattttcttaaacaaaaaaaaaagaaaagaccttgaagccgttaaaagagataatttcaaagctaagcagctctacttttctctcatccatgctcaaaaagtagactatgcagctaacatttgggacaagttgttactctcgaaacacaaatttatagggtggcag

SEQ ID NO: 177519 - DNA, 1396 bp, Cannabis indica
aattaaacctacaaattgaaaaattaggttattaacaaacctaaacatctattcaaaattatcaactaacttttctaaatttatgttatttttaaatgaaaattaaattaaatatctaataaaataaaataataaataaatatcatttatctaattttataatttaatttaaatcaaataaaaaaaatttgaaagttaagaaaatatcttgtaagttttacaaaattatctagattattttattaaaatatatcttattttaaatttcaaataaggtcattttattaaattatttaaatatataaaatatctgaacataaatttaaaaataagataaactaatcaaattaaaaagaaaaagataactaattaagcaaaaaaaatgtagatgttatccattttcacgttcaaaatctactaatatctaaaattgattaaaaaataattaatttgaaactgataatcagatttgacatttgaaaaataaaaatcttcagacaaaattacacaaaaaattacgaaattaatctcttgaaaaaatcaaataaacaataaaaaaattagaaaaaaacaaaattaggatttggtgcggatggtatgcattgcatacccttcgcgcacgcaagtggtgggcatcagccgagaaaactacggtgcaggaggctacatgcagccttgccgcgcacgcacaagccccattcagacaggatttgcccataacgaccgagaaaacttggacagggcatgtcctaaagtgtatgacacttgagtgactctcgggtgtgcgcgcacgtatgaggggtgcttcctttcctaattttttttttttaatttttaaaaaatcataactaattgaaataaaataaaaatttagttttgtaaaaaaaatgaattgcttaattttttccatactatccaaataaaataattttagaacgtgaaaccaattattttacgtagaaatttcttaaacaccaatcaatcattaataaacgcataaatcaatatgaatcatatccaaatcacacatacatcatttttaatccatacttcttgaaagtaaatcacacatacatcgttggattatattttaccagtagatttagtaacaagtatgtttattaacatcttaaatatgaatttctaaaataatgaaatttaaacacatataaagtttgagtgaccttacattgattgcagggaaatataatgattcttcccactcagatctctaacctttgttccgttctgttgtagggtagtatcaaggtctgagcccgattctccttcagttgtttggattcttcacagtcttacacactataattgagtactagacttgctatgggtggtcatgcactcaatcactaaggctcaaaaaacttttatgtaagaa

SEQ ID NO: 177520 - DNA, 1048 bp, Cannabis indica
gaaaatttatatatttttatttaattttttgtcataatattaaaatataatttattttgtttgataggtatatttattaagaatatgaattgtaaaaaaaaagtttaaaaaaaactagtacatatattttataatatttgttaaaaacactatcacttttctcctcacttctctcttctttttctccctctctcactctctctaaaaagtacttaaaagtgttcctcaaagaatccaaaactaaaaaaaaaaacatttaaaacaaaagttcttctccctctctcactatcatgcttttggtggatatgatagtatttttaacaaataattcttaaataaataaataaagaaataacattacacgtagacataaaatgaaacaatgacacatattaaaaaaaataactctatatgaagtcacttttaatattttactgaagcattatccaataatttaaaagttaatttcaaagttaatatatttggaaaaaaacttaatggttggaaggcaaagtctttttctatggtgtgttgcaaggtgcttattaagaatgtcatccagtctactccaacttacacgatgtcgcctttcaaactcctcaaggctttagtgaataacatccatggtatgtgtgctaaattttggtggggtagtgatgacattaaatagaagatgcattgctgtacttggaagagactttgttggcataaagaagatagtggtatgagtttttgagacttacacctttttaaccaagttatgttagcaaaacaagcttcgcatctctatgatgatccaaatttccttgctgctacggttctgaaaggcttgtctcacaggcataagccttttggttccatgtttaaatcgaaaaaaaggctctttcatctggaagaatatttataggggaaggagttgtttgatgttgggtctatctggagagttggtgatagtaatgatatcaaagtttatgaagatggttgggtcttgatgccttcgagctttcttgtgttgtcacctaacctgcttggtgaggaagtacggtgt

SEQ ID NO: 177521 - DNA, 701 bp, Cannabis indica
tttcttttgtgatctctgttcctaaaaagctaagcttaagattgctattggtctctttatatctgttgctgtcaaaggtttatttatttttatttatttttatttttagtttatattattacattatttttgtttctagttgtatcgtatgtgtggacaacgtgttgtgttactaccgaaccgagtaaaggcattaaaatgggtttgtttgatatataatattatattaaattgtattttataccacgtttttatataaaattacagtagaatctctatttaagaataaacttggactaagcgaattatattctgagaggttataataaatagagttacagaaaaaaaaattcaaaatactaaaaaaatatcaatgtaacaacaataacattaaaccatccttaatactatatcataatagaattatttttaagtaaatataatatttatacaagtattacaatttagaataaaattattaattctacataaataaatttataaaatctatatatattttattaagtacgtaattattcttatatagaggtatactttgttaatacaatactcagaagacttaaatttttattaacaaattagaagttattcttgaatacttcttaaatagagtttttactgtatatgtgatattgaattttattaagtatctaaatatataatattttaatataaattat

SEQ ID NO: 177522 - DNA, 753 bp, Cannabis indica
taagaatctgtatgatcatcacaaaaaacacttacccagtgaacccaaactgcacggataactttgaagaggtgatggtcgagttggatgactttaaagaggacgaagggctgtttgtttcgtcacctaaaaagctataactacaagcacccaaaaattgaaactcgaccaaataactttcgaacgcgaatcacaagaagaaaacgacattatacaaaccaatttctaaacagtataccatataaaaataatactcaataaacgaaactccagatcccaattatataatcaaaacttacctatatattactctcgaataaagaaagaaagagggttgtgactctcaaataattaacatcaaatatcagttcaaatattaatgggatttgttttattttttattttattattttattatatataaataatattttattattttattaaatataaataaaaaatcacccataaatttctcataaactaagaattcagttatatagatacattttatataaaatagatataaatataaatacactcactcataatcttgagtgtagaatagtggggatcaccatgacttgaacaaggtattacacttttgtccaaaagcttatttccctaatctctaagcactaagggaactctctaagaaataactttgagaattatcaagccttaggattttctagcaatgtgctttcttgatagaaaatttctccttcccaaatgagcacattagactcttta

SEQ ID NO: 177523 - DNA, 681 bp, Cannabis indica
tacacttaaaagtagattttttttaatatatttttacggactttttttattgacatttttacaaatttttattttagaattttttttctagaaaaaatgtaatttttacgttattttcccataacaataacgtcaaaataacattgttttgaaacaatagaaacacaacactctgtatagttataaaaaaattattatttttcttgcaacgtcaaacaacattttttttttaaagcagcaaaaaaatagtactctacaattttgtaagaaaaatccataaaaaattcataaaaatgtaaaaagaaagaagtaaattcataaaaatataaaatttatcatttttgtatatttatgaattaattctcatataaaatgtgcatatgatatatttttatattcattatatcattaactatcacccgaaataaaaaaaaaattattagtagaattatttttttcactttagggaagatactcaatttatatatgcaaccatacaaataataatatataaagttaaaatttatcaattatttgtatatatataatatttattatttaggagaaagaagacaattagaattcaagtttgaataattaaaatgtatatgtcatttttttataaatacctttatttattatttgaaatcaatcactcttcttttatgtggactgctcttc

SEQ ID NO: 177524 - DNA, 516 bp, Cannabis indica
attggaatgacttttcctaaagtgaatccatttatttgtttggtttgtcatttataattgaaaattttatataaatgtgttatgtcacctaatttcttacaactagcgagtaatgaactagttatttatgttatgtatttttattttattttaatatttatgtttttttagtaaaatttattctaattctaccgaaatttcagcagcataacagctttaattggacgttgtcaaaaattttaaaagtgcctaaagtaataaacaaaacaaatataacaatacagattaaaaaaaataacttaaacaatacaaaatttatccacccatccgaccgctgtacatgtattcgcagaatctacttcactacggatgaatatttaagatactcaaactccactaaacacattgataattaattataataacaagggtgtatacacatttggtaccctatgttttatttaaaatacaagtttggtactttgtatttttagtaatacttatttggtaccttgt

SEQ ID NO: 177525 - DNA, 637 bp, Cannabis indica
aacggtcttggctaggcccccgtgaaatttcatgatctttggagatgtgtaggttgagattttaacagataactaacgagtgtaagagtaaggaaaaaacttgttaaaatttcccctgaaaagaagaatattttcaattagggggccatttcaacaaattttaacccaaaaccattcttcatattcatttcttagtagtacaaattgattgtgactagtggcaaaaaatattccgagattggtccgggccacatttcacaaaggggtaccactatcagaaatgtgagatttttcactattttcgattaaaacgtacgtcgggtaggtcgaacggacgaaaacctaaacttttacgggggtacttacggaacgtgtccaagagaaaagtgatgcacaacggtcttggctaggcccccgtgaaatttcatgatctttggagatgtgtaggttgagattttaacagataactaacgagtgtaagagtaaggaaaaaacttgtaaaaatttcccctgaaaagaagaatattttcaattagggggccatttcaacaaattttaacccaaaaccattcttcatattcatttcttagtagtacaaattgattgtgactagtggcaaaaaatattccgagattgt

SEQ ID NO: 177526 - DNA, 718 bp, Cannabis indica
gaatggagttaatgacgattccattcgcttgagatttgtaatatctcataaatctaattatgaataattatagtttattatgtattatggatgaattaggtagtgataagtaggattatgatcttgctaacttaatttatcctaaattataaaatttgctaataaataaataagtgtaatttgttaattacggatatttattttaaatatgtggatataatgtaagttatttgtgaaataaaaatatttttaagttcgacgacctgaagacttgattggagaccaaaaatattacagtggttttagttctaaaaatcgattttagacccgattgtctgattactcacactaattagtcttttatttttacaaatctaaaattcgtgtaagattgaagctcaaataatcaataactaaggtatttcaatcctatagttaaattgtgtatatattcatttaattcagcattttatacatgattatatatgcttcctattataataaatgtctaacatatagcccctatgattcaaatgccaatgtagttttgttcaactttgtaaactcagaaataaatatatttattgataaaattgacaaataaatctagtttttttttttttttgttagttttgtatgttttctttagtttgccatttttttgttggtatttttgtcgatttactgtttttccgtattttatgcttgtttttttttt

SEQ ID NO: 177527 - DNA, 749 bp, Cannabis indica
ttatttgatcattgttttttatttcaaataattcaatcctatccctaagtgaattagtataaaaagaaaagaaaggtctcactatccaactaatacttctatagcttttaaacctagtttttcattctgtcagacaactagtgttttgagacttcttcttcttttctctctactaatttcaaaattctcagtgttcttcaccatcaaaatttgagccttagtgattgagtgcatgcccacccataacaagttagtcctcaatcatagtgtgtaagactgtgaagaatccaaacaactgaaggagtgtcgggctcagatcttggtgatactctgctacagaaaggatacaagggttagagatctgagcggaaggagtcatttaattccgctgcaaccaatgtaaggtttctcataccttttatgtgtttaattttcatcattttagaagttcatatttaggatgttaaaaacatacttattagtaaatttaggtcatggtaaaatatattccaacaatgattgcctcatttgggggcatcatccttctacaacttcacggtgaactctgcttatcatttggctaattccatacctattttaggttctccttcttcttcttcaagtgattgttttaaaacttggtgaaagacggtttgaactatcaaaaatcccttttaaaatcaaacactttgtttagaaaggatttaaccatgttttgccgtgtggttttaatctatttaagtcctcac

SEQ ID NO: 177528 - DNA, 677 bp, Cannabis indica
tatatatatatatgaatataaacaccagtaggaatccatataatcactatattgtgtgttttttttttcttcatatatacgcaacagactaatttgcagtaagaacccctaactattaatttacttgcaaaaaaattatcaaatctcatattttgatgggaaaacatttcaaagtactgttccatttacattttaaagttgtcgtctgtgcagctatcttaattttgcccacaatgacaagtcactaaaaaatatcctacgtggctatattttacaaaataaaaattaaaatgagtaattaaaataaaataaaaactttaagagtaatttgcggcaaaaccccctaactatcaatttacttacaaaaaaccatccaacctttaaagttttttttggatggtctttttgcaagtaaattaatagttagaagaattttactgcaaattactctaaaatatatatacacacatgatgtcttttaacgtttatagttgaagcttagtgcagtgttgaatatttaattattattatttttttaagaaatcaaaatcattgtattgcataaactcaaatttacaacttaacaaccattacgacctttataaactatacaacttgtagattctgtaaaattaattttgttgtaaatttacaattgctcaaactattctaagtct

SEQ ID NO: 177529 - DNA, 1860 bp, Cannabis indica
taaagtgtccatagttaattatgccatatttatcataaaaggtttaaaaacccatactccacgtaaattctacatctttaaaagaaaaacaattaaaattagtagataaattaaaagagaagattaatatataaccgtaggatgagtaacgaacgcgtaggagagagataatcaggaccgtgagaagagtgtgattagagatctccgctggcgctactatgcatatactacacatataaatatagaatagatagacataaggcattggaatatagaatcacaattatttttaggtattttcttggttcattggttggttgccaagaaagagaaagcagagattagaatttggtgggcttttcagtcaaggcaacgaaatctctagaaacaccacaaccggcgaagctctggattccacctcttcccgtccttggagacggtggctatgccgcttggctttcaggtttttttcttaataaaaaatattacatcgattttggatctgttcttcgatttggctgtttaattttcttcgatttttatttgaggttagggttttctttctgatttgttccaatttggttatgcagttattttattggttcttgtttcactatttacgggttcaatcagtttgatattgaattaggttttcttaactgaaatacatctatcgagatttgtctaattttggtcaggattgtgataagttggtgtacatattccgtttgttactattaggaaaactttctggaaatttaatggctgattgtttggtattctaacctcaatattgaaatgatattattacgtccttgttttttgcaatacataaggttgatttttaaggtttctcttttgagatgagcgttagaaggtcaattttgttttacccctcaattctcttcgagcgtgcttccttgtttatggttttttttttgctatcgtcacattatgtcttaatcctcattgcttttgtaatttgaataatttacctgctttggttgcgtggggcaactttttagagagccaatgtctatgaagggcaactttttagaatattggctctgttatcttatatttaattgtactatgttaagaatttattgagttagttccccagtggatctaggagcgtttctttgccatattgtatgtaggttgaattatgttaattatattcaaacttgtttatagaccttgttatgataatataaattttcataggtcatgctaccttgtggatttctttttcttttctatcgtagtatttgttacttgatttcccctatgtgataaaatactgttagatagatttctatctcattactgatgtacaagattataccattctgagttctatgcacgcggcgttgatgacaggttgtggaaaacttggatctaaacaaatttcttgtacttttcaagacatggagcgagcatgcttctggtcaaattgttttcattactccgttgtatcattccaggaagttcttgactggcgatttctcattgtcggagattttcttctggtttctttcgttaattgcacttagtggtcagttgctcttcaatgatcaggaaaggaggcgtgatgctaggtacttttgaagtaggtgttggatctttattgcacttgtaccagtaagcaattcatttccaatttctctctctctgtccattgctttatgtgtgggactgtggagtttcttaaggaatgttggttaacacttaacatctaacttactattttccaatagtgtattgctgatacaacatcctgtccaactctctgggaattgttcttcaggggtatagtacatcatacttgattttttttttttttttttctttttctac

SEQ ID NO: 177530 - DNA, 552 bp, Cannabis indica
acattatgcacaatcataaacaagcccctgccataaaaagatgaacaatataacaaaaaatataaaattttcagatactcatttataatgtatataaaagtgataaatccatacttgagccccagcagagatgtgaagatacaatggcttttcaccatcactaggtgcatttggcggacgatacttgcctctgcaaaggcaattaagtagatgaatcaattacacacaagatacatgaccatgagagttcctttggtcttataagaaaactacaaacctggttatcactacagccccagtgcacctctgaatctgcaagtcaagtatcatgatcaattagtgtcacaaaaaagacaaaactgaatcaaaagagcacctataatggcgaatcacttaatctcaagaaaagggcttgaattaatcacctcctcttgtgcttgacgcttagtaagcttgtagcgaacagtagactctgcctcgtttattacaatttctcgtgctattaactcatcttggacctttggctaaatagaaaaccatttaaaaacagat

SEQ ID NO: 177531 - DNA, 654 bp, Cannabis indica
tttaaaatttgggtcttatatgtgtcttgtttaagacaataacagagtttgtacttatgccacttaaaaaatcattagatttatgttgctttacaaatttaaaactttgggtacttatatcactatttacatttctttttttctttttattggttgaattgaatatatatcgtgttgtaattagtattgtaaatatgtacatattttgggttagtcccacttatattttgaaaagtaaaatataggttgggttgtgtaggtatgcctagtattttagtatcgtgctttagttaaataatttgttttttttttaataactaactcattatttttatacaaatttaaatttgtgctttattttttgggaaaaaaacagaaaaatacaaaaaaggaaaaaaaattacaaaaatactttgggccggcccattaaacatttatacagtccacatataaatatttacaaaaataccacatgcactaagtcttcagctgtacagagcgaaccatgaaggtgaaaataccgcgatcgtttcaaaactgcaaaacaaccaaaatgaaaccaaaacgataaaaatacaactattaattctggcgaaataaactggaaaagaagacctgcaatgatctaaacagaaaatgacgaaaaaaatcaga

SEQ ID NO: 177532 - DNA, 901 bp, Cannabis indica
atttttttggtaaaaaaaaaattaaaaaaaccttaactaaatactattaaatttttaaaataataaaaaaactttttttattcttacttttaagaatataattctcaaaactaaaaactaaaaacacaaagaaactgtgactcactagttaacttaaatacatttatatcaaaagagaaagcaacattaaaattagaaaacaataaaatcttgtcttccactccctcaaaatcatggtagccgaataaaatgctacttttgtgatgggtattattgccttatctccactccaaatacgcatactttgtgctttagggtaggttagattgggcttctttaatcgtggtttcacttactggatggtcggtattcagtgggcagaccataaaaggaaaaaaaccatttctggttgtacaatgtttgacatgaaaaataaagatgtcaatactctgtcatccaatccaaatggatatacaacttgagtttttttcaattcatgtctgtcattttccattttaataaagcatcattacttgagaatttgtaagtggtctgaactgaacccactactcagaaaactcagtggccatggctgctgctactgctgctgcttctctctcctatctctctcccccaactgtcatgaatttcaatcatattcacagaagtgagttgggttcttttcactcttcagttcccactaatcttcaccaaatcagaccccagagctatcgtatcaggtattttttttcttttctctctcatctatttcttcacttggtaggtactactaagtacttcgtggacatttaagataagcttttaggtgataattgtggcctttttaatgggtgtttccaccgaattatctgatacttctgtatcttaggaagctgaaact

SEQ ID NO: 177533 - DNA, 570 bp, Cannabis indica
agtttcttattgacttctccaagttccgtacacacagtctcaagttgagtctgcgacatctacagcttcctttctggccaagtccacatccctttgcagtgtagttggaagtggcgagattcttgatagcagccgacttagctcgggaataggcatatcccatctttgaaacagtctgtgcggaaaaaaggcattaaatatttgaactagtcaaagaggaattaaaaaaaaaacatcagataggacttacccgcgaaagctctttcaagactcctcccatgaccagctccagagacaagtcattatctgccccaaccaactgttcgttcacctctgggactgaccggctcatatagtggttgagcatgtctctgcctcttttagtctctgtgtgcaatattaaacgtggggcaggagccttaacttgttcaggtccgcttctaaccagctcggatccaccttttgcctgctcaagtccatccaaagtcctcctcgggaacccttggacttagtaactttctaggcaggagggtccacggtaggttgttccttagagagattaatgaccac

SEQ ID NO: 177534 - DNA, 758 bp, Cannabis indica
aatccatacaaacaaactcataatatggtatgtggtagcatgtttggaaaatatttaggcaaaaaaaaaaacaattaatacaaaaatattatagaaaaaaaacgaaaaatacttagagagcaaatagaatagttttctcccttttttattttcggttttgctcttttttttctttctttttcctctaattataaaaaggaaagagatgaaaagagtacaacattatattgaatgttataaaaatttgatgttgtccaatacttgttgatttcatattgactttttttttttttgtagaaaatgctattatattaaaaaagagttaaaatacaataggcattagaggaggaggtatttcctccacccatgaacaattagaatccaccgagagagcatagcgcgccagtaaatgcgcagcattattagcagatcgatatacatgagtgatctgagctccagggaagttggatactaaaagagaaatattgtgcaacaaacaatgaaaatcggacactagctcccgagatgagtgtaaacctttaactacagatagagaatctgtctcgatatagtgtaatggtagttgaaggtctttaatccattgaagagcatgcattagagcgagtgcttccgtaatttctggcgtaaaacatccacaaaaaggtgtagacatggctgcaataatttgccccgagcagtccctcaagacagcgccaaaaccagacttgttttccattgtgtttattgccgcatcggtg

SEQ ID NO: 177535 - DNA, 600 bp, Cannabis indica
aaaattattttaaagtagtaaaaatagaaaaactacttttaaaaattaatatatatatatatatatggtagatatatgttttaaaatttaacatatgtatatttttatatatgtgaaaatataatataaaataaacaaaaaaattctttctattaattaattttttttggttttttttttttaaatttgtttttggagacataaaataataataataacatattctattttgttgttggttatgtaaaaataattaatattttaataaatattaaataatttaatattaaaaaaaataaccaacctaaaataatcaatctaatctacactaattggattggatctaaaatataaaatctacatttaaaatagatcagattcactatgagcaaaatagtacgaagtacatcatataaacattcctaccttaaatgtgaaactttagttggacaccttgtaaataaacgaaatacattataaatttactttttttttgtattttacttaaagtttcatgtacatactaacttttattgtaattagatatatagtttgaaatctatttaataattattgaataaactgaactattgatccaat

SEQ ID NO: 177536 - DNA, 1102 bp, Cannabis indica
attattttaaagtgtaaaaatgaaaaaacctctaaaaaaattaaagtggtcaaaagtagatttttattaaaatatattattgtaactataaattattgatagaaaaattgaaaatcaaatacgtagtagtgtagttgtagattaaaaaaataagaaaaattgtgaaaataaataataagtttagaaaatattaataaatttaatgaaacttttttttttttaaaaaaaaaaagaattaattaggagataatatatagacctatttgaacgaattttaaagtgtcatgtcaccatcttatttttttcttttatatatacattgatacttaacatatgagagaaaaaattcataaaaaatgtaaaaagaaaaaaaaagaactccccgtattttgtaagagaaaaaattctcatatatatgtaacttaaaaagtaatatttttttaaaaggccagccacctcctatatttattaaaactgatttttctattttaattttgagcaaggctatttaatttaacttgataatatatatgtgcatatttatatatatatatataaagtttgcaaaaattgattgatgacatttatgtcactttcatgtcaaattttttatttttttacttaaatttaaaatttaagtcctactcattcatgtaatcccatctttaaaatttatatatgtgttctctttatatgtgtttaattgattgatagcttacatcacttttctgacaattttttttacttaaatttgatattgagcacaacccacccacgtgatccccattcccaagactttatatatgtattttgtttctctctctatctttttttgtaggttggtgtctatagaaaatttcttgagattggtgtctaagataaagaccatgaaccaaggactttacataaaactctccaccccactcttcattgtttcaaaaaacttcgaaagctcactcctttcattcatttttttacttaagttttcagagagaaaagcaagatatatatatagagaaaggtttttgtggacgtgcttcggagagagagagagagagagagagagagagagagagagagagagagagagagagagagagag

SEQ ID NO: 177537 - DNA, 765 bp, Cannabis indica
tttcctcttcaaattttaaatgatggttgctcttcaccttataaatgcaggtggtagtatgcaaaacttttcgtgacaacaataaaatactttagtacttttctatagtatgcagggccatacaagttatgtatatatttatgtatgtctataataaataatataattatatgtgtgtggatatacatactttttatgcaatgtcaaacaagttatgtatatatatatttatgtatgtatgtctataatgtaattatatgcgcatatacatacttttttgcttcgaataacctcactaagcagttctttaaacctgtgccttacactgtctaaaggaacctagactttcatggtatattttttattgtcctttttttttcctctcaacataatattaataatgtaatgggactaatgcattacttttgtttcttataatatatagtgcgctctgttttctaaagatatttgagaaatctatctgtaatactttactcaatgaacttttttattttttgtcaatgatttaaaatgtgatagataataatcaggaacaacttatattacttagatgatataatgtgtcactatggatcatttgtagtcactaatatataataatttaccatgtgtactagtaccatcagaaaaatcattggatctgaaggaaagcgcagacaggagttaatgatgaaaggacctggaacgtttccattaagagaggactattagcgtagtatttctaaatgtatttacgtctgtagc

SEQ ID NO: 177538 - DNA, 711 bp, Cannabis indica
gtttctcaagaaaaatttaagaatcatatcatcgtttcttacttatatcgattttctattttgtgtgattgatgttcgtggctaaccaatttacccaaatgtaaaccataaataaggatgcggtgatcgaattatctgagcacggcattgttttgatcgtagaggaaacaaattgtcttcaggccaaggtttatctacagcgcgaggtatggatttcggcttttggctctttctgaattcctaaagttcaaattgtggtttcgtttcagattattcgagcaattgtttcttaaaaaccaatcagtgaatcaaaactgttttgaaaattttctcatagcttttcattcgttacgagtatggcgcccaaggccgacctcgatttggagtgagtttggggttgtttgtcgattgcttgaacactttttctgttcctgggcattcaagtacaatcgaaattcgatatcctggacccgacatgcagcttcttcttaagtatgatttttatatatattatattagtacagaaatataaacattattttcttgcgatagggactgaaaacactctgctgggcgctttagttaatgcttctttaccaacttaggcatcactggcttttcaatggagactatataactttttttttttttttctgatcgagtgttgatgcatttgtgagaatagtggccatcacaatagcgattttattt

SEQ ID NO: 177539 - DNA, 735 bp, Cannabis indica
atcattcctccaccagaaagctaaaaccaattgggtcaaagaaggagatgacaacacaacaatttttcatgcaagcatcaaagccagaatcaacaaaaatagaatcctctcaatattggattctcaagggaacagagttgatgacccaggcagaataactgagattttttcagattactataaacaactacttggcacaaacatgccaaatagaaagagagtcttagcaggtgtgataagcaatggcccaacagtttccagtcaacaaagagatagtttgctgcaacctatcacagatgaagagataaaaaaggctgtatttgacattcctggaataaaagcaccaggcccggattgctactctagctatttcttccaagataattagaatctagttggagaggatatatatgcaatgcagtaatgtcctttcttcattctgggaagatcttaaaagaaatcaactacacggctctcaccatcatccccaaagtcagatgccctaataaccctggtgattatagaccaattgcatgctgcaatgtgatctacaaagctgcaaccaaggttatttgctccagattaaagcatatccttcctgacattatggctcaaaatcagggaggctttgtcaaagggagatttattacacacaacatcatgatttgtcaagacttggttagacattatgggagaagtctgctaaggctaatgcataatcaaacttgatttgca

SEQ ID NO: 177540 - DNA, 935 bp, Cannabis indica
agtggcttgattagagaaagacttgacagagctctttgctctgtgaattggcttactgaatatgctagttcgggtgtcctcaatcttcccattttcaatctctgatcatgctccaatcattttggacacacacctgttcgcagcaaggggttatgtcccattccgatttttcgaagcttggtcttgggagtcttcgtgccgtgtggaagtttcaaaggcctggaggttttcaagcaataatgcctcagcctctctattgcgcaatattagcagcactagaaaggcccttcaagcttggaaaagatcattgcacaaggacaatggtaatgacatcaagtccctggagagaagattagagtggattcaaatgcaacccatttcgacagctcttaaggaggaagagtcaaaaattcaagctgatctgctagtctcttggtcgaaattagagagcatgtggaggcaaaaatctcgagagacttggcttgccttgggagatcgcaacactagattctttcactcgtccacggttattagaagaaggcgtaacagtatttgggctatcaaggacaaggaagataaggtttggaaggataagagcaacattgcaaggatcattaattcccacttcctggagttattctcttcttcacaaccgataattgatgaggactttttggatctctttgagtatcgtatttctgcacaatcaaaatgaggaattagtgagaattccgtcagacaaggagataaagggagtcgtatttattttacatcccttgaaagccccgggaccagacggattctcaggttgtttctttagaaaatattgggatatagtgggttcttgtctctgttctactgtcaaggaagccttccatcaaggattcattgatccaaaactcaactctactttcatttgcctcatccctaaagtc

SEQ ID NO: 177541 - DNA, 878 bp, Cannabis indica
cttatccatatattttaattatctttagggtttctagtttcgtaattagttgtcactttctaaatgtagaaattaaaaatacttggctataattcttttgttggtaactgatttaagttacatacttttatttttttatttaaaagaaaaataccaaatataatttttattcatattaacaaaattttactatggggttaaagtttgaaaactactaattactcacacacacaaaaaaaagttaaacccttgtatttttaatattcgaataattataatctcaatttttatttgaggtggtatgttgtagttatagaatataaattattttgaatttaacacatgaaattaatttaaatttttcaaaaatttatcaaatatcatattgatattcatggtttaattaaaaaataactataattaaaactatctaaatattaaaaagagttaattacatcataatattttttttttgtaaaaatttatatttttacgtttaaagattttttttgtttacatttttacggtattttataaaaatacataaaaataataagaaatctacataaaagtaacaaaaaattaacatccaaataacaacaaaaaataacatacacatagcaaaaaaaaagtacaacataaaaatacatcaaaaaattgtaattttctgtaaatagtatcataaaaatcgtaaaaatatttaaaattccgtaacaatcgcatttttatatatttttttttacttattttagtattttttttaacttacacttattaaaaaataccaaaaaattgcatatttaaaatttttctaaaaaatacgtataattaaaataatttttttaaattagatataatgcttataaacgtttttgtag

SEQ ID NO: 177542 - DNA, 619 bp, Cannabis indica
ataggcgtgtgagggtaatttataataaagtgtctaaatggatttttcatgtaaaaatttcttaaataaatgaaaaaaaacaatatctataaaattattaaagatagcttgttatttatataagtatttaaaattttagattatagaattaattttatcaaattatataaataatgaaatttgtattttaaagtataatataataaaaaaagagcttgtaatacaccaaactaataggacccgtataaaaaaaaaatacacaattttgtattttaaatatataaaagaaaaaaatattatgtagtatagaatgaattgttattacaagattaatataagcatgcatactcagtttaatttttttgagaccaaatatatgtgttattctacaaaattttaaaattttaactaaatgaaatataaaaatgtcacttaaacttatttttgtgatttagaaaatataaatcgtcttttaactcattttgtatagtattagaaaacttctttttatttctctaaaatttaattcttaaatttgttctagctcttcttatttttcttatcattttaatatgtgaaagcattgagtgaaaatacattatttgcataatgcattcac

SEQ ID NO: 177543 - DNA, 708 bp, Cannabis indica
gacagtaattccacgacagaaggtcttgaggattatgagaactggaccattgatttaaggaagctaaacatgggggaggcctttgctcaaggggctttcggaaagctatatagaggaacttataagggtgaggatgttgccattaagattttggagaggccagaaaacgaccccgaaaaggctcagctaatggagcaacagtttcagcaggaagttaagatgctggctacactgaggcatcccaacattgttcggtttattggggcttgccgcaaaccaatggtctggtgcattgtcactgaatatgctaagggtggttctgttaggcaattcttaatgaagcgtcaaagtcgctcggttcccttgaaattagcagtcaagcaagctttggatgttgcaaggggaatggcatatgttcacgagctcgggttgatccaccgagatcttaagtctgacaaccttttaatcttctccgacaaatccataaaaattgctgattttggggttgcccggattgaggtgcagacagaaggaatgacaccagaaacagggacatatcgctggatggctccgtaagattttcaactcaactgcaagatattttctcacctttatctttttttgggggaattccattttatggactcctcgttttgcacttactgtcgttttatttctactattatttttttgtgtctatgtttttac

SEQ ID NO: 177544 - DNA, 811 bp, Cannabis indica
agcattgtttatacaatttgggaacttacaaaattatttgaaattttggttaacttttacaaaaatactgtcacataaaattttttgtaaaaatactttttttttataaaatacaagtagaacacaaaacagaacaactcaaaacaatagtagaacaacaaaaaaacaccagtagaacaacagtaacttaacacagtatactgcagtatgaaacttataaaaaaatacagtaaaaatgtaaaaaataaccgcatgacagtatttttgtaaaaaaataacaaaaattaatataccatgtaaatttctcatacaatttccattgggcccaaaaataacaaaatgagatcagtgactttgccttttcgaaactgacattttcagagaggaaattacattgttttcttttttttttctttgccaagttagaagttacattgaattataccaatttttttggctatcttttgtattaatatggaagtctcatattataattactagtatgataaatactgaatgttgctattgattgcatgtttgtataattatatgtttttagatctttcttctttctttttgttctatcttcttttatttttgattgctcttagccattacaatacatttctaggtcaaaacatgaatataaaatctatttttcaaaatctaaaaattcccatcacacgaacaagttaccactttctcaggttcaaagtgagaaccggctacaacttttctcagtcttgagagaagtgaggattactagacttttatataaatacatatatatatatatattaattagtttttt

SEQ ID NO: 177545 - DNA, 671 bp, Cannabis indica
tcattgatcaaattaggattataacaatggataactaatgatgtgtctatatggtggaacatatagagcattctatatactgagagtgcaattctaagttctatgcgtggattcaacgaagaattaataagttagtgaattttagtgctaaattcttgatctacttattggaagctcggttatatagacccatggtccccgcactagttgagataatattgcttgtaagactcatataattggttttgattaatcaattataattctcaaattagactatgtctatttgtgaatttttcactaagtaagggcgaaattgtaaagaaagagttttaggggcatatttgttaattatgatactttgtatggttcaattaataaatatgataaatgacaatattatttaataattatttatagttattaaatagttagaattggcatttaaatggttgaatttgaaaaattggcgtttttgagaaaaatcagatgcagaaaaagataaaaactagcaaaaattagcaaaaaagtagaggcccaaaatccacatgtataggcggccacttttgtaggaatttccctctgatattttctatattttaattgtccaaataaattcaaaacctaaacccctaagtggaaatgctataaataagataagtgaaaggacg

SEQ ID NO: 177546 - DNA, 653 bp, Cannabis indica
ggttataaatgattccgccatagcttccatcatgttcttcagaaaaggtatgatcgtggccgtagaacttgaggatgtgaggactggaccccaaagacgtataaacaaccttttccattatgaggtcggcataagaagaaccttgatgagcagattttacagccaaaagtgacgggaagtctttaaattgtggtggtctagaacgagatttgccagggataatcgcttcggaaacagagccataacctccaactcccaacaatttacccctcatccatccccattcttcatctcttctataaatgcttctttgtttctttcctaacgaactcttttcttcttcttcttctcttcctctcttcttcataatcattttctataattcactgtttatagaacactgacgttattattttttcttcttatcagctacagtaataagtttataagtttatatatatagttagaccactatcctaagtagaagaggaaacctaccatttaaatttaaatagttttttttgacgtatacgtatatacatatataattttatactagggtttaacggtaaaaagttcgaataaacctattaggattaggtttatataacatttttaactaaaaataaatcactttcgtattaggttttgta

SEQ ID NO: 177547 - DNA, 726 bp, Cannabis indica
accattgaaacacactttttgttcaatgaactatattttagtttttcaccacttatttacatcttcattggagatgatcttagggtgctacttttgctattaggattcatcaatgagctatattcgagtcatttttggattgatatagttaacttattatttattttttatttttgaagaattaacttgtttattaaacgaatcaatattaaattaacatactaaactccaaaataacatgatctattagaaagtatacacacttatatcgatttaggataattgcgacataaatacttaatattttgagtttgtaaatgacataaatccaatatttttttaacagtgttgaccgatatttttgacaaccaattattagattttagagttgtatgaagtaattaatagacgttagaagagaagattttttacgtagatgagacattaataaaccttaattcacgagtcaatgtattaatgagagtatttaatatagagagttttccgaccgatcccctttctttacatcatttggatatttataggctaataatagtgataaaaggtcactattatcgtgtttgtatgcaccatgctttgcacaattttctaaatctgattttagggctgatggcctattttatgatagattttggctgtctataggcgtttggtgggagttgattttgactcatctcttatttatgacttgatgactcatttatg

SEQ ID NO: 177548 - DNA, 658 bp, Cannabis indica
atgcatgcaacaatgaaaaaaaaaattaacttctaagttaagaacctattgagtgaaggtttctttataccatctgactaaaaatttaaaaattgtgagaactacaattgagtacagaatacttgacaaataagtaattaaaatttttatttttggctacaacttaggtcatgcatgcatcatgtttaattttatttatgtgtaatctgatataattttcatttattgatactctccactccctatattcatctatttttttaagtgcctatttatcatcttgatctcttatgttctatttttttaagttttcgagaaagtcattcaaataaattttctaattgtatgatattatctcacaattcaaaattaatttttcttattacattctcatttattgatactctctattcgttctatttgacatcatcatttttctctcgattgataagacagtgaaatgatgctctaaaattgctccaaatatcactatatggtctcttcttaattctcactttcttttaattttacattaggttcatgattatctattttctcatatttattttctaatttttaaataatattaatctataataattaaaaaaaaaactcttttactggctgatatatcacgtttaaaaatattttggttaaa

SEQ ID NO: 177549 - DNA, 892 bp, Cannabis indica
actgtctttgtaattttgatactttattaattgatttcattctctgggcgtggccccgtggactaggagtgttcgtgagaacactgataccacgtataaatctcttgtgtcaagttatttatttttctgcaaatattttatattctgcctgttctgttttgctgtagcagaattactttctgctgctgcaaacgtttacagttttaatattttcttatatacaactgacatttgcaaaaacacggtttttcaatgacaataactttgaaggttcaggacataaaaataattaaattataaggaatactccaagtctccatgtaccaccctatttatatatttatttatttttatagtaataatttattttgacaaaataattaaaaattatatatttacgttaaccgtataaattttaaactttgtaataaataattcataataataatgaattaaatagtataattgttttattattatgtaatataattattttttaagtaactattattatactaataaatagtcatctaattattatcatactataaaaattaattaaccgcgcgaagaataattatattgcctaatatatatatatataaatatatatatatatatatataggccatgaatttagttcctcttctaaactggtcacccacaatatattaaatatattaaatatgttacaattttttattgtaactatcatggttacaattttttaagccattggattactattagatggttgtgattaatttggaaattaaataaaaataaataataaataacttgtaacctgaaagtaacctaataatttatttcattataaaactttaatgaagattaattatattttaaaaattaaattaattataattattaa

SEQ ID NO: 177550 - DNA, 579 bp, Cannabis indica
taacaaacataataattacattacacatcattgtgtcataagtgtgtacgcaatttaaatatatattatatactatgtatacaatcctaacataattatatgttttatgaatgaattttaatattaattactaatttaaaatatgtgaaatttatccaatatattaaattatataaacaatttatgtacacaaacaagatatctacataataaagatagattaatagaaaataattgtcaatatataataagtatatgtaattaaagtttaaaatttatataatttatcaaaataatcaagataaatgatcatgacttgaaaatagacaccatattttattataatcttgcaaaaatgacttttttttctaataatttttaggataaaaaattttcacaacaattttcataaagattatttaagtaaatgtattatatattatctatatatattgacatgtatttttttttaaaaaaataattatataacaaactatttgaattaacttattataaaatattctaaataccgaacagataacaaatataactacaccataaattttttcaatattatat

SEQ ID NO: 177551 - DNA, 1094 bp, Cannabis indica
acccattaagagcatacccatatatatatattaagaattaatatgtctataggaggatattgattttgtccctatggtagtgatgtttttaaagctatagatatttgatttgtaaaataaatatgtatgtaataatagtttacatttgggtgcattagattattttttattttttaataatatttttgaaatacatacacctttacaaatcaataaaatattaagggatattggcggctaaaccacctgaactttacggtttgtaacacttaaccacaaaaactgaatttttggcggctaaactacctaaaccctggttccgttttgctctgcacacctccgtccaaaaatcaccgttaagtgccacggtggactgtccacgtgtacacacttgtacacgtggcaaatttttagtggtccacgtaatattaattttaaaaaataattataaatatttttaaaaaaataaaaaatcagaatttttttttacttttttttccttttccttttcttttctttttctttttttttcttcttctttcttcttcgcttttctacaggactccatctccgaccccccctaaccccgacccactccactctccgcccacgccccacgatcaataaaactactggtcgatcacgcgaccctccacctcgtcagcacccaaactacacatccaaacttaagtgtcacaagttcaaagtaatcaaaaagaaaaacaaaaacaataaacaagagaagtgagtagaaataacatcttggaaagcttgttgggggcgatcgccggtgaccttggctactcgaaggagagcgagctcagccttgagatccgagctcccaaacggcgcgtctctgtttctccttcagaaaatgaaaccctagcgatgagaggggttacacttgggttatatgggtctgtaagaggggtatataagggaccgcctaatgcaatgggttgggctctcgagtttgctactaatttgggtgctgacgaggtgaacggagataatggtggtgctgaaggtggagggtggtggtgttgaaggtggagggtagtggttcgggttaaggggggttgggagttttgtag

SEQ ID NO: 177552 - DNA, 574 bp, Cannabis indica
aaagttcaagtaccgaattctacaaagtcgctcgagcatcacacgtgtccataataaacttaccacgtgcatgctcgaaggggcatctgttgtgaaccgtttttttttttcttttcaattttaatatatatatactaaaatataataataaaagaaaaaagagaaagaatcgttcatatgaaagaaaaaaaaaaaaaaaatatattattaattaataatatatatcccacttttctctccagtaacttataactgcccaccactcacctttccactctcatatcaatatatcgtaaaaattagcttataaaaataaatcagacaaaagagagggtaatttaaacatcttttcttctcccaataaattttcttattttgtctttggtccactttgatctaggctttctaagccacaaaagatcttcaaaagtgagatatagccaaaggaaaaataagaaaatttaatgtctccatgccgttatgctgcccatttttttaaatagatttttatgtttctctttgattccctagacttcagaaaataagtcaatatgggagtgtataatcaaagagg

SEQ ID NO: 177553 - DNA, 1023 bp, Cannabis indica
ataaataaatagttaagaaaaatggcaaaaatgtaactagtgttgggcccaatatgtggcaagccactatgctattattttatcattttttattccaaataaatcaatcataaccctaagtgaattagtataaaaagaaaaaatggccttattatccaactaatatgcttctatacctagtttctattctgccagacaactagtgttttgagatttcttcttcttcttttctctctactattttgaaatcatatagtcttcttcacaaataaattcgagccttagtgattgagtgcatgcccacccataccaagttaatcctcaatcatagtgtgtaagactgtgaagaatccaaacaattgaatgtggctatataacagaatttttggtttataataaattatggggtgtttttttttaaaattttttttattaaaataacagtttttttttctaagattaacgggttaaatccttttaacattttattttttttttaataaaaactaacagagctggcaaaaagagtttttcatgattgagggtggaagcttaaaaaaattcgattgaaaagtgtcatcgatttgggtggaaacggtggtgagcgtctttgtttagcttccatcgaaaatccccataacgagaaaccaacatcgtcgatcgtctttgtttagcttccatcgaaaatgcccataacgggaaaacaacatcgtcgatcctccattgctgacttagcttcgacctctggcgaaaaatcggccaggtgcattctagtatctatatatactagttggaacaacacgtgctacgcacgtgtaatctttttggaagtaaatatataatttttattaatttgctaaatcagttaaaagataagattcttcctcaatatagaaacatcgctcttgttgaacactcgaattagaaaagaacaagatgctcaagcaaaactatgagcaactatcattaataaaaaacaaggaactattgtgtaaagatggaagaagtttacgataatcttct

SEQ ID NO: 177554 - DNA, 703 bp, Cannabis indica
gaggaaaataattaatattaattaattttaatatatatattaactagtggcctttctagaaaataaaatataacttgtgatacatgctatgcgcgctattaaattttatttaaagaaatttatgttattaagtgtgataataaattatttgctttaaaattcaaataaattaatagaggacattattaactaattattaagaatggggaattctcatattgatgtagaaaattacaactcaaacttcttattaaattttaaaaataatttatggtttcaaaattaagtattattttgccaatttttattatttgaaccataaatcaacactataaattatatagaattaaaaaataaagaactaataggagatatttgctataattttatatacatagtcataaataattttttttataaataataaaccaaaagtgtaaataacaaaaaacacaaggatgaacatataaatagtatataactagtagggccaaaaaataagtgagtgaataattgtatttagtattatttcaaaaaataaaataaaataaaacatttaatgtggccataactttaggtgcctccttttcttgaattctcctccaacttctctcaataaataatcctaacccaacattaaatgttgacaattaatctaaaatttttaacccataaatgcaaactttaattctatttttttttt

SEQ ID NO: 177555 - DNA, 531 bp, Cannabis indica
gaagaatctctaatggtgttctggtctcaggtcacgcccctgcggtgttgagagttgagatctccggagagtgttggaagaaatgccggaaatgcaattgtttgagaagagaagagaagagaagccaacaaacaaagaagaaaaagtctaaagaaagggacgatggtattgggtgggctggaggtggccatgggattggggtcgggtcgaaagtttgaaggtgggactgggtactacgatgcgattcatgcgcacgtgcaaactaacacgtgctaaattctttcattattgggctagggcaatatactcactcatggactctggcccaatgtcgtttccttcgaatgacccactaaactcgatgtcgttttattcttctcttctctttttttttttactttttgttacaatattttgtactggtttttttcttaaaaaaaaaaattaaagggtgcataaaatagatgaaatagacaaacaattaaactggtggtgagtaaaggtctactttgacacattataggtcattaa

SEQ ID NO: 177556 - DNA, 733 bp, Cannabis indica
atactgttgtttctttattgatatttaaaggataaatattacattgaaatggagttttatttagggcataaaacccaacaataaagatgattaatttacgaggtaacatatatataatttatattattagatgaatatgatttctattattgatataatggttttgtattgctaaatattcttatactgatgtttattcttgatagatgtcagtagtgatttggatctcatcttatgagtaatgtgtgatcgtttgattctgatagtatgagtataaatgataatattcaaacaataaattatatgattattgttattacttttcttgttgagtccttgtggctcacatgtgctatgtggtgtaggtaaaggcaaagaaaactagttcagccatgaagtgagagtcttctccagcaatgtacttattcatcctactggcctgtgtaccgagtttctaggagttatttttgggctgtatctgcgatgtatttttatttaatatttttggcttattgtcatatttagccttttgtgtaaaacttttacagtagggatccccggaaacacaattttagtgttgttatgatgtccttttttagtgttttatttagtgaagttttttaatattatcacagatttttaatattaattattttagtactattaactagtttataaaaccacactcgtggcgctcctataggataggacgttacactgctggagtcctcat

SEQ ID NO: 177557 - DNA, 793 bp, Cannabis indica
ttccatttttgagagccatctccaagtaccacgtgagcccaaaatgggagtacaaggctgagatgtagggctcgaatttaggagacctagacaatgcattctgagccttaaaggagcatgtagggctcgaattcacgacaaatatcaaaactaatttggaaccctacaatgaagaggaaaggctccaactagagtaagaataccatgcacaaagccttagagtgatgtgtaaggcttaataagggagcactctctcatgaatacttcttgaggggatttgtagaagattctagacattgcgtaaaagatggataatttaactttctactttaatttaaggacatttaaattcaactttaaatctatattttatttatggatcttatactactattgtgcatggtattcttactctagttctctcatgaacacttattgaggggatttgtagaagattctaaacattgcgtaaaagatggataatttaactttctactttaatttagggacatttaaattcaattttaaatctatattttatttatgaatcttatactactattgtaattgatatcaaagtggttagacatctaaatttaattgtttgtttgatttgtaagtatcttcctaatttaaaggaagatattagagatgctacacccataagtagctaattcatttatttgtagagagagaactctcgaaaccttgagaatcctatgaactagaactaaaactcacttgaaaaaaactcttaaaaaatgtaacctagagaactttttttaagcattga

SEQ ID NO: 177558 - DNA, 789 bp, Cannabis indica
aaaacaaaaaacaattgaaaaaaatctgtctaaatctcggaagaaaagtaaacaaaaggcaattaaaaataaaacaaatcaattctcacacagcaactcgatcgggtgtgaaccccccagtagcagctttgtactcaaatcgacagtaataatcctcaggagttacattttcgagctttgtgtagtttttaaaagagtgaacagtacatttcccttcaatagtgtggccactctgaacatcatagtgatcagataagaatagctccttagctccatgaaactgcctccgtcccccgattgactcctccggtctatagtaccacctcacccgaactttcacgttgttccggttatccgtctcgatcttctcaacgcacgccacgtacgggggtttaccggtatcagatgggcgcatcaacacacaatcaccagctgccgagacagaaaaataataaataaaaacttttatcctcatagacagagaaggagagagagagagaagagtactgaacctctgacgaccttgttggttcctttgatggtataggagtccaggtcctttttgcctggtctagttttggccatgggagttgtctttcaaaactcaaaagaagaaatatctgaagaataaatcaaaaatgtaggaacctaataaatataatatataatagtaaaagcttcgtatatataaatttatatacatatatttatgatttctaaaagagaagatagacagaatgcatgggtgatatagataaagttttcaaatcaaaatacctaaatttggga

SEQ ID NO: 177559 - DNA, 621 bp, Cannabis indica
agaactcagaacccaacgagcagacaaacaggtactactttattgcttttattatttttttaattattgttttttattcttgttggcagtccaaagtggtttatatgttcttgctttcatactcaatttcttccagtccatgcttcttttggatgccttcaacaaagatagggcatctttacctcaacccttgccaaatcctccacctttggcacctttgcctgtagctgcgcttgatcctcgtacacaggaaatgattaatgaaaaactaaagaaggcagaagatcttggtaatccgttgagttactttgtttaaaaatattatcagttttctattttcttttaaatgattatgaaagttatattagtttatgaatatatatttatatatatatatacatgtataaaaagttaatgttataagttatgccattcttttattgaccttttgtaatgatagcgttctaaaactcgcatgtgatgtttatgttcaaagttaggcttatgagataagagtatgcaaatatgcagcataatacagttgatttgagtgaagattaagcttcagtcaatttataccctaaaatatgcttctgtatttttttacttgtttatttttcc

SEQ ID NO: 177560 - DNA, 514 bp, Cannabis indica
aaatatatattagataattgtaaatcattatctaatatatattaatttcacaattctagaggataagagtatcaataaaaaaatatacaaattaatttcccccgttttagaaaaaaaaatgtagtttctacataaaccaatttgggaaaatatagatctgaatattatctttatactgtttcaaacaagaaagggtaaacaaattaagcaattttttaactttttttcgtttttttttaagctaacaaaaagaaagctggtaaaggaggaaaaatccaagctgaatcacgacctccccccatggaaaaatgtacaaacgggaactacaacttttaactgctaatttctctatcaaatttggttctctttgcattctgcacctctgacatggaactaccacgctgctggtatgatacatcatgctgatacgcacaattggctccatgccggcagccccttgagctattaaatatatgcaaggtttcattattttcggctttgactctctcggctt

SEQ ID NO: 177561 - DNA, 813 bp, Cannabis indica
atatatacaaatcataatagattaattaattattaaaatacgtgataatactaaaaacttcactaaaacaaaacactagtagcggacattataacgatactaaaactttgttccggagatccctgttataaaagttttaccaaaaaggactatatacaataactaatcaaaatacacaacagataacagtaagtttatttatttatttattcttaaataaaagtatgtttatttattaccgatacgaattaatattgtcgtgtttattatttttttttaaaaaaaatgaaaatagtttataattaaaatatttcccactccctccctctagaaaagcataacaagtaataaattttgagaatttttaaacctatccaatttagtttgttatatttttttgttggttgattgtgttttttatttttatttttattgattattttttatttttaaaaatattatttatcatatgatattgtgagcttttgtggttttttttttttttgggtgtacactctctcaaaataatttattggtacacttatgttctttaacatagctaccatctcactcaattattatgagattatagatattaaaaatattaagtaaatttttaaaaaaatgtgaataatttataatactgagaacatagttcaaacagtttattttacgaaggtacaatagcaagtacacttacaataaaattgtttgaattgaattttcaacatccaatacgcacgagtgcgggttttgaatttttcaatccaatctataatccacacaagtgcggatgtccgccctttttgtata

SEQ ID NO: 177562 - DNA, 742 bp, Cannabis indica
agggcgtttgcattaatcaatattcccaggttaaaaattggtgtttcatgctgtgttaaaccaatttgacatatcaattaattttttatttaaaaaaaaattaaacctctaattaaatcatagttaacatatttaatataaattaaattaattaatgtgttcaactataattagtttaacacagtataaaataccaatttttaatcgggatcttccatttccatatggttttggtacaagatatagccatcatcatgaatttttacaaaaatattgtatttaatatcaattaacacgttggtctcccaataaaatatagattaaaatgcttaatcgcacgagttttagtcgtttcatttggagtctagttcagcaagacttagataacatggataaattaattattatttatatatctcattattagtttattaattcatgttgtatttgattttgaccaacatatatttggccgccaactaatttgtcctatctgattagccctgattaataagactaaagtcatattattttttgttaactaattaactaaagtcatattttagtggtaccgaaactagcattgctttttagtgaatgtgcaagttgtagaggagagaagccttaatgtagttgctaagaaactaatcagagacaataaatataacttattacaaaattaagtagattaacaatgaatgaaaaaaaaggttcgcgccgatgagattgagaaattaatata

SEQ ID NO: 177563 - DNA, 1166 bp, Cannabis indica
aatttaatattgatttttttttataaatatgaccattatgttaaaaacacaaaaacaaagcaccattgcccaacaaatttaactatgataattttttggggtatattttttgcatttgcgagtttcctctgtctattaatcatgcttctactgatttattttgtttttctgatcttatcacggatctttgttgtcttttgtcctttttccctcaggttttcgttacccatgtaaaacgttttgctaatgaagcagcacatggtttagctaaatttgttttaggattggatgatgatattagttggataggagaaattccctatataaaaaaaaaaaaactagagccgacttaataatatagtgaatcgtaaattgtgaaccattagaattatacaatgtgaagaaattaaaactaaatttctattctaaataaacatgtgactataatcactcctatcaataaattatttaaaaaatttaataaaaattaaggagaaacaccctatattcaaactaaaataaattaagaaaaatatgacaacccatatattcacaattttcaatattaaatattgatgaatcaaaaaatataatatcaaaaagccaattctattaccaataaaaactataaatatgccaaaccaaatatggttctaaaagcattttcaatagagttgcttatggagtgatttgtatcacatgtacaatataatcaacattttaaatatattttatcaatattattgtccaaaataagtcacgatcatgtgacattatttacttttttttaaaaaaaaattctttaatcatcaacttaaatttttgttttttgtttttttcgtttttattaatgtggcatatgtaagtgggattatagtaaataattttttgaagtacttgtcaattattagagtaatttttgtttaaaaaaatataataaatcttatatgagagagaaaataaaaaataatatgtattttattattttattttttttatctaagataatatgtattttttttggtaactataagtattaccttattaaaaatgctctaacactactatgaattggtttatatttgattgactatgtatgagttgattaaaagagaaatactaaaagatataacataatattttttttttaaatgttcatattagta

SEQ ID NO: 177564 - DNA, 829 bp, Cannabis indica
taaactgttactggtagattgaggggtgtgaacatgggcagacgactgactctgggaggaattgctggtgtgaaaacatgctggtgtaggactaaaacagtacaggccatccttaattgttcctcgcagtacctccatccctgtttccagatccttcacacaacaaaagttaggaaagaactcaatggagacattattatcacaagttagttttgacacactaatgagatttttagtgattgtaggaacatgtagcatgtcatttaactttaagtgagaggcatcagataactttaatataccagttcctacatgtttaatagcaatcttacttccatctccaattaccatatgctccttaccattgtattccaccttgttgttgagtttctcaggttcgggtgtaaggtgatttgtggctccactatctgcataccagctgtcatcattcagaacttgtggtgtggcaacaagagcagtaagatgagattgtttgtcactctgctgattgttctcagattgtggaggctgacccataaacccttcatcatatctgttgtaacaaatggcagcagagtgcccatatttcccacaaacttgacaagtgggtcttgagtttcctcttccatatctgcctctgcctctattgttgttgttctgttgtttcttccaccaccagctgggtaattcgaattatttccatgccacggcctgagttgttgctatatcccaccacctctacccatttaaaatcctcctatgttgtttggatgagtggcttttgagcaaatgcagcagaaggcttcccagtgttttgtggtagtgaaac

SEQ ID NO: 177565 - DNA, 675 bp, Cannabis indica
taataaattaaagtaaataaatgttcccattatttattagaaaatgtgaaaagtagaataagattggaagaaaagcatatgccctttaaaaagcaaaaatatgagctagaatcctagaatgaatgaaacgtgagtggataaacagatggaggagagttgtgattggttgacaatactgaaattagtatagcaccaatcccattagactaaatccacacaattttatttttaaaaaaaaaaaattgaagaagaagaagaagatagagatatatatcttgaccatgggagttggcaggatataaggggcctaccaaagtaggatgtggaagtaaggcatgccacgtgggaaggaaaggtgtccacggttttccacgtggcaggctatgggaggcaaaccgagatcgcgtccaacactaacctcttatcaacaacatccaaagaaatataactctctcaatttcctatgtttttccactttctttctctttccaccggactctgtcagcttctaacgccatgaacgccatcgctacagctgcagctctctctttgccaatatccctttgtagatcatctaagcttaaatacaggaaggtatgtaaagttttcatttttctttttggttcttttgattatctgtgtcattgctatgttttgtgatatcagttgtcaaat

SEQ ID NO: 177566 - DNA, 722 bp, Cannabis indica
tattttatttaaatatgtcaacttattaatatattaataatatacgggttagcttataatccatttattaaaagggtcagatgggtcatgcccaaaaaagagagccgaactcatttaaggtaagtccaaatccacaaactcttatgctgatttcaaatcgttttattgcatcaaaccccgctttgctgcatatacatgaagataagaatcatatatataatcctacaatttttcattaatataggatggatcatttcacaactaacatggatacaattattggtcatgttcacctattttagaagactttttttttttttttaattatctaattttgggttgtagatattatctacttattattaaattttgaatttcgatactcttttttccatgtgtgatcctgccctggtaagctgtgttggattagagaactataaaattgagaatttttaacatgttatgaactataaatatatacgtacatattttgtaacatgaaatttctatcaagtttacttttgtacgaattaaacaaattcatatggtatctatcatgtcatgtctataaatttcttttttaataatgaatggctgacccataattttctgtaggctgaactaggcccaacattggtagagctggcctgataaaaatgggcctaaccaaccggtctattattgcataaaaaagtaaaagatggaaacttgtcaaatttgtc

SEQ ID NO: 177567 - DNA, 789 bp, Cannabis indica
aggcagagatggtggatcacagaacttacagtgtttgaagcttttcatctcatgttgtctggactcttaagatatacatttgattgatgcagttgtcatgctatgctgttttgtaagagaatatgctactctctctctctctccttgaataccccctcaaatggtgacgagttaacaagatctaataagctccttacttagcacattcaacctgcaaggtcagatccttaattccagcttcacttagtatgtctgacacttccatcttcgcagatgccttgactgtttcggctgagacacgaagacggagagttccaaccacatcactgtttgtgaaactccatacatgcatgttctgaatgccacacacacccttcatcttcttaatcttagctaaggcttttctcaaatcctcctcatgcaccctagggactctttggagtaaaacttctgctgaatttctgagtaatgggataactgaagatacaatcaagactgatataaatatagagcaggcaggatcagcaacaagccatcctttatacttgattaagagggttgatataacaactccaacacttcccaatgtgtctgccagaacatgcaagaaaataccctccatgttgtggtcgatgtggcgatgacgatccgtatgtgattgttctccattggaaataaggtcatggtgatcgtgccggttattctctccatgggaatggctgtggtcatgttggcaagaatgaccgtggtcatgatcgtgattgtggtcatggtcatgatcatgatggt

SEQ ID NO: 177568 - DNA, 821 bp, Cannabis indica
atttcctcaaaaaaaacttcatatttataataataaaataaattgtttaagaaaccttaaaaaaagttcaagagaagaggttaactaatataagctttcacttacaatgacacatttggtcttttttttatatatatatttatagtgtcttctagtcatcgttattttagtatgttatcaaactctaagaccaaatccaatcaagtaatttaagtaagttattaaaattgggaaaataatgaataacaattttaaataatcaaattattaaatatgttaattacccatgaatgagtttcattttcttatatatatagttgaaaaaaaaaatcaatttttgaaaaatttaatgtaccctttgagcatctccaagtgttaaatttatgtgtggatcatggatggtatattgaagacaacattttggtctgtatttaagaatatttttaacttgtcatttttataagttgaaaacaataagaaattttgttaactgttttatagttggtataattgggttataagaaaaacattataaatgacattttctttttccaactaaaaaagaaaaactagtactagtagataagaatatttaggcacacagattgagtgagacccaaaacaaagatgaggtacttggtgaccaaaataaaatccaaaagaacaggtaatcttggaaagagcgtaggaagacattaggctaagttttccttttcttttattattactactcccaaactctttttaaaatccttgtaaattggaaagggaacagaaactcattccttatagtttggtccctccgataagtcttcctagag

SEQ ID NO: 177569 - DNA, 660 bp, Cannabis indica
aaataattttttaaaatttaagagaatgagataataaaagttgattgataaaaaaaaagaaggacaaagaaattttttttttaaaaaaataacatggctgtaagcacaaaaaaaaaagtgacttaatatggctcaagtaaaatataaaaaaataattcaaaccttattaaatatgtatgaaagacaaaaacatatcttattaaactaaaaatggtgtttttgatatgaagataaaaaaaaaaaaaaaaaggtagtcatacgtaaaaatgaattatatataaataaatatcaattattaattagaaagaaaaagaataatcgtataaaaatctaaaactttcatctccattgctcaaagaagataaaagaaaaataatatgtatatgtatattggggccggtctatgtatatgtatattcagggccgattttaagtataggtgggctagagttcaaataaaaaaaatattttttaaaaaatataaatattttttaataattttttaaaatactatttatttttataataagagtaaaacattttttttacttatgatccatttcaactcagatcgggcctgtgtatattgttatatatgtaagtacctgagtctattacaccaataatggtgttattggtgagtggcttatccaaacccca

SEQ ID NO: 177570 - DNA, 690 bp, Cannabis indica
agatgattaaagagggtccactactagtacccgtgtaatcaacaaccccagcgagttaagcaccaataccacacttacgcacttattgccttaaaccctaactcatctatttacctcatacatatttacataaacaattagcatttatagcatggcatcacataacacatacatactctagatgcttgcatactgcctaaaatggaaagcggtaaacagatgatcacacatacagtcaagtatttactctcaatacttactgcaccatgagtcgagcttatctctgacgacgaatgtacatgttcggccggtctacaggaagtttaaaaaccttggcgctctgataccaaattgtaacgccctaaataattaggcacgctacccaaaatacttatgaaaccctaatcccctaaacgggattactaatcaaaatagcgcagaatttaaacttttatattaaacagaatgaaaataaacttgtaatatatttaaacttttaaaatagttgggatcccaaaaatatttacaaacgttattacaagtcatttctttctagccgacctaaacggcaaaatagaattcaaaagttcatcactgatagacccttaacccgcttggtctgatatggcttgaacatgtacattcttcgtcctgctcctcaaactcatggctgatcagccactgacttaa

SEQ ID NO: 177571 - DNA, 514 bp, Cannabis indica
tcatagaatgttagtaattgagaggtctaaaacataagattagatatttaatctgtaaaaaaaatatgatatttaagtatagaatatttatgaagctcttgattataaaaagaattgtgtgttttattataagtttttctctttcttcttttcaaagcaatgataaacgtaagacgtaacccaaattatcttcaagctatcttttatattcatttcaaaaactaaaaaaaaaactgtcttttatataaatatatttatattattagatatataatctgattattccttgcaagcaagcaccactaaaataacaatattaaacaaacaaattgaatctctgtacctttactcaatcatattgcaggtttatatatatatatatatagttacttagttttcgtagaaaaataagctggttatcatatataacaattaacaactaaaagggtattgtgagaagcattatatatatatagtagcagtagtactataaccatggaaattaaggttgaat

SEQ ID NO: 177572 - DNA, 549 bp, Cannabis indica
gacattgtagagagaaataggcctaaattgactaaccctcttgtgcatagatccagtaatgcttgaaaaacgaactgacatcccatccggtccaggggctttattgcttcccatggtaaaagagtctttcttatttcatcatcattcagaagcttgacaaggtcttcttactcctccatagaaagacggtcttaatcttgaatgaggccatcaaagttgggcacctgaactgaactatttctcgaaaaaattctactccagaattcagtgaattcttttccaattaagtcaagcctagtcacctaaacatcattcctgtccaaaatactttcaatgacattacgtcttcctctaatggacagcagtcaaaatgaagaatttgaaacatttatccccattttaagccacaagataggggctcgttatttccaataaagagctttcctttccatagcttagttgagaaaattaagaatctcacactcctccttccaatctctagtacccgcatgcaacttttttacaagtgattaagcttctgttccaagt

SEQ ID NO: 177573 - DNA, 461 bp, Cannabis indica
attggtaccataaatggaggtcttggtatataccatatttgatgttatcaattgatatagagtattggtaatattgtgttaaataaaattaattttagtagcttttcaaaaatttatataaaaaaaatatcttaatagtttgttttattatttatgaacataacatataacaatatatttaaatttatgtttgtttttattttttttaaacataataagatctaaaaaaaatatcgtaacaatatatgttatttattttaattttactttttatcttttttattttattttaattaaataataaatataataataatatggtaaggaaagtatatagtgtatgttttctaaatatttaaaaaaaaaaaatcagataaatcataacaatgtataaaaaaatcataattcaaaaacttctcacttatttattacatttttaattttttttatttgtatacaaa

SEQ ID NO: 177574 - DNA, 641 bp, Cannabis indica
cgaaggtttaggggcgtttggtaacacttttgtttttaaattttaaaaacaaaaaagaaaagtaaaatttgtgtttttaaaattttatttttaaaaaataaaaatatgttctataacgacttttcttttttcaattttaaaaacagaaaacaaaagtgtgttctataactttcaattttatttttatttttaattttatttaagtcaggtccgggtctggggccggggccgtagtccgagtccaggactggggctggcgccagagtccgggtcccaaagtctagattggggtcggagtccaaaatattgattaagaaaaatgatagtttaaaaaaattttaaaagtgtatttttttgtttttaaaatttagattcttaattaaaaaattaaaaagtaaaaacagttttatagaacatgattttaaaaaatattttcacttttctacttttaaaaacaaaaaactgattaaaaaagtgttaccaaacgcaccctcaatttactcaagttttattttttttgtctacttaatacttaccacaataataattaatagcgtatattgttattatatgcgctatctaaagtgtctccataaaaaattattgtaattgtctatattgttattaatgttatctgcagt

SEQ ID NO: 177575 - DNA, 692 bp, Cannabis indica
ccccgcattatctcatggattctacggaggctcatgctgtgcttgtggattggtttggtcattaccgggctctacgtgctcgccctatggtctagatgattgattagggtccatttttctcaaatagccctgaaataaacaacctcgacgagttaggcaccgaaactacacttacacacttattgccttaatcctaactcatacatataatttctcttttaaaataaacatttatcaatttaatcactaatcaggcttttcacacaacatttcattttctagatgctcatatgttgcctacaacaaaaaatggtaaacataaatcacaaaagcagtaaagcatttactctcaatactaactgcaccacaagtcgagcttgtctttgaagatgattgtacatattcagctgatctacaagaagtttaaaaatcttggcgctttgataccaaattgtaatgccctaacaataggaacgccatgaacggtgactaaacatatgttgatcccgctaaaacgggattaataaagctaagagcagaattttaaactttaaaataaatatagagtaaaattataacttgtaattatttaactttacaaacattcaaaaggtcacatttgtttcgagatctcgtaaaaaacttttcaaaatattaccagttatcattacacgttgacctaagcggcaaaa

SEQ ID NO: 177576 - DNA, 692 bp, Cannabis indica
ttcttttcattaaatctttcatgtaactcagaccaaatctcagctgcattatcaagatacataatgctgtcagcaatttcagcagagatcgcatgaagtatccaagagattacagtgctgttacatcgacaccaagcatcaaaatcctcatgttcctcatctggttgtggaatcttcccattaacaaacttcattttgtttctagcaacgagagcaatcatcatagatcttctccaggtactgtaattttcactccctgttaagatctttggtacaagaactgtagctggattatcaccattcgaaagaaaaaatggattcgacaaatcattggcagtgctggatcttgagttctctccaagaacagagtatctgttcgagtcatttgatgcattagcagcatcacgattagttcgagtttgagctcctccaccacgtgccattgaagaagaaataagaaatcaaagaagcaagaagaaagatgaagatgaagccgaaccaacaatggtggctctgataccatttcacaaatccatagcagaaaggaaacaaagagaatagaagaaaagtgactgaatctgttattcaaattgctcagaaaaaaatacagatacattcaagctacttatagtagctgatgtttagttacagctgtcataactaacacttaatcctacaactaactaataact

SEQ ID NO: 177577 - DNA, 572 bp, Cannabis indica
agatccttgactcttggatgagccaatgcctccaagtctctcaagcttgctgtcaagcttaacagtaagtgttcttgaagttcttgctatgtcagaggtgtgaggttgttttttgcttcaatgagagcaacaatggtgatgtattcaacatcaagaccactgaggacatttgacacaagatgtgcctcagggtagggatctcctacaagagccaactataagaccaatatctcttctgcctcagatattcatccatggtggtagatccctttctggttgtttgcagcatggttctgaggtcatctattttagctcaagagtgagctccatataggttttccaaatatgtccacagggatctagcagtgatacatctcattacttcattggctatggcttccgtcatggagccatagagccatcccatgagtagctaatcatagatcacccattgttcatattctgggttaacttgaaccccaaaactaggtttaccatctctaatagcaactcctattaaggaaaaactcagcaggagcatgtccgaccccattgatgaagccatctaacct

SEQ ID NO: 177578 - DNA, 506 bp, Cannabis indica
ataaacaagtgaatttaactgtataaaataattttgaattgcccataaataaattaaatagaattagttaagcaaaaaaaaatagttaaaatattaaaagaaaattaaatatttctcatgtcaaactatcattgcttaaacaccatttcaaatatggagaatataaaattataaaacttcatcctacttttgcaaaagtaaatattagtagcaaaacatagtattaggattcgtttgataagtcgtataagagtcgtattgtattaaaaaataattaacactatgtttggataaaatattatattatattaattattacgactataaattttaatacaatgtgagttgtattatttaatacatagcaaataactcatattagcttgtattataatatttacaaaggttataaggtcaaccctagcgccagaccctggacccaaaccttagacctgaacctgaacccagacccagaccaagaccctggactcagacctgaacccgga

SEQ ID NO: 177579 - DNA, 720 bp, Cannabis indica
ttggaccaatagtgatattgacacataaaaaggtattaagcaccgctggtgacctttagcatttctcattcctaatagcagtgaccttgaaaccaacattaattggtatgcttatgctagttcgcttttggtatattaattgctcaggtggatactaaaaagttaaactaaagtatttttgtaaacttttttttgatggaaaatggctttttttaataaatgaaattaataatatatatatatatagtatataattaaataatatagatttaatattactatataatgaaattatttttaaattaatattagtatatttatattttctcttataaatatatttatatcatacaattaaataatcgcgcgatgagaaattttattacttatttattgatttgtttattatttatctataataatacttattatttatatatcattagttttcattatcattcatattgatgtaatatttgttacgtgttttatttattttattgttaggatggtaaagtttaatttgatcactaattgaagatattttagttacacatgcagtaagaataaacaagtgaatttaactgtataaaataattttgaattgcccataaataaattaaatagaattagttaagcaaaaaaaataagttaaaatattaaagaaaattaaatatttctcatgtcaaactatcattgcttaaacaccatttcaaatat

SEQ ID NO: 177580 - DNA, 654 bp, Cannabis indica
atttatattataataacaaaaaatatttaccatgtttcttgtgtaaaagtgtttattttttttttctaaataaacatgttatattattattaaaaaaaatttaaaacattactataataaacatagtacattattatatttataattataaattataataatttaaacaataacaatgatattattataaataaaatattttattaatataataaatttatataattttattcttttaattaaattactacaattagtcttcttcttaaatttcatttttttcatcatgtacttcttccatacatatattagtaactattataagtatcaaatcaataatcataaataataaaatttaaagtcacatgttataatgactacacagctccttaatctataattcacatttaaagaatattatgaatacatatatatttatagtaagtttagtaaatattatattgaatgatttaaatattagtaaatatgttattaaaatgtatgagtttttataattaagtttttttgcacattttttgtaatatattaatttttgttgtacattaatgaaaaaacccccttaaatatttatcttgtttgctaattagtaacgtacatatactactaatgaatgagttacaataagagttgtat

SEQ ID NO: 177581 - DNA, 949 bp, Cannabis indica
catattcaatcaagtgtcaatcttacaaacttattcacaaagttattaccaacatcaacatttgagaagacggcagacaagatcgaaattcgtcgattagaagatctccacaaatgcctaaatgagggggagttagtttacactatactctttttcctttgatcaagttttcagcaagatttttaataaggcagttattatggacatccaagggggagtgttataaatattaataattatgtggatgtccaaatcttttatttattaccatgaattgtaatcaacattcctcttttccttagtttccctttttcttagtttcttaatatctcactcttgtatttgtataaataggggttcaccccattggaataaacaactcagaaattctcattcactttctctttctctcttcatcttcttcttctttcttctcatctactttatattattttataacaatatatgtattattcttttttttacacattgttttttaaaaatataaaattttaaatatagattaagattcttttaacatgaatattataaatttggtaaatgattataaatttataaatataaataaaataaaaaataaaaaaattaatgagagaatatagaagatataggtttaattattttataaatgtaattataaaaataaaaaagaatgagagaattaaaaaaaaaaaggagaaaataatttaagagtaattttagaacatcacgacactatttatttacttttttttttttgaacgaaactatttatttacttattttgaaagccgtcacgccactactttattgctgagctttatatatgtatagataggtgtaaaaacttaaaagcatgtatgatataaaaagctttttttgacctgccacataaaatttgagaagtcggtttttttttttaatagtccaatttttttcatcaataaaa

SEQ ID NO: 177582 - DNA, 635 bp, Cannabis indica
aaaataatcacaaccatttaatagtaatccaatggcttaaaaaaatgtaaccatgatggttacaataaaaatgtaaccattgaaacctcttcctattattatttgtaaattggaaggatttttttcccatcgaattcttttagtatcatatcccggcctgttgcattgtaatcggtcaaaaaatcatgttgctcaatctttaacaaaacgaagcattagatttaaatgagactcgggtgtagtggccgggcttgcccgctgatttacctgtttaatttgcctattctttgtatcccaatcttttgacttgatgccttttaatggaatttctcagtttcaaaaaaaaaaaaggaaaataaataaaggaatttttaattaattcgagctttactataagacagcagttgtactaaaaactatataaaaacaaggccgtttaaaatattttaggtgtttcgtgcaaaaaattaaaaattaaaaaaaaatgtaatataaaaaaaaattgtagtgcaattaattaagactacaattttatattagatcttttttaaattgaagattctaaactttcaattataaatttcttatttatgtttgtatatagaaaaataatagatctttactttcaaaaagaa

SEQ ID NO: 177583 - DNA, 869 bp, Cannabis indica
tctgtaaactgttttcaaaaaacaaggccaaacaagccaaattgtttttaaaaaataattttctgtttttaaaaacaaaaaacagttttttagttatgatgccaaacatgcacttacttttattattttttaaaataatttttttaatcaatgttttagactctgacttagacccaaactcggccctgaccttggtgccgaacctagcacccgatccggacccggacctggccccaacccagacttgacttaaataaaatcaattgataaaataaaagtaaactttacagaacacacttttgttttttgtttttaaaattgaaaaacaaaagtggttatagaacgtattttgtttttcaaaaacaaaattttaaaaataaaaattttactttattttttgtgattaaaaattagaaaacacaattattaccaaacggtaccaaaattttacagccttaactttttaatcacaacaatactcttttaaagttttaaaattataaagatacattttattcagcaaagaattaaaataataacgagaaatcaactctaagacaactataaatcaactataaaacaacaaaaaaataatcataacaattataatacaatcataaataaactataaaataataaaaaaaattattatttttattgaaaatatattttgtagataaaatatcttttttttaaaacagttgaataaaaaaaatcaaaaaataaaataagaactttttcagtgattttgaaaaattagttaataacagttacatcattagatttctttattctatcgtggcggtaactgattgggcattgtgtcttgagcagaaaaaagttacagaagacctttgacctgtttcaac

SEQ ID NO: 177584 - DNA, 689 bp, Cannabis indica
acatggcagtgctcttcaattttgatgggtactgccataaggaaatggcagtggttggccatgaagaggggaagtgagattttttgccaacaatgcattttcaccaataatatgtcaaaacaaagtgaaagaagccatcaagtggtatagaaaccacttggctgaccagtgccatagaaaatggcagtgctcttcaattttgatgggcactgccacaagggaatgcagtggtcgacccttgcataaggaaaagagtttcactggccaagtttcattttcaatttatatatgtatcaaataaaaatgagaaaagtcaccaaggccttataaagcccatatccgaccactgccataagaaaatggcagtgtccatcaattttgataggcattggcacaatggaatggcagtggttggccactacacaaagaaagaagtctcatactccaagttgtattttcaacatccatgtgtcaaatacaagtgagaaacaccacccatggcttcccacaagctatggctgaccactaccactgtccgactccaattggtggcaatggtcttctgttagggttttgacgttaaacaagttttaggtcccgtagatccccaaaatatgactcacctacaccccggagggtccaagaacatgcacggtcgagccctgccatttggctatgtcagtgctcgt

SEQ ID NO: 177585 - DNA, 773 bp, Cannabis indica
gaatttagatccattctcattcaatcccacaaaaatttgccatcattgattaaactggtttgcaaaaatagataggcaaaacgaaaaacaattcacaacatacgtaggtataaattggactacagcttgagagcacttctcaccctcctgcagaaaagattttctcattccaattatgcatgagtctccatatttttccttgatgctgttgaacatttgcttttatccttaccagagtatgaaggtagtcctaggtacttctcatggcattcacaaataggcattgacaattgcctatggaagaacacttgggctactaaagtagtgttaggtgagaaagatattactgatttcttcgggttgagaacttggccaaaagcacgatggtagacatccaggacttgtttgattgcaagacaagagttctcgtttacttgacaaaataggaggctatcgtctgtgaagagcaggtgagagattggtggagcatgcctggtgagtttaaaaccatttaagtgacccaccgattgttcataatgaagcaagcgtgataatccctccaaacagattagaaacaaatatggtgaaagtggatagctttgtcgtactcctccagttggggtgagtgaacttgtaatttcaccattcagcataaaagtaaaggtgttggtggttaagcatccaatgatcagatcaatccatttggtagagaaaccaatttttgtcatgacctccctaatgaaacgccattcaacctgatcgaacgctttact

SEQ ID NO: 177586 - DNA, 712 bp, Cannabis indica
tgtctaatttcattcaattttactgtttcaagtactaaatcatgctccccagactttgatatctaccaaatcatgcccctcaaacttttatatgtattaaatcatgccccctgaactttcatccatgttagaatttttttactaaaattagataaaagtccttaaatttaacaatcttaatagttcagggggaatttttaacggccaaaaaagttcagggggcataatttagtacatgtcaaagttcgaggggaaaaattactaattagccttttaactataatagaagaattacatcacaaaaactagtaaaattaaaatgactttaatactactctcaatataaatatataaagtaatacaaaaataattttacaagtttatcacttatttcaatattcattccaataataaatcaaatattttaatgaatttttataaccatttttatttcactacattaccattgccactataattgctattacattatactaaatcaaatcaaaaatcacccagatattaaagtgcattgcaatatacactacacataagtattaataaaataaaaaattaaatattaaaaaaaaagtctaatataattgattttagggtctgtaaccaaaaaatcctaaaaatcataataaagtatgcaattaaataaacttttttatcatctttatgttacattttcaagaacaagacatctaac

SEQ ID NO: 177587 - DNA, 608 bp, Cannabis indica
aggtttgttttttatcgttttttctcaactgggtcatcctctatctatgtttttctatgtgcttttttctttttccccttattttctttgtggggtttcttaaaaaagcattctttttctttgcattaacgatctgatcatgggacatgttcaaatttctaatgttgtttcaattttttttttcagaattcttgctaatagacaatctgctgcgcggtctaaagagagaaagattcgttataccaatgagctggagaggaaggtccagacgcttcagactgaagccactactctttctgcgcaggttacattgctccaggtaagacaatgaccttgactttttcttattagctatggagaaatgtttggttggtatgatgtcactttagtctattctttctgcattcatagaatttttaatatatctttttccttatggaatggaaattattcttaatataaattaccgttgagtttgtggatatgtatgggatatgtatgggatactttgttttactttgctacttagacacaacatgtgtttacaccaatcgatcagttgctgattaatagagcatcaattactgtatccaatgtggacatgtttt

SEQ ID NO: 177588 - DNA, 814 bp, Cannabis indica
atagaaacataccaccgtcgaatcgtctgaaggaactcacgggaggttttgaccaccggaggttttgaaggaaggaactcaaaaacaactagaggttgtacgaaggaactcacgggagaagagagaccaccgaccactgtcaaattgtctgaagaggaggtggttagggtgagttctcaccgtcgtctgaagaggagatgcgactgaagagaatcacaaagacgtgaatagtgtgaggctgaatcgtctgaagagagaaggctgaggattttgcgtattttagttttagggtttctacttttttgcgtcggttattaactctcactattgtattttgtgttattcttaaaagctcgctaatacaatacatgagttttaataacagacgcaaaatgaaacataaatttttgaatttcctacttatttttgtcggtttagtttttagcgtcatatacctaaaagacacaaataacatattattagtgttatttttaaagtgacgccccaattatttgagtactattcacgtcggtcaatgctatgaacagtagcattgaccgacataaatagtgtattttgtagtagtgttaggaagtgcgggcaccaacgacggatttaatgggtaagtgattctcttgattatttttgttgttgattacgatatttagtttataatgttgttttgatatccgatctattggttgttgctgttttatgtcaattttttttgtgtcttttgtggattttgagagaagtttgagaatatttgcagaaattttatcatttatttaaagattctcaagcatccattcgt

SEQ ID NO: 177589 - DNA, 878 bp, Cannabis indica
aaaattagggtaagaaaattacaacattttctttttctttgctggaattagtttttgtcttttctaggtgaattgaaatcaaaatagagagttaagagaataaattaaagaatagaaacataccaccgtcgaatcgtctgaaggaactcacgggaggttttgaccaccggaggttttgaaggaaggaactcaaaaacaactagaggttgtacgaaggaactcacgggagaagagagaccaccgaccactgtcgaattgtctgaagaggaggtggttagggtgagttctcaccgtcgtctgaagaggagatgcgactgaagagaatcacagagacgtgaatagtgtgaggctgaatcgtctgaagagagaaggctgaggattttgcgtattttagttttaggggtttcactttttttgcgtcggttattaactctcactattgtattttgtgttgtttttaaaagctcgctaatacaatacacgagttttaataacagacgcaaaatgaaacataaatttttgaatttcctacttatttttgtcggtttagtttttagcgtcatatacctaaaagacacaaataacatattattagtgtcatttttaaagtgacgccccaattatttgagtactattcacgtcggtcaatgctatgaacagtagcattgaccgacataaatagtgtattttgtagtaatgttaggaagtgcgggcaccaacgacgaatttaatgggtaagtgattctcttgattattttttgttgtttgattacgatatttagtttataatgttgttttggatatccgatttattggttgttgctgttttatgtcaattttttttgtgtggaaatagttgtttttaaatatttttgtca

SEQ ID NO: 177590 - DNA, 841 bp, Cannabis indica
atcgattataataaaggcccaacattgtgactaactgtaatgaacacgcttggtcaattagtgaattatgtacggccaagtatccagtccacccatctagatagagtttcctttcttatctcaagttcttttatcttaggccaataattttattctcagacttcctaacacctatctaaatagatcattttgtagcagacttaccattttctaaatctaaattcattgagtatttaatgacattcatattccatacaaaatactactcttttacaattttatatccaccagatggtggtaacaacaaggacaattgtactatcccataaaataattttcaataacttgttgggaataattaattttacaggagctagaaaagaaatgaaatcatttaaaaaaaaaaaatccaacttttcctcaaaagagaatcagatatgtgaagattcaatcaggctctcgcttatagctgtcaggtgttcgtcaatttcctctgtggataacactctaaacaccgggttgtcctgcttcacaactcccacctacaatttaaataagaacaatcaattcaaactttatttttatcaaaagtcaaagcatagattctgaatgcaatatggacccctcagcaaaatattaaagcccaaaaatgaattgcaagcgtgaaaatactaacataaaaccacagtattagaccatgccaataaaaaacaaaggcgatggaaccagaataaatgcaacaaggactagaaattctcaagtcaaaaaatactaatggcagtatctgactaaagaaaaaacataagaataagatagtatgatcaaaaagaggaaaaagaag

SEQ ID NO: 177591 - DNA, 508 bp, Cannabis indica
agagaactcgttcttttttttttatttgtttgagaattgttgctgagtttttaaaaattcagagaacatcattttgatgttttcagttttttgttttttttaatccaagtttttaaaaagatttttaaaaatttaaccaaacactatcaattagtttttttaaaaaaaaatattttcagtttttaaaaattaaaaatagttttttaatctacaaagccaaactaagctccaagtactcccgcaagaccagagcagggcaagggaaaaaagaagcatgcaaatctgcaaaagaggtacaaacagagtcaatacacttcctcacatcagcagaacagtttcctttatactgtaaattactcttatattttgattaagttttctttaaaaatttaattatttttttattttttctagtcaacataagaaattacaattacatggatgggcatgtcagaatattatccaccatctcatgatctaatttatgaaaaagtcctaagagtatgtc

SEQ ID NO: 177592 - DNA, 889 bp, Cannabis indica
tgtaaaataaacttatttgttacatgatcttgaaaattatatttttttttcttcttatataatatcaagagattttttttcaagtaattttaattatatttaacttcaagaaagatataaatgttatttatttttaatttttagtaagagtttataacttatacgaattaagataacaatgtgaaaataagataattttctaaataatcatattttgtcacaataaaaattcaattaatatttatttttggtgtcatgtgtttttaatcgaagttatataatggcaatgataattttctttttagtagttgaactattatcttttattattattattgtttctaaatgaagatacaagtacttatatttagaatttggagataagataaatgaagttccatttcaaaattaattgacaatgggaggagtagtccatttattttatatatgacaatttatttctacacatgaacaatgtgagactaactctaatactagtagccttatattcacttaaagttcaactgataaaagtgtcagctttcactctatccaataattgattacaagttataatttaatatatgttaactattacaactattagatttaaattcaagtaacttaacggccacgattgggaagctgacttaaatctgcattcctgcagtgcgcaggaatgtcattggggcggctcgaatctaattcagctatgatccgacaagattcagatcatgtaaggatctgacacgccccgtcccgctccgctagatcagatactcggatcggatcagatccgacccgccttataccgatcggatctgatatgacccaactttttttaaaaaaaactaattttatatctaaatttataatttttttcctaaaa

SEQ ID NO: 177593 - DNA, 909 bp, Cannabis indica
cctagtgtcgctccgccgactggaacacttaaaggagctcctgtgtcaatcacatccattcctctcattagaccatctgtagcactcatagctacagctctaactcgattatttcctaataattgctgtacttcacaagtcacattaatttgttgatcaacagtatctcgacccttaactatcaaagcattgtaaatattaggcattttccccggtggaaaagctacatccagtaccggaccaatgatttgagaaatacgccccaggtttttgttttcaagcgcgggaaccccaggactagaagtagtaggatttattctcataaaaaagaaaaatatgtcaaaattttttgtgaaattgaaatcaaaaataaaggttcgagagcaaagcaagttaagttgatcggttaattcaattaagagatgggcgttagcacttgatttcgttgttaacaaatattcaaccgatgtttagttatttttttttattcaatttcaatgagtgaattttcaagttcaaccaaaatccattaaactccagtttcaaattcaaaataaaatatcaagcggatgaataaaaattttgagaaagccgtggaattcgaacccgaactccatttacgcttcattttctatctcattggctcttatttcctatttcaacatatcgatgtaggcttagcctatatattattttagaatatttattttttatatctataccccttctttcttttcattggacaaatttcgcctgtttttacatctaatctaggatttacatatacaacatatattactgtcaaagggtcgaatttcttatatatttttgatttcaaaaaaaaaaggtatacgtagattagaaaactttgaaaaaaactaagaattagggttagacgctatatataat

SEQ ID NO: 177594 - DNA, 836 bp, Cannabis indica
atctatatgctgcatataaagggaaatgtcagttacacaaaaaaatatattaattgcacataaagttgtaaagtgaagtaatattataaaatactttacttacgtcatctgtaagccattcctttggtgtgagcattatccaaaagaatcctggaccgtaatcaccacttctcaaatcccgaagtcggtggttcggaatgagtccaacacaccactttcggaaagtggttaacaatttctcatccggtggctccaggggatcaaaagtcgaagatggcctatgtctcctcttcatctccgtatagtcaccgaaccatacaggaggctttctcttcctcttccgactcttaaccactgcaggttgtgcctctatggacagaatctcaccctgcgactcggtgtcatgtacatggataagaggttgtgcctcgatcggagtcgctggagctccctcataaggatcgtaatcgtcggggaagacctcatcctcttctactgggggtgaagcagctggtggtggggtagatggatctgctggggcctccggtgctgaagctgtcgttggcggacgattcaacatggccaatatgtgtctgagctgctccataattacgttctgaccacccttcagctctacatggctggtctcgtatgccttcttcagctcgacatgagcagcatacagaccctgagtgtcagcctcgatcctatccaaccgagccactaaatcagtgtactcggcaccccgaacgcctgatgaagatggtgcactgggctgaggttctgaaccagtggcctgaaaaaatatatatcaaaaatacggtaagcatacgata

SEQ ID NO: 177595 - DNA, 1276 bp, Cannabis indica
gaaaaatagagagaaaattataataaaaacaacaacaacaacaacaacaacaacaacaaactgcatatatttgatttaaataaccattaaaaactgcccctaagagaataactggattgttttttttgtttaaaaaaaaagaacacaagaaaagagatgatgaatagttaaatgggatagtgggtataaaccaccaaaacgtggtgtgaaagagagagtaattgtattgaagtgatgattacattgaattaaaaagaaaaaaaaaaagcctgccacaaatgtgacaatacacagtcacatcaacctttttaacacttaaaatacaaataataataataataataataataataataataataataataataataataaacacatgcaaaactctaggcttacacgtgtaaaccaaaaagaataaaaaactttatcaacaaaacaatattagaatacacaaaataagaagacaatataaaaatagacagtaaaaagaaaaaactgccgtatcacagtataattgaaataaatgggaaaaatagagtatgaggtgtaaatttcccttaaattaactatttttttttaagatatgggcctaatcaaacttctttgggctgggggacagtggcccttgttgcccaccctcagctggcactgcaacataaatggaaagagaccttaataaaaaaaattaatagagagagagagatgagaaaaaaaatggtgaaatgaagagaagcatataagatttcttaaatgctccatcaattgatgagtaaaatttaattttttgatagttagtagtattagtccaagaaaagagaccacccttctaaattatgctttattaattaatattaacttcagggtattccttatatccaatttcactgtcagaaaaaaatagtcatgttggctaactaaagagtttcttacataaactactcacttttatgtaccaaataagtaaattgatctattctctttggtacaacttaatggttttcttatattcttatgacaattaatttttctattaactattagttgttagagtagttttcagcttgtataatatttatataaatcatcatctcattatagaatctactctttcagtttgaattcttctctcaatgtctaaaattttttaattaacaacctagaaactcagtttaatttgaattttatgtagttttaaatatgaatttaattataattatttttgtgacatatttcgaaatggactcaaacggtaacacctcgtggattcgtg

SEQ ID NO: 177596 - DNA, 583 bp, Cannabis indica
acccaaaaatcccattgcattaatacgtgcatcttcttccatagctaactgagttactaaaatcactactccaaaaaacccacgtcgaatattcccaccaaaatgcctgtctttgcctgtaaacataaaatgaatttaattaaataatacaactctataataataacaatttaattatatatatatatgtttaattacatttataccctgatgtttgggtgagcataaataaggaacaaggaaatatagatggtctccacaagggtccaaaccattgacaatggccacaacagcttctcctgacttagtcaaaccgtaataagtccaaagcaatgaacttaacattgtacaaatgtatggaagactctcaaactcttctgtcgaaccatgtttttacaattctccaaaatgttcttctgcaaaccacatataattacatatatattgtgtgtgtgtgtgtgtgttgtaattgaatttataatataatatatggtatataaaacatacgctggagaaagaaacattagcactgaaataatggtccctgcaaatgaaaaagaaaaaagaagtaaaaagaagatag

SEQ ID NO: 177597 - DNA, 1061 bp, Cannabis indica
acgagtatctatctttacatcatctgcagtacataaaagtaaaaagagtaattttttttttgaaaaaaaaaattgaataagtagattttcaaatatatttgtggtcatcaagagaatgaatgaatatatatggaagagccaatataatatatgcttatgggtttgtcacttctatagatttagctttaggctaccatatttatcagaataatgtactatatattcagaattattaattttacacataaaatatatagagcattgtctttgattttgggtataaccctatacctaaaaatataatatacaaatagaacaaattaataacaaccaactatccttaataaaaaccaacttggcaactgtaattaattaaaaataagtgtcttattttcttttaatttttttttggggggggtgggaaaccaaagcagacttctgagttttatggcccacagatttgagatcatgaatttagacagtaatatataaaaccatgtatatgaaattaatctcttcatctgaagaattaagctagttggctgagcaatcaaaaaaataaataagaacatatatcaatgcatatataaagatatatgtattaaaggaaaaaaaagttaaaaataaacaaagcttaaaggctcttggttaggctttggccacgtcccatagaatcacagtgcaattacttgtgcatgcattggttagggaagacataagctgtcgtaatagtttattatattacatatccttgattttctcattctttttaaattataaaaataatagttaatatcattttagactttgtattaggttctctattttataaaataataaatttaatcttatatttttcaaaatagtataaaaaaattatgtgaacttacattttaatttttttttaattataatcacattgaagattatttttaacataaatagatgtaaaaaaaatatacttaattttattataataactttagattgagttattatcaatttttattttgacacatattgtggacaatgtcccacatggaataaatggtagagtaatt

SEQ ID NO: 177598 - DNA, 536 bp, Cannabis indica
tatctcatgcgtttcacgggtagtccatcaagattgggtctataattagaaaaaaaaaaaaaaaaaaaaaccaaacaaaaccaatgtcccatttccataacctaaacttcttcttcttcatttcttcccaaccgcacgatcttcccaacccagcctacacgaagctgtcccaacccaccttagaggaagccgcccgtctgcctatctctgtccccatgcgaccgcgcctaagctcgcccctttcccattaattttgttatcaaaagtgccagcaaagctcgtaaatgttttttttattattttttttaataatttgtaatttatttatttgtaatttatttatttattttttataagtgaatgttataagcttaaaattgtttgatcagtcatgacctgaatatgatttgaagtggtttgtgattgcaattgtttcttattaatatgatttttctatgttcattggtgtttgagaagttctaattggtttgatgcaatgtaggtactcttagatttcctgttgtgcgtaatgttta

SEQ ID NO: 177599 - DNA, 1246 bp, Cannabis indica
gttgttttgtatattatttctatgttgtttttacgttagtaattttcttataagatgtcataaaaatataattgtacggtatgttaaatatatttacggtttttaaaattttattaacaaaaaatacgatttttttttaacaaaaaataccaattttttatatttttacgttatttttatattgtattttttattattgtgttgttatttttatattatttttatgttattattacgttattttatatgatttttttttattgtttttataagataacttaaattttttaccaaaataatataaattttcttaatcttttcttaatgtcattattttaaggactatttcgcaaaattgtcttattttttaaacactttgcatagtagcttcattttaataattttttttttgcaaaaatagccttataaaaatgttattttgaaaatgacattataaaagagtatattttcactgattacccgtaacttaataatttttccaccttatcttaggggttactttgcaaaaaataatgaaagtaacactattttgcaaaataacttttaccaattactctaaataatattaaatataaacaatttaattttaatttttattttttatgacagtactcggcagtaaaaataagcaatgtggtgtacagtaacataacagggagtagcttctcagaagtggctgtaaaaatcaattgtagcaaaacttttgaatgtgaagagatttcaatgagaaatgtgaatttggtaagagaaggaaatggtgttgttaaagctttttgtagtaatgttggattcactcaaaaagaattggtttttccttcatgctcatagtactaaaaataaacatcaccatcttcttttgtatttctttaatagattatgtctactctaatcaatatgttgaaaaaatgtgatgtaatttggtaactagaaccattatttcttaaatatcaaatggtatttttatttcaacatatataaactttgtagtgctttgtttatactatatatttcccatgtaagtttgcatagatttttctatttgtagtttgtagaggtgttttcgggtttcgttttagggttcgagttttttcaagcttcggttaaagaaatgtgctactaaaatttgtatgaattgtttcaaatttttcatgagtgcgttcgagctaagatttaagttacgtttgtagagattttatgtaatttgtgctgatagatggatttttgc

SEQ ID NO: 177600 - DNA, 779 bp, Cannabis indica
gccacctcgttttcctcttcctcttccaaacaaatatccttccattgttgttccaaaccggtggtagatcggctactagacgccatgatgagaatcaaacaaaaatactttgacacaaaataacaaaactctataggaatagagacaaatcacatgtcagaggacatgactcttttttaatggagattatatacattaattaattaattaattaattaattaattaattagtacattatcatacaattttgaaccaacattgaagtggtatcgatttgaatcgaattttcaaaatttgttctttataaaggggttttttttttgagacatgttagaattagggatatcataaattagaatgtgttagttaaaaagaaaaaagtacagaacatactaagttaatcctaactttaatattgatccttaagactaatattgtccaccattataaagatatttcaagtacatttgatgttttgctcttcaatgcttcaagcatattctttagtataaactcttcagtaaaagtaatgtccattgtccaaaaaaaaaaaaaaaccttggaatacacattataaaaataaaaaaaaaaagatttttttagacttgtaaatatttgcaaattagcattaaataaagctaaaatacccaataatatattataaataaattaaaaagattgttcaaattaaatcaaaaataaataaattaaagaaagactaaataatcatatacttactcctaaagacagaagtgatatgtatcctaaaatgttggag

SEQ ID NO: 177601 - DNA, 760 bp, Cannabis indica
attttgttgaatatttgatattaggtataaagttgtaagaatagaaaaatattaataagtgaaattacaattttatctttttgatcataaatattgattacttttttttttcgcttaacaatattaattacttttctctctctctcttactataaacaatagatatgtgtggaaatggttagccattgatgaacatgaacctgcaacagagaaggtaaaacagagagagagagagagagaagaaaggaaatgaaagagtagcaaagatagtggaaagacttgattcattgaatggaaaatgttacagcatttatactagcaatacagtgataaaacaataacagaatcctaactgattcctacaactaactcaacaacatttaacacatgttagaataagctccaactaactctaacaacctaacagacttaactgtcttcaacaccccctctcaaactcataatcgaacgatcttcgattttgagtttgtgcctgaactcaccaaacctctgactagatatggctttagttaaaccatcagctaattggtcataagaggagaggtgcttgatctgtatggttttactcagaaccttctctctaatgaagtacaaatcaagttcaatatgctttgttctttgatgtagcacaggattctgagttagcattattgtgctaaggttatcacaccatatagttggagttggagtcagctgcaatcttagttcagcaaacaagtattgcagccatgttaactct

SEQ ID NO: 177602 - DNA, 564 bp, Cannabis indica
agcttcatgttgtagttgtggaggatctcgaagcatttgtctaggtcctctacatgcccccagcctttttggacttgataagtatgtcggccacatacacctccctattgcggctgatgagatctttgaacattttattcacaagcctttgatatgtggccctgcattttttagcccaaagggcatgactttgtagcaatacaggcctaagtttgtcatgaagcttgtacgctcttgatctgacgaatgcatctttatttgggtgtaacctgaatacacgtccatgaaactcaagatttcatgtccagttgtggcgtctacaagctggtcaattcttggaagcagaaagaagtcctttagacatgccttttttaggttgatgaagtcgatgcacactctccacttttttttgggtttgggtaccagcacaagattggatacccaaagtggaaagaatgcttttgtaatgaagttatgggctcatagcctcttgacttcatctttgagcgcttggcgcattctttgtctaacaacctcctcttctgttgtacaagtcaaatgttt

SEQ ID NO: 177603 - DNA, 544 bp, Cannabis indica
atataacttaagtattattaccataaaaattaaacttaaatatttatttacaaataatgattgaagttacgtatttatatagtaaattactctaaaaattatctaaactcttaggtggcgtttggttggggaggaatgaaaatataagaataggaatatactaaaatttaaaatgcataaaaaaattattaaattttttcaaattttgcattgtaatgatctttcctgatctatttcaaaattgaatagttattccaccaaaatgatagaaatgtcattccatcggaatggtattccaatagttttaaatgcaaccaaacaaaagaattgaataaaattatttccttttcattccattccatttcattacctccaaccaaacgccaactaaatatccttgcaataagaaatgatattcaacaataattttattttttaaaaaagtcaataacaaatgttgttgtttgatctttttttcatgttaaggatatataaattatggggaaaatctttgttgcactgggggcagccacatgttttttag

SEQ ID NO: 177604 - DNA, 708 bp, Cannabis indica
ttcgaaagataggcagaagtgattaatggagaaactcggtattgatcaagcatactagattagagaaccaagctgaaactgagatcaccttcttagagccaggacttgtgagcacacaggcctgcttatagccatgaagctgctgagttggaatgcatgtggcatcgggagtgatcatgcattccgtaatctctcccgtctcaccaatgtttgtaatcctaatattttatttcttatggaaactattctttcccaagttaggaagaggagggggactcttcttactttggaacaatgatgtggttttatctttattatctcaatccatgaaccattttgattgttatgtttcatcctttgctaatgttttcattcctttccatcttacttgtttttacggctttcccaatgagaaccgacgaatccacacatggaaaatcttgcataaaataggcaataacaatcctattatctcaatccgtggatcatcataggtgattttaatgctatccttaccatggatgataagataggtggtaatcccaataggggaccctctaacagtttgaaagattttttagtatcattttaacatgtccccattggatccacttggccccattttcacctggaataatcacaatgtgaaaaacaataacatccaggagcgcttatattggtgcattgctaatgcaccttggttcagcg

SEQ ID NO: 177605 - DNA, 617 bp, Cannabis indica
attattttatgagtttttttgctattaaattctctcaattatcattttatttatacttaaatttcaaaatttaatggtaaaacccgccaacctctactgtcgtctacaagagtagttttgtgccagcatggattatcccatacgtaaacaaatctacaagtgttacattcatattggtccatataattatacatatttaatattattaaaaaaattaaaataactaaaaatatacctctttcccgtaaatctacaagtgtcaaattgatataccttcaatgtttggaattgttgtaaaagactgcaaagttttattgtcttctttatttaatgtaactatttctcatgttaagcgatctgctaacaaggttgcccattgtttggctcgtggctcttgttattggtctgatcgtagtttttcggagagtactcttcctagtactctcaaatcgattgtgattgcggatttaaattaataatatcatccattcccattcaaaaaaaaaaaaaaaactatctctgccctagattataaaaaaaaatatctctcccctaaattatttaatattttcttcgaactttcttgctctcagctctaatggtgtaaacgacacggt

SEQ ID NO: 177606 - DNA, 554 bp, Cannabis indica
tgtttattccattcttatatataattttttttcgacacattaattttaaaaaattaacatttctttagacgtaaataatttttttctaccctttaaatttgtcatttgtcattttattattttaattgttattggagaacaaataacaataatttatttattttgttgcttgatatgtgaaaaaaaatatattttttcagatatataaaataatttaatattgaaaagtaacctatctaaaataaccgatctaatccatacttttgtggatctaatccatattgaaaagtaacctatctaatccatacttttgtggattagatttgattggatttgaactattgggcgaattggattggatccaaaatataaaatccgcacatagcgcaaatcagatatactacgaacgaaacaatacgaattagatgaatgaatatttctactagcggttttatattttttttttttgaacattattatgcattagtattgtttcacactataaggtgacactttgtatataggtaatagtttattataataattattaaatt

SEQ ID NO: 177607 - DNA, 698 bp, Cannabis indica
catcttcagttcagtaactaattagtacaagaaattaaggcatccttcagtaactatattactggtttttcaccttaatatataatctgtgatcacacttgattcttggccttctgctgaagctgcctacaataaagtgttaatctatatattagaataagagtaatactagacccatactcaaattacacactatttacacataacaatgtgtttatatttttagtcatatgcagttttacttgtattatcgagattaattctacatcattctgtgtaaaaaaaaaatgtatgtaatttgagtatatcacaatcatgactcgttaggataatatcatatagttataaatcttttagtacaataagttctaaatcccaccttcataaatatggctgcacatggaatcaaaaagttatttcttgagatgctatcttatatatactaaaaatttaagatgaaataaaatatttatcaacaagttatttgagacaataatttgtttcttaagtgttgctataaaatctttaaaatttaaactagcgggttagtgagaacttcccaacataagcatttcttcaaaatatttctactaaacatgtatagaacttgcaggttaaattctttctttttgcacaattcaaccccaatactaatttgggtagcatggttgatttactagaggaagaaggagatatat

SEQ ID NO: 177608 - DNA, 909 bp, Cannabis indica
gtatagagcaggattttgttgattgatcaagctgtgggcagggcctatttcagattctacacttgtattgaggaatgtggcaatagagagcctttcctgcacagagtttactattgctctatgctcaatgctacgatacattccattagttataatctacaaccatcatatgcaaaagacaaattaatgaaacaatattacttgtatttgatgaataataattagtgggttatgagttattacctctagaatgtctcctatattgacaataaaagcatttgggagaggcttgacagggacccacatgccatcttttttgacttggagtccttctacttgactcacttgaaggagaatggtaaggcctacggcatcagagtgaggagtgagacctataacttgctctggttcagggcatggagggtaatagttcattctcatcgattgcattccatcttcaaacaacttggaaatttccttgctttctattcctaaagccttttccattttggagattatatctttggctagttttgccaattctaatgaaaaaagttccaagctttccctgcaatattcattgactattgttaaggaattaaacaaaaaaaaaaagaaggatgaagagaagaatttttatgtttttctaataaaaaacctgaaagtaagagggaggtttggaaacaagtgaggtttcctcaaagcaagtggtaatgtagtgagaaagaaaatatcattccagtcaagcttttgttcctcagaaactacaaaagcttgtccaaacccttctacttctcctggaatctgccataactttttcttctcctctattggcatcttgaacaactcttccacctctttcttcattttctctaccaaagaactacttactccatggtttaccaactg

SEQ ID NO: 177609 - DNA, 541 bp, Cannabis indica
attaacactatgcaatgcattaaatgataatttggattctataatttacaagatgaatcaaattggtattttcacatcaattttagtctaataagttttaagaaaattcatgccctcagctcaattttctatcagtaatttcagatttacattgaagaaacactattacaaaagtcagaattcgtgacggtcctaaaaacgcttttataggggactgtcgctaaaaaaaacaactgtttaaaacagtcgggaaaaattagtattcccgatgatttataacagtaattacaggaatagacgatggttttaaattggaattcgtgaatttatttggcccttatacctgacggtttaaaaaccgtcgcctatattaaaccgttacctatactataggcgacggttttaaaccgtcaagtataagggcccaataaaaaatcgttacctacttctcgccacatttctacatgtgcccacctactcttttctatttcccacttgcacacctattttttctcacttattttttctccatttcccacac

SEQ ID NO: 177610 - DNA, 811 bp, Cannabis indica
agataagtaatgttctctactaagtcatgaaaataagttacaaaatgagtagaagacatagtattgattgcatttgccaacaagagagaatccgtttcaatcaagtggatggagagctagttgtgaatggcccatgttaaactgtgaaatagagcagcagcttccatttcttttggagtaaaaaatccatgaaaaggcctaggaaaaccagcaacaacatcacctaaatgatctctaattagagcaccgtagcctaattttccagcagcctgatcacacgcagcatccacatttaatttatgcaaaccagcagggggagatcgccatgtttgaggattccttgtagcagcaggaacagggggaggtgttgaaaattcagcctgagatgatacaccagcagctgcatgttttggagtagtggctttgtgaaactgagccaaataagatgcagaataagagcacaaaacagcaaccggtttgggcttagtaccatggatctctttgttcctttcagaccatatactccacattaaacaaactatctgctctaattcgaaatcattgtgagcagctgcaaatgtaagaaaaaatatcaaaacctttagcattacccatgtttggcatatgaattttgtattggaattgttgccaaacagcctttgcccttttacatcgaaaaatagcatgtccggatgttttccaactgcattgacatagagaacaagcattggaagactaaacttcctatgcacaagattaacagccgtgggaagcgcttcataatgaatctcacaaaaaatctaagtttttt

SEQ ID NO: 177611 - DNA, 699 bp, Cannabis indica
tttatccaggttcggccaaaaacaatgcctacttcctgctaccccctttggtattcattccattcatatggttcaaagttacaatgaacatcaagttagatacacagcctcaaagtttgtacaagagataacccgattctctcactcaagcactccaagaaactcgacttggacagtgccttacatcataaacatattctcatttaatttaattggtttcatattgctctcaagactttgtgtcgttagccaaaagttgagattaacattttggtgttttcattgagagcattaaactcaagaacacaagcgaattgatcttgttcaattcaaatcacaaatggctgtgacaactcaaatgaattagactatggtgactgatctgaatgtccaaactcttgcaaatctgagaaattctcatgcgaatgattcaaacaacacttctcttggaattggtattactgtaggcactcaaaatactgaaactaccagtacccatggtgttggagagactagcccaattgccggagggcaccagttggtgaacatgaggtgacagtcgatgatgataccaaattgcataatttgagggaagctgtgtcccaaatttggaatcacactaacacccttcatcacgatcaggcagaaacccgagaaaccgtgaatgaatattttgcacaacaaaagaggcttttccac

SEQ ID NO: 177612 - DNA, 529 bp, Cannabis indica
tagaaaataaagaaaactcacttttctttcttaactccctctctctctcgaaacccttggagaaccagcagctttttgtggttcatcagcttgtttgtgggtgttttaacaagtctttagtgaatccaaaccaatgtataactccttagcccttttcttttttggtttcttaagtttcaagctttgttttgcatgaattgtgaattatggttgctgtatttgtattttgcttttggtggagtgttatggagttattgtgatgttaattaagctattttgaagctagttggtggcttaatttagtggttagacaaagtttaagttttagaattcaaactttggtctttaatggtgatttttaattctgagtaggttgtgatgttttgttgcttagaatatatttattctagtataattagcaggtctggaggttatggtgaagtttggggtcgaattgagggtgtagtgaacttttaagttttccctacactgaaccggtctactggttggtccccaagaaaccccacag

SEQ ID NO: 177613 - DNA, 868 bp, Cannabis indica
gctcattagtgttatcttgatttttgctcacttgatgtggcattactacgtgaacaaaattagcgtcatgtggcaatacaactcaccaacaagaaggtcaagttacatcttagcaaacggggaccctgacactcaaacaggagatcaagggacatactagcttccccaaagaagttagccgaccacccctggtcggccctatgatcggacagcttctaaacaacagcaaggtcgaccagcctgctccttacagatgtctggccggcaagggaaaggtctggcagaattttctatacaattctatccgtggactgtgagttgggataccaattaggccctaacatcccaataaaatagatggaaaatatctatgtttatgggcattttagtcttttgtaattaattaatttaatatataaatatctaagggtttcaattgtaaattagggtttaggctttcctatataaaggtgttagaatttgaggaataagatggatgaggttccatcccaaaaccaattggcaatgggaggagtagcccattcctcttatatattctattatctttccacacactggcaatgtgggactctctaacatccccccttaagatggtagctattttacttcctcaccatcttggacaactcgatcataagcggctctattttttagctcactatccctgatcacaagtggctcgttttgctatacttttcggatcggtatttttggatttttggtggctcttttttatttttggctcactatatccccgaatcacaagtggctttttttttttgacttcggctcttgaatcaattttttttttggatttttggtggctcttttttttttttcagctcta

SEQ ID NO: 177614 - DNA, 695 bp, Cannabis indica
gattttaattattttgataggtattggtgctggattggaatcaatgacggtgaatccaatggcgtgggaaggctcggtgaacccaaaagtaagctgatcttgttttttttcactttctttttttgattatcatcaactaagctgaactcctgctgttgggatcttacaatcttatactttgatgatgatggtaggtcaaaatctttgaacaagcccagaactgccttcttccaatggggattacctcagaaaatgttgcaagtcgctttggtgtgtcaagaaaggaacaagatcaggctgcagtaagttgaataaacatgtttggttttaaagttgcgatccaactgttaacacgtgttttattaatttcatatggtttatgttgttaggttgagtctcatagacgggctgctgcagctactgcttctggtaaatttaaggatgaaattatccccgtggctccaaggtgtgttttccttactctttttcttaatattattgtattttgcggatatgattatcaatattattatcgtatgtggtccatttctcatttatgtgggctttgtagattgttgatcccaaaactggtcaggagcaaccagtcacaatatctgttgatgatggtattcgacccaatgcatcattggcagatttgggaaagctgagcctgtgtttaagaaagatggaaccac

SEQ ID NO: 177615 - DNA, 609 bp, Cannabis indica
atcaagccttcgttcgtccaccgcaagtcaaccaacccagtccatcgtcatcaaacacttttcatcgtcctcaatcaaacaaccaggctagtagagagccattcccgattgcagtctcgccagaagaaaggtcaatcacatgctcgtggttggaggatgcatgatcggccaaacagaagcagttgtcagaatgtcttcaaaagcaaagttccttccacattgtcgatcatctcaactcggtgactgtaacaccctaactatcttaggcgtattacgtgatttttaaacgtactgtgcagctcgttgctagtcaacgaggtttatggaaaaacgtgattaattaaaattttgctttttcattaaacttataaaccattttgcaaaaagtctcgggatcccgatttataaaaatatttacaaacgtttactttacgttgtacttaacttactaaattaaaagtaacgtcgtacgtaacgacgtacgtaaactaaactctacgccgtccgtcgtcgttcccggtacccgggaaggtacgttaccggtaccgtccctaccggaccggtaaccccgtaaccccccggaccccgaacctagttacgtaaactaac

SEQ ID NO: 177616 - DNA, 791 bp, Cannabis indica
gtcgcatgggaggaagcgtgttgggactgcaacacgcaataaagtctgacggcacaacctccaaccagcagcgccacagtaatgatcatttaagtctagcgacggctacactgcgaagagtcacatcaatcacaaggcaaaaaggacattcctcataaaaaccctacagcacctagggatttgaccatgcattactcatggtatattcattgggaatacccaactttatggatacttacagatacacttgtaagaacaattctagggattaccccaccaaaacactataaataccccctcaaagctcattaaatgggatcgagaatcttgggctgcatatgagcaagaagagtaaatactcaccaagaacattctctgtatttataagggtgacattctcccaagtataaaatctgtattaaatacatccataaataacaaagactcgtggactaaggctcattaacgccccaaccacgtaaaaatccttctctcactttcttacagctcaatagtataatcatattttattagttgccgaaaacctcggtcaacactagccatccatattattagcttccaaaaatagaatttgtacatatcatcttctctgagaaactttaacgagtgaatcaaagaaactaataacatgaacatgagttcatgattactcaggattcatgtcgatctactaattgactcatcgttgtgatgtgaattgggcctttatagcaaacgatatgtctgataaagataacttcggtccatatcatatataatttctattaaat

SEQ ID NO: 177617 - DNA, 613 bp, Cannabis indica
tgaagtacgtcagttgttagatggggagttaattatttgatgtgagggttggggttgaggtaattagggttaaaaaataataacataccctgagacccatctaatgtaccacggagtacattccgtgaaagtacatcacaggacaaaatcgtgtccctatatatatacatttatatacctggaagaagccccagttcttgcatgctgagtggagcttagtgagttcagattcatataataattcagaggtagacataagcaacaagttttggaagttgataattggaatttgatcagaagagacagtagggctgagaatagtggttttatcttgatgttgatcaaggcggatgtatctaggtgggacggtcaccatattgggatcatttgccaattctcgcacacttggaacaatcacatgagagcttccaaactccattatatttttgttacttctacacgactttgaagaggagatcaatgcaagagtacatcttcaatgtgtccatcctgttcctatatatagatataaattataatttcgtaaatggttacatacagtaaagattttgactaaaaaaatattaaaaataatactaaaataataatatgt

SEQ ID NO: 177618 - DNA, 886 bp, Cannabis indica
gaatctgattgtcaccattgtcgatttgggtagtggcttcgttgtcacgtcctgttccttgatcgtcggacatggctggacagaaagaagctggagaagcttctcaagaactcaaagagaagtctgtgaagggagaagaatgtcgattgaagaaacgaattcttcaactgcggacatcgaacgtcgccggagaagaacagaagacacggcgaggaagaaggaaaaaggatcaagatcgaaaggaagtatagcttccttgctctgataccatattgcggaagaaaggataaacattaaagtggttttattgaattgaatgaatgaatgtttacaaaggaaataagcctataaataggcatgaatgaaaagaggaaacagatctcctcaaatcagggagagccgttaatcaagggaccaaatcaatcaacaaacttaacagcctaaacagaacatatacaaccggtatatgtacataacagaaccactaacagagtataacagtaatacaactaacagtaatacaatattcttgttaataatttatagaaaatgaaattgtattactaaattttagtttttttttttttaaaaaaaaaaactaatttttatatttttagcacataagttataatctttaattatttagatcctaccacaaaattttaaattgatatatataatttacgataataagaagaaataagttgtttttattttcaatataataaattatttaaaattttttactatcatatcacaaaaaggaattgcatgctgaaaataaagaaatgtttttataaatattgacaattaatttataaaaatacaaatttataaatattagaaaattctgtaatgcaccctttaaaagggatgcattgataca

SEQ ID NO: 177619 - DNA, 542 bp, Cannabis indica
attggggatatggtcttaagaagagtcttcatagccactcaagaacccggagtgggggtacttgggccaaattgggaagggacatatgaaatcgaggatgagatcggctccggaacctacaagctaaaaaggatggacggaaccattgtgccaagagcctggaacgccgatcatctccggaagtattaccaatagtccaaatatgttaacttaggctttgtttaaagaatttgtaccgtcaaaatgtatgcaatctctaaaatttaaaataaaacttagtgccttaataacaaagttttcatgccactcaggggggtactaaggcataccgcatagacagatgtaaaacaggccaagagtaaaaacaaagtcaaaaagaatatacatcaaagtgatcatatgtatatgtaaaatatcctgacccaaagggcgggtccaaaggaaaaaatatgcatcaaaataatcatatatataaaatatcctggcccaaagggcaggtcaaaaaaagatatataatacaaagggcccagggacaggccata

SEQ ID NO: 177620 - DNA, 709 bp, Cannabis indica
cataacgtggaagtccattattttctaatatttgtgggtcaagagaatcccccatttatttatatatatatatatatatatatatatatttatagagacacaattttgtcgcgtgatgtatttttacggaatgtattctttagtacattagataggtctcagggttattaaatgagtgtcagtgtacgttactattttgtaaccctaattacccctagatcaatctcagctctcagatcaaatatctccctcatctgacggttgtcgtacatcacataatacattccgtaaaagtacaactaccggacaaaaaatcatgtccctatatttatatgatcgatcaaatgatataattttatttctttttcttctttttttgtaaaagtagtgatatattcaatgcatgtgcactacacaatactagtacgttgtggtataagtattttttttcatacataattttaaataaatctaaattggttatagatattttatatatatatatatacacatatttagtacaatttcgtttatataaattatatataggaaagcttttttttaacatgtgatctcttagagcttttctaattttagaaaagtttttgaagattattatgagcctttatatagatgcatggattattttttaatgagtaatattactaaaaaaattataataattaaatgttaaattttaaaaaaaatt

SEQ ID NO: 177621 - DNA, 1090 bp, Cannabis indica
cactagtgtcttattcataacctcaatcaacctatatttaatgaactaactaatattctatctttaggtgtgctttttactaaaaacattactactaccaatgcgttggccattaaataataatattcgaaaaagatctattcaactacgtggacacaccaaattcatagacacatgcagctgtttcgttcagatagatccttccttggtataatataatagtataatttaatttggtgattgaaaaaacaaaggttgtttaatttgtataatcacatgcttataaattcatcttagggaatcttgaagaaatcgaacaatatcttctcaatttcttccaacgatggtaccttgccaaaccctcctatcaacataaaatttaaatctatccaatttggttggccaaaaaagaacatgtatatctgtatcatccttgtaattgtaccttcatttttcagattatacatataatttttttttgtttttaaaaaaaaaaaaaaagtagaaaaaacagtaaaaattctttgaatctttcaaaagaatttatcacttacacacgtcaacaaaacaaattaaaaatttaaaacgtatataatattgattttattagtatttaatagtttgcccaccaccgctttgaaattgaataactttattactctttagtccattgtctgtgtttctcccctatatttttgactagaagtaagttcattattctagttaacttagctacctacatatctgtcaacctgtttaattagaggaaaaatatatgcttaattggtcaatgtcagataatgttgatttatcacctcataaattgtgcttggaatattaatatataaatatatgtatgtgtgcatataattaatatattctcttgatttgctacttcaatacctataaaaagtgttttatgttcccctggttgatattatattaatgaaaactttataattaaaaatgaccttaattaatgaatgttcttaattaatataattgtttaatttaaggttaaatagtttcctagagataatatctgaaaactcaaaaattacaaaaagtaaaatagggtctaggattagga

SEQ ID NO: 177622 - DNA, 673 bp, Cannabis indica
ttaaaagtaaattttgagaagttaaaaaaatgtgacttgagtcaaggtcgacccttaggtgagtcgaacatagtatgcatcttgggccgcttaagggcccaaaattttaattttgtcttaaccccaaatacattaggactcgccctgcccatagattctatttagttttggacatgtttgttgtatttttatagggatttttacactagaaattttcaacttttttacttttttattactgtagagcaaaatttctttaaaaaatattgtgtaagttttatactatgtactgagttaaatttttacggttgttttttagttgttcctaccattgttttaattgttttgttttgttattttacggttgttttataaaaagacagtatttttataaaaaaaatactagtttgtaaatttttgtccaaaattcaatatttttgtaaaaaccctattttatatctattatacatgtgatataatataaaggaaagtaaagtattattttcaatttcaaaacgttattttttttttcaaaattcaatatttatttttaataacatatatatttaatgccatgaactcacatggcacatgccaaatttcaataattttgttgttccgtcgtgtgtttctgtgaagaggaaattacacttagtatgggattttaaaagtc

SEQ ID NO: 177623 - DNA, 691 bp, Cannabis indica
acatatataaatattaatttgtatttagtgtggctaacacaatattaattcttcttatcattatttttggtatatagatttctcaaaacaaaccaattcattacattgagactactttcaaaaaaaaaaaaaaaaaaaaaatacattaaattgagacgactctcttttagtggtcaaaggattgcattcttcaaaattcatgtctctcattttcataatttgctttaagatatttctattctcatgtctaatttttttagagtttagttctcccttctttttacatctattaatactattgctcacattagcaaagtaactttttcggtggacaaaaaatatatttggatggaggaattactatctcctatctcctgtaatgactattgtattataattcacttaatataataaaattttatctaaaaaaaaaaaatctcactttaaccaaatatgttagaggtatgttggaaaagacaacttttattaatcaattaatcaaatttacctctaattttatatttaattgaaacatacctcattttacccaaaataccctgacataagagagtcacgtggagagtatcttgaagtgacagggaccaaattagtacaatgtttaaaaaaagaggtaaaaatgatagactttaaaaaagagggtaaaaataaaataggacaatataaaaagggt

SEQ ID NO: 177624 - DNA, 539 bp, Cannabis indica
gaaaccatataaaaagctcatttagcggtcaaccaatatacttttttcaaagaagtttcttttatttcaccatttcacactcgtccaagtactttcttatgggcaatatgtgaaccccaccccaagcatcaggaccggttttgagagtaagcgagttaggcgtgcgtctcggacccccaactgttcaggctctcaaaattgtaaaaaaaattattaatatatagataaaatattaaataaaaaaaaatataacaaatattatttagtttaggggtaaaatattttactttaagccaagaagtaagagatcaattcttaatctttattttttttataaaaaaaaatatttattgtgtaactatggaagattgaaccttataactcttaagagttctttcaaattttaccattacactaaaatattcaaactattattttaataataattaaattatatatagggacctcaaaatttaattttaccttagactccatataccttagaaccggccttgccaagcatcactggacacatcaca

SEQ ID NO: 177625 - DNA, 509 bp, Cannabis indica
agtaaattttttttatagtgatgtgcttttacaaacttttgttttctttcttacttatctattggtttagaaaataaaagtgtagtttaattaaaaactttttaattaagttgaaataaaactttcatactaaataccataatacggggatcccctgtttataaatatttttacaactaatttacaaaaagactattacaaaatcaaagttacatttccaaatatatatataaaaaaaagggttgatcttgcttcccagaagccaagacactaccgctgatatgtacactgctgggagacctctgactcatggtcgaacgatatctgctattctttttacctacaccatgaagcacccgtgagtcacaaatactcagcaagaaaagctacttgacaaaaagcatagaaagtactagcattaatatcataatacataccagtggatcattacacattcaccatgctcaggtgtattcaacttaacatccaagcaaacacattcatattct

SEQ ID NO: 177626 - DNA, 615 bp, Cannabis indica
ggaggctgcacgtgcagcccagggaggctgcacgcagcctcggcgcgcgcggacagaggaggggacgccgagaaaatttaggcatctgcagcatccttgaccgagaaaacttggtcagctgcagggtgatgggcgcgcggggatgggcttcccagtccgactgcttggtgctcacgagcacccactcgacaccatgaaacccaatttttccaaaaatcataactttctcaatttttatcggaatcgagttccgtaaaaaaaaaattgcttaatttttcacaaggaatccaaataaaatattttcaaaaaacaaaaaaaatatttttacatggaaaaagttttgtacaacacatacattcatcaaaccacaagaaaccatccaaatcaacacaaaacatcgttttaattcatatttcatgaaagtaaatcattaacatagctatgataccagttgttggaaatattttaccaagtatctagatttactaccatgtatgtttcatttaacatcctaatatgaattctaaaacaatgaaataaacacatataaagttttaggaaaacccttacatttgggtgcagcagaatataatgactcattccgttcatatctct

SEQ ID NO: 177627 - DNA, 892 bp, Cannabis indica
caaaacattttttttttccagtcagaaaaacatagttattttctcaatcaaaaaccaaaaccaacgaaaggataaactctcaattcacttcactttaacccaaaccttgtgtgtctgagctaaaccaaaaaaaaaaaagtatggcataaagaatcatatgtacaaaaattagacgtcacaagtatttttcttattgtaacaggtggctgtggtcaatataaatttaaatatatatttatgggaatctatggctttcggttcttttaagattcgtcatgccataaaattgtcgttttctttaaggtaaaagaaagtaactttattgggtcaaaaatgtagttaataatgctaaattttaaggtctcgctgttaagaaaattttcaattagttttggaacttttattattgtctttctctgtaatgttgtaatagaaaatttagagaggttgaggtagtaccaaaaccacagcgtagtgatgatggaatgaaagagacctcctgcgactgactcttcctgtttccatttataataataataatgtagccgttgaaatggcgctatcatagtttgggcggctattcggtgtgaagtcaacgtgtacctatttaggatctgttaatattctatttttatttagttatttattaattttttacagtgaattaaatatgatagaagataattagattgaaagtgaaccacttctcacttgaattttctattcatagaacaacatgcccaagtcacgtattactagaaaacagagaatacaggacagcatgccttaggaaagtgagagtaaaacttttacataacagatacctaatagacttgtaattctaacaagcccttagaagttaaattttggtgaagaaaaaaaaaaaaaaaag

SEQ ID NO: 177628 - DNA, 533 bp, Cannabis indica
atttctctttacatgttatatatttgctatagtaagaaatggttagttttattttgttttttcaaaatattaaatctaaatttaaattcagtacacattttttttattgtgtatatttttttaatattataatttaaatttaaaggaaatttctttttataggactgaccattggttggtttagtcgaatttagtttttggtctgaattggtgtaatttgaaaatttactgaccaattcaaaacttattttaaaattgatcgttttgaattttggtttggtcggtttgaaccgatctaatttattctataagcacatcattttacaactatataaattaattgttcaaaaattataatcttattcttttaactttaatattaatataataataatatattattatatattatgagaaactacaatacataaaggaaaaaaaaattaataaattaatatacatgtttaacagttggtttattgtccaaaaaaaaccgaccgttcaatggcggttttaactgttagcaccttttc

SEQ ID NO: 177629 - DNA, 556 bp, Cannabis indica
aagtgttattgatcactttctaataccgccactaggcataaaactagctttgacttcatatgccgctatactatatcttctcaaatttcaaagcagcaaggcttataaaaaaaaggtttcaagagtgaggggcaaatgattataaaacatcaaagaaagtttgccaaaacataaacctgcaagcggtaacccgatcagcagtcgtccactcaggtcttttctcaacaaagtcatccccaaagtttctatttgatgtcattcgacgatggaaatgagttactttagttcttagacatggatgtgtcttaaacgctttgaggaactctttctctggcaccctgtacagatgattgtgacccttatgtaaataacaagtttcaggcacaaacaaaataataacaataaaaataataacaaaatcagataaaaactataacaataaaaaaattcaatgagaaatcataaaaagagttcagtcaagtaaatacttgtgatttgtgaacttttttagagttaagtattagtaagtcattagtccttccactcaattaaatac

SEQ ID NO: 177630 - DNA, 683 bp, Cannabis indica
gcttaaaatgaaaaatgaattgtatatgtgaggtttcgtatcataaaatcaactgataaggagataataaaaaattttgattttataaatagtattgtataagtttttttagtatattatcagagtgtctgtattgataaaattagagaaaaattacagttttacaaacattaagtacttatgtcgctaaaaaagaatattggatttatgctctttataaacataaaactttaagcacttatgccactataaatccaaatatatgataatgagggatgagggagaaggtgaggaataataccacgtacataccaaagtgataaaaagctttaaatgaaaaaaacctacagccactttcatccaataataatagaacacgtgtcctatcattttcaatgtcaacttctcttatctttcacctacttctcttttgccgacacaaggtaagggagggccgagctttcaatttttaggctatacattcatcaaatttatttttaaataaaatttaatttaaatatactcttttataagtattgtatctaaattatcctcacactctcacttaaatagatttgtattatttgaaaatagatgcgtaggtttgttgagaaagttggaaaaaaattttaatttaaaaagaaaatgaagactatcgcgaagtgataaagataaaattaggt

SEQ ID NO: 177631 - DNA, 623 bp, Cannabis indica
tagatcgagtagatgggttcattgagctcgaagaagctatttgacacgtggatattgttagggcaaaagaaaatcaacaacgcaccacgaccgcatggatgtccttacggaatccgtaatatcccaacagtttgaatttaaatgggaagaggtctaacaacaacaacaggaagggtaatggaaagaaaggaaaattcaacggcaatgccaagcaacacccttgagaaaatgcctctaaatgtactgctttcgttgtcataacaaagaacatagagacaatctatgcagcaactcagtctatggtgtcgtacaagaacccatctttcatgaaaaaggatgtaagtcaaaagagaaacaacaaagtttttgccgcttttcatgtagattaccgccacgacacaaacgaatgtaataatataaagcgagaaatttagtttttaattagaaaaaatatcccacatttatagaagtatgtcaaggttgaccaaaatctaatggccgcccaagcaaacaataccagaaccaattgatgcccccactagtggacgagcatttacaggtaatcattgggggtttgtatcttgctagagactcaggcaaagctagtagaaaattatacctaa

SEQ ID NO: 177632 - DNA, 509 bp, Cannabis indica
ttacaaactactcaaagttaagaagacatggttctataactttgtaccaaaacatttataattggtgaaataacaaaaccgatttgatgagtcgtttaactaataaacgacgtgtcgtttttttcgttctagttgtggtcccgtctttatagtcttttttttcttctattttctaatgcttatttctatcattcctttatacaattttagtttatttgaaaaaaaaaaaattactagttgatcatttagttcaagagcgataaaaaaaatatttaaattgaagagtgatattagaacatctcccggagttattcataggagttgtcttctacatatgtaatgtgatctaattttaaagattaattttacgtaaaatattgctcaatatggaccataaccacatgttattatattttttttgttgaaaaaaatttactttttactaaaaagtcattaatttaatattatgtgtccataatgggcaaaagttgtcaactattagagtattt

SEQ ID NO: 177633 - DNA, 700 bp, Cannabis indica
gcacacagcaagtaggaatgactagagaaaatacaaaaaaaaaattcaatcctaaataatttccaaggttttcaacaaactgatatcagtgtcccgtttaggcgagagtcaaagctatcattcattgaatagagttgtcagctcatctaaaatggcaaacattctagcaaccttttattcgatcgaaaagagaatccgacgttgtcccgtttaggcgagagtcaaggtcattcttatttcatgagcttctaccattgtttcatatgtttgtaagtcttatacagtacccaccattagggtgattaataccaatataaaacacttacaaacatacttatctttcgagattaaacggcgctaacttgctaatgaacgttcctccattagggaggattactcactaaaacaatagctatgtaaaaccaacaatggagatcgaatatctcaaaataataaagctcattatttaaattgtattttcttctattatttatttattttaaatctatatatatatttattaaattttaaatttagaatagaatctaaataaaatttaatttaatatttgtaaaattaaacttagatggttaagaaaataaatagatattcatcttagtgtaatttctacaatattagaaatactattaagtgtatattaataattgcaactcaataaatttacttcaaatatatatat

SEQ ID NO: 177634 - DNA, 558 bp, Cannabis indica
gtaattattaaattacacttatttatttacttatggtaaaatttacaatttatgctaaattaggttagcaggatcataatcctactcattattacttaattaacacataatgtataataaatcctaattatttataattaaattttcgagatattacacacacaagactgggcgaacttgcctccttttgacgctacttggaaagattttttgtcatccaagatcaatttcctaattaacaccttgaggacaaggtgaaacttgtagagggtgttgacagtcctccactcacttttctctattttggaagacacaagaagactactgtgagggacaccacagggggattaagggtgtggtgacttttcggtacattcggtcacctagaataagagttaggaatttctgcgttgaggtatgaatgaattcaaaagtaattgtaaccattatgagagagaaccttgcttttgaagtcctgacaaatttatgaaaaggctaccacccatttttatcttctctattctacttaattttttactactaattgaatttggatag

SEQ ID NO: 177635 - DNA, 657 bp, Cannabis indica
aacaatctcaatagttcagaaagcatgatttggtttatatcaaaatttggagacaaaaatcctaactagtctttctttattcaacacaaagtattctccgtcttgttataattttgtgtttcattaagagagagagagagcataccttcaagagtgaaacattgaatttgaatggaacatcatttagagaaggaattttgtaactcccagggccacatgtgtataggtgacctgggagtatccacttatgagctggatctccccatttcagttcttctaatgccacccaacccaaaccttgcatgaaagctccttcaatctgcgttttcaagtatatcattcctttatgttagcttaatctaattctagatttgcttgcaagtgtcaaaatagtaggatatgaaaatgatgatataatatgttgttaatagagatggaaatttatactgcggggatggataactgcagagccccgcccctaaaggagcggcttggcggttaatgggtcggtggtgggggtgatttcaataccgaagcgaggatagggcgggattggagataatactatccgtaccatattcgatatatatatatatataatttcctttaatttttaaatttaaaagttttttcaattattttaaattattatatatt

SEQ ID NO: 177636 - DNA, 645 bp, Cannabis indica
attaattgattgtataaagttataatatatttttaatacactcgatcccaacaccaactacgagtccgattctgggtccgggtccaggtcccgggtccgagtcggagattggtgttgaccccaaatcctttgtaaatattataatacaagctaatacggaccatttattgtgtattaaataatacaacatacatatattaaaaaatttgatcctaataattaatacaatatattgttttatccatccatagtgttatttattatttaatacaatacgacccttatacgacgtactaaacgagagtttgtacgtcgtattacactgtattgtaattttatagtattatattaaattgtattttatgcaatatttttatgtaaaactatgtgtagtattaacttttataacacctaagtatataatattttagtataaattaaaatttaacatagtattatataaaaatatgatatataatccaattcaatataatacaatacaatacgacctaatacgacgttcttaacgagtccttataaaccaagtgaaaggggtattcattattcggttctattctttggaatttagagattaagtggtagctagaggatactctttttttgataaagaaatatatatatata

SEQ ID NO: 177637 - DNA, 552 bp, Cannabis indica
ggatcctagactagacctgacttaaataaaagcaaaaataaaagtagttacagaatatatttttaatttttaaaaataaaattttaaaagcaaaaaattttacttttaatttttgtagattataaaaatttaaaaaccaaaagtgttatcaaacaccacttatatttctgtctttgttccggttccaaaaagcttaatttctaatttaattatggcatgttgcagcaagattcagttgctcaaactcattacagcatccttctgcagaatgcagagacagttgccttagtttcttcgtgccaaggtttatttgtttcgaatttcacaacaaaaaactcttgttggtcatatttcacttccattagtaacttgatgtgttctgttttctcactttctttcagcaggaaatgaggtggcaaaggctattccagtgagctcactaaaagttggagatgaagttgttttgagagtacagggtggggctcgacacactggaatagaaattgaagaatttattgtcgaaaattaggaaagacatatggcttcttaagt

SEQ ID NO: 177638 - DNA, 725 bp, Cannabis indica
gaaaaaacaagttaagagaattggatgactaccacaaaataatgtctaataatgcaatgaacgctaagtggcccttcattctcctcattttgcttcttataacattacgtttgtggaactcattatgttttcacatccacgtccaatttatatttgacatgatcttgatttgatatatatatatatatataaatatttataccctgcatttataatggtatattgatctagaatatatattattcccccgcgtcaaggccaaccctatagaaaatgtataaagggatttaattttattaaatttatgtttccaatttttcttcaagcatatactaattaagttggatttttacaattgataagaatatatgtatgccagtttaggagagaatactgtcttgtagttattgtttgggtcaggttttgtttttagtttttccctgttatattctttcttttgagggtcgtatttttggtcaaaacaaattcagacaatcagatatagagcagtggtcctatatacatatgaaaattaattgtttagaaatattatattatataacaagtttgggatctggccataaccaaaaaaaaaaaaaaaattaacaatataaggttttataattttcataaaaataatactaaaagaggaataattaagataaacacatatataggaaatgaaacatccatccttatcatgattattattcacaaatgaagcc

SEQ ID NO: 177639 - DNA, 529 bp, Cannabis indica
aacttgccacttattctactcgtggaatatagttcaaaggagaaaaagaaatatctctgactttatgcattgttgattttattattttttttttatttctattatctatatacactgtcagttaaattaaattgatggacttaattatacgtttaatataatctaaaacaataaataagtatagaataatagtttagcaacatcctcctattataataaccataaatttgaacctaatttaaaccttatacttcatttatttatttttataaataaaaagtagatatacatagaaaaaataaacaataaaatttaaaatatggtctctcatgtaaatttaaagtatcttaatcaattattttattttactactatctatatattcaaataaaaattatatattaatgtatttttaaattttaggatagagacttcagccctccctcacatccctagttcgtctatgtacccaatcttatacgtaaatttataaaataaaatttcagcctactccatctaaaaagaatat

SEQ ID NO: 177640 - DNA, 1198 bp, Cannabis indica
cgggtagtcctctgaagaagccgaactccaacggagtgaagaaggaggagtagactgcccatataagaatgaagtgtgtccatgccatgtaccacctacaaaattgccccacaaaaaccattattattaggagaattatctatacattattttttagttttttaaaaaaaaaaaattaacgggttgctctagtagtttctccagtgatttctatataagttgctatacgaattttaattgtgaatcaggttgcttcactagttgctatagaagtttctatatgtaattttgtaaaaatacaaaaaaaattattttgaattgtaaaaataaaaaaaataaaaaactccttattattattattattattattattattattattattattattattatgaatcaataaattaaaaactctttttttgaactataaagcttgagtatagtagcattttatgaaatttacatcaattacaaatatatatataaaagaagaaaatattaaaaaaaatctcctatcaaatttatatagaacatttttcttcattttttctctgctaatttctatcataatttttttctaggtaaaatccaaattaaaaaaaaaaaaaaatagcctcacactttgacaagtgatcaaagaaaatgaaaagtgtcaaatagcacttctattgcaaatatgtgttctatttatatacatagctttactaaaaaagaaggattaactagtcaaaattaagtgtaacttatgaggttaaaaatttccaactaaaagcactatttttctttcatttatgtacttatttaattaactttcatgcataaaccattaaaattaaggtaagaaaaagaaaactaacattatgctaacaataataaagtttagttattttttttctttcttttattctctaaatgcaaatgagtccttcctaaaaaattcaaacaccatcaactattcatatatgatcattctcatcaagtttttcaaaatgacaataatagtaaattaatagccaacaaaatataaatgatttctttaaaattatatatataatgagcttaaaatatagtgttatataaattataaatatatatggatataaatatttaaattaccaattatctggatgaatgactaacgatccaaagttgaattggaattggaattgtgtatagtattttcacttaattcaac

SEQ ID NO: 177641 - DNA, 684 bp, Cannabis indica
cgtatacttagcgtagacgtttaaaaatatagacaacacatttattttacaaagtaaaaaaaaaaaacatttatttttacttttacttttctgtagctaacaacgtaaaaaataacggaaaaaataactactatttacaaataaataaattaataaaaattctagttttaaaaaaacattaaaaataatttaaaaaaaaaattatgaatccataaaaatgaatttttgagatagtatttataatatgttaattacattcactttaattatataatagccgactaactggtcacctcaaataaaacatataacacacatgaatacaaggaaattacaatattgtatattcactctttatttttattttttattttattttattaacttttatttatactcaattttataatttatattcccgtgtgggttagaaatctaattttgataagttttgtaaaaatatttatcaattaatattattttcgagttatatttagttaatttgtaataaaaaaaaatgttttcaacttatcccttcatttattttcatatataatttttttcaaataataatataaaaatggtgatctatcacagattattacatttcaatttcaatgaaaaagaaagaaacaattagagaattaactgaaattctaaattagcgtgcgagaggatgtgatt

SEQ ID NO: 177642 - DNA, 915 bp, Cannabis indica
agatctttttatctgtttttagcaaacaatgaatatatgactaaaccatatgcacatatatataaaaaaatgtaatcatatcatcatatcatttaatttcatttctctgcctaatcatatcatcagattatgtttttggtaatttcattctatggtgagttttaagcataaattgttaaaaaaatattaaataaaataaaaattgagttagtaattcaagtatggtggcatcagtgtaaatgttagaaatataaaatttacgaatcacttagaatcagattttttttttttttttacattttatagatttatattaaatagtgtaaatattatataaatattaattgaataataaaatcagtataaaataattttaaatttaattttatgtgtgattttttaaaagtatatacatgtttattaaagaaatgataaatttatgtagaaaacttcaaagaattctaaaagaaaaaaaaattaaccatacaattttttatatagataaaaaagcacacaattttttaaatgtacattacagtaaaaaatattaaaaacttaacaatgcttatacaacataaagatctaaaacagaaaaataatgtctatgattgggatatggatttattgagtgacttgttcattgatagagatagagaacttattctccaaattgaattgtccccatcctctaatattgatcactggtattggattaaagaactagcatttgcctgaaatttcgtattttaatattctcagtttaattatttaattaagtgattaattaaatacggaataatgaaactgatactgaaaataattttttcgttagttacagaatacaactctgtaactccagagaaacccagaaaatcaaacagtgcataaaagtaaaaacacacaagattttttaac

SEQ ID NO: 177643 - DNA, 1053 bp, Cannabis indica
atatccatgcatcacagaagccaagctttgataacattttctccaagaaagtccactcaatacgatcatacgctttgctcatatccaacttaagtgccatgtaaccctctttccccttccttttccttttaagatagtgtaggatttcaaaagaaacaagaatgttgtccgaaatgagcctacccgggatgaaggcactctgagtttctgaaacaatatcatgcatctgatgcttcattctattagccaacactttagtaatggttttatacaaaacattacataacgcaataggccgaagatcactcatcctttcaggtactttcttttttggtataagaacaacattcgccttactacatcctgtctccatcttgcctgtaaggaaaaagtgctgaacgaactccactacatctttgctgacaatattccaacacttctgaaagaaagcaggtgtcataccatcgggacccggacttttgtctggatgcatgccaaaaaccgctgccttaacttcctcctcttggatcggttcgagtagttgttgattgagctgagtcgagactttttgctgaacgttagctagcacttcatcacattccacgccccccagtattgaagagatcagaaaaataatctaccacaactccttccaaacccgaaccccattctttccaaatgccagaattatctttcaatttcgcaatctgattggtactccttcgtttactagctgcccgatgaaaatacttactattctggtctccttcctttaaccaaaattgttttgcacgttgcttccaaaaaatttccttctggtcaagtactagaaacaactgcttttttgtctcattatacctttgaatagaagcctcatcccttttgtttttcaacattttcagatcatttctacacctctgaatccgttttttaaagcagcccgtaacaccttttccccaagttgcaagtttggtggcacacgcatcaatcttagagaagatgttatcactttctatgttggctccacagtcattcacaatttcaaagcaaaaa

SEQ ID NO: 177644 - DNA, 601 bp, Cannabis indica
aaatgttaaactgctaatagaacacgagttttaggggttttaccaccaaaatcttaaaattaggggttagttgcaataaactaaatacttatggaggttatgccgtaaattactctatatattttagttttaccatgatgtggatattaatagtcattgaggggagcctttggccctttgataagatacaattaatctttgcatgtctgttaaactgactggatatatgggtgcaagttcatgaggttatgattggtttttaatcaatacgtgttctcaaggatttgaaggattatgtggggtagtttaacaagtcggatccaaataattttattgacgtgtgaatgaattatttatatgttttggtattgattaacattgatctaccttttgaatgcaaaatggagatcctaaagaatggtagagattttttttggatttattttaaatttgaacgtgttcctacattctgttttacatgcggtattatcagacactcagaatgaacttgtgaaggactgtttgatactccttttgatccaatagtcaagccatatgctcttggatgagggcgcatggtagaagcacgaaccacttaatt

SEQ ID NO: 177645 - DNA, 835 bp, Cannabis indica
gctgcatcaatgtaaggttttcttaactttatatgtgtttattttatcgttttagaaagttcatatttagggtgttaaacaacatacttgtgagtagatctaaaatcctggtaaaataatttccaacagtctctctctatctccacagccagaaaatgaggccaagtcgaagtcctctgccacagtttctccttaacctcctccatcactaaaggccaactcctccgccgcgatttctcctccgaatcggtacgccattgttctaggtaccgtcggtgatctcggtcagccactctcccttcgctgccatggtgtcgccgccgatgtcagccataccaacaccagatctcgctaccaacaatgaagaggaaacagaaacccatctcacacaactcagaaaatcttgtgcccaacatcacagaacgaaaatgatgaaatggtttagtttatttgtcattgatctgggctatagaagaagaagaaagaaaaagaggggtgggtgggttggtgaatctgggtttagcgatagggtttgttttgaattttgttcatttactttataaattttaatttagtttttaattttttattttattaattaatgttttttatctgttaaaaattttgtttttattaatttaaattcttagtattttataatctttaattcctttttattagttttatattaaattttaaaaaaataaaaaaaaactaaatgatgtggaccaataagatactgcacgtgtgtaatgatctgtcacttaatgttgaggtacttacgaaaagttctaaaaaatcctaaacataaatgtattttttaccgcctaaaaac

SEQ ID NO: 177646 - DNA, 910 bp, Cannabis indica
aataatcactaactaataatgccacttctaggatttaaatcaagtagatattttcagtgttataatatattcaaagtgcaaataagaacggaattttttttttttttctattatttcttgaatatatatttatggaggctatgaaataagtgtaacatatgttgatactaataaccatacaagaaataaaataaggatatggatgccagaacaattgatttttagaaattaatgatgctttttaccaaattatataaaacataccaaaagtttatattatacaaagtggtaaaatataccaactataactctattttaaggcttcaaatactcattttcttttttctattttgatatatacttggtaaaatattatacaaagtggtagtcggtagtaattaatagatttattaaatattaataaattttctttactgtatatgtaaggataagactgaattgttagactaataagtgccaagaacttgtatatacttttaaaggagaaagtaaaattcgggaatgattttaattgtaattaaactgagtcaattatttaaaaatgacaattttagagagttttgaaatgactgttacaaagtaactacagtgctataattgctcaaagggtcgtgagtcatatttcagacaaagccattcaaggttttaaccctattaccatacaaacaaaagatatggttacaaccctgttaagaaattcaacccaaattaataaattaatcaaaaaaataaataattgtgaagttacattcttaccctcatttacggaacaaatataattttagctacttcttaattttctttttaatatatatagtatataagcaaaaccaaaataatgcttttagtgtaagaactgagtataaaaaaaagaaaaaaacatttgttg

SEQ ID NO: 177647 - DNA, 550 bp, Cannabis indica
gacagtagaggagttgtgttgggaggtgattggtctgggaattgggaaatagcaaagagcagattagcagagcataagtcgtctttcctttgccctctctcctccaaaagtcatctcccaactcaactcgatcccccggaggaggaggagggcccacggcggtcatgcctactctcacaacctctttcactttctctccctcatcgccccttattttctttctccttctcatttccactgccgccaacgccgccgccgcttcttctcttaaccatgccgttttcagcgtcaagtacaagtacgccggccaagaaccctctctcactgctctcaaagcacacgatgatcgccgccagctccgaattctcgccggcgttgatcttcccttgggcggctccggccgtcccgatgctgtcgggtttctctctttccctctctttctatttccgtgtgtgcttgtgttgcatgtgtgtgttagcgtgcataatgattgattggtttcgaattgattcggagttctgagtagaaattagaaaattgtttttttttt

SEQ ID NO: 177648 - DNA, 1137 bp, Cannabis indica
aaaaaaaaattgaactcctaaattaggtgggttctaggcacagacttaacttgcttatgttaaggatcgaacttgagtacagacgttttcatagagtaaataagaaaagatataagtaattatcaaatcaactgtaaatttgtgatcatacaacaccatatcttaaaacttagaattaatgaagctaataataagaagataaaacattagtactaaacttcctttgtgaaagtttcaacaatacaaattctgatatcattttcaacaaaaagaaatatctcataaggtaagatgttatatagctattgattcaatttaatatcgtgttcttctgtatattttagtttaacaagtaatatacaaaacggttagaagcgccaattatgttgaagttgaacactttaaagtagctgatagtaatatttaaaagagtcctaattattaccgatacatatatatcagtgtatgtgtgtatgtcagattgtcagatacttttgataatggccgaggctgcttccttcatttcaagcaaagagtcttcaaagcacttagcaaggaattcagggtctgggattatatctttagccaccaaaatttgcatatcagctcttccagcataactcaacatgtgcatagtcagtgcctacatgttttttttcttccaattattaatttaatctaaaatttaatgagaattaacaacaaaaaaaattaaatgagagcataggaaagagatgtataagtacatgaggtagactggatgagttcactctcatgtaagttatagggttatctcccattgcaatagcctcttgtggcccaaccacattggatatggtaaaactagtattgcaaatgatcctgtagttaagaaaaccagcaacctggaaaataaaaaaaaataaataaatacattatcattattttttggctaattaggatttttggcccctgaactttaacatgcaccaaatcatgctttttaaacttttttgaccgtcaaaaattctccctgaactattgagatggttagatttaagaacttttgtttaatttcattttattttactatttagtaattgtttatgtactaaaccatactcctcagactttaatatctaacaaatcatgcctctc

SEQ ID NO: 177649 - DNA, 657 bp, Cannabis indica
tttgtaaaaaatgaataaaccaaattttttatctaatagtctacaatgtagcataaaatcaaacttcataaacttaaaattaatcttctaaagtcactaaaagataaatggtcaactcaaggcaaaagactattttgcccttgcttcaccaagaagcaactttgccacctaagggcattttgatcaaagctaaaactaccaatattcctgacattctcaatgtctatctaaattgtcccactatttctaaaatactaaatcataggaaaaagtgactctatcagctaaacgtcacattccactgtcactgggcataaaatacaaaaaaacataaaatttcatatataacataaatagcacacctaaaatttaaatgtatcacaataattatgtaaattataattaaaattctaattccaaattacatccaaattatttgttaattctcaaattaaacttaagcggtcattacaattatccggccgttaaaaggatttcatcctcaaaatctaacccgaataactatggacattgagccttcatgtctgactccaactcccaggcggcttcctccaccttactattcttccagagtaccttgacaaaagctatggtcttatttcgaaggacttcatcctttttatccaaaatctgtac

SEQ ID NO: 177650 - DNA, 924 bp, Cannabis indica
gttcttactcgacaccttatccatgtagttttgcctaagttgttgcatattcttagtttggaagacaacaacttctgataagaaagaagaccccaaggatactcgaagaagttgtcttcattttctaccaactttagcatatctgtccagatatacacaccctcggcccgtgacagcagaacaccttcgacaaatgcacacaaccccagcttgtatacatcgtctgcaacatcgcatgcctcaaacgctagccaaagggttttaaaggtcaccctttttgaattgttgagatagtctcgcaaaatccgatcagaatcacattgtgcagtcaattcttctgacgaaggaccaccgctcatctttaggcctgtgatcaaaccgaactcagaccgcccaaatctagcttcggttttacccacgtaaaaccacacttcatcatttttggcctcactcactttcttcttccttagtaacaactgatggacaataaccccactgaatttcaattcactggcattccaaaaaacaccaaaaggcgtctccttcaccttctgagtcaagttaaaagcttcaaatttagcctttattgaagcaaagtatccgttccctctgtatgttatacgccctggaaagtggtctgacaatgggagaataagttcaggagccatctgcatttagaaagattaattagatttatcgcatataatcgcacaaacatcgcctaaaatcgcataaaggcagcaaaaaataggccactctcaaaaagaatcgcataaatatcgcacatagatcgcataatatcgctaaaacaatgcagaacaaaacactaaaaaatcaagtccctgtcagtacatcgcacaacatcgccaaacatcgcataatattgcagaaatcgcacaacatacttcatatatactaaatcgc

SEQ ID NO: 177651 - DNA, 960 bp, Cannabis indica
agattgttggatttaagaatttttgtttaattttaataaaaaaagtctaacatttcaagagtcataatttgatacatctcaaagttcgagggacatgatttgatagacattaaaggctggggaacataatttagtacataacaaccaacgaagtagtaaaattgaatgaaattgaacaaaagttcttaaatctaacaatgtcaatagtttagggaatatttttaacagtaattaaaattcggaggcataatttggtatatgtcaaagtttagttaattaaccttatattaaatcatataaatcttgatacttaattatactaatagcgatataacactgatgaaatgctaaacactattagtattttttaatatttctttaattattttgatatatttaaagagaaatgctaaatacatataaatttttagagcactcaaaataagtgatttcaaatgagttcttttttctttaaaagggatcaaaaataaagtatgaaatttactccaaataagttatgcaagaaataataatgtattttatatttttcttaataataaatagtaactaaggtcctccctctaggtataattacgcggccaagaggactaaaaaaatagtgtgcgaagaaagtgatatgggtgctcgacccaacgccaaggtatcctctgcgtgctcggctaagtcgtgtttttgtgatgcacagctcagtttcatctatatacaacttttttggtttcaaatcgagtggtccaagtcattaagttggttgagctaacatttaaccataaaacctttcatctaagagaaacggatactaattacttgtaactaaatacaacaatttcattgtaaatcgattttatttgtttgcctttgttgtgataatcttttccaacttttttgagtaattgcctaatatttagggcatttggtcctatgataaaaatcatatccacc

SEQ ID NO: 177652 - DNA, 925 bp, Cannabis indica
atattctctcggtgttttgcaattcgaataaactggtgcgtgataaataaataaataaataaactgagcttttcaggtgaatattaggggtttttttttagttttagtattttgatgaattatataatctttttaacataatcgtttaaatttatttatagtaaatatttcaataatttttcaaaaagatcaaataatttattgtaaaaataaaatttaaataatttgtttaacacgcttatacaataaatgaaaaaaagaaaaaagaaaaagcacacacatgttgtttaaaatccatttttaacattataattttttaaaaagaatctttcaaaatctcacataatatctgtcattatgtcttcatgtaaaaaaatatattttctacaagtgttgaaaaaaaaaattatccccacaataggattacttacaacttttccgatagtaaatgtatatcatctcaatcttcaaataaaaagtgcaagagtttcaaaataatgataataataataataatattatgtacaatttaaatgagcattatactttataatttgttgacgatttttatattatatataaaatatatgaaccaattattaaaatatactaataacaatatattatatttttaaagccgcatttaacattttctagcattttttctcacttaaatagtgcactttatagctaggcgcgtacacccctacatatgtcaaaacatgaaaggttaatgttgttaacttgttgattatataaaaagagagctcgtataatattaataatgtatgtatgtgagaatttaaccgagaaagaatctagagaagatgagtttgagactgcaaaatggatatgatttttgtcctttctatgtgacccatgtgagatctagtcatttttgcctgttaaggaaaatgtaatggac

SEQ ID NO: 177653 - DNA, 669 bp, Cannabis indica
acctattaatgtgtagataatgggaaaggagatgatctggagttgtagttgaggaggcgaccgttgacgggagagagagagagaggctatgctaatgcttcagtccaaaagaagagcagagtgagtgagtgagaagaaagggttttggttttagtttatgaatatcagtttagtttcttacgtttttttctcttccttttttaatttaaaataaataaataaataaatatagccttttctatagaaaaaaatttaagttaattattagtggggaaatttaattaatcatacttacattagctcaaagaaaaacatttctttattataactttattaggaataaaaattaccgtttattgccatatgaaaaaataaacaaaattagaaaactaaattttttttttctttacaaaactaagagttaagactgagcattgatcggtttggtcattttttatataaaaatccagaattcagttttcagtctggattggtgcaattcaaaaatcgaccgaccaaaatttgttataaaatcgaccgttttaaacttcagtttgatcggtttaaacctccaaaaccgaacttcttttttttgttaaaatatgatttactttattctataagcacattattctacattctacaactacaaccatcaaattaatgttc

SEQ ID NO: 177654 - DNA, 624 bp, Cannabis indica
caaaattgattactgttccacttccaggtataaatttacttgtgttataatagattgaatatataattagttaggtaggaaattttatcaacctaggctaacttaaatttatggttaacttcaataattctgattttaggtacgtttttgtacacacaaggctaaatcttttggataattaatcatctagaacggaaatattactatttggttgaaacttgaaataaattcctgatgacatctataacatatattaataattattatatgcaaactatatattttaataaaataaagaaatattcgtggcaagagtacggaatgatgaaacttgtaaacctcttaaaaattcaattatttttttgagattattttccaaatacacaaaagcaataaaaaaactacaaaaatacggttgtacgtactgaattttaaatattttttacaatttttttaattttatttacaaaaaatacggtctttttatattgtattcttgttaatttgttgtttgattttttatttatctgtatgttattttattgttgtttgtaatgtaattttcctgttacttttatgtagtttaagtaaatcgtaaaaatatataaaaaaatttaaaacgtt

SEQ ID NO: 177655 - DNA, 751 bp, Cannabis indica
gatggtggtccgatgggtccgatgggggtccaatgaggggtccgattgtgtaaatgggggtgatgtaaatggacggtattttgaggatatcataaaagttgtcatatcctacaaatattagttgttatttgtttaggaatttttttttaactaaatgtaagcataaaaaatcaaatttccctacaaatattatactgttgtctttgtcgaagtaaaaaaaaaagaactaaaatccaactattatgaatatttttatttttcttatctacaacttttagataaatattatctatatttatcaacaatttagagattgattttttatttttttttctttattttactacaaatttaagttgtatttaattgttttattatttgaacattaattttttagtcttatttttggtattaacttaagagcatattactatgaggatattaagattttttaaactactatatatagtattcagtatttacttttaattatcaacattattaattacattatttgaaaatacataataataatctcaaacaataactaataatattttttctttaattatttattgtattatttttaaataaaataaaaaataacttaacataaaattaagtatatgtgcctcgcacgtagctttttgatagtataatatatttgtgtatgaaaacttaaaatataaatcatgactgagataataacaaatattttgatactgtgaaattaattttaaatataaaaata

SEQ ID NO: 177656 - DNA, 707 bp, Cannabis indica
aaaccaaaaaaaataaaaaataaaaagaagaaaaacaatacaaaacatacataaggaaaaaaaataaaaataaaataaataaatatagggtctctttttcttttttaacgataaacacattcaaaataattgtgtaatacatatcatcatagaaaaaagttgagatttcatccatttatattagttcattatctattgtgagtgctctaattcatgcatataacaaacataacttgagatgtctcaaaaaattagataactaagaatatactctatgaaagatttttataacaaaaaaaaaaatgatctctaagagaatgtaataggcagttcgcatgcgagttgaagagcagaatttggtttatgctaattttctaagtgaaaattgctccaattctatcaatatgtacacataatttgtataaatgacaataagagctcttaagatttctccaatagaaggcgtttggttgggaggaatgaaaatataggaataggaatgaaaatgggaataggaatggaataaaatttaaaatgcataaaaaattgataaaaaataattaaattttttttcttgttacattagaatgctcattcctttctttttaaaatggaatagccattccaccaaaatggtagaaagagcattccattacaatgtcattccaatactttaaaatgcaaccaaacaaaagaatggaatgaaa

SEQ ID NO: 177657 - DNA, 548 bp, Cannabis indica
atcaagacaaataaacataattgaagacaaaaaaacacaattctagaacgagcagaagcactagcaatccaaaaagctatgactcaatgcatctccttcggtattctcaattcttagtttagatctgattatcaatgcttggtcgtaaactcaattgttctttaacttcagattcatctctaaggttaattcttgatgatattagacatttatgtaccaagtttattcttctgagttgtaaatttttgccctagatctactaatgtagtggttgattagcttgctaattctgctttgaaagctactattagtacaatatcatggcctgattactcattatgtattcaaaactttattttggcagatgccaattatcaatgaatcctttagctctcaaatcctttgagtgctatgctcataggtagtgttctctaagacaaattctcaaaaaaaaaaaaaaaaagaatgcacaaatcatgaaaaatttgagaaataaaataaggcctctaaaactaatgcagagtagaagtaataattagtacttgaag

SEQ ID NO: 177658 - DNA, 654 bp, Cannabis indica
agctcgtgttagttggcttaatgctggtgataaaaaaactaagttttttcaccgctttacttctcataggaaaaagactaacactattcattttcttaaaactgagaatggtgaggttgtcaatagtttggagggtatttgtaatattgtctcttcttactttgccaacctttttcattcgcaggattgtgattctgtttctgtagatcaaattctttttgttttaggtccccctctgaatgattttgagtttgagtgtttaggggaaccttttagggctgctgggggtcaaaaaggctctttttcaactctctggggataaggctccaggtctggatggccttaatgctttcttttatcaataaaattggtccaatatgggtaaggatcttgttgaggctgtgcttgattgtcttaataatagtcaagatttttcttccattaatcatactttgattactcttattcccaagaagcagcatgctcaatctatataggattttaggcccattagcttgtgcaataccctttataaagtcatttataaggttttagctaatcgcttaaaaattgttttcgataaggttctttcccttcccaaacgtgcttttgttctttggagagtaatctttgtataaatattctctttgctac

SEQ ID NO: 177659 - DNA, 800 bp, Cannabis indica
tccatgatttgggccagcccatttggttgtaaaatgtgaagagtggccttgatgtcttccttcaaccctttgacgaaactcccttcgaggatgtggtctggtacatccggtacgcgtgaagcaagtatctcccaccggacccgatactctttgacggttcctgtttgcaccagcgatagtagttcttccgagagtgatcccaccggcaccgatcgaaagcggaggagtgccaattgtttaagcatggtccaagatgtaatgggtcgacgatggttctcccactgaaaccaggacaaggcgtctccgtcgagacccacgattgccgtgtccaacttcataggttccgtcaacttcgtgagcaagaagtagcgttcaactctgtatatccaactatcggggttctctccgttgaatagtggaatctccatccgtgggggtctgaaatcttggttgccagttatattcgcttgaaatgatccaagctgaatcggagtcatcgggggagggatgtgggttggtacggtaaccttcggaggaaaggtttgtgggagcggagtggattgtatgccgattgagctattttccccaccgattgaaccacttccctcgactgctcgtcgttgacggtccgcactcacagctgcggtctccggtgtgaccttctctgacggtagcagaaactgggaaatctgagacatctggttcatcactggttcaagttgtttggccacgatttgagcaattgacgtatgaatttcttcctgcaatttttccaacaccgtcgaacgtagatcagagac

SEQ ID NO: 177660 - DNA, 772 bp, Cannabis indica
tctaatcaaattcaatctaattactgattggactggattagttttttaattgaatatccaattacacatttaatttttaatattaatttaaaaagtgaagaaaaatacataaagactaaatatctctatttctttaagtttaatactctataaaaaatatcattattacaggtataatacaactaaaaatttgaaatgagtaaaacaacaacattacaaaaaaataaaatagaacaaaacatcatgaaaacaaaaatacaaaaacaacaaaatgttataaaatttaactaaaagaaactactaaaaatataattcgaaaatatattttttattattatacataaagaaatataaataatttttttaatatataaatctaattagattggatcgatttttaattagattttgagaatgacatacaataatcaatccaatccaattataatatctaacttttaacatctattctaatctaattgtcattgaatatctatttttttttgtaattctattgaattggattagttcaattaaattgaattgaacattgtccaatcctaagatgttgccccacaccactttatcttgatccttgaaatttagtaacgtatattgctaaaaggtattagtgtacttagcatcattttcagtgttatatcgttatgggtataattaagtattgagtcttatataatttaagaaaataatttttaaaaaaataatcgctaactagtgttgagcacaagtagtgctcaataacaatactctt

SEQ ID NO: 177661 - DNA, 721 bp, Cannabis indica
atattgtaaactgacgcatataatgttataagtgtagatttctaacaattgaattataatacagcgcactacttgaggctagctcaagttgccataggtgggtgtgtgttgaaagttctgagttcgagtctcatgtaaaatatagttgtaatatataaatatttaaataaaaaaaaagaattataatacagccgattgttttaaactaccgtgttttgtagcgtcggttttttttttcaatgttactttctagaataagaaaaatataaattttctgcttatttttttattcacattagtttttcatattttttacaatttataaaaacagttaaaataattaatttaataatgtagttggattaatacaaaaatatttgtaatcttattcttactataacttaataatttgcacaaatatatttaactaacttaattaaaaaatatataaattataaattatatgaaactaattacgtaccagtatatacataaatattgagatatatacttataattttccttgacacaccacctctgttttcacataatctacctacaaatcacgtagactaacattaatgtgatcatttatgtatgggatactgaatctaccttataatacaaaagaaagaaattattaattagtaaaattaaaattaatttaaaacaaaaaaaaaaaaaaaaaaaaagtatttaaaacaaacttaaaactacttat

SEQ ID NO: 177662 - DNA, 1057 bp, Cannabis indica
cccccacaaggtggaagtggatcttcttcatcaaagataaagacagaggatttggatgttactcttcaggccattggttttgagttccaacaagtctctccaaataaagtctctggtctccttcctatcactctcaagtgttgccaggtcttcctctttctttgtattgattttcatggattcttgagttatagtgtttcatataattgttagaagatgcctaacacatgtgagcctaaggatgagaattgccctgttgggtatggccccgctagtgctcgcccctaatgggacgggtatttcccacctaaatagaaaatagggtgaagatagagatgttctgtttggctaaacttttacttttactcgtaaatagaaatataagataagtataaagtttggataactattatataaagattttttttttaattaaaaagtactttttaatctatttagttatcattaaaaagaaaattgtgaataaattaaaaattatgtaaattattttaattttaaaaataacttcttgaaatcttttgaggagaagctacaaatctcaatttcttttaaaaaagacttaaattaaaaaatgatttttattttttttaattctaaaagctaaaaagtaacttaatcaaacaggcctttctattctctaaggggactctttttatttattttatttattgtataatattattttaattactatacattatctacatgtgttttgtaacttattattagtaaatttttaaatatttctattttattttaaataacattgtctgttttaaattattaacacatataatattttaaactttatacaatttaccttttttattcataatttcatttactttaaaataaataggtcctaagtattacctattccaacgagaattctctaccctatctccgatcgggtatatgtagtaaaagagacaggaatggtgggtattaaaatagttacgagaatggggacaatggaagcatttcccgtttattatccatttaatttccatccctaaatgtgacgcgctgtgagtag

SEQ ID NO: 177663 - DNA, 702 bp, Cannabis indica
gtaccattttttttatagtaaaccactctactatgttctatagtctagccctactttttacgtgaaacctcaaattaaaatgtattcaatagttttgtgctcatataatcagggccaatttaatcaacttcatctctaaaaacatgacacaatctattttttttaacttcaccatgttctttcatacagctattatataagcaatatatctttcaagattttactaagctaagcagacaagaagctgaaacattaaattatgacttcagatggctccttgggaaaaatttgtaataaaaatataattaataatcatcttaccattctgccattggcagtgcataatgggcaagcagatgagtattcaaaactggtttgaggaagtatgactggctgctcaccaataacaccagtccccctgcaattagccagataacaatttcactgggtgtaaagaatttgatacctggaaactagaagctgaaaaatacacgacattaatagcagatggcatgaaaaaagaaataactaaccagacattctcagtttttccatgggcatcagttatgatccaatgtcttctaagaagttggacagggcgttctgagttattggttattcgtattctgtatgcaagaaatagcgaccctttgaaggttgactccggcctcaatatacacactcctcacttgaaccctgatt

SEQ ID NO: 177664 - DNA, 602 bp, Cannabis indica
aaaaactattttaaagtgtaaaaataaaaaaaaaaaaatcctaaaaaaagtagttttaacttttttttttattaatgggtcttacttaaaaataaaactatacattaaagtatatggccaacatataatacacacaattttcctattattattattattattattattattattattattattattattattattattattattacggagtaatttattgagtataatttgtaggcaaacgttacaccttgtttctgtataattaattcaaattaatttacaaatccaatgtatataacttgaaaccaaacaaacacatatattcttttgataataaattatcttgaccagtattaagtaggaacacacctcaataatgaagtactatttttgttttcttataacatgaatcaatgtcccatcatagtgacaaaagaaactatctactcccttctatttttatttatatgtcaagtgaaagagattatctgaaaaatgtaggtaaaattatacccaaaaacatgactcttaatcttctctctattctagttggtacgtacgtacatttatttgtactaaactaatatagctatatgtaattc

SEQ ID NO: 177665 - DNA, 557 bp, Cannabis indica
atgatgtgttggcaaaaaggttgacaaatcaacgttagtattagaactttttctagcacaaaatgagaagcgctggcaaaaataacttttcctagcgcgtaaatgtgctggtaaaagttagattttaaccactacgtgcgctggtaaaactttgacctttttgtcaacgcagtttgcgaaatgccctggtaaaagttacttccaacacagtagcaaactatgctggtaaaagtgtcatttcttatagtgaattgtattaaattaagattatgtacctaaaccgattgactaattgttttcatttatttttaaaaattaatataaattattgtttattttatttctattgtttttttttaaaaaaaaaaagtaaaaataattcattaacgaagatgtaataccgcaaataaattttctattatttgtcagaaaaaaaagacaaattaagtattctctaaaggcaaaatacacaatctcaattaagatcataaagtatctccatatcaacttttgtcatgaatgaatcaataaagaatagtcataagaatcaatcacta

SEQ ID NO: 177666 - DNA, 661 bp, Cannabis indica
ctatttatagcaggaggctaaccctaagccctactctacctgtttggttaagttaatgaaactatcccggacaatataatgttcatgtttgccctttggctaattagcaattcttctcccttaaactttaacatatactaaatcatgcccctgaattttttttgctgttaaaaatttctcctgaactattaagattgttaaatttaaaaatttttgtctaattttagtaaaaaaaattctaacatggatgaaagttcaagaggtattatttagtacatatcaaagtttgaggggcacgatttggtagatatcaaagtttggggagcatgatttagtacataaacaatcattaaaacagtaaaaatatatgaaattagacataaattcttaaatctaacaatctcaatagttcagggagaatttttaaacggctaaaaaagttcaggggacatgattttgtatatgtcaaagttcggagaaaaaaaattactaattagccttttttttttcttcttattttttttagtgtagggtaatggtatttttacaatcaattaatagcttgtaatttaaaggtcttgggttcggaacccactgatctctcctttttttttttttcctatttcttcctcactactaagctagccttagtggctttttt

SEQ ID NO: 177667 - DNA, 625 bp, Cannabis indica
gttttgttgcccctgataatctagaaagtagatgcgattaaaacttccaagctatctataggctatgtagcagcttttggtttgtaaaggctgcttcaagcatataatatcacttaacttgattacattcaggccttaagtgtaggatttttctaccccataacaactgaactggcctgcatttcagtagagaatggtttgtgcatatatgatgctcaatacctcttccattatatgtttgtagacacacttaaccctgtccattttgtcttttcttgttaggaaacaacaattcttaaccgggtttggttaaaggttgaatttctctttgcgtttgattcttataagaaaaaacatgcttaactctctcctaagttactgctacttactaaagattccatctattcatttcgtttctaattgagttgcttgatcatgaaatcactaaagttgtttaaagtgtatttttctggaaccatttgtatgttatttgtcaataacactgttcttggcttatagaaaatgtgtcaccctttttgttttctctcttttgaaatgctggcgtccacccagctgtttctcttctttctatgtttttgaaatggcaatgcattgggacatttag

SEQ ID NO: 177668 - DNA, 866 bp, Cannabis indica
gttggttggggttctcagtgttctccagtggagcgtcagcagtaatgtgggtatataatcgtcggcgagagcagagaatccttggtggtgaggctgttggtccctccacaagatggtcggtcggggttggggttggggttggggttgcgattagcctaggtcgggggttttcgggtctccggtggcggtgggcttcaactcttgttctctaccaccttgcactgcccaatgtttcgtttttggggggttttttactaaagaatttttcaaacttttttctagactgaatcatttttttaaaaaattatctaatatattatttttttttatttttatttttttttttgctataggggtttctatttaaaattatgtaaaaatatatattttaaagtgaccaattatgaacgaaaattgccaaaaaattcgctctgcagcagttattccttgcaattgttaacatgatatctacgtctggcttcgtccgattctttcgtccggtaggatatcggtgagcgtccaccccatttcttgtgcccggtggtggttctttcttcttctctaatctcatcgtttactctaggctcttctatgcattttttactggtctggattatggccttctctggttctgcaatctccgccctcaggggcatcaaaactattctatcctagatcatctcaacgcgattgcattcatgaagatggtgttggtacaggaaccatggcattattataatcaacacattgtttggtgttcactaggtgctcgaccaaatgcccctatgaaatatatgactcaatttactttttagattcaaccacatttaccattaataaaatagtgcactccaccctcaggtcgc

SEQ ID NO: 177669 - DNA, 850 bp, Cannabis indica
gatagtataattgagtgggagcgctaacataaatatggagtctataacttctataggaatttagaagtgaaacgatgatatccttcgagcttggctaaacagagataaatggtggagatctcatttcacttcgctgaaatatcatttatacggagctaagtgttttaaggataaaatacattgaaggtgtaacggtaatttagtgcctattcaatgtagatcatctattagagggtcattgatcaaattaggattataacaatggataactaatagcgtatctatatcgtggaacatatagagcgttctatatgactgagagtgcaattccaagttctaagtgtggattcaataaggaattaataagttagggaatttacttggtaaattcggttcgacttattggaagctcggttatataggcccatggtccccatactagttgagaccatactgcttgtaagactcagttaattgattttaattaatcaattataattctaaagttagactatgtctactttatgaattttcactaagcaagggcgaaattgtaaagaaaagagattctaggtttatttattaattaagagactttatatgtctaaattaataaatatattaaatgacaatattatttaataattaatttttagttattaaataattagaattggcatttaaatggttaaattggaaaattggcatttttgagaaaatgggaattgaaaaataacaaaaatggcaaaaattgcaaaagtagaggcccgaacttatccatagccatggccgaccgacctactgcaaagtgtttttaaccacttttatatttttttcttattatttttaa

SEQ ID NO: 177670 - DNA, 828 bp, Cannabis indica
atataatggctcttccggagccttcaattaaatttgcagtgcctgatattgtattaacatttgccttcattcttgataaatttgaaaaatatttatcacttctaagtattgtatgagtggttgcgctatccaccaaacacatatcatcaccattatttgtagaatcatgtatagaatgacaaatgtccattacttcattaacaaaaaaaaacataataagttcaaaatataaatgcttaaataataaaagttcattacataaacatgccaaataaaataaacaccttaaagtaaataaatgataataataaaaaaataacaaagaaaagtgactaattgtggacattcccatctccattatcgatattcatgttgttattaatgagatcttcattaaaaaaatctgcaacatctaagtgcgtaatatccaaaggctctttgagaaaaccatcatcttgataggcaaaatttgcttctattttctcctttcctttcacagatgcttgataaagatcagcaaggtgttttgccgtacgacaggcacgtgcccagtgtccttttattccacatctggaacataaattttcagaatttctatgattattattttgaggaccttttcccttgttctcagtagttgtgcttttcattggagtatatgaatttttattttgaccattacgatgccaaacattgcttcgccgcgatcgcgaccacgaccgcgactttgattatggtcacgccacgtcttacttcgattatgatcacgctacgactatgattatgattgtcagcaattgtagcattcacttcagggaatggagcagc

SEQ ID NO: 177671 - DNA, 604 bp, Cannabis indica
tttccatttgtattacctttggctagatgtataacctttacaagtatcgtgtgctagccattgtaactttttctagttgcgcgaatattataacaacaataataatttccctaactttttgtggtcaacaaaatggcatgcactgaacaaaatctaaatactgtatatatgtttttagcgacgtgcttaagatatttgttgcggagaaagttaaattattaaaatgttatttcttggtgtgagttctttaccaccacctctgccatcaaagttctgagtagtttcttgagaggagacttcttgtgtctctagaaataggattaagtacttatgcaggtgttattagacggacagattgtactagcttttgcttgatgatcatgtgtatattttaattagttcgttgtgtactagctcttgctcttagtatggaatatttttgacaagatgtagtgagcattcttgatgagagtactcaaaggtacacatgagatgggaggatgactatatttgagagaggtagaggcgacatgtgcgctacagttatgcgtaggctcaaactcaagggtttgctaacccattgatggaatggaaaaaataaatt

SEQ ID NO: 177672 - DNA, 528 bp, Cannabis indica
aacagagacattaaataattgtatgcagtatgggaaaaatggaaagaagaaaggtttgattgtgagtaccatattgagaaggagatttaacaacatcaaaaagaggcttgtaaatgtcaaagataacaagtctaagatcagggtattgcttttaaaccatagaaattgaagataaaataagcttacagtaggaagggatgagcaaaagcagcattgactagaaagggtcttgtttagagagatgttcttccgtgtaacccctgaaaacgggtgtgtagcaaatagaatctcagaccgcctgagatggtgggtgacggtgtgaatagagaactgagaaagagagagaggatgagaatgagagacagagacgagtgagtcttagatttagggtaattatttttaataaaaacctggcagattttttaataggataaaataaataatattttaaaaaaatatataattaaaaattcatagtgttattcggggtatttcaggttgattcggtttcattgggcgggttacttt

SEQ ID NO: 177673 - DNA, 563 bp, Cannabis indica
ttatgtataaaaatacatagttaataaattgcttaatttatattattatagagtaaacttatcaggaaaaataattgtgactactgtataagtgagatacggtgatgacaacgagcgagatataataatgacaattaatttaaataatcgagatatatatataaaggtgatatgttatgatgagtagtgtttaaaactagtagaataatcgtggccactatacaagtgagatacggtaatgacaacgagtaatatacaataatgacaatgattttgaatgattgagatatgaaagtgatacattatgaggagtgtttaaacctatggagaacaatcgtagccattagacaagtgacatacagcaataacaacgagtgatatacaataatgacaatgactttgaatgatcgaaatataaagaaaatacatcatgaaaaaaaaaaattgtttacttaaatataataacattctaatttttgtctacactgccctatttatgtatttttatattaataatatttttaatagaaaaattcaaaatttaatatatacattaatcgtat

SEQ ID NO: 177674 - DNA, 637 bp, Cannabis indica
aaaacaattaaatatcataataaatttatataggtataatttaaagagaattattttttttttttgtcaattttattataaatcagttgtattctcattcaaaaatctcaagaaaattattttaaacaattaataatatgctttggattattttataaaactaaactaagatagtgtttagtgggaaagaataaaaatataagaatagtgataagattattgggaatatgaaaatgaatggcatgaaagcaaaattaaaacacatacaaaaattaataaaaaattattaaatctttttctcatcttgtcattggaacgatctttctatttcatttcaaaataaaattaatagtcattccactaaaataatagaaaagtcattccgttagactgatattatacaaccaaacaaagaaatgaaataaaaattatttaatttgtattttattttcacttcattacctccaaccaaacactatttaaatataattttgttgtttaattagtagttataattataaattagtggtcatatgattttttagttcaatttatatcacattctataattaatggtttcattataaaatatattgatttattttattttaaaatttgaacatgtaaattgggtact

SEQ ID NO: 177675 - DNA, 674 bp, Cannabis indica
tcaatttttattattgtgttccaatgcaatattgtaaatcttcatgcaacatttaatatagttattgaatgactcacttaataatttattaaaaatataaaataataataataatagcaaataaatgtaaaaatttaataataaaaatattaataatagcaaaggagtatattagctaaaatttagtaataaaatattaaaaaatgacataatggtaaataaaagcataacatttattgtgatgcgaattttgaatcatgctatattgtgaggtaaatttggatcacttttgattatgtgagatttttgcatcataatttagcacactattagagtggacttttaacaaagtgagctatatttaatttgtatttccatcacttatttgcatctccattagagacgcacttattcctttagtaatataactatcctcaaggaggataatgttgacaccttagaaaaaatattttttatactacatactaaattttttaatttttttacttttatactgtgaggcagaatttttttcaaaaatactgtgtaagttttataatgtatactatgttaagttttcattgttgttctacggttgttttttgattgttccgctgttgttttaattattatattttgttgatttacgattgttttataaaaagacaatattt

SEQ ID NO: 177676 - DNA, 706 bp, Cannabis indica
gaactggtaaccttggcaaacacttataatctgtaggatagtgatgactatcaaaaacacatgagaaaatctgtgcttagatcccattatatatttctatatatgttgttatatataattgacactcaaaggaatatatagatttcaaaatactatagatatgaaatattagagaattgaaaaaagagtaactgaaggcttgagataaggaagtgagatgactaatacctagcttacatgaatatatatagggaataagtgaatgttaccgttgtaaaataaaataaaaataatattttttttatattatatttatattaaatattaatagatgcttaataagtttttataaaactaacgttataaaattacccataaaaaacgtttttgtggttagttttgtgaaggtgccaaaggacactcaaacaaacaaacaagaacagttcaattgtttctgttttacttaatcaaatttagacgttttttttttcttctcttttttggttgcgtaactgtcaattggaaagggagatattagaattttttttttttcactttagtgtatgttgataaaattatattaagaaaaaaaaataaaagttttgtgattctgattaatttatttaatattaactttgattttaattgtcaactttcttgatcaacatgacaaaagtgtttaaacaagccaactttattctcttct

SEQ ID NO: 177677 - DNA, 593 bp, Cannabis indica
cgacgccacttgatggaagtcccggaaggacatctcttgctctgaagaaaaattctgatttggataaagtatggtcatatgtcgggaatcttagcgccaggcgtactattggggacgctcctgagcggaattaagcgaagtaacttatcgtcgttgtagctgacattaaccccaagaagttggtcatcaatattctcaaggaaatctcagactcattatgtggttcttgatggtaggtattggaagtttaaggagcatatgtatattctttagtagtagaattttagtataggttaaagttttgatcatgttttatcatatgatgttattgtagatgaaggataaggatactatgcatgtttttatacttagtggtatttatgaaaacttattcaacctccacacataattctgatgcacttggttaatttctttttaaaactaataaccacctaaaattcttgcactatcaaagcaaattatgaataaataaatgctatatttaacatcagactaatgctaagaggcatcaatatgagttttaagtatgatgtgcaataaagtagtattcgaatttatataaattaattaaa

SEQ ID NO: 177678 - DNA, 1040 bp, Cannabis indica
tcgtttgaggtagtaaaaaccatattgtacattgtggtgactgtggtgtacattactcgaagtgccattgttggagttgttagaggggggtgtcgacggtgagttatacattactccgttctactttacatacattttcttattgacagaaaaaaaaatatatttttgaagggaatgtggtgtttttccattttcgtgtacttaatagtttcattttgtctcaggtgtggaggttgaggtggtgaagggagtttgcatatctttgtcgaggtatttctttgctctctctctctctctctctatctctctgtctctggttctgtgtttaagggagtttgcatttctttctgtgtcccccccgtgcatgtgttgtggttcttagtgtggaatgtactgtgtgttatgagttttttgttttagttatttatgaatatgtgatttggtattttgattgagtttgttgcaataaagagttgcattgtttaaattgaattagttgcattgtactataatttaggggttttgatttgggtattttgatgtatgtatttttggaatgtgttagttgattcggttggattttaaatatttgggaatatgataaatggagattttttgagcaatatgacaaaaaaataatgcatgagttctataatattaggctggatggtcttttagtgatcttatgattgtggaaatgatttggctttatttgttgtttttgggataaaatatgaaatcatcaaatattggtaagtatggtacccgattttagaggcactatactcatacaatttaaagatcgtaatagaagtaggagattaatataaataggagatattatgaaaccaaacaatttgtatcaaacaaaacaagttgtgtattgaactaaaaacttaacacacataaattaggaatactattaaaaattcggataacaataactgaaaaaaatatctgtttaaaatttttgcaaccccatcaaagcttaatgtgcatacttgagggtattgtaatccagttcctggtcttacagttcc

SEQ ID NO: 177679 - DNA, 1169 bp, Cannabis indica
attattctttttttttttttgaaataatccaaaaaatcatatatgtatgaaagtttcatttcatcaaatgtaaggtcaaggttgggctaggaccatgcctagtggcaccttagccgaaggtattttatttttaaaattatacatttaaaataaaaaaaaaattaagagttttatacaatgtaagtaaaaatatggtttttctgtaaccaattaatttatgcagtttcactcattttatttaggaaaattacctcgtatatgttatttttttacgtttttttttaatttacagtttgggtttttaatgtagtttctccgatggtttctatgtgggttgctatatagattttggttgcgatttagattactctgttagttgcaatagaaatttttatgtagaattccgtaaaaataacaaaaaaaaaaaaaaagtgttataaaatataaaataaaaaaaccccttttttttcaacttttctcataaaaaaaaaacaaatttccataaattaacttttttggaaaaaagtaacatttttgtaaactcgtatcttaaaatcataataatacaaaaattctcctttaaaatacaataacttgaattttcctaaaggcccaataacatccagggtgggccttgatcaatagaccgagctaagaacaaagattgggattggccaaatgaagagatcaaaaagtctgaagtggccaaaacatataataataataataatattccaatgagattaactctcagttataaataaatatttaagtttaattttgaaggtaataatatctaaattatatttttggaactctgtaggtacctaatagttaaatgttaaatcattatatctacgtctaattttttattgacatatttaaactattttttaaaataataaaaatttaatgacttgaaccaattaggattgccaatttacttaacacttaacagtcaagtacttataaaaattctagaattataacttaaatattattaccaccaaaaattaaacttaagtatttatttacaattaaaagttaaacttaaatatatttatacttcaaattaattacctaataataataataataattttaaagggaagaacactatgttcttattagaaattaaagaaaaataatacattatctaagaaaaaatc

SEQ ID NO: 177680 - DNA, 764 bp, Cannabis indica
ggatttatggcggttcactgggttttatggtaacccaaaggcgagttgccgttctgaatcatggagattgttatgtaggcttaaggatttatttgatcttccatggatctgtggcggtgattttaatgagattctttcgataaatgagaaaaagggtggttctgatcgcagtatgtcggctatgactgagtcccaaaaagcattggatagatgctctttggcggatttggggtttgagggtcaatgttttacatggatcaataaaaggaatgggggtgcgcaagtacaggaacgtcttgatcgttatttttgtaaccaaaggtggcatgaattgttcccttctgttaaggttcttaatggtgacttccttcactcagatcatagacctattgtggcaactctggagaatgtaactagacggcgaaagtatgataaaaagaggtgttttcggtttgaaactcattggttgaaggatcctgaatgtcaagaaataattagtaggacctggttgtcaacggattatcctttagctaatcaagatagtcttattgatatttttggctcgtgtgctgatcagttggtggtgtggaataagagtaagcatgggtctactcctagacaggttagagaaactcagaaagaattggatgatcttcttagtgtttcagcgcctttggtccgtatggaggaggtaaagcgtcttgagtataaattgaatgcctttttaactcgtgaggaatgtactggaaattgagatcgcgggc

SEQ ID NO: 177681 - DNA, 563 bp, Cannabis indica
attaatgccaaacaattaaaaaaggtaactaaaaaaaataataatatacgtcttcgtttttttttttttttagtgtatcattttaatttttttgaatataaatattcagttacaaaagaaaattatggtgccgtttggtaacacttttgttttttaattttttaatcacaaaatgaaagtaaaatttttgtttttaaaaaatttatttttgaaaaacaaaaatgcgttctgtaactacttttgtttttcaattttaaaaacagaaaataaaagtgtgttctgtaaagttcatttttatttttattttttgattttattaaagtcgggtctaggtccggggtcggattcgggttcaagtcaaaagtcgggttcagcgccagggccgtggggaggggatttgggtccgggtctggtcgtaatccaaaagattgattaagaaaaaaaaaactgtttaaaaaaatattgaaagtaatttttgttgtttttaaaattttgatttctaattataaaattgaaaagtaaaaacagttttatagaacattgttttagaaaaatatttctac

SEQ ID NO: 177682 - DNA, 524 bp, Cannabis indica
gcatttattaattcggtgtgtattcaatattcactttattataataaaaataattaaggttgttcattttactaattgtgtctatataaaagtccataatcacatctgtccctacacaaaattatcaactaaataaaatacctagtaatttacactaagaaacgagtctaccttttttttttaattaatttgggtattattacatcaaagataggtccttttcaaaataaaattaaaaagtaataataaacgaactctaactaaatattacattttttagatcaaatagataattaagtggaagacatagcaaaatataagtcacactgcaacttcttagagcagatcactaaaagaaacaaaatgacaatcacaaagaaaggaacaatatcttaattattaattagttcaaatccgaataataattaattaaaagacaatcactttatatactattttttaatttttttttatgtaaattgttatgtgaaataaaattatgatttaagttgctttgttagttg

SEQ ID NO: 177683 - DNA, 904 bp, Cannabis indica
ccttttttttcttatatttttcttacttatttttttttctccactaaaatttaacttccaaataaaggattaggcacgacaaaattgtaatttattacaaatgttatgttggttgagtaaaaatattgaatgtttagatcaaatttttttctttaccttatatataatatacattttatacatatgtattggttaatttttatgaaatcatgttattgaaaaaaataataatattaatattcaccatttttaatgaatatatgtggatatattttaattaatagtaattagtattattggtgatcattgtatattgttaaaaagaaaaaggaataatattataatatttgatctggccacgatcaaacaaataatattattaaaggtcaaaatgaagtgtaaaataaataatgtacattttttagaatattattaattgatatttggaggatccaaaaaaaaaaagaaaaaaaagatggacaaaaggacagcagagagatgagagaagttattcgctccatacacatgtagctttaagaaatttataggtcatgttggccatttcaagataatactgataaatagtaaaacggaaattaaaggttatatataattataaagttttgaaaagaaaatcaaaatggtaccatgctgattttgtatatttattattatgccttataatatttgcatatatataataagaaaaatgaagtccaacatatacagctaattaggacatagtgggatggcagtatacgattttgggatgcagctaaattaaaaaccattatatatatgccatatacattatataatatatattagttatcccttgctttcctaattttttatttaccatgtagctattgtggcaatttagactgaaattataacatgcaac

SEQ ID NO: 177684 - DNA, 1210 bp, Cannabis indica
ataaaggattaggcacgacaaaattgtaatttattacaaatgttatgttggttgagtaaaaatattgaatgtttagatcaaatttttttctttaccttatatataatatacattttatacatatgtattggttaatttttatgaaatcatgttattgaaaaaaataataatattaatattcaccatttttaatgaatatatgtggatatattttaattaatagtaattagtattattggtgatcattgtatattgttaaaaagaaaaaggaataatattataatatttgatctggccacgatcaaacaaataatattattaaaggtcaaaatgaagtgtaaaataaataatgtacattttttagaatattattaattgatatttggaggatccaaaaaaaaaaagaaaaaaagaatggacaaaaggacagcagagagatgagagaagttattcgctctatacacatgtagctttaagaaatttataggtcatgttggccatttcaagataatactgataaatagtaaaacggaaattaaaggttatatataattataaagttttgaaaagaaaatcaaaatggtaccatgctgattttgtatatttattattatgccttataatatttgcatatatataataagaaaaatgaagtccaacatatacagctaattaggacatagtgggatggcagtatacgattttgggatgcagctaaattaaaaaccattatatatatgccatatacattatataatatatattagttatcccttgctttcctaatttttttattaccatgtagctattgtggcaatttagactgaaattataacatgcaacaaattttattcacaccttaaaaatttataaaatacttattttaataattttatttatatgaatttataagatttttttatttttatacttcaaaaaagttttttttttttgtttttttttttttttttttgtcatttttacagaattctacataaaaatacatattgcaactagtgttgcaacctaatttataacaacaaatcgtatagaaacccattttgcaactagcgctgcaaccactttaaaaacaccaaccgtaaatttaaaaaaaattaaaaaaataataaatatggagtaatttcccaaatttatatctttaattgtattaaacttttttaacttttttcttctaatttatattctattt

SEQ ID NO: 177685 - DNA, 562 bp, Cannabis indica
ttctcattttctgttctgtcatttcatacaatagtattggtagcatatgatatacatatcaatatactaagtgatttgtctgttaactgtaattcatttatctcataaacattataaaattgaaaacataaatgtgtagtctatgtatcatgtgcaattgtgcataatctgaatctctctcttagatccaattttttcaacgaccatctcaattctcaactatctatctgatatatatatgaattatttaggtgggctgcggtcttatcatttgtgactgtacattcccattgatatctgacttgagtttctagcattatcaaatatttgaacccacatttacatataattgatgacacggtatgtataatatcctgatgtatatttacattaagacaaatagatggaatttagactacatctctttttttaaggacttgagacttaggtgttggtactaccatactaacttatttgattggtacaattagtagccaatactgaattatataaatgagcaatgctgtacgactaatgactcttatgtgaaatgagttataaa

SEQ ID NO: 177686 - DNA, 987 bp, Cannabis indica
aagattgcaggtgtgtcaaaggccctgcttttcttgatgttagcttttaacttttggctttgctggttactaaccttgcaaacactgtctctgcagtcaattactatacagtgtttagaggctcttcaatttttgcatggtcttggcctaatacattgtgacttaaaacctgagaatatattggtgaaaagctacagtagatgtgaggtaaaggtcattgatcttgggagtagttgtttcgagacggatcatctctgctcatatgttcaatctaggtcctatcgggctccggaggttatattgggtctttcatatgataagaagattgatatctggtcacttggctgcatcttggcagaactttgtactggcaatgtaggtgttttcttcctcatcatactattattataactataaagcttttatcatgcatgtgtattctatctgtgttcagcatatgaaaatagggctataatagcaattatttggataggaaggaaactaaaatgttatcgatatagcatttttggattactggtgctttaatttttttttttaaaaaaaaaaaacagttttttttttattgggaggtgaatttccagttgacagaacaaacttgcatcctaacctcaaattaatctaaatcaattccttggctatttatttccttcaattacctaaattttatggtgtatgggttgttggacttgtattaatccttacgagaactaatcaccttgtcttatgcaacaacatacttgggttctttatgtaatttgtgcatgttcatgatggttttgtgcgattatatggttaagatgcatatttcttttgtcgctggagcttgtgatgataaagttgctttttctataggtgttattccaaaatgattcacctgctacgttactggcacgggtgatgggaatcataggccccattgaacaaggcatgttagtgaaaggtcgagacacatacaaatattttacc

SEQ ID NO: 177687 - DNA, 729 bp, Cannabis indica
  modified_base (89)..(89): a, c, t, g, unknown or other
aacttctaataatatttcgtattttataatttatgcttgattttttttatattaaactcgtaaacatcatggacacaccggaaaaaaanaaaaaaaaaaaaaagaaaagacacatgttaattcccacttaattggactcgagtaggaagacaattagaaagcaacgctccaaaatcaaatccttaactttaggcggaactcttaactctcacaattaatctttcttaaaaaattgagttaccacttccatgagattctcctttaagatcctgaaaaaatcgataaacactctaatttattatattcatgaattgacatccaatccttaacgtatttacaacatttttattttaaaaaacaaaatcttatcagaaacttcaattaaagtagctaactaatattatattattatttcaggaataatatcaatccaacttttcatataaaatgtaattaatggtataatcttgtacaaaatatatcattgtatatatatagtaataaaaaaaacaatgtaatccactttttctaattttttttttttttaaaaaaaaaaagaaaagttgaaaatatttgtataatattgtgcaaaaatcctaaaatgttaattcaatattaacacaatgtgatcctcctaatagtggaaaaaaaagagtagaatatttcaccccacaaaaagagaaagaaatatacatatgtatcaatgatttttattttgtaaatctcaaa

SEQ ID NO: 177688 - DNA, 861 bp, Cannabis indica
aagagtgcttccactcagatgacacttctttgatgcttggaatagccccttgctcaacaagcaaaaatgataatcttgtttggcattacaccccgaatggaaactacacagtgagcagcgggtataaagaggcaacaaaagatgacatgaaagcaggtccttcggcgaatgaggtaacaaagaattggtggaaaggaatatggaagattgaagcccccccaaagatcaggaacttcatttggagaatgtgtaataattggcgtcctgttaatgtaattttaaggcataggggtatgaacatcaacccgttatgctgctggtgtggtgagaaagaagagacaatcgatcatagtctttggttctgtacttcagcagaaaacatttggaggcgattttcaatttggcctgttctcaaaaaaagcagaaaccacacactggacatgctcattcacatcaaaaatcaggtatcaaaagacgacttccttttctttctaattctgtcttggctgatctggaacagaaggaataagaagcgtctcaacatttaccttcctcctactgagatgtggatccaatgggctcaattggaaatcgacttcataatgaaaaactgttgggttttatgccctaaataaaactcatttcaatataatcagatttacttattaatatagatcagaaataacatttaatgttgcatggttcacatgacttatttcatgattatatgtacataatgtataaattcatctaaaacccttttcacatacttgatcctgtttattgtgcagtcaacacattggacagtaaacatgactatgtgaataaagtttcctagatttatcagacatagggttttac

SEQ ID NO: 177689 - DNA, 1369 bp, Cannabis indica
aggaacaccttcaaatgtattcttaccatatcttaaaagggtaatttacattttttcatcgttaattggaagtgcgagtaaaaaacatcgtttgagcttggaaccttaaggaacctagaattaattgttttcttaccatgttcaaaaattaattatattttaaaccttcaaagaatgaattaaagcatgaattagtattaagctaagtacagaagtaaagatttctacctaaaatcagagactgttggatctttaaataagcctctttattattgtccgtaagactaataattttccaagttaattagtctcaacattaaagcatagattgaaatccgtgagagtataatcgccgagccgaaaccccaagaatccaaaagtaagtgtagtcttttcacacaacttgaaattaacataaaaggtttttatcctatagaaagttcataagtttgaaagacgcacacctctcttggagtagatgttagaatcgaaggttctatgtactaatcttcggaactagacaccaaaaggttcaaaaagcagattcacttctcaacacttctagatgcgagaaacacatagaagcgtacgacttagatctatcctaatcaaacctatgtctcaaagtttaggccattagaaccaagaactcgagacattcaaattagcctaaaagatggttatacaatcaacaagattcaaaaggaaaaatggagtaaggatagtttggcaagcatgcataattaagaaactaaagttattacatacaacctcgtagttacggcaaaatcattgtatccgcaaacataaataggggaccaacgacccccaaatgcaaagaaaaaaaaaaaagaggaaggataatgaacgaagatctctcaaggttggattttgtcaaattttgtcttagtggtagtaacaacaacagtttttacagaaggaacaacctctggtttggaggtcttagtacaaagaataatcaagcgggaatttcctgggacaaagcccttccatgtaagaaggcctttttcagacgagtgatgggcccaagcccatctaaagtccaaaagacttgcttccaatgacgagacttacccaaatatggaaggctcctagccttatagaataggcaaagccctctggatgaacattgagacacaccaagagagtaattccaagaggtgcctccggaagccctttgaggggtgacgtggatgtcctctgacacctggtcccatcaatgagatcttttctcctatgtcaggacatggtagtatttgcaacgcgaaaaggatatatctctttgtccaacagcgacatcttcaattgtagcagtgctcgcgcgtgacatctgtccagacctcgtggt

SEQ ID NO: 177690 - DNA, 1006 bp, Cannabis indica
atctaatcctaatccaatcatgatgatgatactaattattaataataatagcaattatatatataatagtacgtacattatttacagaaatgaagtgcagtacaaacatatggatcacgtaattagtatacttgctatcatattatagatgatgaagttgagtggagcgaaagcaaactaaaaagacccggaatattgctaaaacaaggcagcatcttttatattatatagagagtcgccagggaggttccttttcatgtaatttataaagctttcaatatataaccgcttattattatctctacaaatgctaaggggtgatagtgtaaattaatattgaatcctgcacataatttaatttaataaataatataaaaaattaatgacatattatctgcctaagttttttttaattagatcaaattgtaactgcatatattataggaattcttttattaatatacaatatatacattaaaattacataaaaatcgttgttattaataatatgttaatctcaaggaactctcactcgacaaacaaatcaacttcaggggaaaatccctctctaaagttccggccactctaccaccgtcaatggtgggaatttccttgaggaacaacaacttagagggttcgattcctcaagagattaaaaagttgggatttttacaagtaatggatctgagccacaaccgatgagatgactcaattccttccattctcttcaaccacccattgattcaacagttagtttcgtttaaccaagtctcttctatacagtcccgaccaccgtgggtccgtgcgattgaagcactgtggttctcgccaactaccgtgtgtttcaaaccaccatgaatctctgtctcctcagattgttcactactagaaatatggtgtatatgtctttttcgattttttatttagtttttacggtactaaaataaaaaataccaaacataaaaagtaactaatgtcctactgacctatggcttcggttacttag

SEQ ID NO: 177691 - DNA, 536 bp, Cannabis indica
tcatttgaaactagagacatctagctggaaaagaactgttgcaaatctaacaaatctcagagagtttgtttcttagcgaagtcaatatgtctttctacttcacctgattcctttatgaatctctcaacttctttgacatctcttgatcttagttacagtgaattgcaggggaaacttccagaaaatgttctcagtttgccaaaccttcaacgactcgatttgagttacaatgtcgatctcactgcttcttttccacaatataattggagcagcccacttaagtgttgaatctttctgaatctggagtcatgatagatccttacctttgtagaaagttcaagtacttacaatttataactcatcatatatcattggtacaactaccacccacatttcttgacaattgcacacaaatcacctccttagacctttcttggaatagtttaggtggtttcttcccatggtcatccattttaaataaacatcacctaacccatttagatctttctatacaataatttcataggtgaaattcc

SEQ ID NO: 177692 - DNA, 606 bp, Cannabis indica
gaaaagatctttcaccgaaaaaaatggtgggtgacggctggaaagttatgagtatctaatttggtatgggattcaatcgattatggccatggtggttgtggagatgcgtagaaggaagaagacaaaggagaaagagaagagaaagggccggagtgatttctggggattgaaaagaagaaaggaagaggatgactaataaaaaaaagaaataaataaattgataattttaaatattttttagttttattttattttaattatttttaattaaaattattatttggaccaataaagcttcaacacatggcacttttgaataaattaacggaacagttacatttaagactaacggacttacaaagggtgcgaccttgaggactattgtatgttatctaaattttttattttcacatttttatttgtattttaaagttttagtgatttaactctaattaatatttttgaaagaattccacaagatttagaagctattgtaggtgttgtacttgtggctatatgaatcactatttcattcattcactttgaattgtgccaaaattagtattacatattttatgtgtggataattgataaacttaattttac

SEQ ID NO: 177693 - DNA, 658 bp, Cannabis indica
gacaattagaatcatatggaatcatatgatgcagtttctttagatgggtttccattaattataaattataagaagggagtagatttactgctagtaagtagatgtctgtgcactgtatgacaacaagtgtgttgtggtttagagttgtgggcttgaaccttttaactactttgaagaacctgagttgattggcgttgctctggaggttttatacaatatacctgattatgtgatccttgaaaagattccttgttggtctaggaaggatggagtctcgctgaactgttccaagttcgttgcatagttgctgctccatatgttgttccatacaggtagcaatgtttttattcttacacttatgtgaacctttgttaagtgactattcttattcttattagggaatttctcttccttaatcgatatttattatccatttgtgatgccagtagattttgaattgacacaaaagaagttttcagaagtgttagatgtcatcttttgcaacatgtatgtattgatagtgtctaaattactttaaatttcttctcagttcacgctgttcacattaggaaaccaatttctcaagaataagaatactaacagaacctgttcaaaatctgtgtgtttctctcttacccccttcagtttatttgtgtaa

SEQ ID NO: 177694 - DNA, 814 bp, Cannabis indica
tcactggttgcattgcatattaaaacttggattgggattcaccttttttgcctttcagaatgttgtattgtatttgtgtatctatcttgattggcagattgttatattaattttttgcaatgatgcagtatcttgacgaaaacaaaaagttgattctagcaatattggacaatcaacacctgggaaagcttgctgagtgtgctcagtaagttacatctcctcttatcttaacgtggttgtatgcaattttgttctgatgggtcagaatttgcatctgttgcctgaaaattcttggtttcctctgctagatgtattacatgtttgaattggttgccagttgctttaactttctttttttttttttttaaaaaaaaaacagtatattcttattatttttcgatgcatattattgcatttaggagcttcaattgagaataaatatcagtttctaatgtatttatctattctctttaatagtcatatccttcatctcgattttggctgtgaagtttaatgtgtttcatgtgtttccaactgtgctacattgccttctaatatttttgatgtgttatatgatcattaactttgcaagtcagatagcgtcagaaggatgtagggatattgctttaaaaagttagaaattaattcatgttagttttatttgcagatcaattatgttagcaattcatgagatataagaataagattatactgtgtaatgttacttttagcattacctgcaatatttatctactacaaatacaagttggtcatgcaaattaattttttattttttattgtattggtcatacaa

SEQ ID NO: 177695 - DNA, 619 bp, Cannabis indica
taatcgtacacctatatctatattacgaaaagtcatcattaatttatgcaacatctaataaaaaaaatataaggaatagagttgataaattaattatagtatagttgagttaatagtggaaattaatcattgaagaaagaaataagagagtggtgcataaaattatgggagatgatgagcagcagtaccaaccattattgctgggtctggagtcacattcgaggattccagacttgtcatcagttgctgtggaagagtttttggagcagaggccggtggcgtgtagatggtggccgcgcctcgtgtgctgggagtcaaggctcctctggctcctctctggggcttctatcattgtctctatttttaactacatgctcagctttgtcacactcatgtttactggccatttgggtgcattagagcttgctggtgcctccattgccagtgttggaattcaaggtcttgcttatggcattatggtaatattactttcttttttcttattaagggtcttgttaccccatataggaaaaagattttaaaaaatatatatatgcgtgtgttttatttggttattgatgttagtaatgtttcgatgagatatattataacgcaacat

SEQ ID NO: 177696 - DNA, 714 bp, Cannabis indica
attacttattagtaaacatgccacaaaattcgaaaaccccaaacaccaaaccacaaacaccaaacccctattctcattcccattccctggcccattcccattcccattcctattcccattccaattcccattgccatccccattcccattcccattcccattcccattctttggcccattcccaatactatttcctttcctatttctattcccattcccattcccaatcccaattcctattcccattccccaaaccccaaaatcccccaaacacaaaaattcgaagaaccccaaaccacaaacaccaaacccctattcccattccttggcccattcccattcccattcccattccaattcccattcctattcccattcctatttcctagcccattccaatttcttagcatggttactatgttgggttttatgccctaaataaaactctttacaatctgattagttatcaatataagaaatttgaagtgattgatgtttgcatgaatttttcatgctaatggtttaatatgtttaatatgtttattacattcatacacacaaaatcagttaaatccagatcatatgtttattcacaattacagtatcgtcaacacagtggaatgtgattgtgatcatatgtatcaaaagttttggtccctgtttcatcagtgttattggatttacactaatgtgtataatcagcgatgatgtgta

SEQ ID NO: 177697 - DNA, 617 bp, Cannabis indica
atatatatatatagtaaccatataatatataggtgccgtttggtaactacttttgttttttaattttttaatcacaaaatgaaagctaaaatttttgtttttaaaaaatttatttttgaaaaacgaaaatgcgttctgtaactacttttgtttttcaattttaaaaacagaaaacaaaagtgtgttctgtaaagttaatttttatttttattttttaattttatttaagtcgggtctaagtccggggttggattcgggttcaagtcaaaagccgggtttagcgtcagggccgtagggaggggatttgggtccggatctggtcgtaatctaaaagattgattaagaaaaaaaaactgtttaaaaaaatattgaaagtgatttttttttgtttttaaaattttgatttctaattataaaattgaaaagtaaaaacagttttatagaacatgtttttaaaaaatattttcacttttctacttttaaaaacagaaaactgatttaaaaaatgttaccaaacgccaccataattaatgatgaaatgaaataacaagtcggcctacgtaatactaaccctcctatattatatgaaggaaacaaacatatatatataaagatat

SEQ ID NO: 177698 - DNA, 735 bp, Cannabis indica
gcattaatgtctttggtatgcatatagcaatttacatatgaaaaaacatataaatgtatagaaaatgtgtattataaagttggtttttatttaattttttaattattgtaccacacatcaattcacataaatatgtcatatgtcatgtcatatggacatagttaagtatttgttgaaattaaaaaacattacatactgttatccagatttttgcttacttaagtggcgtgcttacgtcgacaatattagtaccatgcggcaatacaattcaccaacaaggaagttaagtcagcaccttagtcaacggggatcccgacactcaaacgggatgacaagtgacagaccagtcaccttaagccgaccagcctctggacagtacaaggctggccagcttgcttcctgcaggtgcctggccagtcaggattggacctggcaggattttggtgcgcaaacttacatgtggactacaagttagattgcgaattaagccttaaaaacccaataaaatagataaaaaaaaaaagacctatgtttaaggagcattttagtcttttatatttaattaatttaatatataaatatctacttattttctttgtaaattagggtttaagctctcctatttaaagagttttaacttcaaccctaaagaccctaagtctaaacctgtcattaatctctctaagtctcatttaagccgtcaaagttctaagtctaactctctctctctctctc

SEQ ID NO: 177699 - DNA, 729 bp, Cannabis indica
aaaaatagtatatggagtaattataaggaaaatataaaatgatttatcttgccaaatacaattactatatgtatagattgttaggtccttttttggcaatttagttgtcaaaatatttcttaattaatgtgcattttattgagcattcaatttgtttttatcaactctagaccctttttccagggggagttgtgtttggtacttgtgaacttatttggtttaaaagttagcatgtttctttagttattgttggttttcgattgtgttactcagggggagtagttatttgttatggctaactttaacttgcaggtactttgtgttaaaaattattttgttcatctaaagtgccaaagggggagattgtaaagtctttttttggcaagttagttgacaaaataatttttccatttatggtaagattggtgtgcattcatattcgatttcttaccttataaattcggattgtagttgcccttttccttgtttggaaagttgcactttcagctgaactttcctttgttgaaaacttctcaaaagagaaggaattctcttttggaaagttgtcttttttagggaaactttgtttattgccttttccttattgatttcgattgtatcttgatacaatcagaatatctaatctgtttttggcaggaatcaagcattgatagaagatcggacccgattttagtaagtttcccgtttctgggtcagatctgctgcgtc

SEQ ID NO: 177700 - DNA, 961 bp, Cannabis indica
ataaatactgaccattatgagtcatgaaattaaaattattctcgtgatcatgagatgacataatttcccaattagatattgatgatgatgatgctgctgatgagtccaagtaactctgtaaaatataaataaaaaacctaagttgagattaattgattaattattatataataataataatgtaaattaattataattataattagtaccttagagagaagattttcatgatgatggtgattatgatcagtataaaccaataaacgtcttctctttgatttttcagtgaattcaaacaaggcatcttctaagtaaccagttgaaaaaacatcatcatcttcttcttctaatatttctgagcttaataaattaggagacaaaagaaatgaactattctcactcatatctgcaaatataatataacagagagttataaacagggatatatatacatataaatataaatatgagaagaatataaatagtgagtaagttggagaaagagacaaaattaaacagtgaaaagtaagtagaagatggaagagtgaaattaccaaaagacatgttggtgttgagaaatccaaggctgtcgaaattgttgttgttgttatgatgatgatgatcccaaccttgggaagagttattactattattattgttattgttatttgtaatatttatgttgttgaaaaacgacattggaagatgaaactggtgatcattcatgttagttttagttgaaacgacaacaaaatatttggttaggatggatggatggagaaaaatggggggtgttttagtgttctttctacctatctattatgcttctatatatatttatatgcaacatgggaaaaagaaagtgagaaggagaagaagaaaaggaaaaggtaataatgacaataatggtaaaagtatattgtggtatcttaaaatgtttaatgcttaggttgtgtgtttg

SEQ ID NO: 177701 - DNA, 650 bp, Cannabis indica
atatagacatcaaatattttttctataagggaaaaggtaccacaaggacatatcaaaatagaaaaggtgcatacagatgacaattcctctcatatgggaaaaaagttataactctaggaaagttttatcattgtaaggacttgcatagaattggaattagctaatacaactttgagaatttatgaactccctggtggcttataatcattagttttgagttatagtgacaggctaggtgttggatcatctctcattaaacttagccacgtgttcatcctagatcatctctcacatacttagttagaaaaagaaaataattattatttttttcagttattttctgttactcgaagctttcaagccatgtttgtgttaaggtttatgcactgaaaagcctataaagatatttatatttataaataagagtttaatattttcatatatgcttgaatgttaaattattaatattttatattgaataatttatatataattatcagaaaatttattagtcatacataagattatgacttgtattgtacggagaattaatgtcacttatccctgaataaaacagtcagcaacatataaagttatgaaatctttattcaacggttgctagtacactcactgatgcccgttatttggtg

SEQ ID NO: 177702 - DNA, 861 bp, Cannabis indica
aaatttaacacagtacacagtataaaaaatacacaatattttttaaaagaattttaccccacagtaaaaaagaaaaaaagaaaaaatttcaatatatgacgtaaaaatccttaaaaaatttacataatacatgaatacaaacttttatcatagttttattgtctaaatttttaaggagacttttgtctcatgtgaaaaaagaaaaaaacgtttttcattcataagtaaaaattaagtgataaaaatttggtgggcgtaaatagatattggcacggctcaatcagataaaagaactcatatatgatgatcaattaagatgagagctttgatttgattgaaccatgccaacatctaccctaattagcccatatttttcacataactccatctatacatatagatgtatatgagtcattatatatatagctatttataatattatataataaaaccagctagaggaagggaagaagtaaactgtgagttaatatatatatagaagctactaatcaatgattgaagaagtgatataaatagtaaaagtaaaatataggtgcacaagtgaagagtttcacatatatatatagttaattatacacttatattatgttgtgtgtgttcttatatagttattgatttggagagaaagtaataagaaaaaagaagaagaagaaaaatacaatgaattgatcaattgaatggagtggagtgtgatattgaaatgatgatgataaaagtgtgattgaaaatgtgagaaggtgatttctcatctttcgtacctaatattttgttggtatggaagaagaagaagatggctaatataagcttctcaaggcccctcactactgtaactgcagctat

SEQ ID NO: 177703 - DNA, 599 bp, Cannabis indica
ccaaaaagttgaaactttacgtttttaaaaacagaaaacactattttgttattttacaaattactttgtctttttgtaacttttagttttactttttaaaaaaagaaaggccaaacaagcctaaattgttttacaaaaattaattttctagtttttaaaaataaaaaacaatttttagttatgatgtcaaaatatatacttagtgtgtctagcatacctcttatctcttatgtattatggaattttatataatcatcaatatcaaatcaaataaaatataaatatatatatatatataaaggagagttttaaagcattgaggtggcattgtataatccattcactctatctattattttttttgttaaaaactcacattttttatctattttatatttatttgtaaaaaaaagtacttaataataacaataataataattcaattgcaccttttcactttcataaccttcttactattattgcatatttatcactaacataaataagtaaaataaaaaaaaaaatcagttacaactttttaacttccatacaactcttaatttaattcttacatattactcactatatataggaatata

SEQ ID NO: 177704 - DNA, 687 bp, Cannabis indica
tatatccaaacattaaaaataatgatttaatacttaatatgtcccttcaaaatgaagtgtataaatttgaaattcattttggcaataaatctttgaaatggaatgaaaaaaagaaatttggtaaggagatcagcaagattatgtttggtgttgacgtgaaggagcttcaactgaccactttgtacccatacacggataatgtggtaattaatattaatatgtttagtccgttcgtggaagactgagttctcaaaaatttaataaatgttttgttgtcacaatatataagggttgaatgtaaattattaaccccaaagtctttaagtaaagctgagcaatcatttgcaagttgtgttcatatcacggacactttattattttgaaataaaatatttgttattataataaatgtgactttatatggaaggatatctaaggatgaaatacacatcaaaactaaattaaaaataatccaatttctatatccaagcattaaaagtaatcatttgatacataatcctttgccaagctaagttacgtttctatataataaaaatacatatatatgtatacatgtactaagcaaaaaaattacgtgcgagagacacgtatactaaattttaatgctaattttttttctactttattaaaaagtgatacaattaaaattttttaaaaaaatatatt

SEQ ID NO: 177705 - DNA, 538 bp, Cannabis indica
agaaagtgtatcagcgactatatgtagctatagctcgcagactcaaagtttgaattctcttaataaaattatcagatatatagaagttaaaaatgatattaaattatcatgtattaatatttccaatttttatatataggctatctatatctttcggtgatatattataaatctaagaagtcatgtttttaaggtctcgtaataagatatataagcgtaaataataatttatgatctgtatattatatctaaatatttaattacaatatactatatacacatatatatcaaatcaacgtatatatatcatcaaacatctatatataattaataattattgatttgttcaaccaaatgtatataaatgcaagagtacgtatacgtagtgtatactatatattctttaattaattataaattgaagatgcatgatcaaataatatgaggccgtggtaagggagagggggaccgacattattatacatatacagatcgaaatggatcgattcatctcccggcagatccaagcaacagctgc

SEQ ID NO: 177706 - DNA, 614 bp, Cannabis indica
agacaatggaggaacaaaaatcagagtcatcctcctcaacaacaggtcgtttaccattgttctattagctaaagatttcaatcccattttaaagcttttcttttgaacagggaaaggagttgatgaagaacgagttacaactatatttatatatggattaagagaaaaataaaaggatagaaaacggttatgggattcggttaatgggagttgaaaaaaaaatttgaagaacaaaaagaagaggaaaaatggagttgggatcatggagaagaaagagttcagctatggaggttgataatttttttttaaaaaaaaaaaactaaaaagaaatagaaaataaaaggaaaaagaagagaaaaagagaagaaaatgatggatgattgattgatagaggtcatagtctattgacatgtagtgatgcatgcatgaaatgtgtgtgtaagtggtaaaattgtaataaaataaagttgaagagtaaaaatgtaggcttaaccgtgtggtagtattttagtaataaaatatgtattttgtatttttagtgtaaaaattttttttataaaaaactaacataattcataaataattcggatatagaaaagaatattaatattttt

SEQ ID NO: 177707 - DNA, 1025 bp, Cannabis indica
gaaaaaaatcacccgtcccaattttcctatcccaaccctgtccctccaacaaataactgccacatgtctatttactttttcattcatttaattcactaacctttccactacttctattttttttccgtcagttaacttttccacaattacctcatgtaattaaatactcacttcttatatatatatatataatataattactttttttttaattttacatgaaagctatttactagttttaaatttttttttcttttgtatacaattttttttattgtaaagatagtataatttactattattttggtaatatattcgtatagcataatcaatttttttcatgaaagaaatatctttttagaaacttatttttcatttaattaaaaaaaaagattttaaaaaataattagataggtgttacaaatagttatataggtgttaaataatattaatacaatacaatccaacacaatacaatacaatacaatattacggcgtaaacgagccttatataaatttatttttgcattctattttattatgctattttttcaaaaaaaaaaaaaaattattctataatatagaaaagattttacatcaacaaaatatataagaagtgttattttcttttaattaacatacataattttttttatacaataattttaagagaattacataggacacaaaatgttattattaaaagaaaccgataatttccattaaaaggcacaaaattaaaatttgtcattaaaatcttacatatcaatttattaaaaaaaatatttattccataaaaaagttacctcatctttttacaaattgaaaaaaaaacaaatagcaaattaaatttgcatgtaatgtacttttattgagtggacgtactatttgctattacagaataaatagtttattttttttttaaaaaaaatagcataataaaatagaatgcaaaaataaacttatatatagtattaattatttgtaacacctatctaattattttttaaaatcttttttaattt

SEQ ID NO: 177708 - DNA, 932 bp, Cannabis indica
ctttggcttacgtttttcctccttcattcgatgaagaactgctcgaagagaagtctctcgtcctgaagattgttcacctcagcagataaggtctcgatggtctcgtcaaaatggtcagcagcctcgagatccttagttagcacattgattttcttttgagcggcaaagagcttcttgttggcttcacccaattccaaccgaacagttctgacttccgctttggcttctccagcatccttcctgggcaagtccgcctacaccttcaaggtgtcagacagagcggcgttcttggaagcaacagacttagaccgggagtaagtgtaagccaacttcagactggcctgtacaaaggaaaaactttagcatattgagctaagtatggaagattaaggggatgtatcaaaaaaggcttactctggtaaactccttcaagactccgcccaccagcaattccaaagaagagtcattgtcagcaccagccagttgctccctgacctcaggaaccagccggttcatataatgggccagcatatccttgccctttttggcctctagaagtaccggcaaaggtagagtaggtgcatgtacccgttcaggatcactcctgactagtttagacccaaccgttggtggtccagactccttggacttggctgctttgggggcagaggggttagcagcaatcagttcctcggaaagatcaatgacctccccggaaggcctcttttcctttgtagaggacccctcactggccttagactttttggccggaggagaggcgctagagcttccgcctattctcttcctaagagcgttgagcatttgccaagacatgtctacacagaacgaaaacaacgtggttagaaaacagacataaaaaacataaggcatgaaaatcaagaatctcaaaaaaaggacaaagcaatatgcaa

SEQ ID NO: 177709 - DNA, 466 bp, Cannabis indica
ttgtgtttgttgagcatggtaatgaggtattctagggtattttcttaggtttgatttcatctagttcaagagcttgaactttactaagttaaagcatgatttttggttatttgtgtaatctgaattttgagagttgttgttgatgttgtttgctctctactgtgatgatttttatctgtaagaagttaattttgggtatggtttgattaaggttctaatatatggaaaagtgagcatttttaaaccttaaaatctggttttttgggtttttcaaacccagtggccgcggccagatttatggtcgccgccgccataaaacctagcagagagcaatcttcttcctgattttgttttggccataacttttgactcgggactccgtttttgacgttctttatattgttggaaagctcattccgagctctttatgattatatgtattttcaatgccaactttatattttgt

SEQ ID NO: 177710 - DNA, 793 bp, Cannabis indica
gtgatgtcatgtcacagtcgcttacatatttattattgattaatacatccaaattaataagaaaacaaaaaagtcagaatatttatctttcatattaattacttaattaactttttccaagctcttaataaagaaaaaaaaacattaatattaatattaataataaattaaattacattaaaaatcaaatccagccccatctccaatcaaaatcccacaccttgctgatgtggcgggtacccataacccggtccattcgggtatccatatccaggtggcggcggaggcgggtacgacccataaccctgcggtgtaggaggatatatattatgatgatgaggaggaggtggtgggccaggtggcggagggtagtagtgataggacccaccttgtccgtaccctacacccggttgcaccggaataaaacccccaacaactggccagggtggagtggccaccatggccgtggggcccacctccaccgtaggataaacttaacgggtttctctgtgagttgttgtggtgggctgagcttataggagaaatggagttcgcctttgggtttgccggagggttttctaacctggtaactcacgaactgtgtggatgatgacgtggcagcagagtcgagaagctctttgaccgggacgttcacttggccgatttcttatcgccgagggctctgtcgcagaagagggtgaaactagatttctgtgttgggcggcggaatcagctgatgagtcgttgatggtgaatttgacggggaagttccgaggtggggtttgtgccggag

SEQ ID NO: 177711 - DNA, 1324 bp, Cannabis indica
ggctgcgtggttgccacaaaatctatcatgcacttctgacaaaagtcgtgcagcttcttcttctatgacacacctgagtaatggcatggaaaatcctcttctatacataactccctctaccatgatgtaccgtgcaacctttctcctcaattttcgagcttcgcttctattgtctgggagttctctagtgttgaggtaggctactattggcgtcatccagtttggggatgtatcaatcattttaacctcttacgtgctagtgatactagggtttttgggaaactggatatgaattagatttgctttatcatttacgttgctactcgtaagtcgagctaatgcatcagcagttgtgttttcttccctaggaatttgcttgagagcatagcttttgaattgtgcgagcagatcatgtattttgcttagatatgttatcatcttctctccctgagcctcgtactacccagatacatgatttaccaccaactgtgagtcactacagatctcgacgtgttcatccttcatctcccgagcaagtcttaggccaacgataagagcttcatatttacgcttcattattggatgccttaaatctgaatttgatcgcagcgtgcaggtgttcgcgcccctaggtgtgacaaggggtcgattcctgtgttggacaactgatctgtagctgacacgtccatatgtagcttccaagtcggcttgtcttcaatgttgcttggctgaggtacttgtactggcactgggttactttctgaagtgctctcttctttacccgcacattcaaccacaaaattttctaaggcttgacctttaatcgttgttcgaggctgaaagataatctcatacaggcccaactccattgcccatttaagaaactgtccaaatgcgtcagatttttgtaatacttggcgtaatggttggtcagtgtatacccgaaacggatgagcctgaaagtagcatcctgcttgacacttacagcaataagtgagcttttttataaatggataccggccttcagcttcgatgagtcttttactgatgtaatagactgggtgttggatattgttctgttctctgatcaggtacgacccttacaacatgtttcgtgactagaaggtatattcctaactcttctccagccaaaggttttgagagcacaggaggttttgcaagctgcgtatttagctcttgaaaggatttttcgcattcctacgtccattcaaattgcttatatcctcgcaggatgttaaagaatgggcaacacttgtctgttgattttgaaacaaatctactggatgcggtgattcgatcagtc

SEQ ID NO: 177712 - DNA, 661 bp, Cannabis indica
taatggtgtaacaattgaattttttcctcggttctgttgtgtgaaggagcaggtaacagggaaggaggtgttgcgcgggacactcagtaatggtctgtatcagttcaagcctacaccagatttttctcacagtctgtcttctaaagctgccttttctgctgtttcgagtcagcttacagttcctagtaatgttgttaatgtttccctgaaggatgtttggcataggaggcttggacatccctccacctatgccttagatagagtccttaagctgtctaatgtaagagttaaatcaaatgaaatacaatctttttgtgatgcctgccaattcggaaagtcacatgccttacctttcaaacgatctattagtcatgcttctgttgttcttgatttaatacatactgacctatggggacccgcacccatagcctcccaaaacaattaccgatactatatccactttgttgatgatcacacacgatatacatggttatatcctcttaaaaacaagtctgaagctcttgaagcttttactcagttcaagttaatggttgaaaatcagtttaacactaagataaaaaactgagaacagattggggtggtgaatacaaacccttttctcagttagtcacggccaatggcatcatttttgatcattcat

SEQ ID NO: 177713 - DNA, 886 bp, Cannabis indica
ttcccccacggaccatggttgtctctagggtggccattggaagatccatttcattagggctaaaataatgagcattcttactaaactcgccctgattagtacgtatgattgaattggattagactgaactagacaagattgaattatgctgaaagtaatcatatttttagtttaagaataaactgaactattttatttattttttaaaaaaaattaaattaaaataaaaatatataataacaaataaataattcgaaataataaaaataaaaaaaaaaataaaaataaatcaaattataaaataaaataaaataatatattatatataatcaaatatatataaaaaattatttatcatatttttatttaataaataattaaaatattaaattaaaaatacttaaataatataaaattatttatgttaaacactaatttaatacaaatattatttttttttaaaatattgatataaattttttagtaatttaaaaagaatatataaatttattgtcatattgtttctcttagaatcaatttaatgaactattatttatttaatattattttaaattttgaaagcttatgtatgatcattcaaaattatacattttcactcctttaaatgaataaatttttgataaaaaaattataaaaaatttataataattctttcatttattaaatttaaaatatattaacaaaactaaaatttaaaaaaatgataacaaaaatctcacatgtatgagattatttatcccactttgttgaacaggataaatagatcaagacaaatgagattagttggattagttatctagacttactaacatgctcatatactctaatccagtctaatcttgctttatcagagccctaaacgatt

SEQ ID NO: 177714 - DNA, 675 bp, Cannabis indica
ttattgggaaacttcagtacctaacaatcactagaccatacatttcctactcagtgaacaaactgagtcagtttttatccacacctcgagtcacacatatgcatgcagctcaaagagttctacaatatgttaaaagttgtcctcgacaaggcatcgtctttgttgccaacacaaaagtcaaattacatgcctacactgactcagattgggcaacatgcccagatacaaggagatcaactactagtttctgtatctttattggatcatctatcatctcatggaaaagtaagaagcaacacacaatttcaaggtcttttgcagaagcagaatatagagcaatggctaacaccacttgtgaagtggtttggcttctctttgttttgaaagaattgaaggtttaacatgaagggcctgctctattatactgtgatgacaactctgcccaacacatagcagctaatctagtgtttcacgagagaacaaaacatagaaatcgactgtcatttggtcaggaaaaaggttcaacaaggcatcatcaagacagttcatgtttccacaaaagatcaaatcgctgatattctaactaaacctctcttttctaatcaattcaacattttcaaagaaagatgggattgaaagacatctataatctatccccatcttgagggggagtat

SEQ ID NO: 177715 - DNA, 609 bp, Cannabis indica
tggattggattcatctattggattcattggatggatccaatccaatccaataaaaatccagttaaagcatccaatggatggaaccgatccaatccaatacatccattggatctgatcggattggatgactcaaacattggattggatcggatggcaaaattcaatatccaataaatattggattggatcggatgggtccaaatccattggatgtgatccaatgaacacccctatttttagggattgaaggatttttttctggtttgaattttaaattttgctcatataggaagttgaattaataaatttgcatgttattatttggtttatatcctatgtgctttggaattactatgtcccggtctcttgatggaataatcatcaatatataaagatacgatttttgaaagaaaaaaatgtattttttttttattttttttttgttggagatagatttactgatgatatccctttttggatcttgaaattttgaattttgctttgtaataatcatcctatctttcaaattttaaattcctggcaaaaatatgtattggattcatgttttctgtattctattgaactttgttttcaattttgattagtgga

SEQ ID NO: 177716 - DNA, 536 bp, Cannabis indica
ctgctttccacaacttctcccaaaccatatttggctctttaaagcggtgttgctgacttaaccaataagcacttttaactgagaatttgcctaaaccagcaactttccagaacaatatgcccccccccctccacccaagactctaacccgaagaatatcctctgcaatctctttagaaaaacagtctttgatcaccttctcattccaaattcgagtccctaagatgaagagatccttgaccctccacaaaggttggttgttttggaattgaaagttgtctttgatgtcttccaagcctctccaaggaagccacggtctatcccatatttcacaagaaccatctccaatcaaaattccagccccattcacacaaatctcctacgcttccaaaaggcttttccaacatctcgagtcacttccatttttctccacagtccacacatcattgttttacaatacttatctctaagagcgttcaccctaaacctatccttctcttccaaaatcatccaacaagtttagccaaaagggccaat

SEQ ID NO: 177717 - DNA, 336 bp, Cannabis indica
aaaaaaaaaaacaataataaaaggaccaaactgcaaataaaaaaatccaatggcttcagtatcaatgaccaccaccaccacaacactcgtctcagtcccacgcgccgccctaaaccgtcccaactccgactccttcttcaaccctattccgataagaacttcaaacaacaacagatctcatcacctactttctcgtcgtctccaagtccaggcctcttcttcctctctcatcaaagaaaaggccgccgcagccctaaccgccgcggcgctgactgcgtcgatggtcgtgccggaagttgctcaggcagcagggaacgatcttactccgtcgttgaa

SEQ ID NO: 177718 - DNA, 797 bp, Cannabis indica
taatatttattaatatagcctttcataattagttaagaatttatcgtatcatttgttaaattaagattcgtagtaatagtaataatatgtaaattttgtttactaaataaagaacacaaaacaataccctggttttccaacacctgcgagaacaactttagaaaatgtgataacatttgcaccatttccaccaacaagagatgagacataacttgaatgaacattttaggtactcaacactcaccattaataaatatgcaccaacaataatttctcgtctcttgtaaaatgccacttaaatatatggaaaatatatatgtagaagtgtggtatatatgaggtatatgctatatagggcctccatgttttcatgaagcccccaaccactatatctgtgtatatatcacatgtgattttttctctttatagaaatactatatgtgatttttttttctgagaaaaataccatatgtgattgatcactatatattatacacaattgtcaaaaaagcatatgcaaatcctaatgtaaacgtgtcccgcacgtgcaggtggaccatcctacattgcaaacgtcattatatttggacttatagaagaaagaaaatggaccttttttaattgtcggacaaaaatgtacttgtttagcaaatttgaaacatcaaaatggtgataatatcaaattatattaattggaagcataacaatgtaatgtgtgtgtgttagagatttgagttcgagtccaattaaacatagtatattaaaaaaaacgcaataacaattttgcttttaatcat

SEQ ID NO: 177719 - DNA, 626 bp, Cannabis indica
ctaaatcataaattcaaattcaaacttcaagcattaaattaaaatcaaatacaaggcaaaaagagatatgaggtgacaatttatgagtgtttgaatttaattgttttgatatttcaaaattgaataattgggacttgatttcaattcaattactcagccctaaaaaagttgttgatatgaacctgcccctggatcctagggtctaacagttgccacctccctaatcatccccattagttaaacgaagaacgaggagaataataaatacctgctcagatgtcatatccttcgaagaacaacataatttatcattccaaatatcttccaaggatagtaaagttcctaccaaagcacgtattgcagctaatgtgctaacgcaatcaagcttaagactggattgcatcataaccatttcatccataaaattgacctgcaatagagaaatgtatatgcctgttatttcttcatattaataatacctgaggaaaaaaaaaacatgcatctattaattttaaagtgatttgtttccagatttattttcatataccaaatctgaaatatttgaaggagatgaccagtaaggatgctgacaaaggttgtaaagaattgtttcatgcacctggatt

SEQ ID NO: 177720 - DNA, 576 bp, Cannabis indica
taatataccatataaatttccctctgaatattaggtagtttgagttattgtgtaagactctcatttttgtaaagattcaaattttttttttttctatcgtacatacataaataaaaaattaggaaacttacaaaaatactgaaatttaggttaatttttacaaaaatactgtcacacggaatttttttcaaaaatactgtgtttttataaaacaccagtaaaacacaaagcagaacaactcaaaacaacagtagaacactagtaaaacaccagtgaaaacttaacacagtatactgcagtatgaaacttataaaaaatacaagtaaaaaaagtaaaaaataccgcataacagtatttttgtaaaaaaaatagcgaaagttagtataccatataaatttccaataaaaaatttataccgaaaatataagatctaaatcttaaaaagaaaaattagtaataaaattgtggttttaaataatgtatattcttttttccttaaaaagctcaattttaaatttttgcacaaaactctcacctaccctaaagacgatcctctactattcaattggatactta

SEQ ID NO: 177721 - DNA, 604 bp, Cannabis indica
aagaatggatgaaagttgcttggaaatcaaagagaaaatcagttcatgccacccaatgctcagccgaaaatagaggaagaaaagagagttgtttctttgaaattttctttcttttcaacacttagtcaaaattttgtaaaaaattggaagaataaaacaaagtcatttatctcatttatttcagccaacaaaacaattaaaataaacatttaatttccaaataaaagtcactaaaagacaaaacactaatggggcaaaaagaccattttgcccctccaccataaaatcacataaatcatactaaaggggtatttttgggaaattctaaattcccggccattcccgacattcccaatgtctaaaacccgtccccaaaatactaacatactaagttgtgatttctactgagccaaacgccgagttccaaaataccggacaccggaaatgcgaaatataaaaactactgatgacataatcatgcatttctgaattccataaataacagtaataaattatttaaatagctataaataatttcataattaaacataaacaactgctaatttccaaattaactaagcgggctttacacatgttgtttact

SEQ ID NO: 177722 - DNA, 697 bp, Cannabis indica
gaaaaaatttgtaaaaatacaattaaaaaaatataatatgttcactctattatttcttaaactccttttacataagatattgatattgatattgatattgattgtatattcattgattgatgattgataatttggacagtaaatatacacatatgacatgaatcatttttattatttatttattcaagagttgactctttgagcaaagatattaaagtttgaaaaaccatgtctccctccaataatggttgggaagttaggaatattaaatggaccggataacatgatctctatgcatcatagtcaggaaaatggtatctccaagttgatggaagcctagttggcctatatgtctaatgttattgtgtagtaatgaaagtcagcaccccctcaatctgggattcacactgagctaaagtcactagacaattcaaattctccaaaatttgaaaaattgtccagctctgtaaaacttcaatgtgaactgaattagttgagggtcatttagtacatagcaccattgtccctaatttgagtctttctttcttgggttttcaaccatttggcttcacaattatgcaatctaagatagcacagaataatgccagattgaaaaatgtcatgtcagattagattaatagaaacttatgatgaattagactaggaaaaataacattttcttgcatcatgggatgtg

SEQ ID NO: 177723 - DNA, 550 bp, Cannabis indica
aatgtctttttcatttcaaaaagcagagtcattgccaattgactcatgttccagagtagttttactgtattaacatcttgagttgtgacagcataatgtagagcgtttctacccttattatcaacaacttggcagctatctggacgtctccacataattataggcattacactcctattgttattggcaattgcgatgtggaaaggtgtcataccatgtttatttttgatgtaggcactgctaccttcatctttttcaatcaacatctccgtaataatagaagaatgaatagttgccgcatggtgcagaagagtacaaccctcctcatcgccttggttgatcaaattatgttctacttttgctaaaagctctctcaccaaaactgagtaaaataagattgtatgtattcatatactcaaaatattaatggacaattatatataacaatcaacatatatcgtgcttacttaagattctattatcttttttaactagggaatacgttcgctcttcggacggtttaatcattttttttaatttatattaaaat

SEQ ID NO: 177724 - DNA, 606 bp, Cannabis indica
ttttttttttttataatttttatccagtatacataacatttttgaaaaaaaaaactatgtttttacacacataaacacatataaaatgtgtaatttccacttttatcaatttattgttttagtgtcatctcctacgtcctaccaaacaattgattgtatatatatctacatatattattaaatattacatattaattgtaatttgtaatattattaaagttaattaattaaatgaatatacatatatacatatgacctctattatattttcagaatataattgaagcaaaatgcctggataattacaacgtgccattatattggccgagtgcaagagaagtgaaaagtttgattgaaaaagaaggatctttctgtatacagaagcttaatactttcgaaatagcttgggatgcaggcttcactactattgaacatactatttataataatgaaaaacacaaaagtcttggtaaatatgtttctgattacataagagcagttatggagcctattttggtgaaacaatttggagaaactataatagatgaattatttaataggtttgctcataaggttaatgattctatggccaatgaaaaatggaaa

SEQ ID NO: 177725 - DNA, 960 bp, Cannabis indica
tttttaatttttttattttgagcccttgaaaagagtgagccctaagcacaaacctatctgcttatgcctagagtcgatcctgactgtaaacttcacccttccaactcatactaacactataagccttttttttttactaaaactaagcattatcttatctttttttgataactttttctcattaataaataaaatcatagtcttaatacttttttttaactaaagaatcaacacaatgaagagccaaacacctaatttcaaatgcacataaatttctattcaactaaattttatatgtagcacatattattgttacatttatcaccttgattaacaaacatttcaggttgcttactgctcaaaaaattataattattttaataaatttatttaatttataagttattttatagtatacttatctttaattaagaggaaaatatttaattttttaagtatattttttatcgaggtacatttaaatatattttttaaatgtatttatttatttaattgtgtaagaggaataatatgaccattaataagaatattttgctaattaaccaaatattaattttgtattaaaatcaattaaaattaatatctaatatatagttctaataaattttcatacacatcccaattatttaaacaacacatacatgagatgagacctctttttacttagaaatttttacatgaaaaatcctttttacacactttattacataattaccatcacacgcctattactacatttctacttacaaacttatttttattacacatttaccacttagtcatcattacatccatcatcaatcaaatcctactctcttccatctcttttttcattttctatcaatcaatccatcatttcactctttttttttttcttttctttttatttttaattttatttcagtttttaattttttatttttttaatttttatttttc

SEQ ID NO: 177726 - DNA, 754 bp, Cannabis indica
ttgaaaactgagaacaataaagaaaatggtaagaaaaagaaagggaaaatgggtagagtgacaagatgaagagtgacttcatcattccatacaaaatgtgtgcaagtaatattttgataaataaaacaataaaaaaaaatataagcataagaaagggctttttctgaaacaaattttcccgctctgctagggttcggctcagccttgtccctgtcttcttccctcgtgttcaaagggttcccgttctctgggattgaggtaataagctctgcaatggaggaaattctaaagaaaactcataatcttcaagtcacggatgaagatgaagaatgggaagtggacaaaagcttatctatcacgatcgcaagatacaacttacggggtcgcctctgtacgaactctgatcacagtaggggtttcctcaagaaggtgctgggagggatatggcgattaaaggagggtgaatggaatatcaagatcaaagagaagattgattcaggtcttttcttatcttttacatttgcttctgagtcaattcaaagtagaatactatctaaaatgccatggtatttatctaatggggtgctaattttggggaaaatggagaattcaaatgaatcttggaagaatgatttgactagctttcctatatggggtcgggcctggggagttccaacggatcttctgactacaaagaacacaacaagaatggcagcaaaggcaggggaagtgatttcggtgtacaattcagatg

SEQ ID NO: 177727 - DNA, 733 bp, Cannabis indica
gaagtgaattaagagtacgtaccagcggagtagcatcaacttttggttcggtgagaaagataaaatcaggagagcataacctgatcaggaacttcaactcccgaattgtagaggtttgccctaaccctctacagttctaagcaatgcctctcatggctcttgtggaggagatgagacattctcctccacaggggtacaagggtgaaccgagacactcgagtcaaaatcttcaatcaaaaaagtgccaaccatcggattcttcataatacctttaatgtgactcggtgaaaaggaaatatcatcagagagttcttcaaaggcaatcttagaagcattatcctgctctgtggagtctcacgggaaatcacgaacaacatcagggtgcattcagagcacttttggaggtcttgagcatagagaattagtagcttcattttaattttcgtttcttaaacggagtagttctttcgttaatcttagaagtaggtcggacaccaatgtcaccccctaattgtcgaatctcatacaaatccaagcgcccaaattttttcagatcttgcaacaaattctcttggccttagaaaaaaattagaaagggccttctcttcctcaatcctcgcatgagactcttgccccttaacatgaccaacagtaaggcgtttagccccataaaaaagagattcgtccttgtttagtatgagctctaacactgatccatcaacaattgcatctc

SEQ ID NO: 177728 - DNA, 577 bp, Cannabis indica
gtgacattttatgatagtctattctattcatgccaattttaaaggggaataatgaccagtaagtgagtggtgcaaaattggattttccatcatataaattaattaaattaattttaaatatttgagattaaaaaacaaaactaattaaacaacacacgtacactagaatacataagtgtcaatgatcatgaattgactataccttataaagggtctcttatatttatgagatttgagatgagataataccccatttttgccaatacctgaaaagacttcgaaatattataagggaagggaagtagtgtatgtacgtagtacattttactttcaattaatttagttaaggcttcatatcataattcatagcaataatatatgaaaaaagaaaccctgaatgaatcgacttgtacaactcatgatgatattccttgcacatgttccatgttccatgtttaattataacacttgtaaattttgagaaaatcaaataaatcatgaaaaaaaaatttatattaagttgatattttttttatttcaatctaatggactctccattagaagaagaaaaaaaaaa

SEQ ID NO: 177729 - DNA, 633 bp, Cannabis indica
ctatttccaattagacagataaactttcatctcttttggtataataaataatgttaaaaggactaggagataaaagatataacttgcagtgaatagtgctaaagctaagcactcttttatctcactaaacttcccaaatataacgtgtgaaaatgaatgttagtactctccctcaaaatggtagcgagctatttgaaattcattgctagttatgaacggggcaggtgaagtgttacactcagaaacagtgttaagaacattgactctaagacaactgggaaacgtaataaactcttatacacaagtagctggaatccatattttattaggttgaggacttgggtttggggccctgtctactcttgaaagtaaattcaaagatagttgatccagcaaatgtacacgtactggaggaagttattggggttttgacccttgcagtggcagtagatattgaatctgtgattgctatcataattttgacaaccgtggagttccccaaataggatattgaaatagacagtcattggtttagttgattcgagatgttgtggttgtagttggttgaactcattattattacaacataggagtaacccaaacggcaattgtgtaatgtgtgtgagagagatt

SEQ ID NO: 177730 - DNA, 1037 bp, Cannabis indica
accttgatattacttggtatggcatggaatgttccttgccacttgacttcatgtgttgcaatatctgatatatttataaatatatatatatacacacataagttaccaaaataagaagcggccaaaaacaaatgcaggaagagaattaaattgatgatatactacaacactaaccacataaagctttgtagccaatttagcaggctcatctttagaatcttggattagtttgtgcagaaactttgctgcctccatttctacattttggggagacgccatctcgtttcaactacaattcaatcaaaacacggaggaaaaaaaacaagctgtattaactcaagctctgaccttcttagtagaagaacacaaaatttgagcacctttaagacaccgtatcatgcaaaaaatactagcagacgcaaaatttaacaaagtgatcgaattatgttccaattgatcaactgagctaggaaatagctcgatttcagttcattgtaaccaaaacacccaaaacccagataacaaacctaccttagttcgtgctatccatcactttccgtcaaaatcttactagggtttgtttggttgcccagaatataaattacagccaaaaaaaaaggaaaacgaaaagctcacctttttctgatacaaattacgcgaaaggaggtttaagagaaggcagatagctgaggggtatcatatcttctaggatccctaatgaagtcggaatgatctggtgatcgacccaactggggaagacgatggtgtttgatcggggttctctgagagagtttcagtagttttagggctttctcttttctagtttatttgtcatgagcttaggtgggaaagatagatagatgacagaggccccaacatcgaaaggctcttaaacgacgccgctcagaaaaagcaaaccaaattgtacttttattttttaactttttttctaaatttattttatttattttttttgaagttgtgtatacacatagcactcactatacacactcgtaagtctgtttgagctagtctcg

SEQ ID NO: 177731 - DNA, 583 bp, Cannabis indica
atttttgctttatcaatgctgtactcaattgatgagtaatgacagatgcatcagcatagagtgattgatgagtaatttctgtattcgtttttcttttattccgttcctaacggcctcaaaagctttgaaatcttcacatggcgagttgatacagaccgagtcgaggaggaggaggagtcatatatatacgtgcgtgttcatgttcttgtctgatttgcttagattggtttcacaactggatggagaagccaaatgataaggccaactcactcactggatggcttggctttctttgaatttatgttgattccttccatattacaggagacacaagcatccatactacaagagaataaaagagtcataattcccttaatttctgtaatctacaatagttttggtctaaaatatattttagtggattggagtacttacaataaacacacactgcaagccattcattcactattctgacccaggtgctggtccaacccacatcaattgtccatctattgaagttggattgagaatatgaacaaaagtagttaaatagacaagaaatagacaagaaatgagagaagga

SEQ ID NO: 177732 - DNA, 1213 bp, Cannabis indica
gtcaaatctctcccatgccacactacctggcaaagcatgggtgtccttgtgtactgtatatgatccaacggctaagaataagtataattcaaataagaacaaccattgagtactgacacacgtccaaagcatcgtcagtacaaccagtacgatctaaatattgataaaggccacatggaaaatatgccacctaccaatccaacggtggggcttcgtccttatgaagttccagcaacgacgatctttgcgagggaatcggcctataaaatcccttgaagacacacaaggcagggaatccaatccgaacctcgacttcctcctttaactcacctttcaactctccaccttaagatcgaaggcaaatcttttgtaaacacattatactgtaaccgtactatcaacttcaaaatattcctactaagctttctcttcttcaagaggaacacggtagatcggagtaaagtccattaattctttttgtatttatatcaacattcaccgaccaaagagcctaataaaatagactcgtgaactaagaataattaacgcttcaaccacgtaaaaaatctgttgtctatattcttaccatttgtgtttttattatttttttaagctcaataattattcggttgccgaaaaactcggtaaacattattattattgctttgaatatgttttactaacatttgtgtagtttaatttaaatatattttccgaatattactatacaaaaaacactatttaactttgtttcatctttattacttttaaaactcatattaaaaacctaaaataaaacatagtatacttgcatcataacctagtatagttgttctgtcccataaatagtaatttggctttggaccaaattataattattcattcaaatggacgacttgccttgtccatatatatcttttcatgatgagagaccacatgaagttattagttattaatttgaatgagatatttcaccaaataaatctctaactgtattttataatagctaaaatcagtggtggtgtgggggtacataactccactcatatttttctaattacatttttctatatataatttttaaatctacccgttaattttttttttttttatttttattttttatatttttatcctgataaaatttaatttttattaatttatatccttacaaaaaaatatatatatatatccttacatatatatatatata

SEQ ID NO: 177733 - DNA, 598 bp, Cannabis indica
ttaaagagcattctaagcttttagccttctaccaggaacatacatgatttctactctgtagacacatggttaaaccatatactaaatcacaaagtttcttaaatcgtattgcaccattgtatccgtagacccaaataaatagtaaaaaccaagtctcgtcgcaatctggacaatactgaagatatttacgaaaatgctactactgtacaaactaagcattagcatgccaccagcatgcatatcaacatgcgtcaccactttaccactacttaaccaacttgtgggaaacacctagcttgtaatgtgccaccttagcacgcacattacaataagtgttgaaagtaaatccccacattcactgtaaaaccagaacatttatcaaagattacaagcagtaaaaaccttatgtggccttcggcctctaagcaacctagacaaagtatttaagttagttacaaagtctgttaacactttgtaactaactctcctatctctgctctcctctacaacacatataaaaagaccagaaaatacaacaacaacacagaatttcagaatcagatcaatacaactccagatcagtatatacaataagaaa

SEQ ID NO: 177734 - DNA, 761 bp, Cannabis indica
atcagtatatacaataagaaaatcagatcagtacacaagtagtcatagaaatgagattgagttcgttgaaggaagcttacagtagggtaagctttggaaccctaggattagggttcggatatccaagaagccaaggagatcgttcatgcaacagaaggagaagaagaaaaattagtactgattttaagagagaaaaacatagagaaaaagaggagaaaaaaactgtaactatttttcggattaccaaattgtaacaccctaactaccttaggcgtattacgtgatttttaaacgtactgtgcagctcgttgctaatcaacgaggtttatggaaaaacgtgattaattaaaattttgctttttgattaaacttgtaaaacatattacaaaagactcgggatcccgattataaaaatatttacaaaaagtttaactgtttaactattacatcaaaataaaagtcgtctaacgacagttacaaaaattcagccttgctgtcccgaggatcgtacgctccaggcctaaccgccccgacatgtacaatctcataagctcgctcacggtccatcagctatagccttgcctttacctacacatgaacataaactgtgagtcgacagactcagtaagaaaagcataataatatcatacataaaactaactgccgtgtccaacacgatactgagtcccgctactgccatgtccaacatggtactgagccactactgccatgtccaacatggtactgagttttgaacgttc

SEQ ID NO: 177735 - DNA, 515 bp, Cannabis indica
  modified_base (467)..(467): a, c, t, g, unknown or other
actcgatcaacttctttgcttccgactcgttcgcacgagcaaaaaggattgtgtcatcagcgaacatgagatgagaaattggaggggctgagtgtgcaatctttattccatgaatacctcctccctcctcctccctactaatgagcttggaaagaacctcctggcaaaggaggaaaaggaacggagataacgggtctccttggcgaagaccccgttgaggcttcaatttcctaagaggacaaccatttaaagaaccgaataggagacacttgacacacaggccatcacgagcttcttacttctatcatcaaacccaacagcggtaagaactttttcaagaaatccccactccattcgatcataagctttatgcatatcaagcttcaaagccataaggcccccaagaccccttttgttctttatttgtggatgatttcctgtgtaagtatggatgattccgctatccnccttacccggaataaggcagattgatagggtgagacgagtatgttcat

SEQ ID NO: 177736 - DNA, 723 bp, Cannabis indica
agtgattttcttgaccgtgcagaaggttttatcaaattcgaagaggccattcagcaatcagaaggcgaacaaaaacctagcaagtcaaaagctcattcaaataggacatccgtccaactcccccattacccaagcaattcaagttcaaatggaaaacgttccagcaacaataacaggcatggtaatgggaaaaagggaaagttcattggaaaattcgaacaagctcccggggagaatcctaccaagtatactgcatttacaatcatgatagaagacatagaaagtttttacatggcaactcagtcgctagccccatacaaaaagctcgcaccgatgaaaaaagatgtcagcaagagagacatgactaggttctgtcgatttcatggagattacgaccgcaaaatcaacgagtgaaataatctgaagagagaaataggattcctgataaggaaaaataacccgcatatacagaagtatgtcaagaccgatcagaatcagcggggtgattcaactaagacatgctacctccactagtagaaggacatgtacaagtcttcattggaggcccacacatagatggagattcgggtcaatcccgggagaggtatgcccgaatagtacaacacgagcaacaagaagtgatcctggtcgtagaagagatgaagccaaaaatcccataggcaagagaacccatcattactttcaacgacaaagacgctgtac

SEQ ID NO: 177737 - DNA, 545 bp, Cannabis indica
ttaataattttgtttttggacaagttttattcatattaatttgtaatccaataaattgtattctgtattagttctcaatatatataataattggatagtttggcagagaatggctttaataagattgggtgccgacctagtcggaatgcttttttattagcctgactatgcatctttattctcatttcctctcaaaatattatttgtaattttttaaaaattagtaatatatttctcctatgagaacttagaagaagtttttcatgtggtaagtaaatcattgctttggcattcatcacaattatacattatatatactactaaaaactaaaagaagtgttacatatgctattttggaaattatacatgtatttatatattgatttcccaacaccagcccaaaaatcccattccctattgaaaatccgaattccactaataaaatgagagacccaaattttccaatactaactattttcccagtctgcaaacttcagcagttttccaagttccatcttcagtgagtagctgtctatggtgactcg

SEQ ID NO: 177738 - DNA, 684 bp, Cannabis indica
ttttctgctctccttcccacccgaaatagtcccctgaccttccattgtatgccctagcttataattccccgaagccaccatgtcttccatcgccgccccttcaatcggtcgagcatctcggccatcaacacttcccagttgcccacactgcctcttcctacccgccccctcattctcaagctcaacctccaccctaccctccacctggtcacgagaccgtgcccccttaccattactttctttcaaactctccactgtcgaagccacaccagcatttgcatcctgttcccctgactcttgtgagatattgggctccttttgttgtagcccaattgagctttgactagcttctaaagtagatgggcttttcatatagtccatttgagtacacttatggcccacttcaaaacccacctgcattttaccttttaatttttgagtcatcagatctcctataaccgcctgcccacgacccacgccagtcgccacctccttctccatctgttgcatcgtgggaaccacacttctacgcacatctagagtctcatgccgcccttcctccgaccggcgaaccccatccaccaccggttcatcagtattatcacgaacccgaccttcaccttgtttagacataagttgatgatatgctacaaagcaattcggaataggatcctcatccttcaa

SEQ ID NO: 177739 - DNA, 505 bp, Cannabis indica
cttttaatttttctaaaaaaccgtaccaaacaggctcatggtagaatatgcatactcatgctcatgctcttcttctttttccccttattatatatatatatatatatatatattgcagttcacattcaagtattcaagtattcaactatatgtgaatcttgtacaaaaagatcatatccacatacaacatgtatacaattaattattatatagtttggtacatacatagttatatatttattagctccataatattagttaaaggcttagttaaaattttaattagccgaaagtaatctatttatcaaaagattttatgttttgatttacaaaaaaagaaaaaaaaagaattttatgtgttgatttatttttattttgtgccatgccacgttgtcacagtttaccaattaatcgcctgactaatatagttcgttaaactttcgaagtgccaactaaatgaggctacaaaatagattcatactcaaaaaagaaaaagaaaaaaaat

SEQ ID NO: 177740 - DNA, 602 bp, Cannabis indica
attagatcaaaatttgatgatttaatatttttaaaatatattataattaaatttattggtaacaattcatgactaatacccatttaaaaaaagggaaatttgattttctatacttacatatacctaatattttatttctaaaactaatacatatcatcattgaaaaatatatgaccactttatctaaaaaccccaaaaatacccctcttaaattttgcatactttttttagtgcaaaaacataaaaaacaaaaaaaaaaaaaaattggtagtccgatggggtccgatggtcacctgatgctacttttgtatgtacaaaaacataaaaaaaatggtagcagatttggtccgatgggtggtccgatgggtccgatgggtggcccgatggggtggcccgatggatggtccgatgggtggtccgatggtgtaaatgggatgatgtaaataggggtattttagggatatcataaaaattgtcatatttacaaatattagttattatttgtttagaaaatttttttaaccaaatgtaagcaataaaaaatacaaatttcccttaaaaaatgatccatatatatttatatgcattacatagtgaaaaaa

SEQ ID NO: 177741 - DNA, 685 bp, Cannabis indica
cacagttgattgccaacatgaactgcttatgtttacaattctatacatgtgacacttttacattggtacatctaatataattatttaaaattataaaaacttatttcaaaaatatgttttatttttaaatactttattatttttttataattttatttagtttttaaaatgaatttttgaaataataatattaggtgtataaatataaacatgtcacgatataagagtgcatacataaatagttcatggtgatagttaatcatgtgacactttaattttgctaacaatttagtaatctgaaaggttttagagataaatttgaacttaaagagttaaatacaagtgaaatgatagttaagagaatttaaccgctaaaaaattcataaataaatgattgttaatagtgttagagctattttatttaaaataaaattataactcaataaagtgaattttacaaatactaaataaattaattaaatcaatgttacaattttataacaaaattttttttttttttttgtaaagaatctaatctataacaaaaattacaaataactcatggaaatatagtaaaagaagaatatattactacacaaaataacaaaataagatgaaaaacaacagaagagaataagaatctcgcagtcacaatcttaaattttacccttatgtctaaaagttt

SEQ ID NO: 177742 - DNA, 741 bp, Cannabis indica
gatgctaaaaaggaaaaggctaatgctaaaaaaagcaaagaccccatagaaacgatctgaggaatcacatcaacgatcacgtttgcagaagagaatccttgagtgataatactcaatgtcttgaacgtattgaagagttgatgaaaatcactaatgagatctctaggaaacaaagcggtgttgtatccgactctgaggaataagatacggagtcttgtgtgaaaagaatcattgatgcaccattactggagagttttaggatgccccagatggaattgtatgaaggacggacgaaccctagggaccatttttccaaataaaatcgcatcatgcaagtagcgaaggccaacaatgatgctaaatgtttgtgtttttcattaacattgagtaagtccgcagaggactggtggaagaggttgtctctgggatcaatcaacaacttgagagacctacaaatgatgtctaggaaacagtttatagcagtcaaagattatgatttggaatctagctccttgacgagcgtaaagcaacaacaacgagagagtctgaagaaattcatccaacgcatgatggatatggctgccaaaacaaaggtcacggaagacatgaaaatggtggctctaacatcaagacttacaattggatccctactatggggagatcttcaacgtaaaagggcagacaccctaagtgaattctaacaagagctcaggatcatgaacctagaagacgcttatgccc

SEQ ID NO: 177743 - DNA, 650 bp, Cannabis indica
gtatatttgtttatattcattataatctaataatcctaaaataaataaaattcataaaacaataattaaacacataaaaatgaatagaatcctcacattggttgcagcagaaattaatgactctttccattcaaggagtgttcattaactgaatttggacccaaccgatccaatccaattatttattagattttagattttgttatctgatccaatccaatcgaattgagtcatgtgatctgatccgatcaaattgatgtattgaattggatcagtttcaaccattggatgcattaactggttttctattgaattcgattagatccattcaatattccatttttattagctaccattcaagttgattttattaaaaagaaaactatataaaaaacataatttaaaacctaataatctaacatacataataaacattaatttagtccaacttaattctcatgattctataataaaactaccaaaaattaaacttattcaatacacattaataattttattagcgttgagaaagacgagaattaatattttagatctacaattttttttctttaatctcatgtattaaatatgtactaaatcaattaatataattttttaaataaaataatatattaaatatataaaatttg

SEQ ID NO: 177744 - DNA, 780 bp, Cannabis indica
tagaattcttgtttaaccaattttgttatttttaacgcttttaaaatatttcaaatcaaacctttatattctcacaattttttaataaaattaaaaaacaaaaaaagtaatatattttatgatgaacagatcaaaaatatttcaagtcataccttcctattctcacgaaacgattcggtttgtaatcgaagcaaaattgacggattctacaaatgaaattctcacaataacgatttggtatttgtagggattattgcgaataaatctcatttgaaaatgattatagcttttctttcaacaattgtgagaacggaaaattctgcaaatgtgattgacaatctccctaacttttttttttttgtcactataagtatatatatatatatatgtatttgtattcctatgttcgcatatgcctttgagtttttcatgttttttttctgtaatcgatgtgagttaagtgataatcctttagatgaattgaagttcaccgagaagagataaacattcaccagggagagattactttgactttttttttatgatgcttatgagaaagatgcaaagaaggtattcatctgttttttaagcttgtgccactttatctctgtataaatatatataaatttatataaagaatttttcataaattattagtgtaattggcataattaatatcgtgtgtgcatttttatgaacccaacctctaaattttatattttctttgcctgggaataagatatgagatttcattctgaactttatttgaaattttgcttc

SEQ ID NO: 177745 - DNA, 551 bp, Cannabis indica
aaatatactcaatataaatcaaaatctaaagactcgttctgaaaaagccccctttcgacctccaaaactacctcgcatcaacgtcggtgcacattgcaagcaaaaaaaaaaaatagctaagtcaaagaatttttttccccaaattcaattttagctccgccattataatctcgaaccagttaataacccacagattacaaaaatcaggtgaattttacagaaaaaaaaaatcgctcaaaagataaaaacgagatccgaaccgcgaagaggtcagatcggaattcagatcgaggaatatgaaatcatcatacctggggttgtggaaagggccgaccttgttggcgtaaagagggactacgtcattatccttgtagcggtgatctgagccatcagaggtaacctggatggcacaagaagagattagaagcgcaagaacgaggaacttgagagaatcctccattgattccttgtctgaatcctcagatctagtagactaaggaagaagaagacaaagaaaaagattaggagaaatgaacaagatatagctctcc

SEQ ID NO: 177746 - DNA, 790 bp, Cannabis indica
ttggagaattgattgtacggactatgaactatatgcattatttttgtatcaatatatatagggatagaattttgtcccgttattgtatttttgggtatacaatccgtgattgtactgcaggcgttagattgagtttagtcattaatgaaatggttgttattaatttgtagtcattaatccgtgatattcatatttattatattggaaaccggttatgtgaaattaataaaatattaattatttggtattttttaaaaaaaaataaaaaggtgacatgacatgacatgattgatgtctgatagactgataatatattataatttttaataacacgtcaaattatattgtacttttttttaaaaaaaatatatactgtaaatcttaatttcaactcttattcattaacttcttcaatatattttttataaatgttaaaatagtactaaagttaataataaaaaattatttgtgctataataataaaaaaaacattatagtataaaattatttgttatgtaaaaaaataaataataattcaaactatacttttaactatgtattttcataataattaattaaagtattgtaaataaagtattctttcaaatattttaatacctattgattttacttaatttcaaattctatattttaattttatgttatagttatactgcagtttatattacaattttacttattacttatttgtaaatattaggatgactttagagaagatgagattaattttaatatcaagtactactatattgtatgaaaaaaataaatt

SEQ ID NO: 177747 - DNA, 581 bp, Cannabis indica
ttaaaaaagtaaaaaagaaaaaaaataaagaatatctatatagacattagtgtgaaattatcaataatatataattgaataaaaaaaaataatatctacataattaatgataggtggtcttttcaaataacacatataattaagaataaaatacataataattaaagggccaatagtattaaggctagacatcaatttgaaatgaattaattacttcaaactaaaaatataagtattaaaaaaatagaaattgaaaaaaatagagaatagagaatagaagaagattagaatgccacttaagatgttttgtgctttcctttatattatatattgatttgaaataatactagtaaataattgattagactttaaaagcaacaaaactaagtaataataaaataagactaataaattgtacaaaaaaagcaataaaatatagaaaaacattaataaaaataaaaataatataatagaaaaaaaagaatatttttcatttttgttttctaaaaattaaaaagggcttgtaaaagctaaatcaacaaggtctatgtattattattaatagactaattaagattttt

SEQ ID NO: 177748 - DNA, 789 bp, Cannabis indica
ggttatgtatagttggcaggtggaccataatcacctgtaaaaaaaaaaaaaaacaagacccatccacatcaacgcgcctgtcaagcacgtatcctttattttctcattttcttagatatttttttttttggaataaaaaaattatattataattttgttttagttggccggaaaatttagagaatgatacgacgacttgagttcaatttaaatctgatatattataaaaacgaatactacaaggcgggaacgccactccgaaaatcgtggatgaatccaaaaacaccacaattttcaaaatccctaaaacgcttttctcttttattctttttattttttttaatatataaaaataattataaataaattctaaaacagaaaacacctctctcccatatctgggaaaatagaaagagagaagaaaaaaaaaaatcattatattacgtttccattttccaaagttttttctttttaaacttcttttgtgttgtttttttacatatctatttcagataacgtcgagcttaaattttaaattcgaaaaaaagaaaaaaaaaaaagaaaaaaggaaaaataaacaatgaacaagaaatagaatctgctttaggtgttattttttcgtaaacggatcggtttggagaatctatcgttattcgttttccctctctctccgtgagtccaccttcgatctcttactgcagagagatttcaggcgcatgtcgtttcaggtttgtaatttctgggttaaaaagtttcgaaaccttgtaattttgtattttggatttgttt

SEQ ID NO: 177749 - DNA, 800 bp, Cannabis indica
cggtacctcccggagctgccttagtatggccccggcctccgggagcataaaggttcttctcatatcttccccgggagtcatcttcccagagacactcctctgttgcctaagacttggttgctttctttaagagccgatcctctcagctccacgtgtcgtctttttacaggttcacgtattttaggcaaaattaagggcaacaattttttttaataattttgtgatatcaatataaggaaagttacttgtttttttttaaaaaaaaaaatgaaagttagtaattacatatataatacaccggcctctaattcctaactctgaaaagaattaaaaaaaaatactaataactgccaaaaaaaaaaatagtccaataagaagaagtattataaatatcctttttgggagattttggtgtcaaaattttcataaaaaaaaataataataaaaagacttgatgatagactttgtttgtttggtgacttccattgatgaagttaaaaagtgttctctttcattagatgattaacaattgggtttgaaaggaacacaattttattattaattctcctagtcagatacaagtttcagcgagaagataaattatcgcagtgcaagctgtaagatatatctattaacgtaattgtgcattgtaaatttgtaatttatctttatttttttatttattattaaacattttatttagagttttttttttttgggatttttgcgacatggctccttttttttttcttcaattgtcaaatttgcaaggttgttgtggtatgaattataatttatgg

SEQ ID NO: 177750 - DNA, 1038 bp, Cannabis indica
aagtcaaacacattgtagagttctttcatgatggttggtttagaatgggttgcttagcatgtgataatggtggccaagtcctgaaagctttcaccataggaaagatgcaaaaatagctaatatcattagtattaaagagacattaagttaaataaatagacatcaatgggatcgggttatgctgaaaattgatagtttagtttatgtttaagctattgagaataatttgcatatgccttcagaatttgatttatttgttcatgactatggaagtcttttcaataatttttgtaatgtttctttacattttgttgaacaatttgcaaataaaattttgcttattaattggatttctctaattatctttaattctatatataaaaaaaaacattaaaacgttttaaacttataaatcgaagttataactgaaacgttacataaatttgcaattaaaaaaaatatacaatttacttattacaaaataatctttttgtcggttaaactctctaaattatagttttatttgtactttagactaccataatacataagcagtacgtattatgagttaattataaaaaataaaggctaattagcaattttttccctcgaactttgacatataccaaatcatgcccctaaacttttttggccgttaaaaattccccctgaactattgagattgttaaatttaaggacttttgtctaatttcattcaattttattgtttcaggtactaaatcatgctccccagactttgatatctaccaaatcatgcccctcaaacttttatatgtattaaatcatgacccctgaactttcatccatgttagaatttttttactaaaattagataaaagtccttaaatttaacaatcttaatagttcagggagaatttttaacggctaaaaaagttcaaggggcatgatttagtacatgtcaaagttcgggaaggaaaaattactaattagccaaaaataaataacaccttaatttattaagagtttaataatttagaagattttagttttataaat

SEQ ID NO: 177751 - DNA, 704 bp, Cannabis indica
caattatatttttcattattttattttcttgccttatttgatatttgctcaagtgaaaaagacttgactaactacccacactaggggtgacaaaatgggttaagacactataacaccgactcgaaacccgttgatagttagcgagtttgggttattttcgggttgattctttaataaaaggtttgtgttcggtttgacccgtttataacccattaaagttaattttggatccgtaaatgtgttgaatatgtcataagcatgttaaacataggttgacatttttaaacaagatctatttataaacgggttgtgttgtgtcgtgtcaacctgtttaatcgagttgtgtttgagtttgacaataacatcacaaggaaataaactttctcaataacactaaacaataataacatcaatttagtaatttgggtaatgaaaatcagaaattcactttaaattttcatatccatggaacacttacaaacaccctatgataacactatacaataacattgcaaatcctctgaagttggaagtgttaataactgacaatcaatgttgaagggtacccattttctttttagatgagaaaatcttcattacccaaagaaatacaaattacagtgacagaaatcaatatcagatgaaaaaagggaggaagaagaaaaaaatcaaacaaaccaataaagtagctactaattagtact

SEQ ID NO: 177752 - DNA, 492 bp, Cannabis indica
gtacttcattacaattagtggaatacaaaaacatttgtataattgtcacttgtagaaaatgaagaccaattattagtgagcatggctaagagcatgaaggagaagtatgataagtattggggaagcattgataaatgtaacgaggatttcttgattgccttagtacttgaagttgaagtatctccaccattgcttccgtaaattgcatgacccaatcacgtcaaatttgatggtgaacaagattgaaacaagtttgagaactttatttgaggcgtatggtgggtatgagcaattacaacaaccatcatcagttccagcgagtcaaggtgaagacattactagtgttgatactactactacattctcatcagattcttattcatttctttcggatgacatgcatgttgagtttctgcaagagaggatcgagcaatatggtgaagtgtcaaaagatgaattagataagtatttcatctctgatgacgttgaacc

SEQ ID NO: 177753 - DNA, 608 bp, Cannabis indica
atttctttttattttttaaaaactcaaaattaataaagtcaaaatgacaatttcatattcttatttggattatttgtagctaaactttgtaaagtttactttttgtaacatttatatttttatgtgaacaatacctaatatacaagagcactcacatgaagtactttgctagttgtttgttatgtagtatcttaaaaattggtaattttatgtcctataatgtaattaaattggcctttatttccaaccggtttaatcgattatctgtttttcctattcctaagaatattttgtgtaataattgtgaggtttagcttttatttctaatgaaaattttattttcaaacaaaaaaaaaaaaagaaaagaacactcatatgaagctttaaaatcttaaaaataattgaagaaacaaggaatagaactcttatcaaatgaggtaaagtaaatatgtatattatcattagaaaaaaaaaaaaaaaagtaaatttatactcagcaccattccttctatgtatagagaaggttgtacgaactcctaaactaacttttttaaggttaaaagtaatattctaattaggtactatgtaaaaagttagtatattatgtg

SEQ ID NO: 177754 - DNA, 784 bp, Cannabis indica
accctacttcatctttttttaatcttaatagggtagtatagactgcagttatgttgatagattttttatttagataaatttatatgtccccttcagttcagacacgactggactctataagatttatacaatttcactttcggttagtcatcacacattttatatatgcattgaagcacaatctcagaattgtttctattatatttatactgttactaatactcatatcttcatgcaatgccactgattttcttctggttactttctgttatacagactcctactgaaaaataaaacaagaatgatattactgaataaaaaatttagagttgatttacatactaggtcgctctttttaagacgttcacgacactgcccagaaatgtgcaagtagtcgaaaatttttggtcgtccccaagataaaacaacccagtcgaaatatcactgtatcagaactctactacacgatagagaaccgtcgaaacaccacacccaaaaactactgctcgaactagttatataatgtaatcgtaaaaaaatcaagtaataatttttctgtgtgaaaaaaatgtatttctcctattagttttgatgaggtcatacaggaagaagacattgagtgagatcgtgagacgatgttgaaaataagaacatgtctcattttaccaattaatttaaacatgtaataaacagtttaataattaataaaatataagtaaatttctcaagtaagaagtatcactcacacactgtcgttgacgatgcgtgtcgcgcgtgcggtggg

SEQ ID NO: 177755 - DNA, 602 bp, Cannabis indica
tttcctttttcctgtctcaaaaaataaaatatgtaatattatttaaaattacagttcatacattcgaacttttaaagatatcattccactatctccagccaattgtttaacttttttttttatgttatttattttataactatataaaattctttcataaaaactcaactctctaaagtttgtttcttcaaatataattatttttcattattagttctttctcatgtgttattttacacctaactaattactttaagtagccttctatcattatcatatgataaagataaagtaaaagtacttatatataaatgaatagatttattctttttcttttctctttcttttttctcttttactttttctttttatttgtatatttttagaagaatataaaactagaagagtgagatcatccagtcaaggttttttctttaatgtttatatatctatacatatatttatacagagaagaacagatcatctatatatatttattgggttgggagtgaagaggattaagccaacatctttctccatcttctcttgatttcttgtaagtattcttaattacttgagattttttgtactttaaatttgcc

SEQ ID NO: 177756 - DNA, 851 bp, Cannabis indica
taaaaaaaatattaaataatgttatatgatcatttctgattttgaacaataatatccataaaattaatttaaaaatgttaagcaaaatacaagttgtgacaaatacaactccgtgagcaaccttagatatgctctttatcaattgcaagatgaggtgccgataacaaagctaaaaaaatgtatgatgcaaggtggcctgctttgcaaagagatccccacgaaaatgcaaaggaacacgcggcatgaaattagacaaggaaaaggtagtttgtcgttatccccgccctgttgtcggtaggaagggtttcacctttaataataataataataataataattaatattagggtttttttcatttttacatttcaaaatcgtcttttttttatatatttttacgaaattctacgtagaaatttctattgcaactagcactgctacctaaattgcaacaaaaaaatcatatagaaatcattattgcaactagcgttgcaaccactttagaaactcaaaccgtaaaatttaaaaaaaaaaattaaaaaaaaatatgtagactaattaccattaatattattaattaattaattataataataataataaattagagatactatatatttccctattatttaaaaatataatattttattttattttttttatattatttttgacacatttatttttaaaaacactttgtaaaataatataattataatctcaaatctttttctttatcaaactattatttatattttacttttaattttttatttaaaaaacatagcattaatgtcattaggtgtcatcaatgcaaatttcaagattagtattcttttatctctaat

SEQ ID NO: 177757 - DNA, 740 bp, Cannabis indica
gtaaaataatttccaacaaaaaggttggtccacttttaattaacaatggcccagtctaagcgctccaaagaggtgccatgtttccaagtgaagcggctgcccgaaaagggaagaggggagagagagtatttgccaagaaaactctgaaaatgatgcatgtcatgagaggggggtaaacagtgactattacgatcattaaacccaaggtaatcattgaaatcaccaataataagccacggtgccaaaggggcaacatcaaaaagacggttcagcaaagtccaagaattgttattatcagaaacataaggggagccgtagtagcaagacaagtgaaaattattattatttatagtaacagtacagtcaatatgatgaagggagtaggacaaaatattcacatagacatcatctttccaaaacagaagcaaacctccccctaagcctagtctaggaacctcaagaacattagcaaaatacaacttagccctagaaacaaaagtagaaaaagcagtaagcatagtctccataacaaagaaaatctgaggttgatgttgcttgcagaggagggagaaattatagaatgctcgggaactccctaatccacgagcattccaattgagaagactcatttttctcggtggggttgttgtgcaacacccgctgtttcctcattgtcggacatagaaggaacaactacaaaaatcagaatgagaggcacgagcccgtttcagcatgctacg

SEQ ID NO: 177758 - DNA, 982 bp, Cannabis indica
aattagtattgcaaatgtaataatttaaacacttttgaggcaaatatctcattttaaatatcaagatattattgaaatggatatatagagggagagatattttttttctttttctgtaattgaatatctagttacaaaactgctaataactaaacgtaaaatttcattagatattaatgtctaatggtattatagtatttaacaacaatactcaatatttcctttttttgttggtccaccatagttgtgatgtttttggtaaaattttggtgtgagaggatgaaaatgagttgtgctaacgtgtgtacaccttgtgccacccctttggcttggagtattgttataagacatttatattggttagcagtatggtgaaatgttgttttataattagtaatgatgaaatgtcgttttataattaattattgaatttttataatatttattaaagtaaaataagtaatacttaatattgagttgcacataccataagtaccctgagagtaaatttggccctaagcataggcggacaaggtctgtgtttagagaccaaaaaaattatttctcttgtgaaattatactaattttttttactgatttttaaaatatatatatatatttttttttaaataaagattcaaaataaatttttttgtttttatgattcactaaattttcagggccgacgctgcctgtgagggactatggaaaggaagccatgatgatgatgcgcctctaccacgtgcgcgggatacaaatatagaatacgtggtacgccgaaaccacgcgggttggcacaggccagcgcgcgcaccatagcctgatggcccccaataatccctctgtctgtctactttgtggtcgggtgggtcccttgatatctgacgattcttatcagacggtggtgatgtggttatggattaggagatcgaagctcctagaagaaaatcacatcacatgagatgatactcaattcatcacc

SEQ ID NO: 177759 - DNA, 730 bp, Cannabis indica
cagttctgctacagctgtttttctcaacaacacatcaataacttctctaatttcccacaacacagctatactaaactgactcataatgcaatgtgtctatatgtctatagaccgattataatgtactaataaaaatttaaaataacatcttatttattatttatttaatagctataaggaaaaaaaaatctttcataaaattaaacaaacccaaattatttttaccttatatgtatatcatcctatgaataatgaagataaagtacaatcgttaccatttaatttaatttccaattgtcttttacaattttctcttttttttaaaaaaatgaagaataatgggaaacttttataaacgaatgggaccctcatttatctccaatatttcactttctaaaagttgtcgttcttcttttttgctgacttttaaaatttgtcatgaaactaataattatgccaaattttcgagctttgcataatagccccctacatatatatattagcaaatgatatttacaaacacatgtacgttttcaacctttatatttctgcacatgtgtttttttccttttaaattttctttaagggacaaaatttagatgatccaccacgtatatatttctttggttacaatgatgaattttattaaatttgagatgtaactatagaaaatgatgagaaccagacaatatagtactgtaaataagattctgatacatgcatgcaatgt

SEQ ID NO: 177760 - DNA, 758 bp, Cannabis indica
gtggttccctggaaatatccacaacacttgccaagaaaccaatgcacccctcacacaacaaatcccttgccttaagggctgaaattaagggaatccgagatccttgcatcttacccacaaatacaaaagggtcctcgccctcaggctgaaaagttaccatctttcttttacaatcaatggtggcgttgtatttagcaagccaatccatccccaaaataacatcaaaatcctccagatttaattctatcagatcaactgataactctcttccttccacaaacactggaagggatcgaacccacctgctggagataaccaactccccagtaggcaacaaggttccaaaacctctagaaagcacatcactaggtttattcagctgctcaattattctacttgaaatataagaatgcgtcgcaccagaatcaattaacacagtcaataaagtaccagcaacagaaagctgacctgtcacagtagaaggaccagcatcagcctcagcttgagtcagggcaaacactcgggcaggagcgggtgtatcatccttcttttgctctagccgtagcaattgtggacaatttctcttcatatgacccaccattccacagtggaaacaggccctagcctgacactcgcccaggtgatgccttttacacctcggacattcaggaaaagtccgccagttttcgttcccactacgacggaaaccttggttaccctggaatcttttgtttgggcctgctgctgatgattcacta

SEQ ID NO: 177761 - DNA, 686 bp, Cannabis indica
aaaaaggtcttcttaaatatttatttaattacttaaaaaatagtaattataattaattaattctaaaaatagaatttttacctattggtaaccttctattataggtaaaaaaaatgttaccataaaattacaataaaaatgtaaccattgaatagttacccttatatatataaatagatttagtgtaagtataacttattaaaaaaatattatttttagtaaaatataaaacaatgttgctttaataattttaactaacaaaaattatgagtgcttccaactaatttttttttttatttttgtttcatatctacttttactaattcaaaagaaaatcaaatgttattgaatttgatttaaatgttagaattttggagttttttcatttttacactttaaaatagtttttttttaacatttttacggaattccatataaaaatcgatccttatagcaatcaacgtagcaacctaaatcgcaaccaaaattcgtataacaatccatataaaaaccactgagaaattcaaaccctaaatttaaaaaaaaaaattaaaaaataagtatttgaagataatttccttagaatttttagtaagtggacatccattaatccttttggactggattgttactgtcagttattaggttatttaaaccctttaattgctggactagattttttaata

SEQ ID NO: 177762 - DNA, 1303 bp, Cannabis indica
attattataaaataaaaagacatagcaaagtttttatttgatcttacatgtttgaggatcaagaaatttaataataataataataataataataataataataataataataataataataatttttcaaaaaattatgatgttgagtaatgatgttgttttaagtcattgcattgttatggcgggccaaaaggaataaacacaataattaatatttgatctataaagcttctatgttattaactaattaattaaataattaatacttattattaattctttaaatatcttttggtactggggtcaatatataagatgttacttagctctcaaatttatatagctgtctacggaaagtacatattaaatgttttttgggatttaaaataattattattatttttttaaaaagaaattactttcatatttcattaaattcaattaatggtacatagagcaattaagcaaacataaaggtaaagtcattattgttaaacattagtttgtatggtaataacaacaattaataatattttaatttaattttgacattattgttaagcaatttgtcaaaaaaaaaaaagacttagcttttatataaaaatgattattgacatacttgtcttacctatttggtaaactacaattaataagtaattaatcgagttttataacttcaattagtattttattattacaaacaatatagtaattatttttataactaattaaagcaagatttataccaaatttataaaaatgatgttgtaaataatgaatgttatcattacatgaaaatcatggggtacactacaactacacctactcccgaatccataatagttttcaaaataataataataaattatttatatattttttattaccattttttttagatatttgcacaaattccgcataaatataattttatgatattagagaactacaaaatagaatttaaaaaatgatattttttatatttaaaaaaatgatagatttttttttctaaaagaaataaaaataaatacgagaaagagaaagaaaaaattatgaggttgtttggctatgttttcagtttttagtttttagaattgtgtttttaaaattgagaataaaaaacagtttttatcattttaaaaatttaatggtatttggcttagattttttaaaactatttttatatttatttactaaaaaaataatattctacaccatactatgacacgaatctattcaacctcgaatccgaacccgaacacggtcccagaccccaaacctcgacacaaatacagactttaac

SEQ ID NO: 177763 - DNA, 563 bp, Cannabis indica
caaactagacacttctttcaaaaatgtgttcaaacatgttgtcggtttctcattgtcaacgttcagacctatacctgtaaaagcatgtgcaaattaaaactcttaaaacagataaaactatacactttatttttgttttcttgttgagatgaactgcatgtgatgacacaaaaaaattaataataggaatagttttgcacttaggaaaagttcatttaccgacactgacattaaacttattggatttatacgttgaggtgcagagaactcctccaactttgaggccattcaagtaaagatcatttggccactttattctaatgtcaacacatggtaaaccctgaaataagaatacaagcatatcattttgaaagctagacaatcaatcatccaatcatttcatggagtgcgaaataaatgatcattcttggtatgtaacttacaaagagtccaataatagaataacaagagattctcaatcagatactaaagggtaaaacagtggcttgtctttaacactacaaatttctagtgtttacatatttagttgactacaaattcaa

SEQ ID NO: 177764 - DNA, 1451 bp, Cannabis indica
gttcttgatccaaggagttttgttttagacaaaacagagtcgttttggactctattgacttggttaagtcaaaagtggtaaaggtacggatgtgttggagaaggtttaaggttagagttaattattttagccttttttttttaatatagattaaaaaatatataaaataggagaatagattatatgagaataaaaaattatataagagagaaaactaggaagagaacaaatagatgcatttggagtaattttagagtaacatgttaccaccatatgtctccagatattatataaatatatagattagatataattacataaaaactatttgaaatagatttgttatatttactttccatccaaaaacttatgttaagtgtcaagtagggttgaacataaagaaggtttgcctgagtttgaaaaatagtactcgtacctacccgtgaaatgggcaggttaacagggtttgcaagcaacaggttcatgggttgaccaggtcaccaaattgacctagtcaactcttctttctaaaccaaaattttatgttttaaaacagaaaagaaagcttttaaaaaaacttctaactcttgttcgtgtagtgaatggatagacgagatcaaggaggaggcgggtgccgggatggctgtctctagctggatgagacagtggcagcgagggggaggagagctccgttcagcgactactaggagaggagaggggttaaaggtccgtccagttcggtggctgggtcgtcttcgtcaaggaagaagcccaatcttcgacttcctagtgccatcatcgaggccagaggaaggggagggggggttgggtggttcatctcgctcttgggagaggaagaagggtcgaggtcttccttcccaatagtttagcttaagtttttcttttatgttttagtttttaggttaaaacaggttagaaaaataaaaaatttaaaaactaaaaaagaaaaattaaatgttcaggatggcggaggggtacgggtccaacctgaacccaagcatgtgtaagaaaacaaacaaaaccccgcccgatgaagctgataggattgcacccaacccgcttgtaaggaacatgtttttccatgcagcttggttcgatgggtcaggatcaggtcaaactcgacaaaaatgttcacttctaatgctaagtgtacacgatgtaaatttttagtggtccaagtaattttcattgtttaaatattataaaaataatttaaaaaatataaaagagtaaataaataaataatttttaaagcttttcttttattttattttttccttttccttgcttcttccttcgcccaaatttctaggtgaatctttctccctttctctatctcgttccctctatgtggtcgccagtagccagctcaagtgagtcattccagccactgacgaccctaaaaaccacgaaaagcctgagttggtttc

SEQ ID NO: 177765 - DNA, 723 bp, Cannabis indica
atcctagttcatcttcgcttaattacttgaagtcgcctgcgaaacctaacttggagctttatttgtcacctccaatcgaaccatttacagagtgagttctctgcaattctaggttcttgatataagagctacgatattttctttctgttttcacgagaaaataccgaacaatgggaaagaaaaagtgcattttatttatttagtttcattgaatttctaaattatctttactgttttcttgttagtttttttctagttatgttgaggattctaactgaaaaggcacgcttaatttgtctaagatgttagtcgcagggaacttaaaagccaacgataaaataaaaataaaatgacaaatcattgttttgttgaaaaaagttctcgttgtattgtatggacataaaatacacaaattatactactaggatttcgctctaaaggttccttttataaacgttaatttgttttcgcaaataaaatgggagatgaaatttatgatcccaacactggtaattgtgccatttcatgttttatttgaatcggatcagaaatatagagtcctcagcagtacaacctcaagctcaaattggaatagaagaagataatggccctcaagagcatcaaggacaatgtcgttgcaagctaacaaagtgcttaaaaaatgtgagttaacttctatatggagctctctaattcaaatgatcacaaatttgtgtttacttc

SEQ ID NO: 177766 - DNA, 671 bp, Cannabis indica
ggcataaaacccaacagatgttatcatgacaacacaactatggtgtcaacttgatattatggttagctgtacttatggtatggattgacgctatcattgtagcaaaactatagtgctgggttggtattatggttaatggtaccgtcaagaatgtttgagaattatatgtttaacgcaagttatgacttggtgattggtgtatgggatcctgatcactggtcgggtatatgtttatgttttatgcttttcttactgagtttgttgactcacagatgctatgttatgtgtaggtaaaggcaaggctattgttgaatggtagtgagtctagatttgaatgaagattgtacataacaagacagtttgacctgaagagttggatctttgggacagttagggctcacgattttgtagtcgttgtgcgacatcttttgattatgtacagttgaaaaatatagatacaagatctcaatttttataaatgtaatacagtttatatttatttatttattaaagttcaaattttaacactttttgataaaccctttgattagcaaaggttgcacagtaatcgtgaaaagcactgtagcacgtctaaactagtagggtgttacaatttcagtattagagctgccaggttgtctaccaaagaccataaagatttgtacaatcat

SEQ ID NO: 177767 - DNA, 677 bp, Cannabis indica
attttctcttttcttgtcattttattcccatttcaacatttgagttgcttacacatcagaagaaggtatatataaaaatatatatatatatataatatttatatatagtaaataaatatttaaatttatctatattacaattcacattgttacttaaaccatatgaaaatacactactaattcatagaattaattcatattgtcaagacatatacattcaatttatatgcatatatactaatttatactgttattacatactttcttaatacttaatttattgatgcaataataataataataataataataataataataatacttaattgaaaatacattttttacgatgcatttaacgaaattcaatatgtaaaaatacaaatgtccaccacacatataaagctataactttttgtttttttaagtaatttgtagagtaaatatttaaatttaatttttataataaaaatatctaagttatatttgtctcaagttaaaatctacgtgtcattttttttattggtattaaataaattttacataaaaaataaaaaagtgatgacctgcctaatcaaggactgccatgtgaccttatttgacctgactaattagctacctactgaagttttagtaatataacttatatattattactatcaaaaattaaatttaat

SEQ ID NO: 177768 - DNA, 728 bp, Cannabis indica
gatttcgtccatcttcctcaacttcgttccttcatcatctcaccaagttctgcatttttttgtttctataaatggctattacttggtcttcatttttctcatcagtcatcaccattgctgaaaaaaaacctttaaaaataggtgttaaatctcttgtcaacaaatctaaaggcaaatagcctattgtttgaagatgatgatttaaactttgctttgcttaccaaaaaaattgatcgtcaccctgttaagaagaaatcgaaggttaatgttgctgaaaacattttcttttctgaagtttagaaagggaagaaccaagctgatgagaatctgaaggtgtcttatttctagtttctttatcattttgccacaacttttcttattactagtttctttaggaggcaaaaatcatatttattctatttttaaatatctctaaggattataagtttttctttgttttttaatacaaaagtactgattattttttattttttaaatgactgattaattgtaccaccgagtgtgtagtgtagttggttggaatagtttgcatgaggttccttatttgattgttcttagagtttgagtctccatggtaacacttatcttgggccttaaaaattaggttattttagtaataaactttttttgaagattcagcaaaatagtcaatgtaataagaaatgttttaaaactttacattaatatgtcaaatatgatgttgataa

SEQ ID NO: 177769 - DNA, 687 bp, Cannabis indica
atatagaaaaataataattaaatatatgtagcttgccactaaaattatatacatacattaaaatatttgtgttatgctaacaaaattatatactactattatacatagtaaaacataaaataaatattatctaagaataataatatgccatacaacaaaacataaatatactgtaaaacaaaatctatataccaacaacctacaacaaaacaaaaaaaaaaaaaaaattaaaaaatacgacataactttaaaataaaaaattaacaaaactaatataagtataccataatctttaagtagctagtttgctttaaattctaaaaaatatgaaaaaaaattattgacttttttatgtagcaaaagacaaaaaatgttatttctctacaagttttgaaatgaggatatttacttacatagtattatgatttgggggtcacttactataattttctaaattggagtgtgtgtgagtgattgagggcacatttgacacaatttttgaaaaagtagttgtgataaaaaaaatatttagtaaatagttcaaaaacaacttattaaagaatttacggagaagtagttaaaagctaaaattgctacaacctaacttttaaaaactgttattttgattaaagactctacaataaatttatttatattgagaatatattcccttatttattatatatt

SEQ ID NO: 177770 - DNA, 586 bp, Cannabis indica
tatatatataaatatattaagaaaaacaaaacaccatttagacatggcgaggatttaggtaataataggttagagaataaatgtagtgtgattatgaatctgaatgtttttttttttcaattaaaaaaaagctgaaaatgttatgggtcttttttttttttttggagaaagattaaaaaaaaaagctaatgattctctctcttttgtggggctttggaatcaatctcaaaaaccagtcacacaagctcaattttttattatttccattaattttttaatcaaaattttctactgagagagagaaagatgagagctttgttgttgctttactttcccatttctccttttccttcttcctttgtctctttcgtcttttgccattccactcaacactcactgcgctttcattcaaagtaaaagccagtggttttgggctaagctcaaaaaccccactcactcactactacactcattgatattaccattaccatcttactatattcatatttagcaaaaaaaaaaaacccagatagagttagggtttttgtaatgccaagagcttgaaaaaattcatcttgtgggttca

SEQ ID NO: 177771 - DNA, 573 bp, Cannabis indica
ggaaaccaattcaacattctttggctcttctatttcggtctcttcttctacatcaaaactttccgtggaaagaatggaagatttaggatcagttctcggtaccaaaaacagcagaaacaaaggtgtaactctcaatatgttcctaatcaaaattgcaagccatagtttatcgaactgtgttcgagtaatcttcaacacatgaagcagaacacctccaccccaggaagatgagagaactccaatgttatcgatagacatcagcagagcaaagaaggtgccttcaatacccgaaggcaaagctttgtgctgagcacaagaagaggcatccatttaagccttccaatcatttgagataaactttcatcaatcaccacaaagaagtaatcaggtatgccgaatttcagattcaatcgcgaaaccagcactaagtctagcattcctgaaaagccactatagtaactgtgtccagaaaagtaaagtctctaaaatggataatccttgagacaacatttggtagacgtacacgctccccactaatcgacccgacttgtaaccgattgagaatatgaaacc

SEQ ID NO: 177772 - DNA, 1075 bp, Cannabis indica
cacacgtcagctaatgagtgctctatgtcatcaattatttccaaataatcaacattacatgtagtaattgtaataaaaatttatcaccttatgatgtcaattattacaaaataaccagtaccgtatgtaattgtaattaaattttagttagctacattatatggcatcaattattattaatcaactaaaatgtacctcttaaaactttgtagtagtaaaaatacaattaaaagtaatgttgtcctcacttaataatataaatagttaatatttatccacaatatcttgcattaatactcattatctatctatcatatccatgccaaataactcagactacaagaagattatatattatttatttattctttttttttttttagtaggaatttatttattctcttaagttagttaaatattctagataaacatctatttatattaatttatttccttacttttttttttgaataatttatttccttacttatatacccactatccacacatgaatgatcattaattttttgttttttttaaatcaatgattattaaaatttcaatgataaaaaaaaatataaaaagagtttgtcttcagtacttcattcattatataataaaaacttagataaattaataattaattacctagtggtcgagtattaattagtacccactcgcagccgcattttaatatttcatttcatgcacgtaaatttcattttaatcataaagttaattgcaatttgcaaaagtgagcctatatataatatataaatatagtcgaatctataacactaatttgacagccacccactacaaaaatagattctaaataatggatgcaaaacctctaaaccaaaactctactttgtttccaaatgaacatatttatatattgtgtgaatggcatatatatactaaaaaaggtatttttaaaattttttttgtttgattattctatatgtttctacaaattaatatattataaatttataatatttaaataaaataattatgtcatactagggccggttcttatagtgtgcaagttgagctacactacagggccccc

SEQ ID NO: 177773 - DNA, 523 bp, Cannabis indica
ccattccatttcattacttccaaccaaacgccagtgtttagaggtagggtaaataagcttttggacaaaaatgtaatactttgttcaagtcatgataatccccactattctacactcaaggttgtgagtgagtgtatttttttcttcttcatattatatatatgtgctataatattgtgtaatttattcatttttctacttttttatatataatatatatagtatatatattgtatattatgtattataacatttatttaatctctttgttgatccttgtattattttacaatagagttgtaatacatcttgattttctttcattgtaataaatctctaacatgacccttcttcgtcttccgtgaatttttcgcatcatgattcagcttcccctgcatcttcgcccttgtcttagccataacctcaacttgaaaatagatcgccagaagaaaggagtttcagagagaagctcacagtgtatgcatttaaatatgtataattaaatagaaatttttacatcaaa

SEQ ID NO: 177774 - DNA, 889 bp, Cannabis indica
aggaaatagctttgggaattatcaagccttagggttttctagcaaagtgctttcttgatagaaaacttgacatctcttactcccaaatgagcaccatagacctcctttatatagtgtttaggatatcaccatttgaaattcaaactcataacccctatagatgttatggactcaaatgtaactcttacacacaccataactcctatagcattaagaatttcaaataaaggtgtgtaacatcttttacactcttaatgttggtgataatggtggaggttactcatagtaacaactccccaaatgttacaaaaagatgacaactaatatagtcatatgttacatattattagtttattacacatatttaatctatatattatattattataaataatataacactatatatacacatatatataatatatatacatacgaaatacatatatacacatagtcaagtttaagttgggattgggttgaccaccatggccttgctgtggccggcggctctgaggagccaccatgaccatgatggccatgggcggccacaagggttcaattgcacatagttgggatggggtggaagtgcacacacagtgggtcacgaggacccgtttaagacactatggacgttggacatccgttgcatgcatcccgtgcatgcttttgcatggaccgtaggatccacaggtgtcatgacgcacgaccacgagcagctacgggagcccgcagagctccatgcaggtcgaccgtcgaccataggcgagctttgggtcacgggcttgaatttggagaaggacctgagatcaccaatggtgattgtggttttcatagtgcatgcccagagtctatgtgactcgagctcacatgcaatgatgttttttac

SEQ ID NO: 177775 - DNA, 741 bp, Cannabis indica
ttctaagattattttgaattttttatttttcttcttaatagttaattccactaattcactcaaaatgttgaaaaactaaaatagccagttgtaccaaaaatgcatttcttacttgtaacttaagcaataataagcctaggggtaaaatagtccaaaatcataatcccgcttaaacccagtattcataatatcacaaaagtttgttacgctaaaaaataggttctaaaattactcatgtaactctaacgactatccatcacattttccatcgtccccgagcaaaaatcataaaaattacataattcatatttaacataaataatactcttagggcttgtttggaacgtcatattaggtagtattgtattgtattatattgaattggattatatatatcatatttttatataatactatgttaaactttaatttatactaaaaacattatatatttaggtgtacataaaagttaataccacataaagttttatataaaaatattgcataaaatacaattcaatataatactatacaatacaatacgatgtaatacggcgtaccaaacgaaccatttgataaaatctccggaattgagaaattataaactctaatgccgatttttaaaaatgggacccacaacataataaaatcgtaaataattataaaatatcaacaattaatgcaaattatctttactaatccatattctaacatgcggtcattacaataattctgtccaat

SEQ ID NO: 177776 - DNA, 1113 bp, Cannabis indica
aatatttttttaatactaccctattgaattatgaatatttatacctatatatgttatatgaaattaattaattattataatcactttattttattttagtttttttatatggccatttattaagaattggtaaaagacaaaaaagaaatataactaaaaaggtaatttgcggccaagttttttgaattttgaaatttgatacgattaactccttaaattgaaaaaaattaggtaaaactcctaaatctctacaatcattttgctctatactctttctttcaaatttagtctgttaagtgctaaaataaactttaaaatagaaaaagaagacggaagagaaaaaaatagaaaaagaaaaataatttttttaggatttttaaaatatatttttaaggttttttttttaattaaaattattatttggatcaataaaacttcaacacgtgatacttttaaataaattaatagagcagataaatttaggactaatagacttgcaaaatgtgtgaccttgtggagtattgtcgttatttatcgaggttgggaactaatcaacaataaagtgaacattttgaaaaattttaccgcaaattttcctttttaaattatacacacgtgacactgatatgacatataaaatttgatagaataactactttacaacaatgtaaatagttcataaattatttttaacggtctgaaaaattgacgagctgaataatttatatgccatcatttaaggacaaaaattttaaatagcctaaaataaataaaaaaaaaaatttgtactatttatttcagtacgtcttctatctattttcgtattgatgatagatttttaatcaatttttttttcataattatatacatggcattatttgtaatcacaaaatactgaacatccacacaggaaacaaactacacatattataaacaaattttttaattgcactaactaattacccaatctaaaagtataacaacatccaaacattatccaacagtgaatcaagaagagaagatttctttctttcttacaggcccgataaagctgggggcccatattcataccactttggagcccataacatatcatatttggctgtagggaaa

SEQ ID NO: 177777 - DNA, 680 bp, Cannabis indica
ttttttttcataattatatacattgcattatttgtaatcacaaaatactgaacatttagacacgaaacaaactacacatattataaacaaattttttaattgcactaactaattacccaatctaaaagtataacaacatccaaacattatccaagagtgaatcaagaagagaagatttctttctttcttacaggcccaataaagctgggggcccatatttatacctcttcggagcccataacatatcatatttccctgtatttacatttttttgaacgagaagcttcttcttcaattgaattttgtactgctcagttctcacgtcacacttttccaatagcaaagcatgaacacttagtgaagcactgaagctgaagcatttgctcactattttcagttctcacatctgcctttcagtcatgagtcgaggcagcggaggtggctacgatcgtcatattacgattttctcacctgagggtcgtctctttcaagtcggtacgtgattacttcatttctatatactaccatatattttgttctttgaatcgccactctatctcagatgtaggagtgttcaatactttttctttggggattttcggagaaactgattctgaaacccctagctgtatgtccttgctgctctttttgttttaccaaagaactcttagattgagaga

SEQ ID NO: 177778 - DNA, 667 bp, Cannabis indica
aataattaagaacaaatgtacgtacgtagaacaagtagagacaagtggtggatacagctcaagaagtgacagaaatggtggaagacatggacaaagaaagtggaaaaagtagcagacgaacttggggatcgtcttcctgagggtggaaagctcaaacaaactgctttatttgttgaagattttgcccaaaaaactgttcataacgccgatctcatcgaagatctccttcaaaaggtacttacttattaatttattattactgctctaataatttttactatatcataattaacacagtattcctatttagtaatttaaagtgctcagtataatatttttataatttattaaattaaaatgtgtgagatttcatattaaaataggtatttttacattacatgttctaaattttttttttttttttactttgtggcaaagtttttttttttaaaatactgtgttttttttaaaaaaaaatattgtgtaaattttatattttaattattctattttttattttatagttgttttaaattgttttataaaaagataattttttgtaaaaaaaaattgtgtggcagtaataatatatcacgtacgtcttgttgctccaaaacatttatctaattaataatacattacttactctcaaattattgcatttaat

SEQ ID NO: 177779 - DNA, 674 bp, Cannabis indica
agccttttttttttttttgacacctttttttttttaaaaaaaataataattttttaaaaaaacatgtgggatgctcttacacctttatttgtgctcaaataacaatttttaggtgtgttaaaaaaaaataacaattttttagctggttccaaaaacaccctctcggtatcggcaattatgaaaaggcctttagttaatgaattttgtcaaattaaagttactaactcctaagtgtatgtttgacatcataactaaaaaaactattttttatttttaaaaacagaaaattgttttcaaaaaacaatttggcttgtttttctaaaacagttttcagaaaataaagttacaaaaaataagaattttgaaaacaacacaatgttgttttttgttttaaaaaccaattcacttttggtcaatattgtttttaaaaaacactaaccaaacatgacttgtgttttaaaaacttcaaaaactattttttgttctcatttttaaaaataattttttaaaaacaaaaaacaaaaaataataccaaacatgctctaaattattgcttagtaatcttgttactctcgttagaaaaattggtatatcataaatactaaaaaatgttcactaaagtaataactctgggaattattggtgcataagtaatagtagtgactattatttat

SEQ ID NO: 177780 - DNA, 1293 bp, Cannabis indica
  modified_base (488)..(488): a, c, t, g, unknown or other
gtagatggagccacgtttgacaccagcaactcctacgggacgggtctcattgcccgaaactcaacagggactgtcattttggcctcttccacattctccaatggcttctctaatgcgccttttgctgaaataataagcattaaagaagccttaagttggataaaagactctaatttgtctaacgctgtcatagagtcggattgcctcactgccgtccaagctttgcaaagtcaagttgatatgccttcaatgtttggaattgttgtaaaagactgcaaagttttattgtcttctttatctaatgtttttgttactcatgttaagcgatctgctaacaaggccgcccattgtttggctcgcggctcttgtttttggtctgatcgtaaattctcggagagtactcttcctagtactctcaaatctattgtgattgctgatttgattcaataaaattatccattcacattcaaaaaaaaaaaaaaaaacgnggaagctcatatgacttgttatttttaattatttcaagcctgtaggtgtaaaatctatagtgttcttgctattatatgacatgttaattggaagtaagctaagtttggaggtaagcaagataaaacaaatgttgaataaagagtttgaaataaagaatcttggaccaactaaaaaaattctaggcatggggataatcaaggatagaaaattcaagaggaagataagttttcaaagtgaatatatttctaaagtagtcaaaagatttggtttagacaatgctaaaccggttgtgacaccaattggttaacatttcaatcaaactatgaacaactcatgccttgaagacaaggaattgattacaccaatattgtaggaagtataatgtcatgcattatgatctacattaggccacttttatgcatggtatgagtatgatgagtaggtacatgagtgatcctggcgtagaacattgaaaaatagttaagtggatgctggtgtatcttaatgacacatccaacttaggtatgacatacaactcaagcagcaaggaaccagaaattgtggtggggtatgtggattcaaactatatatgttgaagatttgaatatcaggagatggttttgtttttgaaatcaatgactactcaaattagttgtggaaggctaagatgcaattaacagtggctgtgtcttgtctagccaaatgtatagcctgcagtgaagccataaaaacaagtcttatcttagggttgaaaaacttattcaaagattaaagtatctagatagtgaccctcagagtgcccct

SEQ ID NO: 177781 - DNA, 608 bp, Cannabis indica
aaaaaaaaatcttaaaaatgaaaattcccctgtatataattatataattaatttctatagtttttaaagtcttaaaattttcactttactgataataataaggcttgattcatttattcattgttggtatataagcaaagatgaaagttgaagttcaaaaatggccatatgattttgcacagtcagaggactttccttcatcacagcaacgtggcaacttaagtgggagattagtaatatatgacaggtactctaaaaattctacctttgtttcttttctaacatatgataattagtttatataacacaaatgatttttgtataatttaaagatacgttagcgaagagaggatatgtgcaaatggtgctttcgtggggttggcagcgccaggggatgtgggatcttggcaaagagagagtaaggtatttatgtcaatttttattaattaatatataagtgtcaataacgtccactcaacatatgcatttccctctagtcataagtatactctatagtctagtaattttatatttcttctcacattgaggaggtgtgaaatttgaatcccccttccctattaaatatatatatatatatatagatatac

SEQ ID NO: 177782 - DNA, 621 bp, Cannabis indica
atgttaactttaaatttttagtttttttttttaagtttttaacgtttaaaatttttatttacattcttacattattctaataaaataacaaaaaaaacaaaaactaaaaaaaaaattacataaaaataacaagaaaataatatcaaaacaataacaaagcaacataaaaaataatatataaataacaaaaaatcaacaataaaatataaaaatacacttaaagaccgtagtttatgtaaataaaatttaaaaaactgtaaaaatattaaaaactacgtatagattgtatttttgtatttttttaattgtttttgtaattttttttttttaaattatcgtgattaaaaaactagtctaaaaaagaggaaaaaattccataagcccttgttatagcccaagggtcaatccatttaacaaaaacaagctcacctagtcacctgtttaactacattacctaggtaggtttcccttaatattctagcaagtatcatgaagatacatataggtaactggttatacgtaagatagtaacaagttacattgatggtaatcgggttaccttatataataggtaactggttaccgggcggacccacaaagaggcgaggtggggcagtcgcc

SEQ ID NO: 177783 - DNA, 1164 bp, Cannabis indica
atatagttaacaaaatataattttgttattaaaaaaacattgaaatgagatccgatagatcccatatttaatatttgatatacaataactatagaaaaaatttaactgagtccaccgatgtatttttatttattttggcaatatttgaaagaattttttaattttattttgtttatgattatttaagttatatttatttatgatatcgatctagcaaaattttgagaaattttaaaaaatttaatacgcccaaaaatgaaattcaaatagtctatttcacacgcataaaataaaagaatttcgcgtacaacagactatttgaatcttatttttaccgtgttatattttttcaattctctcaaaattttgtagaatttcttaaataattacaacatagatgactataaaaaaaaaaaaattaaactaaaaatttttacctaattactgaaacagataaaaagtgcatgatatcataaacctcttttaagaatgtatattgtagaataagtatccataactataatacccagtcaaaaacaaaaaggaaagcttgattttaggtcaaaatgtaagaaactttgttaggagggaccaaataatgtacataatttttgggaaaaagtatgaattatatattattatgtttttaataaaaaaaaggccaaagccgtcgtccttcgttattgccctcttctttttttttttctttcataatttgtttatatatttatgtatataaattcttacaaataagtatatatatgttcatgctaaaattatttttgcctttaataaaataaaattcgaaaattatacgtctaattattacatttacataaatataatatatatatatcttcacttattatgagttcgatataaataccttggggaataaatattcactaacatccatatatatgatattatatagttagttcatcaactgttaaacaatacatatatttgagaatttttgttaaattaagagtactgataattaattaagagataataaataatttgtgtgtgtttttgctgtttaagataattcatgaaaaataagttaaaaaaaagaaagataattcatgaaaattatatttaataataagctttttctaaataaattaaataattaatttccatatatatggacgtggttgc

SEQ ID NO: 177784 - DNA, 952 bp, Cannabis indica
atgccaaacatgcacttagtttcctcgattttttagatgacttctttgttgagttcattgttactcagtcagtctcattggcttcattcaccatactacaaattaaatagatgatatgtgcacccaattatgcaccaaacattactcatagtgacattttttaccaagccccatatggaatagatgtgatcggttgaaagaaactgccactgccacgtcattgagtgtaatgttctagtgtataatttgggtgcacatatgtatcattactcaattaattatgacatgtaagctacagtgtagagatagaggaaagcatttgaaccattataagatttgacctttaagccttcgttctaactaattattcattcttttgaattattagttaaagtcacttctgaagctatatgagaatgagaaatacattcttgtggtgaataaacaagaaagggactttgaggtctttgtttcattcaaggtacgaaacaagttactagttacaaccatcaagtaacccaaaactatccttgactatatcaatcatcacatcctaaatgccaatgcaggttggagcaaccaatatctcagtcttacgaagcgtttggcaggcttattggctgcatgagaactggaacagcctagataacaccttggagcagcttgagcgaagcctatcgaagttggaaaagagcttcggcgacttcatccaacaactgaatcagactggatgggatacgaatgaaatgaatcttaaggtgcccaaggaaatcgctgtcgatgaattggatgattgctcatgaaatggtggttgcttgatgatactgatgttatattggcattggcagtgtgattatagagaaagggtaagtgtagtagttgagctttaattggtttttggcattgcattttttgggcctttttggttgtcattttctaatttttttttttt

SEQ ID NO: 177785 - DNA, 678 bp, Cannabis indica
ggttcttgataatccaagaccttgcaaacaagtctttggttctattttcataaaatcataatatggaaagatgttggtgttcatatatctttaacattaagatttaagttatttatgaaaatttcttgttggttagattaatacaagttacctatcgttttttaacaggagcactagttgttttggtgggactaatatatatgcgcatgtgatgttgagacttatttatctatacgtgagacattcaattttgaataaaaagataagtgcatgtttgacatcataactaaaaaactgttttttattttaaaaacagaaaattgtttttaaaaacaatttggcttgtttggccttattttttaaaaatagctttcagaaaacaaaattataaaaaacaacaattttgaaaacaacaaaatattgttttctgttttaaaaactaattcacttttagtcaatattgtttttaaaaatcactaactaaacgtgacttgtattttaaaaacttcaaaaactatttttgttctcatttctaaaacaattttataaacaaaaactagaaacaataccaaacatagctctaagttattttgaatttcctttctactatctagacaaattagatctaatttctaaattacatcaaattatttctattttcattttttagttaaaagc

SEQ ID NO: 177786 - DNA, 754 bp, Cannabis indica
gtttcagtgttttaggaacttatttcctctttgttttttaattgtaatcggtttgagttattgcgtattacttgtttgtatttattatgttatataaccagttttattttagttttaatcggtttgagttatttcgtgttatttatttgagtaatttgcggcataaatacctaagtttaactcccagttgtaaataaataccaaagtttaatttttggtgataataatacctaagttataattttagaacttcagtgttttattcattataacactgatataaaacggttctattttaattataactgatttgagttattttgtgttatttgcttttattcattatgttacagaaccggttatatttcaattataactggtttgagttatttgttttcattcattatgttataaaaccggtcctatttttagttatatctgagatatttacttcatgtgacttttcctgtgacttttctggaaatggtaatttttgcggtgactttttcgacgacggtgacttttctggtgactttctcggcagcactaacttttttggtgactttttcggggaacttattattataagttttattaaatttatttattgttttttttttctcatattttaaacttgaattatttttaatcttatattttttttgtattatttatttatgccataaaaaagtaactatacctttaattttatatgtataaaattctccaataaatattgaatgggtctcatcca

SEQ ID NO: 177787 - DNA, 530 bp, Cannabis indica
tatgttcagtgtgtaacaatacacataagttaagaatgaaattaacatggctgtagaagaagcaggcaagagactccgccgtttaccctcagaataagcaacccccatatatataggcttttcccttaacttgggactgatcacacgctttaagtctttattatattagtatgtttacaattcaatctcaagaatcaagatcacctgtccaaatattatatcccatattatgtctaaccaatataataatgacacattatttaatttatttttgtaaagtttatactctaaaactaacggagcaagtctgttagctacaaaaaatggtagaactaatctttttaattaaggaaattataatcataatataattaaaataactaaaaaaataataatgatttgtatttttttatctaaatgataaggacataatattaataggaatcattgaaaaaaaaaaaagaacaaccctttaatttttcttgtaaaaagaaaaaaaagattgtattattaaaataaatcaaaattat

SEQ ID NO: 177788 - DNA, 877 bp, Cannabis indica
ggtaataaagtatctacacccatcaatggttaaggtatgaaagggtctccgaatatcaacatggattaagttaaaatatttttctgtaagattgtgatttgacacaaaaggtaattttttctgcttagcataatgaacgatggaactaaaaaaatgggtacaagaattattctaaaaattcaactttttattcaatgaatgagttttgatacaagaggaatgaccttatatatagcgccacgtagcatcttttgaaattttagaatatattaaagatgtaaatacaataggagcattgctagaaacagtagtttttaggtaataaagatgctcaattctttcacccatctcaatttgtaggttgttctgtgtgtcctgaatcacacatttagcaaaggaaaatatgaactcaaatgtggaagtctatgctaaagagctaatacatattactttggtacaagtaccattgggctatttaacaaaaatgatagaaggatcaatgaaagtatttgaaaataatgacatattatagcaaacatgatgagctgcacttgtatcaataattcatttatcaaaaatattgggattgagagtaccaaaaagctgtgacgccagtggttggcgtggatggcctgagtgggaagattctggttgctcttgcattttttagacaacaagccattaatttttagcactaagttgaagtgagggctgacataaaatatttttcaatagatgattggcctccttgctttgattgatcattttgtgctcctgtaaaaattggcactgcagaatttataaatttgaggagtcattttgattagaaaatcttccatgtaattggtgtccaggtgaatgcttatgtagtcctata

SEQ ID NO: 177789 - DNA, 677 bp, Cannabis indica
aaaaaataataaataagaaataagagaatagaaagaaaaaataaatatatggattatttaaataaaaaaaaagaaagaattaaggagagaacaaataaggttaattagagagattttagaccgccacgtcaccgtctcatacttctcctttatatatatatactaggaaacgtaaccgcgcgttgcgcagtcctttcaataattgaacaaaaaaaatatataattttattaatttataattaattttatataagtttaaagtaaaaaacttataccataaatagcaagacaaaatataaactataatattctattatttgacaattctttttaaataaagctttattttcatttttaaaaacaattaaagattaatttaaattttaaagttttgaaaaaatattaaaaaattcaagaatctttcttgcattcatccaaaaatatacaataaagtaagcaatactaaattaattatattttgcagcataaacttctaattgttagattgatgctgatagtctaatagataccctttaatgaaaatttgcgacttaagaagctatcagtttttgaaattatattagtattgtttctaattgatatgttaattcattctaaaaattaatcccatgtgatgatgttttagtgttcaaaccacgctttagactttgatgatg

SEQ ID NO: 177790 - DNA, 627 bp, Cannabis indica
ggcgcgagccaagagattcaaagaagaactcaacaacttagtcaacagagttttaaaacaagaggagaccgcagtcaacactgaaggagaacaaagatttgtgcttctcatcaaagtagactcaatttagacccaaattgagcttatcacgtttttcaaggcatttggcaactttcctttttaattttgtttcctttattttgtctttattttatttggaaaattgtctttcttttagtttccttttttcttggttgtaagttggctatataaagccttgtaaacactttgaaaaatcagaatattttggaataaaattttgagaggttttcttcttgagttcttgagagaactattcgaacttatcaaggagtattccttgtggcgttcaacctgacttatcaaacggatttccaccaccgtttgtggcgtcttccttcataccaaggttcatgcttaactaagcattgggtcgcggttccacatccaaattttgagaattcttagaggctgccataattggtatcgggtttcatcacaactattggtgtggttcgtatcatttggtatcagagcttaggatcatcgggtttggcctatctatcttttgtgttttttttttcaatt

SEQ ID NO: 177791 - DNA, 629 bp, Cannabis indica
gtttcacgtaggggatcatgtattcctccgagtgtctccaatgaaggggatcaagagttttgggaaaagaggcaagttatgccctagatttacaagaacttcgagattctcgagaaggttgcacaagtggcataccgattagctttgcctctagctctttcagcaattcacaacgtattccatgtctctatgctaagaaagtacgtttcagaccctgctcatgtacttagttatgaaaatcttgagctgcaaccagacatgtcatatgaagaatagccagttcaaatccttgacagaaaggataaggtcatttggaacaagaccatagctttggtcaaagtactctggagaaatagcaaggtgcaggaagccacctgggagttagaatccgacatgagagctcaatatccagagttgttcaggttagatttcgagaacgaaatcattttaaggggggataattgtaaagaccgcttagctttaatttggaaattagcagataattttggtttaattatgaaacttgattattagttataaattattaatttataatgatttatttgaattcagaatgcatttgatatgtcatatttagaatttcataaattttgcatgttttgtgcccg

SEQ ID NO: 177792 - DNA, 657 bp, Cannabis indica
gcagagaagaaggggggggagggtcgacgacgagcggagaagaaggtggtgggggggggggggggggcgatgcttgttgggcagcggctgtgaaaagggttatttagttttaggtttttttgttttagtttttcaatttaggcagtacctaataatagtataaattaaattttaaaaaaaaataataatatattacgggtcgggttgaacccgcccgtttttaggctaacccgtacccgcccgccaaacagcgggttaaaattcaacccaatccaatttttgcgggtttttaatgggcggtttccatacgggcggattctaatgggttaggcggttcccacggtttagcggtttttatgttccggcctaccagtaacacgagcaaccgtgttgacaatttcatcaacttttagcttcagacccgaatttgcaggaggcttacatggtacccgcgatgctggaacatttgttggtgggacaaaaatcaggttagtaggggtttgagctgctctatattgcaatagaaaataagcagcgtaagtagagatagccaccgctggtgaagtggtttgggttaatacggctatattggagttttcggaggcttgttgtggcgaggtggctgcgtgttgcttagctattgaaacggcaaagatc

SEQ ID NO: 177793 - DNA, 763 bp, Cannabis indica
aatagcacagattacaaagagaaatgaagatagttgtaatccatatgcagagattagtttcttgcacacacaaaaattaaaaaaggaaatctattgtttccatcaaaagaattaaagttgaatatatgtccttataatattagataccaatctactaaagaaggagtaaaaaggatagtaaaatttacaggatcaggcttcttgcgagggacaacatctccagcaaatatcttgatcttctctgctctctctggtccgagtaagaaacttactattgcagagaccttaaatcaatggatagttaagaatcatggtcaaacagttgaaagactgatgagctaagttatgttaaaaaatcaatagcacacaactcatcaatgtactaaatcatacaaaacagtatgaaatacatgtaaatgacatttcataatagtgtgattaaaagctaaaaaaactggcagtttagatcatagtaagtacttattcccttcatagtaaaaattaaatctcaagtggaagcatatgacttgcaacgaaaaatatgaactttaagacccaataaagcataccgccttttcattagatgtgctgcatacagcaactttgacaccttctgcaaaagcttgatcaatcagcctgtaaaattttattagaaaatctcaataacccaaattgaaaattataatcaagttggctcccaaaagccaaaccacttaactttcaaaacatatgaggaagacttcaacaaacttgttattccatc

SEQ ID NO: 177794 - DNA, 901 bp, Cannabis indica
ttgagattgagattgagattgaggagggaagagaagagaaacgaatctgttttcacttgcggttattgtacgcgcttgtgtattgtaacaaagttggaaactcgctcttgttgctctacaactcatttctcaagtttacctttttgttcttttccgcaacagattttgttactttgtgggcacacatgacaatactttaatttatttttatttttatttatttttatttttatttatttatttatttacatttattgatacgatatggctacctagtagatcttatgacttatctcagtctttttaaaattaattgtaataaataatacaagatatgcacaccacaaaatcgagtacttttcacggggcaccaaggtgctagagcattgctatagtgaaaaataaaattataattatacataattataatccttcaatcatggtgtgttcgaatggaattcatcatcgttctgccatcgtattggtgtttattaaggaaaatttgtttctaagttcattaatattttttagtgagtgttctgaatcacaacaaaataagtgtgtataggcagaaggatatttagccaacaagtcaattatttagtcaaaaggtatacaaaaattaaaatatgaattgcttcaaaacaaaactactcatataagactaagttactctaaaaatttaacaactggatatcaccccaaaaaaagcaaacagactaaatgaataaattaagcaagtctacaaaataacaaataaattagaaaggtgcacattatttatcgtagattttcggaatctaatttaataagtgcttaagagatagtaaaatgcaagtaataaaaaagacaagaatttttacgtggtccagacgttaatgagccttagtccacgagtcag

SEQ ID NO: 177795 - DNA, 1192 bp, Cannabis indica
gtactaaatcatgtctcctaaactttcatctatgttagacttttttactaaaattgaacaaaaatccttaaattcaacaatttcaatagttcaggagtatttttaacagcctgatttggtacgtacatgtcaaaatttaggaataaaattcctaattagcttaaataaaatatcattaaagattattaataatataaaattattattattaaaatagttaaattacaaaactataattaacatataatatctattgtgtgtaaaatttgatatagtgtcatctatactaaattgacataatatttttagtatttgttaattaatacaactttcaacataatattttggagaattatttttgttcaaaaatactctatcactaatttggcactcccattagatatatgccctggcgttataggagaaaaataagactagcatatagttttttaaaaaaaaaaaaatgcatgcaatctctatactacttatttatttcctaaataagtaaataattccatattaaatatttatgccttaaaatatataataaaagcaatatttattataaaattaagataaataaagaatataaaggtggcgtttggtaacacttttttaatctagttttttgtttttaaaagtagaaaagtgaaaatatttttcaaaaacatgttctataaaactgtttttacttttcaattttataattagaaatcaaaattttaaaacaaaaaaaatcactttcaatatttttttaaacagttttttttcttaatcaatcttttagattacgaccagacccggacccaaatcccctccctacggccctggcgctaaacccggcttttgacttgaacccgaatccgaccccggacctagacccgacttaaataaaatcaaaaaataaaaataaaaatgaactttacagaacacacttttgttttctgtttttaaaattgaaaaacaaaagtggttatagaacgcatttttgtttttcaaaaataaattttttaaaaacaaaaattttactttcattttgtgattaaaaaattaaaaaacaaaagtgttaccaaacggcacctaattaaagaaaaagttattgggttgttctatgaagcatcccggaaaaaagtctactgatgtttcacttttttttttttctatattcgaatagctgtgatttcaatttttt

SEQ ID NO: 177796 - DNA, 775 bp, Cannabis indica
gcgttcaaacaatgtgttgcacgcgtgacttattttatttttatacgcgtgtaatatagattgtttgaacactgttttctatattgtaaattattcagaatttcttaaaattttgtaggatatcttaaataactataacgtacatgaatatgaaaaaaaaaaatagactaaatttttttttctggatgccgaaacaagtagatggtgcatcagtacatcctttttaagaaggtggattgtagaatcacccattattatattaccaattaataaaatatatttttaatttatttagagtaattatgtcaattgatttatattttttttgtcatatcttcaatcttttcacttttagagatattgaaaatagaaaatatacatgataaatcaaaaaaaattttaaaaaaataatagaagtacatcaatagaaaaaaaaaattatttttatgctttgaattttctttatttatattatagttgtcagagataatttctcgttagtttcttactttttattgtaaaaaaacgtatttttataattttaaaacaattacaagtataattttataaataaaattgtaattgtaaaaaaataaaaaaataattttaaaaattacccttgaaaatagaagagaccaaatccatatatcttttccttctaactttctttctttctttcttcttttttttttttgttaaggtattttccttctaactttctattcatgccaaacaaatgaaattgattctcctttcactcctcttcctcctatcc

SEQ ID NO: 177797 - DNA, 509 bp, Cannabis indica
atttgacaaaagaaaaattagtttagaattttttaaatattcgtgtatattgtaaatatttaaaaaaaattataaaatttaaaaaattcaaaaaaaaaaataattaagacatcaaacataaaatttaaataatttattgtaccaaattaaactaaaaaattaaaatgtttaataatatagatatgcagactgttggtacaagagatttgatatgatcagtgctaaacacgtggaagtcggcttatggggttggtacttagtacgtatgcaaatgtaagagaaaaagaatattattgttgagaaatgtcaacgtgatatatatatttggcaaataaataattacaggagacttttttagtttttggtaaaattttaaaaaattaattagaatgtaaaaataaaaataaatagtttaattattattagtatgctttataaaattaataaatttgataaaatataaattaaaataagttattagtatgttttattatatgtgtatagttacc

SEQ ID NO: 177798 - DNA, 613 bp, Cannabis indica
ccgggtcggatatgatccaatccagcaaggtggggcgagagttgtattatgatacatatattctgtgttttttttttttttttgtataattacatatattctgttagttcctttattttgacgggctcctatcctatgctcttaaagtaatgggttgttctctgttctgttggtcggttccctctgctctggttctagaggttaagttttcttgcccttccctcactttccttttttattatttatttgttttctttatttctctagaaaaaatttcgggtgtagttttttttggaatgcttttttttgtattgagatacaagatagtgtgaggtaactgtggtctattactcttgattcttgaactaataattaatgtcccacaacttgttttataaaacaatgcaaagaactatatataaatcaaactttggtttaatagagtattagaaatcatttgtaggtgggcgatatatttctaggctattaatccagaggaaaacacattttagaatgtgatgagatataactagataagctttataaaaagagaaaggaggaaagtaacttatgcacttcctctttgttattaacactacttcataggaataaa

SEQ ID NO: 177799 - DNA, 527 bp, Cannabis indica
cacattagacacttatttatactatttaggatcacacattttgaaattcaacaccttacacctcatgactattaccattctttattgggcgtcaattgaattaaatgggtgatttaaaagttatggaagctattagaaaacatctccattatcaaaaaaaattcaagtaataaagctaacacaccatcctcattgatccaactcgggttggtatgcacacaaagagagaccctaccacatgtgtttcagtttgagagccaccccgttctctataggtcgtcgaagcccccaaccaagacccatgagaccttgtcatcgatggagttgcccgatgatatgacttactgtctatggctccgttgctggacagtcagcgggaattctgggttgtccttgacaagtgatcaatccaagagctccgatcgatggaagaaagcactaaaaccagtaactagttactagttatcaaatttttccagttttataaataactctccaaagcattccaaatcattcccaattgattt

SEQ ID NO: 177800 - DNA, 741 bp, Cannabis indica
tttgtgtggatttaaagtagttgagaggccaaaaaaattattgagaagttttattttttcattaatatatgcaaatatagtataataaggtactttattcatcaaatttttttatttaattaatatgctacatagtgatattctttaatatattagatggatgttagatgctaagtcatctatgtttagttttattctaggttatattaatttttttttaaaaaaaaaaatcatatgtaaattttggtgaaacattatggaagaaaacacacaagctcgaactgtatgattaagctagattcaaggaaggcttataacatgctagaatgagatttcattgaagagattctgactgctttaaactttccaccaaaattcattcaagttttgatgatatgtatttgaactcttaaattcagtctattcttcaatggatcaatgcattgactttttttaaaagcaaaaaggaggcttagataaggtgattcaatgtctctccttatctttgtattatgcatggaatatctttctcgtattctagcaaaggtggagaagaaaatagattttaaatatcatgataggtgctcagatttgaaacttaataatctttgctttgcagacgattgtttactcttttgccatggttgatttttaaatctatttactatatgttacaaggttcttaaactttttctctctctagattatgtccaaatgacatgaaatctgctttgtatgttg

SEQ ID NO: 177801 - DNA, 868 bp, Cannabis indica
cttccaccatccttcttttggtgcttctgctactcctcatgaatatcattcattccaaaggttagatttgtaattttagggttattaattatattcgactaattaaaatttcactcctccgaattttgatatgtataaaattatgttttttttaattttttggtcgttaaaaatttttcttgaattgtattaaaattgttaaattcaaagacttttgtttaattttactgatgaaatcgtgacgtagatgacagttaaggaaacacgattttgtacatgttaaagtatggaaggcatgatttggtagatatcaaaattttgaagacatactagcttaatatatagacaatcattgcattagtaaaattaaatataattggacagaagtattccttgaaatctaacaattttatttttaatagttcaagaagaatatttaataagtcaaaaaattcaagaatataatttagtacatattaaaattaaggttgaaaaaattataattagcataattattcatcaaaaaaatattaaagtctatatattcttaatgctatgttatttgttatttgaaaaataaatagttgttaattaattttactcaattttatatatattaatttttttaatataaaaatatatttgatgaaattaatcttatttatatttttactcttttagaatgtaaaaatatgaaaaatatatattatagacatatttatttattcatgataattaattaattaagcaattacaaaatagatgcttatataatttagaatttaattttcttaagaaattaaatacatgaatgaaaacacactatacgtcatatgaccatgatagcttgatctaattatcttcattt

SEQ ID NO: 177802 - DNA, 869 bp, Cannabis indica
atcacaaggttcagaatataccagaatcaaatagtgaaagccccaaattaaagtattagtttaaaatacgggcaactggatgaaatacttgatattgtgatgaaaaatgaaagcataaaaatgatacaaaaaagtcctagatacacaatagacactaccttgaaaagagtaaaccatatgttttggctatataccatctgaaaaagatacttgaacaaaatgaaaataatgcacatcttatatagctaatttaaacaatgattctaatatttcagaagcacgatttaaaaatctatgctgagttcgcgatcccatattaatgcacgtcaatttgctgcacattaatcaaaaaaggaaacttaatatccatagtccagttaatctgaaagaagaagctgtccttagcaaaaacagaggaaaaaatagaccataagtctctgactaagcttgacatcagatgacagcttgtcctttattttatattttaaaaaaagagacaggggtcacttgtcttctgtcaataaagattataatcaaaggagtcttgcaggaagcagtaagtaaatcaacgagatacttctttatccaaaattatgattaagtttaagttagaagtgtgaaaggcccacaactacacatctaagtttaaagaaaactgcttcaaacaaaaaataagaagtgtaacttgaaaagaacaacaaaaagaaatgacaaaaactttctactcaaagaaaactagtttgattaatatgctatgaatttcacaaccaaaaaccttgatttctatccgaatttagatgagacattttcgaaaaaggaacaatgaacaactataatgcctatagtgaacatgtaaacaaaaatttcat

SEQ ID NO: 177803 - DNA, 756 bp, Cannabis indica
aaaacagcaggccatttctatagaaatgacctaccattttactggtgcaaaacctagaaaaattgcctccatttttttgggtagtttccttgttttagggttttctcgtgtttcctcgatatttaggatttttccatgctatttatcgatagagaaacttttaatttcaagtttagatccctgaaaaggttttaattagaaggttgtttacttgttttgcgtgaatgtgacatagggcattcatctagcgtgtgattttctgttcaggtcgaccagtacacttgaattcacaaataaggtatgactaggatatatatttatatatgaatatgtgtatgagtgatatattcatgctatgtgattcatacactaccaacataagtacagtaacagtactgagtcaattggtacagtgtatgatgtttaaagagtacatgacggtattcgaggtacgaaaaaacccctaccaacagttgtacagtagcggtacgtagtgcatgtggtacagtgatcgtaccttaataaagaacattcttacttatctaataatccttgtggataggtgtatgggcgcttaaatataagtcagtattatattatatgctatgtgcttttcttactgagtcttttaaaggaaatgcgaaggttgaacaagagtgagttctgagctcaggggataattgtacatccgagacggtgcaaactggagtgtttggtctcaggcaacttgggctgtattttgtagttgttatgcac

SEQ ID NO: 177804 - DNA, 893 bp, Cannabis indica
  modified_base (687)..(687): a, c, t, g, unknown or other
tgataggaatatgtctttttgtagtagtgatgatttaatttcatatgtacattttcaataatttgatgataatattctatttctatttgataaaaaaaacagtgctaggaattagaacttagagttcaagaaacatatcaactctgttctcatgtctcttcatttttattgtgctcaaattatgttgataccaaagaagatactaaaaaatgtgaactcaatttgccgagctttcctttggaaaggagtagctgagcacgtcggtctggggaaagtagctcggcgaaatgtttgttctttgaaaaaggaggggggtgttggctttagggatgtaatggtttggaacatagcagccattgaaaaatatatttgagccatatctacaaagcaagataatttgtggattcgatagattcataatatttatttaggagatcataattggtaggagtatatagctcttagatcgttaaattggtattgaaagcaaatcattgttgtaaaagagaaatttaaagccaaaattgatacttaagaattcatctctgcatatagcatcaataggggctacaagttgattaaaccagaaagctcagtggtgaaatgacacagagaggtttggggaagagctatcttcccaaacatcgcttcatgctagctgcaaaaaacttcaaacaaaattttaanagtttttttatataattatttttttaataacatgagtaattattataatatttttttacttttaataaaagaaataaaataaattaatattataaaatcgtattttttctaattatacttaataaatatgataattttaattatttatttattatcaatatacattattaaagagttagtttttaaaattatatagtttgtatata

SEQ ID NO: 177805 - DNA, 552 bp, Cannabis indica
aattttgaaaattgataaataatgaactaatgaaagtttatggtagacgatgatggcatataataattcattggtagtgatgatcaatatatatatattttcaaatctttattatattaggattaggattagttacatattttagattttttttagtggatattttagattatatctatatatcattaatttaaagaataattcaaaatatacatcagattctttttacgtttattttttattttttaaaaaaatcaaatatatagatattttttttttgaatacacagtaattaataaattaataaaaaaaaaaatcaactccggataattagctatttctagtcacattttttaagggaatctagtcaaaaaatttaaatacaatttatttgatagatttgcaatcggattaattagtttaaaaatattatttgtaatctttttgatcttaattaaacatacatattctttatctttttaattttattttaaaataaaatacgttcttataaaatccactttttatgttacatataatttaactaattac

SEQ ID NO: 177806 - DNA, 510 bp, Cannabis indica
ataacattagaatgagtgtactcacagtatccctgagaaaccttaaacacctgtcatatttgaactggacttcatctgcaataaagaagtaatcaaagccactggcatagggggttgcaatgactaaaactcccctgtgatacatatatatatgataatgaaagtgaaaaagaatgaagtcagagtagttggacaaaagggagaagagagaaatggatgaattagattagggactgacttctcacttctcagagagacgttcaagaaataaacggtaggtgagctgaggtgcagcaccaacaaatatacccccaacaaaatggacaacacacttgggtggtatgccttttggtttcagaacccatgctccctgcttggtcacacacacaaaaaacaaacatctgactaaaatcagttcaataatatactatcaaaagcaaacacttcagctcggtgtgaaaatttcaccgagctgaagactatttttcatgcctgctagcccgtgatgag

SEQ ID NO: 177807 - DNA, 954 bp, Cannabis indica
ggtattattaggctttttgggaactttttgccgtctttatcaatagtgtagaaaatcctttgaaagctcaggatctagctatagcaatattaaaaatcaaagtacaatttaataataattattaatattataatgttatattttgagaggtgtggtattattattaatttttttttattttagttataataaaatttatgactaattataaataataatttttatgttgtaattaaaaaactataattatataataagtattattaatcacaaaaattagttcaatttattataattaaacatatttttaatcataatataaattgtaaaacaagtactttttattgagactaaaattcaatcataaaaaatttatattactgtgactaaagattgttactaaatatagtattttttcgtgtagtgccccttaattcccaaataatgttgataataatgatataccaacaaacactaactaattaattactctgttttaatttaaattaattctagaaaattaagatgttgttttgttagtataggtatatatagatatgtgtggtgttgtcagaacatgtatcatatacccaataatactgctcattatatagcattgacttgtctaaagtatccaaaggtcaaacttcataaaaagctgatagatatgaattataagcatcactactcttttggttgtttttactatgtccatcaactacgactactgcaaattatggtcttttttcaaataccattttggcagctttcacatgcaaaaatataaaataaaattttgagatgagacaaaagctgatcagaagaaattacaaagaaaacaaacaccttttccaaccccaatcaatcaacatatacggattcaaactactatgagctcatgttcaagaaatgctaatcacgttgcatgttaatgtaatttattatatattgggt

SEQ ID NO: 177808 - DNA, 656 bp, Cannabis indica
acttttggaaccaagctagctctaggatggtcactattggacaaatagtaaggatttcgagcttcatcagagtaagatctgacattgttgtcgagagccgagaaccggttggaattttctgatgaacttcgagtttgagctcctccacgagccatggaggtgactgatgcaatggaatttacttagagccctgctctgataccatattagttgcggaagtgtgtaaagaaagagagggaaaaacagagagaaagtgaatgagaaaaatagagtatttttcattaattgtgaatgtgtacagtgactaagcttatatagctcaagaaatacaatcatacagttggcaatctaactgcctctaaccaacaatgaaactaatcaaactaactctaacaaattcttctaactgaacaactaactttgatagtttctatttacaaaagtaatgtttgaaaaattagagtcctccattagaaactttatctggtgtagaatagtgcccactgcactaagctggtttttcgggttcttgagagcctccacgaccattttgcagtccaattgtatctcgtaaggtcagtttcaatcccaggtagcaccttcaaagcttccaggatcacccaggccttcgccacaaccaccgaacactggctggg

SEQ ID NO: 177809 - DNA, 667 bp, Cannabis indica
gtatttatatttgaatttggatttatatatcatatttttgatataatactatgttaaaactttaatttatactaaaatattatatatttaggtgtttataaaagtatactacatatagttttacataaaaatattgtataaaaatacaattcaatataatgcaatacaatacgacctaatacggtgttccaaacgagccctataagtatttatgaccacacttgtaaatttttaaaaaattctgaatagtttataatgtcgaatataaggtttaagcagttgcttaccactcatgtgtatagaaaaaacagttgcgagtgcaacaaaatatataaatcttattttttgacattgtaaaatactcatatttttttaaaaaaattacatataatcttatataactataacatatacgaatttaaaaaaacaaatattttttttagaatgttaaaatagataaagggttatgaaacactcttttaagagaagtgtattgtagacttactattcattatttgataaaataaaattttgtgtgataacgttacttaagactatatattttttcaagaagaaaatatgttatattgtataatagtgaatagagacaacctaattcttaacctaacccattattcatttggacatttgttgtggttattagagt

SEQ ID NO: 177810 - DNA, 702 bp, Cannabis indica
cttatcatttgaagagtggatggaacaagaattccaagagcatggaacactgaccacctgcgccgatactattagtaaactaggggtggtcaagttccttttcatttttgcgttacctttttattaatttccttgtacggctcaggaaagaaccattcaaataaaagaaggattttcatttcatatttggtctttaaaagttttatcatataacaagtgatcaaaagtctcgactattaatcacttggggggttgcacatatgctactgttatgaatatatatatatcctctttcaccagaaaatagctaaattaaatactcaaatataagagtaggaagtactgcctaaaaccagagcctcaacgatctggaagtaagccactaccttattgtatttgaaatttatttatcacttaaccaaatatgagaaaaggaagtatgacaaaactggaacctcaaggaactgaaagtaagtcgttgctttcgtatatttggaattaattgtcacacactaaaatggttaatctaggtaaacttaaaataaaggttcacaccaaatggttaattcaggataagaataccataatattcaggttactaaaatcaattgatttaggtcaattaaaaagttgagtttgaaaaaaccctaaaagtaagtgatgaatgccaagaaagggtaaattctcaaaaaataaaattgc

SEQ ID NO: 177811 - DNA, 527 bp, Cannabis indica
taagtctctcctcacctatttaagattaaagagtactatcccgtccggttacaaaactgaaacggggattctcaatcctcactccttacacgaacaacaatcaccacaactcaggagctacctataataatgacacttgaggggaagcagagtgagggggcaggtgggtcactcgctgctccactcctagaggatcaaaacccaatctccgagggcggcgcgtcgttctcaggcgcagtattcaacatctcaacaaccatgatcggagccggaatcatgtcgattccggccaccataaaggttcttgggatagtccctggtttggtagtcattctattggttgcgctctcggtcgatatcactgcagagtttatgttaaggtacacaagctcaggcaattctcaaacctacgccggcttgttggccgagtcatttgggcgcttgggttcggtctcagttcaaatttgtgtcattctcaccaatcttggctgccttatcatttatttgatcataataggtaagttctt

SEQ ID NO: 177812 - DNA, 804 bp, Cannabis indica
ttttttaaatctaattactaatttaatccgattagatggaaaaaaataattaaattggattggatgacgaaactcttccctcctcgccttaaagtaattacacgccaaacattttgacttgtcaaatgagaaatatgctgtttgaacaatccctttctttcttattattttatttatgcacatacttgcattttatcgaaaatcatttaaaataataccattatcacgcatttctttttttttttagaaattcagataatataataagtacatgttgttcaaaaataaataaataaataagtacatattattcggaaaaaagaaatacaggcactatttttggctattagagtggttaacagagtaccggctgagctccatttcagtttctcaacttcaaattagggtttccagctacttctcctctctcttttctttttccgaagaaggcatgctcggcggccgtagagatggaccgttgatgagggagaagggccacaccggaagcggatcacgaatcgctatagcaattgtgatcggaatacttctcggttgcgtgttcgctgtgctctacccttatggattattcgtttccgattcgattactcaaaatcgtcgaatcgatcgccactcggatcttcagaaaagtttgccatcatgcgagtcatcggacaagattgatgccctgaaattgagagtcaatcactttcgaatcgaaacttgagttgcagaaacaggtcagagatcgtgagtggaagatacgactagctgaacattaaaggatcatgctgagaaactggttta

SEQ ID NO: 177813 - DNA, 517 bp, Cannabis indica
gtcgactcacagttctacgtttatgtgtaggtaaaggcaaggctaaagctgatggaccgtgagcgagcttatgaagattgtacatgtcggggcggttaggcctggagcgtacgatcatcgggacagcgaggctgattttgtaactagtcgctaggcgacattattttgtataaacagttaaatctttttgtaaatgattttgtaatcgggatcccgagtcttttgtaatattattttataagtttaattaaaaagcaaaaattttaattaatcacgttttccataaacctcgttgattagcaacgagctgcacagcatgtttaaaaatcacgtaatacgcctatgttagttagggtgttacagattatattgaaatgagttttatttagggcataaaacccaacaaagaccactaccaacattatcgtttttttcagcaacatcttgagccattttttcttaggcacccaccttcaatttcttcttaggagaagctcgcccatgcttagataatgga

SEQ ID NO: 177814 - DNA, 589 bp, Cannabis indica
attagttgtgtatacattcatggttaagtaaaaatttaatttgatggatatttttttttatatcatttttgtactttctaattattatttgaatgataagttcatatttttttttaaaaaaagtttaaaaataaaaagaactccagtatcctttttatgggtattacaccccctactatatatatatatatatatatatattatttttaatgaaatctagttcttatagtgtaagggtgtatatatgtttggaatttttacaaaaatattgaattttaggtaaaagtttacaattttactggtacacgaattttttataaaaaatacaatctttctattaaaacaagtgtaaaacaacaaaaaacaaaattaattaaaacaatagtgaaacaaccaaaaaaacaaccgtggaataaccgtaaaaacttaatacattacacagtataagacttacattgtatttttttacaaaaaaaattagtcttacaataaaaaattaaaaataaaaatttcagtatatggggtgaaaatctctttctttgctttatgaaatttacttttgttcacctttttatttctcttttatttc

SEQ ID NO: 177815 - DNA, 814 bp, Cannabis indica
cctagtcagaatcccgggatacacaagtatagggttaatccctaaatccatttccacaaaatatataaaattggcctttaaattacatatattcatatagagctcggaacgagctttctaacgatataaagaacgtcccaaacggagtcccgagttaaaagttattgcaaaagcaaaaacccaaaacaatcaataaactgccattgtcatggtcgctaccaaacctatgatagttgcaacctctgggtttaaaaacccagaaaacccactttttagcttcgaaaattatgctcaaacacaactaccagaattaatcccacaataattatcaacataacagagagctaacacacatattttaagctctaatccaccataagcatgcttcaaaattcagatttacaacaaaaatgcaaagccccaaacattgagctaggattcaacaaagtttctagggaatgcatgaattccaaaatcaaaacctcacacttaaacattactgaaaaacaaatccaataatcagaatctcacacattaactcaaccttagaatccaatgaaaagcatactaaaatcaacacaattaatcataattcacaaaatcattccttctctacacacatgcatctcaagaacctaacaacccaaaacatgatttatacaagaattccagcaatataaacttaaattaaaagctctagaaagctaccccaagcttccaaatgaaatcgagcttcaattccctcacaaatccaagctcaacaaaagcaattcctcaatgatttcacaaaatgtaaagatggagagagagagag

SEQ ID NO: 177816 - DNA, 721 bp, Cannabis indica
cctcttgaagatgatgatcaagcaatggaggaagaaggtgatgatgaccaagtactaggtgatgacgaggataatactgaaggtgctcatttctcttccactttcaatattgaggaagcatttcaacaccatgaacctagccactctcaacataacttcaacaccatgaacaaccaacatcaagccatatgtaggagtacaaacacaacacacgtacacatgaatttggtgaaaatcctacttttattgctgacctacaaggtacctaggtctacaggcctttcaccaaaaggaaacaaggagcacaccatggcccttcatgatagtgttgcaccaatatccattcaaccataacaatgtcctttgtatcttaaatgctaactcatggcatcattcaattatgtaacaacctctatgttagaatgtgtagtttggaaagtaggatgaggtaaggtgtatggtgttagaagtgctccttgatgaactacacaacacaatgcacaactaatttgagcaagttgggacctactaccggtcaatcaccgaattcgtttgcaaacataagacacctaaaaacgacctttcatgcccatgaagaacactgaatttttagtgatgccttcgccaacctaatgaactctatctttcaattcaaactacttaaatgtgttaatataaagcatttggtcttcgttgataacgaaaactcacgagttctatc

SEQ ID NO: 177817 - DNA, 535 bp, Cannabis indica
ccttcctgatctcagtgatctagcattgttgtgggcattgatcttggataatctttgtcgacgagtagcaatttagattgagagagcagttaaaggaaataaggaaaattgaagtctacatattttatttttttattaattttatttactgttaaggtaaataacattaaaaagaaagctatggatggatgataacaatcggtgaggagaaaatagattggattgacacgtgatgtgtaaaattataaaagataaaaatacattaaacttaactaaaattaataaagttataaattaaaaattcaaatgagatataaacatgacaccttataaaaaaaatagaagagtacaatccacctcagcattcttcattacttttataattattttttttaatttttttgttagattttaaacttgtttgtatttacatttttaaataagtcattaaataaaaactaaataatagatggaataattttaaattaaggttgtagttataatttcaaattataaggagctttacgtcaaatat

SEQ ID NO: 177818 - DNA, 569 bp, Cannabis indica
ttatgactttatactatagccaagccaaaatgacataatactctacttaatcaaccaacgtggacaaaatgaaatttaattataataataaataacagcaaggttaaaatggtgaagagactgctaagtacaaactgaagcctatataagaaacctttgtcaaatgcgctctcatcacaaaatcaagtatatatatatttttaagtgttgaggttgagatcattaattacttactagaagaagaagagaccatggaaagttacacaaggagcagaaccataacgatcagcggtagaaacttgtcgtcgagaattcctagtcgtccgatcccaaagagagggcaagtaaagatggggatagttgtcggattagctcactctgtagcttcagttttctctcctggccgtcgtatgacgtagattctgtattatatatatatatatggggttcaaggtgttgtttctgtacaaattacgtactctctttttcttttctttcttaaatcatgtatgagatcgcgctcccatgtacagtgatctttgcggtatgtattaatggagtttattata

SEQ ID NO: 177819 - DNA, 1008 bp, Cannabis indica
aacatttcatgggaatgacattttaatactttaaaatacaaccaaaaaaaaaaaaaataaaatgaaaattatttcttttccattttattttattacctccaattaaatgccaattttgaagtgcggaacccaagtgatcattttccttatttaattatttatttatttcaaaaaaataaaaaaaaataaaatagattcgcttttttattaccttgcaaatttaccaaatgcgaatgccgcaaattgatgaacaaacacgtacggtaagagtaattggcctaaaacgagttgttccatgcgtcaaaacgcaggtcacatggtgtcgtttggaaagggtatttctgtaatttaactgatgttatcttcacactgtactactttgctttccttaaacagacgcattgactctcagtggctctcttatgctacccataataaactctcttctttaattccttcagtttgtgagtacaataaatttaaaaaaaaaaaaaaattaatggcttctcacgaccaccctcattcccatgatcaccatcaccatgaacatggtcatggagattcgggaagtgggtcatgggtaggacccgacggaaaggtctaccatagccacgatggactagcaccacactcacatgaacccatttactcacctggattcttcaccaaaagagctcctccacttcacactagggatttcaatgaaagagctttcactattggtattggcggaccagttgggactgggtatatcactatgttccccccttttttttttttatctttttctttttatgtataattcttttcatgatgactttcttttgtaagcattcttagctttgactttgtttagattttgatttgactcttataaagggtttaagtattttttggtatgtcattttttaggtacacttgaatttaaaaaggaaaaacttttaattttgtataatgggattaaaattaatatatatgataatttgaaccttgtacctttaatgagtg

SEQ ID NO: 177820 - DNA, 790 bp, Cannabis indica
tttgaaaatatgaaatatagctaataggaaatagaatagtaaacatgaatataatagaattaataaatggatacatcaaatggtaatttcttttcaattttaaataaaatatttattccaactaaataataaaaaaattatttattaaataaaatttcaatacttaaatacaaaataaataaaattattttctttccatcttattttatatccttagttatatatctttatatatacatgtgacatgttcgctaaaaacaattttcagaggaaaaaaaaactattcaaagtagcagcaagctttgttcaaaagagaagggtacccctgattttttttctttttaatattactttacttatataaacttttaataccaatattatggcctctctaatgcctgctataaactacaacttgattttatttttctctcttttctttctatcataatattttataaatgggatgtgttaggttgtaacttgtagagaacacactgctccttattcagaaaaccttaagagactaaaaaagctacacactggtatttactttggaagatactacatgcaaccaaacttttcctaataagagagaagagctacgcaaaaaccttttattgcaagttaatcaacctgtaaacctctggttagggaacaaactgtcaacctctaaatcaaaatgattagtactacagttaggtgaaaatgttagacatttatatgtataaactgaaatatatatgtttatgtataaaatgcggaattaaatcaaacatatatacactat

SEQ ID NO: 177821 - DNA, 1206 bp, Cannabis indica
aaactaacatgaaatctgacatatgatgttaataactgctgaaaatataaattgtcagctgcctcaaattatgctacttgtacgcatactgatgctttcagggaaaaagaaaaggaagacacattctggggaagagagaagaagctaagatcataaataacctgacagccttgcctaagttagctgccttagttatgagtaaaatttggttactttgtccttatgcaaatgtatcaaaatctcttcagagcatgagaagtataaaagatcacatgggatgcacctaattaaccataggtagcaagatcacattgaattatgcactcaatttaaagttaaaagaatctaccttcatggcatatagcagaaacttttgagcttgcgggtggagccaatgtatcccatataaccaaattatcacccttggagttatatccagccacagcaattactgatccactcgaaggaaaataagtaacatccctgcaaaataaattatatatcaatgattgccacgaaatatttaggaattaacaataccctttccaaccaaaaacacagaagataattgaaatatattctagaaatttatgaggaataaaaaagtgcacatacgaagcatggtggtcaaagcagactgacgattctgttggatgtatattgctccttcctcccacctccaactgccatgtacaaacagtgccatctaatgcagcagtagcaaatctatgtccacaatgatcaaaatggacagcagaaattgaggcaagggcataaggtggaggtacatttgcagcaggaagaactccataagttgcagtagctttatccttcccaaactgcagtcatcatattttagatcaggcaacaaaagttgaacaagtaattaaatagcagttcttacatatatacatatatacctccttcttggaaggtagtacactaacacattagtaggtccccatgaggaaggtacaaaagttgaacaattaattaaataaagttcttatataaatacatatacctccttcttggaagttagttaactaacacatttgtaggtccccatgaggaatggaaccccgaaccccatgagagaaagacctttcctcacaagtggtttataaatcactttcaaagtgatgctcacagtagtcttaataacatattaggttggcatgaaatattatattcgtcgtgtttatt

SEQ ID NO: 177822 - DNA, 883 bp, Cannabis indica
cattaaaaaaaagtacaaatttattttccaagacgtaggaatgaatgtaactcataattttttttaatctctttaattcaccagctaaattttctttgtcagccctacgaattgtacttttcttttcataaaatttgtatttcaatttatttcacctaacatgcaaatataatatcaaatataaaaatactttcattgaaaaatactctgcaatgacacaacatttctttttaatttttctttctctcttgtagttggtttgaggtgaggactgaggagccgttggtgtcatttcggacggatttgtgttgacttttgatggtgctggtgttgatgtctttggcctagtgtcgcgctgctccttcagttactatcttgttttctgatagtcattaattcttattagaaaagtcataccatatgaagatgattttcttaatgcagagcttggttccaattctagctttgtttggcgaagcatttggggtgctcaaaagataatcaagcttggtgccagttgaacgattaagtcgcgtactaccactaccattttgaatcatccgtggcttcctaataaaaccagccgtatgttacaacaaacaatcctggtttgataactagcttgtctcttctcttttctctgttgaatcgggcagctgggattatgactttggtttgtgactatgttcaatcctcgcgatgcaagcctcatcctcggccttccattacgctccacagatgaagatgattgctggtatggactggtgaaactaaacgggtagcttcatagtcagcagtgcctacaaactcgctgcaacaaatcaaagaactcgaccattctgcctaataacttcaggttctcgaaaaactgtggcagctgaag

SEQ ID NO: 177823 - DNA, 719 bp, Cannabis indica
gtggctaaggcaagggcttcatattcggactcggacttcgatcgagcaactacagttttgcttcttttgaacaccaatttgatcagattacctccccagaaaaatacaataccccgaggtggacttcctgtcatcataacatccagcccaatcagcatcggtgaatccttgtatatcaagtgtgggactcggtttgaaggtgagactggtgtcgagagtgcctgaaagatacctgagaattcgtttgcaggcactccaatgttcaatggtaggagcttgctggtattgactcaatttattgacagcaaaagagatgtctggccgagtcattgtgagatattggagagccacaagaacacttctgtattgagttgggtttgtcataggggttcccacatgttgtgagaactttgtagtagaacacatgggggtggattgaaacttggagtccagcatctgagtggaatgcagcaggtctttggtgtatttttgctgtgtgaggtgcagattagtgccatctcttgtgacttcgaaaccgagaaagtaactgacagaaccgagtactttcaatgcatattgggactgtagcatggagatgatagattttatttgagttgaatcttcaccagtaatgaggatgtcgtccacatatattagaagtaggacaagtttcccatgagttcttcttaaaaacaagctgcagtcagatttgctattgg

SEQ ID NO: 177824 - DNA, 589 bp, Cannabis indica
  modified_base (59)..(59): a, c, t, g, unknown or other
gtacgcaattgtaacagtggactcctacacaatgtggtgagcagaactgtggttcacanaaccgccaagcagtagctcctttcgcaacaagttcattatatgccagtttgaagttccttacaaaaatcatcacgaataatggtactcagttcagagacttagtggagcatattgcaaggagactggatacaaagagaattttcagctgtggtgcaccgctaggccaatggccatgtggaggccaccaacaaagtgattaagaaaaacctcaagaccaagctagaagaactcaagggggcattggtcgaggagctccctaatgtattatgggtttatagaacaaccccccacactacgattggagaaaccccattctctttaacttacgggagtgaggctgtactccccgtcaagatgcagataaactctcacaaggtccaaacattttaagaaataaggaatgaggaggcactggcagagagcttggacaaactggaggaaaaaagggaaaaacctcagatgaaagtagtcgtataccaacagagagcagccaggtactacaactccagggtgtgaatacatgccttcc

SEQ ID NO: 177825 - DNA, 549 bp, Cannabis indica
aaaaatagatgtttcgtggaaacgaaagtaaaaaggggacgtcagacctactcatatgtaagaaacatcaccttgggacttataatcggagggctttttcagtgtggattagtgggggcacctcaagaaagatttgcctcagttgaagaaagaggagcctaagcctgaagctaaaccaacaccagcgcgtgtgtttgccattacttaggcagatgctatacggccagcccttcaatagtcacaggtcagcttcctattaacaacattatttatactgtactatttgattatggagctacacactcgtatattgcaacaaaagttcttagtcagcttggtaggcctagtgatgtatttgagatgggatttggtgttgggttttgtgccctaaataaaacccatttcaatataatcagatttacttattaataaagatcagaaataacatttttatgttgcatggttcacatgatttatttcatgattatatatataatgtatgaattctatttaagtccagaacatatgaatttgttaatgattatagtg

SEQ ID NO: 177826 - DNA, 1052 bp, Cannabis indica
ttatacatacataggacagattagaacttaagaaaaaccaaaacaaataatactgatacaggcgagtcatagccattagagttcttaaccactcacaaagtttacaatcatctaacagactcaaaattattacagtcaatccaaacaaaaaattagataaagcaaccaaataaaataatataattttacaagaaaataaaattgcatatcaaatttcacccaaaaaaacactatctgatatcaaaaaacaaaatcaaaatgtgcaaaaacactaggtacttataatgaataattctagcaatagtaaattaattttcacaattcaatgtttcaatactcaactagcttggagaactataagaatttgagggatatgtttatggattaaacaagttccacaaacaagacagcttactgaaattacaagatatatacatcgatttatacataaactagaagtgttatattttatatatgagacagtctaagagagtagtcttagacctgtatctgacctcaaattaataaaaactccacaaacttctatcactattattattatataacattggaaaacagaatcaaacattttatggaccacaatcacctatgatataagcaatggctaatggattccagatgctgaatagatggatggagcaactgggatttgacagtttcaatatttatctttgaatctgatttcagaaatgaaaaataacataaacacttaaagcttagtatagaacaggaaaataaaatagcaatacttgtcttgtgaacgttattccgatcaaatactcattagatagaaatccaaaaaccatatcattgagaggaaaaaaaacagtgggtgatgtactcagcacattgaataaaccctaacatcgacttaaatctttagtgaagaggaagaagaagacgatgattgtagtagaaataatagcctcttcatatatataatgagtaaataagaaaccctaacattatgggcttctgctgtgggcttttctgtttttcctttttaagatttcttttcttttctttttgaa

SEQ ID NO: 177827 - DNA, 800 bp, Cannabis indica
tataaacttacatttttactttgaaaactatattttatacacaatctacctttacaaaatcagaaaatatatattatatatatacaaaagaaaacttacattataattgatgatcttaattaacacatcaataacgtacacttaccaataatcatgatcatattatatagacgatcgagacccgccgaaacatatacatacttcccacaatttcaagcccttacatatatatatatatatatatgttcctcttattatatataggtttataacttaataattattgaacatataaataaaaaaagtccaagcatataattaagtgtctcgactcgaccacgttgggatattcattagttctttatgcaatttcgcttgtaagggttattacaaggcggcgctgggttgcatacgtagcggccgccggggccgatcctacaagctggtttgctaggatctttcgctcctccacctactgaacctgtaccattattaatttaatataaggaagggatatagatattaattaattaaaatcgatgtatatatataagtataactaataagtaagtgaagaagttattattttctcacctttctctactaattgtcgagcatggaccaatagagatgggaagaagagaacagatgacagcaaaattgtaattagtattataagaaaagacttcatcttgttataattttggtatatgtatgtatgttattagctcctacacatcttcctcctttttatagacaaactataaatgtactcaattcacaaaaattaaattaaaata

SEQ ID NO: 177828 - DNA, 979 bp, Cannabis indica
cgacgatgcatgccttgtgtcgatcacagttcttatttacaagagttcttcgagctcatttgatgttgcttctcgacttgccaaggttgtgagcctcactaatgctaacgagatgaagttacatgaggtcttccactaacgagacgggcaccttgcttacttggtcttgagctgatccatctgtaacacttagtttgtacactaaggactttcgtaattatatatgttgttttcgtcttctaatgtgtactgtccttgatgcctcgcaattcgcattcagcgacatatggtttctcgcttatatgctaagtactagtttgtatattagttccttgcctaagaccttacaatctatagattaaaaatatactctgatacttacgtaattaatgaggtattccataaaaagcgattgaaccgatccatattccctttatcttgacacgtgtcctccactgagatggcaatcgaaatttgaatataacaatcgacccttaaaagttcttttaagtaaaaagaactttttaataattacagagggcaattttgtcagaatcccttcttgggaaaaatacatccttggattttggcggttgtacagtttcaagggtcattatgaattgtcccttcattatttttccttccaaccgttggatttctcaatccttagctttcttgtcactggactttgtgtataaaagggcggctcaagcttgtcatttttcacaaagtcctggttctctggtgagatccatcttgagaatggatcatctctttcttgctacaatgtcccttctgagttcagaagttcaccctcccaaactcataataccaggatgcaccaaccatttttcatttgttcccaaggacttcaatcctcaattggaaccggaaacaatggattccaaggctgaggagcttccgaaaatccaaatcaggggagtcccacagcccgctatgggagatcttcacaactgat

SEQ ID NO: 177829 - DNA, 664 bp, Cannabis indica
aagtaggagtcgcaaaattataatgattaaaaatcagaacaaaaagcaggaacacatctttattagaatagagcttgatatgatttcttcggacaaatggataatgtatagttcaataaaaattaaaaaacactaaaaattaccttaacagatgaggattctgatcgggtcattgattatgccacgtggtaactttctgatcatgcacttgatctcactgttaagtcattattagaaacacgttgggaaattgtgttgacaatattaaagtaatgagattctaagctccacaaataaaagaagctttaaattactttgtacaaagcaatgaagatgccaaaataaaaagtgatgctgagactttagcaacatataatttttaaaattttgagttcttagtgagcatggttatttggtatgatttgttgtttgctgttaatacaactagcaagatcctgcaaagtgaagttatgcaaattgatgttgcgatcaaagaggtaaagattctactttcatttcttcaaaagtacagataaaattgattttgaggaggctttgactaaagctaccgaggtatcaagtatgatggaagttgaatctttgttattgaaaataaaagtttacaagaaaaacagtttgataaagagtcaatgaggaggtgaca

SEQ ID NO: 177830 - DNA, 1139 bp, Cannabis indica
gagtagtttggagaaaaaatcaaaggaagaagaagaatgaaagaataaaaaaatggaaaatagttgatgaggagcaaaacggtgccgtgctgaacacacgtctttagtttagtttaattgttttatcgtagaaaatagtgggtttggtattattattggtggttggcttttcaagctgtccaagttggaattttctagttctctagtcacccctcacgtcacaattttgaagggtctaacgtttttagttaacgtactttttttttttttcctatcttgaacttgtatataaataattgaatttatttttaagtatttaaatattgattttgttgtataacttggaaaataaactaattagattttattttgtgataattaaattataaaattatattaaattttaaatttagatatatttttttttataataatataagtaattatttaattatattttcatttttgtattccttgaaaaaataaattagaaaaaaatatacataaaatttcttattcaaaaaaaataattgataaatttagagaaattagacattaaaaaaatcttcacacaaaatagacttcttaaaaaaacaattgatacatttctaaaaaaaaatcaatcacatgatttcaaaatgggatattagtggtaaaatcattcgaactttacatattttaacacttacctacaaaaacggatttttttggggacaaaactacttagatctcacttttgtcatgctatttactcctaccacccaaaaataccccagttaagtgtcacagtagacagttaaagtgtatactaatgtacatgtgacacgtttttagtggtccacataattttaattattaaatattataaaaaataatatctttttttttctctttttatccctaaaaattgttcagattttctctctctccctcaccttcactctcggtggtttatcctccagattcgacaccgattttccatcatcggctgacaacacacgttgcacgaaagagaacgaccaccctctgaaacctccacctgtgaaagccctgcctgactcgtgtcgccaatgaggagaatgactcaattaaagtcgcggcccctgaaaccttcaatcgatttttcaacgagattccga

SEQ ID NO: 177831 - DNA, 512 bp, Cannabis indica
gctgttttctcatatatatcaatctctctgcctatatattattttagttttattggtttagtttgattctcattctctcttgagtgcattgattgaattatgttcttgtattggtatagtgttctacaccacaagtggattctgagctcaatgctcgaatcatcaaaagaacctggtgcaagaattcaagaaagcttcaagaatgactgtgtaaagttcaaagttgataaattcacaggccacaatgacttcgttctctatggagaattaaaatgaaagcactcttagtgcatacaaaggctttatgaagccattgatccaaagctacatgcaataaacaatgaagaagatgatgatggcaagttcagtactatcgaagtaaaggttcatagtatatttttactcagtcttagggtgaagttctttgagaagtgtcaaatgaagaaacaacaattagtttgtggagcattcgcgtcagttaaaatatcagttttcttttagaaatacttggc

SEQ ID NO: 177832 - DNA, 661 bp, Cannabis indica
gtctccattcttcccaaacgcaagttgaattcagccatttctataggagcagaagtagaagcagatgcagcaccaaagccacgaaagggcctcttggatggttgagcattttttgtttttgtcatttttctttgaaaccctagaaaaacaaacacactctcacacttgaaaaagattagacttttgagaaaaaagagagaggaatgaatggtggtgatcatgggtaattgggaagtttaacatatatagcatttcaaatttaattacccaataatcagaaaaaataaaaaaggaaagtagcttccttaccttagacaccacgtgggaagagaaaaaaagaaaccaaaaagatttttcaaaaattggtcaaggttaccttaaatggaaaaaaggaaacaacatatccccacaaaatctaagaattaaagactcaaccaaatccaaaattgccaccaaaaaaggaaaccacaaaataattaattaattaagaacaagtttcctaaaacacaaaagaaataagaccaaaactccaaaatataaaggaaacataatagataaaatgcaatgaaagcatgtttccataaaattatgccccccttttcctttaattttttcaaaatatgctccccaaattaatctgcaaagaatgatcaagacaaca

SEQ ID NO: 177833 - DNA, 936 bp, Cannabis indica
gaaagtcattcgtatactagtgtttttaccacatagagaaattaaaatgattttcatttgttttattttttgacttccagaactctataccatttgcatattaacatatcttgaagacatcatgtctgcttgtctcaagcagcttgaaagaaaatgttcaatgaccataagttcttacttccactatgtggtacacaatgaatttctcatacacgagtcaatcctagcattgaaaccttcaacctctactcttatctatattaagcatgcatttgttacatatgcagttaacatttattaaaaacttaccataaaaacatataaacttctttaaattccacattattttttctttcattttttttttaaaaaaaaaacttctttgaattcccttattggttcaattcaaagacatgacaaaacactttccaactagttaattaaaagttattatcaaggttttgtcaaacataaatttaaagaccaaagctgacagacataaacagctaaaatgagcttgtttaagtaattggcatgtaacaactttaaaacaaacttgtaaataagaatatatctgattcagtactccataaagctcattactgtattctagaataaatgaaaatcctaagaagtctgctacctgatatggatctcgcataacttcagtccaccatctagaaacattaaaaggactagccttaagaaaccgaagaagcccatataggtcatcaagtttgcgttgtatgggagtccctgttatgcaccagcggtacttagcaggtaagcgtaatgccatttctgtagcagaagtcgcattactctccaccatttgcgcctcatccaaacaaacccgccaccagaagatccttgtcaaataagtaggaataactgggtacctgcaataaattagctgtcagtgtcttgaaaactttc

SEQ ID NO: 177834 - DNA, 961 bp, Cannabis indica
aatataataattagtgtattattaattaattaaataataaaatggcatagagagttgttgtgttcatatatgattaataaaactaattcaaaattaaatatttcataaattaatataatagtgttacgtatgaatttgtgtatatataatatatatacatattctaatttgatccctagatgtagatataggataagtttatagtgtattttataatagtgtacgttatagctatttctcattatctataattttttagaaaattaattaatgtcaaaaataaaatttacatatatatgcataataagtcattgtttatattttattttcagttactataaaccatttaaatttttttaaaaattcacgaatagtcttaaatagttacaacatatgcgatcataagaaaaaattaaattaaaaaattctccttaatgtcgaaacaaataataaatttacgaaaacaaccctatattatatattaaaagaaacatataatttggcattaataaataaatatggtaagaattgagtctaaaaatttaaaggtcaatcaataaaacaaagtataaatagcaagaaattaggatagtcatataactcatcagctcgtgcgttagatgtaaaaattttaagtccacgcgcaaacacataattaattaatatatattaattaaacaattaaccctttttcatacacaatttattttatatataatatatttattttgggacccttctatggataattagtggttggtgttcgacatgtatgaacttaatttactataataaaaaaaattagtcaatttcagagtgtgttatgatgagtgatgacatatatatatttttaataaacatatatattcatatactcataattcactattttaaagcaaaaatataataatcaataatatatatactttcctccaacacctttttagctaggtctttaaat

SEQ ID NO: 177835 - DNA, 615 bp, Cannabis indica
ataatttggagtaggagtgttcacaaagtattcgatctaattcaatccgcacgatccaatctaatccaatccgcaaaatgcagatgttcgcacttgtgcggattggattggattgaaaaatctaaaatccgcacttgtgcggattgaatgttgtttaacctcaaaaagtaactgatccaattcaatccgcacttaattatatatatattttaaaaaaattataatatgtaatatatattaattaaaaaaaacacaaacttctcatttcttaatcttttttagtaatatattaagttggtgcattttatttattttgtaataaaaacacaagaaaaataattcttattcacatagacacatacacataaagtttaaatatatatatatatatactagcttatttattttagtaattagatacatatatattttagtgtaaatctaaagataagtaaatatatattgatatatatgtatattggtttaatttatatataaatagagatggaaatagattattattggagattagaacaatagtctttttaatttttctatgaatataatattatataaaatacgatcaatcgcactatgcgattggattggattgga

SEQ ID NO: 177836 - DNA, 900 bp, Cannabis indica
ctctatcagaagtaggagtagtgaaaattcttcaaatcaaaacaccttcaaacgattctgatgttgagggttctgatgcatcctcaaatccagtagttgatcatgaatgaaactcatggttaaagaaattttttgtgaaaaaaattattcatttttttcttccgttgtacagtggaaacattttttcagtgttaagtttagtttgaattgaatgaatgttaatttgtttatttgtttattcccctaggattttttttttattattttttatcagaatttgctgtaagtttaaaggttgatttaagttgaaaagcagatacttactatattgtatttgtatcaaagattggactataatattacatgtagatttataatacatagaaagctcgaaggcttttgttggaatctattaaactatttcatctgttttgttggccggaatttgcagaacttgttctttcctgaataatctttttccttggtaccttccaagcattaagagggtggccattggatttgtccctggtgattccgataaagttgagccgtccaccactctcaatccttcgacaccatataccctgtaatccttgtcaaccacagatcccactaaacaacctccatggtaatggtaaaatgtcctcacattcttcttgcagaactttttcagttcatcttcagaagtcatagccagcacatggttattgtgtttctccgtacccaaatccaagcaattgactgagaactctcaactttttgcagcagcttggccattcttatcacccttttgagtcttctctttgtctgatagttgaatttgactgatgggttattcttgggtctgtattgtaatctaactccttctgatgctgtaaatgaaagcttagtagctattgg

SEQ ID NO: 177837 - DNA, 868 bp, Cannabis indica
atagcttgacaattatagtagtgttttcctgcagcctccaaacctttaatcgcaaaccatgtaccatatatgaagcaaattccccaacatccataccaagatccatcagccatttgggtctcttcaaggtatctcacagccttggcaatgaaattgtcaatctcctttctcctatggtttggatataacttcctaaatagatttaatgcttgtattgaggaagaggtacactctacatacctgtattatataacatatataagtaaatgtttttgtacgtttggttgtttaatatctatatctaaatagttaatctgaaaaaattatgtgtagttttacatactcgtattcaatgactagatcctccatacattccactggattgagccactgaaatagagaaaaaaaaaaagtgtgcatcaaaatattatttgaaaagatatgacactgatttttataataggatataggttctaggctaatataaataaatattgattggttagaaagaatgtcatggtgactgttcgtaatgtgtgagttcagatttgaaatgatgagtatttcaattaagagaaaaagtagttcgatataaaagggttttcgtttgataattacttccaatatttttggagctcctgccttctcccaagctgatacaccaccattttcactctgttttttagatacgacaatggacatcaaatagtgataataactaaacaaatattatatataagtaattttggtaacacaatctattgtatcttctcacctgtagtgaaagaataatattgacagagtcgtaaaaatgctctacttccattggctctcccacaatatcaggtgacaacattgagagcaatag

SEQ ID NO: 177838 - DNA, 517 bp, Cannabis indica
ttgtattgatgctctcttattcacatattaatgaagattagtgatgttttcagctggagtatggccagggatcgatgttgatctctaggaccggaaccaggataaaatcttgtgttgttctttgatttgatttctagtttgatttcattgggttgattaattggtttatgttcattattattgtccaaattgtgagtttattgcaggttttatgattgaatcctcaagttatttctgctggaattacaacaaattccaataaccaattctgcattgtaaagctagatcaatctattaaatcatgtagacacaaaagtttcaagtcatttcttattaaggaggtactaagcaagaaaacatcaatgaaaacaacagcaaagtaaaccattatatccctattatcttaaattaaaaaaaaaaaaaaaagggggggggggaaaagggctgaaggctaaaagccaccaaaatagaaaattaaacaaaggaaggttctctcccacatgattatgtcctcaac

SEQ ID NO: 177839 - DNA, 563 bp, Cannabis indica
ggattggatcgatttatgcacaccccctagatatatttatatatatagtgtttcttaattaattaatataactactctacttttggccaagttcgaaatgagaaatacagtaaaaatttaggaaataaaaatcaagaaaattttgtttgggggaaggaataaaaaataaagaaaattgcattattttagtgtgtgatttattagtacgtaaatgtttggtctgaaataattattttagtgtttgatgatattattgtgtaagggaaaaatcaaagtttataatgtgtatgttcataataaacaaagtgatgtactcttatgcccttgtgttgtgtttgaataatttctctaaacgttaaaattaaaaacatttttacaggtaagaacaaaagtgatgtctctacgatataatttttcgtatattttatatatgaataatgtgttaatgaattaacaggacgaatgggtagtttgtcgtgtgttccaaaagagcgcgggtgccaaaaagtacccgacaacatcaactcaaacaagaacaatgatgaacccttatgccctaattg

SEQ ID NO: 177840 - DNA, 635 bp, Cannabis indica
gaaagctcatgttgctaagattatgttttgtagtttacataaactacacgaatattgaagaatttattatcacgtatgtatggctgatagatacctaggctaatactacgtactttgctaatctatatacatactgagctgttattgtgttttttttttctctttctacttctgttcaattagctatatattaatattaatgtgtcgttgaatttttgcccaataatttcggactattattttgcttgaaaataaaaggacacattcacccacacagagaagtagacgtcacctattgttgtgctcttgtagttccaaccaccaattttatttgccataaatacgagacacgatgagagagagacagagacagagcaaataccaatgagaaatggatgtgaatgacaagattaatgagcctagaaaataacaagaggtggacaggtatggtggctccataaagatcataatcctttgtctattttgaccaagaacaaaagtcgtggtaagacatgcctttaggattacacacctttggattttacaaaccctagaaaataattaacttctactctcattacatcgatacccgtaggtaacttatgtatatattaattattattagctcttttttc

SEQ ID NO: 177841 - DNA, 759 bp, Cannabis indica
cttaattattattttttttttcagtttgagggagattgttcttccactccttaagattaaaaggattaaatagatgtcctaataaaagggcggcctaacagattcattgaacctggacgtaataacgttttgtagagacccaaattgttttgctaacgtggcacattttaattggtggaagcgctaattctgtcagcacattcgtcacgtggcccgcccagtcgaagccatgaggactcttctgggtgtcttcgttttcccttttttcctttttttttttttttgactgtcttcattaagagaaccttaaaaaaatgcatgattaattataatcaaattaaaatgtatcattaaaagattaatattaatattgtaataataattaaattacacatagtgctggtgtgggacatacttattcttaactacactatctataaaatataaacgaaataataattaattaatagtgtattaatataaaaaaatacttgactgatttcaaaagaaaaaaaaacttacatgactaattgttctctagtattttaatcattttcaatcaaacgttaaatattggataatataataatattaagtccaggcaaataaaattatatatttaaatttatattatatatttttaaatcattttttcttgtagaaaatatatattatatataatatattgtttcaaaattttacatatatattactataacatatatatcattcttaaataattacatcatacaatatgtt

SEQ ID NO: 177842 - DNA, 804 bp, Cannabis indica
agttaagtctgttattggcttgcaatccaattccaagatactgaaatagtttcgtgttcaaattcagagaatcaatggtgggattgtttttggtcattcaaagtcccttccaaacttcaaatttttatggtgggtgattcatgactaggggtgtttgcagtgcaggtagtgcgggttgtaacatttttttcaagctgaatctctatgcagtttttgtacttttgcaaatcgcaatcgcatcgcaaaatattaaaaccgtaaaacactatgaaaatgcaatgtggtgcgatgcaatttcaacggtttatactattattattatcgaacatcatactaaaaattttaaaatcaatctataaacttttaacaatacaaaaaaaattcttattaaagtgttaacatcataacatatatactaatcatcaagtcattatattaagttgtctcttagaaaataatgtaatatatacatatattacatatatttattcttaaatgaaaataaaataaaaatcatattgtaaaaattagtaactttataatatatggtgcggtacggtttaaatcgcaattatcaaattcaaaatcgtaaactgcaccgcaccacgtggtttgaaaaaagtacaatcacaatcgcaccgcaaaaaatttctaaccacattttttatgcgatacgggcagtttgatgaacacccctattcatcactttctaccaatcactgccacgttgcattggaggcatattagcaactcgagtcaatgctccttatgctcttttcacaatgaaacacttatccatgcccc

SEQ ID NO: 177843 - DNA, 787 bp, Cannabis indica
aaactcaattttttgatttttgaaatttagttagactttttttttaatgggtgagatgcttacataattataattataatgcaataaaaaaaaatctgcttattcattgtttttgattatctctcatataatgatagaatttctcctgattgcaatgactctaataaatttcaataaattataatagtgaatttgatcataacaggaatgcgagtcaactcgagtgaagagctatgtaagaaacaacaacagttttgaaggaaaaattcctagcttggagttcaccttaggcagaccaggctggcaaggagaagaaatatgacaactcgctatttttttttattctcatcttcttcttccttttttccctagaatgtatctttccatataaatatatataaaatcgatcttctactcaaatcagaagaaaaaaatgatcttctacttcttcaacacattttacaatattctagaactgcttttacaatattcgttgatgaaaattataggtcatgaacaaaagggtggatattgatattggtgaaatagtcttcgttatgtatatgtatatatatgagctaaatttgcaagaagtcaactgagggtagttatttatgtaatacaacttaatttttgaggatttttttttttttgcttttttacaagtatttaattagtttgttgtgatctctaagtagacttgaaaaaagtatattatttacaaagaaatgattatatgagaaataaatgagaatgtgttgaatacacaaccataacaattatgtta

SEQ ID NO: 177844 - DNA, 797 bp, Cannabis indica
attatagccaactaaaaagttgaacagacataaaatacttaaaaaaaattagtttcaagaactaaaaataaatatataaaattatgagatgatagtttgaaaaaaaaattaacatacttaaaaaaaaaataccaaagatgaatctttagaatttggatcagatttttatttcttcttgataggtaaccttcatatgaattttaattttaaatggaggaaatttcttttcatggtgagcacttaaattttttagcaacatcttctgtcgtattttgttagagtttgactcaaattatttatttatttatttatatttgtaaagttacaatttctttttaggtaattattaattatgggaaaaaaaagtcttagtggccaagttttgaaaagtcttcttaaggaagctttggaatgtcttggtccccaagttgtcttgatgcccaagttttgtaaccttataaatatgtgttatgtgtgagagaaaaatagtgagttatgaaaagagaagtgtgtgagtttgttatgtggtgagagtgaggaagaatcaaatggtgtattgtgatttgggtagagagattgagatagagagtgtctgtaattttgaagtaataagtgaaatatatctctctttgtgggtttggtagttttaccaaactgaggaaattactttgcttcgtttcttgttgttttgctgcgcttgaagtctatcgttttcccaacaagtggtatcagagccaaggttcagattaacacagaaaaatgtcaaaagatggtgtcttccacaaaaatttgagatc

SEQ ID NO: 177845 - DNA, 607 bp, Cannabis indica
tacctctcaagcctcccaacaataattatcaattcgagaagaaaatgtctttacacatgtaatctacaatgatcatcagttcactatcgtcattagatcttcataatttaaggatatataattttgattatagatgattatcaatggtatatatactatatatatgttaagaataaaaaagaaattatatatatatctatatcggagtcggatatggtgcggatagtattatccccacttccgcctcatcccctcttcaggtattaaaattgttccttaccaccggccccattaaccactaagacgggaaatccccaccttattaggaacgaatccccgaagttacccattcccgcagtataaatttccatctctatacattatagtctaatagaagttagactttaaaaactgaattaattaatgcatttatatatttatatgagatatgtattgtgtttttctaaaattttgtggtatatattatcggctatgatcataggatttaatgttccgatatcacataatttttaagaagaaaaaaacaaataaattaaataaagaaagtcaagttgcaggtagtcattattgtcgtattactagattg

SEQ ID NO: 177846 - DNA, 761 bp, Cannabis indica
attttcctttatcttcagacaggtttttaatcaaaaagttattcgtaatagttttatcctcctttcccatcagaagggtttgatcaacaaagactttaaaaattttaaagtgttgggtttgcactatatcatgtatttctaaataaattctgattaatcatacacatatgcccctcaagtaattttaaagagtaacactttgtaattacttgaaaaatgattaactttattcataactaaagttcacaatattacattagaaatgtgagttacaattatcaatttactagtagtagggtcacaaatattccacgttccagtagttcttgatcagcgagccatttagccgagctaatttgtaaaccccggttcctactatcgctttaatcacataaggaccctcccagtttgggttgaatactcctgcagatgtgtctcttgtatttccaaatactcgccttagcaccaagtctccaacattgaataacctctttttgaccctttcattaaagtatcttgtcactcggtgttggtacgctgcattagtaatatgtgactcaatcgtttttcattataagatccaaggacaattttaagagtactggtttcttcttgattgtaaaattctcttctatgagtcaagatgtttacttccacaggtaacaccttcgagccaattgctagcgagaatggagtatgtcccattgctgtcttctcagtgttctatgagcccaaagtcttgaggtagttcgtcgacccat

SEQ ID NO: 177847 - DNA, 631 bp, Cannabis indica
gtaagagacttgtttatgcatccaagttttgtttgggtgcattctaaattttttcaaatttcagtagttaaatattatattctaggtagaataagagtgctaaattgatcctctaattaataataaactctaatttcttgcaaaaaaaaaaaaataataaaataataaagccccatcgtggtggcaccgcattggctgggcatgtgagtccatagtccagactcccacgtcacaacacaacaccacaaactccaaccttgtacccttttctcttctcaaatctcatcgcacccacctccacaccacaactttcaatctccatttttctcaattttacttgtgtttttcatccatgggacaggtgttcaacaaaattcaaggtattattcgttttatttcatttaagggatatgatgaatgtgattatatgcataatctccatgattaatctggtcaactcagatttggtttaatggttttctgtttttccctttgtcatggcaggtaggattggaaagaaaagcaaataagaaagataactgataaggtttatacaaaacttataaatcaatcggaaaagggtttcgcctactcttacctttgaagatctctacattggagttctctagtc

SEQ ID NO: 177848 - DNA, 458 bp, Cannabis indica
gtcccatattcgggtgctattttttccgctatcccatattgggctactaaataatcttcttgttctaattaagttcttatttttattttttttattggtggggtggttctaattaatagaagcactttcataagtttctctactctatctttttaaatatcttacttattttttttttattttacttcctacatttacattatattataaattaatttttctatttttttctctatatatttaatattttttaataaataaaacattttattgacacatatttatgtgtgagagagaaatgaaataaaaaattggttagaaaaatatttctctcacaatattatacgttaactacaattagttaaaaattttgctttgcaacatggtatatgtatttaggtcataatgtcatatgatatatgaattaatttaatcaaaaaaatattctacctcactac

SEQ ID NO: 177849 - DNA, 816 bp, Cannabis indica
ctcacttaccatagataattatataattatattcacaatttaaatttcttattactaaatgtcacttcaagttacatctacaaacatttagttacaagttgttagtagaatatttttatagtatgaaattgcattgctttgtaattaatatatataatttaattttattactattattggtagaaatgaagatgaggctcaacctctaatgtcaaagtatcaagtatcagaattgaaagcaaagagtgtaggagtcaatttcatcccattggaagtgagcttgagagacactgtagaaagcctcaaggaaaaggggttcttcaatatctaatatctcattaacaagcctatatattttattagtttgattgtcgacttgtaattaataataataacatttatacatagttaggctaagcattttgactctacatttttactggttctaagcctaattaatgtatacataataattacatatgtcaaaacgtttcatcatcatattattaatagaactatttgtttacaaccagtctctctttttattataagttcattttattactcccagtcttcatttacttagataaagaggagcataaaatgaagaaaatgaaagtaaaggcttcaatttatttatagcaaatttaatggaataaaactcttttgattctgctgtctatgaatgtgatggggtttttcaacagtctccctgcatttctttcagccactgaccctcaagttaacaaatgtctatgtgagaaatactaaaaggtaatatggtacctagcacttttttcggtgtcttatcgtcta

SEQ ID NO: 177850 - DNA, 444 bp, Cannabis indica
ggttgcctagagacacttcattggatcaggatagctgggagagattaaaagtaaaaggaagtgattttgcaaaaagattttttagatagtgaattttataaaagtaaagaaaaaaaaaataatttagatttgtcttttgtttctatttcattctctttcaaataaataaataaataatattatcatttcataagagtggaagtggtcccatctaacatttatttagctcagtaaggtcactgtccaaggttcaaacatataaattacaaagtaaataaatgtggcaatgaacacaaaaccatgttgggaatacacattactttccttaaaagaattacatacataagttcttaatattgagcaaataataataatatatttaagatatatatggatttatacaaatttcaaatttgtaccctatattctgtacaaataagtgtt

SEQ ID NO: 177851 - DNA, 811 bp, Cannabis indica
ttgagatccttgggctaatggttcatattagataaaaaaagtttatcaaattcgctttttcttttctaactccgatatggactatcaaaaccatcaggaggtcctattaaatggggataaaataatccaaaaaatatggaaaaatatatttagactattttttaccgtagatgatgatctaacggcgagaatttacttttaaggttgattatcattttttggagttctagtcgcaacggtaggacccgatctgggtatgttgtagcttaaattcgtaactccgtttgggggtgaaatttggagcacaaactttagaattgcgattgaattgtaagacatcacttaatagagcattaaaatagcttcaaagtcaaattgaattgtgtcaatcgaatcaatattgagtgagttatgactgttttactgaaggttgttttgggccaagcgcccaggttgacattccagcgcctaggttgacatgtgatgtcaacctagatgctgggtgagtgagaaaatgtggcagggattgattttttttttttttaatttctaagtgatattttgacatcactttgtccatttttatgttttggcaaagctagtcaccagctctcagagatgttgttgtcttgcagaaacaggagactcgaaactacctagtttccgagtaaatcaccttgtcagtaaaagtgaaaatatgaagttatgaatttgatttcatgactctcaattattgttgaaaaactaatacgaacggtcgaggcggaaccagatcagataagcagaaaccaagcgcactaggccatttgtt

SEQ ID NO: 177852 - DNA, 685 bp, Cannabis indica
ttttttaattttattttttttatggactgataataaatgacatattttttaaagtcaaattcttcaccagtaacaaataccgtggagattaaaaaaatgtcttttttttggtgaatactaatattatcaaaattttagtttacaaatataccaaatcaacaatatcaaactttaagattcctttcttgtaaaaatatataatatattcgataaagttagtttaagaataggataaactttaattagtctcacctttttataattctttaattattgaaaaaaacttccacagtgtgaaactgttttcagtcgcacttcattttcactttgctgtacatataattatacaactcaataattaatcaaatatcaaccttattaatagtgcataattaatttcttaattatataattttccatgcatgtttgctaattacggccatgagcttttatgtgttgaacgtgcaattatttatttgtatatatatggtgcacatattttatatgtataatttttataaattaacttatatatcactcttagttaataatattgtatagactaaaattagagcgtcttaagcttttatgattcatggggtaataataaaattttaagaataatttttttatttataaaataaaattcttataatataagtttttaaacaacttttttagaaag

SEQ ID NO: 177853 - DNA, 613 bp, Cannabis indica
aaatatatttttcagtttccaaaagaagacgactaatagtaaaagaaacttttttttatatatatttttaggctatattattatgttattttattgttaaaaatacctttatgttatttttttttaatgtaactcatatgatgttcaaaacctattaaaatacctttaggttattattttttttaatgtaactcataacatactattcaatttatttacaaattattttataaaacctattaaaatagttttatttgaaaatacatttattttatttaatcttgtaatatctaaatataaaaataaaaaatatatatattttttagtaacttcttaaattgtttgatacattaaattttattaaaatttaaatactgtttattaatgtattaaaaaatataaatagaaaaactaaaatattataaaaaatatgtatcagaaaaaatatcatattttcaaaaaaaaaaaaatgaggagagaacttttaatattataattgtctttttttaataaatattcaatatttattacatgtttaaagaaaaaagagtgaaagaatttgttgcacaagaaaaataagagaacgtgatgtattgagagagataaaaaaaaa

SEQ ID NO: 177854 - DNA, 638 bp, Cannabis indica
ggatggtcatcactcatgactagtctactcatcactcatacatcatcatcaccatgcaccatatatgtatatatacatctacttatagagttatacgtacctacgtaacgaaaatgataccatctatctaaaaatagtatgtacctttttaaacctccagtttggtcaacttttttttaaaaaaaaaaaaaattgtatgcaattaactttgtgatctttgtttttttaggcaataccttttaacttcatttctatttgcaaaattgagatgtttgttataaattatatctttggtgttgaaatatataatacctttaaaaaatattattattgaagatgttgtaagaccaataaaatatgtcacatgtacaaacaatgactgttaaaaattgatttttaaatttagtatcgattgtaaaaatttggttattagacattgtgtatttttcattatgttgttgataaaactgttttttttctcttttaatgaaataattattttattttaatattaatgaaactggttttcaaagttagtatcgtttgtagattatattttttttattattctgtcgatgaaactattttttttattcttaatgtaattattagtttttgataaaactgatttttaaagt

SEQ ID NO: 177855 - DNA, 645 bp, Cannabis indica
gttatttggaaggacaagagggtgaaagtggatattttacttgaggataagcagcagcccattgcgaaatcaaaatggttggttttcaagaggaggtttttcctcacaacggtttatggaaaaaattagatgagtgagaggaaggacctctgggaaaaattggagagtattggtcacttgaatgaaccgtagataatccttggggatttcaatgacatgtttaattacaaagatagatgtggtgggaggaaaatcaaggatatagagatccaagatagcagaaactggcttgctcagtggcaggttgaagagcttaaaacttcaggctcgttctttacttggtccaacaaacatgaagaggggagtttagtctacttggaattagatagaatttttgctaatgaaaaatgggttgatgcttttccgaatgttgaagctagatttagatggggaaaaatatcagatcatagttattgtctcattaagcacatagcaatcaacaacagaggtctcaagccgttaccgcttctgtaactactggacctcaaaagttgactacaaggagaatgtctaagcacttggagaaagagagcacacagatcttaaagctttatcaacattattaggatcaagtcatgtctaaaa

SEQ ID NO: 177856 - DNA, 657 bp, Cannabis indica
gagttaacaaagtgggccttcatgtacatgtctcaatgtgcaacaccatgtgatcatatttacatattaatcctctgttatcccaaactcttttcccatttttctttatcaaatcaatacatgatacctcactcacctcctcaccaagggacaacttaagatatcaaaaaactaaatttgatgcaaattcaatataaaaaaaaaacttctaaatagaaagagtatagtgctctaacaaaatattttacatatataatcatatattttttcacatataaaaaaataattatctatagtaattaataatttctcccaaatgagttttctttgcaatttgacccccaacttataaatcttcccttcgtcaatgcttctgaccactagaattaacgatacatcagtatagtcaatggcagaggaaaggggaggtgggtcatttcccctcatcacctctcaactttttataatttacatttttattattttatattttgattctataaaaataattttttatttacgtttttacatattttatattttttatttttatcccacatttatatccatataaaatttatattttttgtttttatttccatgtactttttatttttattctcataaatttttaatatatttcaataaaaattataa

SEQ ID NO: 177857 - DNA, 1267 bp, Cannabis indica
gtccatctcttctttctcaccgtaatctattttatttttcactttttaaatatttatataaaaaaataaataattaagtgtaataattttaaattaaaattataagtataataaaattttaattatgaaattatatatgtataattttaaattataaagagttttgttataaaaatttaaataatttaagtgtaaaaaatataaattgctaaaagatccttatttaataataaattgcaaaaaataattaataattatacttaatttaattttaaaatataattaatcctaattaaagttttaaagttttaaaaagaaataaattaacaggttaatatcaggttataggtcattttttatttatttttatttaatttctaaattaatcacaactatttaatagtgattcaatgactaaaaagaatgtaaccatgatagttacaataaaaacgtaaccattgaaacctcctccatgtattatttattaaaatgattatgataagaaaaatgaagttaatcaaaaaaaatatctggttaagtgtaactcttttaacacattttgtaagtgttacttgaaaaagtaaaaaagaaaaaaaaaaagtagtgtcaatgattacgtagagggttttcctctacaaagagttgtatgaaggcatcttacatagcatatataatttttatcttatagatatttttttagccatattctctttctttgtaattttttttacttaagtttacattattttttcttaaatcatttatacaaataaataaataaaattgttatatttaatacattgtattaataatttttattctattctcaatgatattatgtttatacatggatacatactaattaaacattaacatttctaaaaaattcataaagttaatactttcatataattttgacaaataaatatctaaataaataaaaaaggagcatatactcttatagatcaaaagatacaaaaataataattttatttttgtgcattttccatactctacttttttcaaatctataaatcaagttatggaaaaaaaaaaagtcaaaacaatctttcattgggggagtaactaaatttaatagtaattttggaatgaggaagaaaaaatataaaataagggaaatttaattttctatacttacatatacttaatattttatttctaaattaatacatatcatcattgaaaatatatgaccactttatctaaaatccaaaaacccctctcaaatttcccatacttttttaag

SEQ ID NO: 177858 - DNA, 975 bp, Cannabis indica
gttttttgatatttttttccttttcaatggtattgaaacaccatgatgaaatttggaataatttttaagacaccttcctacacagtttgccaaagctgtggatgagaacaagaatccattcttatgttgatgttatgataattttagctttaatttattttttcattgcaaattgattgaagctatatattttcttttatgtattaaatgatgattatggatgtcaattctcaagatggtcatctgagaacagtttggttagttctattttttgatctatggggtctgtgatgcttgctctagtaaaaatagatgttctatctcgttacttttccttgaaatattaacgactttacctaaaaaaaaaaaaaaaaagtactactataccctataaaacccagccttgcaatcatagtgtattttatttgaccaaatatttaccagaaaaatatctattaaataaataaccaaaaaaacttataaaataaaaatagtacaataagaaggtaattttttcttttatataaaatgaatttcttttttcttgaaattgtgttattactatattataaaaaaaaattgtactattatatatgttaaatgtattttacaaaattataaaaataaaatgtaagtggataagaaaaaaaaaaattagagtatgattatttgttgcagagcataaaaaaataaactaataacagtttaaacaaattagaattagtaatgaggttttttaattattgtatctaaaattaatcttatttacaaaaatacttttatatgttctctatttatggttgtttaattaaattagtatatatgatatgttctctgatttatggttgcttaattaagtattgcatatcgaataaattattcctctaaattaaataaagtctcatatttatgcatccacataattatcaataatttaagataattatgtaataattattttttcaacgacttaat

SEQ ID NO: 177859 - DNA, 826 bp, Cannabis indica
aatcattggctaattacttaatatatatgagaatggaaattaatagtggtgcacacacacactaccccactttttaatttttttttttttttttgaaagaaggcatgttattcaactcaaatcagctgcataccccactaattttaaaactacatactcaacacatatatacttgttcagttgttctaatatattcaatatcttacctatatattatttatttatttatttttgattattttttattttttattttttgaaaagtatttttttttgttttttttttgattatttaattatttattttgccttgtttgagtagttatttaatatttttcttcttttagtagggacttacaaacaagcttagtttcatgtccttcttactaatctaaactatacatatgtattaggaaaaatatgtaggtataccttttcagaaaaattgttttggtatagtctctatatgtttcagcgtctaagaaactttttaaactaataactttttttatgattgtatatattgtaatattttaggacctcttgtaaatttttaaaaaattccgaataatttatagtattaaaataaaagtttaagtaataggagtaggtaacatctaacccaaaccgatttaatctaatccaattacaaaaaattagatatctaattacaataaaataattaaactggatattcaattgtaaaaacttacaaaaaatactaaaaatttagtttacttttaactaaaaaaactaaaaatttaatttctttttacaaaaaaactagtcacacggattttttctaaaaataaccgtagtttttatt

SEQ ID NO: 177860 - DNA, 1041 bp, Cannabis indica
cctacttttgaatagtaaatattatttttgtccaataactccacaagtagttttttcaatttatggaccaaaggttatgtactaaattataatcaaattattaagaaaaaatagtagtggaatatttgagtccaaagaagattcatttcatttcattcaagaagcaaaaattcaattacatgtgacaaatatttatacattatattttttaaaatattactgttctaatacaagaatttaacttaaaaagtacataccttgcatgtgatattaactttaatatatatatatatttattattatataataaagttatgttagctgaagggaagagtctctttggttctagttacatttttcatttacattactacatccttttaataatgtatatataactattttaacaatggtgtttttatattttttttgagttatgaggattaaatttaagcattttgtcatgctatttattaagaccaggttttcttgtttattttttgcagcaaatttttcaatttcataagcagaatgtatgataattgtgatgattgtgaattggattgtctcgttagtatttgaaatttacgttgttaaatttgattgtttagcaattgtatttgcttttaataatagtcatgtttacttaaatgatttgggttctttgttagaagatattacaagtttgttttcttaaatttttcaataatatccctaatttatgtacgacgaacgatcaatatgactgcacatggattaacaatgatagtacatgctcttcagatgaatgaacaacttgtttggttaaaggatttttcttgttttgtaacgtttgtatagtcttttagcctgtacgatattactttgatttttaatgacattgattattgtttgaaagaaaaaaagaagcaaaaatccaacgaatcttaatttataatctaaattttaattcaaaaaatatctataatctacattttttttctagagtagcttaaatattattagcttcgagctagaggcaaattaataatttgaatgttg

SEQ ID NO: 177861 - DNA, 831 bp, Cannabis indica
aaacgtgttgcctattttgccaacagagactgattaaacaagaacatatctcgaaaccccatactactatctattttatgcaagctaggggtgctagcataacttcgaccaagtgtaccaatacattttttgtttattcgagtcccgccccgcaccagaaatgagcacaaagacagtaaatttcattcacaatactgacaggaaagtggaatagccccatagtataaattggaatcgcctaaatcactgactttaaaaaaacctcacggccgaagaaaggagcttcgacgtccacccatataggttatgccatattcaatcaataatagattaaaataaccactatttactctatgtataatatttgatttattaagtttttaattatatttatatgatatgtattagatatttaaattattattttttacaataaaaattaattatatatataattttttaaaaatatatataaatatgtgtaaattaaattaaatcagttagttaatcaacattcaatctatactttatggtttagatcaagcggattgaattctattgaatattttacaaacactctcagcactaaaagcaaaatctaaaactgtttcaacccgaaagcttgtaccataaactttttgtctcaattgtaacatatgaaaaattctgaatactcttgaacttttaacaagccacttttaattacaaaatttattctaagattttttttgaaacttaacagtgtgaaaacgatcataccaaactacatcaataaatgatctcgagttattcaaaatgctaaaactagaaacaaaaacaaaaaaaaaaaaa

SEQ ID NO: 177862 - DNA, 688 bp, Cannabis indica
gtaattatttatgtgaattgaagaacacaatgaatgtgtttttcacaataggggtgacacaaaggaaaagagagagaagggttagggttgggcctctatttatagaagaacattgataaggaccaagtaacaccaatacttagggttgggcttcacagtccatggactgtgctagggcgctgcctaacattgattgtggtggtctttttcttttatgcagtccaatactacattattttctcctttttatttataccatctattatttctcttaaaatataaattgtataaataattaattttctcaaaattaattctttataaaatatcactaattttttttttatatatatttcattattttagaaaccatttttctcaaaaaaattattttttataatttatttaaaataaataaatttaccattttattcttttttcgtaaataacagtcattattattttttatttttttttatttttattctaaatactttatctttgtttgcttactcttgggacaggtggacatgtagttctgtgctccaataattaaattatctcgctaactattgatttaatgaatttaatttatttaactaaatgtacattatcacactaataaaatctacaaactccaaaagacactttagcttaatgttaaaaaactcacaatatagagtacccc

SEQ ID NO: 177863 - DNA, 1138 bp, Cannabis indica
cctctatgacgatgacgatagtggtgatgatttcgatgaatctaattatgagctccaattattcgaagacactacctcagtctcaaatattgaaactcgactaaataactttcgaacgcgaatcacaagaagaaaacgacattatacaaaccaattatataatcaaaacttacctatatattactctcgaataaagaaggaaagagggttgtgactctcgaataattagcatcaaatatcagttcaatattaatgggatttgttttatttttattttattattttattatatataaataatattttattattttattaaatataaataaaaagttacccatgaatttctcattaaccaagaattcagttatataggcacactttatatagaatagatatatatatattgttaagtaatttgtgagaattttaagctttaaagattaaagttttatgtgattaaattatgaaattaattttgtaattttgtaattttattgattatataaactaaaattaattgtgcttaaatgatttctaattgtttaataatgttccttaatattttaattaccgattcagtggaaaaatttataggtatcataataaactttactctttgaaaattttgtaattacacaaattaactctaccttctagtttaagtgttttactacaaaattgataccatatatctcttcgaaattggatcttgagcaaaattcctcaattttccattgtttttgtctaatttttggccaaaatttcatcccgacctgttaggtacaaatcaggtcacgtaacccgcttcagaatttgctagaggttgaagttaacctctccccagcgatgcccactcttggcagcagcgcgtgtgggcatgtgagacatcgtcagacatcattttttttgacgtttcttttttctagcttgcttaaaatttaatttctggtttttttttatgttttttaattaattctttaacttttttaacaatcattattgatttcatgatagttattaaattaaaaaattattaaaaatattttttcatgaattttcgaaatttgtaaaccatagaaaatttaacgggcttcttctcgttctatttgacatagtcagtctcttatttggattt

SEQ ID NO: 177864 - DNA, 572 bp, Cannabis indica
tacttaatgaggcagctgaagttctggctggataccacccgaaacttaaaacaataatgaaaaaagaaaaaatagtacttagaggggccacgtgggtttccacgtgggaattgtgtggttagccaattagaagaggacaacaaaccaagtgagcctcccacctgatatgatgatcagtcttatggtctaatactccaaccagctgtgtttagtcacgtggggcatttacaaccaccatggaccacccaccactactcgtgaaaataaatataaataatttaggaaataagagctattacattacatatctttcttactaaacattccaccattttaaatgtgaataagaaaggaaaaacatgtactcatgaaacaaaagacaatataaaatacataaaattctacaatgtgcatagatccatttatatgtgttttggaatttggaaaaaaatttagtgtaattttattttatggtcatttatgttgtaggtatttaaaagatcaagttaggtttatttttatacaattttagaatctattttaatgtgtggtttcttttttttttttattct

SEQ ID NO: 177865 - DNA, 645 bp, Cannabis indica
cttagggattttatgagggctgtccttatttccttttgactgatgtgattcttcacagagtagccgtcattagactttattggtcatagccttgtaagtgcagatcgggggttgtgtcgtcagactttattgcgtgtggcagttccaacacgcctcctcccatgcggcattaaatgcgagatgactgctcatagggagcctgacaccacccggagatactgtgatgctacctcgctctccgggagcatagaaaaccttgcatgcctcctccgggaggcatatccaagataatgcctttctttacaaagacttagctattaatttaagtgctaaaccctttgtgtccacgtgtcctggtctggttggtccacgtatattgggcaaaatcaggggcaacaaaagacattgcgaagaagggaatgggtgatgctgcagagccatctggttctaaaaaaagattttttccagctaatattgaatctcgtaaggcaaagagaaccaaatctttgaaatttgtcaaggatgtaagttgggtgtgtttttcgattttttttttagttttcttcttgttgttttgtttttcgtttgctgttttgtgtttcaatttgtttctccataatgttttaggttctctccgatgttgac

SEQ ID NO: 177866 - DNA, 598 bp, Cannabis indica
aggtcaaagttttactagtgcacatttgcagtggctagaatctaacttttaccagcgcatttacgcgctgggaaaatttatttttgccagcgcttttcattttgtgctggcacaagttctaatacgaacgttgatttgccaattccttttgccaacacatcagaagtaaattctattttaccagcgcaataccaaacttttgtcagcataaaaatatgctggtaaaagtgacatttcttgtagtgtggaccttggataagtgcgaggctcatccttacttataggttgggcctagtatcttgttagagcttttgataggtcttctataattagttttgaattgggaatgccaagtgtctctcttctcaaaatatagataacaagatgcatgttaagggatttatatagtaatgcttgcttagtagctttcattattttttctattttagttctttgttatttttcaaactatacaacattttaaacatttgaatgtaatttttccaaattccaaataagtggtttttcaaaaaataaaaataaaaattccaatcaaatggtattaaataatcacgtatcatattcatacccgtatgat

SEQ ID NO: 177867 - DNA, 704 bp, Cannabis indica
tgggagcgctgaacataaatatggaatctatagcttctactggtgtatagaagtcaagtgatgattcccttcgagcttagctaaatagaagtaaatggatgagctcttgtttcagtgactatttcttagatcactaaaatatcatttacaggtagctaagtgttttaagggccaaacactttgagggtccgtttgggcatcaggaaaaggagtgggactgggtttattaatcctaagcccatgtttggtgataaattttgaccagattattagtccattgactaaatttaatgccttttttttatgggataactagtcccaacttaaaaggtgggattaggtgggaatgctttatttttccaaacccttcaccttcccacaaactcttggcttcactgtctgaaggagtagtcgcaccactcttgtcgtatcctctccgaccgccatcacgaaacctcaccaccatcactgtcacgaagtctcaccacctcaccgccacgttctcaccaccgacgtacttgagctcccaccaccactgtgaggtatttcattgttctttttttcttttattttttttttcatctctttacttttttttctgtgctctatttttcagattttacttgtatttttttttattttgcctttttcaattttttgggttttaatcagatctagatctataaaatatatgcctattttga

SEQ ID NO: 177868 - DNA, 903 bp, Cannabis indica
attttctttaatattaaaattctgttatctaatttacttagagaatctcttttttatgttagctttaattttaatattgaagtttatgaattgactaaatatatctattggttagataattgattcacttagaagaaattcctccagcttcatgtataatgtagttacttgagttattttaatcttttcaaattactcccaaaaaataatagattttgcaccacacaacattattggtgtggttaaacataacaacttgtagtgaactttcgaaatgtacacttaaaaatatgtataccttacaattactccttttgctttctctttatgatatatatataaatttattttgttatatgaaaatatttattgtagttatttaacatagtatgtaaattgtacaaaattataataatctataatatatactagaaatactataagtcaaacattatatttcatacatatatataaaaaataaatatgtatataacaaaatatttttacttaattttttaaacagtaaattattcgaaattttttaaaatttactatatttttttaaataggtacaataaatgcaatcattaaaatattaagtttataactatttagtgttttacacaagaattgaaccataaatttttccaaaatttcataaagtaacttttgaaattcacttaacaaatattttaaagtgataaagcaaaacatgaactctagaggcatttaatacaaaaataaatgagagaagatttgaagtggaaatatttaggtattatgtcaacttaaatctatttttattcattttttttttacttaattatatattgttattgtaaaattgaaaaactatgtgttgataagaggtgtggtaaggatgggaaaggtagaaggaggagg

SEQ ID NO: 177869 - DNA, 637 bp, Cannabis indica
gaggtttgttatgtgagtttaagttaagagaagtagagtttcaaagaatatgaaagtattggatgagaatatgagatctgcaaactccttagcctctttccatcattaaaatttaattttcttggattaagtttgacattctcattccaaaaatttaaacctataccaaatacttcattacagttagagtattgttatggggtactaagatgtcaatcaccgctataaagtgactttttatagtaattagcggtttttataatctttattaaagtaaaataattgtaagaaaaaatgttaaaaagcacttatggtacttaacactcattgtgcaattcaatatcagatctcacttattttgtgtataataaaaattatgaaaaaccgctaaataattataagacgttacttcataattatacttgacaccataatataattttttttctcatctaaagttctcacatccacattaggagcgaaaccccacgtggcgaaaccccatagtaaaagaggttaagataaataaataatgaaagacttaaaattaagtattcggtttcacaattaagatcgatcaagtaataagaatgctcattgcttttaggtaataaatcctttctatccacaaaatatt

SEQ ID NO: 177870 - DNA, 504 bp, Cannabis indica
ttataaaattaaaatatgtaaaacatcactgctaccaaaattaatagctatagaaaatcgggtaaatatcattttaaaccctctattttacaaaagttaccaattggaccctgtgttttgttaaatgacaaaatggaccctgtgttttctaaaatagtacaaataggaccctgaattaatttcttgtcaaaataaagtttaattataatccaatctaaaagtgttatgacaaaattatttacattttttatatctgtttgtattaagcattgtcttcaagttggttgtattaaaaaaaaagttgttaaaaattaagttgagggtcctatttttactattttagaaaatatagggttcattttgtcatttacaaaacacagggtccaatctgtaacttttgcaaaacacagcgtccaaaatggtatgtaccctaaaaaatctcataaaactaagcatcactgctgtccttttttctttttttttttttttttttatttttttcgt

SEQ ID NO: 177871 - DNA, 607 bp, Cannabis indica
tttagcacatgtcaaattttatattttttaaaataccattagaatagtattttttttcttaaatgtgcttataatatatagcaatacactatctttttaacactttcttcgaggttctcgtattaatttataataagtttaaatatatattagcaaaatgaaaactcaaatatcttttttgaataaaaaactcaaatatcttaaaaagcaacatgcactacaaaaaattgatacttttagtgataactttttagtcacaacataatttttttgtgactaaattatattgtgacttttagtcacaataaaatattacttgtgatcactaaaacatagtatttagataaaagttgtcactaatttagttttaatcataacaagtatggtgactaaaaatacatttagtcacaacaaattataatttttgtgactaataccttcagttacgaatcttttagtcacaacatagaaatgatgattaataattagtcacaactttttcatcacttttagtcacaagttttgtgtgattaaaagtaaaaattttgtagtgatgttaattgaattctaattttgatagttttaaatatatctaaattataatttt

SEQ ID NO: 177872 - DNA, 882 bp, Cannabis indica
tctcaaacaaagtgagaggaccatatccacgcacagtattgaggatttcagcagaggtgagaggacctttcaaccacattgtttctttgtggaccaagaaatcaaatttgaacccgaaaaaaatggcatatccactaaaagatcttcgagcatcaaggcaacttcccaagtactgcttaaccctcatgagttcacaatgaagccggttgaataaagaacccatcatgagtagtaccattaagatggcgtaatatatataacattttgcaagccagccaatgtatgtcagtgggaacatgaatgaattgataatcaaggcaacatctggccaggcctagtaaaagtaagatacagtgatgcacctaagtgcttctatatagttttatgtcttccgtaggttcaccatccttttaaacagagtttatgagcagcactagcagtcatatatttggattgggattagtgtaaaaaagttgtcgtacgatatacttccactccaagaaatgggacaaggtccttgagtgcaaaatgttgatttagactatgaacttgttcatcagttggtgaatgccaatagggcatgtaacacgaaattcatctagacaagtagtataactagattttagcttgtggcatataatgtatttagcttataaacaagatgaggcaagccttcggatcgtgacgtatatacggtctcatttagttgaccattgagaatagcattacttcatcaaagctgtctaacattccatgtacaagtgactaatagtcgaactgcaacttgttcctcatggtactaatagtcgatcgactcttggaaaactaccatgtgagtggtccaccataaaactggcttcaaaccttataccaatcaaacta

SEQ ID NO: 177873 - DNA, 582 bp, Cannabis indica
attcgttgatatgttgcaccagcgttctttaattcgaaaggcatgaccaggtagcagtataccccccttatcggccttgaagctagtgcatttcttgatctgcaatgtgcatcttgatctggttgtagccggcataagcgtccatgaaggacaatagcttgaatccagaggtagcgtccaccatttggccgatccgtggtaaggggaaacagtcttttgggcaggccttgtttagatcggtaaaatctatacatacccgccaagtaccatttggtttaggcaccagcaccggtttggccagccattctggataattcgcgtcgcggatcatgccactggtttgtaatttgtccacctctttctccaggggttctaccttcactgggtcgagggggcgtcgcttctgctgaaccagtggcatgtctgggttaacgttaaggacatgggttatgacatgggttatgacatggggacttatgccggtcatgtccccttggcaccacgcgaaaacatgcgtggctgcccttagtgcttagttattttttctttttcctcaagctctaggctttttcccaaccggag

SEQ ID NO: 177874 - DNA, 838 bp, Cannabis indica
tttctccttaattgttatgtaaattgtaaacatacaaaaaaaatagtaccttaaaatattaaaataatactacttttaaagtacaaaaaaatactactttaaaatattaaaatcaaaaaaaaaaaaaaaaaaagtaaataaatgttcttttgtcaaataataaataactgcacgttttttctccaataaaaaaagtaattatcgcgtttctttgaattttttttcttttattacaaataataaactaattcttttatagagaaaataaaaatatctttcgatacaaaaatcaagtaccattacccccattacatgaaaatagtacaactcatttagcaaaattaacaacaaatagatttttcaagtcatatacaataaaatggaagaaaattgtcatataaactatagggtgattctataatgcaccctttaatacgaatgtactgatacacactctacttgtttcggcatccagaaaaaaattttagtctaattttttttttcatatgtacgttataactatttaagatatcttacaaaattttgagaaatttgaaataatttacaatatagaaaataatgttcaaacaatctattttacacgcataacaaataaaatagtcatgcgtacaacatactacttgaacgtaatttttagcgtgttaaacttttccgaatttcttaaaattttgcaggatgtcttaaataactataatttacatgaccatgagaaaaaatttgactaaaaattaattttcggatactaaaacagatagagatatatcgatgcatcccttttaaggggttacgattatagaatttctctaaacttatatat

SEQ ID NO: 177875 - DNA, 847 bp, Cannabis indica
aggatattttagtttaagtgttttaagaaatttttactaaataattacttattacacctataaaagaaaagtagtcaagtgtataagttttttagcacgataaattagtttaaaatttcataaaattttataagtgacttcttaaataattacacaatattcattagaaacgaaaaaaaaaaaaagagaactaaaaaactatgccaaaacaaataatgggtgtgcaagaatatcatgttggaagtgttactatagtgctttccatctatctatttctaaattatggattttggttgaatcactttggttatgagactttggcatatgtatgtccattttggtagatctttcctcttagtcaattcaccctttgaatacatttgatttgaaacattattattgattgtaatttttcaaaaaagtgaagtacaattatgtgtgacctatgaggggtcatgatcgatttacactctcttattctctattatcgtgttatgtttgtatatggcattgtttgtagggggtgattttgttctattattagaatcggtagtttttttttttttgagtgtagcgtaatagtttttacaattatatattagcttaatagtttaaaggtcctgggttcgaacccatgacctctccctttttcccatccctccctcaccactaagctagccttagtggctttattagaatcggtagtttgagcattgctcaaatctgccaaaccacatattcactgtgattggatgagatcttgttgatgaagaaaaagagtgagagtttcaattggtttaagtctaaattataatctctattgttatttgttatcttacttttgtac

SEQ ID NO: 177876 - DNA, 499 bp, Cannabis indica
ccgaaaccaccttccctcttcttttcttctttattttcgaaatccttgagtgaatgagtgagtgcccacacacatcaagtggtatctcaatcatagtgtgtaagactgtggaaaatcaaccaacaagaaggagattcagcatcaaaggaaggagagaaagagatccaggttcagatattgataatgctctgctacagaaaggaatcaagggctagatatctgaacggaaggagtcattatattccgctgcacccaatgtaaggtttcctaaactttatatgtgtttatttcattgttttagaattcatattaggatgttaatgaaacatacttgttagtaaatctagatcctggtaaaatatatccaacacctactgctcttgtactcgacggagtcttggaggatgatattgcctgtaagtgttgtcgcatgtgggttgttcaggcgagagagagagagagagagagagagagagagagagagagagagttcttacga

SEQ ID NO: 177877 - DNA, 1226 bp, Cannabis indica
tgtccataaagggtcaagcccttgaaatttttgtggtcgattgtaaaaacacatactcttgaagtttctcaagatttaggagaaatgcaagagccaaagagaagcgagagaagagcagcagtaaaaaccaaaaaatcaacattgaaacttcatgttgatggaagttgtactgaccaattgctggtgcaggcattgcccttataacacctaggggaaatagctatgcgaagcaatcaaattcagcttcatggcctcaaacaatgaggctaaagatgaagccttaatcactggcctcaagatggtgcatgaagtacgagctgaccacctggacatattcagcgactatcaactagtcgtcaatcaagtcctaagtgaatacacaacttgaggtgaaagaatgatgtcctacttgaaaaagatccaagacttgcaaagttagctcaaaggctattcaataaggcagatctctagagaacaaaatgccacaatagatgcacttgcgtgtctgggaagcagtaccattgctgacaaagcaaacatggtgctaatatagttcctaaaggaacaaagtattaatatccctgaagaagtcaacagttggaagaaagtccaacatggatgaaacctgttgcatcttacctccaaactggagccttgcttgagaacaagaatgaggcaaaaaagatgagaagaaaagttactagttatctaatcctaaatggagtaatgtatagacgaagtctctcaatgctattgttaaagtgtcccaccaagactaaagttgagcacttgatgatagaagtgcatgaaggcttttacagcagccatgcctgggggcaaagcctatccaaaaaatgatactatgataggggtacttttggccaacaattattgaggattcaatggatcatgtaaaaaaatgtgacaagtgccagagattcttaaaaaaccttagagctccacccaatgagctcatgataatgcagtctccttggaccttcgaagtatgggggagagacctaattggtcaactcccaatgggaaaaggaggggtgcattttgtcgtagtcgctatagactacttttccgagtgggcagaagctgaacccctaacaataatcaccttcaagaaattcattgacttcattgtcaagaacatcatatgtcaattcaaacttccataaaagattaattcagacaatggaaagtagtttgacagtgacatg

SEQ ID NO: 177878 - DNA, 662 bp, Cannabis indica
tagcattacacgttgtctgcattggagatggccttagaagttaggtaaaactcaaccgcacatgatcgtacaagtcatttatatgttgatcgatttgattcaagatttatgcgcgcgttcactataagaaacatgagtttttgtgtcactgcaaaagccctacaaaaatcaatcctattcgggccgaagtagggtttttacttagaagtggcacgttattacaaaataggatcgtctcgcaaattttatagctattggatcgatattttatggtcgtctaacacatgcctaattagtgttagtaatgttgattgattgagttttccgtacaacaaaaaaaaaaaattcacaaatgaacactacaaatttttttacttataattacaacaaaatttgttattaattataaatatcatacttatattattattaaaaagtatgtggttaaaaatattagttataaaaatcataatttattatgaaaatatattttttagtcataataattattgtagttaaaattaaattagtgataatttatatctaaaattacatttaaaaaaaaaggggtatattataattaaaaaattatcattaattaaaactttttattttttgatacgtgacttcttattctcattataaaaatgtaaaaacaataa

SEQ ID NO: 177879 - DNA, 788 bp, Cannabis indica
aaaaggtgaatgaagcaatgaaggtttggcaagatttaaagagtgaaaacgttgtgtttgatcagcatacatatggggacattgttagagtgttcctagacaatggattaccatcagaggcaatgtacatatacaatgagatgacatcttcccctgaccccccactctctctaccatttcgagttattctaaaggggctcctgccttacccggaattgagagagaaagtgaaagaggatttcttgaggatttttccggggatgatcgtgtatgacctacctgaagacttgtttgatagtcatgacaggagtacagatagtgaagaagatgagtagaagaaaggaatatttgaatgtttgaactgagagagcattaactaactgctctaaccatgttagctggatttagtttgtgaacaacttgtatatatattgatttctggattaatgaaacactttacggattttccctttaaaaaaccttgcatggagttttttttttctgtactaaccaacatgttctttcatctaattaagaaatagaactcatctcatttttagacacaagttcaaaatattatgattgtctaagttattttattgaagtaacaagagtaggttacaagtgaagcttataactttgggaatgaaaaacaacaacaatggaaagaaaaaaaagcaaaaaagcacagcacagcacacatagtagagaaatcaaagctttttggtaggaaatgaagccatttgtagataccacagatgccttctggtttaccaatgtttctcttc

SEQ ID NO: 177880 - DNA, 607 bp, Cannabis indica
gctctcacaaaacaaagaaagactctcttctctcaaaagataaatgtagaaaatgaataatggaagaggtaattcgaatggttgctctctaggctctatttatagatcatagaaaccaaagaggcaaccacaagttcgaattagcagctgtacaaaaactttccaaaaacaaacacgatctgctacatcagattcggatgctgacgaagcagatctgcccagaaacgggaaacttactaaaatcgggtccgatcttctatcaaagcttgattcctgccaaaaacagattagatattctgattgtatcaagatacaatcgaaattaataaggaaaaggcaataatcaaagtttccctaaaaaagacaactttccaaaagagaattccttctcttttgagaagttttcaacaaaggaaagttcagctgaaagtgcaactttccaaacaaggaaaagggcaactacaatccgaatttataaggtaagaaatcgaatatgaatgcacaacaatcttaccataaatggaaaaattatttgtcaactaacttgccaaaaaaagactttacagttgtgttgaaggaattataaagaggaagtgaaacatgcgtt

SEQ ID NO: 177881 - DNA, 799 bp, Cannabis indica
attcatttgtttagttacatttttaaaatattagaatgacattctaatggaatgctctttctactattttggtgaaatgactattccattttaaaataaggaaagatcattccaatataaaaaatttaataattttttttatcaattttaaattttatttcatttatattcttatttttatttctattcttatttttatttttttgttttcgttctcccaaccatacgctactttaaagtgtagttctatcatttatttatttatttatatgatatacatatggataaacatcagttttagtttaatattaaaattaggggcaaacgagtacaaagaagcatattttattgatttttttttttaaattaaaaatagcatattttatttttctttatagcaagaagcatattttatatttcagcaaaaaaaaatatatatatattatggataacaaaaaggtgatgcttcaatttgagagaaccaattctcagacgtatcttcaatattgaaaaaaaatatatatatttctctcaacaagaaatattaaaaaaaaattaaaaacgaaaacaaaaatgtatttagataaaaaaaaaaaaaaaagtactcaatctaaactcaatgagacttacgatgtgtattagtccactcaagtgccaactgggacgattagagacgacaatagttgtcttgtctttttctttctactttgttttacttatttctttctggtatgtaattagtcttgttttttaaactactctatatttgtttttatatatatgtactcaatcatgtttc

SEQ ID NO: 177882 - DNA, 525 bp, Cannabis indica
attgggaatttgttgggagagcccgataaaacatacgccacaaatgtttttttttaactttttggggcacccttaaattccaaagaccatttccatttagacaacttttgaactcccagtcttctcacgagccaattcatgcgctaaagtatatccacttttaacagtatagcatccattcgtattataaactagatagttgaatccatgtaggagtcgaatatatatcttccttttggagatcagtataaggctcacaaggcttcatgattgtcgtttagtttcttataaaaaaaagtaatggcctccatttgagatagcatctccaatgttaattgcccgaaaacacacaataaacacccttggtttgagaacccctaccttatccatgcctttctccttctaaaacctacgagaaagaccttcaaaaggtcccaaaggggggttaggccgaagaacatagcacatcatagctattttccaatataatacttcctcttctatatccaccatatctatttttac

SEQ ID NO: 177883 - DNA, 682 bp, Cannabis indica
aaaaaaaatatgtatgtatcttaatgaagtatttctttttaccactccaaaggtcagcacactcaaacaaagcagaaccatacatatctctgcaggcttcattttcattgtcactcacaaataattctgcaaaacatgataaatgatcataatcatccatcaaataatcaataagccagagtaataaaaatgcaatctttctttacatcatctaaaatcaatcttatctaacaaagataaacccataattactgatccacaatatagagcaaaagacatggatataagaaaagtgtttcctttttccattcatgtatttatacattgtggacacatttttgtttttcaaaaacaaaattttaaaaacaaaaattttcctttgatgattaaaaagtttaaaaacaaaagtgttacaaaacaccaactaaattaataaaccaattttcattctagaacaaaaaaaaaaaccaagcccaaaaatttgagtatgtaattacatgaacaaattttggaaaattcagaatgaacctaacagatattagcatcggtttacacattcaatcaacaatcacacgaaaagttttcttttttaattctccttctgtcatctcaatcttaagaaaaaacatatttatacatatccatttatatatatatatatatatatataatacagaataat

SEQ ID NO: 177884 - DNA, 677 bp, Cannabis indica
gacttaatcttataaaagtacaagatctccttcgatgttggcacagacttaccgtgttgagcacaaaagatgtaccaacctgacagtaaacggtacgcctgggaaataagttaaaaaggagctattctggccacgacgtagaagtttacgaaatagcacctcagaggcaagtgtgcacccatctcgatatgagcccagttctagagactgaagcctcctttagtgcacttgttggacctctccccgagaatggagagcctatttcaaaataatcctgaaccctttcaagccctcgtagggtcttgtatttcctcaaattgttataattcctgaacatgttgacatgctggtccaactcccatggattttcatttaggattaattttggagcgtcttctcgctctattacttcctcatctgaattagcttcctctggatgagtttgtttatgcataatttttgtacgaaagaaagaaaatccaagcagttagccaccctaactacctagcatagaaagggagctaggggtccttccccataaactgcttggagaggtcccaactagactaattatcctgaaacgagaacttctagaagttattcattccagataagaagtcaggaacaatacagagagaaaaaatagacaaaaattaaacgaagaaacccaaaaaacc

SEQ ID NO: 177885 - DNA, 736 bp, Cannabis indica
ttttattattcatcattagatcagaatctaatgatttaatatttttttttgcaaatgatttcatatttatagttaaaattatttagttaccatcaatgggttaatacctgttgagaagtgattcataatttcatatataaaatttcattgcacattacaataatcaatcaaaataatactccaaagtttcgacaatttcagatacagtaatttttgttttcttatagagaaggttcaaaaaaaacaagtaaatgatcatttagtaaaagtaaattttagaagcaccagttgttgaattatttacttttaatcaaataattaatgttactaaacatagaaaaagaattgttgcaatatattatttataaaataatttgaatgacatttatttttaatatcttaaaaagctagtcatgtattgttttctcaaaaaaaaaaaagaaaaaaattagaaaaagaattgttacaatatatcattgatcaagataaaataatttaaataacacttactttttattatcttaaaaagctagtaatgtattgttttgttaaaaaatatattaattgagtttccataaaaaaaggttcaacattatcttaaaaagccactaatccaatcaattagtcaattgagtttccataaaataaaaagataaaaaaaaaaataaagataagacaaaataagttaacgaaacttaaaacaaccaaacttatacttttatattattattattat

SEQ ID NO: 177886 - DNA, 572 bp, Cannabis indica
tctacaaaaaaaaaaaaaaaaaactacttccaggatgataactccctcattcctactattcatattaatgaattatattaactagaaaaaaaaagtacaacctttccaaataccactctcattcctacgtttgtattaattattaataattaacattaataattttgttgtatgatttgtctcaactaagctattgccacatcatcatactatcttatctttgacattggttagttaagttagttatacaatcttgacacctaagcatacctaactacttaattcataaccaatgcctataaaaagaaaggcaccaaggctgctgtcgacagttagtccaatccgagcctctcacctagaaatctctctctctttctctctaatttttgtaccaatcttgtgagtgtttaggagggttgtaaaagtagaattgctcatcctatgagatgacttctaccatgtgaggtttgatatgtaatgtgtcttacacttagactcaaattgagtacatgaatcggattgtaaaggtgctagacatttgaataaagttcaattgattcaatgctaagtct

SEQ ID NO: 177887 - DNA, 494 bp, Cannabis indica
gttgagagaattgcaaagatttggtgcttgataattcgaaatgtaccacgtgattacattacatgcatgtatcatcactaataatgataattaatatgtaaattaattctaataatgtttaaaatatttctattttaaaacgtaggtacataaaattaaagtagaggaattattagggcattaattaacctgcctcaaccaaaaatctcacctactaataaggatgatatatatatatatatatgatgatcgagcttagaaaatttttgtagtaaattttttatttgttttagtatttaaaagaatttttttggtttaatttttttataatcacatatagtaatattaattaagaataatggtaaatttttcaaaaaattgtgaatagtttataatattaaaataaattttaaataattatttattacatgtataataaaatagttgtatgtgtaacaacatattatttttaatattaaactacctaaattttt

SEQ ID NO: 177888 - DNA, 1070 bp, Cannabis indica
aatgtaaatgcaatgtgattatgttgctaatttaacattttcataagtttggcaaatttcccatatagctagtacaatcactctcacttctttttcattttctttaatgtacagtcaaatcaacgaagggaacttactcttgctaatttccatctgaagtttgaggacagaatatcattatcatataattcaagtcatgatgatactaagtttcagaagaaatgaattaaaacgtctacaagaagtcctgcacaggctttgctttggaaataagtcatatcaaacaagaactatagactcagaaaagcatcatgtataagttctcacacaccctacaactttcttattttcatatctatttctttacttattatttatttaactttacaattttgtgtttggtggtcactattgaaaaccattttagaaactgcaatatcaaataattcatggctgtaaaagcttggctgaagaaaagagagaaatgagagaaattaaagcaagccaaagaaaagggaaagaccatatgtgtagaactatatctttgggagaggttgattggagtgtaagattatatcataccttacatatctttagtacttgtcttttgatatctatactctaacctttatttcaacttaatcttaagccagaatctttggaagctatatgaaagctcagatacttcgagaaataatggcataattgattctgatcgagaccattatccaaatgacattaagcaactcaaaatgaaagtggacaactttgttgacaatgctgctcagaaaggaaagagttggaactcattgggcataaagcaagctatagaagataagatcaacgtaggccttcttctgatttttcacctcaaagagaaatgatatgaaaataatcttaatcagcactactctgtcataactttgattgtagattatatgttatgacttggaaatattagagaaaaaaaagagaggaggtcacagttgaacttcacagacatgcgaaaaagtggcatgctttgaaaaaagtcagagattctttgaacaaggaatcggaagatacaaatc

SEQ ID NO: 177889 - DNA, 770 bp, Cannabis indica
gacctcattcaaaggatgggcccgaagggtgaaaaaaccgtctttaaacttgtcccccttcttgaggacagaaacaagttcataaaaatacaaaattttgatcgggctaggtgaagcccagcctctggcaacataaaaaataaataagcctgagatcaggcggtaagcttgtggaatcagttgataaggtgcaaggccgacaaagacaaggaaattaatgaaatagtcttgaagagggagcatggccccagacatgaggtgggtttggctccaagctctaaaccacccgtagttgtggttgggcttctcttcgtctcgaggcaagcggttaacaaccccggacggagatggcttgatgcctaccacagtcacaatcttctcaagctgatgagcgcagaccaaggtagaatggagctcatccgcttcccagccattggcacgagaagtatagttctcttgggcaaccggtcctttcatgactttttccaaagtagccagggtggccgcccccttcttagaaggtttcgtcccggagataggagcagacatttttctgtaaaaataagaaattcagcagttaggctccaaaccaaaccctaatgtttaaaaaggaatgggggtcccctaaccgctggaaagaggccccctctggatgcttgccaaacaggaaacccaaagactttccttaaaagcatcgggtgaaaaagaaaaaaaaacggaaagggaaagcgcaaaggaaacgagaatcaccttatgccctaaaagcgtta

SEQ ID NO: 177890 - DNA, 583 bp, Cannabis indica
gagagagagagagagaataacaactaacagttatgtctttcattgaatggtaacaatattacaatagtaaagtaatgaataagaaacgaatagaggtatatataggaatacctcatagtacaaaacacagggacaagcagaagtttcctaatacagatagttaacaaactgttacctgattgtcattgaccaaaataaaaagttacacctaattgactatgacacaaacataacaattctccaccttatctttgtaatttcaagtcactatgcacacattctattgtcaatatttaataggtttaggcaatgatcaaattttgctgcagggagtgattttgtcaacatgtctgcatcattgtcatcagtaggaaccttgatcaatttattcctaaagaataggaaaatatatgaagttaaaacttagcctggggctagcttaaaataccactgttgggctattccagccagggttgccagaatattcggcattgcacatatccatatacttgttggagatccgtttggatcttaaagtactttatgtgtgctaggtaatcttctttccccatgtacatcttcc

SEQ ID NO: 177891 - DNA, 1122 bp, Cannabis indica
tagcacattctaaatttaaatcatagttgtaaataggtggccggtctgattcatattttaaaaagtcatatcaatattttaaagagtaaattcgatatgacctgtaaatctatatttttgtgttgtgctcgaacttgtgcagtactttattcgaactgacctattttttataattaagtcagtccattttcttatatttgaactcgagctctacttatccactattttcttacaactagatagttaatcattaaggtgacatttggttgagaggaatgaaaatataagaatagaaatgagaatgagaatgagaatgagaatatgaatatgaatgaaattgaataaaatttaaaatgcataaaaaaattgataagaaaatcattaaattctttatcatgttacaatagaatggtctttcattctattttaaaatggaatagtcattttactaaaatattgtaaagaacattttattggaatgatattccaatattttaaaatacaattaaacaaaggaatgtaatgaaaattatttcttttccattctattctattttattaccttcaattaataccacctaaattatatgtatttttttttatagttttcaattattttcatataatactttacacattatcaaataaaaaattaattagaatttaaatattttttaataaatacatatgaattattattattattaaattataaaaaattttaaacgtgttgtgttatttttttagtttattcgtgtttacattgctgttcctttaagtttatcgtgtcgtattaaagtatttttttcgtgttttatcatgtccaaattcatatttttttgtgtcgagttgtactttttaccttgtcaaaaaaaccctatccatatttacaacactaatttaagtgaaccataaaaaatgaattattttctcttgacatttatttatttttctctccacacatttagaaatattattattctactttcattgtcattatcaaattcgaaacaaaataaataaataaaatcaaagctattgccgacattagagctcagatggtggggaactcatctgtctttttgttttcatttgtgtaatataataatatgctttgtcctt

SEQ ID NO: 177892 - DNA, 676 bp, Cannabis indica
attttaggccccatagtctttattttagccttctaaacttattgtatttgttatataaagaaagagaagagacctttatcaacctaagaattagagttcatctactaagaaaaaaaaattgtgtatagatactttgaagcttttccaaatctgacttgtggaataagactagaaccacataaaattttgatttttttcttctttctttattaaagttaattattttataattggtttcggaaaatctctataaacaaacagtataatgtgttccattgatgaactctatttttttttcattaggactttgaaatatactttattttagtcaattaacataatgtttaaaattttgaagcgtacttttatcagtattattagtaggagtatccatataactcctctccttggaaataattaaggtaagaaaaaagtaaaaactctaataagattaagagatgatataatacactgcataataataatgataattactttcccaaaataaacattgctggactcttgttcctgttcatgatatctaataagcttaattaacaaacaaaacaactacgaacaatgttaataaagattattaacaagttgataccagaaataagaaagaaaagattcaaaattatcacattgcaaagatgatcatgaattcatgatccga

SEQ ID NO: 177893 - DNA, 703 bp, Cannabis indica
ataaacttgagttgttctattagctgaaaaaaaaattaaaaaaaagtatttcggtaaaaagaaaagaaaaagttgaatttaacttaaatattttgtatataaatatagtgcaaaaagatgttatttttttatattatttttttttaattaagtagctaagttaagcgtagaaatttcaatttctcttttattattcgctattggatcaaaatttagtgatataatatttttaaaattaatatttgtagttaaatttatttagtaaccatcaatcaatgggtaatatccattagaaaagtgtttcatatatttttatatgtaacgaaattgttagtttaacgatttttttgacattttacttttttttttaaaaaaaaaaaaactaaccaagggttaacgtttgatgttagcatccgaaaaaataaaataaaattgaataaaataaattcttcatggtgatattctccttccttgcgatttagggcctttttttttcaatttttggaaaaaagagaaaaaaaacttccatgaatcttcagattaacaaattaattttcaattgccacattccataccgtcgatttcaaatgaaggatttgattttcaattgccacattcaaaatctcactattggctagttttagatgctatgcccacgattcagataacaatttggttctaactgctacaattgctgaaaatc

SEQ ID NO: 177894 - DNA, 627 bp, Cannabis indica
gaatgtgtaatgtgtaaaggaatactttatgatattgtgtaatgagtaaacatgatgacatgagattaaattgataatcattttctttcatttattgttttggtcacttttcttgctgagtctctgtgactcacgggtgctttatggtgcaggtaaagggaaggcaaaggttgagcaaccatgagtttgtggtcgtagcagcaatgtacataccagccgcagtggcacggcccagtaaacaggatgctctattttgattgtattttggaaatgtaaagtttatgttgtaaaatacttttaaaccagtttataaatattttgaaaacatggggaccccgtagtctatatcacttatcttttgttaaatagttttaaaagttgaactttaattatcaaaaatttaatttcccacacttttcagtataattatatatattatatagatcaagaactttattaaattgcacacacgtggcgtccctgttggacagggcgttacaccttcactttggctcaagctgcaaagcaccaagtagtaggtgtaagcttcgaccttcagtctttattttttaattttattctttcatcttatgtagttttattgtaccaaatgaccttgattgtaga

SEQ ID NO: 177895 - DNA, 1252 bp, Cannabis indica
atggttggtgtgaactgtgaagaggttgtggcataattcgaaaataatgttactgtgtcattgctaaatgctaatctatctttggaaatgctttttgagtagcgagtgtaggataaaaagaaatacttgcttttctttggaaagaaaaaagaaacttacgtactgccatctttgattgttattttttgttgttgctgaaatcttggattgtcattaatttgttaaatcagagataataatatatcatggccctgtccctgttttattccctgctgtaaatcgtggctctgttttgaaaagatgaatttataagtactattactaatcaagtattagtgttttgttttcccaggaaaaggaaaaatctcagtccgaacaatcgttgccattgtggttccaattgctgttgctatactcctactcgtattaggattctctttcttagtaaagagagcataaatgattgtatataatcatacatgtttcatgattttttatttttgtattttgtatggttttctatgtccaatagtggtgtatttgctaatttacttcacaacctttttccttcttgtgtcatcattagttacttctggttattttttcatcaaattagtttttaacttttgttaactttccctatgtttgatgggcaccatcttgagttcattattatctgtaaggatggttttcaaaagttctctactgtgttgccttatagtataatttgattataatatgcagaaacaatagatctatattggtactttatttagtaattctcttaatttgatgcagtaagtgttatcttctcttggtgaaagaaactctcaattctagtaggaatggcgaaggaaaaggggttcattgttttggctttattcttaatattctcgctcatcatgccatcttccaccattgccaaatctcgtcgtcccataactgtatgttttatgtctttaatgaatttaagaatagacttgaatttgtggtcaattcttcgggtgatgtttttcttaggatattgagatgaggcagaagaagaatcaatgctacgaggacattgagaggtataattttctattcattgtttttaactttgcttttgtaaattttgcatttgattttcgatttggatgggttggaatggaaacgagtggaagttatgggggttggcagtgcaagtctccatgatagcgaaaaggaaaattgtgttttgaaatgccttctctacttgtatcaaatcatatcc

SEQ ID NO: 177896 - DNA, 644 bp, Cannabis indica
agttgattttcagcctccttaatgtgttcttcaccattcgaacccatagtgatgagtaccgtgcccacacatatcaagtcaagtactcaatcatagtgagtaagacggtggtcaccaaacccgaaggagagaaagagatccatgttcagatcttgataatgctctgttatagaaaggaatcaaggactagggatcttgaatggaaggagtcattatattccgctgcaattaatgtaaggttttcttaaaaccttatgtgtttatttcattattttagagaattcatatttaggatgttaattcaacatatttgttagtaaaactagatcctggtaaaatatccccaaagggcatgaccagcaaaagaaagatttttgctagccgaaccaataagcttctagttaaatttatctaaaatagtacaacaattcgagaccttccacttagtaggtcttatattaactcctaaatacttaagagaaaatgatccctcttccgtttgggaaatctccaagatcttattcttacttctctttaaccccccataaaagagatgagatttcttttttttttttttgggtctagcaagacctatttcatttacaaaactacttgaaaagacttctgttatcccaatttttgca

SEQ ID NO: 177897 - DNA, 578 bp, Cannabis indica
atttaatttttccggcttaatataatggaatgaattaatgaaattttttattatattttccaacaaacagttgatgttttttttggtaattgtgtaatttgttaggtcccatgcattaaaagtttatataaaaaaacaagtttttagtttttgaataatggtcatgttttgcgagttttaggtgtttagttttggattttttatttaaaaaaagtaagtgccgaaaaatgtcctttaaaataaataatattcattctcaaaataaataaataaataaataatattcttatcgtacattaagaaagcataatttgtactttttcccaaaaaaaaaaaaaagacatcatttgtatttttgtaattttgatgagtggaaatgagttcatgactttgtgttacttcttctatttatagaagttttcttttgctaattctagtaactaggagtattaattacaacattttaatcaatttttttactcgaaattatatgttttgattttttttttgatatttttataaatttttaaaatatttaacaataacatggtaaactattcaaaaaaaaatatcaaaaa

SEQ ID NO: 177898 - DNA, 565 bp, Cannabis indica
aactccacagttaagcttgcttgacctggggtaatttaaggatgggtgacctcctgggaagttttcccaggaagcgtgtgagtgaggacaaagcacgttggaaacactcgtgttggtctgtaggatcagtcatcaatccaagaagcagctagaatgacgtactcgtgtataagagccagtcattccgtgggtgtaaggacccaatggaggcttgaagcggggacgttacacaaatgtgcttaagacttattttttttttttataatatttatttcttgttttgtatgtaattataataaatctaaatttcataaaattatactatatctaaattttcattttcctaaaagtagaatcgttatatagaagagtaagagatattaatctcaacagaaacaaatgaacaaccttttatatattagggaagatatataccaaaaatgtttaccctgagcatcaaaccattctttaaattgtgctctttggcatattttttttaaattaagaattttatattctcatggatattttttgaagaatatttaaaaagaaaaatgtgtgccta

SEQ ID NO: 177899 - DNA, 1229 bp, Cannabis indica
tttcgtacaaaatatagcattagagcatctccaatagagatgtaaataagtagtgaaaatctaaaatatagctcatttaacaaaaaatgtgctccaatagtgtgtcaaaaagtaatataaatttagcacataacaaattttgtgccaaatttaacacaatatttactataatgtaaaatttacatcacaataaatatatttctttaataattaattatttttatgtataattaacaataaaacagatataatataaaaatattttaattttaatttttaaaataatatataaaatctttatatttaaccaatataattcaattaacaaaaatataattatgttatcattaaaacacaatttatgtatttttctacaattatattttccttcttaatatttaattaaattagatatactcttaggtgtgtatatctaataagagcattgctattagacaccagtagtgtctagcaccttctcgacatgtcgcgttgtgaatgactagcaatattctctaaaagctattatattaaattatatgagacccgatatttagttagactaatagcgatattaacacataagaaggtgctaaaatactactgatgctttttaacatttttcatccaataaggtgggccgtaggggttggagttagttggtagctgagctttatcaaaccgaggaaatctgccccaaaaaaaaaatggcgggaaaattttacaccaaaagaatcgaaaagattcccttaggattgtactgtgaattaattgagcttcatgtaagccacattgattattgtgcttaatttaacacacacactcatcatttaatttaatttattatttacttttgcactcaaagtaaaaagccccccaaactggaaatatctatatttaatatatattaaaaaaaaaaaattctcccaaagggggctttacatagttttgtcaatttaaaagaaagctttgtttttgtcaaaaaaaaaaattaaaataataagaaaaaaaaagatttgttgtttaaagaggggttgtaaagctcactataataaggggcctcagaagtgaaagccggtaatgatttggttgagaccttttttttttgttattatttttaggaaaattttataatgtattatcttaaaaggatacaccgatatatctctatccattttagaatttaaaataattttttagtcaatttttttctcataatcatgtaaatt

SEQ ID NO: 177900 - DNA, 704 bp, Cannabis indica
ttaaaaagggatataccgatacatctctatctattttagtatctgaaataaatttttagtcaaattttttcttataatcatgtaaattatagttatttaagacatcctgcaaaattttaagaaattcagaaaagtttaacacgctgaaaattgcattcaagcagtgtgttccacgcgtgactagtttattttatacgcgtgtaaaatcgactgtttaaacattgttttctatattgtaaattattccgaatttctcaaaattttatagattatcttaaatagctataacgtacaggaatatgaaaaaaattagattaaaatttttttctaaatgtcaaaacaagtagagacttcatcagtacattccttctttttaaggaggtacattgtagaatcaaccgttaattttagtcattttgtttctaaaagttgttttttttttcttttaattttttttttgttttattttttattttgtaaagtaaactatgtaaagtaaactaataaatattcgttattttctacttgacaacatcatattcctttttttttattattattatttatttaagtgaagtgactattatatatgtcatgtgtactagtattactatttctcttacccacgcatcacatgttttttttttcaaagggttttacttttttttttcttacatcaacttgattatgttttttattaatta

SEQ ID NO: 177901 - DNA, 800 bp, Cannabis indica
ttagaagagagtcggctgagagttgaattcaaatgggagggtttagttttggaaaattagtaaattggcatatattagcaattttagtaagtatatatttaggaaaaaaatatgagattttggaagtatggaaattcaaatttcccatagagattaccaatattttttccacatctagcgaagagaaacaactgttaaccaaaggaacatcccattgtcgttcctcattaatgaagtcagaaacaacaacagcaggcggccccgaatcaaaggttgggaagaaagagttatgtcctagattccaaggatctaaagcacaagtaacttttctaccttctcttattttccaatgaagtctagcgacaagaagttctcacccaaaaagtataccttgccatgttaaggatgaagagtgaccatgtgaagcttccaagaaagagttattggagaactatttcctttgaaaaacttacttaacaacgatgatggattatcgagtagtctccaaacttgcttggcaatgaactcttgattaaaatgcataaaagagcaaaaacccatcccaaatcttccaatggattttagaacatgtctctattgttccccaccataaattagccatcatcaattccaattggttacaagtggttattggaattcaaaaacagctcatagcaaaagtaagaattgattgcacaactgctttgagcacatgcactaagtacttgtcccatactagtattagtagggctgaaccgtacccaaagtgctactgagcgttgtaccacatgcactagtac

SEQ ID NO: 177902 - DNA, 850 bp, Cannabis indica
agttcttgtaaatcattgctaacaaggataacatcttctacatagaccaacaagaaaatgaaagtgttactataatgtttaatgaacggggagtggtcaattgcagaatgatcaaaaccttcatcaaatagagcaatggaaaatttggcaaaccattgtcttgaagcttgctttagaccatacaataatttatttagcttgcaaactggattgtgtggaagctcccccttaggtttatagccttgaggaagtgacatgtaaacatcctccttaagatcaccatgtaagaaagaattatttacatctaatcggcgtaaatgccaaccatttataacagtacgggcaataacacatttgactgttactagtttagtaactagtgcaaatgtatcagtataattgatcccttcttgttggttgtatcctttagcaaccaaccgagccttaaacctctcaacactccatcaacattgagtttaattttgtacacccatttacaccaatgacatgttgtccttcaagtaagggaacaacaatccaagtgtcatttttctctagagcatctatttcattatccatggcattgtctcattcaggaatgccttgtgcttgactgaaaaacttaggctcaaagtaacttgaaatggtcaaaatagtagccctaaaagtaggtgataacctatgataagacacaacctcagacaagggtaaaggtgtaactgatgtaccctgaaatgaagagtaaaagcgttagcagccaaataataatgatagtcatgtaaataggatggttatgagtggtctgccttagggtcagtaacatgttcaaattcagcactaggagagtgaa

SEQ ID NO: 177903 - DNA, 599 bp, Cannabis indica
aacattaactcgctgtcctgaccataagcaatatttttgtaagacttcctgcagatggtcaaccccctgcatattcgcctagttaaaggaatcgagtaataacagagaggggcatttcagactttcctcttggtcctgaattataggaatgctgatgtaatagaatcaactctgattttgcgaatctttaccgttagcataggaatatataatattccttttctgctttaacaaacttgtacgtgtaagccatttattggcatttgtaatatcttgtcccctgcctcaaaggctataaaatacagcagcctctctcagtatttctgagctgagttttctacaaattagttcactgctatttcttcacttggtatcagagcctctccggcgtcagccatggcagatccagactcaactccacagcagcaggtcgaaggctcagagacatcgcaccagtccgaacctagaccatctgctcaaaccataagtcacataccagtgactacacccttcagcagcaccctaagccaaccattcacgatgaagcttgatagaaacattttccttgtggaaaacatggtgttcaccatcattcgagg

SEQ ID NO: 177904 - DNA, 1195 bp, Cannabis indica
ccaagtttaagaaaatactaagtcaatgtattaagtgttttaaagaaaattatacaaagaaagaagatatgagtcacttctaaagctaataactactatcatttatttgacaaaacaatttaagaacattaaaaaaaaactaccaatgtatgttttataggaaaattatattatggatctactaaaagggtgcaacaatgcatttttatctaatttggcatgaaaattttttaatctattttttttatgattgtgtatgttataattatttataaaaaaaaattgagaatttttgaaaaattcagcaaaaattaaaactccgaaaataatatttaaatagttaatttgctgcatgtgtcacatgtaaaataaattgtttgaacaatgttttctatattataaattagtcttattttctcaaaattttataaaatattataaataattataacgtaaacgatcaaaaaaaaattattttatttttatgtcaaaatgataaaaattggactcttctctattttggtaataagcaccatatttaatatatacatttgtatatatatcatatatgtccgcgaattattggtgcttttttttaaattttttaattaattattagttattataaatgacaaaaaatataaaattatatactgtcatagttatgtcatcacttttaaaataaataattctttttttcttcaaaaagaaaataaaaatcttttacaatagttgactttgacaaaacataaaaattactacataattttgaatccaatgatcatttactacattaattttgtatttttaattaaaaatatcaatgaagtttattaaattttaggagtgggacaagtttttatcttaaaaaaagaccaacaaagaatagtcaacagaccctactaaattcttgttaaaaaaggaaccgagatcccatctcggagactcactcactattacttggttttaatatttacttaattaatataaatttttattaaccaataaataaatttttatgtaataaataaactttaggatatttataaataataataataataaatataaatagtaagaagattttttaacgtgattttgaagttaatttttcacactctacgagtcttttatttttgaaattttagaaagtgtatagtgaatagagaatacaagatattatttgtgaattata

SEQ ID NO: 177905 - DNA, 992 bp, Cannabis indica
aatgaattaatttggtaaatttttaaaaaattcttaatagttttttaattctttagtaaataagaattccattaattcaaaaactgtacacaccagttaacaacatgaaacaattacaaggtagtaaaccatgagagcttaacttatatcccttgtgttcaatctatgccaagcagctaaccaggttataataaatgtgttttagcacattatatctcatccaaacatttgaagcataccaattccgagcaggagtaatatcggaagaaaggtcacaaacctccttgatagagtaattcaattgctcaaattgcttattggtgcagtactcttttagcatgattttgacttgatgggctttataatcccaccaacatgcttccctatagccacaaaatttgagttcacagtgcaatgaaaatccacctctttctttggcttgcacactttatcccaaaagataccacctagtctgtggtgtttaacattttctccccataagaagccatgcaaaattgctcaattctatttaaaatcttatttgggaagatcatgacttgtgtaccaataaaaaatgaattgtcatcaatactgactttacaaagacaactctccctattgtataagacatgtatgtttcgagtactcttaactcaatccactatactgttttttctataagaatttcacaatcagcactagaaaatttttctagaataaattcgtaatagtttaaaagtactgtaaaaataaaattttaaagaatttatttttaggctaattagtaatttttccccccgaactttgacatgtactaaatcgtgccccctgaacttttttggccgttaaaaatttcccccgaactattgagattgttaaatttaaggacttttgtctaattttagtaaaaaaattctaacatgaatgaaagttcaaggggcatgatttagtacatatcaaagcttgagggacatgatttggtagatatcaaa

SEQ ID NO: 177906 - DNA, 1145 bp, Cannabis indica
agttcggttcgagtatattacttcaaaagagtaatattccttcctcctacaagaaaagtttccagttctgtaaagaaaaaaaaattagaaacgtagagagaaaaaatttgtgggaaaactaatatattatatatataaaaaaatcacaaaacaaataaaataataaattggctcccgacaacaaggacggtaagtgggcctagtgaagaatgactgggctgtgtagaaaattaattttggcccacaaatgtcttgtgattaggtgtggtcgtgggcccaataggaatccgaccagagaatgctaaattcacctgacgtgggggtatggacacctcattgcatcaccgccgtgtctaagagtcctccactcgtcaacctggaatctggatcagatttctactgcctcccatctcacacaccaatcgcaattcattcatatagtttagtattaatttcactattagttaataacaatgttctatttaaaaaaaaattggaaaaattaatttttattttcaatttttacaaagacttttcttttattattatttttgatagattccaaacaaactttctataaagacttgagttataaaatattttataaaaaaaaaaaagacccaaaaatacttaaattagtaaaaaaaaaattagtaaattaacttcttaaatataacgttaattaaatttctaatatcatgattacttttatattttaactgtttttacataggtgattaacaagaacaaaatatactattaattatttgagtactttcccgttaattaattataataacatcttccccaaatatttgtatagatagttacacaagactacatcaacattaagctgtaattatcttaagatatgatattaaatactttgatgttggagactttaataatattctttaacatcatatgcaatatatatatatatatatatatatatatacatataaaagtaaaaataatacaatccagtctattcaacaatggtccatgataatgaacaatttagatcaaacatgcttccccctttgaattcaaaatcttaatcatgtagtagtggaataataatagtgaataaataactaactagtcacttctaatttatgactcaacctaattttgaatgtatt

SEQ ID NO: 177907 - DNA, 1372 bp, Cannabis indica
aatgatgaaatcgaagaggaattagttcatcatatgatcattaaaattcttcatttctaagtgagcttttctagtcttgaattcatccctacagagaacaactactttaataaagtgttttattccactacaaaaatttttacttttagtcacaataaaatttgtgactaaacgtctaattataaattattattcttatgttgtgactaaaagagctgtggctgaatgtattagtcacaaaaattataatttgttgtgactaaatgtatttttagttacaatacatgttgtgactaaaactaaattaagtgacaacttgtaactaaatattttattttagtcacaagtaacattttgttgtgactaaaagtcacaaaaaaattatattgtgactaaaaagttgtcactaaaagtagtatttttttgtagtgttcaaaggcagagaatcttgaaagtaatgttttcaacgaaaaattaagaagagtcagtgataatacgaaggaacattggaatcatcataatgttcaatattcaactaaagaacataatgatgatgcttatcaagaagattttgtatctgagttttttttttttttttggcaagtggttggtactgagattcaagaaatatagaatgagcatgataaaaaaattataatactagtgaacctagtttttctttaccgtagtggttgtaaaataaaaatattttcaagttcagcgaccctggagacctgattggaggccaaaaatttcacaacggttttagttaaaaaatattgatggcattattgagataagttaattttagaaataccagtatattttggggtactcgaagttgaccaaatacaaagtagagattttttagtagttaagaaataataagataactattaataataaaattttaatttatattattattaatattatattattattactaatattttattattataatattattttatatatataaagttattgtaactttaaatatatattatataagttacagtaacataaacataaatgaacccttattctccttccttcgtcaaaattttcgcttcttatatctatttttctttattttcaacttgaaacctagcaatctaagctccggtagtaacaggatagcaaactcttgaagagggagagcttaaggtatggtttaatttcgttttaagtttaaaaataattagtttcgtataaggatttcgtgaattataatagttatggagattctgacttcgtagaattattctttggtacctatgggactagtatcgatgtttacttgttgaatttgaagtaattttgagttagaaattgagttttgaactttttaaagcttagtccgaat

SEQ ID NO: 177908 - DNA, 534 bp, Cannabis indica
cttcaccctcaagtgccatcaacctaaaaaccttcttcgccttcacaaccaatcctcccttacaaagcccgtcgattaaaccagtgtaagtcacaacatcaggcttaattccacgccccatcatatcgttaaacatctccgaggcctctttcaatttcccaattctacaaagctggtgtatcaaacaaccatatgtaaccacattaggagaaatcccctttgcaagcatcatatcaaagagcctttttcctttttcgaaatcaccttctctacataacccatttataagagtactatacacaacaacatcagcttctaaaccaagattttccatctctttcaacaacccaaatgcctcattcacttgaccattcttacaaaaaccatccatcaaaattgagtaagtaacaaaatttggttcacaacccaaattctccatctcaactaacaactccatagattctttaagcttcccttccttgcatagggaatttataagaatattataacttacaatatctggtgataaaccat

SEQ ID NO: 177909 - DNA, 855 bp, Cannabis indica
cttgctaggtcttcttcatcatcattgtcgatcgatccatctatctctacaacgttttttcttcaccatttttaactttctttctttgttttatttaggctcttcttcttgttcaattttacttttttctttttctattaatttaatttgtacttttctacttttgttattattatatacttaattagaagaagagtatgcatgtgcatcactccttgttaattttacttcttttgaggcatgcagcaatgtattttctttttcccttatttacatatataaatatatatatatatatatatgtatataggtgatgatcaaaagctctcagcttgaaatatgtgtgcatctatatgtgtttgttgtttttctatttgtgtctaattaaatataacgatcaagttggcacaagtgaaagaaacaaaaagtagtgtcaaagtgtgaaatagaaaaaatatattctaactctaatatattcaatgtccaatatagacagtgtatatatttatatatagttgcggattgtattatattatccaatgctgataataagacatttttctttattcacaaaatcatcaattttaatcgtttctttgggtctattgattgcaaaataacgaaaaggctttaacttgagataatatatactaagctcattaattaacctatatagggatcatgttaacaataaattatcaaatatatgtccccacttccaaactcaaaatataaaattaatttattcatcattataagtataaaaaagatgtgagtaaataaagggttgacgaattcactatatataatatgtattctttatcttaatttatggaacttcaatgaagtatagtt

SEQ ID NO: 177910 - DNA, 736 bp, Cannabis indica
cgagcgacgagccacgactctgacggatttagacagatctactaaatgatcatcattgtgatatgaataactctttcatgctaaataacatgttgatgaaatatgttattacatattgattcaatcatgtataatcaaattatacacagtacctttaccacatgtctatccacatatgtgatctcaattaaaatcacacgcactagagtatagtacatagtaaaccgtacttaataatttcatattaaagatttcatacttttatacactatcgatttattttattcatattgtatgatcttaattctcttttattctagtgtggctcttccacctcgatttccgtagttgcctcgaccacctctgaagccatgatctccatggcctgaattgccttgatagccacctttggtatttgttgtgttaacaagatttgcctgcacatttgtaagagagtcaattgtgagttgattgattctcatttattgactgtgaagcatgaactgaacctcttgcaaaataggattgtcagttcgagaggtaaagttcaccactactacttcataatttgaaatcaagaccaccatgaatatagagaatcaagtcatcattggaaagaggttgtgctgctatgtaagtgcatttgcatacagattcatctcaagagtatcatcaatgaaaagtgatcattctttgtggattgcagaagaccacggatcaaaaggagtctgtctct

SEQ ID NO: 177911 - DNA, 1097 bp, Cannabis indica
ttttttttgaaaaaacttaaatttttaaatttttataattatttagaaaaataaaaaaaatagagtattgtatcaaatatcatataatttaaaaataaaactttcttatttaaataaataattgtaaaataaacttttttaaatttgttcaaattatttgtgctactaatatggtaatgagttatattaaaaaaactcgtattattttatgaatgtgtgtatataatatgcaaatgcatcaaattataataaaataaaataatgaatagttgagactttaaataaaaaagatataagtaaaattagtttcataaaattgtgaattaaatatgtacaaaaataatatatattatataatatatatgttctgtcggttctcggtttaatcggtcggtttgccattgacactaaaaccgaccatgttaaggcagttttaaccgaaggtggttattttggtttttggttttttatggtgtcagtttttttggtgtttggacgggtagtgtactcggttttgtcggtttcttagattttttgctcacccctatttttgtcatgattatagtgtcgtcagcacagtggaatataatcatgattatatgttcaaaagtttaattcccatgatttgtcagttcactggatttagactggcatgataattagcgataaggtatacttacaccttggataagtgttatgtcctttccagggcattggcaaagtttaccagtatcagatgtatggagtatacattggaagagaccgatattaatcttagataagatatcataacactactgcaatttagacctttagtgacattatttagtgacacgcagaaaagtgtgggtcactaaagatttagaattgatttttagtgacatgcacaattagactctaaacgttcggtattagtttcctacaatgtgtgtcactaaaaatatgaagtgtcactaaagggtaattccataatttaaatatttttttttaaaaaaaattgttgacctacggtgacacgctaattgcgactagttaaatgtatcccagcatgtctggcgcatcattaaaagttatatttttaattatttttaaaaaaa

SEQ ID NO: 177912 - DNA, 645 bp, Cannabis indica
atccgaaaatgttttcgttttttcctttagtgttatatataataaatatccaagtaattccaaaagttctttattttttaaaaaaaaggttaattccaaaagttcttatgtatgcattttttcttttttttttttttttgttaattttataaaaatgatccacggtaattaacctattaaatttttactcgtttaataaatttttaattatacaaaaaaaaaaataaataaattaaaaatttaaaacttgtttttttaaaaaaaaaaaaaatggagagaatattatttctagttttgtcggcttaatagtaaagaaagttatagcaaatgaaattataatactatgtaagtaaatgtctatattttaaaatttgtaaagaaatgacctttttacactatttattatttatattattttttgtcacataaaaagttaataatttttttttatatttttttagaattagaagcaaattacttaaagattatggtatatatattagttttattaaaatcttttttattttaaagttatgtcaatttttttaattttttatgagttattgtgcgttgttggtatataaattttgttgtacacagtaatggatctagaatttttactttgtgggggcttatttatcatta

SEQ ID NO: 177913 - DNA, 1481 bp, Cannabis indica
aaattgaaagacacacgattaagttagaaaattccattactagctttcagtaattattgagcgaacatgaccattttggatgcaccattgtaagaggcttctcactcaactttttgtgtagattgcgagctagtggtggcatatagctcctcttcttcatagtaactgttaaaacctagaatttctttcatcttgtcaaaagatggcatgcttttatgaggaatatgaccctctttgatagaagcaagagcatcctgcagtttagtcactggagtcaccttcatgaagtaactaactatctagaactagaagtctaggttaatagcaaatagcaatcattaaaacagaatgcaacaaagtacttataatttttgtaaagggtgtcactgaaattttattccaagtcaaaggtgtcaatgtggtttttccaaacaaaaatttcataacatagttactattaatttaaaacaaatcaaatcaaatgaagttttaaatgtgcaatgcctagaacccttccttcaagattgtagggtttaatttgggactaaattggaaagtgaataaagttaagatacctaacctgcatagcttgcatagataccccaattaaggaaagtggataggccacgagcttaaatccaaagtcttcgagttcagaaggatcaagtattggtgtcttgccccctccttcaagcatgttggcctagcagaatcaagtagctctttcaattgccaaaagctaaatctaaatctgaatctgaatttgactctttcatgtgtattgcaattagcaaaagaacattatgaaagttaaatgtttaacattcaacaaaaatatgattgctcgtgatttggcatctaacaaagcaaaataaactataccagtttatgaattaagggagaaatttcacaaaaagctctcatttcatctttcgaagctagtgcgtcaatgaaaagaacatctgctccaacatcagcaaaagcccttgttctccagagtgattcttctaaagacactccttgacgagaatcagtccgtgcaacaataacaatgtcagacccactctcctcccgagcatcaatggctgcttttatccgcatcactgcttcctctctcgacaccaccttcctgcctcgagtatgaccacaagctttgggagacacctttttcaccataaaatccataagatacagactagacatgggtaaaaaaaataaaaattgtaaagcaaatgaggtccccaacttcaataataatcacaaggttgaatgatgttaggccaaagaatatgctgatgaagctcgctcatctagcaaataagattgataataagtagagattggacaacgagaaatgtcatatcaaaatcaaattactaaactaaaatgcaagagaattatttctaaataatgggtacccatcttcaaaactaaagatgcttccttagccacttactctacaataactaacgatagtagtt

SEQ ID NO: 177914 - DNA, 698 bp, Cannabis indica
aaggaataaaactgaaaataaccattccttgagcaaaatagcaatcaatcactttccctgaatttacctgagtttctcccactgatttcctcacaagttctttcaacacaaagtgaacctacacaataatttcaaagtaaaccaagagaaacaataatttatagttgttctttgaaaattaaaacgaaatgaagacgtgactacttacagcatcaaccgaagcttcagctggacccctaaaatagttgagtgaagactcaattaagcgcctataaccttgctcgggggcaatcaaatggggctgataaccatctgcctcagaaaccactttccttacattctgcagagaaagatgccgatcaaagggaagctttctcaaagcagcaggaagctggttatcaaagacgccataaatccggtcaccaccaggccgcctaaagattgaatacaaaggtaggaaaatttgtagacaaattgaaatcacattctcagagaatttttgacttccaaaaaatcactctcaaagactagtgataacataagatgggaaaacttgataaatgcattaccctccatccaaatgctccttgaatatccggtcaaatgcacgacaaaagttccaaaatacgtgtacaattgagcctaaaaaaataatgcttttagttaagcagttacacctgagaatattcttattctac

SEQ ID NO: 177915 - DNA, 757 bp, Cannabis indica
caaaaagatgacgataacactgtctttttttcattgcttgtttaaaaaagaggaaagatgaaaatcacattgctacttttacagatggtaatggcacggtggtggataatttctctaaagtagttgctcattttgttggtcactttcaaagtgtcatgtggaactcgaatactcttctttaaaggtggaaaaaaaactgcatagccatgggtccagtgctctcacttgacaaacaacttactctcttgaagccttttgcacaaaaggagattaaaaaagctttattcagtatacctagcaacaaattgctaggtccagacggctttgggtctgggttttacaaaaaaaatctgacctgaggtgggaaggaaatttgctcagccattggtcatttttttaacactaatcaaatcccccaggagcttcgtagtacaaccatcaccttgatacctaaggttgcgtgctacaatactctgtacaagtgcatctccaagcttttatgtttaagacttgccaaggtcctccctcaaattgtgcaatagcataaaggagctttttttcaaggtcgttccataggccataatatccttattctccaagacatcttgagtagctatagtaggaagaacatttctcctaaatgctcgataaatattgatcttcgaaaagcctatgacactgtcaactgaagttcattgaaaatctcttgaaagctctctgctttccttcaaagtctataagttggataatggtttgt

SEQ ID NO: 177916 - DNA, 532 bp, Cannabis indica
aatctaaatattttttagccttttttttttattatgttttgttcagaatctaataatgcttgtgttattattttttttttttttggttaaaatttatgttcaaacttcgatctaatattatgtttaaaaatttgtatcgttgttattgaattattgatctaatttaggctattaaagtttatatttgagatttatttgtaaagttctaacgtgttgtgtgtatttcagctcaatcatatctatatatatatatatataattgttttaatttttttgttgggattggatattgttttgattgaagtttattgtttaaattaaaaaataaaaataattttcctttcaaatcgaatctgaataaattatacatttagttaattaaaattatttttattatgtttaattgtatttttatacaattaattaaattattatttataatatataaaatttgaattataagaattaaatattacttcttttagaaaaaatatctaatatagtggctctttttgtgggtcactatatatat

SEQ ID NO: 177917 - DNA, 553 bp, Cannabis indica
agcggtggaggtggtacgcaaagtgtgagcgtgtatttgttttaactgagacatgtctgtacagtcttgtaagagtcggagaatacgggtttggtgggagcatgaaggccctccaatgttgtcaatggccattgtacaagtttgtgagattgccagagccatattgccgtgtttgaattgggaaaatgaaagcagaaaagtaatagagatatagaaagtgaagttgtgttatattctcatatatggaaagaggttcacacaaaggctattggctttagtgagagtaaaaggaaagatgaaatttcttgggaaaagaggatagtgagtaaaccgttagagagagagagaactgaaaggaggagggttggcattgtgtttttttttttttattttattttttggtaaggagaggagagcaaagaaaagatgtaaatggacaaaagtttgagaaaagaaaagaagttggtgtgtgttgggggttgtatgtggagagaaaggggttgtattgtagcgatactatctcgtccatccattgagaaacacgtatttttat

SEQ ID NO: 177918 - DNA, 773 bp, Cannabis indica
caatttattttattttatacatgctgtaaaacatcattataaaataaatcccaacccattataaaaaaaaactaacaatttaagaataaaataaaaaatatagtgtagaaaaaaaaagaaaaaagtgttattttggtctaaaaataaataaatatccataatttattaccattatttaaatttcttttttagttttatcattcttcttttcttttctccaaatgattttgagactaaatttgaaaagctgatttgattaattatatgaggcaactttttttttaaggaaatactcactaactttgagtatactaatcttcaatcaaaaatatatttatctaaaatgaacacaagatataatagatcaaatactcccattgacaagaacaacaacaaagacagaatcaaattagaaatatttatgtatgtactataataataaaaagggtagctagctaagagtagaagatgagatcatggatgatagatcttatttccacatctgcatctccatgagagtagataatatgtgtcatcttcaccatgagaagtggtctttaaattattaggcttcttctggtgatttggaacaaccaaagtagcctcacatggtctacaattcaaacacttgtttacacactgaggtggtcttgaccccaacaccatttttcctctcctcttctcttgatgaatattcaaaaacccacttcaaaaatcaacatcaaaaaacaaaaattaaatataatatatgtacatataaaaaccccaatagg

SEQ ID NO: 177919 - DNA, 737 bp, Cannabis indica
attcggtttagttgggcgggttagacctattttcaacccgctcaattaacatattgggggggttgtaattttttgggttatttcgatttgtaatttttatcaattttttcggttcgggttgagcgaattattcagtttgagcgatttacaatttttttttataaccatactagccacccataaattatatatggaatatattaatgtgtcatgggagtttttcggaaaaataattatatattgattaaaataaatgctaaaatgtatataaattgtacaaatagtactcacactaaaattaacctggtatagtcgattgtggtgtgagaatgtattagctcaaagttttatgtcatttaatgaatgggcaactttagtaaaattataaattttagtgtaggatccaaaatgtaaatttaatataatgcatttatttggtaaatttaaatttttagaaactaacttgtacatatacagagtaatatatgcataaaatgaataataatctatatctaggaactaatataaatatgaagtaatatatacatacaatgagtaataatttatatccaagaactaataacttgaatatatatagagcaatatatgcatatagggctcgtttggaacgccgtattagatcgtattgtattgtattatattgaattggattatatatcatatttttatataatactatgttaaactttaatttatactaaaatattatatattta

SEQ ID NO: 177920 - DNA, 688 bp, Cannabis indica
ctgatgctattatatttcaacatattttttcatagaacaattaaaacaatattagacatattatatataatatatataattataactgaatatatatataaatatttccacaaatgtattttttttttaaaaaaaagaaatataagaattaaaaatgcataaatttcatatcatatatatttttaaaaaatattattaactaaataaatataacttaataaaagtgagaagatgagagataaaattaaaaaaatatatcaatcaatttacatatatccaaaataaagatacattttataattagtaacataataatttgatatttcaattttatacatatctcaataccaaacaaatataaagagagttactatcatttctattcatcactgtccatcattcttaaactctctatctttctactatatattttttattagactttttagtgagttttgtgttttttcttttttataattttgtatacatagaataatatgttttcttagtaatttgtttaagtaaaaatctcacatatttacaaattatgttaggcttataagtaaatcatttctttattgatcacttcaaatttgtccaaaaaagtagtagtgtttttcttttattttatataagtgattgaatctaaaattttgctcaattaagtgcttaaatttaatagatatct

SEQ ID NO: 177921 - DNA, 879 bp, Cannabis indica
cctcaaacaaggtgattctaacatcacttcttacttcactcatctcaaagtaatttgggatgagctccgagaattccaatcttttacacgctgtacttgcagttgcacttgtggtgccatgaagaatccaagactactacaatcgagatcaaatttttacaattcctcatgggtctcaacgagtcctatgcttatgttcgggcccaaatacttctcatcaccctattccccccttgtctactatttttcaatgatttttttaggaggagagacagcgtggccttggttttaatcctatcattgttgcagcttcaaagccctctagtccacgttccaagaagccaagactgacttgcttcaactgccacaaaccagggcactgatgtaatgaccgaatagttaaatcatgggaattagcagacaattaagaggtttacttattattatgcgattttgtgcctcttagtagaaattagagcttattgtcaaaaataggcatgaggaaaatattttttcaataacggagatatatttgaatcctagatgcattatatatgttatatgtgaatttttatgaatttcatgttttatgcctggtaatagtggaatgggacgtatgacctatatagtcacttagatatggtttagtattttataaatagcagggcattttagatagacattcgatatgtcaggattataagtttgaccaaaatatattttggtggcaaggttacttgttggtaaagcaaggcgtaaattagtaatttaaccctagatttgtttttagtggctagtggattattagtgaaatcctaagtttaattaggttattctacaagctgaaataaaataaaaatttatttctttaacttatcc

SEQ ID NO: 177922 - DNA, 711 bp, Cannabis indica
acgccctctccatcatttccttcctgagggtcagcaacatgggagtcgacttcctccataaccgtatctaggagaattttcttacccgagccttttttgggtgtacaccatggttgaagcacgatgagggttactagaactttcctcaactttcaatgaaagcaccaaaatgtttattgagattttcaaaaaccaaatatgtggagcttaagaaaataaaagatattaaataatagacaagcagatttttttacgtggtttaggtattaataatccttagtctacgagccaatagaattaccctctttaggcaagtgtttaggtattgcaattgtttacaataatgatctctgtactcctcttttttttcttcttacgagaaagctctctaggaattttagcagagtattggtaaataaaaaattgttcactccctactcaaagaaaataggagtatttatagacacacatggggtaaagggtatatacccacctagggttttgcactccacacgctcccaaggtcgatattgctaaaggaagatctgaccatcgtgtggcgtatagctgcactgggagattttgtacaaaccaggacacgtgtcacgaaaaaggtctctcctttgcaatatactctctattaaggctattgggcaaaaaggtatgtccagaggtgcgtatgcgcactaccatggcctgacatggggggac

SEQ ID NO: 177923 - DNA, 795 bp, Cannabis indica
gcacacatatacattaattactaggaatattaaatctcataataaagcaaagaaagaaaaaaaaaggaaattgaaggagcttaggattggcataaaatatcaaccagcaataacgtcatgatcaacttctatctatctatctacacatatatactatataaggcaagacaaaatattatatttatgcattaatttttattatttatttattaaatggaatggaatataaaagttcaaattaaatatatatatatatagctatgcatcacttcatcagctagcagacatccattccagctcatatattgagttggttaatttggtattttatgaatagacatgaactacatacatatagaaactgcgtcatctttaatttatccaaattcatcatgatctgtcacttgtgggagatatttttccctttcaataaacagtagctagcttaacttgtattatataaagaaaatacgtttgataaaacttacaaggaaaatgccaacaaagaaaacatctaaattaaggaaaatttgaaattataattagggaaataattaggatacacttaaattatatacattttttacacacaataatgtgtaattaatttcaaccatacaattaaaataatatgattatacttaaaaatataaatgaataatatttattaattattgtgtgcaatttaaatgtgtatatatcattactctaataataattaagagtcactctctgttgtagatactacatcgaactaaagaatataaaagaaaaagtgtcggagtagggttatgc

SEQ ID NO: 177924 - DNA, 596 bp, Cannabis indica
aattgttttgttaagtgcataataaaagcttagtcttacaacattttataatataaatatgatgagatgtttctactatgcatggggctatagaccccacgaataaaatattgcattttaaaaattaaatgtaaatttttatttaatattataggccaaatagtagtaaagtccctacaaaaattagatatatttagtagagtgattataatgtagctataaatatttttttatgataaataagccctcacaaaataaaaatcctgagtccgtcgtttcgatatttttagcctatttttttttttcatattcgaacatgttatagttatttaagatattttataaaatttgaaataatttataatataaaaaataatatccaaatagtctatttcacacgcatataaaataaaatagtccgcaacacaatgtttgaactttgttctgagcgtgttaatcttttttatcataaaaaaaaaattgactaaaaaattattttagataccaaaacagataagaaaatatgaatataaaaaaatttgattaaaaattattttaaataccaaaataaataaaaatgtatctgtatatccttt

SEQ ID NO: 177925 - DNA, 478 bp, Cannabis indica
aagaggtcaaaatcaaaatcaatcccacacaaattgccaattgccatgggccaagctagccagtaaagtaagtagcataacatggcaccaaaagaggtgaaggtgacgtgacatttatatttatatataaatataaaaaatagaaaataaataaataaataaaaaagaatagcagcttctacacattgcgatttatagcagcagcaagcagtggtagttctattaacttttgcccatgcttttgggtaagtaggagtagtgggaaatgaactatgtaatatgacactattgtatatcagtcttcaagagtgacattattgatgagagaaagatttatttttttgacttttaatttcacgtaattcacaaagggggtaatcaattatatattggattaacccaaaagtgctttctagatctctttatgattttggtgtcaaaaaaaaatcatgtgatgatgagtgttggattaaattga

SEQ ID NO: 177926 - DNA, 843 bp, Cannabis indica
attctacatactcctaattaccccaatacatacactatcagctaatcacaatattcccattaaaactaataattaaacctgttatgacatttttggccccagatcgagtctccaagtgtaataaccaaaatatttgattatttttttttttcttctattacgatagtctagttatctcgatgtgaaaatagttattgcgtagaatataataattttttttttattattgttatttgaaagtggtatgtttctttacttcataaataaaatggtatttatttcttacatcttgtaagtaagagattacaaaaattaagtgattaattttgttagaaactatatttaaatttatataatcaattaaggaataaatcaaagaattattatttttatgaataattttaggtatgtggcacaccaaggatcaattcaagttcaaagatagtttatacataggagtaggagggtttgaatctctaatcaattcacaagcagattaggttatattaaattctatgtgttctatcatcatcacatttagttatttttttttaatttaaatctttttttttttggagttaatcgtgggccactaagttaaagaaacttttgtttcaaaaaaatatatataacataataagaagaagtcactagtgctagtggaggacgtggacatatattaagaattttagagctggagtaattaatagtggtttatgaggcaacaataaatgaagagagttactccatattatacgcacgtcaagaatgatattctctgcatggtagtttttttttcgaacttaattatagatagtattaaactagttttgaccgtattgt

SEQ ID NO: 177927 - DNA, 783 bp, Cannabis indica
ttacagattacgtatacgtggattatgtaatgatgatccttatacagtagctatatatatagtctcatgaatgttgtgtattgtaggataactaaatcattattaattacaaagtcaagtaaattattttctttttgtctatctctgcttattataaggtttgttaatgaagtttctctatcgatcaataatcaataatctgtgatgggattacatgcaatatgaatcgattattaatcacttgttaaagacgtagtacaatgctttttcctgatttgtaatataaatcatatataagacaaccttttcatttaatttttttttctaagaaaagtaatctatatactagacagtatttatagatcaagaaacaccagctctaattaaaaaagaagagaaaaggaattggtatatacacatcgatcctgattctggtcaagagttacatatagtaaaaagtaaacaaattataaaattgcaagtatgtcaatatcatgatcctattccaacaactcttatggtgagttttagatgttgcatatatatatgccttcatttccacttgattacttaacttcaaccgttttttatatattacacacacataaactcacatacacacataatcatatcatttataattaataagagcatatccgttaatgtgcctcataatgacaatcatatatttatttttcatataatatatatacttatgaatatgtgtgtaaaaatgttagtcaaagatgtaggagagagaaaagaaaaacacacataccttct

SEQ ID NO: 177928 - DNA, 734 bp, Cannabis indica
aagaacacaataagagtttcaactgaatcacataacccatttgagaattgaatatagcaaatacttgttatttgcctaatacaatagaatagaattacacaagggaaatactaactcttttgtagataacatatataaaggaaaatggtaaagaaaatattgttatgggagcatttcaatatcggattccataaattttgattaaataaataatacaagaaaccactaaccaattattgggtgtcacatcggtatgatgtgaccactttaaggtgcgaaatagaaatgctcaacatataaatataactctgatttgatgaaacgaataaacaccattaaaatgaagtacctgaaccgtactggaaccatcagaggacgaagctttagcacggtttcttcgaccatccaatatggcatggacattcacgtagctaatcataggagtctgggcaaaatcaagcgcttacagtgactattgtacaaactagtaaataatccacaatgaaattagaaaattaagaagaagaagaagaagataaataatacctcatctgcagtgtagtcagtttcagtactaccatccagttcaattgtggctccataccaagtgaaaacctttcacagaataacatccaaaaattcaaaatccacaaggagaagaaaaaaaaagtgaaaaatgcttgaaataaagaaaaatacagcaaatttgagcctgggagggaaagtgagccaga

SEQ ID NO: 177929 - DNA, 575 bp, Cannabis indica
ttttaattaatggtttttttattataatatcttcatccataatttctattttattaatttgatattgtatggtgaatttaaaaatttctcatttttaatttttgtttttggtttagatttttttaagtgagctctgtataatttttttttttttcaaaatttaatcttttgttcctataatatatagccatatttttcctttggataaacaatattgtagtgaatttttatttttctcatatctctccatttttgaatgatttctctatttttatttttatggtaaattttttttcttatataatatatcacttttttctgtattaatattctaaattagtgtctcacattagaaagccacaatgtaattagatttgtgtgtaattggaggtaattacacaatttggcatgtttgtctgatcatgtaattacaatgtaactatgtaattagaagtaattgaggggtttcaattacactctccaattctcatggccccccatgagaattgaatgtaattacactgtgcaattactaaaactttccatattacacattagctaactaaaaaatatta

SEQ ID NO: 177930 - DNA, 1342 bp, Cannabis indica
taatattttttatttttataattttaaaatgaaatttttgaaaaataatttttaaataataatatttcgatatacttatataaaacgtgccagatgtacaaaagtatgcacataaacagttcatggtgacagtttaccgaatgacactttaaatttacaagtaaaacgatagttgagagaatttagccgagaaaaaacttctttttttaaagaaaatttcaaatacttagcatacggaaataaaatttaaatattttattgtacgtgtaattattttttttattcgtgtggtaaataattatttaaatattatttttagcactataaattatttataaatttttgaaaatctacatgtgcttttaaataactacaatatatacaattataaaaaaaaaatagattgaaaaactctcctaaatacaaaaatagatataaaacctactaaaatacccctttaaaaaaatgtatatactacacttttttttgaaaaaaaaaaaaataagaatactactaccaatctcctattgcaatctcttattaatcaatatttttttcatgattgttttcatacccatgttcgtcataattataatatcatccatgtattttaatttttttttttcaaatttgttttcatgaagtggttttggctaccactatttggaagttataataaggaaattttcaactaaaaatggtagaagtttttctctatgtcattgttgaacgaaaaaaaatttaataaaattattattattattattattattttagtatatgaatatttctttcggttaaaacttaaaggaaatatttaattattaaaacaaaataaaaaaaagggcattttacataaatgtatacatttttttaaataattacaaaaaatgtgcaaaaaaacacaattttaaaaatatacacatttcaaaacatatttacaaaaattcatacatatttttaattaaattataataaatatattaatgatttaactttctatatatagatttgtataataaatatttataaccaattgatatgatattaatgaaaaggccacaactaattagcaaaatatatatattaataattaaaaaacataaaagattctaattataaatttgttatcatacaactcacgtgaatatcataactgttatatttttaaaattgaaatcatatataatcataattgcaagggaaatgaaaactaattatgatattattttaataatctgattatgttatatgattattaaaaaacttatagctatacgtatattatcataatctaatcataattatcaaattctaattatgttatatgattattaaaaag

SEQ ID NO: 177931 - DNA, 520 bp, Cannabis indica
aaagaagctgaccctccacgtccctctgtaccaaaatcttcagaaaatattatttgcacattgcgaatgtagttccgagaccagagaggctcaaaaacaagatttgaaaagcgaagcactgatagattttcaacaagttcttttcccaggtaatggtcaatcctgaacagcaatgatatgtatcaaaatttagctctagcaaaaatataattctcagaaatttaggagaagaagaaaaaaaaacctgaatatttggtcttcagcaaggtattgctttaaacacctggttagctcaccagatgattctgagtcacggccaaaaggcttttcaacaatgacccttgtccacccactttcagaagaagctttaagactagcacatctcacaacatccacaaatatgtttgggggtactgataagtaaaagagcctacgggctatttttccagcctgaaaaagagcattattgaagaatatcatgtgctcatagtttcaaaaggcacttctttctttttttttt

SEQ ID NO: 177932 - DNA, 640 bp, Cannabis indica
acataatctacactattgtaaagaagaaaataaaaagcaacagtctttccatgtatatagatcataaaagcattaacccagatccttaaatttaatctgaatttaaagctcataattaacatgtgatcatcagttaagtcataaaatatcataaacccaatttaaattacactatttactcatttaaaacacagtaaagaaaacagattaccttcagatccacgaaaatgcaaggcattggctgctaagcatatttccatcagcagaagaattatcttcacctccattttcaaaccaaaggaaagctagagaacagttctcaaaatctttgagacagttcacactccatcatctgaaagagaattagaacagtgaagatgaagtaaaaactggaaccataacaagacccagaagctgaaaatggctcacctttaagaaccaaaccgttcagtgaaaccaccaaaattgattaggtgaaaatataaatattatcaatgtttttgttgtcctattgaaactaagcacataaacttgaaatggaatagtttgtttgtgtcaaggcaaggatgattaagttcctagcaactgatcaaagccaaaaaaaaaaaaagctgtacagaacactaaaaagacaaagtta

SEQ ID NO: 177933 - DNA, 1017 bp, Cannabis indica
tttttgaaaaaaattctatcccacagtatgaaaataaaaaagttagaaatttcggtatgtcgtgtaattatctaaaaaaaaaataattactttgaaatttttggtacatttatattacaaattaaaggaaagaagtagtcggtagccctcaaacaaaagttttatctctaaaaaaagataagtaattaaagtggattaaatgattaattaactaaactagcttgagacgaacatccaccacttgtacagcccaagcccataaattattgaatagccgatcactctcattgggtacatcctaactctgcagatcataaaccaaacactacttaattataaaattttctaattctaataattaatcaagcttagttaaataattttgataaatcacgaaacaaaaaaaaaaatttcaaaaacaaatattagcacatataattacttttaaattgaaaggggaaaaaaaacaaaagatattattattccaaattaacaaatattaaacattaattaattaagtgaaaatgtatataagagaaaagggataaataagcttgccttggtagtccagatctgtgagaagcagcatgagaggccctttcatcagcggtaactgggtggatccagcgagagaagtcacggtcgaaataagcccaatctgggcaaaacaccccggcaaggcccactactcccaccaagtatgttcccactattttcttaaacgacaacgtgcataccccaaccacagccaccaccgcagccaaccaaatcaagcctgaccgcaaacctgtgtcgttagccatagtaataagagatagagagggagacacacttattctcttgttttgttgcctaatttgctttgctgattttcttttggacccccttaaacttaaactcaaactcaaaactcataacctatatttcttgctaaaaatattatgctcattttcttagccaagccaaccactacaactaaaaagaaaatagcttccatattattataggtggtgggtc

SEQ ID NO: 177934 - DNA, 684 bp, Cannabis indica
ggaactttataatttttaatcatcttatatgagttagtttctgttgtgcttccaattattttgttgaattgaaattgtgatttatgactttgttgttatatatgttttagtgaatttattctattcatttaagtatgtttatgtataattatttacttttacttcatcatgaccaataatttaatagttaaacataaactgctgtgttaatgtcgcgagctacataaaacaaattatctctaaaaatttagacaattaaattgtttcgtctaaactatattactagcacaccaactcaataatataccaaaaaaagtttataaaatacctacgaacatattaaaatttatgaatgatgagttgataaaactaatgaaataataaaaagtgctagtttgttagttattaatagtttattttaattttgttgaaacgtgaataagtctattcaattaatttttaattttttatcctgtgaattaatttttaattttcaatcatttaagtacttattgactgtgtatctaataatttttcacacaagcctaaaaaaaaaccaccacataaaaaacccgcccaaactatccaaaatcaatctaaataattttcttaattatccaatatccataaaaccatatgtacttttaatcagttcttcaaattatagagttacaaatatctatt

SEQ ID NO: 177935 - DNA, 749 bp, Cannabis indica
ttaaaaaccaatatggatgtctgacaaaaaaattttaaagcctaatttttttaaaaattgaagttaaaaaaatagaaaacattaaaatgttgtttttttaaattttttttttaaaaaaattaatttttctagttgaacttattcctttatattttctctcacatacctaggtctgggtttggggttgagacgtctgggtagttcggatccgaatccgggtctgggtacagggctagggcatgggtggggtcaagttcgagtttgggtatgaatctagggtccaagtctaggttcgggtctgggtctaggtctaggtctgggtccgggtcagaggtctagatttgtgtatgggtttaggtccaggtccagatcctagtccaggttttgggtcctaattcggggattgggttgttagggtttataccctgaaaatcctataaaaatattaatgattattaataaagagctgaacattttgatatatgcgtgaatattaaattattaatatttattatttgaataatttatttataaatattagaaaatttcttattcatatatgagtttatgacttgtaattgtacagagaaccaagatcacttagctatgaataaaacagttagcaacatattcaaattatagaatctttaatccattgttgctagtacggttcactgatgctcgttcttcgatacaagtaatctcagttcggattacgaatgtagtataacatcaaagtgaaagtgttg

SEQ ID NO: 177936 - DNA, 492 bp, Cannabis indica
gagcggtatgaagaagaatttggtagaattcgtatcgagatgcctcacttgtcagcagattaaggctgaacatcagagaccagcagggttgttgcagcctctaaccctaccagaatggaaatgggaggatattacgatggattttgtggtcgggttacctaggaccacgggtttatttgattccatctgggtagtggtggatcgatttacgaaatctgctcattttctgccggttagaacaacattttcagtggatcagttggcagaattgtatgtcagagagatagtgagacttcacggggtaccgaagtctatagtttcggacagggatccgaagttcacctccaaattttggcaaagtttgcaacgggcaatgggtacaaagctaaaattcagtacagcattccatcctcagacagatggtcagtccgaaaggaacaattcagatattggaggatatgttgagagcctgtgttatggactttgtaagga

SEQ ID NO: 177937 - DNA, 604 bp, Cannabis indica
gttcttttataaatattgcattaaatacattgttatatagctggtacaaatgcaaaaatatatgttccaaaaagttcaattcttcttgaaagctagaagttgttcatctttattttttgacaaatatacatataaatgcacttatccatttcatgaacactgacaaaaaaaaaagaaataacattattatgtatttagaagcagtagaaagagtgggaaaaaaattatatacagcatagaatgtatgagttcgttggtttaccttgatcattatcattctatataaaaataataattgatgagagcttataagtgagaaatgagctaatgttagagcttgatccattcacttcaagaacatgggacaagaagtatacctgcaagagggaaaaaaacaaaacaaaaatatgagttaatggaataacccaaatgatatttatcatattacccaatccaataatattttcaaaagattaaaaataattctatataaatatatattataataattgttcaatcaaatcctttagacctaaaaggtaggagtttgaattacaatcctcttctagaatgatgtcctacatatataatatatgtatatata

SEQ ID NO: 177938 - DNA, 662 bp, Cannabis indica
ttttattttattttttttgtcatttgtaattaaaaagtaataaacttgaaattttattgaaataataaattaattttttaaatatataattttaaaaaattattaaaactgtgcgaagcgcggatctattccttagtttttctaataaaataataaaatttaatcaatctcaattacaataggatacacttaggaccatagtattattacaaaattgcccaattaaaaaaaatattaaataccccacaaataaagtcatttttcaatgcatcaccataaaaatttccaatatatatattaccgtttcattgaattcagatcattatccaaatgagttctaaatttctaattgtcactaattgaaccactcattaatagataatcaccgaataagtggccaagtagtgtaagtaagcctattattattattattattattattattattattattattattattaattagtagttcctcaaccataaagtcatcattttgaaatcgagggacaaagtactcatttgggttatcatatgcaaatcaaattattcaagaaaaatatatcaataacttcggccaattcgattaataattcagtttcaagttgagctcttaattagatatatataaattattattgagtaaatgctaaaaaggtgct

SEQ ID NO: 177939 - DNA, 582 bp, Cannabis indica
aaaaaaattattaagtataaatacaaggcgagtacaaactagaatatgcgagtactattaaaaatagaattttaggctctcgccattccaagcccgttgaatagtagtaccatccagttctgcgagtcggtacgtggcgtcaccaatcttttctgcaatgagatatggtccctcccaattatccccgaagaccccatgtgctgggttcttggtatttggcattactcttcgaaggactaagtctcctactcgcaggactcttgtcttgaccttggaattgaaatatcttgcggttcgtcgctggtaagtcgcatttttcaggtgagcctgatcgcgcttttcttccagaaggtcgaggtagagcgactgtttttcttcgttttgtgaaatgttaaaaacgtctcttcgtacagaacctgcgccaatctcaactggtaccatggcgttgcacccataggagagcgagcaaggagtctcatcagtcgtggatcgaggagttgtgttgtatgaccatagaacttgcagaagctcgtctggccaaaaccccttcgctcttcgtagttttcctttgatggtgtgctt

SEQ ID NO: 177940 - DNA, 597 bp, Cannabis indica
atatgtataaatattaataatatatgttataaatttctcaaaatttattatatgttattataaactcaaaacttagagttttttattacttctagagcactgatcacaacaatttctctaaaatagagaaaattttaaaatatttaaagaaccgtaataaaatcacactagagctgattgatgctccaaactcctttgtcttttaaactttttcttaatatttattattcatgcttcacatttatagaatatttattattcattgctctaaacatattttatatattatttgttcgagttttaattttactttttgtatggagatatgtgtaaatattaataatgtaaattttaaatgaataaaatatattaaaatttagaaaaaaaaaatgaagttttgactaatttattttaaagaagttggtgtatgaactaatataaaagtttgaggtaaaataaagaaagtgaagttttggtgatatatttttaaaggatgaagtagagatgttaatgagagtgctctaatgtgtgtgtcatgctggtccgacccatattttttttcgtgcttttcaaaatatggtcgtgtagagtcgtgcc

SEQ ID NO: 177941 - DNA, 690 bp, Cannabis indica
atacaggaccttccactcagccccttgtatcgaatttctctggtaagactgattttattcatcaaaacaagtggattattgatacaggggcaactcatcatgtttgtccttacattgaattatttaccaacatctgtcacaagcctatattgtttactgttactcttcctgatggtaccaaaaacaagatttcttgtactggtaacaccaaagtttcacaagaaattgttcttgttaatgttctatatgtcccaaattttaaatacagcttgttgtctgttacaactttgatgtcttcagctgattgttcttttgtgtttcatgataattcttgtatcattcaggacaccaagaagaataaggtgattgggaagggtgaaagacatggagatcttttcttttttaaacctgattctaatcctattgttcttgctttttctgattcaatcataaatgttgacactttgtggcattatagacttggccacccttcttgtatcaaagaattttctttgaataagagttgaggaaggtgttgccagatcttattgctgaaaatgaagggggctttgttcatggaagatatattgcgcatgatgttctggtatgtcaagatatggtgaggctatatggaagccaagctgcatgattaaaacagatttgaggaaggcctacgacaccattgaatgg

SEQ ID NO: 177942 - DNA, 873 bp, Cannabis indica
aaattaaattaaaaagatatttctacaaataaaaatttaattgtgaaatttaaccaacacttcaaatttgcaaatagaaataaagttaaggggccggtatgactacaaaaaaaaagaaagaaaaaaagagggttaattgtattaaaattaaaatataagggagtttaatcgttaattactcttatatatgtgtcttatgccattggtagaactagattagcttgattaataccaacttctaattaattaagctactcaatgtagatttattttagaacatattattatcatgagataagcaaaagaaggatataataataactaattaattagtatatagtgaaagtgattaagattaattaccattatagccatccaaaatgcaagggcttccataatcaccagtgacatttaaaagccctgctcttgcagctaataaaccataacctaagtaactatatacataagaattaatacatcatcaacatgtcaatataattatatatatatttaatgatgattaagaatgagattaatgaatgaatgagaattaaacctgtggacatagagataatatttggagcctttgagataagtttccttgacatatgtttctctccattttttggagttggtgcatttgaataagctttttcagaaatgcataagacatttgaactgatccacctccaagatcaaccactccaactgtttctccatatcttttccaaatttccaagtaagtgtttattgctacctataaaaaaataatgaaaattcatttttgcttaaaattaatgttgaactataggcttaatcaaacatttaaaaaacatatatgattttttgtaagtgcaaaaaatatgattttta

SEQ ID NO: 177943 - DNA, 712 bp, Cannabis indica
aactatctttttttacttggtctttgtgtctgtgacatatggttgtcgaggcacttgattgttttgctgatggattcttggaaaatacatctatccttggaggtaaggctcaaataacataatccttcgaagatatactcatattattcctgagatgatgaacatgattaagcctaaacaaattaagcatctcaacgtgaataatgtcgataccaagaatattcctaaaattccttgacaaacttcgcatccttaggaatatgttcagtctctttgcttttaaagttgtaactatgagtttactttgagaagagcatgcatgagcttcatattttgaggagactatcatgctttgattattaaatttgtcgagttaatttattctttttgttgtacacgtgtcatgcaaccagacctattattttctgctcgaaataaagggatagcagtaatagatttaggttaactaataataataataataataataataataataataataataataataataataataataataataataataataataataatatttgctcattttgctctagcaacttgaagctggagttatggctaaaactagattaaaaatctaaggaaaaataaaaattacaagcaaagaaaaacgaagaagaaaggcctaaactctgaatctgatgtcatacgacgaagtcgattgatgtgtgattggaac

SEQ ID NO: 177944 - DNA, 863 bp, Cannabis indica
catagtttttggatttttgaatacagacataaactcaattgagttttttttagccggaccaatctagatattttggctggacgagaatatgtagtatcagttacttttaaatctttttttaataaatttaaacggagcctgtactgacgaaaaatagagaaatttacagttttacaaacattaggtacttatgtcaacttaaaaaaaattattgggtttatgccgcttacaaactcaaaactttaggtacttatgccgctatttacctataatatatatatagagatgtacatgagagaacattgttattagatatatatttcttaaaattatataaaatataatatttaattataataataacagtataatattaagtagagtgttaagcactcataatattttttaacaattatcggatggtaaataaccattttaatcaatgtatcatataatattatacacattactaaaattttccaaaacaaattaaacaagaaaatgccttataataaaaacatattaaaaagcaacgacaaagaataatactaaataaaatgagtaaacaaatatcaaaattagtaatgtacttagtgtactcatatggattttatcatactattataataataaacccccttctaaaaatatattttattttgaataataattaattaatcttcaaagttaaccacttattatttcttaaaaaaaataaaatcattattactaacaaactaataacaaaataagcaaataaccactcctataatattttagaaaaaaaaaaaattagttttttatctcattttttttttcatatataaaactacaaaatagatagatttcaaaaaaaaaaaaaa

SEQ ID NO: 177945 - DNA, 530 bp, Cannabis indica
attataaggtacttctcaactaaaatctctaaaacttgcataataatgtaattttcaggaatcgattacaaagcccaataggcctgaaatgagcaaatacctacgaatgaagttccccactttttgtatcgacagcgagtggtgtttgtgtttgagaaaacctggagagaaaaaaaaagaaggaagaaatggcttccaaaggaaacatcaatctcagtagaaacaaattgatactctcagctctctctatacaactttctttagattctgtaagctttttttttctttcatttctttagattatatattttatattttttttcattttccgtgctttaaaatttcgctcgattgatactcgtggtttgtaaagttcggggaactgggtttctttttgtagtctgattattcagaaactgtaacttagtttctcattagcttgaatttcattaggtgggtgtttttgacttactgttacaatggctcatttgttagtgttttaacgatttcatgcgtgtcaatgaaatggg

SEQ ID NO: 177946 - DNA, 709 bp, Cannabis indica
atagacaaattaactaccaaaacattaataataataataataactaaaacaaaattttgtaaccaaaacaaaaaaaacttaatcacctaaaattttagataaacccatctaatttgaaatttgaaattttctcataaaaaattcttgctctcgccacaaaattctagttatttgcaaaattgtgagaaataccgtagaagtaaagtacacttcgaaatttattatatgatcacaaaatgttccaaaaattacttaaattatatttgaactttttaaatgtgctatttttttttttctttcttaaagtttgtatacatatttccatatttttgtttgtttccctgtaaatgtgcgaaaataaaacattgaatgcaattgggctgccttttcctttagtcgatcgattgagcccactacaaattaaagagagaatatgctataaattatattaggaaaatttacatacattactaatttttctcattttattacttttctactgtgacacgcttattgttatatttatactattttttttttctctattgtgtcaattatttttcccaaaacatttaatcataataataataaataaataaaataatgagtagttagtgtcccctcacattaaaatttaaatttttttattttattagtagagattgattagacgtgagatgtgacaaaaatgacatcttcttttcttttt

SEQ ID NO: 177947 - DNA, 674 bp, Cannabis indica
ctgttaaggtactcaattactactaagtatagaccttctccacctaaattattttaggttctaccatcatatttcttctttcatttcctttttttttttaattacttgtcataatttacttagttccatgttaatttaaaggaatttcctaaaaattgtaaattgaaaaaaaaataaactgtaaaaatcgaaaaataaaaattataaaaaatgtatatttatatatattttgaatgaaataaatattaagattgggtcaaaaatgatactttgtgtaaaaatccttaattttattttacttttggtgatgtgttgctaactacttacctttaccactatgaacaaaataataaaccaaaataaattattgggtaaatattattttggacaatatattttgcaaaagttatcgatttaaccctctgttttattaaatgataaaatggatcatgtatcttttaaaatagtaaaaataggattctgggcttaatttttgacaacttttttttaatataaccaacttaataataattcctaatacgaacagatacaaaaaatgtaaacagttttgtcatagcacttgtagatcatattataattaaattttatttcgataaaaaatcaattcagagtcttatttgtaccattttagaaaatacatagtccattttgtt

SEQ ID NO: 177948 - DNA, 994 bp, Cannabis indica
gtttgaagaaaataataaaaagagacaaaaactataaggaaaataaatataaaatattaatatagagttatcataatttagataacaaaatatttttatgtatcattattttattttgttttgaagataaaattatatttcctcttttgtttttagaataattataagtaatatatatacagaaaaggtaaaaaaaaaatctaaaatttaattttatacatataaaaattttctttctcttagttttttttttacattttaaataaaaaaatattaaaaaataaacacaaacttttttacaaaaaatgttattgtaatcaagtattgtcatacaggttcctacataaattttactatatataattacttattttgaaaaaaatttattatgtaattgtctaattaatttgttaattcatttcaacaaaaataatatatttaatttaacttttacatgtatcttatacatgtacactataaaacaaaaacaaactaaataaatttataaaaaaaatattaataaatataattaattataaacaatataaataagacaaaaacttaaaaaaacaaaaaaaataaataaataaagttacatataattaaacaaaaagtaaaaattctaattaaagtgaacaaatacatgtacatattaataaaaaaaaaaattaattgaagtgccaaacaccgaaagtggtgacatgccgttattagggcattttcatatcagatctctcaacttttaatttaataaataatatgagaaatcagtatttatatatataaaaaatactaataacaattcattattgacaatataaataagataacaataaagaaagaactaaaaaaaatataatataattaaatagaatgttaaaattctaattaaatgaataaatatatgcacttattaataaggaattcgctaatgaatctatttttcattgatattataaaaattattcataaaaaaatcaattgataaaaacac

SEQ ID NO: 177949 - DNA, 802 bp, Cannabis indica
attacagcccatttcatcttttttttttattatttttttaagcccaagcccaaaaatctctaagccaacacaatcaatcttcttttatattatcttttctagatattttatctatatttttcttttttaaaaaataaataaaaaaattattaatattctcccaagataggtttgttagagagatatgtggctaagatgatttttttaatttaaaaagagattattaatatttaaaagattgtttatttaaaagattgtttaattttttgggtttaattattgggtttattttttaacgggagatcaaacctaatcgttaaatttaacagaatattcttttatttttaagtatattctgttaaaccaagaaatgccgttagataggcacttttaatatataaagatatataaaattcctcattaattaaataaatttattaaaagtaaacataaatattttttttataacaattaagctctcacattctaaaaattttgcatctcacctatgaattttttttttttcatttttttaaatctaatttccaaatacatatagagataattacataaggtactgtttttttgtaaaaaaaaaaaatacatttttacgtttaattttttttttttttactattttacggttttctatagaaacaacaagaaaactacataaaagtaacatgaagcttggtcagggcacaaagtcaataggagaaagagtggtttgattttctctccaaaagtcaggtttgaagttaaagaatctatccaggatttactatgtaaaacccggtaaaaa

SEQ ID NO: 177950 - DNA, 518 bp, Cannabis indica
gaagacaaaaaaataaaggaaccaactttttgagttgaggaaatttaagaaagtaggattttgctattggtttgaactaagcaagtgggtagtagtagcagtagctcattgagctaaatcaattatagaaatatttaaagcttttgcataaagaaattttcctcattgagacttggcttacgtagtaagtgatcaaaatggcagatcaagtggctcctacttgcattagtttataggggttatgctaatatacaaacaccacgtgatgcatatcagaggtacaatggactcggtcagacattactagtaccatgaacacaaaacataagtaaacaaaacagaaagaaaattcaatataatacttccaaattcaagagcataataaaatatgtaaaccttcaatcaaccccaaatgttaaacatgctttgcttgatgcaattaactagtttgaaaataaaaaacgaaaaacaaagtcaagaaagagaaattgaaatacctaattcttatgaaaaaattc

SEQ ID NO: 177951 - DNA, 565 bp, Cannabis indica
aaccaagaagtgaagataacattcttttagttcatataaataacaacaaataagcggcagcccccccaaagtgaaggcctttttggctgtgatttcgggtatgactgctctggttttgctccgatttatcgttcacgatcacgataacctctttgttgctgcggaggctgtgcactccattgggatttctgtgcttatctataagcttatgaaggagaagacttgtgctggtataactttttgaccattcttttgcatgcttttgtttactcgaataggtttccgcttggtgaaaatcgttcgtcaggatttaggggaaccaaactttcggtctttaacgattatgatattaattcggtgactatccctaaaaaaatcttttttttcttgggtaaattgggattcattcgattatatcgagatgaaaatttttagatttttttcttttatctagtaattttatttttctactatttttatcaataatttaaaatttttaaattttttctttatttctagaaatctatagtttaacaaagaacccttttcttgttagtatttttgg

SEQ ID NO: 177952 - DNA, 846 bp, Cannabis indica
tgtaagtagtctttatacttgtttgtaattgtttgtgcacaatacaagtttattgattttcaaaagaaaaaaaataaaaaatgaaactacccaccaatcactatcttgttttttcatttttttaggcatgaccatagtcatccggttcttccaaatgtgatacatagtggctgcaatggcagccgtaaaaacttgcttccgaaatggaaaaacccgagatcttctaacccgccgccgaaccaattgtttcaaactcaagttcagtgccctccaacccaaccaatctttgatatggctcaatgacaagtgaaaaacaaatgctcaatagtttcattcgcatttccaaccactaaacatacttgatcttggcacactttaaaccgaaaaaatctttctctagtttgcaatcagtccaacatagccaaccaaagaatgactcgatgtttgggtacattataacaaccccaaacctgtccataccaactaactttctcccccattttattcagtaaatcataaccaaatcggatagtgtattatcgacattgctgcagctgatattctgtcatgattctcttcatctctctttcactttgaaaatttgttgccaataccaacttccttgacttatggaatcatacatccaccaattattgctttgtatataaacattgtacacccattttacccaaagattatcttgcttttgagccaccgcccaaacatattttcccaaggtcccttgattccatggattcaatttcctgaagcctaaacctccctcattcttgggtttacaaagattaccccaaagaaacatagctcgaccctccatattcagtctct

SEQ ID NO: 177953 - DNA, 856 bp, Cannabis indica
gtttattatttttattttagatatatggcagaagtaatgaacatagaggcaatgaaatttcaagctaatatacaaaggaggacagtgagttattgatgctagattatagaaaattgaaagaaacaatttcttcaagaactattaattgattggagcaagaacgagagaaggtcatgaagaagactctttcaaattgatctggttaatttctttggtaataattagctttttttcaataaattctcattcatattaataatttactatatttatattttattagcaaaatatgaatagataatgtttgattctaatttgaagtaagaaaatatttgtatgtgaattgtgattatgaccagcatatgatatatcgtctttaacaatttgcatgatgattaattgagcctgagaatatggtgtgaactaataatattcctaactaatctttcaaaatattttttaaaaaaataaataaattatgtagtttcaaaatatgtatataatgtttgttatttttaaaaattaaatgatggatcatatagtttcaaaaatgtatataagagtttttttttaaaaaaaaaaatatattaagcatttttttaaaacatttttttaaggatttttttatttaatatatattaaaggctaatttattgtaatcctatcctcatatttttagttttcttttcaatttttttttcccttatcaaaggttattgaagtaaatctttttaattaatatataatatttttttttctaaaattaattctaataatgagttcttagtattgtaatgagaaatgctaaagggcaccactggtgcctagcaccctcctaccgtgtcaatatcgctat

SEQ ID NO: 177954 - DNA, 775 bp, Cannabis indica
ggaagagatccaattcgccatagttgttccactgaagctctccttcgtcaaagtctggtgtttttttttttttgtccgaatagaaagtatagaagaatcagagagtgcgcattttagcaaaacgcagcgttctgagaagagaagaagagacttttttttttgggtattagaggatgcgtatttttagcaaaacgcagcgttttcggtggagaagaaagagactttgattacgctaaaattacgagacggtgagcgattggtttcgccgtaatacatacgattggcgttcacggagagagaatgacagaccaacttactacacgtgtcatgtagggaagattatgtgaaagaggagtagtactatttatttaatcgggttttttcatttttacacttcaaaacagtttttttttttacatttttaaggaattagacatagaaatatatattgcaaccagcgctgcaacttaaattgtaataaaaaatcgtacataaacccctactgcaactagtgctggaaccactttagaaactcaaaccgtaaatttgaaaaaaaaaacgttaaaaaatagtatatggggtaattccccttcagtatatactattttgctcatagtgtatgtggttttgtttggtcggtttatgctacagttataaaaatttaaatgcaacctgtccaattagaaaaaataaaaataataattagtaccaataaaattaatagatttggttaggttaacttgtccaaactcaccacgaatttgttttaattaat

SEQ ID NO: 177955 - DNA, 767 bp, Cannabis indica
aaatagttgaagggataacataaagcttggtaattactctcaccaactataattttggtcttccacgcgcaatcttattattataggatatataattgacacgtagacttaattctcaattaaaaaaaggataacaagttaataataaccctagtatgattattctagcatgatcaaaacttatgagaatatacgaccgagacagcatttagcggcacactatgcatagcatagtaaagtaaaaagcaagatatagagagaagttaacatagttacgtatataatgatcatatgcgcgacaactcattttgaacttgtagtacacgaatgcccaatatgcgaccgatacaatctcaggtgttctatttatagaaccccgagagattcatgcatcggtaaaaactccaaagaagttttatggtatttttgaattgtccaaagacctcatatgcgagtaacaccagagaacccgaaagtttatactcaggatgtgggtgggcgatgtgcaactttattagtcgtacttgtttgaatattaataagaatggtcaaaattgttctattatttattttataggcatttttttttttattttaattgaatgtaattaatattgtaacagtcttgtctactatttatgtaaattaaaagatcacttgctttctatataaatgagtgatccaatcagactaattaaatatctttttaaaaatagattaagcaaatcgagctttagttgaactactatattaaatctttttgtgtt

SEQ ID NO: 177956 - DNA, 640 bp, Cannabis indica
tgaagaagttccccatgtgccatgaccaagtttcccgggtaccatgacgagtccactcaggtccactcatgaccaaagtggagttatgtccaaagtggaggaccactcatgaccagagtcgtgaggacacgtgaccaacgaccttctaagctatagttgtgaggacacaaaggacatgtgaccaatgacctttagagctagaatcgtgggacacatgaccaacaacctttaaagctagagccatgaggacacgtgaccaacgaccttcaaagctagattcatgaggacacatgagaaaaaatgaccaacgacctttagagctagagtcgtgaggatacgtgatcaacgaccttcagaattagagttgtgaggacacgtgaccaacgaccttcggtgctcaacgttgggcctacctctgaagtctaagtaactcatacaaacttgagtctacgtgaagagacactttcgtgctaggcatgtaccattagagctagtctaagaatatctacaagaattatcatttttggaggtaattgttttggaatattattttatattttcaacttaactcaactatagttaggaacaaaaatatgtcgggttaagaaaccttaaaccctacaatgcaaacctatataaa

SEQ ID NO: 177957 - DNA, 824 bp, Cannabis indica
tgaacccaaatgagatcccaatattttcccccaaaaagaaaacaataaattattcacaaacatgaaaaaatgaataaaatattcaactaaaaacaaagacacatcactatcaacactcaaagagatcaaagctaatcttgtaaatcatcatcatcataaataaataaataaataaatattattttaaaattaaaaaattaaataaaaaagaattatataataaggtttaatttccctatagtagacttgcagtggctttttgctattataacctttttttttatggtaatgatgaatgtggtcagcaattttactataaatatatctatatataaatatgtatatatatgtatttttttttttttggacttttggggtagcaatgagtgagtgaaaatagttacttttttttttttttttcttttttacaaaatttttgtgtcgttttatgtttgtgtcttttgtgtggggccaaaattgaaaattgaaacaattttttttccttcctttaaatgtaataaatattatatgaatatcttaatttgcatggatatggtatggcacgctttgtagtgtaccattttggtgtaactttatttgccctttctatgtgttgaattttatgtttttggttttttaatgagtgaagaattaactcttattgtttgtagtctagtcactttaaaaaagaaatgtgttaagaaacattaatggttaagtttagaaaaattaggttaagaggaagattaatagatcacatgatatgatgtggtattgtaattaaatatcggttatcatatattctaatttattaataattatta

SEQ ID NO: 177958 - DNA, 1113 bp, Cannabis indica
aaaaaaatccctaatatcttctctatataaaatgtggctatataataaaattcttagtttaataatttttttttaacatttcttttttcttttaatgaaaactaactggagattaagagcatgtttggtattgttttttgttttttgttttttgttttcaaaaaattgtttttagaaatgagaacaaaaaatagtttttgaagtttttaaaaacaagtcatgtttggttagtgttttttaaaaataatattgactaaaagtgaattagtttttaaaacagattttgttgttttcaaaattcttgttttttgtaactttgttttctgaaaactgttttcaaaaaataaggccaaacaagccaaattgttttcaaaaaataattttctatttttaaaaataaaaaacaattttttagttatgatgtcaaacatgcactaacatttccgttaactttcatctacatctaccatccaccttgtatattattaattaaaaaaaaaaacgattactttctaattttataattttattatggtatctacacatttgatatcctgtgttttatctaactacaagtttgatactttgtatttttaataatacttatttcgtatcctgtattttaaaatcatacctatttggtaccttaaattcaaattttttttgataaaatttaatcagaggttagccatattgtcaaatgtataattaattatgtcatttactttctactctaaaaaattttctaggatggaattttttttaaaaaatactgtatttttttttttcaaaaatgtatataaaaataaaaaatagtgtgaagagagagaggtagagggagagagagaattggaaaagaaaaatgataaaaaaaaataaataaagagaagagaaagaaagaaaaagtcagataaatttacatagaaacaataacaaaaaaattacaaaaatactattgcacataatttttaactatttctataattgttataattttattgatagaaaatacattttttgatgtatttttatgttgtatttgctattgattgtttgttattttcttgtcacttttatgtaagattattattgtttttcgtattttttttttat

SEQ ID NO: 177959 - DNA, 764 bp, Cannabis indica
tattaggctgccatacaaaggaaaaactctttagtcaactgggaagatcattaccaacatggaatttaaaattacagatctgagagcatgtttaagaaatgaaccttaatgtattgcaatgcttcttcacaataatatataatttaaatattttgccaaaaaaccaataaacactaataatcacaatcatccaaagtgcattaaaagaatgaataaatttgttggcactgtacacttcactgtcgaattgaaggttaactattctaaacttcacaaaagagacatccatactttttttctctaaggtccaacaaattgaagaatctaaaataactttgtaaagataagaatacagtaactacctccgctgcttcttgaatatctgtagtggcaagagagctcacatggtcttttgcaacagaatccgatgcgatgcccttctctttaccaagcttcaccactgatttcaccattttacttttgttaagaatctcccccagctctgcaggaagattttcatcgagttgttttgtctgtagagagaagaagaaatagaagaaacgaacatgattatagaaagaaaaaacaataaaaattaaaagatagctgcttcatagaagaattgaaataccttatctaaataaagctcctgatttctacaaggcgagctagtacaggatgatcacggcaaggctgccctctacgatttgagaataagatagaaaagtgaattgctttgggcaatatgtacaacagaagaagct

SEQ ID NO: 177960 - DNA, 858 bp, Cannabis indica
atatttaagtttaattattaaaaataatgttttatttcgatatttagggttttgaaaaaaaaaaaattggtgagaaaaaaatcacaaaaatcatatttttgagtgcaaagcactctgtctgagtgcccaagctgcatgtagcctcatccgcacgtaggaggctactggcagcctcattggcatgcccaagggctgcattgcagcctcagcttcggacaaaatgggtgcttttaacacgggctagcagttcagacacaggtggacatcaccttgtttgagccctgtgtgctgtggtgtcaagcgacaacacccaatggaccctaaaacttcaaactttcatatctctctcattttttatcgaaattgagttctgtaaaaataaaaattacttaactttcacaaagaatctaaataaattattttcagaacaataataaaattatttttatagaaaaattttgtaattcacataaaatcatcaaatcacacataaactaacatgaacacatccaaatcaacaatcatcatcttaaatccatatttcatgaaagtaaatctttaccatggctctgaggccagtttttgggatttattttaccaggatctagatttactaacatgtatgtttcattaacaccctaaatatgaattctctaatacgatgaaattaaacacataagagtttaggaaacctaacattgatgcagcagaatattaatgactcattctgctcagatctctaatccttgttccttctgtcgcagagtaataaaaagatccaagcctgaatctgtttctctccttcggttggttccactgtctctgctctatgattgagtacttgactttgctatgtgt

SEQ ID NO: 177961 - DNA, 806 bp, Cannabis indica
aataggtggcccacctctacactgtctattttttgatggacttctttattttctttaactaactacctttttttttttttttgaaatagttaagtaacaccttttattaccattattattattattataattattattatgagtaaatacttaaattaacctaataaataagtatttaaatttaattttttgtggtaataatacttaagttataattttggaacttctataagtacctaattaaataaattgttacgtgaaaattcttgattggtccaagtcattaaatttttttttttgctactgaaaaggagaaccatttatttatcaaacaacatgatgttggtgagtacatggggactcacctcccaaaagttcaagtaacaattacagtcatgactaagcccccatttagcaaggagatgggcggcttcgttagactctctaggtatccaaaaagaaacaacatcataggaggaatacaacctcataacactaccaaacagagaccagagtttccaatggggcaaagtggaggaagacatggccgacactagaacttgacaatctgaaagaatgtccgccgccgtaaccccgagatgccgccccacctttaggccccaggacatcgccaggagctcaccgtggatcggagaggaggcatgcactttggaagcaaacagagcaagtatcgaaccactttcgtcacgaaccaccactcccacagcttctcagttatctttagtggcatagtccacattaatccgtattcgtcccggccgaggatgagtccatctgtgcacaac

SEQ ID NO: 177962 - DNA, 819 bp, Cannabis indica
tccagctgtacattttccataatctccacgttttgcacaccagagacattacctaatacaaatccatctgtcaccttctcacaatatccatccgtacgctgcaaattcgaatttgttgtagtgggcgtaccctcttgtacgaattttcttttctgtccaacgtcattgtcctttccagaaacggtcactgtacccagcacctggccctccgacgacgatgaagcagtggtgttcttgatctcctccggtctctggtttcgtttccaagtgcgcctccggtatggtttcccaacatcccattcagggacttcctccctgaccaccagcgatctgatagaccccttgcccttcatattaaaacaatttgaccgtcccgtatcgcttttaatccatgttccatacatcggaacagcaggaccttccgttggaataaccatatataagagatgttcattttttcttgtgaaaaaatgtacttatctagagatccgttaggcatgaaatcatatataagagcccacttctttccttcaacacaaaaaccaaccaatctcacgatattgacatggtgaacttttccaatggtagctatttcattaatgaaatcttgaccattattagtcttgcatttccctaacattttgactgcaacaaaaggaccactacaaagttgtcctttatatacagagccaaatcctccttcaccaagtttctccttaaactctttggtgatcttcctaatgtctcgataagaatatcgtataggcatgagattgttatgactttggtaggaaatcttctatgtcattgtacattgat

SEQ ID NO: 177963 - DNA, 832 bp, Cannabis indica
tccaattttagtaaaaaaaaagtctaacattgatgatagtcagagggcataatttagtacatgtcaaagttcaagggacatgatttggtagatatcaaagtttgggagcataatttaatacataaacaatttttgaaatagtaaaactgaatgaaatttgacaaaagttcttaaatccaacaatctcaatagttcatggggcatttttaacgatcttaaaagttcagggggcatgatttggtacatgtcaatgttcaaggggcaaaaatcctaattagcttaaaaaaaataaggaaaatacttcatatattaaatatttttatatacattagtattcatatatatatataaaaataattttaaaatgcaaaagtttgtgtttgtcaatagcattggaaagtgaaaaccacatttttattgggttttccttgccagtcaactaaagcccaccactttcacttagccaacattaaaatattaaaaacctaaccaaacataagaaactttcagattctcattcccacttctctcattaccgcataccaaacagccccttagtgatgaacttgaatattataattaaataatgcatgtgcatggctccttgcacatatatatgtgcattttatatatgatatgatattattgtcctttgtttcaactttgtgtatactacatagtttagtgcacactataagcttgtatgaacaacagtaatagtgtagagcaccaaaaacacaaacaaagagaaaaaaaaaatgaaaagtaataaatgcagttgcaccttctcactttagttaagagtcttcatttataaactaacaaaaaccta

SEQ ID NO: 177964 - DNA, 786 bp, Cannabis indica
ataagatattttctagatagtaatttctagactacttattatttctaatatttaaataggaaaatattatactttgtgaaattaattatttaaataattaattttggtacaattttattaagtatatttttcctagtattaaatagaaattaataattaagccttctctacacttaattattatttcttgaatttaatacatttaattaacttgaaaaatctaaatatctaagttgattttcatcatgatacttaaatatttattgatttttcatgacacttaattaaatagaaaattatttttaggttgaaatttaatttttcaacttaaatttaaataattttcaatatatatatttttctttattttattaatcaatttcgaaatttgcattttaattatgcaatattttcgaattttttttgaaaaatagattgagttgtaaattaattatttattttaattaattcttggaccaactacaatcaatgattttttcatttaattgattaatttaaaataaatgaatttaaaatatatatatatatatattattagaaattgaattaactagtcaaaagaaaatctagataggtgatatttttgcttgaagtatttcttttctattttttattattttcgaaaattgtatttttatatactttaaattttcgaacccaataaatatattctcaaaggaaatttttaagttgctaattatttaatttaattcaacttaaattaaatttccttaatatttatatttaagattattactaagatgg

SEQ ID NO: 177965 - DNA, 506 bp, Cannabis indica
gctataactatttatgatacgaaacaaaaggtttttataatttattggttgttgtaggtatgtattataattatttgtgactgattaactatttaattgggttttaaatagaataaatagtaaaagaaaattgtattcattgtttggggaaccttcaatataatgctaaaatataattattgtaatgaccaaaatatttagttattattttttattataatagtctagatacctcaatgtgaaaatagtgatagcattaaatatggtatttttataaattgtgagaattatgttattattctaatttggactaatttagtatgggcttttcttttgcttttagtccactacgtaaatattggacatataaattagtgagttattgttattattgttattctttcaattattgttatttgcatgttgtgtattattaagtgaatattagatttttttttcctttttataagtcctattttgaagtattattatacaaatggcaatag

SEQ ID NO: 177966 - DNA, 600 bp, Cannabis indica
tgaataaatgcctcttgagcttgaaattttttggctaaagctcactctcatcatcaagacagttattatatttttcccccaaagttgagctaacattggagccaacaacatgccccctcaattaggcccaacacaatcacaaacagttaaatgcttctgccacgacacccaccaaaactaagttttggatcacatcccctcaggcccaccagaattagcaaaaacacacccaccgacccaactctcccaaccttcaacattaatggacctgacccaccaccagcacaacccgaagccctaggcccattaattaaagcaataccatcttcttcctcgggcccacccaatttagaacaaacctcctcctcaggccccttaccggagacacgactacaccttcccaaattcaaattgtcaccatccagaccatccgaaacaggtacgtgagcagtaccctttccatgcacatcagaacgtttactggaaacattaatcgaaatggcatcctcaaccctaggcatggcttcaaaaaatttggggatccaaatggccttgctgtgtttccctcccattgctcgaggacctccagtcaccatcttt

SEQ ID NO: 177967 - DNA, 666 bp, Cannabis indica
tttttcaacactttagtaaaaaaattttagaaaaaaacttttgaaaaagtagaatttttctcttcatttctctctctatttttcggctggtgcatgggattcaaagggctgggttttgttcaatctttcaagtgaattctcatcctaatctaagcatttttccaagctaggttagctctcttgatttctccttgaaattatgaaaaaaatgatgaatattgagtgaaatgcatgatgtttttggtgattgttactgctgattattattgttgttgttctttgtttaaatgttgaaataaataggtttaatgagattgtatagcatgcttgagttccttgttcttgtaggttagatttttatgtgaaaaagttatgaatttttgaaagaaatggttcattttgtttctgtgaaattgctggatgttcttgtgtgttttcagaagcttattcatgcttagttgagtagaattaactaggtttggatgcatgttagtggatttaaccaagtttgagttttggaactcaaagcttggtctttaatggtgaattttgcctctgtgttttctgggtggttttgaggccttagatttgttctttggggtgtttagaacaggtctggaaagtttggtaccaattggggttgaattggtcgagttatgagaattt

SEQ ID NO: 177968 - DNA, 739 bp, Cannabis indica
cagtataatgattttttgctggagtaacatcagagtttgctccagcagggggctgattcatgctttctggtgccttcttttttgcatcagcctcggaattcgttgaagtgatggccattgtaatttcattatgaaccaaagaagcagaattcaatgttgatggtgtaaaggaaataggagtactgctgttgttttgaagattgtccaaaggggattgattgttaccaacaacattctggtttaaaatggcatgagagaatgtgttcagagtgtttgacgattccccatacagcagagtgttgggttgtggctgaccacgaagagagagagcaggaattgtattcatgatggttttccttgctaatcgggtaactaaaggccaagcattgcctttggagaagtctgttctatatcaatcgtaacccgaagatggcaaagcagcccccttgatagtaggcccgtaagcgagttctggttctataccattatcaataagttcaaggaaagttgaacatttctgataaggatggcctaaacaaccacattccatgcaccattcaggcagtcgctcatagcgaaaatccacccaaaaacttgtctcggatttgttgcagcggatatttcgacccttctcaatggtttagtacatcaattttcactctgatccgcaagaaaggcccccagccctcattcagtgagtcagtaaaaacctccatgaattccccaataatgttaccca

SEQ ID NO: 177969 - DNA, 704 bp, Cannabis indica
atatatatattttttcttcttttctattgatggaaatgacacttctcataaatttttctcaatctcctacttccaaaataatacccacttataacacttcatctcccccaaacttataaaaagcatatggcataataatgtatattgggcatgaaagtaattaaaggaaacacattaggctcaattaagtggttaaaattttgaaacaagctaaggctcgacttgggtatactaaggacaaaattttacaggtaatcttcaagggctcaatcggtccaaagaaaattgcctaaatcattttccaaaaaacaatcatcaaggatttcgcttcgagagagtaagtcacgcaagttctattccattccaagcaaacatttcacaaacccaagtagaacacaagtgatactatccaaaaatcaataatttacatctatatgaaagaaaatttttacaaggtcatccaattcaatccaaagagtttatgaattaagcacacagtttaaatttcaatccattgcacacatacaatagcagtttaatcagtagactggctcatttatcaacacatgaaaattaaaaaaaaaaaaactaaactaagttaataactaaaacaaagacagtaaaaacataaaaatttaaatcctcccccaaactaacgattcacattgtccccaatgtgatataatattcaaggtgagaaggac

SEQ ID NO: 177970 - DNA, 659 bp, Cannabis indica
acacattcaaaatagacaaaaatcccaaaattcttagattaaagaaaataaagtgtataagataaaaaaaaaaagaagagtacgaaataatctttaaaatagctaaaagagaacgtacttgtcgtaatggtggatttgcttccaagcatatggggcttttaatctagtggtgtagtccaaacactattaggtgagggagatggtgtttcaatctagtgatatgatgatcaaagcaagatttaagagagggaggtaattggagtttcaatttagtcatcaaagcaagatttaggtatatatatcagaaaaaaaaaaagaacagaaaaaaagaaaattctaacaacatgaatataaaataagagagtacctgctctgacggagtatttgcttcgtctgatttgcttccaagcagacgataaaggtttgaatcgtgtgtatatatactctaaacgagataagaacacaaagcggttgagggttttcgaaatgtaggtttctttttaatttgctttttttatttatttatttaaagtagtagagaggctgaattgtaaaagacaaatatatatttattaaaagaaacattttattataaagtgaaaatacataaaagctctttatgaaaattacataaagacccttcataaaataaaataaga

SEQ ID NO: 177971 - DNA, 674 bp, Cannabis indica
aatacattattcttatatatgctattctattatatatctccacccttgatctattacgatgtataagttggttttttcccttatatctacgtttcatccttaagttattatttcggttttaaagtatgcaattgaactttacctgtttgagttcagatatgcagattgatgatgaagttgtggcgggtgatgagcctgtggaaatggctttgaataggggtttggagaaacaaatttgtaatgctattgatccatcctttcttctacaattcgtatgtcattttgactctttatgattctctcacatgtctaattttatgaaaaagcattttctgcattacactggaataacaaagatacttttttggggtcggatgttctgcagacaaatgttttgtttggaggaatttcaactgtcaagggttcgcataatgatccagatgacagagaggttgctgctgttggtgcagcttgttcttttctccatgccactttcaatgcattacctctggaaagaatcatgactgtgttggcttatagaactgaacttgttccagtactgtggaattttatgaagcggtgtcatgacaaccagaaatggatgtccttgtctgaacatttctcatatcttttgtcgggagatggacctggttggctattaccattggctgttt

SEQ ID NO: 177972 - DNA, 822 bp, Cannabis indica
tagtgccaacaccaactatcccccactactcgcctcgctatggaatagacagaattatcttaacatccatgcgtaaaaataactactagagcttcccaacatcccacctaccagctggaagaataaattcactcaccgacactcatcattaacccttctcatgattggcttgaaagaccttggtctcaggatccacaggttgttgaacgatagtacttacattccatctccaatggaccgctgaagaccactcttaagaacttccaacaccaaatagaactaagatgagatgatccatcctttttagtagcttctaaaatagagtatcttggaaaatacttatgttttaaaattcttacaagtaacgaatctaggttcagtagcaatctccacacttgtttagccactagagcttgatgaaaaagttgaaaatcttgaaaccaaagattgcccattaccttaggctaacacactgtctcccactttacccaaaggagtttccttttacccccattcgagccccaccaaaatttcctcacaatggatttcaatttttcacaagtttccatagaagcttaatgaaactcatcttataagttagaatatcttgaaggatagatttaattacatctgttctaccagcagaaaagaaactacgcttccatccccaaacacgcttcttgaccttctcacaaatcccctcaaaatgttcgactgtaggcaatcaaggatactgtcatgagtagctacagatgtcaagcccaaatagtcgtagaacctcatctctatcacttgttgcacgtttcatctaaaaagtgatag

SEQ ID NO: 177973 - DNA, 749 bp, Cannabis indica
ggcaaccagggaatgctgtttggaatgatgtatactcttctttaatctaattaaccttatatcaaattatagttaaattattataagacactaacactttttttggcaggcacatatgggagagcatcaacggtctgagaaaaattttcaagttttacgacccagagcttctcacagtgcatgggatcaacgatgaagaacagagtcagtcttttgacgatgcggcaagacgattggctaattggttatcattaatgaacaacaaccaccaaatgttctttattccttggaatatcgggtaaactttattaaattctttagtgctaattgttcatttctatattatgtcttcaaattatttttatactatcttacttatattccaatataattttctaggatgcattggacgctagtggtggttgcgccaaggaaaattatccatttaaaccctgtaaaaggccgcccaattcccgaagaaatagaacaaatgatcggaaggtaataatttaatgacttcttatgtaacgaatttaaattaactaacgaattgaaatgctaatataattttcccaaaaacagggcattcatgtatatagggaaacgcacatcagtatcttggcccgtggcaaggaaattaaccaaagcaaaactgtccaaagacaacctaaaaaagccaaagaatagcggtttttatgttttgtaaaatataatcactgacatcgtcgcacgtgccaacccacgccgtt

SEQ ID NO: 177974 - DNA, 849 bp, Cannabis indica
attttagagttaatattttcgtgacattcatatatatgatagaagtgtatagaagtaaaaaaatttatagaatgtatctaaacttttaccttttttatgttgccgcaattttataatatattttcacaacatgtaaaacaacaatcttattttagaacaaacttaaaaacaacattaaaaaaacaatatttgtaaaaatgctttctacagtttttaggtatttttgaaataattcccttataaatatatgtagttttaggtcgtatagtaaacgtaattataaccttatgaataaagctagttctctgtccctaattggatcacgcacacaactttgcttgcttgaccaaaactgtaccaatttatcacgcaaagatttctattaaacaaacgtaaaaagaaggctaaaatatctatttattaattctccttctttaaaaaaaataatccatatttctttaatggtctttgtgactctgaatgaaagttaatggtctttgtggccctatactatgattgatctttgtgtgataattgtgttcatggctacgatgatggcggatagtactgttgatgaaattgtgcaattgactgacaagttaggaatggagcaagaagaggaatgggaggtgaatgaagagcaagtgactgagtttggagagaagtcactgattggaagaattgtttcgaaacaaagtatgggattggggctgttccgaaccatttttactaggatgtggaaatcagtgggggaatggaaagtgaagattatggatgacaataatgagcataactactttgggatatcatttaatagtagaagcgatgctaaaagaatatttgagaagc

SEQ ID NO: 177975 - DNA, 726 bp, Cannabis indica
atatatatatataattttataatggtaagtcatgtcaacttatttataaacaggttgaattcaagtttaagtttttttatttcttttttaaaaaaaaaaaaaattgacaggattaataaatgagtcaattatccatcgagtttttgaatcttacatttgcttgtaatacttaaatttcaatacgagaacacgatctgattgatttttgttttccaataaaacatatcaacaaatacaaatgtatgtacagctagttaattgcatgcctactataaatatatatatatatatataaaaatatatatatgtaaataagtatttggtacgtagctttcgttttatcaaaatacacactcatatatacatataaaaaacacatacttttagtattacttttttaaaacgtacatagtttgatgataaactaattgtaaaactagaatatgaatatatagatttaaatgtctctagctatatgcacattataaaaaaattgctacgtacttttagtgataattttttagtcacaacataaatttattgtgactaaatgtgacttttagtcacaataaaaagttatttagtgactaaaacatagtatttaattacaagttatcactaattaattttagtcacaacaaactaaaacacatttagtcacaataaattgtaatttttggtgacttaatattttttagcctacgtacctttttagtcacaacacaa

SEQ ID NO: 177976 - DNA, 660 bp, Cannabis indica
gaatgacctcctttaggaatgccatttaatttattatgactttgaattttagtgcacttttgaattttgttaggtaaaattaccattttaaaatttttgtgaggttaaggacctctttggaattttgaaataatatttcatcatttcaatttattttaatgagctcatttggaattttgtgtcattttatatgactttagaattttaccactttttgtgataaaattgagctttgaaatctttttattattttttttataaataaaaagattatttggctgacattttaattatttattctaaaatttgaaagtaataatttatcttttattagatactattttgaattgcaatttaagtaggtcaattaaaatttaagataatatcaaagatatttattttataattccaactcatattcttatttgaattatatgcataggatacaacatataatataagaccatttaactttacacactaatatagtgtatatatataacatatattatatattgatcgttgagagtcatatgtatatttaacaattaatcccaatcagagtgctctcttttttgtgaacaggtaaggcttccttttaattttactcactgacaagaagattaatttgactctcccttacagtatatgcatatgagt

SEQ ID NO: 177977 - DNA, 667 bp, Cannabis indica
gttagctcacgggtactctgtgtgcaggtaaagacaaaactaaacagtgaggatggcgagctcgaggcgtggattacatgttaggggattgtcacgatgttttggtttaaaaatatttcattaaagattatgattcaaatagtttttgtaaaactttgtattttaaggttatgaataaataaatgttttgttttaaaaataatgagatctcatgcttagttatttttcattaaagaattcttttattgtctttatcttaaatagttttaaacgggttagctagtgtgacgtctcgggaaatcagggcgttacaaagataattttaatataatattttaaataaaaaagataaagttatcttttaattgaaaatatgttaaatatcaaaatatctaatcttataattaaataatatataaatattgaagaaattaacaaattttaaatcttacaatatttaaaaaataaaataatcaatttttaaatttaaacctcaaaatatcaaaatgaataataatctatcaaaaaataaatattatcaatttaaaaaatgatatttaagttcaaatatatttaaaaataatattttatttaaatttgggtttgaaatttaaaaatggattttggaaaatccaagaaatcggttgggtgaatgctgcccaggagc

SEQ ID NO: 177978 - DNA, 853 bp, Cannabis indica
gtttatgagttcaatattcaatgcagtgtaacactatagcttttcaaatttagtggaattgtaggttgttataaaagaattacaaaaaggaaaagagagcttagttactgagaggaacaagacaacaatgtaaaccaaacaagatgaggaacaattaataccaatattgtgacagcctccttcacaacgcctgctattgtcactgtaacagcactagttactgagacaagaatgtattctgttaacacctgtagcaacagtagagcttagtaatccaagtttcaaaatcaaatttaaaaacaatttaacttgtaataaacaagcagcaaaatatatgaagtggaaggtctacacttctgtcattacagtcccaaataataattagaaataagtaaaacaaacgaaaaacactcacgaactcatgtacaaacaggaaacgacagcaatgttaactcttaccataaaaaatgcaagagttccaccaaggagcatcagcaaagagcttcgagtgacatgccatggattattgaagtaatcattctttctaaactcattccatggatccagcattaacgagagaataccggttgccactgccatcactggagttacatagctcatcagggtcagcgggttttttaatcctgcaaaatcaaatggaaatactacacagtttagtatgccaaatagaagcatttgcttaatctaaatatcagaaagagcacatagactacaatagtctctagacaaaaggagaggtgatgatccaataatcattgaaatgcaccatgcataaaaaaaagcatgtagattcataattcataaagcaatgtagattcataaagcaaagttt

SEQ ID NO: 177979 - DNA, 578 bp, Cannabis indica
aaaaacaattaaaaaagaaaagggacattttattaccaaacaccacaaaatgtgctcacctaattaaacatataatattatagaaataaaatctttaatcagtttgatgcaagagcacttcattaatcaaatcatccaaatttgtagacgagctcccacttggagcagtggcttcatgtaccaatttcttaaattccattgccttagtcttcattttcttacctttttctccatcgaataactgtttaaccaaatttgtcacttgatctctctttacatcactttcaatctccaccgccacaccccattcattgaatgcaaaccaacaattggtttgttggtcagcaaagtatgggtaacaaatcataggcaccccactagtcaagctctccagtattgaattccaaccacaatgtgtcaaaaatcctcctatggaggggtgatttaacacatcctcctgtggtgcccaacttatgattaggcttctgtctttggtttggtccaaaaactcagatggtagcctaccttccccaattatcaagtctggtctaatcacccacaggaaaggaacattgcta

SEQ ID NO: 177980 - DNA, 515 bp, Cannabis indica
ggttgagaattttgcctttcttcagctaattttagtgaagggaacacgaaaactgaaaaggaagaaaggttaagtcctaaaaataccggtccgtttgagtttctcgaaaaggtaggtcaggtagcttattagctagccatactccctattttatctagagtttacaacaaaaactatattgctagttaaagtgccgtggaaaaaaaaaaacaaaacaaaacaacagggttaaaatacgacttgggagttagagtcgcacttgcggaaactgtttcccaggtagtttagataaatttcgaggacaaaatttctataaggaggggatagttgtaatatcccggaaaatataataaatttatttggacatattttattaaatatgtgattatatgaatattagagtaagattataatcttacttacactaattacgagttaattagtggattttgagtaaataaacaaataaagcgtaatttataaattacggagatttgtatagcatgtgtgaatgt

SEQ ID NO: 177981 - DNA, 577 bp, Cannabis indica
tgtttttgacggcattgcatggtccgattttaaggttactggattggtccttagagggatctttcttctgagaaagaaagagattgattggttttatgagggtggtgctgctgctatttatcctgatggtgagtgtgaatgctttgctgtaatgtgactgaatcgctatacattctgagttcacatttcattacctattattttgtttgcactgattttgcttatgaaattttacatgtgattgtaaaattcttgagttttgatatcagaatggtcaaaataactgacggatcacctttttacaaatgatttttttttctgcattatttgatttgtcaaagctggatgatgttatgaaattgtgtttggcttgttttgttgtgtttacctatacaaactatcttgcagtgttataattacaagattagatttgtggctaatattgtgattatcttcttgatcacagcttgggaaccgtttagagatcttataccagagaacgagagaggatgttttataaatgcttacaacaagagactaaactgtgatgatttggaaacacaagtaagacttggct

SEQ ID NO: 177982 - DNA, 801 bp, Cannabis indica
caggatcaaaattattatttaacgaaatagagagttcatcaattgctaactttacaaaacacaacgtctaaaatgacaattacccatatttattttcttataaatttttcaaattatatacatacctgccatgttttgattctaaccccatttgtagtaccaataagcttagctctgttgactgtaataccagagacataagcttctgaagattttgctcccaaacttccaatactgagctcacaaatgaaaattcaagaatgacacaatgttaaaattgataatatatcaaaaagaaattaagtaagttattggtcaaaatttgaacctgattccatggccaggtccacaggttatgtctgtggcttgtacattttgggagccagttacaattgaaatgcaatcatcaccttaatcacaattataaactaattagtatatttaatttttagtttatttttggtatagggagcaaaagcaagacataccagttcctataacagagttcgaaatctgaatgttttgagatcttgtaacatgaattccatcagtatttgggcttttttctggtgcagttattttaagattggaagcttgaacattgacacatttctcaaaagacaaatgaatttgttgtgaatcttggatattcaaatctttcactccaaattcttgctgttgtagaaaggtgagtgcctattacaacaaagaaaataatttaagataaatactaaaatttggttaacaagaagataaagtaaaaaaacttccaaagataacacataatgataaacatattag

SEQ ID NO: 177983 - DNA, 789 bp, Cannabis indica
cttcacaaaaaaatattttttgaggctttgacaaggagatctcgaattgcacagagaagaatgctgagaaaaaaaatatatgggtatattagcttgctcaggacaatcatttgggcgatcccgaggttgatgagtccattgaaggagatgacctggccctagggttgaattatcttttaaggggatcatgttaaagataaaatttgggctagactttaagtatcatgagaggtgtgttaggcttaggataaatcacttatcccatttaataattattgtatttaaaatattacaaaattttattataaggtttcagtattacattagttgatgatttgtgcacccgcccacatgcactagattgctccatatcacatttttgtggtaagtctacgctgtttcaaaatctgtgtggtcccgtcagttttttgttatgagatttcacttatttttgtggcgcactaaaacatatttctattagtatttagcttcttgttttcactatgtaaagtacgtaagaactcagaaagcctagaaaagtttatgcttcctaccttttcttactcactttattctttcctttttcttccttaaaggtttcaccttaaaggtgagaagtagagactaaaggttttctctttttttttttgattagaagggactaaggtttttggagaaagctttttaatcataagggagaaaggtttcacatttttttttttctgtttttattttttcatgggagttatgaagttttcctcattgggagaagaaaggagaagaagaact

SEQ ID NO: 177984 - DNA, 537 bp, Cannabis indica
aaggtgagaagtagagactaaaggttttcctctttttttttttttgattagaagggactaaggtttttggagaaagctttttaatcataagggagaaaggtttcacatattttttttttctgtttttattttttcatgggagttatgaagttttcctcattgggagaagaaaggagaagaagaactggggaagaatgaataagtttcactattcctcactgtgagaagaaagattaacaagaaatgggggaagaatgtgaatcttttttgcttattagagggattttatagacagtaggctctattatcacaaagctatattaaaacataaggctatattaatgtaatatccagtttatatacatatattggtatttggtatattaagtgtgatacaattaaattattattattattattattattattattatttattattattattattattattattattattattattattattgttgttgttgttgttgttgttgtgcgtgtgtgattagaaaaaaatgatatatatatata

SEQ ID NO: 177985 - DNA, 748 bp, Cannabis indica
caccaaaaacattctacaaaagtagactctaaattcgatgccatacatcacgcagtttattaatggtaacattacgtttttttttggttacctttaagttttttttttttttttttaaaaaaaaaaagaagaagaagagtaaataataacttactacatttgttcatagaagatacaagctagattctaaatacaataaaaatgcaaaagtgccaaacggaaagtttatgtgaaaccagaaaatatggaattttccgattggtgggctacattgacccatttaattctctaccttaaaagtagataattcttcagccaaaacaaaaagtagaaaattccttaaaaaaaataatgaaaaaaatccacaatttgatatttatttttgtcatcaagttttatgttttggtaattagccctccccgctaaaactattctgaaagacatttttcccaatgcacatcaaagagaatcaaattacaataaaaatgaaaggggccgctctaagcttatgattaatctgtgctttattgattagttattactaattagtatgttgtattacatgtacacatataaagtaagacatgtgagtaaatcagtagtaatgttccctccacatatgtttgggtcatgcccgaccgctgcatacaaatgcctcgttaatgggaaaagcaattccttaatttggggtctaaggtttgatttttagaagtgttggtttaatttcaagaatattaagaattatgcg

SEQ ID NO: 177986 - DNA, 1105 bp, Cannabis indica
atcgtacatatacatcatctttatttttcacttttagaagcatcatgttttgaaactgcacactttcaaaagggtgaagttataggtccccacttatgctaatcatgcattgtttattttttttttttttttttttttttggaaatcatgcatgaaatcgatttcaatatgtttggtaaatccattataaatcatgataaatgggttacgtatatagtaatatatttataagctgtatacaaccataaatcattaaattatcttcaagcaacgatgtgtgttaaaaataacttattcattactcatggttatgatggtaaagccaataactgtaattgaaaatatttatgagacaattaattctaaaaaagataagcagaattgttagaataaaatagaaaaataagaagaagatatagcagtagatgtaggtttttaaaagtgtaactttcattaagataaaatagtaagcccaaaatttacatttgaagagtttttggagccagtctaaactaactcaaagtctagtcttaatgccattctcgctagattatggccaatacacttacaatagttttagaatcaatttcattttcaacatataaaattggaaaggaagtgattaagcaccaattgagaagacattggtatagtttggtttctctacaattccactaaatttaataaccttttccctactagccctaataaaaaaacacacacacaaacatttataaaatgagaagtgaaatattcatcctctcacgtgaaatgctaaaaagtacacatggtgcttagcattattgtaaaatataatattactattggtgcaactcaatatcaggttctacttactttattaataaatattataaaaaatcgctaactataatgctaggcaccatgagtgcatcatggcaatgctctcctctcacatgagcattgctatgaggcactcagggtgcttaacaccaacggtaaatatcgctctatattgattagtgattttccataatatttaataaaataaaataagtggaattcaatgttaaaattgaatcaatataaatattaggcactatgagtacttttttatatttttcac

SEQ ID NO: 177987 - DNA, 792 bp, Cannabis indica
tttataaaggtatataagatgcaattataacacttgaaaatggaacctaaaaaaatacttaattttgtgccaatggatgaagacacactaaatccaccacactctaagcatacaacaaaaacacatattttttgagaactcgtattatcaagaaaaatatatacagtacaattcctttacccaaaaaaaaaaaaagagaaaggaataatacaattattaattctattctaaagccaaatacatttatttatttttttggcaagaatagtacgtttattaattattatcgattttcaacaaaacaaacaattcactaatattatataactactctttcaaaaagagaatatatttattcatattaaattataatataaaactcaatctgttgtgacacattgatactgatacatagccttaattagatatacatgataatatacacatataggggcgatgtaacaaataagtggtttcctaatgtaagtgtttaaatataaaatatatatatataatatttatataataaattgagacatggatgattaagcaatgttttctggcacatcattatcttaaatattaatttatttatttttgtgtagtttggcatgattttaatgatcattacgtaccacaaaatcccaaaccataaaagaaaagaaaataagaagaagaaaataaaataaatctaagtttccagcaaagtggggatacgaaagttgatgtaataacctatctaattcattgatacgacatatgaatggtctataaatctaaattaatgttaat

SEQ ID NO: 177988 - DNA, 694 bp, Cannabis indica
tttagtgttgcttttaaaagtttggtaaaaataccaaaatatttattttctcttttaaatttgctacaaaatcaataaatcattagtaacaaataataatcaaatatttgctaatcatcaaaacaaggagatcgaaaagtttgagttaacaaaagtaggattagaaagtatgagtattgctgtggtagcgagaaactatcttggcatggtggtttgggttcaaatggcacggttagagttttctgatactttgtgtggggaagcagatgcctgctgcttggctttggatgtagctaagaggaacgattgcaagtttaatattgtgaagagcgactagggtagtattgactttgagaaagaagcgcctcgccaactattagaatattagtaaaggcgccttagcctatctataggttggggccttttcttgctcgttagcgcccccctaccctaaactattagtttagtcatactcttcaagaccttcctctaacaagtaagcaagtaaactaccttttgaaaaccttactaatagtgccaggggaaagatgcgcgaaagcacaggacctacgggccaagggacagtcttaggtagacagcttctatgggacgtaggcctcccaaaaggtaacggaggcgtggcaaaggtttcctcaggccaaatggagattggccctcgagagcaaaggcagaa

SEQ ID NO: 177989 - DNA, 1505 bp, Cannabis indica
taaatattgttaaattttgtaaaccctttgactcaaatttcgtggcttattataaactattggattttagattttttttttatattctatgtggtactatatacacaactattgatgcgaatgttgtaatcttttaattagattataatgaataataacttaaaaaaattattctaatataaataataatattaaaattatattatctaattacttcttaataataataataataataataataataataataataataataataattttatattaaaatatgtacttttttaaaagtctattcatcgtattagaaactagaaaacaaatcgcgttttgcgtggggttgtattttatttagtgataattaaataataaagctatatcaatttttaaattttcatatttttgatgtattttttattagcatgtgtatctattttacttaatttttttttttactcaaattaaataaattactatcttcaaacaagaaaaaaatattagagatcctcacacagaattgagatttttttaattgtataaatctatataaagaaaaaaaaatacattatatgatttcaaaatcattgtcaccactgtatcttactttgtattcgccattacattcaaaatctttgttatcaccatatatctcttatagtcgctattacaatcaaagtcgttgtcattatcataatttataacataaaagtaagtagtttaatatttttatttaatgatttacataatataaatcatggttttgcgaattttggtagtagtctgtatggctctatagaaatggattaatgttggggtttaatttaatcaagtatttgtattaggagtacacatcggatgagtttttatcgggttttcatattttcaggtttggtcataaaattagtaatccaaacccacatatttgtttgacctaggtttttcaggttttgggtgcgagtgggtcgagtttgggtggattttaactgtgttcgggttggcttgaccttttttttttttttgaaaaatatcatttttatacattttttcataaaaaaaaagaaaaaaaataaaagaagaagaaataaaaatgatatatcattgtttagaattaattttcttttttgttttaagtttatgttttcagaaaatgtataaaaaattatatatatccaggtttcgagtgagttttggtgtaacttaatttttttagagttttagatttatgaaatccgaacccagccaataatgaatcgggtgtaactagaacccagtttactaaaattgagagccttttttttttaggatttttcaagttttaggccaggtaagtttcgggtttctggtgtaaatgtgcacccctaatttgtatgatttatgatatttttttgtaaataatagttttgaagaagccttcggattccctagtaggtgctacaaatataactattgtaattaagtaaaaaagtaatgtataaattaatatacgtgatattagtaat

SEQ ID NO: 177990 - DNA, 742 bp, Cannabis indica
aaatatatatatataattttctaggaggaaattataaaaagttaaatttttgtgaagtaaaaataagaacttaatattttttgtgggataaagaatgaaatttatctatgtatttttgtagctcttaattttttctaatgatggagtatcacatatatcattaatgagttatttcaaaaaaataaaaataataataataataataataataaaaagaagttattagatttaatacccacgtattctacccattaatcaaatgagaatacaattttttttttttcaattccaccctatcacctctcatgataatagaaagaatcttcttcatcaattccataaatcccaaaaacattttgttcttcatcttcctcctgtttctattagccacaagcatttttcattatgtattttaatttcaaattattgtgtacaatgctgttatagaaaaaaatttcaccatgcatattaagactgaaagagagaatgccagagatatgtattttttttaaaaggaatgcaagagatacttcaatggaaaacttttttttaactgtggaaaataataggactaaaggcattagatggagtggagatattgaaacaactaagattgaaatatacgtgtaaattttgtatgatatattcattaaattcaggtttagtcctattcagaggtcaatttaatttgaaaaaaaaaagaatcaaattaaaaaactcaattgtatattttttgatctag

SEQ ID NO: 177991 - DNA, 741 bp, Cannabis indica
gtaatatattatttacttaattttttttttgaaatagaataatagtgatttatcttgttttaagaaacgtaatcggaatgattaaattaactaaattacctttttgagttaaaatatataatagtagttattttgtatgatatattttaaaagacaaaaatatcattatatatttaatattgaaaaataaataaaatccattacccttaatgacattttttacaaaattaataggagaagtattccctttcttttatcatttatttaatcaagttttttactttctaattttaataatctaagtaaataaatataatagaatacttaacttatcattaattcttacttattagtaaacatactatatgtatatcatattgttgttcgttcactaagaaattatcaaacaacttaaaaattaattatttatcattgcataataattttctccttattagtaagtttagaaaaatcacaaattagttatattaaaagaagttgaaaattgagctcaagtttctatttgtactattttaaaaagtataaaatttattttatcatttaataaaacagagagtaaacttttacaaaacacacactataacaaattttacttttagtcaatataaaacttgtgactaaattaaaaaaattgtgactatataaatattattcctatgttgtgctaaaaagttcgtggccaaagatattataagtaaatgatattgttagtagaattgg

SEQ ID NO: 177992 - DNA, 507 bp, Cannabis indica
ctggtggcacaatagctgctgctgaaccagtagacaacagattgctgctgctggtaggagaattaatctgcagagtctctgaaacagattgctgaatgttgggagagacaacattttgcagagaaagtgcaggagcagctgggacatcagtagaagaaccaggaggagaagctggtgtaggaaaactgactgctggtgtaggaaaacttactgctggtgtaggaaaacttactgctggtgtagcagtggtatcagcaggagcaacaacactggcagaagcagcagtagcaggagaaaaatcagtgctgaaactcatggtgggacaagcaatgttggctgtcttttgatcagatagagaagcacaccctttaatttgaagagcagggaaagaacattcatcaaaaacaacatttcttgcaataaacattctaccagcagcattttcacacaaatagcccttgtgctttggagatatcccaaaaacaacacagttcagatctgtaatca

SEQ ID NO: 177993 - DNA, 933 bp, Cannabis indica
gaatttatttactattccctttgaactatgtcacaatgctgaaatataagacttctaataagttttatccaatgtggctaataaaatagtaatgagacttgtgtgtcattgtcacataagtgccacatgtataatttaaataaaaaataatttgaaatttaagaaatttcttttcttatcaataattaataagaaaatttaagattaatttatttttattcatataatttagggtaaataccattttggatcctgtattttgcaaaagttactaattggaatctatgttttattaaattacaaaatggaccctgtatttttgaaaaatgtacaaataggaccctgaattgattttttgtcaaaataaaacttaataataatttgatctaaagatgttataacaaatctagttacattttctgtatctgttcgtgttagaaattatcttaaagttagttatattaaaaaataaaattgttaaaaattgagtttaggatcctatttttaccattttggaaaatatagagtctattttgtcatttaacaaaacagatggtctaattgataacttttacaaagtagaggatccaaaatagtatttatcctataatttatagttaataagaaaatattttttaaaattttaaattaaatatgtggcgctgacaataacacatcaactacattgacatgttttagcgaaaaaaaatttcaaggggtacgatacgatcattgtaatagttcaaggttataaaatttttaaatagcctaattttgttattattttctaaaaaaaaataagtaaaaatacaattcgcttgaccttcctatttggcccctcctcgggtctttgtctggttccgccactgctggatagcactgcttatacaaatgaacatgcatgaagtgtttattttttcagcaaaaaaaaaa

SEQ ID NO: 177994 - DNA, 1192 bp, Cannabis indica
gaaaatagaaaactcacacaagatcagaataaacagctggtaagataagaataaatgtgtaatcaaaacttaccatttttacctcaatttccgtaaatatgaaagctagacaactttccttccaagattagatacacaaaatatggcaactaaattaaacactccagccgaaatatacaatagataataaaatatctttatcaattaaatatgctaaaaatgaaattaacaactaaaaccttagaaggagaataaaatagaggaaagagatgatctttcacagtgtttagagatattataattgtggcaccttcaatttattttattagtttttttttttttgtattgaagatggcaccttcaattttagaaacaataaagataagtttactctagtattgttaatctctttaaataattctttatgtttggtttggttagatactctaatctttaacattatttttgcttatattagtacacgtttacttatctaagttaggtattgttgatgcacttggacaaaatttaacttatattttttgttgttcaaagtttttttgttaactgttgagacttcacatataagttctaatttactctttttacaagtatttggcatgatgtttcttccaatatgaaattttcgtatcatctttgaatattttatactaatctatttttgtttttgtaatctatatgtattcttttagtgggatggaatagttaagatgattaatttttcagcaacatatttcaaagttttattgtccaacttttttgaaatatttttgtatttacttagaatagacaataaattttattgtatcgaaaagattcttctttccttcagtaatagctctttttaacattagggtaaatactattttgaatcttatgttttgtaaaagttactgattgaactctctgttttgttgaataataattcagaccctgtatttttcaaatagtacaaaatagaccctgagtataatcttgtcaaattaaatttaataataacctgacttgaaagtgttataacaagactagttacattgttttgtatctattcgtggtggaaactggcttcaagttggttatattagaaacaaattgacgaaaatttttagagtctatttgtaccatttaaaaaaatacaagttctaaatctcatttaacaaataaaaaaact

SEQ ID NO: 177995 - DNA, 1018 bp, Cannabis indica
aaaattcccagctgcaattgctggacccaggctccgtacaggattcattgacccacctgttgatttcctgccacgccaactcagatttaaatatctagttgtatatatcagtacatataatttataactcttgtctgatcgaataagccatgcatgcatatagataattatatggtgattcgaaggtacaaaccctgatatgagaacattgaggataacggtagctccaactgctattcccgccaattctcctgcctgccatacatatatatatatttatatatccctcttaaccattagaaatgatcaactgatgtttatatatatatgaatttatgtacttaccgcacgtgtgtcggtggagacagcggtgacaatgaacatgaggaagaaggtgatgacaaactcgacggcaaaagcttcgtgaagggagacagtaggaagggtgagtccactggacatgaaggggtgaaaggctgccttgagaaggaaagagcggatatggaggccagaacctggactgctatgtaagggaggacttggacccaagggaagtgcttgaaggttgcgaatgcgatggtcacagcagggtttagatgggctcccgagatgtggccagttgaaaatatgaccaccatcactgccagacccgagcacactgcgtttccaactaaggctcctgctgatccatcgtgctcctgattcaccaggggcgctgctgttgctccaaacaccatgatgaacgttcctacaaactcagctcccagctgaaaacaaaccacacacaccacatatatacctataaaattaaaatctagccgcgtacgttgggaagaaataaaattagcaagtgcaagtgcacaataaattttttatacatacataatatatgtggaccccaattgatcaaataacttggatgctaaaatagaaagaaagaaaaaaaaaagtgaaccaaaatcaactgattttatttatatcatgggcaattaatagagaatcacaaagcccctttggc

SEQ ID NO: 177996 - DNA, 653 bp, Cannabis indica
gtcaacctgggctaattctgatgatgttttctgagaactcttctgagtcatcttactctatttttagtaaagattaagattcaactattttaggggacctaaacggaacttctgaagggccataactaggaccgagcgcctagtttgacacctagcactaggcctaatgcccaagttgatatattgccaacttgggctatttttaatcaaagttcatgaaaaaatgttttgggcattttttcgtcatcagaaataatgaagattcaagcaaatttggggagaaaacaacaaactcgagcctctagaaaccgggcctgacgcctaagttgacctggtgctgcgcctagcacctaggtctacaatcaacctggtgcactacttttgactgctcaaatgccaaatctaattcaaccaatgaatccggaatggttaaaaatggggtatgagatcttgtcctcatgttcaagaatcttgaaagtattaaaacaagatactcgagagcttgggaatgagtacccaatcccaggttgacaaatggcctggtgtgctaggttttacttatctgattctgattccatttcgaacgtccgtctagtttttcaaaataaatgtgatccattgaaaagttaaataagtcaaattcacaactttac

SEQ ID NO: 177997 - DNA, 525 bp, Cannabis indica
agggaatagaggaagagggcttgtatggacccattacatgggtgtgaatggagctgaggaaatggattattcaaaactatttaaatttatttgaaaacaaaaattatatgtctcaatattagggtttttcataaagtatctgattcgatccgttctgcacgatccaatccgcaaaatgcggatatccgtacttgtgcggattggattggattgaaaaatctgaaatccgtacttgtgcggatcagatgttgtttgacctcaaaaagtaaccaacccaatccaatccatacttaattatatatttaaaaaaaattataatatatataatataatattaatttctaataataatacataatataatctgaccttttatcaacaaaaaaaaatcttaacctaaaatcatttcactttcttctctttcacctacaaccactttcatctcctaccgagcagtcctgatgttgagcccttgctgaccagtctagacattcagtcgccggtctacttcagtcgccttaacag

SEQ ID NO: 177998 - DNA, 749 bp, Cannabis indica
tatatatatatatattttgatgtttgttcattgaaggattaattttgatgattaatgtttttttttagaaaaattgatgatcaattgttataaaacaatataatgtctttttcattttctgaaagtttatagccaaagtactaaaggcccgtttagcgcagcttttggaaaagctaaaagctcctttttgaattttgaaaaagctgtgataaaaatatgtttggtaaacagtcaaaaaacagctttttgaagaattttgaaaaagttattttgtttaaaaagattataacaatttttttttgtactaaaatcatatttaattatttattatatattaaaaaaataaaaaataaataaaataaactaattataataaaataaatattttttttgaaaaaaaaataaataactattaaaatctcttatttcttaaaaaaataatttctatttattttatattaacaaacaatatcaaccaaatttttttatatgttttgagttttcaaattttttttttaaaatttgattaaaatattataaaaaatattataaattatttttattaaaatacatataaaattttatattttaagaaattaaaaatatataaaaataaaaatattaatataaaatagttttaacatatttaatattataataaactagattataacattatcattatcattattaattcaattttttttccacagttttggctcccaaagtacagttgtgccaaactgacc

SEQ ID NO: 177999 - DNA, 574 bp, Cannabis indica
tggttgatatattcggtgaaattatgagtctcaatgttccatataaatgtctcagtcatcttcttcgactggtaagtgtggtttagcttgtgatcaggtcactgactaacaaaatgattctatattatttccatcatttaccaatcattgaattgttttactaggtctaagtctgcacgttggtcgatttatgttatattttattcaatgatcgagttataaaattctaagtacaacctgtaccaaattaaaaaaaaaaaaaaatagtaactcgcccaaggtgaaattagtcggtttaatccgtccaaaccgaccactaatattttttttttttaatttttacattcaattattatattttagttaattgtaataataagacaaatatatatagattgaattcaaaattcaaatcaaccacaataaaaaaattatattagtttcaactttatattttttaaatagtcatataaattatatgatatataatatatataataaaaatatataaatatatatatataaaaaaaacccttttaatttggttggtggggttagttcgggttgatttggc

SEQ ID NO: 178000 - DNA, 686 bp, Cannabis indica
gcctaagtgatattttgatatcactttagccaattttttccattttggtgaagtctatcacaagttctttgagatgttgctgttttgcagaaacaatagacttgaaactcccaatttcagagtaagtcaattgccggaaaagtgaaaatatgaagttgtgaatttgactcttttgtcttcatggctctcaattattatgaaaaactagacgaatggttaaggcagaattaaaatcaaataagcagaacccaaggcactaggccatttgtcaacctgggcactgggtgcttatttcagagtttccgggataccgttttgatattttcaaggtccttgaacttgaggacaaagtctcccaccccgtttttgaccatttcagagagaatgctcatagaaaaatttgcatttgagtgaacaaaattagcgcaccaggtcaacctcattctgggctcagtttttaagcccttgcaattatgggtttctccccgagtttacttatatcttcgttatttctaatgacaaaaaaatacccgaaacactttttcaaaaaacaatattggaaatggcccaagttgactatatgtcgatctgggcactgggcctagtaccaggtgtcaacttgggagctaggtctagtttaaggcatcttggaagttctgtttgctcccaaaaaatagttgaatctt

SEQ ID NO: 178001 - DNA, 771 bp, Cannabis indica
gggataattattaagatagaattaatttttactggaattaatatttttgaggaaataatttgtatatatatttaattgggaactgaataattaaattaatttaacttttttattattcacttacaaactatgtattacttaaatataatattattactaaataataatgagatagaaatatattattttaataaaaaataatatttatttaatccaaaattaaataagagattaataagaattaatttctactgaaaaataatattcttgatggcaaaataataatttttaataaattataattttgtatatatatttaattgggaaatgaataattaatttaactatattattctattcacttaaaaactatgtattacttagatataatattattactaataataatgagagagaaatatatcattttaatgaaaaataatatttatttaactcataattaaataagagattaataagaattaatttattattatttattataaaataaataataaatcttatttagaacaaaattagtaaaataatttagtgttttaaaatatggcttatacgtgtaggtgacatataagagctcaattatgtatttgattattctattaaatatattaatcaaaataaattaatcatttaattattttattaaatataatataagataagatatttaagattaaaatgattaaataaaataaagataaactgaatatggttattcagctatattatttgaatttcaaataaaagatt

SEQ ID NO: 178002 - DNA, 523 bp, Cannabis indica
tatttgtgtatgaacataaggccaactctaatagagagatgcctatattagtgcttgttactaagtgaggacagatcgagtcataaaataatatttatggagagaagataagaaagagtgttcattgttagtacaggtgccacgaatttctttttctctatgctgtgggatttgaagtttctcaatatatattttttaaataatttaaatattaaggctggtgacctacctcatacacacatctatttcataattaattctttcaacctcaaaaaacataacatatatttcatagtatgagtgatcatggatggctcacgtatgttttaatttattaattggtggcaatcacaacaaatcacaatagtggcgacagctagaaagacccaattattacagtgtacagtgagttcatttttaatttgttctttattttaccttttccataactaaaaaccctttaatcaacttaactatatttatgtttcctacttgttccctacaccgattctatctcctattt

SEQ ID NO: 178003 - DNA, 733 bp, Cannabis indica
tagagaacaggaggcaagggaacggtatgttaaaatccataaagattattgttctttcttacaacagaagtctaggataaattggtaattgatggtgatgaaaacttggctctgtttcattcaagtatccgagagagacggtgtcacaatagaattctatccattttagatgctactggtaacaaattagaagatcctgagggcataactaaggcatttctagagttctatcagaatttgctgggttctaagatgatgaacaaaagggctgtagactccaaactaattagaaatggggcatgtatcacatatcatcatgttcaaatactcactgctcattacacaatggatgaagtaaaagaagctattttcagcattccagcagcaaaggcacctgggccagatgggtatagcaattctttttatcaagataattgggacttgatcaggcatgatgtgtttgaagctgtcacctctttcctccacacaggccagctgctcaagtagttaaattcgataattatcacacttgtacctaagagtaagtgtccaaatgttgtaagtgactatagacccattgcttaagttacaatgtcgtttacaaagttgcaactaaaatgatttgtagtagattgaaacttattctcccagacattgtagctcaaaagtcaggggggggggggtcttcgataaaattaaggaagattcgaattgcccatactatcatgatttg

SEQ ID NO: 178004 - DNA, 647 bp, Cannabis indica
gaaaacaaataaaaagatgtcacaaaaatggcccaaaacacaaaagattggtatttttgaagtccaagaaggcaagcccattcagcccaaattccttctccaccacacagccacgccacgtggctgcttcccattggctcagcagtaacaaatcaggccatgcaagccttgtctcccttcagctgccccactctcccgaacccacgcgtgagtctcacggctccttgtggtccgcccgtgtgtgccacacgccagccatgcggctggccctccttcttcacatggtccaatgcagccaacaaatgctttctgtcccattttctaaacacgcaaaatgtctaagagcatctccaatggtagtattctttaaaaatactttatatctccacatcattcaaaatataatattttattttatttttcttccacatcatttttggcacctttacttttaaaaacactccaataatataataccttttaaaatactataattatgatatcacatattattatatatataagatttttctttattaactattatatatattgtcactttaatttttattgtataaaatacatagtatcaatgctattgtgtggtcatcaatgcaaatttcaatataacatctttatctcactag

SEQ ID NO: 178005 - DNA, 566 bp, Cannabis indica
aatgcaaatcagagaggaatcagaaagaaagaaaaataaagagagagaagctatgaggactcaaacctgagaaagaagaaactgagaatcaggcaaaacaaaccgatatcggtacataaccagagcaaagcctgtaggaagcttcaagaagaagagaaaataaaacttcttacggttttaacacttgaatcagataaaagttactttttttcctggtcgctcatgaaataaaaattagttcattgcaccctcgaaataattatacagccaaattcattccaaagaaccaaaagcaataagatacatttggccaaaatacaataacccaaaaatccaacagctatgaacattacacacatatatataaactatatatacatatttatataaactatatatatacacatattcctgtatcaaaatgcgaaccatatcaaaaactgaaaccagccattacatgttgtaatacgaatttctggatcagtcagtttcatggtcaggagttggggaataccgatgcagggaacttgcctttgcttctcagcagtctagtaaaggatgagtca

SEQ ID NO: 178006 - DNA, 445 bp, Cannabis indica
cacaatcagtacccctaacgtcaaatatgagatactatacgtgtaatccctaaacaaaactatttcactaataaaaatctaataaagggacgggatccatcaaacagagcaaaaatcacctaacaacttggaccaaaagttatcagctaattaataaatttagccaagagttatatacatgaatatgtataatcataatttatgtagagtcggcatctatattaacatatcacaaacctcatataaatatataggtcgacaggactcaccaaaacacgaatggccactgatttttaaagtcattgtaataataagaaagttttgtaatataaataataatacttacgaattaagaaagaaaaaaacaatataaagatgtaaacataaaaagatcatgtatttcatttttaatagatatattcaactgaaatacaagctattctag

SEQ ID NO: 178007 - DNA, 1452 bp, Cannabis indica
atttacaaaaattagtattttatgcaattatataataaaaaattagaaaaaaaagtaataaatcccattttccaaaaaaaaaaaaataaaagaaactaaatttgaaagaaacaaaaaccaaatgggctttggggtgagtagtcagagctcagaacagaagtaaaatcacggccaccgcctttcgacgtcacaaataccggttcccgaaaccttatgacgtggcaaaccatcattggataaaatcaaaacgacaacaatcttatcatcgtatcaaccgtacccaatcatatcccaaacttcttcttcatcacaggaacagaagctttatttttgagttttcctaaaaaaaatccaatctttattctctcaaaaagaacaggagaatattcaatatccattctcaatggggacccaagctgtgcccgtggagataacggagccactgattcacgattcggagaagattaccaccgttgagcctaatgacgattgcggcccaattccagaatggaaagatcagatcacgatcagaggtttggtggtcagcgcactgttgggtagtcttttctgcatcatcacacacaagctcaatttaacggttgggatcattccttcgttgaacgttgcagctgggttgttgggtttcttcttcgttaagtcgtggactggtcttttatcccaattggggttctctgttaggccctttactaggcaagagaatactgttatacagacttgtgttgttgcttgctatggccttgcatttagcggtactaactataaaactactagcttttgtttttgtttaccttacccaatttgattttgacttgttgtgattggtcaaacagggggttttgggtcgtatcttattgctatgaatgagaaaacttataatcttattggacctgattatccgggaaatagagctgaagatgttataaacccaggattgggttggatgactgggttcttatttatcgttagctttcttggtctttttagtcttgttccacttcgaaaggtaaagattgcatattatttttttaatatgaaatcaacatcattaactttttcgaaatcggaccattgacttataaaaatgtaatttttattcacaggatgatctgtgttctcagttaatacttaaaagttgaaaagtaattgtttttttagttgaatttgattgttttacagtcagttctgcttttgtgtggtttttctttgacctgttgaattccgcaacatcatgccctttattgaatttgggtctttgagttatacatatcacagaccgttttattcaaaccatgatgatatgggattttcggttaaaactttaaaaatacttatttttatagttgaatttgattgttttacagtcaatttgacctgttggacttgttaataatctaatgcattcactcatcaatctaggctttcagattgctc

SEQ ID NO: 178008 - DNA, 664 bp, Cannabis indica
aagttaatcaacaatttgttagtcttgacatttttttttttttgactaaaggacatttttggtcacagaaaaaaaaattatttgggactgaaaaataaatattttaatactaaattaattaaagggttaatttgaagaaaatatgacgagaaaagatatatatagaagagtgcacatataattatatatgtggtatattattccttaagggcttgtttggaacgccgtattaggtcgtattgtattgtattgtattgtattatattgactttgattatatacaatatttttatataatactatgttaaattttaatttatattaaaatattatatatttaggtgtccataaaagttaataccacatatagttttacataaaaatattgcataaaatacaattcaatataatacaatacaatacaatacgacctaatacggcgttccaaacgagacctaaaatttctaacctagattcggttagtttgttagtttaattgtcaaataagacaacaagtattattggatcttttggcctatataaagagaactactcctcttatttcacaacacaagaataagggcaagaacaagaaagacaccacacaacacaaataaagaagttagagagagagagagagagagagagagagagagagagagag

SEQ ID NO: 178009 - DNA, 1184 bp, Cannabis indica
acactaaccatcagggaaaaaaataaaggaattatttcacaaatacctataataacaacaaaaaaaataaaaaataaaatataaaaatacggttggacggaattttaaataattttacgatttttttattttatttacagaaattaaatacggtctttttatattgtactcatgttaatttgttgttgattttttattatttgtatgttattttttgttattgttttgatgttattttcatgttatttttagggatattgacggctaaaccacgtgaactttacagtttgtaacatttaaccacaaaaattgaatttttggcgactaaactacctaaacttggttccgttttgctctgcacacctccgtccaaaaatcacagttaagtgccacggtggactgtccacgtgtacatacttgtacacgtgttaaatttttagtggtccacgtaatattagttttaaaaaataattataaatatttaaaaaattaaaaaatcaaaatttatttttctttttactttttaatttaaaaaaaaataatttttagtttttttttactttttcttcttcttcttcttcttctttcttctttcttcttctttttctggtcgacccttacgctccccacgagcaaaatccaccacccaccctctcctccggaggtacggctgccaccctaactcccaccgctggcgccggccgtcgaatagacgctctcatcggagagatcaataacaacaatatttatcgcaattattagttactaaatagccttgtgtcccacacgagcaattgattagttaaccagtatgaagtaataaaacagaggcactctatcaatcaagtcatataaattgccttgttttaagtcatatactttaatgctttctctctactgttcaagaaaaccacaagatgataatatcggaagtagtgatgaagctatttcaagctacccttataacgtgtttgaccatcaatatctcaaatacactagcaatgatcaccccaaatcctaactgccccatgaactgcagcaacgttagcatcccatttccgttcggaatcggcccagattattccattaacaaattgttcgaaatcgtctgcaaaaacgtctatggttctcacataccttcctcaaacaggtaacaacttaaaggtctgaagatttcaattgac

SEQ ID NO: 178010 - DNA, 1145 bp, Cannabis indica
cctctttaattagaatcgcgaggtggcttatcttgctattcgtaacccgaggttgttttgtataattgtattcattttacttcgagtaaataaattattttctttgtctgtgtactccaagacaggtgcatgtctcgtcaatataagtttcaatagtcttttattctttcctcgctaaagactactgtggtcagcgagttatgaatatcttctattaaacctttgttaacgagttattttatcttgtatttaatgatataaaatttattataccaggtggttcatattctactgcaagacatgtgtcactttttgaagtatagccgaatttcaagtataacaatttcccctcaaaaagttcgtttttaattataaagagctttttagatgattataagggtatttctatcgtaatcccaattaaaaaaaattacatgctttgagttttggcggttcatgatttcgaggcacatcattagcattaaatgcccatcttttccaattcttccgtttttccattcgtttgatctttttcctcatgatataacggtgaacacccttaaagtataaaactcaagagaagacatttgtttgccatttctactttcgaactattctgaaaaatccttctctattttttaatcaccttgcatgctctattttcttcgtgtttcatcagacttcgtcttcaatctcagagaatctcagaactcctttcttcagtcatcaaattctcactcgacaagctctgcatttcccagaaagttttgccaaaacaggaagcagatttcttctttgtttttgctattcctttttctagaatttgtaatcttatttttgctttcgattgcatctttatttactgcatttggtttaggtatttttaggtttaatttctggataatttctagggttttaaggaaaaagcataggtttattaaattcctaggtttctagtttatattgaacttattccttccagaaattgggattatccttttttgacaatatgtcccaatctgattttaaaatttcaactccagattttctagaaatagaatgccctaacgaatgagctctccgtttgaacccaaaatccaaaaacctaaatccaaaacttgagataaatgatgccaaaaattggg

SEQ ID NO: 178011 - DNA, 762 bp, Cannabis indica
gacactaaataaaaactattgcgactacggtatatacgtcggttttaaaaccgacgtaaattctttaagtgacacttaaaaaccgacgtgaattatactttttgtagtagtggaagtttgggattataggtttcgacagaagaagaaaaggcagtatttttttatgtaaagaagaaacaaattttgattttgagaagttttattagattctgatataattttgtaaatattttttgtttttattttattttgttttaattaggaaaaaaagttctaaatttggattttacttattagacttattttattatgtattattttcaaaacacaaaaatagttttaattaccacctgtgtattaaagcagccacgtcgttagataagttgagttggatttaggggttaacggggtcaatgcacaaaacagtaaattgcaaacggaatgggacttaagggggttttcccaccaaaaataaagaaaagggggttaagtgttaaacaaatgaaacataaggaggtttggccgcaaatttctcaaattaaaatagccgacgtgatattgcatttgcatatatttaagagttaataaaaaattaatttgactaattagtactcgttattaattcttttattcttttttataattgaatgacataattttctattctctagccttacaaaaaaaattactattctctagacttaattgaaactagctagtataggatcgatataataacccaagtggacatgtcttattgtt

SEQ ID NO: 178012 - DNA, 596 bp, Cannabis indica
tcgggcccgatataggactcgatggccttgacaaaattttaatttttgataggctcgatgcgtccgatgttgggcccaatggccttgccaaaattttaattttttatttaatatggcccgatgcgtctgatgttggtccgatatcctattctaacttggctgttttgggtcgggtccgattctaactttcactttttttgtaaaaatctctacagttaataattccactctcggtacattacacaagccgtataacttggggcgggagaagttattaccacctgaaaattaaggtataatttgagaaattcagactatgggataaagtgagggaatccctttttaaacagttcttcgagagagaaccattacaattttcgaggacattgattcatcaattaatattgtacaagattaaatttgacaagtcagacgaggtacatttttatttggcagagaaaagatgcagattcgataggctggagtttagtttgatgactgagttgaacttgttgcccggacaaactgaaaaagaaattgaagagaatagaagtttgaaccggttgattatgcaatttttcaacggtaatccttcc

SEQ ID NO: 178013 - DNA, 618 bp, Cannabis indica
acccacgaaaaccccaacccgaaccaccctcacccacgaatcccaaccccaacccgaacgacggtcgaagcccagttcaccgccggtcccacgaatcccaggccccccatcaccgacggtcgaagcccacgaatcccaggccccctcttcaccgccggtccatcaaatcgaaagcaaaaaaaaaaaaaggaaaaaaagccccaggtccgatggtcggaccatggggtccgaccaatcggacccatggtccgaccatcggaccccctctctctaagtctctctcaaatcgaatgaagaaggaaaaaaaaaaaaaaaacccaggtccgatggtcggaccatggggtccgaccatcggacctggggtgtgggatgccgagatagagagagaaagagagatgctgtgagagtttgagggtattttagggttttgaaaaaaatgtatagttttttaaggtttaaattttggtttagggaaaaattttaaatttttaagtatagaaatcaaatttccctatatataatattttctataaattcaaatgataatttttaaataaaaataatatttgagatattattacatttaaaataatatttttaactaacattttatcaagt

SEQ ID NO: 178014 - DNA, 328 bp, Cannabis indica
attattattattattagcaaatcttgcttagttttatctcaaaggttcttagttggtcatttgtttttttttttttttttattattgatttctcttaaattttcatttccacctttttcctcatgatgccaaatatcattgagatcctattaatttaaattaggtaaaataatatttagtctttcttaattatatatattttgagattgttatacatactttgcaattaagttggtgataattttttctatatttaatgaataacataacacctctacgaaaaatgggaaatatcacatataactaaaacaatagttgtaaccaaaaa

SEQ ID NO: 178015 - DNA, 674 bp, Cannabis indica
acgtaggggggatcagacaaggatccgcgcgcgttgttcagacaaaatcctgtccgaacacgcgtgtgaccgaggttcactcggttccgcgcgcgcgtgaaggtgcacagtcaccttatcttttttcgaatcttcaaaaaatcataactaattcaaattaaatcgaaattgagttctgtaaaaaagtaacttgcttaattttttccatactatccaataaaaataattccagaaacaaaatttcaattatttttcacgaaaattcacaaacatcaatcaatcatcatataacactcaatacaacatgaaaccatccaaataacaaacaatcgttttaaagtccaaatttcttgcaagcaaatcaattaccatggctctgaggccagttgttggaatttattttaccaggatcttagatctactcacaagtatgttgtttaacaccctaaatatgaactttctaaaacgataaattaaacacatataaagttaagaaaaccttacattgatgcagcggaattaatgtctccttccactcagatctctaacccttgtatcctttctgtcgcagagtattatcaagatctgagcccgaatgtccttctctttgagtttgatccttcacagtcttccaatctatgattgagttactgcttgctgtgtgtggtcgacta

SEQ ID NO: 178016 - DNA, 666 bp, Cannabis indica
atgtcaatggttgtggcatatgtaatgacaataatgtcctcattgacacaagtgaggtttatatatgtatatgatatgtgttataaaaataaatattatcactaatttcaatttaagcatatttctctaactacttagtaaaattgaaatctctgtcagctaaggtattaattagcagagctctcctaatcaaatttttatgtgaaattgatatatctactttacattcataaaaatcaaattcaaattatatactctttattagtttacaaccaacttgattgatcacatagtcaattcaaacttattgttaattagagttgtactaatataatttttgtcggcaatttttaaaatgatttaaattttattgaagattctataaatatatatcataaaatttaatataatatatttacatatagttatagtaatataattacagtaatgttgcacttttagctaaatatatagttatagtaatataattattttgattttttttcttaatacattaagttatttaaaaaactttataatttttttgaataatttcaaataatttactacatcaaattttattttaaattataatcattgattattatttacatatgttaaattaaatattagtaacatgcaataaatatttagttaaaaattgtt

SEQ ID NO: 178017 - DNA, 629 bp, Cannabis indica
tgggaccatctattttgttaaatgacaagataaaccttgtattttctaaaactaaaatggtaaaaataatatcctaagtttaatttttgacactttttttttaatatgacaaacttaaaaacaatttttaacatgaacatatatagaaaatgtaaacatttttattataacaattttacataagattataattaaattttattttgacaaaaaatcagtctagggtgatatttgtaatattttaaaaaatacatagttcattttgtcatttaacaaaacgaagagcccaattagtaacttttgtaaaatacagggttcaaaatgatatttactcttttatttttaattttgtcccaaaattttttatttacaaaaatacgcttataaagttttaaaattacaaaaatacactttgttcagcaaaaaaataagaaaacaactaaaaaaacaaataacaaaaaaaaaaaatacaacgtgtcacgataactataaatcaaatataaataaactataaaataacaaaaaaataaaatcaaaaaaataacaatcaatgaacaacaaataataaaactacaaataaattatagaacaataaaaaaatattttattgtttatactgaaaaagtatt

SEQ ID NO: 178018 - DNA, 672 bp, Cannabis indica
atataatatatattctatcatgtaactttatcagacccgcttacattggagatcaaatccaaattcttcttcagctcgactcaacaactcttgatcaaatgaaaggtggttcaagtatgccaaaggaatcataaatctcttcattgttctctctccaaatatactatgttagagtttataccttaaaaaacttgtaaatatatttttgattataaatattagttgaacattttgatatatgcttgaatgttaaattattaatatttaatattgaataatttatatataaatataaaaaaaattcttattcatatatacgattgtgacttatattgtacagaaaattaagattacttagccataaataaaatagtcaacaacatattaaagttatgaaatctttaatcaacggttgttaatacggtttaatgatgcccgttattcggtacaagcaatctcaattcagattgttgatgtagtatgtgttggaaattattttaccaggatcttagatctactcacaagtatgtttattaacaacctaaatatgaactttctaaaacgataaattaaacacatataaagtttaagaaaccttacattgggtgcagcggaattataatgactccttccgttcagatctctaacccttgattcctttctgtagcagag

SEQ ID NO: 178019 - DNA, 558 bp, Cannabis indica
tatttttttttctttttttctatctatagcatttacaaaaagaaaagggaaattttatttacaccccaaaaatttataaagacaccctattttaataatttttattttatgtaaaatttatatctttaattgtactaatttttttcaattttttttctttcaattcacatttttaaaaattgtacctatcaaataaaataaattatattttaaatattatgacaaaaaaattaataaaaaattatatgaaattttcttagaaaaaaatgaaaaaaatatatacatgagttagaaaaaattatgaaaataaaatcaaaataagtattaaaattaacataaaataatatgagaaaaaaaatttaaaaaaaatattaagagtaatttttaaaattatttaagtttatattttttttaataatggggtatatttataagtttaaggggtgcaaataaaactcccaaaagaaaatgttttaggcttccactaagtaaattacttaataaaccacttgaggctagctcaagtggccatagggagtgcgtgtgtgttggagcacc

SEQ ID NO: 178020 - DNA, 504 bp, Cannabis indica
cataaacaatcactagtaaaattgaatgaaatcagataaaaatccttgaatataacaatctcaatagttcatggagaatttttatctgtcagaaaagttcaggggcatgatttgatacatgttaaagtttaaggggtaaaaatcctacttagcctatttttttatatatttttaagtgaatattataaattaggtgtgtaattagatatttaattaaaaaatcgattaattaaattttgaagtctaattaaatttgatcggattagaagaaaaatattaaattagatcaaatgctcaactctactcacaaatgttttaaaatatatatattttgaaatatttaaaaaactaaactaaaaatatactctaaactcttattctgattcccattttaagagaaattacataaaatatggcttcttttttttttttttaactctatgcatttttatggggtttaactttttatctttatttatggctttttattcttaaaagttaatg

SEQ ID NO: 178021 - DNA, 737 bp, Cannabis indica
ttcaaaagagaattgattgaattgacaacgattttagtatcactctcgacaaaagaaacgaaaaaacttaattctaaacactattttacttgttgcagtaaattaatttcctaatatagtcttctctttttattcttttccttttttttttttgctaaacttttttctattattattaaacttttgcaaataaggttattttaagacataattatgacttcatttcatgtcttctaaaagttaatttatcattataatgaacactcttttcctttaaaaataaaaatccaaattcaaagactatcatcttaaaaaaacctttatccaaccacatgctatgcaatgcagtgtaggaaaatctttactagtatcctcttttgtttaggtcaagagtttgactctcactcggcctctcatttgtgagttattatgtttggcctttaaagggtaacttgttgtatagtaggctatctttaggataggaactctcgtaaaatgtaagaactgatgacaaatcagaataaagtataagactcctataattagcacgtagtctctaaaattaccttagactgtaaaaatgggtacgagatctgtatcacgtgatcctctttcttctagcacaaaaaaaaatcttatccaaaaacacaaagactcaaataatgacaaatttgcccttaatatagaagtgaataaatagaaaaatagaaggtctattttggtaatttcgaactagg

SEQ ID NO: 178022 - DNA, 669 bp, Cannabis indica
tgactcttaattcatcatgaaaatcagttcaagtatctttttttcccccacaaaatatatgccaaactaaattagtattaattgcaacaatttttttttaaaattattttttcttaaaataatatatatattattggatgtagttaagtaaagtcaaaaatgtgcctctaatttagtcactttttcttttatttactttaattataaagtggatatagagtatatatgttagattcctaaaattttgataaattttaatatattacacatgtgaattttctttattattaagtaaaatacatataatttttaaatgaccaacagaataataataagggacataagaaaataatactcaagtgtcattaaatataatgacattattatataaaaggttaacaataatcatgtcccttatatctaatattacaaacattaaattcaaagacaagcaaaaaagaaaaaccctaagctagtaataaagccacttagttgtataatcattatgagcaataccatcatcaagacttgtaattgtgtttacacaaacaaccaaaggacttctaaccctatgaacaccactccgaccaaactactttactcccaaaatcatacatcctcgagacttttttgtcggtacaagagtgacatagtaagtgatttcttccc

SEQ ID NO: 178023 - DNA, 641 bp, Cannabis indica
aagaacttgtgtgccaaggatattttcttatttcgattttattgtcagaagaaatgatttaatatagcaccaacctccacaagatgcttgtcaccctagacatgagttcccataatctaccaagagttccaacaacaatcttaggcctccattttagaagccttgtctgtttctcgaatgacattcctccaacaattggaacaactctcatgttggtatccttgccaataatacaaagtcaaattgagtcagtgaataataagatataaaagctcccaacacactaaaagctattatctcgcctttattttattattgacacatataatattggtaattgataacattcttgcaaacctattttggatgatgccagccataataatacttcaaagaaagcaggaaatataaaatagatgtgtggaaagcatagtttggtaaaaggagtcacataatatggaagcaacagaaaaatgcatcccaaactacacagttaaacgaggaaacaactgtatgaaaaaaggccttcaaatattaacaagaaaaaaaaacagattaactctatgaacatcgtttgacaagcatttatagtttccacaaaacctcttaaaacaggatacagataaagcttatacaactaa

SEQ ID NO: 178024 - DNA, 535 bp, Cannabis indica
tacacttcactaacttgatttgattgacactactttaaaataaatattaaaattatacactgctttacacaaaatatctttggtgtatgatctcaatattaaaaattataatgatatcaaattgttttgtatataaacctaaaaatcagcacttaaaagacaacctaacctttttttttcttccttagtttcttttgatgaaaactcaattttgaatttaaacaatttgttttgtttgttcacttaccaaatttggaggcatgtgacttattgttacacgaatcatttgacatcaaatatttgctagcatatgctaaatttcaacaaataattattaacatataccatctctcctaatataataattaacatattaaagtaattggcctgcattattgggtaggacccattaatgaaacaaacaaaacaattgacagagattggatattccaaaggaatatgtatgagtttatgtttgttccattcggaaatttatgacaatttgaattatatacaagtgtataaagatatggga

SEQ ID NO: 178025 - DNA, 886 bp, Cannabis indica
ttaccattctccttacgaattggttgtcagtgctgtaaataggtgcatgtccgacccatattttaaaaatacatatattatgtttcatttaaatctacccacttttatgaataaattgcctaatatacctttatacttttgcacttcacttaagtatagcacataatttacacctaaagggtataatcgagacatcatctataaaagtgagtatattttaaagaatataaaaatgaaggtaaaaattaaaataaataaagtaaagtgggtatataatgcaattgcctcataatataggtcgtatccgtccataaaaaaaatatagattgtgttgtatcgtgccaaaaatggtaggtccagtatgatcagtaagtgcatattttcctattgtgctcgagttcgtactgtattttactcgggccgatctatttttcataaataaatcatcctgttttcttatacgagctcgaattcgagctccactttttctagtattttttacaactaataagttaatctctatgtaaaaaaaaaacaatcactaaattatatgtattctttatagttttaattgtttttatataaatttttaataggggtaattacataaagtactagtgtatgtttgacatcataactaaaaaactgttttttgtttttaaaaacagaaaattgtttttaaaaatcaatttggcttgtttgtaccttgtttttttaaaaactagtttttcagtaaacaaagttacaaaaaacaagaattttgaaaacacaaactgtgttttctgttttaaaaaccaattcactttggtcaatatgttttaaaaattcactaaccaacgtaacttgtgttttaaaaaacttctaaaaaactattttttagtcttct

SEQ ID NO: 178026 - DNA, 678 bp, Cannabis indica
ctataattatctatttatactacacctattatggttaggttggaatttaaatatatagattaaggaaaaagttaaatggctttaaattgaacctttgtcgccaaacccctataggtttcaattttgccactttattaaataacatatctttctttctcaaataccatattttaactctaactttatattttatatgtttaacaattataattaattactaaataaaattgtcattttatttatttatttattagacctatcaaagtctcttaattaataaacaaatcttaaaatctctcttcttctcaattaagcccttacttagtgaaaattcacaaataagacatagtctaattttgaatttaattgattaattgaaacttattatctgagtctacaagccaatattatctcaactagtgcggggaccatgggcctatgtaatcaagctcccaataagtagttctagaatttaccacgtaaattctctatcttattaactttttctgactccactatagattcgaaattgtactcttgattatatagaacactctatatgttccaaatatagatacactattaattatctattatttcaatccaaataatcaatgatcctctattgatgatctacatcgagtagagataattttactgtgctacccttcaatgtaa

SEQ ID NO: 178027 - DNA, 1062 bp, Cannabis indica
accgtctttttaaacggaccaagatttgagtgtgtttaagttgtttgttggaccaaaggagatcaaattcaagtttgggggatcctaaggattggtttgaacgtacccaaacagtccagaaacaccaatatcgaaaatcaccatttttgggttcacgttagacacattctattaggcaattcggatttgagtgagtttaggtggtttctgggtttgctggaggttgttgtttaagtttatgagatcccaaggatcagttttaatgtgaagaatcgaagctttaatgtctgaaacgaaatgtgacatttttggactaccatttttagacggttcaccgccaaggaagaagacaaccgcgtttaggctattttggctattttcttgcttttatttaatgttcagtgtgtggttttacctctagaattttattatgttggtttgagaattttcttgttattatttgatttattatgaattatttaatttattctataatttaattatagaaaatacttaagttgttcagaaaaatctaaatttattttctatgattggttatggattataaactgttacaaaattgatagattaggtttttggtcgattttgtatttctcatgaattatttgtgttattactaaatttaattatgaaaaatacctagattatttagaaaattaaaagttaattatttagggcttagtacagactataaactgtgttagaatggttagattgggttttcaatcatttttgtatttttcatgaatttatttagttaatacttaaaataattatgaaaaatagttaagtgatgctaaaacagtaaaatatatttttgtaatgctatttactatctatggtacgaagaaaaatgatttttataatttatagttgctgtatgtatttattataattatttgtgactaaataattattaatttgagtttttaaatagtagtaaatattaaaaattgtgttcactgcttgggaactgtcatatgatgttacatataattctagtctatgaaataaatttaagactaggttgagtattttttt

SEQ ID NO: 178028 - DNA, 722 bp, Cannabis indica
cttcgtcggagttgaagccatggctgaagacagagctaaagttgtggcctttctcgtcctctctctcatcgcctgacaatgagaaattcatgggtgacttcttatttatattaaaaataaaataaaatgttttattattaaaaataaaatggtttatgaaaaattcatgatcactttttatttatatataataaaataaatctcattaaatcaaaaaaaaaaaacatcattaataaaaataaaaaaatgactcaacatcaaatcttcaattacacgatacatgtaattactcaaacatcacatctttcaattataaaaaaaaatgactttttacgagggaaaatatgattgtctaatagagctaaaacaatatgttttcagtgtgatgaaaaattaaagcaacaattttgttaatatcaaaaagtttaattcaattaatcttataatcttaattttactctttctagaatcaatatatgaacaataatttgaattaatcttataatcttaattttttaattcaattaataattatttgtcacgtaattattaagtcttttccctttaattttccttttgttgatgatgctaatttattcatattttgatttctacaatttttgtgttcagaccattaaggtagtgttctactaggggatctaacgagttttgcctcttcgctaatggcatctaagagttcaaattccagtattgtataaatc

SEQ ID NO: 178029 - DNA, 933 bp, Cannabis indica
aaggaaaccaacatcaatctggtagtttacttacgaaacacgaggggcagtacagatcgtccttgagagtagtactaattactagaaaaactaaaaaagttacttgaaataagtacatttttgtagactaaattaggatggataatgcataaaaatatatagaaaataaaaaaacctctgaaaaactgaagtagttctcatttgcatcacatgtcaatatgcgcagaatgactttagcacaagctacaactaccgaagtatggttatcatcaagacatatcctacaaatcaataaactattgagttaaatagtataaccatgatgttaaaaaaataaaactagagaaaaaatttacaaattagctcaacgatatgtgtgtgtgtgtgatttttagcatgaattaaggatagctgtaaggatcattggaaaaaatttactttctcaatgatccaataatttctaagatgtacaaaattcaattcaaatacacatgattaaccactcaaacagaaatactggtaaaagtcagtcaagctcagatgcaccactctaacagaaataagtgagagacattcaacccaaagcaagtatccaggactaagactatgaagaaacaaagaattttgatgtaactcacctcattgatagaacaagctcaggctccgggccaagtgcataagcccaaatagcttcccagtcagaaactctttcatctttatcctcctttcccatggaacatccaatgtgaactcggttaatattgtctattgcattatcaagaacagctaaaagcaaatgcaatgcaagagcccgttgcccaggaatctgaaaccacaaagcagaaattaaacaaaataaataagagaatattactaaaatcagtatcaaaagtcaaggcttggagtttttgtgttgttattgtcagactggtg

SEQ ID NO: 178030 - DNA, 1034 bp, Cannabis indica
aattcttattataactagtgctgcaacttaatttgcaacaaaaaatggtataaaaactctattgcaattagggctacaaccactttagaaactcaaatcgtaaatttaaaaaaaaaagttaaaaaaataatatatgaggtaattctcctaaaaaatattatttttggtgtaattttttatgtttttattagaataaaaaaaataagtaattaacggaataagtatttaaatttaatttttaatttattatagatatttagtcctaagtgccaaatcaattactgcgtaacatcctttcatcagtctattttattaaatttttattttttatttgaaaattaatttaaatatacaaataaaaaataacacatgaataataatgtgacacttaaccgaccgtcagatatctagttatagaagttttatatatatataacttaaatatttttaccataaaaattaaacttaagtatttatttttaaccgaaaattaaatttaaatatttatcttgtaaattttaaaaatatatatacatatataacatagttggtatttgaagactagagagcacaaaaacaagttgacagatgatgataacgttgtattaaatttggtaatgctttgcttccctatataacatatcatttttttcaatggcagacccattttaattttggataaatactattttggaccatgtgttttgcaaaagttacagatttgaccctatattttgttaaatgacaaaatggaccatgtattttctaaaatagtaaaaatagaaccctgagcttaatttttaacaactttttttttaatacaaccaacttgaagacaatgcttaatacgaacagataaaaaaaaatgtaaacaattttgtcataacacttttagatcggattataattaaaatttattttgacaaaaaatcaattcaaggtcctatttgtactattttagaaaatacagggtccattttgtcatttaataaaacacagagtcctattagtaacttttgtaaaacagagagtcc

SEQ ID NO: 178031 - DNA, 724 bp, Cannabis indica
atttttacaaaaattagtattttatgtaattaatccaaaacaaaattcttatattacaccagagctcctaatcgtaggctgtgtatatgaagctttaataattttaatgatttatttaaattaattaattagcaaagtaaatcatggtgatatattattagggcatgttgggtcaaacgacaaggaatctttcgcgtttaataatctaataattaagtaataactaatctaaatcaacctctctctcaaattcactcctccaaatatatctaatcaataaaaatttaatagtaccataatttaattaattaattaattttataaatttaggacaaaaggcatcatataattgcatggtaattttaataatatatactgtcatcaatcatgataaatgtgtagatttcatgctattaaatgataattaaatcaaacactgataattttattggtagacattactttctcgttttattaataaaatgtttttcattgcacttgtagatttttactctttgaattgttgtttgcttaagttgttgaaaactatcccattcgttgaaaatattgaccaatatactaatgtgggagttataaaatattttaaaataattttaatttgacaagtaattaaacaatgggatatattaaagtttgagcattattattattattgagtacccgaatactatattgatgtgatagtactacaaaaatttttata

SEQ ID NO: 178032 - DNA, 1117 bp, Cannabis indica
ctgactgttaagtgttaagtaaattgtctcgtgacaattcttgactggtccaagtcattaaatttttatttttttaaaaaaaattaatttaaatatacaaataagaaaataacacgtaaataatgacttaacatttaatagtcacgtacctaccgagttttaaaaatataacttagtaatattaccgctaaaaattaaagttaaatatttatttacactgaaagttaaacttaaatatttaaactgtaaattattattatttttaatttattattaaaaaaacacctattataacaaatagtcacgtcttgttagacaacaacaacataaaagactctagaacagtctcacgcagttcaaggccgcgttttatcaaaatctcaaacatataaaaacccaaaatttgccattcataaatttgcgcttccgtctttcactcctctttctctctcttcaaccaaccttagttttactgctccattaaatttttagacagaatcaaagttgtaacgataatcttttcatggcgtttcgcactgcgatctccaacaacgtgatctctcccgtccgtacctccgtcgccggagcgagatccatctcatcgtggtggcaacacgtcgatccggcacccaaggatccgattctcggtgtcaccgaagcttttcttgcggatcccagtcctgataaagtcaatgttggagttgtaagtattactgagcattttttgggccttagctgccttctggcttcgtcactctgctttgtttttggtttgatctttatctctgttttttctcggaataagaaaacgaagagtaggaatttatttcgaagattaagaaaatggtcattgaatatgaaaaaagtagaggaaattcaaatgattttatttattattcactaattttgtttttctggtcgtagatgaaaatttacgattgttaatttgtcgatgtttcatttatgaactcaattttaatgtatctacgtatacttcagaggatgaggtttggagaataatttttctcgtagtgattagaattaaggagtattttttttcgatttttcaggtgcattttcattgctaccaaacttaaaaatttagtttttttttttt

SEQ ID NO: 178033 - DNA, 625 bp, Cannabis indica
agtaagacaaattcatttcattagagtagttatatggcaattgtacgggtacattacaaaaatgatttcactaatagggtgactattcaatggttacatttttattgtaaccatatggttacatttttctttaacctgtaatagcaggttactaataggtagactttccttttttagatttaattaattataattaactattttcttaaaataattaattaaatagacattccttttttagaattatttaattataattaactattttcttaaaataattaattaaatatttaacaagacctcttttagcaattaatatttatatttaaatccttacttgaattattttaataattaagccatttaattataatatttacaataaaatttatttttttttacaaaaattaaacttcttttgacacaaattaaaattctcttcttataataaattttcaaataattaattatttttaaatgatatttaattattttgttacaattatatgaactaagtatgaggcctcaagctaatcaatcgataacaagtgcagccattttttttctaaaaaatccttcaacttatttcattttttactttttaaatatttaaataaaaaaaatt

SEQ ID NO: 178034 - DNA, 616 bp, Cannabis indica
aacacttatccaaggtgtaagaatacctatcgctgattatcatgtcagtctaaatccagtgaactgacaaatcagggaataaactttcgaacatataattaagattatattccactgtgctgacaacactataatcattaacaaattcatatgttctggacttaaatagaattcatacattatatatatataatcatgaaataaatcatgtgaaccatgcaacataaaatgttatttctgatctttattaataagtaaatctgattatattgaaatgggttttatttagggcacaaaacccaacatttacatggtatgaatcttaaatttttatttgcattattttttctcattttttgaacttaagttatatctctatatgcctagaaacactatccacttgttttattgctctcaaagtcaaacagtatatatagtgtaacacgaacaatacattgatatatatatacccatcacgttttaatagtacattgatttttaacactaaagtctatggcatttttaaaacaaaattttatttgggctaaaaataattcattcgaactaagaccaataaaaactgaaaccgaccgcaacatacccgacaaacctgacc

SEQ ID NO: 178035 - DNA, 671 bp, Cannabis indica
ggttccacgtcatcaccgaatttggcggtcggtttcggtttcggcttttttgacatggcggtcagtttcggtttttgaaataaaaaaatagtttaaccaaaaaaaccgtcaaaaccgccaaaaactgcctaaaactgccaaaccgaaaaccgccaaaaactgtacggtcggttttatacagttataatttctaaacggtcggttacggttttcgtaaaataaaaaccgtaaccggccggtcggttataaattttaaaaaccgaccataaccgaccgatttttacccctaaaatagggcatgcattacctacgtaataggcagcgttgatgttaggtgaggttagccttcatccttccttgattgatgtgattcttcatgatggagccgccactagccccttagattatcgtgcaatcgccctaaattaggtttacgatgtttgacacatcctcttatgggtgttcccagactttttctccatgttgcattaaatgctaagcgattgttcaagtcaagcctttctggcccggaggcgccttcttatgtcttgactcccggaggggtaaggtagatcttatgctcatgttcgggagctaacaacatgaaccatacttgctgctattttactctgacttcccactcatctccaggtgacgtgtctattttgtcc

SEQ ID NO: 178036 - DNA, 543 bp, Cannabis indica
gaggacaattacgtgcataaagtgatcgtaaacgaactttcgtagctcttttcttcttttgttctattataataataacatgtccattctctccatccttatccactctatatcaatttgatttatgtatacagacaaggctattatgctatggcgatcgataatcatgtttttttctgaatcgatcggtaatcatgtttattattaattactatactttactttttatctcttaattaagtgaagtaattcattatctgacagttaatttctataattgtttgatgacaactagataattttgtttttagaattttttacgtaagtatatatgctagaattatgaatttgtttatgtagcgattgcaaggctttttgtgatgcttttaagactcgttgttttttttaacaaaaaaaaggacaacttaaaatattattttttatttttctagtctcatttatccacataaaatttgtcacatttacataaaaaaaaatacttcaataattaactttaacattaaaatttagttgaaagaaata

SEQ ID NO: 178037 - DNA, 591 bp, Cannabis indica
gtcatctatttcagataataaagtaattatctatttgttttttgcacctagaaggatattcttttttttttctttttaaaaatcttccatttccatttcgaggaaatgtgctaaaaagatctcaaattttcagtccttcgactaatgcttcttatgagtttttgaataatttgtaaaacagagtatatgctgattatagagtgaagttgtttctgaagaagtttatgtgaatttactagcgcatgacattgtcttttcttatagtttgttgtttttccttgtgtattcagtgaaaactgtttaattactagtaagtaatgagaattaatggtaaggtatttattcttttacatttgtgtaatttattaaaaattaaaaaatggagaacttgattaaataagagataaaaaaaaagaaatacttttcccaccaattttttaagggatgtcattaagggtaatggcatttatttatttttattttattttttgatattaaagttttattgtctagctttttcgagcattttttttatgttattcataacgttaatgttgcggcctatgaattggtttagcatgtttttaggat

SEQ ID NO: 178038 - DNA, 1254 bp, Cannabis indica
gaaagaaaaaaattaagaataatttaagttttttaagtaaatttaattaataattttatcaaattttttataatttttttagaattaataaaaaattataattttttgaatttaattttttttttatataaaaagtagcaaaaattaatattagtcaaaattcagggagtaaaaatattaattttcaactattaaaataactgattatataatttttatattttaaaataaataacgaatcagtagtattgaaaactcatatgataaaaatactaattattaatatactaataataactataagagataaagctaataaacgcggcaaaaaaatgtgcccttttggggtctgtggaagttaaagtcttttaacggttttttcctctttcaactggtttattcatcttttttcaaaatcatctttgaagataactgttccctccaatgtttccttcatcatcctccatcgccggcttcttcctcttgcactaaattatccctttttctttgtgatgaatactgtaatggacaatcttcactctacactatccctcactgatgaggaaagttctattcttactctccctgaagttgctgcactacaatcatctgatctccaaccaggttttgcccttttggcaagggttctcaccagccagaatgtttacaaaccaggcttcattgaccaaatgtctggccattggcaaggtcgataccccgtcacgattactgaatacaagggagaagatggcttatttcacattcggtttggctgcgaaggagataaacgtcgtgtgctcgccaaagaaccatggcactttcagaaccatttaatcatatttcttgcgccagatgctctgcaaaatgtcacaaaggaaaatctgatttatactcctttttgggtgcaaatatatcgcctaccattcttaagtaagtccaggtttcttgctgaagcgcttggtaatattataggagaatttctagaggtttatgatgactctactaatgaaggttggggtccatttctgaggatccgggttaaactccaagttaccaagccacttatgcgtggtcaaatgattaaactaccgaaaatcaaggatgagttttgggtcgatttccgtatgaacgacttcctgaattttgtttcgaatgcggatgcttgggtcatccttttgagcgatgtattgctttcatggagagaatggatagaggcaacgatgatgactttcaatatggaccttggatgaaagg

SEQ ID NO: 178039 - DNA, 633 bp, Cannabis indica
gggtttctgaatttggttcagaaacaagagcttttaaatgctacattgaacggaagtatgattctccttattgtaggaaaaaaagaatattatattgttcatatttccatttcacatgtagagtaaaagcccaccagaagacttaaaacagaaaatttaaaaatttaatgattaaattagaaaccctaatcatttctcatctaaaagaacaaaaagatttcggaggtttttgacacaaagccaaatttaatgtgaatgttcaaaccctagaaaagtagagtgaacccaagtttcagacttttgacaattcaaatactaaaaaagtaaaagaagcagaagcacatggtttaaactcacatgaggacgatgagtacgaccggcggaggcaccatccggagagggattggtttgggggtttcgtcgaccacgaccgcgattcatgatcctgaagaagaagaggaaagcccgaaggcaagcaggagataaatttggcgggagaagatcaagtgttacaaatttacgagttgcgagtttacgagcggaatcaagttttgagtttgggtctaccttttctttttcttttcttttgcggcagaacacaataagactagtaactcgctactgcaaatatta

SEQ ID NO: 178040 - DNA, 904 bp, Cannabis indica
atatatgagctatatacaataggtcactcttataggaactaataagatgataatgctagtgaagtctttaacatattcaaatatgatagatatatatatatatacatatataaataaaaacgtagatttcataaaattataattatttttaaatataaaatataatgcactctccttaatttagttaattaaatattatatatatatatataaatgtgacctatcaaagtttataattaatacattttttttaattaacattaatgactaaatattactactattaaactgagtttctaatattttaaacatcactcattctatatttaaattacttagttcaaatttttaaatatattgaataaaatatatttgaaaattaaaaaaaaatatcatatttttttcaatggacatacataaagtttccgtcgctgaaattcttaatgtaaaactttattgtatgcgttgttcgatattggcccccctactctttaattctagctccgcccctggttgatggaacatcatattggatgatacaaggaaaaagataaaacttatatatatgtttggctatttccattaataattcatgctatatataatcatgagatttttgaaaccatctttgccaattgcgcaatactatataataatttctctatatataaccaagtttacactaatataattcttttatacagttcataatctcatttgcgagtacgtggatctaaagaataggcgcttgtttttgccaaagaaagtgagcaaagaagatatgagttggattgaaaattttgtaattagatagcaagcttattatgaaaagcgctagggagtagaaaaaacagttttcggtaaagcccaataaagtatataggaaaaagcccaatagagaaat

SEQ ID NO: 178041 - DNA, 961 bp, Cannabis indica
ccttgaaatttaatttatgcaattatagtatatttcaattttcccaactttgatcatgtgtttaattaatataatttgattaccttttgtcaatgggatgaattttctccttgcccgcgagaaagactttcctaaagagagactgcggtacaacaaggagggtgctaattcaaacattcaagagttaataattcagtagtttcacaaacatttgtaaccgctctaattagtataattaatacacctatgattattgtaacgtacaatctcattataactataatttttggtaacaatattcacctgccaccttataataaggtaaacccacctccatttaaaaaaagtttgagtataataatacaaagcaagagtactcttcaaaagtggagtaggctcgaatcgagctattataattttttgtatctattttatattatatactaggtaaataaatcgagctttgggcggttttgtaatttttttttataaaataatttaagtttttagtattaaaaatttaaaaatataactgactaaatattttattttttaaaatattataaataatttaataatatttcaaaatactttttaattatttttagtgacattttttccaatgacactaaaaagattatagttacatttgtgtttttactcacactcgtatatcttacatatttttcataaatgtcaccaaagcataaatgttagtaaaactaatcaattataacactttgaaatgttactaaatccctattttgctggtgtagtgctaataaaagtatccaaaataatttaatttgatggttaggtatcactctgctactaatgataaaaatcctatttccattccagcccctatctccttatattgtattttatattagtaaaattaatgcatgtaaaacttttttagtaaatctattttttgttcatttttgcaagatcgtatagg

SEQ ID NO: 178042 - DNA, 580 bp, Cannabis indica
ctaattgagaatataatactgtttctcacgtaaacttacaagtgaaggagattctacagtataagcattgcgttaatcattttgtttgtttattaaggcattttttcgcttcaatgagtaaggttatatcacttttactttatttatttacttatttaaattgcaatgtatatcaaacaatccatcagtggaaaatttatgttctttttcacaggtgtggtgctacacaatcggatttatctttgtctggtgaagaagcacttgatggtatacttggctttggaaaatcaaattcatcagtgatatcgcagctagcttcatctggaagggttaaaaagatgtttgctcactgcttagatggtactaatggaggtggaatctttgccataggccacgttgtacaaccaaaagtaaacatgacacccttggtaccaaaccagtacgtgataatgatgtcttttgtattttttaggttatatcccttacacgaattttcgatgaggatataagttttgtgtgttctttacaaatctcatgtttactgttccaaatcatagtcatagatagctcttagtttggt

SEQ ID NO: 178043 - DNA, 649 bp, Cannabis indica
atatctttttctttgatatacatatatagtttgtttgaaaacacaaaaaacacaaaataggtgcacgagcactctttcttgggtttgaaaccataaaaatcttactcttgcaagaatgatacattttgtcgattagtttatcaataataacttaagtgagtacaaacaaagccaaacatgagtcgtcactgtttgaaattattatccaaaatgtttatggaagctgactagtaatttattacaggctggtaggtatcaaaatcctgaagaaaatgccttctttcctgatcatttaccaccctcattggtgccaccatatgcctttccaccggtaaattattattattagttaataccttggtgagtcaattaatatagtatataaaaaataactttggattcttataataaacttggaccgtaggtactgcatcgtgcaggggcttcaatcaatgtgaacaacaaaatttgggatatatatttcaagcaattgcttcctttgtttattatatcgggtgatgatggaaactatgcatcgactgcctctagtgacctcaattgcttacaggtaaggttgtttaagttttccttttttattgagcaaatgcctatttttcatctgaattatgattttatatctataaatatt

SEQ ID NO: 178044 - DNA, 874 bp, Cannabis indica
atagtaactaaaagttgttaaggtgttgagagacatgactctctcgaatgcaatgtattttttaaaggaaattttgaagggtatttattagaccacatccaatatttttaggcctattcaaattcgatcaaagtatatattattggatgttagattttaccattcgaaccaatccaattactttcaatcatctgatcgatcggttctatccattgaatatattacttatgtaaatttaattattaaatttgttcgaatttatttaatattttaaaattaatatttttttaattaaatcgaattcatctaatattctacgtctaatatttgaaactccctcttcatatacttgaaacattatttaaataagttagaataaataattgtcgagatttaattagtttttaaatcaagttgcacacagatttgttttttctttaatttttagaggtccaaaatcattggcagccaccttttatttcttattatatatttatatttatatatggatgtttggttttctttcataataaactaatgggtttgtttatctaaaaaatttccctttggttattattttattagaaaaaatcttagctagcatcaattataggtttgtatttataatacttgaattagtagctatcatcacattaattaaaaaaaaacctcccactttatagcttttattttttacctaagtcaccatctcgaatgaaatgaagttatatatttttattttaatttatatatttatttatttatctttagtaaggaacgctacaatgaagttagcagccattaaaaaataaaactcaaaggtacttaaaaaaaataaatcactaacgtttttttccatatttttttaaaaaaa

SEQ ID NO: 178045 - DNA, 746 bp, Cannabis indica
accagttttattattccgcatttaattaatcatttaattaaataatcaaactgggaatattaaaatacggaatttcagaatgagtaaattaatctaaatgtacaagttcagaaaatatttttaagaagctatttatttaagagcatctccaatggtaaaactttaaaaaatgtttagtgaggtagatatattatatagcaaaatattgagatgctatattattggagagaaaaaaatgttattctagaaatttacataaatgctattaatttctttttaataaaaattaaagctaaaaagttattgtagctaaaaattaagataaatattaaataataatatgtgagattataattataatatttttaaagagtgttatatattggaatatttttagaaataaaaatgcaaaaaataatgtagaaataaaataaaataaaatattatattttgagataatatggtaattaataattatactttggtagatgctctaatgacagaatcaagtagtgtgaagaatttaagaaaacttagtaattattttattttattgaattccatttgtttgagttgaatgaacctagtcaaatccaatctttcaatgaactggctataggcaaaaaaaaaaaaaacaaaaaaaaatttactccaatgcatccggctgagttacctgccatggaagctgacagtagtaaagggcacataaccagagtcctcttctgtggaccttactttccggcttc

SEQ ID NO: 178046 - DNA, 671 bp, Cannabis indica
tatttttatctttatatataaaaagtgtttatttaatgtgatttgttggtttaattaattttttttaacgattttcttttctcttttgttaaaaaataaataaacagaatgctaacgttaaaatgttaacaaataaataaatattagaaattttttacaattaagctctccattctcgttccactcgtctccttgcttggtcttcacaatgctttcaatctccaggtgacttaattttccacttcccatttcactgccatctcctctgttcaaccaaatctcaattgccgtgtttatttctgttttttcttccccattagagtgtctctactactcctccgttaatggcgatttacttatatatattatcataattagagcaacggaccttgtacaaaccatcatgggctcgtttggaacgccgtattaggtcgtattgtattgtattgtattatattgaattggattatatatcatatttttatataatactatgttaaactttaatttatactaaaatattatatatttaggtgtccataaaagttaataccacatatagttttacataaaaatattgcataaaatacaattcaatataatacaatacaatacaatacgacctaatacggcgttccaaacgagcccccatatgtataaaccttgttact

SEQ ID NO: 178047 - DNA, 510 bp, Cannabis indica
tacgtttaggagaaatacacagaggctcgacctttaatcaatcgaggtctgaaaggtgctcgatgggtctcaccaccattcgtgctaacttataagagattgactaatctcgatgaagaaggtctccttgggaaggtagaggcatttcttcctagtctagaacagctcgcaacaaattttaaattttgtctttcacattattttttttttaatatcaataattattataattatattttttcacattttttaaaatcatatatatatatatttttaaatttttttgtaataaaattttatataattctttattttaattttttcctaagtatttaaatgtatattttatttttattatatatgtatattttttaaaaatttgagaaggaagaaaaaagattgaaaaaattaatataaattaaaagtaaatattaaagtgattataaaatgtgttgttttttgagttaagattataaaatgttgttttaaaaaaaaacttttaaaattgaa

SEQ ID NO: 178048 - DNA, 735 bp, Cannabis indica
attgaagtatcattttaagagattttttttaaataaaaaatcttaaatgatatttctttatatatatttctttatatataaaaaatctaaaatgatatttctaaaatgatatttttgaaaaattctaccatgcacctccttgaaatagatatattaatgcactcatatctgttttatcatctaaaataattttttagtcaaattttttcttatgatcatatacgttatagttatttaagacattttgtaaaattttaagaaattcaaaaaagtttaacacgctgaaaactacgttcaaacagtttgttggacgcgtgactattttattttataagcgtgtaaaatagtctgtttgaatattattttctacattgtaaattattccgaatttatcaaaattttataggatatcttaaatagatataatatacatgaatatgaaaagaaattagactaaaaaatcttttggatgccgaaacaagttaagggtgcatcagtacatctttttttaaggagtgcattataaaatcacccccaactaaaaacgaatatttattttatattttttacgtaaatcctttttaaataatttttttagtttacatattttacgaaaataacttttttttatttacaattaacataatagtttgttttgcttctatttttttttttattagtctagagtataaaaataaaatataaaattttgactttttttttagtataaagtat

SEQ ID NO: 178049 - DNA, 627 bp, Cannabis indica
attgacgaggaagaggaagaaggtgagatcatccctcccatggaccgtaagcgcaaagccaaaatggtggagacgaaggctgtcaaaaaatcgaggctagcgggcactcctgcttccagtgctgattcatagtttccttctgaggtggatgaatatactgtgcctcccggtattatcttaacttcccatcatcttgatgaggaaaggactcagcttcggattgccaaatacaattatgccttgggggaagtacaccaaggggaacgcagaggtggaggctctaaagaaaatactaagggacgccctggatgaatcagtccaaagcgaatatgttaggaatgtctgggatttgaatttggatcccttgaccgactcgtttaaatgcttcataggacccagcttggctccctttgcttcagagataatgagccattttgctgccagcctgacccaactcccaataaaaagatatgcagcctgtgcctccactaatctcgtgtatcaaatccaagcatgagcgcagccctcactgcagtgagttcttatcttttagatttctcaagtctctttcatttttgattaccaggttctaatatatatattatttgttgactgccagatcgcagc

SEQ ID NO: 178050 - DNA, 578 bp, Cannabis indica
aaacatgctcataggattcgaaagacattctacaatgtatgaaaaataaaaatttatgcatatttgacataagactaaaaataatttttgtaatattcaaatacaagatgctttggtcaatatttctaaagtgtttttggattttttgatccaaagaaaaccttaatgctccacacctagacttggacccgacttgggtcttgacgtcgacatcaaatctcgaaccctagagttggatccaaccccgtacttggaccttgggttcagaactcgaacaacgaacttggccttgaatcttggccccaaaacccggattccgaacctcgagcttagctccagacctcgaagttggaactggccccaaactcaatgttgatcccgaacctcagacttgttaccatgagaaaatgataagaaaaagtgatgtgagaggaagtacaaataaatatttcaaacaaaaaaaattgttaaaacaacacttcgttgttttcaatttttttttttatcttttgaatttttattttctgaaattattatatgaaaacaatgccatacgcacctacttactctcaaagaac

SEQ ID NO: 178051 - DNA, 709 bp, Cannabis indica
tcactttgtctctcatcaaggtcaaggttagggtctaggtcagagtcttgaggtctggggtcccagggggcaagattggaggttaggtccgaggtttgagttcagatcccaaccgagatctgggtccagatctaggtcgagtcttgttcatatccgggtctcaatgtattgaaatattttttttaaataaagtaaaatgcaaatataaattgtatttttttaaaaaaaaaaaattattaaccaaatgcgttgtgtgttttgaaaacttcaaaaattatattttattctcatttctaaaaatataattttgataacaaaatataaaaaataatgtcaaatatgctcaacttttctatttttattttcttgtaaatgagactcaataatttttttcgcttagatttcatacatatttaaatattgttagaatttgaggataagatgaatgaggttccatcccaaaatcaattggcaatgggaggagtagctcattcctcttatatattctattatctttccacacattagcaatgtgggactctctagcatcccccctcaagatggtggctaatggtgactattttatatgctcaccatcttagacatctcgatcataagcggctcatttttttttttgctctactttttggatcggtatttttggatttttggtggctctctcttttttttttttgtctcactatccccg

SEQ ID NO: 178052 - DNA, 537 bp, Cannabis indica
ggtcaaagaaatcattcactcgtatgccatcaagattgacatggtaaaagcgtatgataaactaagttgacaatttatagaccaggtgcttcgcagttttaaggcccccaaaaagtttgcaattgggtttgccagtgtagttctactacttcgtttaatatcctccttaatggaggaaaagtgagcagcttagtccctgagtgtggtttaagagagaaagatcatttattcctgtatctctttatttgggcagctgacatcctctcttgtatccttgagaaggccatcaatttcggatctataaaaggtatcaagttgagaagagatggtcctaggctctcccatctttttttcgcagatgaccttatccttgtgggcagggcgactattgtagaggcaaaggtttttggaaatgcttggagaaattttgtgattggtttgggcaacgtgtcaataagctaaaaaaatcaatcttctttagcaataacactagcaagggtatgaacagaggtattatgcaggagcttgggctaaaca

SEQ ID NO: 178053 - DNA, 771 bp, Cannabis indica
agtttatgcaggggttgacataggctgtatggtgtatcgatcctccagttaaacccaacccgggatcaaactttgcacatacctagtcaaacatttttatgttattccagttggacttaaaaaatactaatatactggagctaattgaatcataattcataaacatacacaaagactttggaaaatgattaataataggtatcatatctttacatggagccccgtattagaaggctggattaaaagaaaaacagtgtaaagatgacaacaaacaattaaaaaagaagtgtgtttaaatataaattataacatatatgaacacctttattggaatgaagatggccaattttgatgtgttaccgaaaaaatatgaaagatatggaactaataaagacaaaacaatagttgccaatcgcaatgtctaagaaagattgccttatatttataagcgaaaaatgaaattttttatatatcaaacaagcaaaaaatggttgcaaaacaaccttttggatgcaaacatatactccattataaataatacccgcacacaaaatatatatgcaatgtatagcagcatacctatcatagttcctgtcatagtcaggatccttgcggtcaatttctcggtcccgaaatatagctaccctattatttggtttgtacctaccaattggttccttctctgctctatttctagctgttctacaactagttatcaacggatcaatcagaactctactaggaggcccagaacttgcatcagcaaaaacc

SEQ ID NO: 178054 - DNA, 443 bp, Cannabis indica
gataggaaaccaatgattgtaagacatcggtctactgatttgaatgaactgaaacttattcgattagttccattgtggattcgtcttcgagatccagggctacaataatgggggaacaaaagcttgaatgctttagttagtatggttggaaaatctattatggtggactaacatactaaagatcgcattatagttcaatttgcttgggttttagttgagatggacaaaactgatttgccttcgagatcgattctttgtctcaatgaatatgttcaattgatggagtagagtatagactatgagcagctatctgtgaagtgtaaaattgctagggattggtcatatatgatcggtagtcgcaaagttgaattaaaagaagagcaaaaactgatgggagaagactgtcattgaatcttaatctcagaatgaggactctgatttag

SEQ ID NO: 178055 - DNA, 852 bp, Cannabis indica
tatctctaaataatggagaatcacaacaagcgtctacgatattgtttagttatggccttttagataggggaatgacatttaagtctatacctatagagagtacaggagagtggatatccctttgttataccatcgatatctctgagcatgtctccttaacatactgatatgcttgttttggctaatctggtggattttgcagaggggaccatagcaggagggacagctggtgttgttgttgaaactgctttataccctattgataccataaagacacggctgcaggcaggttaaatatgaatttcaacatttgaaatgaaacataatgtcccatgaggggctatttggttcagtcaaacttgtaatgtcaatttattgatgcagaattccacgttgtttactcagacttactttttaacctttttttttttttttttactttttctttcttctttttctttttgttttctttcaaatttttataatttgtgttggcaattttttgatgatgactctaattgtcatcaattttattacaggctgttcgtggtggaggtaaaatagtttggaagggtctttattctggattggctggtaatcttgctggtgtcttaccgtaagtactttgaactgaattcacgcatgtggacatacttgtttaagaatttgatatgtgttttgtctgttatgtctcatttgtttgataataattactctactcttttggcttttcttttctattttgcaaatatatttgttgcacttataagaagatataatttccgtatatacagggcttctgcaatctttgtaggtgtttatgaacctacgaagcagaactattgcggatgg

SEQ ID NO: 178056 - DNA, 669 bp, Cannabis indica
  modified_base (475)..(475): a, c, t, g, unknown or other
atccttcaccttcaaggctcaagctgaggtccccctacactttcagaaccaaaaagaagaaagaaaaaaaaagaatttttcaatgatttgacaaaaatgtgctgcacacactatactatactattgtgtatacacaacataagagcaagatgggatattgggatgagatcatatttgcataaataagagtgaggagtcacaaacaaatggtcccttataatttaagacacctcataataattaatacactactaatttttggaggtaacattaatggagttcaatcattgagcttcattggcaagtgaggtgagcaatcctccactacaagatatgatatgatgtggaattaatttttagttgagaccgctacatcaatagtaaaattagaattggttattgaaaataattgtttgaatttaatctctatttattttcctttttttttctctaaaaaaacaaaattaaaaaaaanaaaaaaaaaaaaaagtatatacttatacttccaaaaaataacaatttaaaaaaaactaaaatattattattaaaggataatacaatattattaatatactatactattctttttttaaataaagttacttcaaaataattatttattattaaaaaatattaaattaagaaaaattcttctataaatacaattta

SEQ ID NO: 178057 - DNA, 643 bp, Cannabis indica
ttatttatgttggacacgacagaccaaaaaaaaaaaagatatgacagacagaaattcataaaatgttggagttcccgaactcttagaactaatagagagttcaaagaaaaactaaaaaccccaaataatttatataagcattcttttagatcctctaacccattatttttgggacaggaaataatataataaatgctagtagaaattgtaaattaatgtagtcatgtaagtaatgcttttagcttgtggtttcttttaccatccaccatactcaggaataatattatgaagcaatatttcaaccaaacaagcttaggcctgaagatatttgggcaaccggcaacataaaagttttcaatacaatgttaaaaaaaaaccaaaacaaaatatgcattattgattaaagtatatagttgaattaacatagatcgttatagttaagttcctacagagacacaatctactaatccagctccaaccaagttgcaaggcatacctgcggacagcaagcccccaacgaagctgtaacgcagagatctgcctgagcaatagcacaaacgcctctgtgttcgacgtttttccgccaagagctcaacgctgtctacggactttaaaacgttctgaactacagatgtagttctct

SEQ ID NO: 178058 - DNA, 658 bp, Cannabis indica
ggctcctccagcataattctagaatatttgaggaccagaaaactatagctattgattgctatgtagatgccatagagaaactcgaatctcgaaccttgtgggagaaaaccacaccatttaagatacccgtcttgttttttgtttttttttttttccttaaagagaaggtggtctattttcaccaattacttaacttttaaaatcatcaacttcttacctatctctgaatttctaactaaatctgaatacatacaacatagatgattgatgcatcaacattgtaaaacaatttctactttacaattttactaatattagatgacataactcatctagcaagcacatactgcataattatgtggaaaggtcagaattagaaatgctcaccactttcatatttaactacgtattcatcgacatcaacacctggaagagtaaaacctgctctagtcaaaagatttccagcatctcgcacctaaacaaaaaaaccatttaggggactcaataaccaatcaccgaacgttcaaaaactattttgcatccagtacatcaatgcatcactcaaccaaaaaggacagaaacaagttcatttacttttcaaaagaggaaaaaaaactgacattttaacagccttatatacaagcatgtcaagaacaac

SEQ ID NO: 178059 - DNA, 803 bp, Cannabis indica
ggttaaactatcaaacattgatttcggtataagtaaaggagcgagaacggtattttataaggattatttaggtcaaagatatttttataattatttacaaattaatgtatataattgaaaatctcccaaaaattaaagcaatactttgagccaatatttattcaacgaacccttgtcccgatcaatgtattaacattcagtgatagaaagtcttctctccggcccacgactctttcactcaaatataaaacttccctacaaaaggaaaacacaaaaataattaaagtaacacaattattgttgacaaattaagttacaaacataattcttaataagagataatagtaattacttacctacaattcagtgagttgtcaaatatatatttagtcacaccttcttcgcaagaagaaaatgaggactctccaataaaacagggtgtcgaacaaactactggatacaatgcagaaatttctgaaaacttacggtgctcctcgcttctctcacaagccaattttactttgccatcctaatatatatatatatataaattttaacacatttacacacactattaaaatgtatatttatacaagaaaaagaatagaataaaaataattacccacttaccaatgcagacaactcaaactgagtaatatcatataagtttaaatcaaatccagaaccaccatgaatagctactaactctttctcttccttaatatatggatcagaacatccatatcctcgcgcaaatctcgggtctggaattgagctatggttcctctttgaggattctacgc

SEQ ID NO: 178060 - DNA, 650 bp, Cannabis indica
actcttttctcaataaaaaataacaaaaatttactaaaaaaaaaaaactagaagtcaacctcaccacaactacaaataaactataaaacaactataaaaaaaataaaatattattttattttatttcatattcatattcgcatttccatttctgttttattaatcaacgatgattgtgttgtcgctatatgctcatccggggcgttaggctgagcatgtgtatggcttgatatcatttgaaacatttctatataaaatttcctaatatttttgtcatggagaaaatataaacttgagaacaaaagttgttgagagttgtttatttcacttctttgttataatattctcttctttcaaaagttctcatattaatcttggtttatacatttatttatatttttttgtttgtggttgttatataaccatctttcctcatcaatatgtatcgaaatattctccaacaaatatataattcataattaaccgatgtatgtatgaagaattaacttcgattacaattcgcaattattataaaaagaaaaacattttttattccataaattagttactgctaattaaaaataataatacatgtaagattctctgatcatcgttaacaattcaccttaatatatttatatttttgaaaa

SEQ ID NO: 178061 - DNA, 699 bp, Cannabis indica
agcaataaactaccagtaccacaaaaataaaattgagaaggcactttttcaagcagaaaaataaaaagggaaattaattagggcataggcgtgagggacgtgagaggacaaaagcaatgattatttaactggtaaaattaaataattaagaaaaggaatgcggtggtatatatggtaaaagttggaaagagggaagggtgtttgggtaaattcatagattcggtttatagccgatttagggcaataggacgaaagttgacgaacatttgctttgcgaaaaggacctcatctaatcacttttttgtattctcttcttaacttcctctattgcttgaaaggtgagcttttattgtttataactattttttgagaatatttagaccccttctctctctctctttccaacggaataccaatttggtgaaaactttttaaatatttactatttttctcctctaacttacactagtgatcccccacctaaaaactcaaatgtgtcaaaaataaaagtaaaatctatatatttatataaagaaaagtacaatacatgaatttttataatttttttttatttttttttagttttgtaagaattttatattaatgtgctaaaaaatatgattagtgatatttttttttatttaagaaagaaagaaattttattttccaaatctaataaccaaatcaattttctactcg

SEQ ID NO: 178062 - DNA, 828 bp, Cannabis indica
attcgcacgcgcaggtgggagtgcacggccgagaaaccttgtccaaggagcctacgtgcagcctgtacgtgcgcgtagagggtgatttcagacaccctgggcatgcatgttcggacatcccatgtctgaacacgtgtgtcacccaatccgcgcgcgtatggggtgtgtcaccacccccttttcttttttttttcaaacttcaaaaaaataataactaattcaaattaaatcgaaattgagttttataaaaaaaagtgaattgcttaattttttccaaactatccaacaaaaataattccagaaaaaaatttcaattatttttcgtaaaaaatttacaaacatcaaataatcatcaaaaacacatagatcaacatgaatcacatccagatcacacatatatcgttttaagttcaaatttcttgaaagtaaatcaattaccgtgactctgaggccagttgttggaatatattttaccaggatctagatttactaacaagtatgttttttaacatcctaaacatgaacttctaaaacgatatgaaataaacacatataaagtttcagaaaccttacagtgggtgcagcggaattataatggctccttccgctcagatctctaacccttgtatcctttctgtagcagagtatcaccaagatctgagcccgattctccttctcttgaatttggattcttcacagccttacacactatgattgagtaccacttgatgtgtgtgggcacttactctaatcactctagggtttcgattttgaagagagaaagagagagagaatttcgaaaataggtagagagaagatggctcaaaa

SEQ ID NO: 178063 - DNA, 716 bp, Cannabis indica
aaattcaaagtgtggaatagagaatttttgttttaaaaaaaataaaaataaagaattgtaaaggggacttggggagcttattgggaagaaggaaagaggagaagtgttcacgggaagagtttgaagctgaaaatggtattgttttgaaaattcagaattagctaagtttggaaatagttttaaaaaattttgaccaaaaaggtttcgaattgggaaagaatggaaatgaaaactattttctgtcacttccgttataaatatcacctggattgatgtgtggtttgcacagcacagcatagcaaagagcagcagagagcacatattagagacaaaatacaggtcatgctgagactactgaggggggatgggtacgacaaaatgctcaaccacaacaacacaccaattggggaatatcgtacggtaactgtaaataacaaattattaaaatttcaaactcactcccaaaaaaaaaaagaaacaaacaaaccccacccacttttgcttctaatataaactagaaaaaataagatttttttttctctcgaattaaaattttgtagggtttttcacatatatttctcctgatttttttcttttattcataaagaattacaaatgtccaatgttctccattcgttacttcttgtttattttcttaaataatttatttttggtaagtcaagactcattccattactcacttcaaaaacaattac

SEQ ID NO: 178064 - DNA, 805 bp, Cannabis indica
ccatgtttgtttaagttgatctaccttagcagaaatacatcaaatacaacccaaccaaaattttaaaaaaaaattaagtttcaagtgaaaggaagaaaaaaagaagtgaagatttatgtaccaaataaatagctcgaatagttttgataaatattgataactctcaaatagagtatttgaacgaaaaaattcattaaataatgaactattaattctaaaccatctattcaaaatacttttattacctattcttaataaactaactatatataaatgtagtaagatctggaaagtatttcatccccaaaaattctccatgtgaagctattggtgcatttcaatatctcaacttaaccctagcatggtgccaataccatcataaaaagctcgtttagaacgtattaaatcgtattatattgtattacattgaattaaattatatatcatatttttatataatactatgttaaactttaatttatactaaaatgttatatatttaagtgtccaaaaacactaatatcacatgtaattttacataaaagtattatataaaatacaatttaatataaacaagcccaaaatgtcatattttatgagtgcaattaaatattcaccctaacattataattattagtagtgttgcgccaaataacatttacgtaaaaagcttcagtaaataaagcatattttgcatatttacaagtgctggcaaatatgccatccatatatgaagaacatatgaatcttgtaaggttatatttccactctagggatatatgcaaacaaagaaagtgaaatacgc

SEQ ID NO: 178065 - DNA, 798 bp, Cannabis indica
agagagagagagaggagtctgtttcttccttattattatattatatatattttgtttcttttaacttggtcaaaactaagtgtgaacaattttttttttttttaaaaaaaatatcttggttatataaaactatggactaattttggaaattaaaaatttaagaaagaaaaatgtttgagaaaaaaaaaattatatagtatacatacccatagtaaaatgtgaccccttaaataaaagagttcattaaaaattttctaaaaggcaatcaagacccataactactttagaggaatatatatgtatttatgcatattaaaataataataataataataataataaaattattaaattaacaaacaaagaggctaaaaagtaaaaaaataaagaaattaaccttatgatattttactatatttataaagttatctaaattctttttaagcaatgtgatgaaatatcacaccaacaaatatatatacatattattttatagaagtttgaattttaattaaattattattcttattaattaattactcaattaatattttggaccctctgttttacaaaagttaccaattggactctgtgttttgttaaatgacaaaatagaccctgtattttctaaaatagtacaaataggaccctgaattgattttttgtcaaaataaagtttaattataatccgatctaaaagtgctatgacaaaactgtttacattttttgtatctgttcgtattaagcattgtcttcaagttggttgtattaaaaaaaaaagttgtcaaaaaattaagc

SEQ ID NO: 178066 - DNA, 605 bp, Cannabis indica
cctctctcttgcttgcccgagtggctttatatagtttatacttgtgtgtgttgagatgagattgaatgagagacttttgagagaaaatcagagtgattatgagggctgtaaaatgatctctcatgtttttaattgagagtatcacaagtgatgttctttgcaaggagcaagtctccattgagttaagggtttaaccttagttttttgtaactttgttctggccataataaagacgatctctacatctattaaaggttgctttctcccgtggattaagctcatgatcatattgattgtgtagcccaaccacgtaagttctttatgttcattttatgcttttaattgttgattccatttttggttttaagttcagttcattctgttgaggtatcaacccaagtcccacattggttaggaatggaaagaattatgggtatataaggatggacactactccattagtatgaggccttttgggaaggtgcccaaaaacaaaaccgtgagggcttaggcccaaagcggacaatatcatactaatatgggagtaaaggtgaggtagcggtcggaaaagttgaaagaactggacccaacaagtggtatcagag

SEQ ID NO: 178067 - DNA, 317 bp, Cannabis indica
aataaatttatttacataaactgaaataagaaactaattcataccctacatagcaattagcaaatatataccaaaataaaatagtagtatttatacatataaaaatactctctagagactaagagcatgtttggtattgttttctgttttttgttttaaaaaattgtttttagaaatgagaacaaaaaatagtttttgaagtttttaaaacacaagtcacgtttggttagtgatttttaaaaacaatattgaccaaaagtgaattggtttttaaaacagaaaacaacattgttgttttcaaaattcttgttttttgt

SEQ ID NO: 178068 - DNA, 518 bp, Cannabis indica
gtaatccttaagggatgttggaggttttgagatgcgaccagatcgtgttttatttgttgtagcaggtattgattgatattgagtggagttctcaggagctaagtgcgaaggtgcactgtctgtggagttgtggtctcgagagggattaatgtcaggagactgagtttgagtgttatactgcctgtattgtgggagctgagacggattgatctcagttgttatgtgggaatgattagtgtcagtattggaaaaaaactgatcaatgttgggtggtgggatgggttgtttcaaagggtatatattttcataaaaaatcacatctcttgagtgaaaaatgtgatttgtttgaatatcaagaagggtgtaagcattcatattatgtggatagccaatgaaacacacggtttggctcgaggtgagaatttgttgctgaattgacaacagatgcatatgctaaaaaacgaaattgcgaagatgatgatattgtggttgtttttgatgaaggagttcatatggag

SEQ ID NO: 178069 - DNA, 472 bp, Cannabis indica
tttttgtcttttttcttttcttttaaacctcatatttttcttcatttttctcaaaagatctctctcattttttttactttattttgtttttaaatttttttaagtcgtttgttacatgtttttaccatcttttttcttttgttgctttttttttttttttttcaaattttttagctcttttttttttaatattcttcttcatatgtttattagtaaatatataatagtgtagaaaattatacaagcacacatatgatattaatattttttgtgttattattcttctattttttcataattttttgttattattttatttttcttctaaaatttgctttattagttagataatagttagaaaaaattacatgagcttatattagacattgacgactaatgaccttagttttaataagtgaacctataccacactatgtcctatttaaatataattgatgaaagtaagtgtaac

SEQ ID NO: 178070 - DNA, 1136 bp, Cannabis indica
atttgtctctttttactcatcaaattcaactttggttttattgcttccttaacccaataacacaagaggaaattacactctataccttttttatattgtgttcttttatttttaccttcttttttaaaatttatcatttttacctctttttttaaacattgtaccaattttgcccctgttacttcaagatactctccatgtgattctcttatgtaagggtattttgggtacaatacatataaaaagaggtatgtttcaaataaatataaaattagaggtaaatttgattaattgatgaataaaagaaggcatttttcaacttaccccactaaaacaaacctcaatcatataatgtaaaaaaaaaaaaaaaaaataaacttttaatttagatatagcaaaattacccataaaaaatacaaatttttttaattaatacacattcatcaaaaataacccatttatgtagtacacttatatatatatatatatatttatatatgaatattttttttaaaataaaaattatatatactggctcgtttttttttttccttacctactctgattagtaattaatgtgtaataaatcatatattaaatacccatttatatagtacacttatatatatgtatggtatgtatatatagagaaatgataaagggcaccagtgcctagcaccttcctacgtgtcaatatcgctattggtccaactaagtatcgggtcccatataatttaatgtaatagcttttaaagagtatcgctaaccaatcgcaacgcaacatgtcgagaaggtgctaagtaccactggtacctaatagcaatgctcgtatatatatatacatatttatatatgaatatttttttaaaataaaattatatatattggcacatttttttttccttacctactctaattagtaattaatgtgcaataaatcatatattaaatatataccttaattatttttaaattattgtatggttgggaatcgttgactatataacaatagatagaaaagtaggaaacccaccgacagatggagccaattcacaagtagggggcaaattgttaataaatttattttgagggggaaaattataaaattatatattaacatatttaataatatatat

SEQ ID NO: 178071 - DNA, 674 bp, Cannabis indica
tttgttgtgtcaagctttttgttaagcagtcagctgtttgatcacttgagggaacatatctaacttcaagtgtcttgttaatcactttgtctctaacaaaatggacatctaattcaatgtactttgcgcgagcgtgataaacaagattaatagccaatccactagctcccatattgtcacaccatgtgacaggagtacatggtaaaggaacatcaaactcttttgtaaagcttgtatccatgcaatttcagcagctacttgtgcaagggccctgtactccgattttgtaccggaacgagatacaactgcttgctttttggatgaccaggatacaagtgtatctccaaggtaaacacaatatccagcaatactatttctatcatcaggcaacatgcccaatctgcatccgagtatcttgtgatagcaagtctatccaaaggtttgatgtgaagaccatgataggttgttccctttaagtatccaagcactctttttactgcactccaatgtgttgttgtggggactgcagaaattgacttaattgttgacagcaaaggataaatctagtctagtatgtgtcaagacctatgatgcttcaagtctttggggggtttgctagaagtttaccatctgattttgattagaggtttacctactgtcaagtggagagtgcg

SEQ ID NO: 178072 - DNA, 816 bp, Cannabis indica
atgggaataggtttagtatttcttggaaactgaaaatgggaatattaaagcataggaatgcaagattaccttgtttggttgtgtataaaaaactacattactaacaattttgatatttttataaaaaaaaaaattattattaaaaaatcatcaaaaattatatatatttcagtggaagagttttttcattaaaaaaaaaaagaaaaagttaaattatatctaacatctatatataaatggatctctacaaaaagataaaaataaaaaaaaaagacttgtttttgtctttttctattatttccttttacaattttttttttaaatttttttataatatttttttatttgtggttttttataagtttttttttttattttttaatttgtttgttttattttgttaaataatttttttacttatactcttaatgtgcttaatgccttatcgttaatgtgtttaatgacatcctattttttgtacttttttaattttttaaaaaataatttttgtacttgctattaatattttaatgcacttaatgtcatatcggtatcatactcaataagtggtttgtaattttatttttttgtcttttgtatttttttcatttgtatggatgatttttgtactatttattattatttttgctaaataattattaattagttagtaatttttatgaatgattttgtaccatttacatttttttatctttattttttattgtatttttttaatatgatttttgaacttgttattagtactcttcatgtacttaatgctatatcggtgtgggtaccaaataaagtggttag

SEQ ID NO: 178073 - DNA, 340 bp, Cannabis indica
gtgagagtaaaaaagaaattttttaacacatacaaagagcaataagcaagacacaaattacttaaccaataaacataaagttgtgaacaaaaaataacttattaagcatatttcatttaaactctggaactaattgcaaaataaaaatattagtcaaattggcttgttctccctggtacttcagtacgcagagattttctcccaacaatctaaatccaacaccaaggctattgctaaataaacaaacatatataattactttttatgcatgataagtgcataaataagtctgatgcgccaaaaaataagtgcacataagatcattacaaatacattaaaa

SEQ ID NO: 178074 - DNA, 620 bp, Cannabis indica
tcttctttgatgagcttctcctcagcatcaatgagcagcaaatcagctgtggacaacaatgtttgagctccttcaacagcttgagaatcacatcttttcctttgaagaagtccttcatctctgtagttaacttgttcaccaaaggattaaggaaagcagagagaagcgctccaccaactacttcagccatatcagatcttttacaaaagaaaaaattgcaaagagagaaagattatcagtgtagcaaacagtgcatagagtagaatggtttttctaagtataaaatttaattttgcataatgtatgtactgaacatttgtttaatgttcttgttaatgttattttatagattaatattatacgcgtgcagtaaaagactaaaaaattggtcacataactacaaaaattttagaatctattgataaaataatacaaattgagttgctttacagtaattatatattaatttagtttttggtagactgtgttgcacatgtgggtatggttaatttttagttttaaataaatgtgagaaaattaatggaaaacacagctcaaaaaaacagatcatggttgtcttattatattataagaataattcatgcatattatactgaaac

SEQ ID NO: 178075 - DNA, 682 bp, Cannabis indica
aatttggtgtaatttatagtgttgcgattggaattgaaaaaaaaaataatgttaaaatagtagttttttagtgttgatttaacacaaaatttaagttttaccattagagatggcctagcactaccaataaatatttttttttggtgaaatctaaaaaatagttttttattctatttttcaaaatatatcactaaaattgtatttttattattttatagtgtattttcacattacatatcatacatcacttcaataaaatacatcaccaaataatgatatatacatttaatacattttattcatttatattatacatgttttcgaattaatgacgtgtacattttctaaagcctaacaacaaccaaagtcggcccattccccagtccagacaagtcaataagttagtctgcatacggaatcaggttacagctccaaatgcagatgcaagtccagcttgcagacaatactcgactagaccaatttggtctaggaaataccatttagcatagaaggcgaagagttcatctaggtaaccccaaggcaagtaattggaaaggcattcagatagctttcagatatcaccttctgtggcgtccactaaacacggggcccgctgtgtcagaggtttgttccctacgttaggcatgtgtagtgcaggcctggccctgggcataagcgggct

SEQ ID NO: 178076 - DNA, 789 bp, Cannabis indica
attaaggagtaattaagtcatttcccatgtagataattacaatatttttctttattaattttatgctgaaattatattttcattatactttaaaatttggattaaaaacaaaaaactagtttaaagtcaaaacttagtctatttctctctttatggttcggcccccctttggaaccaagaaaaaaatttaaattccggccaaattcagaggttttttgttgggaattcatagggattgaagatagcagctcttggtaagctagtttcccttctttttctttgaattttctggtttttgagattaggttttcatgcaaatttcagagttaggttactataggaatatttgggtttagttctatttttgaggttgatttggagttatttgagctggtttaagcatgtattgttgtttgtggttgagtttggacaaaaaaaaacctcacatctgaacccagagttaagcacaataaaaaaataaaaataaccacaaatctcacatattacacaactaaaaaactatttcttttgtaatctcaaatcaattgaaaaataacacaaatcagatatatattgtgtaaataaaattaaatacaaatattacacaatatatattacgtgaaaaatattagatatacatatatattgtataatgcacaaatcaaacatttgtagagaagctgccaccaaccatcgttgctcggctgcgcaccaccaaccacctgaaaaaacggagagacagtgagagagagagagagctagcaacagagagaaggagagagagagaga

SEQ ID NO: 178077 - DNA, 658 bp, Cannabis indica
agcggctcaaacttgcatagagcattcacttaataagaccccgatttgtaataaattttattttttacgtataaaaaggctctaattctcttgaacaaaattccattatatatacaaagttagaaaaataaactttggattgggcctcatccagagctgtgatattacacaaatggtgcttcgagaatgcaataatatatgaaagaagactgatagaattgtgtattgatttatatacatgatataaatatatataatatgtaatagtttttttatttttaccttctaaaatattatttttttgtatttttatgaaaattcgcataacaatatcaacaaagataacttaaaatacaatctaaatttatattgtaactcacataacaattatcagaacaactaaactataaaagtaataaataagttgtgattctactaatatttattaaagaggattataataggcacttttgtgcatattggtaggattttttttttatataatttaatacgtagtcctacaactaatttatttaattgtgaaatatttaaatctcacttttgttattatatatagctattttattacaattgttagttcttttgtcgttactagctcaagaattatactgtatcaatatcaaatgtgtaacaattg

SEQ ID NO: 178078 - DNA, 605 bp, Cannabis indica
caccgcgcaaacagtagaataaataaaaaaaatggagttgagctccatctatataactaaggacattttaggtattaacatttataaaaagactatttacttgatttttttaaaaaatagacattaactttcatcagtgtaagatttaaggccatttattacaattttccataaatataattatttgactcacatggtaaattaacatgtacaactttcccattttaggtagctcgatatatgatacgcaaaactataaatttagatatttttaaacaaataatattaacaaggggtttttataaaaatgttgaattttaggtaaaagtttacaattctactgttacatattttttttttataaaaatactatatttttataaaataaccataaaacaacaaaatacaacaattaaaacaacagtaaaacaactcaaagacaatcatgaaacaacagtataaaatacatagtattttgaaaaaaaaaaaaatatttttaaaaaatttccccctcacagtaaacaagaaaaagttaaaatttaagtatgtagcttaaaattaaaatttctattaataatgatgatttaagtgatagggaaagacaa

SEQ ID NO: 178079 - DNA, 815 bp, Cannabis indica
tttttgctagttgaattaaggaagtaaataattgggagtaaaatctattgctatgtataaataatagtttcttccttgcattgttacaaaataaaaaatacctttgaattttgccttatgatactaagcgaccttgtgaaatattgaaattgacttgtgatgctttaaaagtttacttgatagacagttacataattacgattatgtaattagttgcgggtttgcttttttaaataataaaattggcttttgttgtttgaaaaatttatttgatagagggttgtctcatctttaatagtaaaatgtgcattggaatgttatcttttgctacttttaataagatttgccacttttaataagatttgcattgttcatttttaaatagtttctaacgacaaagaataattgttgtttggaaatttgttgctgattgctttttcaaaagttaaaattaacttttgttgtctcggaagtttattggatagacaatgtttccttagatgtttcaaatgttcaaagatttttgaatgttgccttttgccattgcgtgaggttttgtattgcttgtccttaaacaaatggttttggatccaccgatggttgctttctgaagtattaaaattaacttttcatgacttaaaaatttacttgatagatagttgtctcctctataaagaaaccttaattactctttcacaatttgttactagatcctatttaaaacaattaagttggtttttgttaccttaaaaatttactagatagacagttgcctcctctttgaagaaaacatactctttttggaatttgctgtt

SEQ ID NO: 178080 - DNA, 1103 bp, Cannabis indica
cttacctttgttttttcttcaaagcatttcatttgttaattattattattatcattggattgtcaaactaggatttaaggtgtagtgaatgtggggttagacagttgatattggtgtaattaagtatcaggtttcatatttagtgttcaatagcaatgttcagttttattttgagcattgttattgggtatcattagtgtctagtactttttagacgtgctactttgtaattggttaattaaattatatgagattcaatacttaattgtaccaataatgatattgacacattgacttttagcattttttttggtgtgaaccaacacaacaccaaataataacagtactaaataatttaatgtggacctggttttgggtgatgacagcaagatttggttggagtgtgatgtcaaatacattagcctttgttttgttttttatttggacaataagacttagaacgtgctctccaaaagctaaaactaaaactaaatgtaccattcaatgttgttattaataaaagaaattagtattgttgaaaacttcagcatacttgtaggggaagtggaaaaagaggagtactataatcttagttaatttttgtgttcaaaaatatatgttaaaatattttttttatgacagtgtttgttatagttacaatattatttttgtaaatttttgaaaaatttcgaatagtatacaaaaaataagtttgaagtttttgaacatgcaaggtgaattggtatctcgcgaactcgaattcagtactgtaaattatttggattttttttttgtaaaatttattaaggataatattgtgactatatcgaaatatcgttaatagaaaaaaaattaaaaaaatattctgatatgtgattacgtagagattgactcaaaaattgtaataagagattgtaattaaatagagtttgtcaaacacatttatataaatataattacctaatttaatgcactagctacaacaaataatgacacaagtcttggcttgaaaaaaaaaaagcttttactcttcttgttgggtcattgtaaagattattagtgtttagaagagaaaagaaaataattttgaataatgtgagatg

SEQ ID NO: 178081 - DNA, 583 bp, Cannabis indica
caattttatatgttatattgtctgcaattttcttcatacttttttatacattttttctaaattactcaattattattgtagtaaaaaaaaaagtttttctctaaaattttaaatttgttaaagtaaacataatatttattagattatttttttacatgatttatatttttattagttttttaataatttttatttattttttacgataatagtttgtaaatatataaataaacttgaatcttttatttatttatgacaaaatctttgttttaaatttattcaatttttaataatttttcttttgacactatcagatcgtaccctttaaaatatataattttttttttcattgttctaagatagttaatattgttgctcacaatcttactaagtatgcattgtttgtggcaactagcaaaagtttggtggccaaattattcagattggatgatgccatgaatctctaatgatatctccctagctcttctttctttttgagagctattattactctttacgatggaattttgagattttttttctaaaaaaaataataaaaaaaaaaaactagaatattttattt

SEQ ID NO: 178082 - DNA, 577 bp, Cannabis indica
ccctgggtccccctcctcctctggactggattaagctcaatgtgatgtgaaagtgggcctggaaagtatgtgtattgctgtagtggctagagatcatttcggcagagtgcttagagttcacacagctcgggaggagttctcggatgctctgtgcggtgaagctgcggcttgctgtttggcggtgtcaatcgctttggattccggctataagtttgttattgtggagaatgattcgagggtagtcatcgatgccatcaatgggaagggttcgcattgggctttagtgaactatatctcattttgtactaaatcttctccttcttttaatagttgtattttctcttatgtcagtagaacttgtaactttgccgctcataatgtggctagatgggccttcgcccatcagatgtatgggtctctaccggtctcttctattccggatgctctattttgtaacgaccgtgaggtctaactgaattttattctataatataaacgcttttcatcaaaaaaaaaaatacatcctctcgctgagcccacaagatgtgataattgggtctactagtattatagcaag

SEQ ID NO: 178083 - DNA, 595 bp, Cannabis indica
ttcctctgtctcacttctcaggctgctcttctattatacaaaacttccatcagatattgtggtgaacctgtacagccaaatcgtttatatgatgctgtcaatgtcattctctcattacaggttggtgattcaagattttcactattatcttgttagatttttttactgttcaatcagtaaagactctcatttgagataattgtcaagggtgctgtaatttactaagaagacttttcttttcattgtgatgatcaatagcagcctgtgttagaaatactttgtaatgatgtcatatgagattggagagttagtaataaatatcgacaaggcaaatcacaacaatgtctgtatttaagtctctcgtgtaatgatatctagtacatgatgctctaataattcagctctgtaaatgtattaaaagggacatattttagctgacaaagctgttctttctcatacactgttctcgtattaatagctacaattcctatggtttatgatttgaaaggagaaatatcatattggtgataggatggttttttttcccaatcataatgttgcagaatggagacggtggctttgcaacatatgagct

SEQ ID NO: 178084 - DNA, 466 bp, Cannabis indica
gtcatttaacaaaacagatgattcaattgctaacttttacaaaacataggatccaatatggtatttacctaataaaatttaagggctacttcatttttacatttgaaaattagtttttttttttttgtattttttacgaaatttttcattgaaactcctattgtaactagcaatgcaatataaattacaacaaaaaatcgtatagtaacccatatagaaaccaccagagaaacgattttaaaaactcaaatcataaatttaaaaaaaaaattaaaaaaatattatatgaaataatttctttaaaatttaaaattaagtgtagttttatattttgttttttaattaattttacttttataataataaaaaaaaaagggggggaagaagagggtgggaagaaaagaatagagaaggaaataaaagttggtcacgtgaaagaccacgcgtgtgtgaaggttaccaggta

SEQ ID NO: 178085 - DNA, 751 bp, Cannabis indica
ataacaatgtttctcataatctacacctgaataagtttgtcatggagattcaaagcttactatcatccctatctcaagctactgttggctacattcctcgaggggcaaatgaagtcgctcatcgtctaactaactatgctttaggtttagattagaaagctttgtaaaaaagaaataaattttctctgtaaaattgtatcctcaattctagtattgttttttaatggatacacctttcttcataaaaaaaaaaaatgaaatttttttatatatataaaaaaagaaacaataaataaatatttcaggttaataaaaagacatagttttttttttttttgtcaatgattcaaaaataaatagttaagtaggggcagttgccaaacaaatttgttcataccaacggtcacgattaatcgtagagcatgaacaaatttcaatcctagccgttgaggtgaagggacgaactttaatatttattgttaactgcccactagttgaattagttaaggcggagctttctgtttcagaggtataaatcacgagtatttacaataaatcgaacggtttagaaaagcccgggaagcgatggcctgggatccaaggctccaaacatgttcgacatttaacgaagtggaccatataagagtgccgtttgaggtttaaacttttgtctcccccatcaaacttttcatatttaacgtccgctaacttatagggtttccgaaatgccacaaaaccaaaaaaggaaatc

SEQ ID NO: 178086 - DNA, 744 bp, Cannabis indica
accatccgtgactattattggattgcagtgttgccaacctttgattgaagcacctatcgcgaagcataggtatttgaagtggccattttcgtctatgacaaagtctgtgattgtccctgtgatacaataaaccatttagtatataattcatttattagatatttataattttgtttttagaacttgtttatagggtagtcaagtagtacctgggttgcattgttccatcatgcataagattcatgttattgcagagtacgattcttgtgggcagcgtcttgcatccacaatagctttttctctagctctccatgctttttggtaagatatggagacactataatcatctgccatgtcatccactattttatttggtgtgtagtctctttttggatttacaaatttggttcttattacgctcccaatcaggttacttattgcattaggatggtctacagatatgacagttattgagcatgtatgagaatgttgaatctttctgattttgaacatgtttgtttttccatgttttgatgccaaaaaactccatttgcaattttcatcgaagcaaattaacttatagtcaagtttggaggatctctttaccttgaagggctagttttttcttattaagtataggctgatagcatttttgtagtgtttctttgtttgttaaaagttgtccaacaaatatgctatcaacatgaggatttaagatcacctgacttgttgcttgatggcttg

SEQ ID NO: 178087 - DNA, 704 bp, Cannabis indica
gtatttctcaacttttcccttattgttaattgtgcagtaaatgtggattggcccaacccgacacaatccacatttctatgtttttttcaaaaaaattcacattttatcatatttaaatgtggattgtatgctgttgaaaaatgtaccaaggcatgtttcgctatttgcactaagggacattctattactgctactctatttgaaattgcctaaacaactatgtactaataattaagggtgttggaattgttgcacaagttaaatttactaattggtcttgaaagtcttgtcctctgacatggtttgtttcgtttaaggttgtccctttgttttaaggttgtccctttgttcttttctagtctggtttttgtgctttttctggtgggcttcatggcatccagtagtaggaatcatgaagatttggttgatattacccttgaagaagaggattctggtggtctgttttgtgaggagatacaggaggaagagagggtagcgtttgatgcacgttggtgtttggtgggtcgtttcctcaatgaaggttcagtcgacttcccggcaatgcagcagaccctagcagcattatggaaaccaggtatgggtgtctatattaaggaacttgatggtggtattcgatacttgtttcagttttaccatgagatagatatatctcgtgtcttagaaggcagtccatggacgttcaa

SEQ ID NO: 178088 - DNA, 398 bp, Cannabis indica
tatcactctgtttgtcttattgcatatttaatttttctgaaccctttttctcccttttaactttatccccatcttttttctttcccatcaataaataaatatataaataaaaataagaaagaaaaacatgtgaccccatgtagcataccctacgtgtacgatcgagtaattactccaatcatatcatgttttcgttgccgagtaatcgcatgcattaattaagccaataagatcaatcttacacaacactttattggaatgttattattattattatttttttttttgaatacttatatttattgtgtattagtaccggattaattatcaattaaaactacatatctttcttttttttagttgcttggacaaagcagcaatcaacaggccagaactaa

SEQ ID NO: 178089 - DNA, 548 bp, Cannabis indica
tctgtagcaccagtcaaaaatacatattatctgggtagatagaggatttgtcaacagtcactgagtgagcaaacttcttgatgtccttcaaggaagatacatcaaaacttcggatttgctcatcgattctgtacacgagttcataattgttttttgcctttggaactcttttagaactgaactatgagtagactgtatcataacttttaaggctgtctgtttgtcgaaaccagctttgctcagggcgctatccactgcatcagtaacgcttaagcttagctcttctgcaagatagggtgcatgctggaagaaacaatatgacaaaattatcatttatgtaaaaaaaaaaattgaattaaataatttatgtgaaatttgaattaggatctggtggctttgcaagaacacattcacaacttcattagtagatcagctgggaaatttttattatttcgctcatcgccaattggtttaaaaatgaaaccacactgtatttcaactacatttcacattctaacacagtatcaagagaaaaaaaaaaaaaaaaa

SEQ ID NO: 178090 - DNA, 642 bp, Cannabis indica
tgtatatatactcttttatttatgtattttaatgagattgatagcttgtaggtaggagagacttttgttttccttcatatgagtgcaacaaattataagaattaattagtatacatatagatccctatctcatgaattaaaaattaataaaaattataagaagtaattattggtaaatttaagatttaattgatatggagcccaaggcggcaagaccagcagcggcctatgctttcgtccctcttatctatatatgctactgctagaaagaatgaggtagatcaaaaattaaaaacactcttaaacatatcataattaattaatctgacagaagaaataaacatataataattaaaacgtacgttttcataaaccctcttaaataatcattcaagtcttctttatgaattattactacgaagaagattataaatctcaagtatgtacctaatataagctttgatataactgcattcatctacagatacacttacatgttataatatgttttataagttgttttcataataaagtttataatagtatataattatgtaaagtttcctttaatgtgaatattattaaagagtgaaaattacatatttcaaaatgtgccaaagtatgtatttttttttccaaaat

SEQ ID NO: 178091 - DNA, 734 bp, Cannabis indica
gttaggctttgcttgtaaacatactaatacaaatgatagaatcatggatgtaattagtagctagtgaggttttggtggttgggcttcgactctcctttgttcaggttgtatttgctcagtttttgaataaaattatccttttgttaaaaaaaaataaataaataaatataattcataaatttccaataagaaaaaaaatgatatatatagaaaaatatcatttttaaacttataatttataaataattaaatatttaacaaaataacaaacttttgaatttgaaaatattatggtaagtgtatctataaaaatatctatgttaatttcaaatttattaattatttaatttgtcatataagataattttaatataatattttaaataaaaagacaaagttatcttttaattaaaatatgttaaacatcaaaatatttaatcttataattaaataatatataaatattaaagaagttaacaaatttttaaatcttaccataattggaaatatttaaaattggaaatatgtcaaattggaaatatataaaaaatggaaatatttcaaattggaaatatttaaaatttagtatatatcggattttcgggaaacaatcccaaaaaaaacttaggattttcggggaaaaaacccgacaaaaacttagcaatttgtgtgggccttcacgtgcagcctagattggctgcaaatacagctaacagaggctgcaaacgggctca

SEQ ID NO: 178092 - DNA, 598 bp, Cannabis indica
aagagagtttgaaactctgatctatataatgtagggtacttagttagaaatgaataaagtttttcatggtggaaatagggaagatggttcctatattgcttcctatgctaaaacctactatggaaactgcatcctttctcacaattgtgctaaagcacctactgccatggttgcccctactacaactaagcaataccctatgccaacggagggagtcccatggaggccacctaatctgaatggtatcaatattaatgtggatgcgacggtcaatcaggccactaaaactttggacattggagcacttattcaagaccataatgaggttattcttgctgctatttttcaaaccagtctaagattattttcgatcagacaagatggaagcaaatattctttttcatagcatcaactgggcatgtcaactataaatctccataacaaatattgaaatagatattttaagagtctctactgcgctatctacgatattcttagatttatcttctttctaagatttaatttttgatattcgttatcttttatcctcttttcctagagttattatctcccatgtttggaaacatgctaatcgacc

SEQ ID NO: 178093 - DNA, 514 bp, Cannabis indica
  modified_base (461)..(461): a, c, t, g, unknown or other
  modified_base (489)..(489): a, c, t, g, unknown or other
tatgtaacttgataagggccttcctagttaagtctaaacactccagttgttgagtgtttagtatccaggaacactcttcggagcagcatgtctcctatgaagaattttctactcttgacgtctttgttgaagtgccttgcaactttttgctggtaggcttgtagcttttagttggcttgttctttctttcttctacttcgtcaagggactttaccagcagggtgccgtttgtttgttggtcataggttgttcttctgtgagacggtggcactagctctataggcaacatcaccttgtagccataagctagagcaaatagagttcgcctagtggtcatcttctcaattgtcctatgcgaccataggacctctaggagcagtttaggctagtttccttttgcttctcaggtgcttctcaaggtgtccttgaggtttgtactgcttctcttcccatctgcttgnggatgggccacgcaaaagaagctcttgntgtttccatgtctgttgcactaatc

SEQ ID NO: 178094 - DNA, 446 bp, Cannabis indica
gagtacacttagcccaatgatggtcgaagcattaatttgtctcaagaattggtagagcggatcacatcaacccattgttgtgcgagagtacatggatgaagaagaaatacttcaaacacaagcattgcttgaagatggtaattttagtttgttatattttattttgattttcataatttaagtttaatatcataatatttattttacatatgcatatttattacctaactagtttatacttttcatattttatagagattctcaataaaaatactaaaggcactttttctactccttcaacctcaacaagtcaacaacaaggcaccaccttggattgaaaaggtttattattatactttattatattattatttagtatattgatttctattttgtctaatttatccttttttttcattttcaaaaaaaatattgaaaggtttgga

SEQ ID NO: 178095 - DNA, 1395 bp, Cannabis indica
gtatgtaaaaaggctcatgagttcaatcaatgtaatcatgaatttttgcattaataagttcatatggaaataaagttggattatccccacaatttaattaaattttcataattaatatcattggattctctctctctctctcttgaattgttttgggccacactaaagtccaaattaagttttattggtatatttaaaaagaaaaataaaaaacacttcttgtgtgaaaaccattatataaaaatggctgctctactttcaatttttatttatatttattaattaaaaagaaaattatattttttaaaatatatatatatataaatagtaattaataatggtgactctgtcatacacaaataaattaattaattttcaaatgggtttttgcctcatactcattcaagcccatcaatattgactcaaagagattttagagagagatttcaaagcaaatactcatcactaataagactaaagagtcacctctttagattacatgttagtaaaaagctaagctacaagatctccttaatatgattttggttcccaataatgataataataaagagtatataacaaaaaattaattaaagaaatgtagaaaaaaagactttttaacaaaatataataaaaaaattatataatgtctaaaaacaattgtcacacccaccatatatatctttattagaaactttgtttcattacataagacttacctcatatgagattgagtgacactataatataattttggggagattttctataaaagcaaagtaatttttcttttttttcattcattagtgtgataaagatatcattatactttgtccttttgtgttaattacttttctcatttctttatttgtttatttttggaaatatagaaaatgactacttatcatttagtattatcaattatacttagctaattcaaacacaagctaagttgactttggttcaatgaatacaagaaatagacaattgccaccaagtattggtagatttgtgtccaattaataatttttttttataatatttattaaattaaaataaataaaatttcacattaaattatactaaaaacaaaaactcttttatagtaatatgtgaaatttacataaaatattatttttagtaatttttttttttacttttacattttttttttataattttacaatgttctatacgaaaacaataaaaaattatataaaagtaataggaaaacaatttctaaataatatcaaaacaatataaagatgatatagaaataataaaaaatcaaaaaataaaagcatttttttttaaaatacatatataatttatgtatttatgaaatctctatattaatattaggtcttaacaacttttaaaaattatttttgtaag

SEQ ID NO: 178096 - DNA, 1476 bp, Cannabis indica
tggatattgaaatgggagaccacaagcaggcaaaactgcaacatgattgcagaaaatgataaaaaagaaatttactgtcaaatcaaaaagaaatcacagaccaaaatgacattatgatagacatgattgataattttggagtgtcaacgagctatcaaaaagcatggagaacaagagaaaaagctttggagttaacaagaggaaggcaagatgaatcttatcagcaactaccaaaatacctacacatggtaaaagtagtaaatcctggaacaattgcacaattggaaacgaataagaaggatcatttcaaatatgtgtatctaccatttgcaaactccatagaaggttggaaacattgcaggccagtcattgtaaccgacagaacatttttaaaaacatcatttggacaaactctattcacagcttctacaatggatgcaaacaatagcatattcattctagcatttgggataggagactcagaaaatgactgttcttgggaatggttcttcacaaaactaagggaaacattcagagatagagaaggtatgctatcaaaaaaactagtttcgtttcatctaaattcaagctaaaattttaaattcatatgtaaatatttaataaatttcatgcatcttgttacaattacaaacaacaatgatagtaaatacttgttatatcataacattaaaaaaacaaaaataagaaaatatagaaactagttacctacaacaaaaaaattaataacgtttctaaaaaaaaaaaaaaaaaaaaaaaaaattagattatgattccaacacatacctactgatctcattaaaactggtttccatgagcaggtttgacaataatattagacagacataaaagtatagagaaggcggtgagcaatgtctacccaaaccacttccacagagcatgcatcttccacctgctaaacaacgtcaaaacaaattttggagtgcatggagacgatctgacaataaactttgtaaaggcagcaaaaacgtacaagctgacctcatttgagcgctacatgacaaaaatagataaaattgacaaacgaataagaccatacctggagaaaattggacatgaggtttggaccaggagccactgccctacaaaaaggtacacaatgatgacttcaaacgtagcagaatcaataaatttggcgatcctagctgcaagatcattacctattataacaacgattgagtgctttagaagccttgtgcaaaaataggtgtggaaaaatgacaatgaagcacatggaatatttaccgaagtagcatcagatgccgaaaaaactctaagagaaaatttgcttaaggcaatgaaatactaggtacaaaaactaaaacatagagaagaactatgattaaaaaacctgtttcttgatcatgttgcaaaaccatttctatcactttatttatatttcactacacacacaaaaaaaaaaataaacaaggtcat

SEQ ID NO: 178097 - DNA, 740 bp, Cannabis indica
atacaaccacaaaaaccaagccaccaaacacagtcaaacaaaatgataagagccaccccattaacaattctagaacaacaaacaaaagaagtatcatgaaaaccaggcaatacgactacataaccaaattattgcaactattgaaaatatatcatttctgttgttaccattccaaaaaaaaaaaatctgttgtattctgcttatcatattaacataaacaatatcggtaccataatctgttgtttgcagtgtttggattttattttacaatcaagcattacacgtggctttttttttggaaccaatattcttcagcaaaataataaactcaaacttgttaagtgtaatatttgagcataaactgtatgcatcccaagttgaaagacaatagcaaattgggatgtttccatttcttcatttcaatgatgagaaatgttagatatgttatgtccaatcctaagtatatatcaactcaaaatttaactcaaaaacacatgtacaaaacagaaccctgtttttctacaccattttctttcccatttctggatttcgcatgtacaataatgaaactcaacattttcctatctctctctatatatatatatctctctttgaattttccttttttcagttcttaatacaagtaagaaaagaattacaaagtggaaaagacagagcaattaagctaagctaatcactctttgctttagttaaaaagaaaaagggattgattagaaaag

SEQ ID NO: 178098 - DNA, 769 bp, Cannabis indica
taatataaacatatattatatatatataattatataatattatataactcttgcaaaatattcagcataagccaactaaaattttaatttggtggagttcttgactattttttttataaacaaaattaaatccagctagcatgtaaaatgaggaaataaaacatatgttcaacaattaatttattaacttaattataataatcagagtgattattgattagatcgataacaaatttcacataaaagaaagaataatagttgttaattgagacgtgttgtacattattttaactagaaattattactaaaatactctgctatatatatgtttaattaccaaactgtctacatcgcagtaataacaattgttcttttctttcgtacaattacaatagtcgtagtacatgttaatgaacaaattaaaaataataaattaatgaatagttccattattaaattcaaataggcgagttttgatattttgttatactaacaataaataacacaatgtattgttgttgtgataatattttggatacaaaaatgaaaagagtggaaggagaaagaataagagaaataccaaaatcacttatttaactagaaaaaaaattagagagaaacaaaatacgagaacgaaatgagatcaaatgccaaactcttattaattacggagttatggcttgatagctatttgtggtgtgataaaaatctcacaattttacttgcacacaagtaatgtaggataaatatatatataaatttatttatt

SEQ ID NO: 178099 - DNA, 599 bp, Cannabis indica
ctttacccaagaacaataaaaagagtaaattttaatcaattaattgtttttccttcactttctgatcaaatccccctaccaaacagaatcaaaaagaaaatatataatatattcagttcattatgataaacaatacctgttagagagtaggcccatcaccgagttttagtagcgaaattctttccgggcaaaacttaataggttcgtcgaaagtgttttgtccgaaaaagggaatagagaataaagaaaaataaaaccaaaaccagaaagatacgtcgttttacgagattatgctaacgcgtgttggcagaaaaatgacgattttgaccctccattgaacgcttcttcgtcgttaagcaaacgataaagactgcagtgatggggctttacacgtggcggcatgggatgtaagaatgtcattgtacatgtactgaagccaattgggccttattatccagcccatcagctcacagcccagtattcttatttatattaggaaaattattttaaaactttgttacagaagttttttttttttttgtgaaaattacatcaaatatggctttttaaaattttattactcaaatatggcagtttta

SEQ ID NO: 178100 - DNA, 624 bp, Cannabis indica
gtgcgtgcaaagatggctgcatctcaacagggaagttgggatgactatagggtcctttttccaggtaagtatcaaaattattcattccttgagaaatccattgaccttggaacccctgaagctgatttgagctgccttgttgcccagacaaaggcacttttgtgacattctttatataagaacgttgctcctcttgatggagttcagtctttaaattagtttttgactcaattctggaagtggccaactgaaatatgccactagctgatgcagtatcatctaaactaacatacttatcattagtttcatctcgttgcaaacttcctgtttcatcagaatgcaacgagcttcgaagaggaacagacaaagaaccatccgtggatgtcaacatactggcatgtgaatctggagattttatctcagaagaatcaatattgcttgaattaggttccaatatcttatcaactggttcgtctgttgttgcatggcttgaggaacgagtttgattatacacaggagatggcgtgcgagggaagtcctcctacaaccaacaaagtgaaagtaagcatgaacacaaaattgaaattgagaaaaacactgaatcgaacaactctagactacatc

SEQ ID NO: 178101 - DNA, 617 bp, Cannabis indica
ttgagtaccggtagtaagtcatacatggctatggctattggttgaaagaaatctagaattttttaaggtgttgaaagttctacaggggggctctttagggataaaaccaaacactttgaggagttttcatttttagatctgagtagagaatagaaaaatttgatgtaaatggcatataattgtttatgtttttggctaaaccgtagatttggtgttttattgaaatttttgtgactacaggttcctctctaccacaacaagtatgatacataaaaacatagcccaatttgaaattgaggtttatacataaaaccctcaaatgctaagaaatattagagcttccacacttactacataaaaatatattccatatgatacaatattatcaattggactgtatttttaactcacactatactaacaatcatgatattctcatccatgacaaaaacatagcccaaaataactagatgatatgattaaaataggtagttagctagctatgaaattcagattatgtaaaagaaaaagtttgaaagaatagtgaggttaataatattgagaattaccgaaaccgcgaggatctgaatttccattgtgatatccttaaaattctg

SEQ ID NO: 178102 - DNA, 1228 bp, Cannabis indica
cttatgggcttcaggggacctgagctggtatcctagcaaaatgacgccgtcgtccgacaccaaagcctccatggctgaaataagcggacccaccgactcctcgatgtagacgacatcggtggccaaaacgaagtcgtacggaggtttgagggacttgatctgatcggcgttgttccagtaaagaacggaatgctttagggttttggcgagcacggatttattgttcttgaggtttcgcttcagtgcgggcatgactggagagatatcggtgaggatgacgtctgtcagaccgagtaggtaaaagcccatgccagcggctccacagccggcgccgagctcgacgccccgcttggagccgaagtcgaggagttgggcataagggttgggtgtggttgtgggccttaggtttgggcccggaagtggggcccaacgctcagcgaacttgacgaggacaagggagcagggccagacggaggtgccgacgtggaaggagccgttgtcttgctgtatagagagaatggcgttgtgcaccgggagctctatcaccggcgagtctgtgaacttcatcgctttcgtgatgtcagtacacttcgcggccgggcttcccaattttggaagctctgcactttcccaacgaaaactcaggggataatggatttttatataacacgtattaattgttttcagcatacatatttatcttcagtatggtattctatttttatgtaaaattatattttagaattttttgaaaaagcttcaatccattaaactgccgaatcggcaagaataagagtttgaagagcagcaggcgctgtcccttctacaaaattacaacctgaccaaaaaacaagagttgcgggcaatacaatgtgcaactctgttagcagatcgcttaacgaaacaaattttaacattgacaagagaaagtaaaagagtttgacactcaacaaccattaaaccaaacaccgaaggcattcgaatagaactttccaacgcttggatcgaaagtaggctatccgattcaatgacaacattttgaatacctttcctcttgacccaacttagtgcttccttgattcccatattcttaacacagtatcatataaaaatatgatatataattcaattcaaaataataaaatacaatacaatacgacgaaccctaagcactagatacttagatagctaattagattttttttttaatttttacatgtactatatt

SEQ ID NO: 178103 - DNA, 805 bp, Cannabis indica
gtaattggtatatatgcatctcatggtggtgctaaattatagattattttaaatattaaatttactatttatttaaatatacatcataattactaaaataaaaaaaattaaattaatttttaaatttactcatatatatttttttacattctttgtgttaattgtaatgtatctttttatctatattactttcaaacaaaataaattaaatttacaattgataaaaatagtataattataaatgatatttatataataaaataatattagtgtagaccatgtatgaaagcatgaaagtgagagttgaaaatgctgttgaaatgggaaaagtttgcgatgagaacatcactggagaagatgaacgaaaagctttcaaaaaatggacggacggatttactcgccaagatcatcctacggtcatccaggtcatctaataatatattattggtatttttttaccaagtaataatgaaaatttatgattaattagaattaattttatgaattactatttaattaattaacaggttatattgcatggaagtaaagataaagatattagaggtgatgtaatgccaaatttgatttatgttgcaagagagaaaagaagaacatcacttcatcatttcaaagctggtgcccttaatgccctagtaagtttccatttcaaatattactttaaaatttttatgatggttttaaagcatgttgtattacatatgtgtaaatttattagaaattttagataataatttaggtgttaataaaattatagttcaaccactttattagtttatttgtgttt

SEQ ID NO: 178104 - DNA, 1212 bp, Cannabis indica
aagttgactcaaaaagaatagaaaaaacaataacaaaggaatgcttaaaaacacaagtacctaaacttagttcagagaaaaatagctaaagcaataaatcacatacttgattagtttataatttgtggaatttttcactagacgataaagtttagaagaaattggcaaacatcagttacattttagctaaatcaatatatcaccatacttgatttgttcatcattttgcaattttcatccaatgatataattgtcgacattagtgtaacgtgcacttacgatgaattaggcaaattgcagtcaatgtattaaactattaggactgtgaatgcagttaagttttagtgatagtgagtaacaaactcgactgcatactccagaaatactaaattaaatcaattatacataaaaatattcaaatattaagaaattatacaaactaataaagagtcaaaagagcaatgccaatcaagagtccataccgaggtaaaattgaatcaagaatatgcaaaatcgtttacaaaggcagataaaaacgaagtacctatatcataaacaatgatatcgctaaggattttttatcgaagaggccaccaaaaacgacgatcttcgattttccaatattgacggcagtatgaccactgtgaatccaaagaagaagatcatttcaagcgagaagatcaaaaatctgagagagaaaggaacaataaagagaagggattacctgcgaggttgtggaagatttccatggaagtcagaagccaaagctcgaacccagtgatgcattttcctgtgtcactctccaagaggaaataaggttaaaagtgatgaattttgccaaagctgatgactttagtgtaattttcctttttcaaataggaaaataaaaatatttatattataacaaaaataaaataaataaatagatgagtgtattaataaaatgtgggggggtgtgcccacatcaaaagacctgactgctttgccactggttagctggcattggccccatcattgatgtgttccaatggttggtcacccacagaagcttcctctgttcattctcaacggaccccaaaacccaaacccaaactctttctatttctctctctctttgtcttatttctcaatctcaactcaatagtgtgtagagtaaaacagggtaccccgttagggttattggtctatatcccttctttttattttgatttt

SEQ ID NO: 178105 - DNA, 528 bp, Cannabis indica
agtgttttccattatccaacattgaaatattacaaaatttgatgtgtttcactttcatttttatatatatgcatgcatgtatatatagatgaattttaaatatatatacacatcacatatatatatggatgaattttgatgtgtattttaattttattttaaaaaaattaataacaagaagaattgtcttggccaatattgatcaagaaatcgctttcgatcgctagaaaaattatttccttctttctcaacttatttggcgtaataaatcataatgggaaataatgtcttattatatatgtctcctttggtgggatccatctcatctcattactattcaatgtttttttttctgaattttgacatgtactaaatcgtgtttcctgaaccttttttagtcgttaaaaattcccctcgaactattgagattgttaaatttaaggacttttgtctaatttcattcaattttagctgtttcaatgattaatgtttatatactaaccatactccccagactttaatatgtct

SEQ ID NO: 178106 - DNA, 841 bp, Cannabis indica
tgaacacgcatatcagtgaatctccagtcctccttggcaccccattgccatttttctcgcctaaaataattatgggtcagtctcaaactccatacccaagtcagcaaaatcgcaatcctcgatctccacaagttaaactgagccaaagggtgagtagaatagtaatgagccagcatcaccggtatcactgtccagtacaagtcaatcatctgaaaattcccaatatatatataagtcaacggagctaacgatatacagcagtaaaagaaatgaatttaaacacttgaagaagaaaaataagactaacccaattgctggagagaatatgactgatgacccagaagagaacattgacattgaagaagaagaggaagttagctagtagaagagggtgatcatagcaccatttccagagtggagagagggaaacgtcgtcgtttgatttgggatcatcatgaagatgttgacagtggttgagaaaggagatgtagaagagaatggagggaagtggaacgagaaacgcaatagctgcgttcttcagattgcgactcaaattccccataattgtcactctttaagccttaattgatattcagttattgagatttgatactctctcctaactctgttgcctattttcaaccaagttgctattttatagtcgcactagcttgcacacacacatttatttcttttttctttttcttatttattttgtaaagtttttttttttaaaaaaaaaatgagattgatgatcttcaagtaatcattagtaagcacataacataaacaagcttgtccaatctcagcggccttgaggttaaattaatctttatagttt

SEQ ID NO: 178107 - DNA, 601 bp, Cannabis indica
gctttattgtttattaatatttcttattaataaataatatttatcattttcttcaaatattacaaaaattatggagtttcattggaaaaaaaattatgaggttccatatgaaaattattttggtaatgaacgaattaatttacattcttataaatggtttaatatttatacattttgttgtatatgggagccaaatattccctcttaagatttgttttttttttttctaaaacaaatatcaaagtaattaactagttatcatatttatttaaaatcgatctcaactgtatttctttttagtgtagcataatggtattacaatatcaattaatagttaaaaaacttaggttcaaatccataccatttctctttttttcatccttccctcaccactaagctagcttaatccctcaccactaagctagcttaagtggcttgatctcaaatctctttagtactatgtgaatgttgtaaataccttgtactaaatatataaaaagtaacaaaaaaaaaaatataaaaaaaaaataatatacaaataataaaaaattaacaaaaaaataataaaaatataacaaaaaaaaataatattaaaaaatcg

SEQ ID NO: 178108 - DNA, 909 bp, Cannabis indica
aggtttatttgaattattttatcaaattaaattaaatatctaatgagataaatgatttgaaaataaataaatagatactttcaatatcattttctaatcttataatttaataaaattaaaataacaaaataaacaaattttaaaatagatatggttaggccattattattttagaaataaaataataaacaaataataattatcctaactatatgtcaaaatatctcaaattaagcatttttcaaatatctacaataatatctaggtcatttaaatatttaaaatactatttataaatttctgataagtaaaatgaaataaaatatcacttttataacttataatttataaacaattaaatatttcacaaaataacctattttcgaatttaaaaatattatggttagaatatctataaaaatatctaggttaatttaaaacttcttaattatttaattcatctaataagataattttaatataatattttaaattaaaagacaagggtatcttttaatgaaaaatatagccaatattaaaatatctaatcttaaaattaaataatatataaatattaacaaattaacaaatttttaaaatctgacaataattttaaaaaaaaatcaaatttttaaatttaaacctcaaaatttcaaaaattaatactaatctattaaaaattaaatattattaatttaaaattgagatttaagtaaaatatattaaaaataatattttattttctaatttttgggtttgaaattttggaaaattcaaaaaaaaaataaaaaaatcccaacaaaaatcggaaataggtgctgctgcccacgaggagattgcatgcagcctcatctgcacgcgcaggaggcatgcgtgaccaagcatgtgcggcatcgtgcgtgcgttcag

SEQ ID NO: 178109 - DNA, 685 bp, Cannabis indica
gagtaacaatattgttagggaagaggttcgacaagattcaaacataatgcccttttctagaagcgaaaaaagagatcagttccgtggaaaaagatacctgttttacacattctaactttgttgtttcgaatatggcaagttgagtctcatgcacaactaggaaatgcatctggtcttgatgaaactgtacgcgggtatctgattgagatgatggagtcctcccagacggaatctgcaaaaatctgtttctttgtttttcccatccatctgagttccacacacaaatctggtaaagatggaagaattgcttcagagttggaactttgtttagatttacaaaaacaattttactagtaaggaattataacctgagcatctgctccagatgaaactagcacattcagaacgtgagaaaaggctaagccagtaatccttttagaatggcctttcagcttgctctttacctgtgtcatgagatgattaagtaacaagctcgaaaatgagcagtgcagataatcacaaacatactgatgctgctatatgacatacctcatccactcgcacattgtagatctgaattgtggaatcatccattccaatagcaatatattgttatcttgaggatggaaagcaagtaaatgttgcagcagggggtgaggcatgaaaagttgtcaattgtctgtac

SEQ ID NO: 178110 - DNA, 870 bp, Cannabis indica
tgtttggtaacatttttgttttctaattttttaatcacaaaatgaaagtaaaatttttgtttttaaaaattttgtttttgaaaaacaaaaatgcgttctgtaaccacttttgtttttcaattttaaaaacagaaaacaaaagtgtgttctgtaaagttcattttcatttttattttttgattttatttaagtcgggtctaggtttgaggtcggatttgagttcgggtcagaggccgggttcagcgccagggccgtagggggaggattttggttcgggtctcgtcggagtctaaaatattgattaagcaaaaaagttgtttaaaaaaatattgaaagtcacttttttttgtttttaaaattttgattcttaattaaaaaattaaaaagaaaaaacagttttatagaacatgtttttaaaaaatattttcacttttctaattttaaaaacagaaaactgattaaaaaagtgttaccaaacgccacttagataaatgatagtactaaagtggcaatacaatttctataacatcatatataagaatgtgaattgacaagtccttctgtttttttttagttcgttttttacttttttttagtttctaattctattgtttttttctaattttggttgtttaattctattttttggtaaaataatttttggtactgttactagtactcttaatatgcttaatgttggtactattttttttttacttattttttaaaattttgtttttaattttatttttttggttttgtactttgtctaatactcttagggctcgtttggtaacgccgtattaggtcgtattgtattgtattgtattatattgaatttggattatatatcatatttttatataatac

SEQ ID NO: 178111 - DNA, 717 bp, Cannabis indica
agaggctgtggaatgactaacggaggtgtattacagcataccaaacaaactgtgtaagatgcacataagcttatgactataattgttaatattgtcaaaataaaacataaagagtcctaactatatagctgtgatacgtatgtatcgtgtcgatccgaccaacccatattttgaaaagcccgctataatatgggtcatgttgtactaatattttaaagggtaagctcgacacagcctgtaaacccacattttcatgttgtgcatagactcatgtcgtgctttactcgggccaactttttttttataaataggtcaacctgttttcttatacaagtcaaactcgagctttacttatttactatttttttaacaattaatgagttaatcattaaattatatgtatttttatagttttaattatttttatataatatttcaataatacgttgtacatattatacaaaaattattagaatgactaaaatttgaatattcattagttaacatatatattattattatcaaattgtaagaattttaacgtcattctgttttgtagttagtctatttatacttatgtatcgtgtcttcgtgcttgttatgtcatgtcgtttattgaaatgattaaattgaatatttattagttaactatatattattattattaaattgtaagaatttttaacgtaaatactgtttttgtagttagtctattta

SEQ ID NO: 178112 - DNA, 746 bp, Cannabis indica
ccattttctagtagttcgcgcgaacgcgcgagggactatcctttctatcgcttgcgcttgcttttcactctcaaggcaacggtctctctcttctataaagcgaagcaaagcgcatggcgctgaagtgaagaaagctcaataaacacacacgaacacgatgcagggcatagcataaatgagaccgctgatcatttcataaaacatatatgctttccctttctcgatgcttttttgggggtgactcaccaaccgacccagcagtgatcgatgacagaatggtacgaacaaatcaaagtcattggatttggtagttctccattgacttctctctttacccctttgcatatgttcctaaatgggtgtgcacccccacccagatgggcaggggccggcctcccaccctcttatgcagcatttattagcttagctgagttgggtggatcgtgcaataagcctctctcgaccctccctttctcatacgtctttatgaaagcctctcgcctttcgagatccggtccatcatcaactactcagtcagatcttcttgtttgcttgctttgacccttaacggatttgatcggcatttcgtgcctgcggaattcgacctttatccgctggttgggtagagcgtagtaaggttgaggcgcaactagaagagttggccctagtctttctatttttttctccaattcgattgcagtctccgaatcctcttgatcgatggtccccattagcattagtgccaa

SEQ ID NO: 178113 - DNA, 796 bp, Cannabis indica
tattttgttgctcttatggccacagtttatgaggtttggaaagttagaaatgttgttttttcagtatgaattatgccattagaagagacataaatattgttaataatgtacaagggttagtcaattcattccctatataattccaaaaactaaaattatatatagcttggttttggtccttgaatattgtttagtttggtggttgtgctctgttttaggtctcccttttgcttagcaattggctgtgagttgggttttcccttttacttgtaaagttttggcatcaataaaaagtttacttatacttacaaaacaaaaagagttacaaatcagttactctttctatatattacatttgatcatattaaactacatattatagtttaccggtcacgtttcaatttaaaataaatgttattttaaaccttattttattgattgaattttatattttgttaaataataaattagacaattttaaaaatagtacaaacagtattctaggctcaatttttgttaatttttttcaaaataatcaatttgaagctagaatcttatacaaacatatgcaaaatatgtgactaacttggtcacaaccaatcatggtacatgttattttacataatttgaaaaatacatactctaaattgttatttataacaaaacagaaagtataattaataatttttgtactaataaaaatccaccctttaatttatattatatttgtacaaattgtgtataaatctactatataactgtagtatattatagagttttgtattactctaattca

SEQ ID NO: 178114 - DNA, 605 bp, Cannabis indica
ctatctcttgtgttgtgtactaaatagagaaacgttgatgaagaagaggttgagaaaatgcgaggaaagagaaaataaattgataattttatatttaagtaacataactggcaatacctatatacagataataatctataaaaattgaatgcaccattgaatcgatcttcacaaatctaatgaaacgccagtgtagcgaccaaaggtctaatagtacactgattctaagacattcccaaggtcaccccaataatgactgagtgaaatataatcccaatctccaacacttgcaacaccagtctctgcttcattctcaccaaatcctcctccaatgtcactccctctgccccacccaactcacccacttcgatcctcgactcgaccaatttcttcgtctccgtctccaccaccacaatctcctccttcgtacctaccgatttgtattcagtcgcatcactgccaccgtgcatttctgaaaatacccatttatgaaaagaacccttgattttaaccttaaaaaatagtctaaatacaagaaaaaaaatcgaaaaaaaaaacccaattaaggaaactgacgaatcgagcgagaaaacaacaaaaaccca

SEQ ID NO: 178115 - DNA, 610 bp, Cannabis indica
attaaacttgaaattttattcgtaactaaaaattaatttcattaatgtaaaattttaaaaaaaaatattaaaaccgcgcgaagcgcggatctattccctagtgtatcaataaatttaatacacttttttttttattacccctataatgtgttcggaataaggggaatcttctcacaatttttgtcccttttaaagcaacggatgatatattaaaacataaataaatagtagggtaaatttgcggcataacctccttaagtgaccaggtttttgcaactaactcttaattctaaaattttggtggtaaaacctcctaaacctaagttctattagcacttagccctttctatccatttttggcttttaactgccatggtggaatgtctacatgtacacagtgtacacgtggcacaattttattggtccacgtaaataaatatttaaaaaataaaaaattaattattttaaaagtaaaaaaataaaaaatttatttttatttaaaaattaaaaattaaaaaaataattttaaaaaaaataaaaattaaaaaaaaaaccccaaattccctctttctcttcttctattctcgttctctctctctgtctctctctc

SEQ ID NO: 178116 - DNA, 669 bp, Cannabis indica
cattgacacttcttgagtggaaataggaggatgtcactatggattttatggttggtttacctagaaccacgagtatatttgattccatatgggtgattgtggtttgatttactaaatcagtgcattttctgctagtgaaaatgacgtacatagtagataagaatatgttgaatatatattttttttttgttgaaaaaaattatgttgaacattatgtacaactttatgtgaaaatttagtaatgggccacaattatggtaatattaatttgattaataaacatgtagttgtttaagtttttttttttttttttttttagtattttgaagctaatcttaatctaaaacaatttatttatgctttaaaatatagaaactaatttgaaaagtaaaaaaattagtaattttctataggtacatttgataaatatgggttggtcatttcataaaaaataggatagcccgtttaggcccagcacaagttcggcccaacatgaataatttgtgcttaggtcgttgggcttactttaaaatatgggtcaggcctgacccaacccattttataaaatgggtcggacgggctcacattaataaagtgggcttttataaagacaagtcgggctaggccaggtcgcctgaatgtacatctttagtcacaatacaaaattaa

SEQ ID NO: 178117 - DNA, 772 bp, Cannabis indica
aattttaattgagaagtacctcataatgttcacaaaaaactaccactttttagttcacattcctactatatatttaatatacatttcattttctgattgataatttaatatttttttctctcaaattattttatatgatacgaaaataaagttttcatataaagtaactaattgtttattatcaatactaatagtaaccaaaaaattacttaaaaacacagcaaaaattataaaaaaaaaaaaaaggaaataacatcaaatatattattgtaaactttctttcaattttccctttgttttctccagaccatttactgatagaagggaaatttacatggtatactaacttttgccatttttttacaaaaatactgtcaggtggtattttttacttttttatttgtatttttttataagtttcatactgcagtgtactgtgttaagtttttactgatgttttactggtgttctactgttgttttgagttgttctgctttgtgttttactggtgttttataaaaacaaagtatttttgaaaagatttccgtgtgacagttatttttataaaagttaacccaaattccagtatttttgtaagttttccctgatagaatgggcttacaatgcgaatgtccaaatggcccatatagcctcgtgaactctaaaacgttctcaccttgggattcatcggatctgaacaaattacataaagcacttattttttttttggtaaaacaaattacatttttacgtttaaagaatttttttttat

SEQ ID NO: 178118 - DNA, 743 bp, Cannabis indica
cgtttctgatgccaaaggccagccttctggagaaaatgatatagaaatggggaggcaagttcaacggaacaatgctgatattggaatggagactttcaataaacaggtctttcttgctcctattcatatcgtttttttaacaaccctgttcatatcgttttgttcagctatttttctcattattgaaaaaaaaacttacgtaaaataaattgtgggacatggttctgtgaaagagctaaactacatatttatgtctgtgtaacattgagctttctaataaatttcctttcctttttgttacacaagcagatccttaaatttgtttctgtgattgtagatacaagaggttgagaaattagtggacaagctctctgagctgcttaagaagcttaaggtcagcaaatttttatcaaaggttgtatggttaagattgacatttttacaaaatacagttagttttggggtgatcttttaaagtatatggttgtctctttatgagtagtgatttccacattcctaattatcttggaatttgagtaaagcatcatatatgatcatagttaactaattagtcattcaacataggaattctccatactgtttaatggtccatagtaacatattgatctaattcaaggcaggagtccaaaaattatatttgcccttgaaaaggaaaaaaaaaatagcccttaaaaattattgtcttagatagttgacatcagttaaaaacttcagattaaacc

SEQ ID NO: 178119 - DNA, 758 bp, Cannabis indica
tacccagacccatacaatgagctcactgtccaatcatctgcgtcgaaaagcttcactttgttaatcccattgtcttttagaagattcaccactatgtttggatgcaatgggtgagatgccattgttccccaatttactcctatattgctctctccattctcaaatttcatcattaatattattccaaccatcaaaaccacccccaccaacctactactactagcttcgaccatggttccacaattaataattaataattatttatggtgtgttcatattaatcttaatgagattgatgaatgaaactaatgatgatgatgattgtagtagtttgagaaagaaaacaaaaatgaaggtggctagagcctagagacattaataatattggtttccgtaagccttgttaatttgtggtttttacaaagtttgttaattggccttaactgctatcattctaattttagatttttatttatttatatatatttgaatattataacttgattttagttggcacatgtatataataagagggttgtatagtattattagtcaccttgcaaaaaaaaagtgcaatattattatttatttattttctggtaaagaccttaacttcattaatcagagctaaaattttggtgagcacatggagatcacctcccaaaaattaagcaacccattgcagctattggataaatcccacttagcaataacatgcatgggccgccacattacaatccttcttaaactaaaacaca

SEQ ID NO: 178120 - DNA, 627 bp, Cannabis indica
tcaagtttcaacaatacaataattagtgggctttgagctggacacttattacatattggacctaaataaatttaaaatttgtatttttataatatgtggtacggtacggtttggagcacacattaacaatttaaaactgcaaaccgcaccgcactgcgcggtttaggaaaattttaaactgcaaccacaccgtaaaatattaaaaccacattttctttaccgcatgtgcgatttaagaggtttgatgaataacccttatttgaaccttaaatctgccaaatcatttgactattttttttttttttaaaaaaaaaaaaaaaaccaaatcatgtaattacactacaaaagctcttacacataagtatcatatttggtggctgaaattcaagtttaacaaaaatgaaatcttcatttaaaaaaaaaaaaaacgaaaacaaatctcagagacccatacttctcaatatattagttaatttgctagtgtcatacttacaagtcttcacgatttaccatttttccttaattaataattcttccatacaaataatacaaactttaaattaacctagctacaactagatagaagcatgcacgtctcaaaataatgatcgtatatatttatgccac

SEQ ID NO: 178121 - DNA, 682 bp, Cannabis indica
gccacatggcattcaattcgatttttccatcaactataccgtaaaataagtataacagacttaaatattaattatctagttaatttttttgtttatttaaattagtatatatccattatatatatatatatatatatattattttgaaatcataagattttattatttctattattaatgtaactttttagttaacttctaaaaaatgaattgtcattttaatatcattaacccaaaaaggaagagaaagaaaagagatgaaagtatgaaattgtaacagcaaatttcaatagaaaaaaataatatagcagtacaaaaagataaatcaagttgtgaaaactaattaaaaaaaattcttaatacaaaaatatgctaaggagttgatattattttgcatattgtatttctttgcttttttttttcttctattgctttgtagctgtctttttgttgttttatagttgttttcatgttgttgttaaggtgttctataatttttttttaagttttactgaaacataatctttttgtaattttgaaactttaatacaacatttttaaaaacttagtacaataaaaatataaaatgaaaaatatgacagtaaaaataacaaaaaagattggtattcttgtaagaaccccaaaaaaaaaaaaacaaaatacaccatgctctgattttttt

SEQ ID NO: 178122 - DNA, 567 bp, Cannabis indica
ttaactatagggggctcattaacatgcctattaatggagacaaacttacgtgggacaaccatagagtcggggagaatcatgtcaagtttgctcttgataaaggtttatttaacggagcatggctcaacttgttcccaaaggctgttttgttctcctctcaaacttgcaactctgaccataggcctctatgtctctttattgatggtatgggggaaaaattcaaaagaagcttcaagttttaagatagttggacccgggatgagaggagcaagctggtggttgatagcgcctggaaatcggtgtgttatccttgggctcccgctagagttttcaagaagattggtgcaactcgggttgctctcttgcattgagtagacccacgttggttaaagttagatagcttaattaaagatctggaaggtaaacgtcaatgccatccagggagttgacagtgggagtcaagagactgggagtgctgagtgcgatatttagtcgaggctcttaattgaggccgtactgctcggaaacggaatctgtactggaaggcagcggaccgacggagtttcc

SEQ ID NO: 178123 - DNA, 659 bp, Cannabis indica
taataacgtgttctgatgattattgcatgtgcatatttttaaatcaaatcaattatcttgatcaaggtgggttcctccagaaacatttgatcattgataatgttcttattggtttagagtgcattaataatttaaagaagaaaacgaaaggtgatgagttatgtgcaattaaattttgagagaatcatgttgcttgaattttatgtgaattggattagtgaaattctttttttgtatctcttttttggaatactctattctcttgaatgaggaagttattggttctattactcatcattgtggccttagactaggagaccccatgtctccgtacttattcttgctttgtacagatggtttgtctagtttggtagatcgtgattgtgacaatagtttattgattggttttcttgtgggagaggtggttcggtgatctcccatctattgtttgctggcaatagcctcttctttcttaaggctttaaaaagtgtattgtctgagatttaagcaacttcttagttggaatggtgaagtttttgggacaactacactacaacaaatatcattattaccggcggaagcatccgccggtaataagtaatagtaccgccggtaataattaataccggcggaatccgccggtaacttatccgccggcc

SEQ ID NO: 178124 - DNA, 801 bp, Cannabis indica
cattgttgatagtcactaatattttgccatttaaataagtagcttcaatcacacctaacatgttcaaaatagaatttttaaagaaatataaagtctaaacttaaattatcaaaatacatagtataaatcctatatgtagttttattttacacaaatacacacaaaaaaaaaatcatttaaattaaataattttaaataaaaaatatatattataattataaattatttattttcaagatgaaacagttgaatgcgttaaaaataatatgtttacttaaagtatagaataaataggatgttttccttgtgacccttaagagttttgtcttaaaaaaatctcctaaaccataaattattgcaaatattttcattcagttgcattctttgttaattttttaaacaatttgcctatgtgagagtcgcacgtatagttgcagtactaaagtgtattaactaacttaagctacttgaaatttaatttattggggataaacatactaatatctctatgaacgcatatatatatattcacataatttgttattagactattatttatttatgtattttttatttggactcttgaactacgctacttagcatcacaatatagttctacatcaacaaattattttaaaaaatgaacaaaatgtaattggggacatttgcaataattttatagtttgggagaagttttatatatataaatggtaaaactttagaagtgtcatagtttcgagggagaaaaaaatcctatttattttgacatgagaaatttgcgtcaaaaatactcattttgtt

SEQ ID NO: 178125 - DNA, 754 bp, Cannabis indica
cctaaaaggaaggacaagtttaatctcgaggtctatgagatttttgactgatagttcttttttttttttgggggggtcacaaatgtttcttgatttgttggtttgaaatggggttttagtgtagtttagcttaaattgtattttgatttggaatcaattgtgattgtttttaggaaaaatgtgattattagaatattttatatattagatataaaatcatctatatattacaataaatattttatattcatttaatttagttataattaattagttgatattttatatatggttagattacaatttatcaaatatttaatttccaatttaattttttaaattaattatcaaaatattctaataattaattgtggtggaaattttaataaaaggttttacttatataaatatagggcctcagtccccgaattcacttcttatttttgtaaaaacacaataaattcatctaaagagagtagagagaacttggaagcccgattacccacactaatcagtttctttttcttttgcagatctaaagctaacgtgggatttaagctcaaagaatcaatgactggaggcattttgactttttatcatagtccatatatgttcgattaattttgcattttatacatgatcatatatgcttcatattatacacataaatttctaacagttagtatcagagcggattatatatcatgtcttgataatttcttcagtttgatgtatatatatacatgtgtatata

SEQ ID NO: 178126 - DNA, 866 bp, Cannabis indica
gcttagtatttttcaattttactaataactttacaaaaaaattcgaccaatcgcattttgccatgtcattatttagattgtggtttaaatgtgaagcaaaaaataattattattatatttttatcaccaccaaaataaacaaatttagtagggtttgaacgacactatcttttaaaatgaatatacatattattgtgtattagtagtgtctaacattacttataagtaacattttattagcagacctaaaattttaatcaagcgtaggcagaataattattaaaataatataatatctaaatctaactatatatgtttatgtaagaggggcgcacacttattttattatacataattaatttttatcttaatatttatttatatatgtacaatattaaaaaagaaaaaatgagcatgggcaaagccccaccttgttcttcattgggtttacggctggattcttattattggttattggtattctttgagaattactaaaaaacactattggtgtctatctagcgcccttcttggtgttatactactattagtgtaattaattatcaggtctcatataacttaaaaaaatgtttttaagcaatatcgctaaccaatcgtgagacactacctatgaaaagtattggataccactagtgcacaatagcaataatgctcgtctttaaaagttaaattaaattatatgagaccagatacttagtaattacaccaataacaatataacatctcaaaatatattaagcactactgatacattttagcatttttgaaaagagcattctattttgggcactagtagtggtgtataacacctgctataggtgacgctccacgattgattaacacta

SEQ ID NO: 178127 - DNA, 765 bp, Cannabis indica
tgaccttttcgctatagtaaatgaataaataaaattaaatactattcttattcaagaaatctctacttattattattgtgcttggtcttctatagcagctagtaaaacccattagccttcactccacttcattccccttaatttgccttcttcttttgcttaacccttttatataaaaatatatttttataattatatttacggttaatcccctctaattgggacatatggtatgcggctgctttcaattgatttaaattatttaattgtcacttggtttaataaatggtaactttcttcttttgtgtgtcaattaattgaccaattatcaatgtcttttaaggaaatgtttaaacgcaataactaatgtgtattttttttttgtacatttacaaatgataatacgttggatttttatttggaaaatttatataatatatctaatatatatatatatatattttatatttttacaaattttttatttaaattgttacaatattatattatatttctaaaatgtgaaaaataacctgtacataaattttatttttcagaagaacaatatgtaagaaaaaaaaaatctgtaaaaaatatgaaaaataatactcaaaaattctataaaaacataatttttaaataaaataatactcaaaattctataaaaacataatttttaaaaatatttatgaaataatcccttttattttcggtagggataactgtagaatttgaaaagtgccgacatgcacctcaaaactttat

SEQ ID NO: 178128 - DNA, 590 bp, Cannabis indica
aaacagaaaacagaatatgacattaaaggtttttgtttaagttaaaaaaaaaaacacaaaacagacaaagtttaaggaaaccccagttgaaagaacagctccaagaacttgggaaaactaaggagaaggtggaataatctgaaacctatggaatgggtgggttaggaaagataaagattgaaactttttttcacttgcaatcaaactaagtgaataaaaatagtatctttcctaaccacccactctgtaagattctgaaaatccattcctctccttgttctccattaatggcggctctcttagggttagatctcttctatactcctttatttataggtaccattctaaacccttgtcatcgttggccgttgatttgttatctgagatagaaatatctgaccgttcatttggtgtgatgacgtcagttaacgtggttgactcatttgggcttttgccaagttcatgttttttatgggctaatgtttttttaaaatgatatttttaaaaatacttgataatatgataaaaaatttataaaaatacagttttacggattttattgtttattttttttttattttttataaaaa

SEQ ID NO: 178129 - DNA, 760 bp, Cannabis indica
ttaaaatatataaaatctaatatgaaaataaatcaatcaaaataattaaggcagtgatcctaagcattttccattttatagtttagttctttcataatcatgagtcagctcagccactaggcactatcaataatgaacacagcaaagaaagggaaagccgactcaataataataataataatatacgtgaaaaaagatggccatacatttatattggacacagaaagaaacaaaatatctgtcacacactgagtcacactcccacttatttatttctgttttcacacaagaacatgatctttttagattccaattcctttgaaaatctttagctaattaaatgaaaagaaaaagtacagccacacgtgttgaagaatgagaagactaaaagtccaactttgctccaacttttgcttagaagtttctcagtacaggtgacttttattagctctttctaattcctctcactctgtctgtgttttacttttcagtttatctttttcttacaacaagtattatgtttctaagattgagatttgtgttgtttttttttccactattggtcatatcaattctttgggttgtgggtaattcgaagtctgtagtatgcaattgattattctgctctctgttttctctgcagatgtagtttgttagagaatgagtctaaaataaccatttggtctgtattgactttttgctgctgttgcctgcagaggtcctggtcctgtacacctaagtaagtttttcagtctctttt

SEQ ID NO: 178130 - DNA, 524 bp, Cannabis indica
gaggggtatgcattttccttgacaaagtctatgatatcttggaaaagtaagaaacacgatactgtttcgaaggtcattaattagctgaagcagaatataaggcaatggccaatacttactgcttctgaaattgtttggctcttatcttttctcaaagagttgaaaggtgatcccgttttccatgagagaaccaagcacatagaaattcattgtcacttggtgatattctgacacggccattgtttccagctcagttgaaggtgtttaaagagagaaaatgagcatatatgatacagcttgagagggagtattaagagtggtttagctgatatatgatacagctatgtattctagttagttactttctgttacttcttttacttactcattattaacatgtagctaagctagcctacttgtatataactcattttccattgtaattctattctatatgttcacatgtttttttattatcgttgttctgtaattttctatacagtgtctatcatagcagtatgtaa

SEQ ID NO: 178131 - DNA, 747 bp, Cannabis indica
cactagttgttttggtgggactaatatatatgggcatgtgatgttgagacttatttatctatacgtgagaccttcaattttgaacaaataaaaagataagtgcatgtttggcatcataactaaaaaattgtttttaaaaacaatttggcttgtttagccttattttttaaaaacagttttcagaaaacaaagttacaaaaaacaaaaattttgaaaacaacaaaatattgttttctcgttttaaaaactaatttacttttagtcaatatcgtgacttgtgttttaaaaacttaaaaaactattttttgttctcatttctaaaaacaattttataaaacaaaaaactagaaaacaataccaaacatgctttaagttattttgattttcctttctactatctagacaaattagatctaatttctaaacatcaaaattatttctattttcattttttagtaaaagcttacttatttataattttttgactctaattattattattattatttttgagaataaattattggttatttaaagtttctaaaattttactgtacaattttcctagagtaaattcttgcaagttggtcataatttaatattcccacttatagattggtttaggatacttatccaaaatttttcacaagtcggtcataatttggtttagctttttttcagatagatataataaatttttaagagttttttacattttgacattttattttaaatctaatttttaaa

SEQ ID NO: 178132 - DNA, 725 bp, Cannabis indica
ttttttgtatttttatagaatacaggataaataaaaaaaaagtaaaagtataaataatttaccaaacaaaaatagtttacataattttctcatgttttaaagcttctttcactccttatttcgtattccaaaaatactacagaaactaatttcttaaactgaaaaattagtttcataatgaaaaaaaatcttaaacagcatttaacaataaaaaaagatgaaatatataattggccaaattttaatttgcttattttacgtaattagttttttttgttagatttttaattaattttttaaaaaaaacatttttaattagtttttgaaataattggtttctgtgatttaattttatatacatatattaaaaattcttttgtggtatgtcttattattttattgtttttcataactagtgtttttttttaagtaactaattttcataattagtattttttttattgttgttcataattaagttttaagttttaatttttttatttaattattttaaaaaattggtgtttatctattagtatctattttagttgttttactaacttgtttctctgtgtcaaaaattagtttaatgtaggtcaaatgctgacgttcaactccgttgatgacgatgacaactccaaccactttctagtaacttttcttttgtatattgttcgctttttcaaaactactctcttatgcaaatgtgtaataaaaaatggtag

SEQ ID NO: 178133 - DNA, 501 bp, Cannabis indica
tagatggccattgttgctcctccgcctctcctaggacgtcggtagtcgtagtttcgagatccccatttcgatagcccaaggttattactttcttcttttgttttccattatctttttttcatttgtctctctatctctcttgctctctcttttctgtgcagcattcatggtcgatagcagttaaagctcgtcgttgatctcgaccttcatgatgtttgaagctcgttggatctgatttctttttagtctttcttgggttttttttttaccttattctaaatattgtgttttcttatattattttgggttaaaatttagatttatgcccattatgtaactaattttaattagtttttgttgaatcaaattgaatcgatgaactctatatgtaacattcaggtaattaaactttttattctagtaactttttcttagtatcactgtcttgatgagtgattacagttaaaaaaatatgtatattattttagtttataatttatt

SEQ ID NO: 178134 - DNA, 997 bp, Cannabis indica
  modified_base (726)..(726): a, c, t, g, unknown or other
tatatatctacatcataatcaagcactttgtcttcaggacacaaaataaagattgtgatgaatatatggtatgattaaaatggtagaaaatttttgcttttttcattatcttttatatactttggtccacaaatcattaatgatatctccgtatatatttttattgtactatacgtataatattgataagaaaaaaaagaaacgtataatatataaaaagaaattaatgctttatctgtatatattatatatatggatggatgagaaaacatttttaaaagccggtgaatgacccaacgtgattatatataattaagtggtggtttctttgtagtcaagcaagcattgattgatggcaacaaacaaatatatcaatatatgcatatattatagaagatatgccgtgtggaattttagtttgaaagtattactctaaggccaacactttcacttgttatttgacttaggacacagttttagaaattaaatatgaacacaacgaagtatatataggttactaaagtacacttccttcctgtttcaaaaaaaaaaaagaaacacttccttccttgatcacttcatacatcatggaacttaatttgttgagctatttacatataacatagaatagaaatcttccacaagttttatcattattataatttcatagaaatacataattacaatatattttttttttttgtataatctccaaaaaaaaaaatntaaaaacaacaaaaaaatatatatatatatatatataaaaataaggtcggtacagagtttttaacctttttacgattttttaaattttatttacataaaatacaattttttggtatatttgtatgttaatttttttatttttattttgttgattttttttttaaaaaaaataaaattttatgtaatttttttttttttgtaaggtatatttaatgtactaagctctataaaagatcctaacaatttgccaaaaactaaaagaaaaggaccc

SEQ ID NO: 178135 - DNA, 583 bp, Cannabis indica
aagaagaagaagaagaagaggttggttcttctgcaacaacagcgggagtcacgagagtgttgtaaatgcaattcaatttttcttttcttttcttttcttttttattattaaaattaaaattaaaattaaaactattgtttggtgctgttattattatttaaaattatggttaaaactactcaaaaatcataatctcatctcatgaattcacccaccctcaatctcaatcctcctatctttttctttctttatttttaagcataacattctttcctttttctttaaataaaatttatatcattatattattctttctttttactttttacttcttctgtctctcttattttattaaagagaaaaaagaaatcttcaatataaatagtccgagtccagatgttgtgtggtcgtggtgatcatgttttatttattatatatatatatatatatagaatatagtgtatattgtagtatgtataactatcattagagcataataaataaaaacaacaaaagaaagagcagagcaagaaaacgccaaatgtgtaatcctcccattccaacttgttcatataatactaat

SEQ ID NO: 178136 - DNA, 787 bp, Cannabis indica
aacatcccaaattagaaaacaagcaaaaaatattgatatcaatatcagcagcaagaaaattttcatatgcagattatttttttaacaaatatacagtgttgaaatcaaacaaatgtctggaagcaccttcaagctttcaacaaaataaaatttcaggatatcatcttcaagaattgtaaatatgctttttattcccacaaaaatcatatatcatgatatataaacaacatagaaccagagtcttcaccggcaagaaaactcttatagacgactaacacgaaaagcttcccgacagttgtttaatatcccgatttcgtgacaacaaacatgaaggttgtgctcaacccatccagaatcagatttaacacaaactataagagaatcacctccaacatttatctgcaattacatcatatagtccctttataacacacgtaaaactccataccataaacacacggtcacaagcagtatttcagaatcatggtttagtatggttctcatcctaacagagttatatgctatatcccgaaaccgcagtatatatttgttctatatcttcttctcgttacttactctataactatctcaattccaactcaaatcatgtcagcacagtaaaacatagtacaaaccagttccacaatctcacacagcattcataaacccaacacattcacataaaaatatagtaaacgagataaaaaaaaaaatgcacacacctagagtccacagcctccgactgtacggtcttctcgacctcgtcagcactggaatcagcaactcc

SEQ ID NO: 178137 - DNA, 698 bp, Cannabis indica
aaataattataagtaatcataaatttagccaactgcactatccttcccaaattccaaaaaaaaaaaaaatccttaatcaaatttacatcataaatttctgtatttgcactcaaaaaaaaaaaacataataaatttctgccaaaaaaataaataaataaacgtagtaaatacaaaatattgtcataaatagttaaaaatacttaaaaaataagaaaaatgtgtactaaaaaaacttaaaatagcaaaaaatttactgggatctacaatttttttatatttttatgaattttaatttttttataaaaatacggaaaaaatatcttatgtgaaagtatattttcattatttatatttaggcatttttgtttgagatttttttattttatattttaaatcagttttttttgattttttacgaaatttcatatagaaactcttattgcaactagcgctgcaatctaaattgcaaccgaaaatcgtacagaaatccctattgcaactagcgctgcaaccactttagaaactcaaactgtaattaaaaaaaaaaaaagtttataagataattctcctttttgttttcttaaatgaaatgagtgggcacatgcagcatgctgaccgcttaaagcaaaaatattcaatgggtctgtatacaacaacaatcttatgtatgggctacctatttcattggaccgttgaca

SEQ ID NO: 178138 - DNA, 874 bp, Cannabis indica
atataataaattgaatgcgagtagcattaaattacaatataaagggaaaaataattgaaaattaatgtgattggtggattgtatggttgtgatatttttgagcccatgacatactataaaattatattaactttccatatctagttagagatcacccatcaattgctatacatttatccaaaatggccacacctacatttaaaataataatcaataacattggctaaatcaatggtctcatctatttctttcattcatattcaattcaaattttgataagtttttattatttttattattatcggagtaaggttagtcacaatcataaatcagattattatagaaacatacaaattgaacacaaattttatacaaaataacataaattcaattttaataatacataattttaagtaagatcgcattacttttttttttttaatgaaaatgtggcattttattaaagtaaagattcaatcaatgcaatgtctaacaactccgaaagacagttgttagaatggaattcaccaagatcgcattactttatagttatcattccgtattgatacactagatcaaaaatcgtgattatgattacagagtcgtataaaacttagccacagtacacagtataaacttatacagtattttttaaaaaaaaattcgtcccaactgtaaaaaaagtaaaaaaattaaaaattttactaatatgtagtataaaaacccaaactggacaactattttagttagggtcgttcttcaacgataaaatgctagtgtgggtgctgcaaaagtaggccgtatgtattcttaaaacttgattgatttttctaaaagtctctaacaatagtaatcctgtctaggtagcatactc

SEQ ID NO: 178139 - DNA, 1070 bp, Cannabis indica
cgatacccaccctaaataacaatcatcaatataaaattttaactctataaaaaaaatcgtttataacataaaacatttgaataacaatcgtttatattagatacttacattataggtttatatacacaattatgacattcttaacaattagttttataaaacatatagtttataacataatttataattagtcactaaattcttaaacaaaaaccacaagaacttaaaataaaactaatatgtaactctcatctagtaatgtctaaatatatgaaattaacagatattaaaaaagaaaagaaaatattttggtggcagtggcacgtaaatgaggagaaaaagatatgtagatatttatttatttaattttgtaataaaattaaaaataattttatggtaaaacccacacccaaaccctacgtgttgatatttatcttcacatgcctctaaacccttctcagctcactgctctgcttttcctctcgagctcatcctcagtcaacctcacgtcttccatggcagctcactgagacaccgacccagacagagagactctctgtgtaagtttctcaattctattctttccattttgtagaccaacccaacccaaacttactttgtttttgtttttctcttttcatttccctcgctcttcttctattttctgcaaaattcttatggctttctttgttttcgctactccaagtggttttgggcttaattcagaatataattgaataatttgcacttgattgaaaatttaacattcgttgatgttaatccatttgtttatttatgtatacttttcgttttcaaaccgaatggaaaagaaagaaagtaagagaaaatggtttccttctttctatacttctagatactgaagtttagtgcaattacatgaggaaatgaaggtttatttatttattttttatggggagtttgcagataccggaagcggaaaatacccacaagggaaaaaaatcatggagattaagaggaaaacacctgtacaacttgaaggtcttgacaccatgtacttaggtaacaagcgtaaacctctttctctatct

SEQ ID NO: 178140 - DNA, 719 bp, Cannabis indica
attattgttatgttttttattataattgtaaacataaaaataaacatagtcaatattaccatatatatatataataatcaataattattaccatatatattataaaagaaatttaaatttttttttaaaattatatataaaaatgtatgagaaaatgataataagtttttttgtacatattttgtaattaattaaaataatgtatataaaattgtaaaatgcccaaattaatatttttatctagtaaatagtaaaatattgacggggattaaaaaagcaaattatcaagaaaaattcaacaaatattaatattaaaaacgtatttgtatgtcaataactattttagctgatttacttaatcacgaaatactatatacaattaatacataatttaattacaatcaaatatttaaagatattcttcaacggctagaaatacttttaattaccttattaaaagatttgatatatcacattatcacagtttaagaatttccaaaaatatgtgatatatatataataatccaaattaattatttaaaataatacaatttaatattgttattcaataagaattaatctttggataaagccttttagtcagctgtggatatttctttataactatataaattacacacttttgtattcattcatattcacaattcaatctctttctttcttccccatatcaaaattcatccatggctattagggca

SEQ ID NO: 178141 - DNA, 558 bp, Cannabis indica
tatatatataaatacattaacttgtatatcttgttatcatattacataaatgtctaatgattaaaattatgtgaatacacatttttgcacattttcatttttcttgtttttttttttttggcaaagtttacagaaatatatggcttgtttttaaaaaatattttatgaaaaaacttctaaaaaagtttaaaatgttggaaaagagtttagggttactagttactcctacctttattgtaaccaaagttagtaaccagttaattactttatactgtttttcctcttagtttttttttttttttcatttttttgaaatcagattttcctaaaaagtatacacattgtaccaaagataaatgcttgcaaataacagtgttaaataaatattagccacacaaattgaaaataatttaatttaattaaattaaattattaattttagttatcatttgataacttgtattaattaattaattaattaatgttcaattaaaagcattctgaataggtgtgtacaaattttgcacatatcctatgtacaagtttagaattgaagtg

SEQ ID NO: 178142 - DNA, 1250 bp, Cannabis indica
caaacactatgtttttggcagggtcttggaaaaaggtcatgcttctttgtggagattgttccatacaaatacatggctatatttacactctttcaatttgtatatttcttggtgtgttttggtgtgacatggattcctatagctggaatattgttcccattacccttcttccttctaatcagcataagacagtatctccttccccaagctgtttcatcctcgttatcttcaggaactcgatgcagccgagtatgaggaaatcacaggcgccccaagactctctcttagcctctctctaagggtacataaccatagttagtattacattactatcatctatacatatatgctgatgaactcataaatgtattgacttttgtatcaggggagagaagcacctaggcttggggaagaagatggagttgagatgtgtgatggtgagattttagacgagttaacaaccagcagaggagaagtcaaggtcagaactttgagtttcagtgaagacaaacgtagtcaggtaattgactcttatggtgtgtttacttgtattcaatagtaatcagattcatcctcaatcttattattgatgaattggaatcacaatcagaataaattatttattttactattacgatttgaaattaaggcacgtttggtaatattttttagtcagtgttttgtttttaaaattagaaaagtgaaaatattttttaaaatcatgttctataaaactgttttaactttttcaattttttaattaagaatctaaattttaaaaacaaaaaaaatcactttcaaaattttttaaacagtttttttttaatcaatattttgtactccaacctcaacttagagtttcgaaaccgaacccggacccgaccccaaacttgaacccgcccccgatcccgctctctgacccgcccccaaatgaaaatgaaaacgaaatttacagaacatactttgtttttgtttttaaaattgaaaaacaaatagaatatatttttattttttaaaaacaaaagttttatttttacttttgcgattaaaaaattaaaaataaaagtattatcaaacgacatttaagttatttatttagttgaattcaatagtaatcagattcacccttaatcgtatttgttactgaatcaaaatgagaataatattatttactatgagatcggataggattgccatttcttgctcccaatttatataagataattgatattgtgtgttttctcattatg

SEQ ID NO: 178143 - DNA, 611 bp, Cannabis indica
catatcagaccctacatctgtcctaacacaaaaactataaatttggataccacatcagaccctacattggtcctatcaggcctaacgcaaaaaactataaaattcgacctctatcgaaccatgcatcgaactctatatcggaccaaacacaaatcatcaaaatggacacccaattagacccctgcatcggtcccattgggcttgaaaaaaaaaaaaaaattagacacacaatcgggacctacatcgaaccatacatcagccttatcaggcctaacaaaaagcataaaaattagacaaactatcgggccctacattgggcctatattggacctacgtctttaaccttaatcctttccaacaacataatacatcaggcctacattggacctatatcggatcagactaaaaacccaaattgtttcccaaaacacagatctgaccaatccaaccctaaatctaacccaaactcaaaaaacacagaggcttaaccctaaatctcaaaaaacctatcaataatttcatacattttaaccctaaatcatgaaaaaaaaaatacaatacacttaaatgaatagacaaaaggaaaagaaatcttacctttgacgacattg

SEQ ID NO: 178144 - DNA, 746 bp, Cannabis indica
ttatatgttacaactatatgtaactctcaatcacataatattgtgattattagggttgtgcacggggttgggttggccgggttgatagtatttcaacaggccaacccaattagatcggcctagaaaattctaacacattcatatcatattttatgcacagcccaacccaacccaatatattgtgggttgggttgggttaggtcgggttacaacacttattttttacattaaattttttagatctaaatctcatcactgtattaaaatatcattacattaatccaaagtcttaaaattataaataaaaatgtctataatgtaatactaattaaatagtgattacaaacttgaccaaaataatatctaatagtcttcttcttccttgcctcaagtttactgccaagtgccaacaattcaaaacaaaaagttactcaaattattaaaaataaaaaagcataaaacaataacaaatttgttcatcacagttataaatataccaaaactattaatacttaaataatttaaataaaattaccatctgtataaacactaaaaggaaaaacaagaacaaaaaaataatatcatatatctattataacagtgataatatataaaacggaagcatttattaaaaaataaaattgaattagtatatacagagagatcatttcataatatatacaacaaactgttcaaaaaaaaaatataccacaagatatcaataacagtttaggtcaatcacaagg

SEQ ID NO: 178145 - DNA, 533 bp, Cannabis indica
atggcggcgagcgagagcttaaagggaagggttttagggaaaaaacttaagagagagaaaataaaaagtatggcaagaaaatgggaagtagtatagagagagaaagaaagagagtagagatatttaggagaaatacataaatgcccttggaaagatgttttaatttacacttatgccactctcttaggtttggcattttttgtgtggtgggagcgccacgtgtccttgtcatgcgcgcgaaccaggggttctaaatgttccgcgttgagtgggttggaatcagctaccgcaggcatcacgcttaattttttttttttttttataatacgtgtttttataaagttactaattaaattttttattttataatttgtacaatgataaattaattttttatatataatgaattttaaagtaatttctaacaaaaaaaaattaatttttcataacaactctaaattagattattattagtttttatttaaaataaaatcaattcatgatataaaattattttattattttataaaata

SEQ ID NO: 178146 - DNA, 1149 bp, Cannabis indica
tcctcattccgagctgacgtatagtctatggtttaaataataataataataataataataaataataataataataaaattcaaaaattagattataaaaaagataatttccaaaaatacacttcttttgtattttatttataatttgacattttaaaatttttaattacaaaaatttatttgtaaaattttaaaattataaaaatatattttattcaaacaaaaatttacaaaaaaataactgaacaataacgagaaatcaatattcacaataactataaatcaatttttaataaattttaaaataattcaaaaaataatataatacaattataaaataacaataaaaaaattgtctattattttttcgaacgatgtattttataaataaaaaaattcaaaaataaaaaaagatttcttttatattgcagtattttataattttttttttcaaatttttggtgtgttatgtaatttttcttttaaaaaataaaaaagaagggagagacaattagaaaagataaaacatttcaccaaaatgtatgtgtagaaggaggcaaaacgtgacaaaacgtattatgtagtttttggcttttttgtacggtaacctattaatatataattcaattaataatttttaacatgataagtattactattaactattaatattcaatactatattgtaaaataaccatatacaagttgatagtaatcttttttaaaagagtactaattacaacatctacgtctaaaattatatgtttaaatatttttttataaatttattttttttaattacagtattttttttaattttttttaaaatttttaatagtttaacaacataataaataaagtttttaatactccaatttactatatgtgttcaaaaaaacttaaaatgtagttgtttttgacactataaattatttggaaattgtttaaaaaaaaatacaaggataaaattataattataacgaccactattatgaaaaaaaataaaaaaaaaactaattatatatatattttaagttacgatagttgattaagaaattataataaaaattaatatcggtaatacgaccttatttattttatattagttactaagtttaaatttgtaagacctaaattatatgtaacata

SEQ ID NO: 178147 - DNA, 975 bp, Cannabis indica
acgttatagttatttaagacatcttgtaaaattttaaaaaatttgaaataatttataatatagaaaacaatgttcaaacaatctatttttcacgtgtatataataaaagattcacgtgtgtaacaaaattttgtaaaataacttaaataattataatgtacgcgatcaataaaaaaaaaattagactaaaaattagagtgtaatgtataattacttaatagtaatagtatgtaacttcaatttctatactccaatcctactctactacattccataacactttttattaatttatttatgagacaaattaataataagagatatttgactttactaattcttttaattatagtactcacatagtccaacttagtcttgatagcctttaattttagtaattaagtagcaataaagccaatttttttacattcaaacactattagatgagtaataagtatcttttcttttttctctttttctttcttgtatatttataaaagagaaaaaaaaaaggctttagttatgacaaatcatccaaacaattctattgtctactaatttaagaacattttattaggatcaaaagtgtactgagtaatatattttagagtcaaatacccttttatatatgtttataataatattatatgagacattttattttttatttttattttttaaaaaaggtatcttggacttttaaaaatcaataaaataaaataaaaataaaagggagcgtggcatgtataaaatgatagcttgcctaggaaaagcaagtgtcttcccaatggtcatgtaagcttttgatgttttttttttaatttgattattttctttaatggtttttttttttaatatgatcttcatgaatggtttggtgaccccatttgcataaaataattaaaatatattatggaagaaataaaagatagaatctagtagaaaatccaatgctaaccaatctaatgaagagat

SEQ ID NO: 178148 - DNA, 621 bp, Cannabis indica
agcaagagcctcccttcgatcagcctcctcctggatcgcccgactttcagcaaacaggtcccgcaggatcctcgcggcctcatctatgcccccaaattcggacatgacgaagccatgattgactatggtcttggaaaggcggctggtctccgcagtaatctgaaaaaggagacaagtgtaagatcgaatgccttagacaaaatatcaaggaaagaaataaaccgcaagtacctactgcagccatggcgttgctgatgtcttgaacctggtagacggagttcaaggaggcacaagcagcataccgtttaggcgggaactgagtcagatgggagacatactcgctggtcatcttcgaggcaaagggagccaaggtgggcccaaggaaacgattgaaccagtccgtcagtgagtccatgttcaggtcccatagattccggaaggcctcctcattgagagtgttttgctgctcctcccgtaagaccctcttcaaggcctccacctcagcatgcccccggctgtactaatcgagggcgtaattgtatttggctatctagagattctgcctctcctcactctccaaggaccagagtcaacactatgccattgggcacagtatattcc

SEQ ID NO: 178149 - DNA, 511 bp, Cannabis indica
attaagatataattggtaagatttgataaaaagtactaatgatataagtcaatgtttattacttataaaaagttagtatctcagtctcacttctaattattattattttcttttcttattttagagtaaaatgagttttccagtaaaataaataactattatgttttggtcaaagaaaatatctttatatattaaaagtgcctatttaacagtttttcttggtttaacagaatatactttaaaaataaaagaatattctgttaactttaacggagaagaaccaaaatatattttgcgattcctctttcttctttaacaaaaccctattggattttttacggggcaacgattagctatctccatttactctttctctcaatagtcaagtactatctacattacatttcctctttctccagtctcgaccgcctaactaaatcccaaatcccaaatcgtaccactacccgctaggagttcgattctccccgcatcaggttctctcaatcgctca

SEQ ID NO: 178150 - DNA, 797 bp, Cannabis indica
aggtaaaaaaaaatgtaattttaaaataagtaattagtaatttaaatgtttattaatttaatttactaatatattatgagtttttttattattgttgttgtaatttattagtttattaaatagacttgaaggtaacataaatattgttaaaaaaaaaagtaatataaaagtttaaaataacataataatttaatatgatttaaaaaaaaaaacacacaggtttcaaagtatcagaaggtatacaaaataattagtatataaaaatggtggcttattatattacataacaactcattagtttcaataaactttaaggttaccaaaatgtattttaaataataagatactataatataacttaaaaataattaattgattattaagatatttacaaataaattttggaggtaaccaaattctatctcaaattatatgatataaaaataatttattttttttttatgtaaaagtaactaattagtttcttatcaacattataagtaagtaaccaaaaggtaagttttgaaaatgcaggtaaattaaaaataaaaagtagaatttaagattaattttgtttcaggcatattaatttagaattaaggtattttttgaagatgtggcaaggtattattgtaaatgagatttgtgaaggtatttttgtaattagtttgtattttaagtatattattgaaaaaatcccttttttttttattgattaacacctatttatctacaatgcagggccaaccttaagcataggcggattaaatttgtgcctagggcccaaataaaaacgt

SEQ ID NO: 178151 - DNA, 713 bp, Cannabis indica
catgatacactaattataaggctgatattgattaggggtgttcatccgatccaatccgcacttttttggtcaaacaacatccaatccgcactaagtgcggatttcatattttggatccaatccgatccgcataagagtttaaatccaatccgcaatagtgcggattggatcggttattttggatcggttatttttttaataataaattatttaatatttcatagaaaaaaattaaaaaaagactattgtttcttaatctccaataataatctatttccatctctatttatatacaaattaaaccaatatacatatatatcaatatatatatacttatctttagatttacactaaaatatatatgtatctaattactaaaataaataagctagtatatatatatttaaactttatgtgtatgtgtctatgtgaataagaattatttttcttgtgttttttattacaaaataaataaaatgcaccaacactcaatatattactaaaaaagattaagaaattagaagtttgtgtttttttttaatttaatatatattacatattataattttttaaaaatatatataattaagtgcagattagattagatcggttactttttgaggtcaaacaatatccaatccgcacaagtgcggattttagatttttcaatccaatccaatccgcacaagtgcggatgtccgcatttttgcgga

SEQ ID NO: 178152 - DNA, 657 bp, Cannabis indica
gaattcttgatcccttgatgaatcttttgctcttatgaagtatgaagtagtttatatacttgttgaatcttatttttttttattacatatgtttgactttaccgagcaaatattgatactttgtgaattttcttgtaaaatgatcaagaaaagattagtaacaaataataatcaaatatttatttatcatcaaaataagcgagtgattgagttttggtcaacaataacttcttatgtatcgaacatgcatcatgtaacaatcgaatatgtactataactaatctatatcaagcagatatccaacactaatcgaaatatcatccccaatctctaaaaatactaatcatcaagtaagcatcgaatgcatcaaattttacgcgaaaaaataaaaggaacccaaaaatgcagatctgatgctccagccaacaaatagacaaaacacacacgcaaatatatatttaaggtacaaagtaacaatatacttgaacaaaattaagattaataacaaatttagcacaaaatcacatacccatttcttttaccaccaaaaagcaaatccaaaatcttgaaaacattgaccttctcctccgatcttgtgataaggctctttcttgattgaaatatagttatctttctacagataatagctctagaaaa

SEQ ID NO: 178153 - DNA, 666 bp, Cannabis indica
ataatcatcaaatcaaggagccaatgagcaacgtataacctgggtgttcatgaacctttttacattctttgacatatttcagatttggggtatgggaagctgcaaaatgggttgctagagttcgcgaacgcacaatttacgacccaaaacgaccaatattgcttaacctgtcaacagacatagtggaagaaaaccggtatcttcagtgcaaggagtcagcattagaggctgctttccttataaagatgatggaatcctagatgtcattttactatcaaatttatccaaaacacctgttgatctcagcaagttaagaggagatatcattgcaacactcaacttaatcaatggataagtatgtgggctttctgttcgatataataagtttagttgctaaggatcatattctatgacgttttctaatttgttgtttgtttcttcttgtgctgaagtagagataactggatgaagacaagaataactttcagctgttaactcattatatgcacaaacatcccattttcaactatgatgattgtgggctgattttagttattgagacaccaagcctgttatcggtacatgtcaacataccctttatatataaatatatatgtatttatataaatgggtcagcaatgagcaattttggcctggaacgtgtcc

SEQ ID NO: 178154 - DNA, 859 bp, Cannabis indica
gcgtgggattattccccccctatttcttttttaatttttttttttgcatggggccaataaatcttttttacctaccaaaatactcccgcttctagcgaagttatgtgtctacttttgttggattcataggcaaatgacgctggaaaaaaatagtactactagtgtaaaaaccaaactgcgctagcaaagcatggttttctaggcacctttagacactggtaaatcttacaaaatttggctagtccagaaggatcttttgccagcgtcactacttaacagcgtcgctaaaagttatttttgcgagtgcagtttaccaattacgttagtaaaaatctcaattcttgtagtgattaaaggggagatcacatgttgcatagagactaaaagaggtttgcgacaagggaatcttatgtctcctttgtcttttttttttttttatattagaatggagtatcttactaagatcatggataaggtagctcatcatcttaacttattcaaagtccatcctaggtgtgaaaatatgaaattcactcacttgatctgttcccagatgatctatttatgtttaggaaaggtgcgtttacatcaatccttattattaaggggattttagctgttctcagaaagcttatggctctaacttaatagaggtaagtctgcaatatatggagtaactatgaaagatgattccttgcctttcaattacttgggcaatgaagatcagtaagaagtgcatattttaaaggcagattttgagtgcttaattgataaaatggtgcacaaaatatggacaatgagttcaaggaatctctcttttgtgggaatgtgtgtcttaattaactctattttgcttact

SEQ ID NO: 178155 - DNA, 720 bp, Cannabis indica
aacatgatatcatcaatatataataaattacaatttatatatgtctttatataataagcgtgtaaaacattattaaacatttaagaaagtctctaatgttttagggtaggagacattatgtttttattattattaatttatttttaactaatttagtaagacatgataaatattacactacaagaaatgtcacttttgcaagcatatttttgtgctgacaaaagttagtattgtgctggtaaaatagaatttacctatgatgtgttggtaaaagggggttggcaaatcaatgttggtattagaacttttgccagcataaaataaaaagcgctggcaaaaaagatttttcctagcgcgtaaatgtgctggtaaaagttagcttctagccactacaaatgtacgctggtaaaactttgatctctttgccagcgcagtttttgaaatgtgctgataaaagttacttttaccagcgcagtagcgaactgtgctggtaaaagtgacatttcttatagtgttagaagacgtagaaatgaaacaattaaaataaattttggtagagcatagatatctcctagctatagacgtatcacttggcggacgtctccaataggtagatgtcgtgttactgtggcatctacctataagagacgtttatacactctctcccgcccgttccctttgtcatctccctttttttatacattttctctacatcacctg

SEQ ID NO: 178156 - DNA, 615 bp, Cannabis indica
ttttttttaatctagctaagtatatatttcacaaaataacttacatcctagcagtcattatcatagacttgccctactattaaaaaaactcaaaaccatactgtgtaacaatttttttttggcaataatacttttaatttctacttttttatatttatatttaattttttttaacaattaatatttattgtatcaattttcatgctccaaaaagcatcgtcttacaccaccaaatgtggtatactgtcgctgctaatattactaaaaacacttggcgtcagatctatttagttttgctctagccagccacttcaatatttccaaaacggtacatttggtcatagcccaatgcacccacaggttgatttcagcccaaacataaacactcaaatagcaattaaagaataagtgctcctcagtttccctatttagcccacaaattaaacatttctcatgatcttggcatatgttgtatttaaacaatcgtgatttgaatctcaatctatctaatatcaccactcacaacataaacttgtgctttggtatagataatttattctaaattttcccttgccaatcaatagtgggaaaagttggataaaatttaacatatcc

SEQ ID NO: 178157 - DNA, 810 bp, Cannabis indica
atctcgtctgacacttccttaattagattgtttgtgtcgagagggaaaagaataacaacaggagtattagattgtttttattttctattttttttaaattaaaatcttctaaattatagaaaaatctatatatatatatatataaatgagaagtatgaggcggtgacgtggcggtactaaaaatactttaaagtctatcttttttatttttctccttaattctcttaaatttttttattttttttattaattaattaatgtcatatttttttctaattttttaataatattattaattaaattttttttaaaaaaaattacataatataacataaaattattcaccacgtttttattttcttaattttttaaattaaaatcttttaaattatagaaaaaataataataaattaagaaaaaaaaaaaacgcttgcatactgttgctccaaaattcgcccaaaatacgtggaccagtcaagaggggacacgtggatcagataacttggaaagatttgctaagtctttttatgccaccaggaagcgctattaacatgggtcccggaggagacacccggagtacaagttactcctggaagctagtatagcgtgaaggccctccgggatgtgtcaggtctctcccgagaaatcaagtcgcatttaatgctgcatgggaggaagcgtgttgggactgtaacacgcaataaagtctgacggcacaacccccaaacagcagcgctacagtaatgatcatttaagtctagcgacggctactctgcgaagagtcacgtcaatcataagacaaaaaaaggc

SEQ ID NO: 178158 - DNA, 917 bp, Cannabis indica
gattaagttctccaaataacttgccatagagtcccctgggatatagtctatcctcaaaggatacaaacttcccaaccataaggcctttgcaaagccacaatttctgaaaagatgcagagcagtttctccttccattccacaaaggctgcaatctttgttgacaacaaaaggcagtcggtccctagttggaattgcttcattcaagattctccaaaggaaaatcgatatcctaggatgaatcttcccattccaaatccacttccagatgctacggactggaccaaatctccaatcctgatccaccacgtaggcggatttgactgtaaacttaccattctggttattcttccaataaacttgatcagtaaacggccgaggaattctagggatgtgaaggatcctccccccaagttcttgaccaaagatctgaagaatcatctccgcattccattcatttcctaccgagacatctgccaggcttcttatggtatacctttgggtttgaagctgttgcatcagctcacgaaattccctatattccatccaaggaatccaaggctgtttccagaaatttattgaatttcctgaagcagcaactgccatagaacctcgaagaatcacctctctcgtgcccaagatactcttccaaagaaaagagtcacttgatctttggttcacacaccaaaaaagtttcatgttgtacttgtatatttattactagctaggtacgtgttatataaatatatatgtgtgtgtatgtgtgtgcttctaaattttcgtctgtgtttagtacttatgagagttagaattgtactgctttgaattcattttattgggtttgtttgttttgataccttaataattcataattaatttttggttaattacgatttttttcttctaaatttgacatttaa

SEQ ID NO: 178159 - DNA, 800 bp, Cannabis indica
aggtcaagcacgcttaactgtggagttctttcgtgatgggctaccgaaaaacaagatgcaccttgttgatataggtagtaccaatcaatccatttaagccctcttcaactgtgtagtcccatacctacacagtctcagaatcatcccacttgaccttccccaggcggtgtgggattgcacagcttacccggtgtttccccttacggatcacgggactactgactgtcacaggtgttgattggatagagggtcttcatgtaataggagagtattttatctctcgtttcaaaagtattttctcttcaaataggcctcttgaatattcagacttggctaaccttatccatcctttaatttctatcgaggacaacttggctcttctaagtagtctgagcccggaggaaataaaagatgttgtgtggtctttgacgcatctcaaggcatcagggccagatggtatgtcatgccacttttatagggcccattaagatattgtgggtcaagatgtgattgatacgattatccagtttttacagactggggaatttgtcaggaccctaaatcaaacctttatagttttgattcctaagaagttgggtgcacaaggtttcaatgattactgccatattagtctttgtaatttttctacaacattatatccatgttgttggtgaatagattaagaggtgtgttgttaatgattatttctctccaccaatcgacttttatcctttttcgatggatcgcaaaaaatggttttttttacttatgaaattattgactcttttaagaagtaaaca

SEQ ID NO: 178160 - DNA, 1101 bp, Cannabis indica
aaatcacaaaatttaaaataatatttatctaatttcaacaacaaacataacattattttgtttgttttgttttgtttttttagtctaaaacatcaattattttgttgtatattggtcttcattggaaagttatgggtggggtggaagtaatatagtgaagtagcaaatcttcatacgtaaagggtttcacatttgacttggtagcctttatttatttatttcattaaatttttgacatgtgttaaaaattgtaatttaatacataataaatataattttttttcaatacattttttctattgatcattaatgataatctttaatatagaataatttttaatcaccacattaatattaataattttttaaacaatttaatttattgatgagatattttattttttttgttataatttgcaaacataaaatattatattgtacattgaataatagtaaatatattatttgtttatttttttaccaaatttagtaaatattgtagagatgaatacgagatgggtaataagtggggatgctcttcctgttcctatcccctttaattactttgaagttttttcattttttacactttaaaattagttttttttatttttatttttatttttattttttactaaaattctaaaataaaaacccctattgcaactaccactgcaatctaaattgcaaaaaaatatcgtataaaaatccctattgcaactattttagaaaacccaaaccgtaaaatatatattaaaaaaaaagttcaaataaataaaaacgtttataaataaataaaaagagttagataaataaataaaacgtttagacctcgtggtcattacaaaggatagcagtcggaatagtagatatttctaccataccgttaatattgttggcgaatgtccaattagccatattatgggccacaaaattacaatttcataccaaacagtcaaacatactcattttttctctaatttgaaaattgtacaattgttttgactcattgaaatataaccctttcttattcaccaaaagtatgtatatttaatattctaatgtatttctattcatccctacctatcaatatatatatat

SEQ ID NO: 178161 - DNA, 646 bp, Cannabis indica
gtaagttggattttgtaggggaactaaaaataaaaaacttggtatgaaaagttaaatttttttatgttacctatttctttactccctgaaatccaattttcaaacatagcctaaagaatcgtcattgctgtaaactctcatcaactataatacaattattttatttgtcgagtgtgaaaatccttgacaaaaagattattttacaacatgtgaatagttcagggaatatttttaacgagctgaaaaattcaaggagcacaatattatataggtcataattttaatatccgaaccacttaaaaattctagtgatgtcttattattacatcagttaatctctcttactttttctttatcattagttaccgaaaatctcgatcagagctaaattgaatttgatttgatttggttttcaggttgtggctctagtggtagtttcagcaggtgtagcagtggcaacagtaacagatttagaattcaatttatttggtgctattattgctattgcatggataatcccaagtggaataaacaagattctttggtctaatctccaacagcaagccaattggactgctttggcgtaagtataaataaatattgttattattatgagctgagattattgttacaattaaacacaaac

SEQ ID NO: 178162 - DNA, 595 bp, Cannabis indica
taacccaagatggcatggaagccactatgccatcagatgagagtggggaaggttttgtgttccccaagaaagtagctacatctaactaagtgtccccttcctcctactggctctaagaaggtagccaagaaggcaaaggtggtagtaatggggtagcagtctccggggggagaaggagatttgaggcaggttgagatcccaagacaataacaaaccaagcagtaaccatcccaatcacaacaaccaaaatagcaacaaaaactctaccatccacattaaagaccagtacaaccatcacaagaaaaataggcacagccatcacaacaataggaccagcaacaacagtagacgaaacaaatccaacctcaccaaccacaacaactgcacgctcagcaaccaacataatagccacttccacaacctcttcagtaagatcagcaatagcaacagccacaaaagtaggcatctactacccttctatcggtcccttctcttaacttcaaatggcatttgtgccccaaagaaattaacgtcgaggtcctaaagaaagtgtaggaaactcatcaatacctcaaggggcatcatgacaaagaag

SEQ ID NO: 178163 - DNA, 760 bp, Cannabis indica
tccgatgtgagtgagggtactataatgtactaaccgtaatgacacaacacactaaccctaaataacatgtatctactaaaatagatatcttcttttatcttatctctctggcttaaaggagaaaaggcataggcagctttaatgcagcggccattccgcgcccgttagggtgctataatgccctaactctaatgaacaaactaatcccgattaaagaagtccctctctaaaatctatctatcaggcaggaggcgctcccttttacatgccatgtttagaggcggctatcttaccttcctataataaaatgtctactggcgggaatagaatgagtaaactcgataatgctcacagttctgggatgatggatgataaggcacctgtctccttgcagggaataggtttgatttagaatgagatgagtggaagatttcggtcgaggtttagtcatatcctagaattgatagaaagattctatatagttagagtcaagagctcatacccgttatgatgcgagaccggtattgtgcgatctccgattgcctgttattccttttgttgtaggacactcccttgtgcaggcccagactcgtctatcaactacctaaaattgttgtagttttcggagtaaacaatgacggccgggaaatgttgtaaggacatttaagtcttactgccacgtcggaaaaatattatcgaggagcaggtcgaatagtcgaagaaggggcctgctttagttttcgaagtcttcgatgtattt

SEQ ID NO: 178164 - DNA, 722 bp, Cannabis indica
atgtattaagtgctagtatattattctattaatcattttaacatataatgcaatttttctataaaagatttttccttttcctttttcataaaggtttcctgaacttttatggtactaattactaaaccaccatcctaataatttcctaaaaaaaaccactatctccctaaaaaggaaacaacaagataaaataccaacacccaaaaaggaaaaataggagcacccaaaatccaccattaaaattaaagtataattatatcatttcatgtataggaggagtatcctaaacatatcatatcctacttgttattatcatttaataaaagagagaatacatacagtaaattgagtcaattcttaaacggtcaattccatacggttgtcatttttcaatagttagtatatagattcccattttgtcattaaatattcatcaagccagccaggtaatgagatgccttttcaatatccaatgctacaaatgttccataatcatatttctacatgcttatatctatatacatatatatatatattacatgtaacccccaactttcactagtatagacttactctgcttttcatcatgcccattcctccatatatacctttctctttctctcaaagagagattatttttcttctaaagaaaacagagcaaaatcaagtgagagagaaagagagatgggaggtgggatccatggagaagatgaagaactcta

SEQ ID NO: 178165 - DNA, 806 bp, Cannabis indica
ctatgtgggttgttatacgattttttgttacaatttaagttgcagcgctagttgtaatatgagtttctatgtagaattccgtaaaaaatgcacaaaaaaactgctttaaagtgtaaaaataaaaaagcccctaaatttaatagtaatagtaactggttacttattcagatctaaaaagaaaaaaattcttaatctaacttaagtgcctactctgtaagtttgtatagttaaaacttaaaaagggatatttacacaaaatatctaaaatagttttctttttaaacatttttacacaactatattttactgttttgctctttttatttatttatttacatttacataatctcatgatatcaatatagaaataatatgtaaataaaataatacaaatataatttatataaactaatatgaaaacaacgtgaaagtaacataatataatattgttgtaaaaaaataaaattaaaaatttaaatctgtcacaatgttaaaaactataaattcgtattattgtaatttttttggtcatttgtgagtatttatgacttaaaatgtgtgagaaaaaaactaaaagattgtagtagtgggcttcttgagattgggcttgctctctttggattttgttaagtacatgtcccttttccaatttcaaacttataatgtaagaaataaaaaataaaataaaaaattgggtttttaactacctacaatttccattttttttttaaaatttctttattgtatgacggagttttttctaaaataactgtgtagttttatattatgtattgtgtagtttttac

SEQ ID NO: 178166 - DNA, 914 bp, Cannabis indica
ctttgccatcataaagcagcacatctctctgccttggagttggatttcacagactaagataaaaatgttatataatagatagcaaatctgtagtttccacattttctttaatttcattgagcattgttgcatttcacggattcagcatttgtttctttgaagaatccaaattaagacatcttcacattagcaatgatataagtaccatagctactgctaaagtatatgaattattgcattgaatagaagattttaatcacgcatcctccaattagccatcaaacacactagccagtccctagattatattcccaatcttaccatcaagggcatactatagatgatcagttcattgtaaaggaacaggaaccttgcaaatatatgagaactaaaactgcattctcccttttggtggattagtacaagtcctatgattcaaagccaagtaacctctttaacaaaaccagctgcaccttcccttccactactatttataaccactaagaagaaaagaaaagaaaggaggagctcatgcagattttcaaattcaaccactaaaaatgatctccaaactagcttctaatgcactcccaatgtcaaccaacctaaaaaattttgtaatcaaccttttaacaataaaacagaaaaatcaagctattttttttttaaaaaaatgtaaccgaaacttcacaactgggacagaaattatcctaagaatcacaggaaccttattggtaaggttttaagccccacctatatttttctcaaagttttgaatatcaatataatccttacatcatcattatatctcctccatatcatcaatcattaattcattgctaaccgaaattgtagactacaacacaatacatttgcctaacaatgtagactagtttttaacaatgaccactttt

SEQ ID NO: 178167 - DNA, 537 bp, Cannabis indica
acacttcaaagacgaagggagttcgggcttgaaggtgtttcaagaagtcagattcataaagtggattacaaaggattgcggcaatactttagagggagtctaaacttgtttaagtcaattgtctttgtaattttgatactttattaattgatttcattctctgggcgtggccccgtggactaggagtgttcgtgagaacactgataccacgtataaatctcttgtgtcaagttatttatttttctgcaaatattttatattctgcctgttcagttttgctgtagcagaattactttctgctgctgcaaacgcttacagtttttatattttcttatatacaactgacatttgcaaaaacacggttttttagttaatgatgtggttatggtattatattggtccacatatgtaataattctaatattctcctacttggacaatataatcaaccactataatattgtctgtcacacattaaggaaccaaataaattagtacataacatcatatcgatagaatacatatattatgtatgaa

SEQ ID NO: 178168 - DNA, 677 bp, Cannabis indica
ttctttcttgtataccccttcagtagatcctgaaagatcatgattttataagctagaagtctattcttgacgaaatcaccttggttacctcggacaagaataggaagaacttctgagagcctagaacaaatcaatttggagatacacttatatatggtgttgcaacaggctatgggtctatagtctttcgccgtgctcggatcaataacttttgggattaatgaaatgatagtttcattcagatccttaggcatgtatccattggcatagaaatcaagaacatctctagaaatttcattacctatctcactccacatgtctttaaagaatccagagccaaagccatccaacccgggacttttagcagaggggacactgaacattgctttcttaacatcctctgttgtgaagggtctgataagtctaacttgctgctccacacttaggcaactcccttgggcaatacagttttgatcaaatgttggaaattgctagagcttttacttcccataaattactcaaaatgacccacaaagttgtttaacaacttcctcaaagtcatctataatagaatcatccttggagtaggttgttatcctgttatccaacttccttttcctcatggcagcatgaaagtagctgagttctcataataaactttaaccactttatcttac

SEQ ID NO: 178169 - DNA, 1324 bp, Cannabis indica
gattacttcataataactgacgtcatagagttttatgttgtcgattattttcacctatagcgttgacttaaaacagcgttggtagcgaatttatacaaaatacaatgctgatagaaatgactttaaaaattgcctctaaagtctaattttaaattaatgtgattcgattaaacaatgtgtgtgagtttgtttaagtgttttgttgaaggcatgaaatctattgaagatgattgatttattatgtgaacgagtgaaattgtgccacgtgtacactgtgtacaggtggacattgcaccatagcagttaacaacctaaaatggatggaaagggctaagtgttaacagaacacgagtttaggaggttttaccactaaaattatagaattgggggttatttgcaaaaacatgaccacttaaggggattttaccacaaataaccctttatttaactgtactaactttctgatcaagtgaaacttgtataagatattaatataaaaattatttttaaaaaaaccctaaaaaatactagattttaagtaagaggctatatatatgatctttgtatgatatgatgatcttatcatacttgttcttttagataaactggtttggacacataaagcagaagagtttgactattggtttggaagagtattttaagaatttattggccggagagaccgatgtggacgcaaaagtacactgaaaaatattattgatccacacacacacacatttcatatatatatgtttcagttttttgtgtacatacatgatacatgtccactccaagccaacggcatgcacaacagaacaaaacttgtaacgtaaggttgatatatttggttttttgtgaacattaatttctttttcaatcagtacagttgattttgcacaagacagcaacattgcattaatttgtttataaatacaattttttatactattattattttttgtcaatacaaatcgcattccatgcaagcttttcttttcttcttcacttttttttcccttgcgtttcacatttatttatgtgttatttatttttatttttatttttgagaaatttttcaaagatatcattattttattcttatgtttatttcaattttactgtttaaaaattttaattataaaaatactcttataaagttttaaaattacaaaaaaaaatactttaattctgtaaaaagttataaaaaaaaagaaaaaaaaaagaaaactaaaaactaaaaaaaaaggtagaaattaatcaaatcacaattataaattaactataaaataactaaaaaaaatactacataaaaaatacaaactat

SEQ ID NO: 178170 - DNA, 529 bp, Cannabis indica
atacagctaaaaacaattctggaataaactaaaaaatatataccataaaaaaatcacacataagctaaacaacaattgtacataaaaaaaaatgcataaaaaaatcaaaaacaactataaaaacaacaatagaacacctaaataacaacataaaaataactacagtagaacatttatctaagaatacacttggcaccaagaaaattttattctaatagagaagttataactaaatggagttatactagaaaaaaaaaaaatcaaaacaccaaaaatatcaatttaacaacaataataataaacactccttaatattatatcataataaaattatttttgagtaaatataatatttatatctttattacaatttggaataaaatattaattttacataaataaatttgtaaactatatgtatatattttatttatatataattattcttatatagagacatactttcttaatacaggacttaaaaaaatgtataaccaattacaatacagaggttattcttatttataac

SEQ ID NO: 178171 - DNA, 816 bp, Cannabis indica
catgtaaaaaataattattacctttattgttttggacattatattttataatatctattaaattttctattttgttaaatgataaattaaattttatatttttcaaaataatatacattaaactaaatttccattaaatttttattttaatacaactaacatgttctagccatggtcggctcaagggtgaggcagcaggagcccacgctcatccccacctaagctcaaattttttttaacaaaatactttaaatttattttcttaaaataccataatttgtatttttactattgtttattaaaatatataactattttctaaaaaaatatatttaatttagtttttaggatgctagaatattttattttctttttaaaaaaatttaattatatttttaaaatactatattttaaatttttaccactatataaaaaaaaacataatgtttttcatataaaagagcccaatttaactttttgacctaagatctctaattagcttgaagaggacctagcacaaatagatgaaagaaaatataactactcgcatcataacacctttttattattatttatcattttaaggtatattatatttgtaatattttgaaaaatacaattacccaaatatatatacataacaatatataatatttacttgcatctatataaataggcaatgtgtgtacaatacttgtattgtttgactaactttatgagaaatatatttaaaaagtattattggtgcttaacaacctcttcagtatcgtattactaatgatatataagtatggatcccaaataacttaataaaat

SEQ ID NO: 178172 - DNA, 609 bp, Cannabis indica
gtacacttagtaaatattaaattatactttaaaaaaaaattaattatttagttttttttttcagagagaagtaaaaaatttcatcaatagttaaatcagacaaaatttattacataaaaatataactcatagagtaaaattaataatagtagacatatcaagttgtttgcaataaaaataaagaaaaccttaacaacaaccttaactaaagatccaataagtcgtcggtgatcaaacataaaaagcaaaaaaaaagtatgtagtaaactaagttcccaaaccaaataaatatttgacaaaatcaacctatcaatgactattagccaataattttccaataaaaattaaaacataacaactccattggaaaataatcaaactataaatgtttaaataatatttatattataatataaattacactcttaattataatattgtatttattttcaatattgttataaatttgaatgcttaaaatgatgatatttaattaatattatatatattttaattgtacctagtttttttatcttttttaaaaaattaaactcatattgatatttgcatttccggatgatcaataaatgggtcacttcaaaggcccaa

SEQ ID NO: 178173 - DNA, 913 bp, Cannabis indica
gatatattatcaatgataagcaagccaagatcagaaaagaccattatcgatagtatgtcgataatttttagatagtttatcaataatttgctagaattaggttttctcattatttgtcaatagaatatcatatgtcaatagagtgtcaataattttgttaaattttttattgccaagcttcacaattgtttgtcgcatgacatttttgtcgatgggatgtcgataatagtaaaaaaattatattcttactatattacgatattttttcgatgtattttcgactcgcacatattaaatattgaaaaaaaaaaactttttaaaaataagtaaaatcaaaacgatcaagataacaattataaaatttaaaagtaacacttaaacataaaatttaattaaaaaatttatattatataaatataaatatataatatataaataaaaccaccaagataacaatcataaaatttatattatataaatatatataaattattaattaaaaatgttctgccggaaatgtacaaaatatatgtaaacaaattatttgttaaaaaaaatatattaaataattttttagtaaaaacattagaaaaatttacataattgactaaaaataaaatttgaaaaatttttaaaaaaatacatcaatacggtagttttttttttatttttactttttgaacttttttatttacaaaaatacctcttcagtaaaaataatgaactatttttttagttgttttatagtttatttatagttgtcataagattttttgttgttgtttatagttaatttataattgtcacgggggtcgatttcacattgtttttttagttattttttcttttactttttttttgaacaaaatatatttttgtcatttaaaaattttataagagtatttttgtaatt

SEQ ID NO: 178174 - DNA, 600 bp, Cannabis indica
ggttgaaagtgtgtgtaaaaagtatttgtgtaattttttttattagactgtatatttatactcatttttttttgtaatattgttattttttggtggctttttcatttttacacttcaaagtagttttttttttttttttgcatttttacgaaattctacatagaaacccctattgcaactagcgctgcaacttaaattgcaacaaaaaatcgtatagaaacccctattgcaactagcgctgcaaccactttagaaacccaaaccgtaaatttgaaaaaaaaaagttaaaaaaatagtatataaaataatttcttttttttattataactggaaaaaatctatttgtttaatctcatatcctttgttcattatatttatatcatataaaagtaaactttagtttttttttctaatatttattaaaagaaaataataattattacatttaaaaaaaaataattattattcaattgagtaaataaataaaaataaaagtagcttttgcaatgcatcattctaaaaaagtgtatccagagaattatttatttaaaatgttataattattcaaaatatcttataaaattttctaaaaaaaaaaaa

SEQ ID NO: 178175 - DNA, 739 bp, Cannabis indica
cataatttacatctgatccgatttaattataattagatatccgattctattagatgagacaattgtaattgaatcaaatgactttctgtacacccctatactgcatctagagctcatcgaatattatttcttattatctgggccagtcctaggctaaaatggatcggcccgcgcgtagagcccgccctacacaggaatcataattttttttaaaaaaaaagaaatacacaatttttttgaattttcaaaaataccaaatttctttaatataagaaccttccaaagactcaattactcttagggccatacttcaaagttactagttgtagtaaaagcttatttatttgcatatcttctatcaaaaataaacttattgtgggtttttacattggttatgatttgaaatagatactttcatactaattattctagtaagtaattagttattggttttttttgttttaactaattagtcattggttaataatcttatttttggtttaaactcaaacctcttgcttataacgagctacataacttcttagttattgttttcagattctattttgtttttgtttaagagttaaaattttacattattagtaattggttactaatattattcatgacactcctccaaatttttacttttaaattcatatttgttgatagtgataacttattttggtttggtgtcaatttggaaagtcattgtataattgaatgagataagttgagg

SEQ ID NO: 178176 - DNA, 1031 bp, Cannabis indica
tatatgataaagaagagtgttatcgtcaactttttattacaatcttttagttaatttttgtgcctaaaatcacatattggaatatttatttaatttcttttcataagggtgttcgttatacttacaacatcatcactgaaaatttttaaaaaatttcaagtagtttacaatatcgaaaataggtttgaaattttttgaacacacatggtgaattggaatatcaaaaactttatttctgttacttaaactattcaaattttttaaaaaatttacagagataatattataactataacaaatatacggctatgaaaaaaaatattttcatttcaaatatgaatatatatatatttatatatatatatatggaagaggttttaatggttacatttttattgtaaccattaggttatatttgagatttagatattgctaaaaaaaattataaaaaaaaaaatgtaaggaaaaaaaatacaatagaataaaaaatgtatcaatgtttcatatgtttggtatgagaattttgttcaataattttttcttcatataatttttctttcttatactaaacatgctaataattttttatttacattttaatttcttttttcaccaaaatttaattccagaaatataagattagtgatatatatttttttttctaaaatcatctcgtcacatttgtaattttttggggctaattatattattatcatgaaataatgatatgataaaagatttaacaggttaagtgaagtataagtaaacatggtcgtttgcaaagaggttgaggttggagaactgggggatgagagaatatagtttgatataaatttatatatttatatgtataattttttatatatattagatcaccaagtagttaatattagtgggatctagaatataattttaagataaactaactaaaatttacactgaaatttaaaataatagtaaaaaaatataggttaattagtatttttttccctcgaactttgatatgtattaaatcatgcccttgaacttta

SEQ ID NO: 178177 - DNA, 576 bp, Cannabis indica
tctccagcttcgcattcaagcttttcgatcctctttagtttaatgccttcttgtagcctgcacacaaaaaagtcaagatagcagccagctaagcactaaaatactgcttattaaaataagattgccatcagaaaaggctttgaccaacggtacttacagctacagcttcatatacatcttctaattgttttgacacagttgcaacagcattcgccatattgtgctttgttacaaacatcacatcagaaaatgaccagccctgcacattgttatacaaatcacaagtatatcagcaatcaaacacattcaaatggttgactggctagagattaatagtaccttcaaccacatgtaacaatatcctactgcaccaattgcagcagctggcataatgtaagatgcataactccctgcattaaaatgacagacactggcattactttatgattagagtaaaccataattttaaaaaatactgcttaagttattataagtgtaataaaaaaaaagctgacaaacaagtaacactcagaattaaaatttaattgtcacatcttcactgaaattgaatatgac

SEQ ID NO: 178178 - DNA, 613 bp, Cannabis indica
atacatagaaaaataaaaaaaataaatatgatctaagaacaataatatactatacaacaaaatagaaatatattgtataacaaaatctatataccaacaatccacaacaactcataagaaattgaaaaaatcgacataactttcaaataaaaaagattctaacaaaactaatatagatatatcataaactttaagtaatttgcttctaattctaaaaaaatatacaatttttttatttattaatttttcttttttgtggcaaaagagaatatatataaaaaaaaatctaaaaggaacattttgctacaagttttaaaataagaacatttattaacatagtcctataatttgggaccatataatttcccttcaataaattggataaaagcataaattaaggctcctgacaattgatagtttatagtctctcgtagcaacacacatactcaaacttgttaaaaatgagaaattttattatatatacttgaaatataccattatcaatttttatacttttaactaatttataccaataatgcctattttgacttgctttctccttttgacccccctcactattaataaatgcatcttaaaaaaaaaaactctctct

SEQ ID NO: 178179 - DNA, 303 bp, Cannabis indica
atataaaatgtatatactatttctctcaagtttgagatataaccacatgttacttcattttaaattctaacatgaatcaatagagatttttttggggggtatacatatgaatcggtactgttcaattccaactcctttagatacctatcaaggaaaattccaaattagtgagcttatccacgaggttatgcaagatcttggctttcatgttttggtgggtcttcgatgatgtatgttatgttgaagagagataatatataaatatgaaatatgatttaattgaaggctgtaaatagtctttga

SEQ ID NO: 178180 - DNA, 523 bp, Cannabis indica
agtctttaaatccaacaatgtcaatagttcaggggacaagatttggtacatgtcaaagttcaaggtgtaaaaattctaattagccttcaagttattggacacaagaacttttatttatttccatttaatattactaatgtgaacattgtacatgtaccaagtggttcccctaaattttgatatttatcatatcgtgtcttttaaattttgacatgtatcaaaacatgctctttaaatttttatccacattaaatttaagttaataaaattagataaaatttttaaatttaacaatttcaatagctgtttgaaaattttggaaggccttaagaattcaaaaagtatgatatagtatattttagagaattactaaaagtatcattgatgcttaatatactctttgatatcatactgctattagtataattaagtatcaggtcgtataacttaaaagaaatctcactaactaatcataggagataagttgaggaagatctttctttgtatccattaatcaaaaata

SEQ ID NO: 178181 - DNA, 782 bp, Cannabis indica
tgcttctggccagaaagttaatttggggaagtcatccattttttatagcactaacactttgagccatgttagggaagacatcaattctcttttacagatgccacaagctgatgatagaagcatgtacctggggctccctagtaccatggggcgaaataagtcggctgtattgggatttttgaaggatcgtgtaaggaaaaaacttcaaggttgggactccaaagttctatccagagccggtaaagaggtattaatcaagtcagttgcgcaagcgcttcccagctatgcaatgaatgttttcttacttcctttggagatcagtagagacattgaaagctctatggctagattttggtggaaaagttcctcaaaggagaataaaggcataccttggatgtcttgggagagaatgtgccagagtaaaaacattggaggtcttggttttcgaaatctccgtgactttaatttggctcttttaggaaaacaaggttggcgttttcttacaagacctgattctttggtttctcgcatcttcaaagctcgttattttcctactggtacttatctctcggcccctcttggaaataatcctagttttgtttggcgaagtgtttgggaagctaagtctctggttagtgcgggggttagatggaatgtgggaaatggctcttctatttctgtcttgaatgaaccgtggctgcctgatccccatcaaccttttgttacttctactcatccggcacttcagcaagctcgggtgtgcaacctgatggcaatggaca

SEQ ID NO: 178182 - DNA, 680 bp, Cannabis indica
  modified_base (62)..(62): a, c, t, g, unknown or other
ggctgacaaaatatatagcatatctgagcccatttgcctagtttagtatattattgatttgnggtcaattattctgtgatattgatccaagctagcttgacacacggtcaaatatttagacaaaagaaaatttgaaaaaataaaatcattttgaaatttgacacatcagtctttttaaagcatgaacttggagtgaaaaataagcattgatgaagaaggattagtttacttatctaatatgttattttagatcaattttaaacaattacacattttaacttaagggttttttcttctagaaatgtccaatgtattaaaagattatttaaactacacatatgcaatgcaacatattatctacattgtatactcctatttaaattgtattacattgatttattaaatatatatatacggatatgatgtcgttgcattatcatttaataacttctgttaacttttcaaaatacagcggtggagttaggcatcttatcttttatttatattttcaaaaattatatatgtgttacatagtttttgataattaaaaatattatgtgcatgattaaaatttattaaaaaataaaaaatactatgtgtgtaattaaaatttatcaagaaaaaaaaataatatatgtgtagaaagttatcaatgatatcagtggcggaactagacaaag

SEQ ID NO: 178183 - DNA, 1043 bp, Cannabis indica
ttggtttcatgttgatctttatccttagattgaatatgttcatcaatgatcacatcaaaaaagtcatcaaacactttgttaacagctttcattctttttgtcaagccttgtaaatcaagtggagcaagaaaaggaatgtaatctcccaaattaggagctgcagccaagtgcataaactctttgataatttccttgaaacccttaggatcaaactcttcgtcggagtacttcttcccgaacaccattcgacaactcatatcggtattacatgttgtaatcttggcgctcaaatcgattgcaaccccgccatcatgagaagtagcattgttttttatgaactcgataaaatgaccaatctcttctcttctcatcgctctaaaagtgcttatcttgagactacttagtagctcaagagtgcacatttttctcatgtcgcgccaataagaaccgtcaagccaaaggataagtcctctggccccacgacaagtactgggcggcctggtgaaccggtctagtggcgaaagaaagatcatgagtcttgagaaaaagctcggcagccttaggggaagacacaacaatagttggaattaggccgagtcgcatatgcataatcgggccatattttttggacaacctttccaaatctcggtgaggtttttcgcctaataggtttaaactccctattagaggataccctttcgggccaggaggaagattcttcttcttctcattggttttatttcttagaacataaccaactagaaagagtactaaagttagtactatccatagccaattagtcattttatgttaagtgtttagaatcatggtaattgatttatttaaatgcacagaagcttagatacttttcacaacttgggaaatttggtcaactttaagtggaggtcaataaacgctatgttaacaattttattatacttttctttgtattgacaaagaataagaacattttttaatccaaaaaatttcttttcaaacgtagatatagtacaaattacactaccataccattgtagggacac

SEQ ID NO: 178184 - DNA, 1083 bp, Cannabis indica
ctacgtaagtagttagtttttgttttttttgtagtcgtctctttttttagaccgcttattttttggtttttaaggacaactctcagttcttgtttccttaactacacttgagtttgagtaggggtgttagacaagatattaagtctgtaattagttaagtttttatgtttatgtacaactttatttgatgtacataacttagttggattattaggcttgtatataaaagcatttgctctgttgttaattagttaagaaatattatgctctctcatgatttcacttacatacaaatattctataatattaagtaatgttttctttaacaactatttattattagttgttagactatcaataatatcaatacgaggttaattaattaagtggatggtaagcaacatagttgggggattattttttttaataaaaaaaattgggactaataatgtcgttggatgacaagacaaagaaacaagaatgataaatcagacggtggacaatccaatgtgaatgagatcaagtgttccaacgttgggagctgacatagatttatacctcactccctcccaccactttcctcctttcgttgttgttaggctttcttatctcaaatcttagagaggttcatgcataaacccaaaccaaaccccactccttttcttaacccaaattgccataataactaaattatatgatctgtaccatgtcatgtaaatagtcgtgtgaagaatctaccaaaaaaaaaaaagaaatatatatatatggtaaatggtacctaaatctaatagaacatttttataggtatcaaaagaggggaagcaagataaattattatacctaaaggaatcaaaggaaaagaggaagaagtaacaataactgtacatgatgcatacaatgtatgtttcgtaagagctataacttaattcaatgtatatatatatattagttaaaagtgttcattcaattcaatttattttattttgcttatagtgcattcaattcgtgccacttttatattttggcactactacaaaaaccccctttagaggcggtttttaagccctttcagcgtcggttttc

SEQ ID NO: 178185 - DNA, 551 bp, Cannabis indica
taccttcaagtaaggattaaaccatcttttaattaattatgcatccctttcactgtagttttaattgcaaataatttttttttgcagatatattattggagccatataaaaaggaagttgtacacttctcctcacctcgaccttcccatggcttactggaatgaggaccgagtgaaaggaatatcctcgttcatctccaagagtgggggatttgtgaatgggaaggtacatttttggtttacaactcttcaaagttacttgttattaggaataggccaatacaattttgttaattgctactttttttttttatttgtaaagttgatcttgaaatttttctcattttgggggagattattctacacccccctatgttcaggaagacatatgaccatacaaaagacacttccatcccatcatccaaccggggaggaacctcagcctctacatgctgcaactatatcttaagagatgaaatgaaggaaagggataaaaaattagacactacttgtcaagaattactaagagtatttgactctttcaaagtcgac

SEQ ID NO: 178186 - DNA, 534 bp, Cannabis indica
tatattggtggttttagttcatagattttagtatttttcggtatttttcaaaaatctgggatgaaaaccagtgaattgaagtttctgggaagtataatgagaataatgagtgtgttttaaaatttcaaaataaaattatgttgttttaacgttgttgtcatgtttttttttttttgttgtccatgatcctgaaataaaagatgtacaaaacatacaataataacacaagattaatgagaaattgatataactttattattaagaacaataaataatgaaataaagaaataattgtgttcaatacaagagaaaaaaataattgtatcataacatcttgactcatcctatctaaaaatgattaaattattattcagtaggattaatctttccataattgttaacattaagatgaaagtataaacataaatttcaaaatataaaaaaagaataaaaaaattaattttcttgttgttgtgaagcttcgtttgctatttgtaacatcttatcttcaacttgaaaatattatgataaact

SEQ ID NO: 178187 - DNA, 612 bp, Cannabis indica
ccctttcaatcacattgtattgtagtagctttttgttaggtttccaatttatagtgcatatgttttgggttttgttatggttatgtatttatgatgtttttgtatataattattatatagttattaatggtaggtgagcttgcatttatttaattgataatttgtttgtttatttagttattataaatgttttccatagatttatgatagctatttgattaatgataaaaaataatggcatatctatactaagccaaataaattttaaatgaaaactcctttttattttaaaaataccattcatttttgtgttgataaaaattggttcaaagctttgaaaatgcactctcacttcacttgtattgtatctagtcatgactcatgtcgatttgtctagcacaatttggtcattcttattatgacattcattcgattataataagcactaagtcacttataatgaatgaataattaaagtccaagaaaagaaattgatttgagatttcttaaagtacaagttttatgggtcccaatataaataattatgtgaatctcatataaacagaaaacaacacccataagcaacacccataagcaaaataaggtgtataa

SEQ ID NO: 178188 - DNA, 595 bp, Cannabis indica
cctaagcctatattttttcgtgtcagatcgtgctcgtgcctctcgagcttgcgccatgtcaaaaaatctgtcccatatttactccactagtgtatatagtagtggaaaattatacaatatgcaacttcctaaaagggatgcaccgatgtattttggcatatgagataattttttagtataatttttttcatggtcgtatacgttatagttatttagagtatcatgtaaaattttgagaaatttataataatttaattaacaagatagttgtaattttaatttggcaaatatagatgtgtattgtttatatccaaataattttaattatatatattaatatatatataataatgtgttatttaaaatattttataaactttcgagaattttaaataatttaacgtgtcaaaatagattttatataatttgttacacttgtatctcttttattttatacgttgtaaaataaattgtttaaattaaatcttatactttatattataaattattttgaattttttaaattttacagaatttcttaaacaatttccatatatacgtaccatcatataaaaaagattaaaattataactat

SEQ ID NO: 178189 - DNA, 846 bp, Cannabis indica
aattttattttaatttttagttttttttaatattataattttaaaattaataatattcaatgtagtgaaaatgctcatttgattaaactatcaaagcaattaaaaattaaattaaaataataatttaaaatttaactaattataaatatacaaaatttagaaaattaatttttaaataaaaaaaataaacaatatgagcaaatttattattaattgcagattaattatatttaggtttaactaacacaacttctaataatttgttaatttttttatttaaaaaaaagtcacccaataatttctcatcaaaaatactgttatatagccatattttataaagaatagattatattttttttttttgtaaaaaattatttttttaaatcaaaataatgaaaaaattgaaatagtgatggcatcgatagtccaataatagcaacttttgctctctctctcttttgaaaattaaacgaatattgtatatgtggcatgagcattttagtgagcaactttcattagagatgttataacactctcattgtgtattcttctttaaatccttcttgctcgaccactatgtttatttattgggatgattaacatgttattttgttttttttaattttttatcattttatttcatcatttacatttatgtttgtataaagtgaggtaatttgtggttaaattatctgaactttaagatttgttacggtaatttcttggactgaattttcggggaaaccctccaaacttcaactcggttttggtctccacttttccgttcattttggtttgtcaagtgtcaatgtagactgcaactgtgtgtcactatataatattaat

SEQ ID NO: 178190 - DNA, 630 bp, Cannabis indica
gttttctaattcaagttttatattgttttttgatgtttttttcaggtggaacttcagtattttattgagttaggagcgttgtttgaagatgttatagctttattgtctaaacttccgggggcagttttgtcccatggggctcgctctaagattttagcagcccatggttggcaaagcatgctctgcggttagacgatgagctatcctggttcgaggaggttccagcgccagtggcggacgtgggcgtcgtaaattcatgagtgattttaatcactttgtcaaaaaaaaaaatataaagctttactacatgtaaacctaatataatatatatacaatatcactctttgcttgggaccattccaaacaaagtcttgtccatgcttatcctttcaacaattcttgtaaatttttctttttaaaaaaaagcaaataatatatatatatatgtatatgcagctaaattatgcattaagatttaggttaattaggattgggaaatttgattttctatacttagaaaataaaaaaatttaattcctaaaccaataatttaaaccctaaaaaaactatacctttttttactaaaacctacaaaactaaccccaaacctactcacagcatctctctttc

SEQ ID NO: 178191 - DNA, 848 bp, Cannabis indica
ttttatatttccttttatctgatttcatcgaccaagaaaccgtgtacagctatagtaatttaatgttgtcaaagttgccttattcatttatagaaaacattactgaaaaactgtccagattttctgtatttgtttaaacgaactgactgacttgtttaaacagtattttgacttttcctttttgaaatgatttttcatttaatgacctaatcatttcttggttgtttgatcacgacttagagggtttctaaagtgtataaatacacccttaagtcgctagtattggttagatctctcggtgtatcaattctatattacttttcaaagttaaagagcgttttctttgttgtgtgaagaacttgagttcaacaagttcttagtattttattattgtgttactctatattgtttcttgttgaaattgtacaggttgaacaccttggatattgttaatcaagtttcgggagaagtcttgtttgtgagtgaccttttcaggaggaaaaagtgcatgtgagtcactcttcgggagaaagattgcaagttagtcactttttaggaggaagattgcaagttagtcactattcaggaggaagattgcaagtgagtcactcttcgagaggaagattgcgagttaaacactcttcgggaggaagattgaatgtaagacactctttaggatgaagtgtgcaagggctacaaattaaagggagttcaaggtctcgacacttcagaaatttgattagaagaattagttacaacagttgcggcaaattcaatgagggagcctttatttgtgtaagtcaatttggttttgtaaccacttgtgattcatctaataaattccttct

SEQ ID NO: 178192 - DNA, 742 bp, Cannabis indica
gacggatctgctgctacctcctgccatgttccaaaacatgaattttcagagagttctaaaacccacatgtcacccaatctgaagccattaagcccaatgcctccatggactgccattttccgagcaccaatgcagcatgctgcatgagccccacggtggggcgggacaatggatcccacatcaagcagcttccatgacaatgttataccgagagtctcgtggcatgataattgtccaatccatgtgtcattcatacggttcccatgatcatcaattcctccaaaaacaactagaagttcaccaattacaacacatgaatgtccaaatctcccacttggaatgcctgaattaagcttctgccacttcaactttctttgacaatcattaccaatatatgccacccatgtgtcatcaagatggcgtcctaaacagtaaaagagaaaagagaaacaaaatcaatgcataacaaaaagaaaattaagagcataatgaagaaagctaatatgatttttagcttaatatcaacaaacaaggatttttcatttctatggtgattgatggtttaagcatctaaatactgtcacattacagttttttttaactttctttcttttttgtctgtcacttctgaaagattttgtaattttttgtaaaaatcgacatgaagggcatctccttcacagttctcaaatgaatagcacttcaaacacctcttaatcaacgactgtctgcaaatttaggc

SEQ ID NO: 178193 - DNA, 504 bp, Cannabis indica
tgatatatattggaccacacttatcagctttgtcattatatacacgtgcctatcaataatgaaaaaaaaaataatattgtcattatattataattaagaagatttgtttcataaaaaaaaaaataatcaaattaaatattttagggtaatttacctaaaaatactatattaattataactctaaaattttttattttaatataatagcattttatcagaaaaaaaaagaaattataattctagaactacgtatctaactattaaatattaaacaaattaccacacagcaatccataattactttagggtggtgaatttttatttttatttttatttttttaaaaaatttaatttaaatatatcaataaaaaaatcacatgttaataatgaatagacatttaatgcttgaatacctataaaattttaaaaatataacttaaatattattgccgttaaaaattaaatttaaactatatttataacctgagagttaaactaatctat

SEQ ID NO: 178194 - DNA, 1016 bp, Cannabis indica
aacaactgcttcaaatacagtatcaggcagtaccgcttgtggaacctcgatatctacgggcttgttagctaaatgacaattggcacatacaatacggcctgtcgcttctcgtggattttcataaccctgttgggcaaaaatgggatatgcatttgaaatgggtgccctggttattatatatattaatagtgatacggaaatgaatcgaataatctcttcctttatccaagaaaaggtatttctagtttgcatagtccaatcatttatcccgaaaatttctacaataaaattagataagtcactagtatagtttcctatctatgattctgctatttagatttactgaaataatgttactggaatattgaaggaatctcccgggtgggtagaaagaataagtacaatttagactgttttgctaatgtacaaagtaacaaacattatatataatttgatcggtcggtactttcctttactactactacttactagttaagtaagtagtaaaattaaactacctaacctaaacgtaaggtacgggaacgggaagtaacgtaccggacgtttaaaattttaaaaacgtaaaaacggaaaagtacctaacctaaattttaaaaaatttttaaaaagtttagttacttaaaacttaaaaaacttaacggtaaaagggtaaaaaggtaaaacgaaaaacgaaaccgggaaccggtaattaaatttttaagtttttcgttacttaatttagtaggacgaaactaaacctaaaacctaaaacttttcgttttaggtaagtaagtaaggaccgaacctaactacttaagttttaccccgttaaccccccaaacctagggggtcgggggaacgtaaggtaaggtaaccttaccttaactaactaaaattaactacgttaaagtttaaaaaagtaaaaagtaagtaaaaaacgtaaaactttttattgtgtcactttaaattatataggaattcttgaagacaagagttaagaaaaataagttcttcat

SEQ ID NO: 178195 - DNA, 1045 bp, Cannabis indica
atttgtttttcatttttcgagttggctctcttggctccccaaatatctctacgaaaatcgtaagaaggtatacataaataaagacatgtatatttaattgttttcagtatgttaaattgagagtgtttttgatctgtggtacacatatggtgtgcataaatgagttaagagccatatatgcaagagttgcaagagactaagctagtgacataatttaataatgattttttttttcaagtgttgcgtaactattgatgaaatatgtaaaagtcatttgcttgaaagtgaaaaaggatgcgtttataagaaaagaaaaaacagtaaaaggagtacgctaataagttaggtgtgatatttataacttcgttatctagagtttcaaaggcccctttttttcatgtatccacatgtgtctcgcaataataatattgcaataatgaattatactagtttaaaaagattcttgcgcagattgctaatgtattctttatattgtattaacgtgatcatgatcactatatacaaaataataataataataaaagtatgaaataaaattgtagaagtgagaatttgatccctcaagaaaaaaaccatgaagtttgatgtaaaaaatctagttgcagaggtggaaagagatccttctatgttctatccacatgtgccgtgctgttaaggatggggccatgggggccaccaaagcccaaacccaaaggcaattgtttttttttttttttttgagttgagaaatgtcaatgatcgagaacgaggcaacaaattttgagaaaaaaaaaattgaattgtccattaagatgggcagaattgagaaaattcttttaatttgtttctatcccataattcattaattgtggtcaaaataatcctactaatgacctgattctcaggagagaaggcattataattggatggtcatatttgaaaacatgaagcttcaatgactccagctcattggcagccaaaacttgcacatgtccactataagaattccagctttgtttttttttttttttttaattaacttccc

SEQ ID NO: 178196 - DNA, 708 bp, Cannabis indica
gaaaaatggaaccttgttaacattcaacggacagtactttgagatactgatttcatcttaatcaatgagcaagaaacttaccaaggtcataaaccttagcagcaactttagcagcaatatttgctgatatttttctgatattggtaaatggtgggtatatcagtcccttctcatagttcttctcgctcacctgagcagccaaagcctcagctgtcggcacagaaaaacagaaattgaaatgattagtaaaggtttatctgaaattctaagagatctccactgctaaatattcaaacaatacaaattatagtggaatcttacaggctgccaaaagcatgtcatcatgtacacgaatagcaccagagatgatcaaacccaaaccaaaaccagggaatatgtaagcattgttggactggatgttgagacaattaaaaggtgagttagccatgattgccttgtaaaatttaattatggagattggaacagaagtagggtgacaaacctggccaggaacaaacacttccccttcatagttaactgggtcaaatgggcttccactagcaaatatggctctaccctgtatattgaaagtagggtcatttatggatcactaaaaatgagacaatggttaaataatcataagaggtctttggagttgtaccttgctccatgtgtaagcctcttctgctgtgcactcagattgtgatg

SEQ ID NO: 178197 - DNA, 889 bp, Cannabis indica
gagagatttagagaaaacaacggatgagactcttttggccgcggccaaattggccgtaagtagaggatggagatgtcgagtttttccagtgaggagaggcccgccgtggtagtctaatttggattcggggcctttaaaaccatggctttcgtttatggcgagaaggagggagaggagaagagtggagaggactagagagagagaacaagggagagaagaggccatattgcttctttctttccatatgtttggagaaatgaggtgtgtatttataggaggctcattgccataaatgttgggttgtatgctctaataatgcctccacattccctaaagattagcactatcatttcaactccacatttccaaaactatttttaactctaaaccaacccataattagattttcattttctttacgtagcttactttggtatcaatgtcattccattcattttattgaagaaaaaaaaagtgcaaattgcaccttatggtgcctaaaaacaatggtcataatatttacttattttcttgccgtacatattcgttcaatattggttgttatgttttatctctagcaaggaaaaaatttacttttatttttgtaattaaaatattaaaaaataaaagttttatcaaatgtgacttttgtcaataataaattatgtgcaattattctattaacagttattaactatccaataaacaaattgcttaaaatgaataaaaaaaaaaacaaatgaaacccataaaaataattcttctaataaaacttaaattctctctaaaaaaaaaactaaatagaaaatgtggaaggaaaacttcaaagattgtacacgtaaaaaagttacttttaataatgtttcgttgctggttgatttttttttta

SEQ ID NO: 178198 - DNA, 548 bp, Cannabis indica
tttctatgtgggtaattggtgaatttaatcttagccattacaactttttttaaagtaaatgcagaatatatatattttttgcatttttcaatctttattaagtttaaaataaaaaaaaacaatttaattgttttttcatataaaaatcattttttttataatgctttattttaatttaatttaaataattaaaattatatttaaataattaaaactatattgatttattaatatatggtatttagttgaataataagacaccttatatatatatatatgttgcccctgattttgcccaatatacgtggaccaaccaaacagggacacgtgggcacgaaggtcttaacactcaaattatgagctaagtctttataaagactggtgttatccggcaattatctcccggagaaggcatacaaagtcctctatgctcccggaggcctaagtgatatcaaagcacctccgggagatgtcaggcttcctctgagcagtcatatcgctatttaatgccgcatgggagaaagcgtgttggaactgccacacgcaat

SEQ ID NO: 178199 - DNA, 766 bp, Cannabis indica
atctcgtccatagatctggttttccgagcctcagaacttaaatcaggcccccatttttccgtttcttagcagatagaatgattttcccctgcacttttgccctcgttttggccatggcaccagcgcgagctgcaagagagagaaagggaaagagaaagtcgttattttttttttttacttttagttactaaagtctaaattttaagttaaacactaaaatatctaaactttaaatgcaaaatagtcccaggtaaaacatgttgtaatatataaacgcttaaataaaaaaaaaatgtaatttatgtaatatattatatacacttttatttaaaaaaatatataattcggtttaatttgatttatttggattaattaggctatttagaataatttataaaccacccaaaatatttattgggcagtttcaattttcattgtattatttcggcttgtttttttatcagtttattcgatttggtttggacaatttattcaagttaggcagtttgtaaattttgttgaatacccttactataaatagggacagaatcgatgagaaacgagacagcaaatttgagagaaaaaaaatcttattattcaaatactgatagtgtattttgtatctcaaaaaatattctttacaaaactacataaaatatctggtgtcactgatcatttattatttatttatgggtaaataccattttggaccttgtgttttgcaaaaagttacagattggaccctatgttttgttaaatgacaaaa

SEQ ID NO: 178200 - DNA, 561 bp, Cannabis indica
cccgtcaatgaagatgtatgacgaaacaacagaccctaacgatcacatagaaagttacaagcaaagaatgttcacagtcgccatccctcgtgaattgcgagaggcttgtatgtgtaaggggtttggttctagtctggtagggccagccctccagtggtacacaaatctacccaataattctatttcttcattttctcaattaactgacatatttttggagcaatttgctagtagcaggaaattggagaaattatccgacaatctttacaggatcaaacaaaggatgggtgaatcgctgagacattatgttgctaggttctattgggttttatgccctaaaaaaaactcatttcaatataatcagatttacttattaatatagatcagaaataacatttaatgttgcatggttcacatgatttatttcatgattatatgtacataatgtatgaattcgtctgaaacccttttcacatacttgatcctgtttattgtgctgtcaacacattggaaagtaacatgactatgtgaataaagtttcctagatttatcagacatggg

SEQ ID NO: 178201 - DNA, 835 bp, Cannabis indica
aatatttattatgtgttgtactattcccattatgtattccatgaactgcttatactgttatgtgttaaacatggacttttagtttttttgaatctattattgtaattattcgttcagtttgcatggaatgaagtgcttaactaactaaaaaaccaaaattttacaaatttttgaacctattaaaacaaacataagtggactcgggttataagtagattgttcaaatagaaaagcgtaaaagtaaagattgttcaacaaatataataaataaaacatctaaagttcataacaagttctggtagaataaatctactccccatctctggtggaagagcggcatatggtcatcatctactccatcgaatggtcgatccaataacttatgctcaatatgctttatgacgtacattttgcaatagtagttaaacgcaaaatttaataaacaaatattttttttaatttaattcgtaaacatattctcaatttttttgtatttaaattacctcgattgtgtctaaggtacaacttttttgtccatgatatcccagtcgaattttttaacctgggtttcgaaggctgtcatttgagggaccatcaccatgtaatgggtgtcacatacaccacactggtccaccaatttggacaatataaggcaccaagcatccatcaacgtcttcagttcgtcttccgttagagttccatactcgaatcgaagcgaatagcttcacaactcaagattcgcctccatagcgatccaatgtttctgtcggtccaagaagatggccatgtatatgcactccatatcccttccaagacgacatgaattggtttggat

SEQ ID NO: 178202 - DNA, 787 bp, Cannabis indica
ataaaaaaaagaaatgaaaaggatcgatgcatgcatatttacaaagaaatgcgattaggtagaatttaatttgttcataaaatataatataatcaaagtcgggtgtcgacagcactaggcagctgggccacaggcgacaaagctaagaaaatcaaaagaagcagcaagagaaccggaatgaacaagagcatcaacggcggaggtggcagaggcgccggcaaaacaagcggcagcaccagaagagacactgtaagaaccaccattatcattgctgacttgacactatagaattttaccattaatatttttcataatataatgtattattaacctatatatatctctacaatacatatattgaaccgcgcgcgtgcatcatatagacatacccagaaatatactttaaacgatgccgttttaggtctcttggtgcatatatatgaagggtcaagtcaaggtgtgatgagatttttctttgagacctattgttttgatgttattgtgagtgagttgagtttggtaactggtaaatatttatggaacgaaggtgagattaaacaaaaagaggagtgagttttaggtggggaagagagagagagaatgagaaacggtgaaaaagttggaagaaaggtatttaattaggagaaactgataataatgtctctgttcatcccaccaaagcgtacgtacgtatgcgttacttctgtcttttatagacaattgacgccgtcaggggtatctctgtaattacgctctatgcttcccctatcgattaagatttacaatg

SEQ ID NO: 178203 - DNA, 773 bp, Cannabis indica
ttccgaaatttgatcaattgatatattccaagtgtgaaacctgaaatcaaagaaaacaagcgtaattctattccaaaaagaataacaaagaaggaaaacaactataaaaagtgacccaaaatgtaggctaaaaatagcctaacaaattcccccaaactagattcttactcgccctcgagtaagataaaaaaaaactaactacgctatcagataatcactacactgctgactcatgctctgctttcttccttgcataaactagaatttcgatcctactaactctaacaattaactcagatgctcaattcataacactatgtataaccacaaaatttatccatatgtgaaacattgttataaaagttttactctttccaacagttccacagcccgataactcataagcttgcatgcttacctttctccactaatgttgacaatatcctttggaatcattaggtcttttcaaggtttaggcattatggctcagatattcagaaataaacaaaagacggttttggctcaagatatcataagcacacaaacagaacccacaagcttcttacttttctttttcaaaaccccatagtgttcccacatttaccaagattgagagaagatatctctattatttttttccccaacatcactgaattttttttttcaaacacatcttactttttattgtgtttttttttttctattttttattatttttttttttcagttgacatttgaatttactatattttttttttttttctctttctcta

SEQ ID NO: 178204 - DNA, 1243 bp, Cannabis indica
atttgattgagggtttaccactgcggagaaactttttatgattccatgagtgatacaataatctataaacaattggctgtccaactgtttgccattgtctgaaataattttgtgcgggagtccatacggacatattatgtttttaaccacaaattcaaatactttttttagatgtgattgttgctaatggctcagcttctgtccactttgtgaaatactcaactgcgacaattgcatactgtactctgcccttgcccttgggcaattgtccgatcaggtctattccctaaatggaaaaatgctaaggactttgaatctatattagctcagtgggcggtggatagggcatcatcaaaaatctctagaatttttcacatttatttacataggcctttgaatcttccatcatggtcggcaaaaatatcctttccttagtgctttctttgataggctttctcctactgcgtggttgccacagaatctttcatgtacttcagatatgagtcgtgcacgtataacctcttagaaaattccaaatataaattttaatttatatttataaattatacttagatggataaataacgtgaattatttccatcttagtaataatttccataaatatttagaaaattattcaatttaagttgtttcaaaattaatttacaactcaaatttaattttctataaatatatattgcattttcgaaaatgctttaaaataaaataaaataaatcctggaaaattactctaattttatgttggcccaaaattaataaaaattaattttcaacaaaaaatataattttcctatttaattaaatatctaagaaaaatttcaaatatttaagtatcatgattaaaaaatcaacttaaatattaattttctatttaattaaatacactagaaaaatacttcaagcaaaacagataatatctatctagactttcatagactaattaatccaatttctaattataatatattttagttcatttattttaattaaccattaaatgaaaaagtcactgatttaagttggtccaaaattaaataaataattttcaactttaatctatttttcaaataaaattcgaaatttctgcattaaagaaatgcaatttcgaaattttgggaaatgattaataaaataaaataaaatatattttgaaaattattcaaacttaagttattctgaaataagattccaaacttaaaataattttcaactttaattaaat

SEQ ID NO: 178205 - DNA, 610 bp, Cannabis indica
aagagcttgaaccacacatggataagaacagtacgagctaattgagagaggaatttttgccttccaaccttccatacagctgactactttatccataacaaacttgaagtctttacaacagttgccacgaacaaaagaaggtttcctaaaaatttctcatcccttcccatggcatcgaaatccaacaactcaagaagttcgtcctttagctgagccttgcaattattggaaaaagtaattttggatttgttaatggtcagttttttcctagactagaggcaatacttttctagacaatcaagaatcacacccatagtttgagcattcgccctcccaaaaaggagagtatcatccgcatacatcaaatgtgtaatagacgaccgacccccttctagagattttgaccccttccaacagaccacaagcctccttagcatacagaagcctcgagagaacttctgaacacagaataaaaatatatggggatagagggtcaccttggtagattccccttagagggtagaaagtcttggtgggaccatcatgtagaacatgatcagatggataaacttctaattgaaccaaaagctttgaggacagtttcaatgaa

SEQ ID NO: 178206 - DNA, 539 bp, Cannabis indica
aatgtaataaaattatattatatgaactaacgtgaaatttttccatctttttaagtctttcaatccacaatacatcgaccaaaaccaaaccaattaatatttgtattgattggtttgtcctaccactatcatcaattaaactaattatttcgttgccttttgatttactcttttttttttttacttttggtacaaaatagcaatttagtatgtttttttttttctaaaattttgagtcaactttttttttattagtcgttgggctagaactagtttttatgtcctttaattcgatgttagattgaattttatggctatatgtcattttttttttataaatattattttggattttttttaaaaaattattgatttgattatttattttattaaatataaatttaatcttatattttttaaaataatataaaatagtattatggattcaattttgttgaccgagattttcggcaaccgatttaataatatataagaaaactgtaggaagtttaatgcatgagatttttacgtggttgggg

SEQ ID NO: 178207 - DNA, 716 bp, Cannabis indica
gatacatgtaacactctcgatcttgcctcctcgtcatgcataactgtctggtctcttctatattatatgtatatatatttaagtgggttccagacttctatagtactattccctgccttacaagaaaaaaaaaagagtgataacattcatgtgatgataatgtcaaaagagatttcataattgattcttagaattaaataatagtaatgagattaatttatcagagacacatgatatcatgtctgtcttcaacagcaacttaacttaaaatccatgaataagatgtaccataggtttaaactcaaaaatcaatgtccactaaagaaaaaaaaaagagagtatggaacattaatatatatttatattaatataaatacagatatacctgaagcaatgcagctcataattatcagtagttgtttcttgatcagtctcacattataattagactgccatgcatttcttcatatcaaatcttagggaacgtacgagtaagtgatagattaaaggttatattcatctggtacccgaactcagttttacatttatgaaaaataaaactataatatatatgaaagaaagctatgaagggtaaggcaaaattatttgggggaaagatacgttatacaaagaaagaaagaaatattatcatgtatatattgaattgctttgagtcgcgaaacgaatctatatatattatcacaatggataacaag

SEQ ID NO: 178208 - DNA, 769 bp, Cannabis indica
actataaaaatactaaaacaataaattgagcacagttaaatatttaaacagaagtagcaacaaacttccatccaatggactaaaagaatcacacatatcgaatttaaatgcacacaaagatgattttagattatttaacaccatcacaaattaaaatgtaacatcaacaatgaacaatcatataagagtaaaagactaatattaaatcataaaagagatcaaactacaaaagtgacaagataccacaccaccattgcaattgagaaattgaccacccacccaaaagagcacacatgaaaaatcattagagacttacagagcggatcatcaccccctttcaccatctggactcctggtgaaatatacccaatcacaaagtctgaaagctctactctcagctgagctcatttcagcaagaaaccgcgaacgaaaccaaccctgcataaaacacagcacacacggtatttaaaggatagcaggcaatttgtttcaaagcataatttacttcagactatacttcagatcttcaatttcactccatccataatgcaaaaggatgtcctgaaaccaccattgcaaacataaaacacattaacatgaaataccagatttattcaagaagatatcttacaattcctacttaactacaaaactcagcaaattagtgacgaattacaaaacaaactcaaaacttaactttctattaacaaaacaagtaaagatgagaatgaaaaaattaaaagatgatagacatggacatagacataaa

SEQ ID NO: 178209 - DNA, 843 bp, Cannabis indica
caatggtaatgatgccattttctaatatgttgaggaaggacttgggatatcaccaattccgtacctgttgttgtggcctggtggtgggatggaacgctgactcttaatttgaattgattggattcttttacttgggaaaaagaaaatgacaaggttaattagaatctattgaaaatgtcaagtattgtacttttatgagaaaaagactatgtgctagtacgacaaataatgtaacgtatatctatgcatatccaaagcatgacaataattggggtgattttgttttctgataaataaatgtgggcgattttgtattggtggcttaggtttggatttggattgtggaccttttctggctgttcactcagaaaatgcagtgaagaaagggcttttgagcgaagctgatgtgagtaatgcattgactaataccctcaatgtccaaatgagactgggtatgtttgatggagagccttctgcccacccgtatgggaaattgggcccaaacaatgtatgtactccggcccatcaagagctagcccatgaagcagccattcaaggaattgtacttctcaagaaccaaggcccttcactacctttgtctacccgccgccaccactccgttgccgtcattgggcctaattccgatgtaaacgtcaccatgataggcaactatgctggtacgatttgtaaaatatcatattcgtttttttttaaaaaaaaaaaaaggtatttttaattataaatttttaaatattaagcataaaaaatcatcaaatttgtaaatttcttctctcttttataggccagcttgtttattcaaatgggcctctctcctaaaaaaaa

SEQ ID NO: 178210 - DNA, 770 bp, Cannabis indica
taacaatataacaataaataattattaatattatattataatagaattatttagaataaatataatgttaatacatttattacaatttggaataaaattattaattttatgtaaataaatttacaaaatatatgtatatattttattaagatgtaattattcttatatagaggtatactttgttaatgcgggacttaggaaatatataactaattacaatttaaaagttattcttatttacaactggcctaaattgagacttaatttttttataacaaattagaggttattcttgaatagagtattcttaaataaaaattctactgtacttagttttaactagtttaagttagtataatagatacttatacaataattacacgagtggtttataggtacatcaataaattatatcaaaaaataagcgaaatacaactaaagggtgaaattatttcttaagtttaaagggcacttattcgaaactaattcaagggcaaaattacaagtattaaagatcagggcaaaattcttatttattttttttaaattaaatagaatgtatacatatattttttaattttaattagtaaaaattaaagaaaatattttatgtaatatgatgttgtgcatgtgtattagcatacatgtatatgtataatactatacatcctacaaaaaaattgttcaactgaaaagcatacacaattaattcatgatcaacacaaattagggatagaaaatctcactagcataaataataaacatacata

SEQ ID NO: 178211 - DNA, 658 bp, Cannabis indica
acctctaaaaaaataaaaaaaaaaaaaaaagataataaattgaattcaaaatgtattaaaaaataataataaaatttgaaaattaaaagaaagtacacatatattaatatgtatatgtatttttaacataaacttttaatattttttttgcaaaattatagcatgttgagaactgataatgtagttaaattattaaaaatatctattatgttttacgtaattaatttaacactactatgtacaaaaataggtttttggatcggtcaatgcatcttgtgaaacttgttgactgacacaaaagttaacccccacttttttacttcggttgttaaccgacactgataatatttttttgcatcggttgctactttaacactaaaataaaaattgacgctaaagataattttttttaaaaaaaaaaaaaaatacaggggtcgaatattgtgttggtttttctcagacgcaccttttagcgtcggttataagatttttgcatcagttatgcattgacgcaaaattttcctcaaatcacaaccaacgctaattttaaaaacatcacagattttaggcctatttcaaaaactcaaaaattaaaacttactacatattaaatttaacctctcatctatgagccagccttaactcaacctctctctct

SEQ ID NO: 178212 - DNA, 781 bp, Cannabis indica
agggcagactccaaggttgaacctcagctactcaaaaaaatgactctgctgtctcctgggacctggcggtggggcctgcagggtatccaaagttcaaaaaaaaaataaaaaaaaaaaaaaaaaaaagaaagaaaagaaaaagagaataggctcttttagttttgcataatggtgacatccctagacttggtaaaaacctattttgctcttttatctgattggcagtctagtgtttgcatgtaatgtaagagaaaggaaataggaagaggcagactgatccatttctgaattacttctcctttttggctctgggacctgttatttaacacctctggtgctggtttttctgtctttgtttacaatcaacagcaccatgcttcaaaaatataaaaagccataattctgaagagcttgcttgcagcccaccatgcttaattggttatactaattgttaaattttcttggatcagtgtatttaataacactttgttccacaagtattcccatggtgaagttccttggataaagtttaaatggcatccaatggtacaggaatacagaatgtattcctgctctatttttggtaatatgtgagaaccaaagagcatttgtaccttatttccctaaactattgagagttgaggaaaattttacaacagtatctttctctcaaaaagaatttgtattcattattatgagcactattcatcttatgcagctacaccagatataaactttttaaaatttccatgattcacataaatatgtttatttttttttg

SEQ ID NO: 178213 - DNA, 856 bp, Cannabis indica
atatcttgtctttaacacaattccaacactcttattattattactaaataacctttttccttaattaaaatataaatatagtacttgcttttacttattttagtggtggccggtggttcattaattatataattaatcacacatatattatgtatattaacaggtatataatcacccctctccattcatcactttaattaatgatgaagttagctcaaatatttaaataaaaaaaataaatatttattttttgatatctgcgtttttggataaatgacaatgtatactttcgaagtttcccaatattgccacacacaaaccaagtaatgaatcggtctacaaccgaagccagactaaggcttcgggttcaattgtaactttgcctctataaagttggatctttttggtcccagaatgacaactctcgtatccagagaagcgaatactcaaagaaatacaatcggacactttcaaggataatctcaaaggattagtcgatggggtgtccgagaccaatccgacgtggcatccatgtgagtacatcagatcccataaaatcaaaggtttgtatctcctatgtcagactttagaaaggcgcacacaaaaagcaaacaacttttttcaacgtccactgccctgacatttactatacatgcaatcgacggcacatgggcacctgtcaacatcaggttgtacgaccccgtaagagcaattagaaaaaccctccaatttaagtttcactatgatagtatttttacaacacgtaagtatcgtttacaagtaagactcacaagagcgatgtcgatcccactagttaattaccaaacaattagatttctaattctatttggtgaca

SEQ ID NO: 178214 - DNA, 997 bp, Cannabis indica
ctagagagtcatcgaaggctagcatttctcgatccaatttctaatactcatggactctacacacgtcgatcaggactccacttcaaccacgtcatatcctaacacttcactgcagagatgactctcccagagttttctaatcatcggtcagctaatactattcgttaatagagcaaaatgaaccagtaaagagtagactaaaccgtcaattttgttttgatgaggagggttcacacatcttgtggcgtgaacttgctttagaggagaaaattggatcaggtaattgttgttgtttggaacagggtcgtatagaaattgtgcacttcatttcctataatgttgtacatttgattctgaaaaaaaaatattaatgaaataatataaaaatgaatctgtcacaaattctttcaggctcttttggaactgtctatcgtgctaaatggcgtggctcagtatgtgttctttgtttcatttcgttccattcatgatatacatatacccttgtatttttgttatgcccagttggttagaaagttcttattctttctttaactgtgaaaggttatcattgtattcagttgtaaatttgtgattttaacattagtgaattgatgtccggttggctataaagtgcttattcttatctgatctgaaccataaaatataagtcattgaaagcatgcctctgtatgcctttgtggccattttactttccagaattgactcacaagtttgtagaggttgtacctttaagttaccaaaggacccatcttcttaccgaccttcaaattcttattcaatttctcagttaatatgcccaacccaagatgcaggtggcacaataggtttctttattgtgagtgtgtgtgtgtgtgatagttttttatttattttctatcataagttcagtgtcataaacattatcgatagagtggtatacattgaaggagacagtggggtttagaacaaaatgactgtattgtatttgtattcaaca

SEQ ID NO: 178215 - DNA, 841 bp, Cannabis indica
atttttatcctagtaattttggcgtaaaggtgacatatactgtagtttgtatcattgaataactgaatgacaaagaacttcaatattttgtcatttatttgggttttttatatgattatatgtaggtcgataaggctttacaaagcatggaagaagaagctgagcgtatttacaaggatgagcgtggattacttcttgatgatgaagctgcttctacgagagatgctatgtcagtgcttgtaactttaattttatttcattgcttaacaaatcatacaagtccaaagtttatattttaacgacctcattttcatcataggtgttgatgtagttgtgatagccaaaacccatactcagttcttgaaagaatctgagattggaatctttattgatattgagcaaaattctgtacaaatgtttaatgttggagcatctccaatggagatgtaaagctaaaatatagctcaccttacaaaaaagtgtgctctaatggtgtgttaaaaggtgatccaaattcagcacatagcaaatcttgtgctaaagttcacacaacatttgctatgatgcaaaatttgtatcaccattaatgcactactgtttatttacttttatgtcagactattttcttagtatatttagttttagcattaaattataaagtatgtatattctttttttgcaaatatatcacaaactcattttttgtactaaatatagttcaatttttaatgggagatggtcttaggctgcaaatacgcttacatgcctactatatagccactgtaagaataagttacaagctagttggagagttagtacagcttatgcttagggctggtgt

SEQ ID NO: 178216 - DNA, 549 bp, Cannabis indica
ttggatcattacaatgtgtggaattagttatttcattgactcttgaaattttgtacatggatagtcataaaaaaaagggaaatggtttaactttgtaatataaaatataaatatacatatggtgataaattaataatcaattatgcaatttatgaggaacccaaattttttgtgtgtaatacattttagtccttatatgattttagtatacacataatggagacaaccacatatgaaaggtctatggcaattatcaagatatgtattaagtacgtgcaaaacacgacaaatctcattgataaatgtacatattttttttttttgtcttgattataaataaatatataattgtaaaacgtttttgtatgtgtatatatttatgtgttaatttgtgtggtgggtccttattgtttattttttttgctggagaactactcaattaaacacaaaccagaaaacaacaaagttcaattggtcacaagagggaccaactcctctgcacttaaaaaaccagaaaagttaagagcaaaagcccatttagcaagcaga

SEQ ID NO: 178217 - DNA, 582 bp, Cannabis indica
tataggtataacactaaattaaaaagataaaaggtgttttttatggcatatttgaaaaatgtggtcgtatcttgcgaaaacagggacaaataatcatcccactttcgttttcagacaaataaataaaaatcttaaaaaaaaataaaaaaaaaaaatagacagctcagctggccgttacagtagtagcagtacgcaagtaaagtagggacccccaaatcttgtgtttcccatatctgtgagacattccacttagtcaccctaatacccacccactcaaatatctttatatattaaaagtgtctatctaacggcatttcttggtttaacggcatttcttagtttaacagaatataccttaaaataaaagaatattctgttaaatttaacgatgttaataggtttgatctccgttaacaataaacccaataattaacccaaaaaattaaacaatcttttttaaatttataaaaatcatcttagccacatatctctctaacaaaccgtatatccctaaaatatcaaatccaattctctcgctttggtttacgatcaaccaaacgcagctatggcttctcgtcgcat

SEQ ID NO: 178218 - DNA, 625 bp, Cannabis indica
agatgtaatggattgattgttatgctcttatagatatatattcaaagtgtggtttgctctcgattttctatttcagcttctccctattaatttttttttacactattatttaatgccttacctatgtattcatattttatattccattttgcaaattttttctataataattgcaagaaagcttcaatgtgttggcaatattgataaattggtgtaataatgagatttataatacatttaaatttagttggtgcttgagattgtgttttgttaatattttgtattttgtatttgatattttgaatattttgttgttttagataatttgaattataaagtaagactttatgaaataaaaattaaataatctttcaaattaattgtgttatgaagagaaaatagtatgatggaaattgattattattattttttttatatatattttaagcttattagatgataaataatgcaaaaattgtattattgtaaaatttaaatgaaaataaatatattatgaaactaaaacaataatgatttttagtacacaaaatgtattattgtttaatattcaataatacttaatataagttaaaaaaaatatattatggaaactaataaagataat

SEQ ID NO: 178219 - DNA, 836 bp, Cannabis indica
acagacgagatctttttgtggttgggattttttgccagacctagggactatgggagctggatcacatggctggctggcgggacttcaagagtggttgctgctgttacaataacgttggcagtatgtgtttattgtatttggtctaactaaaacaaatatcattttgaaggctgctcaaaaaatgttgtagctatacttaaaaagataaaataggttataatttagagattataccatgtaaataatagaaagttatctttagatgaaagaaattttcttgttagattaaaatgtaatctttagttttctgttgggcagcttgtgtggagcctctatttgtattgttttggctttttgttagtgattaatgaagttttctctttttgaataaaaaaaatgatatatatactaacgttaaaaataaaagaaaaactatatatatttatattgacatcaaatagggtgcaaatagtattcattcccgtcactcccgccctatccctacttcgggtgttaaaattgtcttctaccaccgctccattaacggcaaaaataggaagtccctactccattaagagtggatcctcacgattacccatccccgcagtaaacatttccatctctaattgagactaacaatttccagagttgaatttaatctaaattgtttttgttctcgaaatctaaaattttgcagtaccaattacattaagaaaagtggtatattgttacaagtatattgatttttttttttacctttttggtcagtagacttattatcgtcacttgagaaaaagttgtaaccgcttaccaattttcgcatgggattttgtatg

SEQ ID NO: 178220 - DNA, 596 bp, Cannabis indica
atcttcccagtagtgagaaaggacaagatagcttatgtaaattcagttcccgctatgtcccagttctcctgataaaaggcacttccaaatccgtctggtgccggagccttgatactaggaattgaaaacaatgcatctttcacttcttgattcgtatagtctgcccataaaatagctttatgcatatccgtgatcttggggcctagattaaccacagactgcatgacactccttctattctgcatattagtccccagcagcttttcatagtagttcagaaacgcattttgaacaccatcaggagaatcaaaccaagttccatggtcatcttcaatcgagaagatcttattttgaatcttccttgatttcagagaagcatggaagaaggtcgatttatgagttctattataccttctactggcttcttgctcaagttccatcaactgcaaggagagtggattcttggtcagtgcttcctgagctgctatcagatcaatctttgcccccatgtctgccttttgtatctgagaaaagccttctcgatttatctttttcaagattggtttcagccttctgagtttagaaacaactttgaa

SEQ ID NO: 178221 - DNA, 933 bp, Cannabis indica
ttaaatctaaaaaatgaaagtctacctattagtaacctgctattgcaggttaaaaaaaaaaatgtaaccatatggttacaataaaaatgtaaccattgaatagtcacccttaaccttattattattattattattattgttattattattatggtgagatataaaaataaaccttgatccattgaatgtgtgttcagaaggtgagtgccaatgacattgtaataattcataatgagtcccattaatgttaatttttccagcattgcctttccattttacctgaaaaaatgacacaattattataaataaacacgaaattattacaattgttatgtaggtatccaaaaatacttgaatagagtttgaactacttacctctctatgtttacaaaaaaaaaaaaaaaaaactaacttacctctcacaattattctttttgcattttattcttatattcttcgaaatttatagtttagcccaccttaatttaaattttttctttttgaccctctctaaagttcaactctagttctgtccctcactaagagaaacttgattcttagaacttatagcattagtgttaatgttactgttttgtcaaactttacgggaagaaaacacatgcctgatcatctgaactatatcggtattgcgttatagtaacattagtaatgtaatgtgataagaataatgtatcgaaaactatttcagtacatatttggttacatattgtaaatgttatttaaaagacttgtatgagaaagcttactgtaatatcatgtcccctattcatgacagtggcaggagctggtttgtaatctcttttcaatttccctaaattgggaaaaacttgaaccctttgatgaagaagatcaatgggagactgtaattttccattgttacaaattttccaatgtgggtcaatgtgaccccac

SEQ ID NO: 178222 - DNA, 735 bp, Cannabis indica
ataacaatccacataaaaactaccagaacaattcaaaccgtaaattaaaaaaaaatagcatatgagacgagggctaattataaagatatggaaaaatgttaaggcaaagaataaatatggaaaatagagtggagaaataataatatttaaacttttaatttcgattattattttatttatttatttaaaaaataattattgcgtttgaatgaggcagcggcaattcaaagagggcagacatttggaacaatgacagctttaggcacacgaattgcacctcagactcagactcataccaactcaactcaacccaaccatcttcttcacctttcttcttcattacatctctctccccccttttccacatcgattaccttttctattttagggtaaattttttttttttggttcttctacagaccaaatattctgggtacagcaatatcttcttccggtaattactaggtttctatctatttatatatttattaaatagaatttttaagccgttaatggcgtgctgattatgaatcaatgtaacagtttacaactttacatgtatattgtttcattttgcaattgggtttttttctaattttgattttgaaatttagtttgtgaagataatgttgtcgaaaattgaagctgggaaaaaaaattggtgaagattcaagcagcggtaagttgttgaatgagattgaggctataagtaaagctctttacattgacaaacac

SEQ ID NO: 178223 - DNA, 633 bp, Cannabis indica
atactatttaattaatttttttttgctcttgttaatagctggttataataacagtaatccagagagataatttttttaaaaaattaatatagtaatttagtctaaaaaaaataaaactttaatacaaaactaaatgtatataaatatacatgtgattttgccattttattcaaaaatctctctctctctctctctctctctctctctctcattcatctatggctaaaatagatagaaatctcagttcttatcttgattttgtatgcatggtttctaatttcttacatggtgtgaaaatggccgataagaagatagaaaaattgaagcttaagatgatcacaaatcaaaagaagaataagcaaagaacaaatgatcataatgatcttactaattataaaaagtcttataagaagactaagattagaaatcaagaaattctataaatctcaattacaaccattcattactacaagagaggtttcattaggactataatgatcttctctaggttacttgatccactaagtattctcatgaagattattactacacaaactcgcaaatattcctacaccaacttcacaatctcctccctctaaggaaggcgaaaaccaatgatgagttcttacttgt

SEQ ID NO: 178224 - DNA, 526 bp, Cannabis indica
tcattgcccttacaaccttcacgtttagaattccaacaggcctcttcgatgccctgcaacaatcgcatcaattattcacatcagataaatcatttgccacaaacaaaatatcaggataattcagaaacctactttgctgggtcaacaattggcacatcaagggtttttgggccacaggtacatgtttgcaacttgatccttaatgagttcctgcagagaaaccgcaatcattaatcacatcactaactagtgaagcaaaacttcctataacatctaagaaacataatgactgaagcaaaacaccatacctatatccaaactactcatggatcaaaaaggaaaaaatgtgaggaaagaaaacagtggacaaatcaatgagagaatcaaattttaaggcacaaacaagttaaaaagtaaaggcacctggacaaatctgtaaaaggccgggtattgacatcagatcagcccctgcaagctttaaccaaaatcgcaatgcggctgataaaaatgacagaaaaagctgtag

SEQ ID NO: 178225 - DNA, 609 bp, Cannabis indica
atttaattttcttgattaagtggatgatttgtacttaggggagttgtttactttattgactaagaaacatttattgtgaaaaaagttaattaaaaaccctaatcatcttactataaccccacacgtgttatagcattacaatctttttcctttgtttattattaagtctatcacacgtgccaccatgcccacttcttatttcattgtgctttggtcaataacactcaacattattattattattattattattattattattattattattattattattattattattattattattactacttactactaattaataattagctagccaaacaaacaaaaaaataacctaagtatataattaatatatagtgccccctgatcctgttccctcagctgtgatcaataatagataagaatatatataaatgcattaaattgatattaattattactaattaatacaataaataagtattttgacttatttttgatcagtgaataatccaaccaaggacatgtggcttaaattaacctaatgcactatatattataagatcgtataaatcatgcctaataattccaatatcattaatatatatttgcttg

SEQ ID NO: 178226 - DNA, 757 bp, Cannabis indica
ggaaggatcaaagagagcatatgattttacaggaataatataatatgagtaaaatgtaatcattagccaaaacattgcgccaatatagttaatttctcattgacatagaacttaattggctatttttcttattcctcgctaagccaagttatcagaaaatagctcgacgatctcatcgtcactctgatactaattcaacaatacaaatcattgatcgatttaagaaccatatacaaaactcaacatttagagctcttacacgttagcttccgtacatttcctcgggaaaaatggagaaaacttttaaaaatatatatatatacaaacaatttgatttttcaactttcattgcaatgcattattaattttcgaaagatgagatgaagtggaaaattgaaagctgtgtacctataatcattccgatggtgacgaatgttagtaatccgaagacaattctcatggcggcggacatgggcgaccagtaaagatccagaaagtgatatagctatgaatctgtaagcgtttttttctgtgagaagaaaagaaagaaattatgtggagagatacgtgattgtgaagaagaataaaaaaccactcttggaccccgcccatggctttatttccttccctttaattctatagtatctctatatttttacaatttaaaaatatattttcttgcctttgtattctatttttccaggatttttgtttattttttcttcctttttaagctttaattgtacctctaaatgcg

SEQ ID NO: 178227 - DNA, 691 bp, Cannabis indica
aaccgtaccacactgcaccattttttgtggtgcaattttcgcgatattttaatttcgcagtgcgagtgcaatttgaaaaactaaaagaactacatgtgcgaattaatttgaaaaaatagtcaaaaaccacacaccagcgccgcaaacacccgtaatttgtacaaagatatattctatcatttggtaggatgcggcttatatagaggagatcaaaaaccttaattcaattgtgggtcataagcaataaatatagatcacgtttactgctttggataaaaaaaatgttcaaaattaattaattaataaataacatatatttagtttattaaataattttttaataaaaaattaagtgaccacaccaactgcccacaagctcagcacgcatgtacattgatttgatgtgtgagcctcatccacacataaaataaaactgagtgaccctcagggctcaatcccaactcttttactatatcacacacttcacttctctaatttttgtaaaaattcaaaagtatctatctcctttaaacacattttatatagtaactaacacaagcaaggcaagcaattctttttgtacatcaataaaccgaccctaaatacaaagtgaaataaacattaaagagtaatagtttattagagcactcacaatagcatattcactatttttagccaaatgtgatcaaat

SEQ ID NO: 178228 - DNA, 698 bp, Cannabis indica
atacctttctttactttcggttaaaaagagtgaaatattctcaattttttatttttagagtttggtcccctttcaccccatgagattaagaaggcggaggcaatgctttccttcttgctcttcccatcacagagtaaaccccaaatacatttttcttttcttttcgccctctctttatatataatgttattggttacatgttagaacttctcaaagttgctcttgcctcattccttttcttgtgacacggctgttattctaaagaatccacatttttatattttcttgttcagagttttcactattagtgttgtttttgttttttttttagtttctatattagtgtattgtcattacttggttttaattgagcaaatatgtttatattaatctttgtattgtttcccctgtttaccctgctattcataaggagtgatctaggccatggttgaggataaatgacaattatttttgaaattttgacaaattaaactcaagaaaaaagacttttctattgttttgaatctaggggtcaaaagtgatagtttgtgccaagaaacatcaactatatatttttgaccatttctttctacttatgaatccatacatcctaataataaatacttatctaaacaaaaatacaattaaaagtaaataaatgcacataaatctgttaccagaatgcaaagagccttcac

SEQ ID NO: 178229 - DNA, 1010 bp, Cannabis indica
cttgctcttcccatcacagagtaaaccccaaatacatttttcttttcttttcgccctctctttatatataatgttattggttacatgttagaacttctcaaagttgctcttgcctcattccttttcttgtgacacggctgttattctaaagaatccacatttttatattttcttgttcagagttttcactattagtgttgtttttgttttttttttagtttctatattagtgtattgtcattacttggttttaattgagcaaatatgtttatattaatctttgtattgtttcccctgtttaccctgctattcataaggagtgatctaggccatggttgaggataaatgacaattatttttgaaatttgacaaattaaactcaagaaaaaagacttttctattgttttgaatctaggggtcaaaagtgatagtttgtgcaagaaacatcaactatatattttgaccatttctttctacttatgaatccatacatcctaataataatacttatcaaacaaaaatacaattaaagtaaataatgcacataaatctgttaccagaatgcaagagccttcacaaacagagtgcaataaaaattttagaatcaaatagctctgaaagtaaatcacgcaaaataaaaatacaaattaagaaatcaaaaattaagcttactatatatactttcaaaggaatagaccttgaggagacctgagattgttaggagacctcaatatatttttgtgtggaaaattttcacccaaacactatcgaaaaccatttccaatatcacaaaaacaaatattaggttcaacaaaaattaaatgaattattcccattttaaacccattaatattgaaacagagtaacaaaaaaacaagggacttctatattcaaataaaacagagtatatatgtgttataggataaagaccaacataattataaaggaccaaattaagttagttttatctctactatttttcctaatacaaaaaaaaaaaacttagttga

SEQ ID NO: 178230 - DNA, 567 bp, Cannabis indica
ttgcaaattgatatgcattacatgtgtttacctactccattgtcgccaacatcgtcatcatcttccttgccccttgatgttaatccatcaatagtgtttgagtcttagtatgtttcgagataacataattaattgtataccttttatttattgtgaaacactttttttttattattttttatttgaaatagatagacaaatgcatattcaattttttttttttacaattattttattgtaatatacaaagaccaaatatatatatatataatagatctaataacaaaaacaaagttaagaaaaatctgccattaatttttatttttattgaataatatgtataaaattatttaaataaataattataattcaatttatcacattgtaacaaatatatatattataaaattgagtagtatttatattcaaaacatgaatatatatatatatatatatatattatgtgtatgtcattagaaattatgtatttttctttacttaaaaaaagaaaaaaaaaattagttaaataacactagtgatgtttaagagtgtgtatcatatccaaaa

SEQ ID NO: 178231 - DNA, 519 bp, Cannabis indica
aaaaaaaaaataaaactttaaaacatgaagtattgaggtggagtaaatgacaaagttataaagttatttctacttttttttttacttttcaaagaaactcataaaaaggtcatccatcaccttattaataatatatattataatttttttgataaattacactaaatataatatttattcaattatcaaaattttattatggaattatatatgacttagtagttaataagatatcttggtgagttttttttttcttttaaaaaataaaatcccatatggatttgaagatactgtgggattgcaatttcaaattataaataaatctacatatttatatgaatttaaaatacttaaataataaacaaaattaaaaataaattaaataataataaagcaaacgaggaattatttgtaagaaatttgaagaatataatttgactgtgttttgagaaaataaaaactaagtttgaaagaattttgaaattacattcatgcttaccttaactaaaaactaaataa

SEQ ID NO: 178232 - DNA, 758 bp, Cannabis indica
ctgacaaatcagggaataaactttcgaacatataatcaagattatattccactgtgctgacaacactataatcattaacaaattcatatgttctggacttaaatagaatttatacattatatatataatcatgaaataaatcatgtgaaccatgcaacataaaatgttatttctgatctttattaataagtaaatctgattatattgaaatgagttttatttagggcacaaaacccaacaaaacccccatcttatcaggttctctctcatctcttggtatattttctatttacctgtatttgttttttcttaatttaaatgtgattgttattttcttgggacttgaatacgtttgcagattcctttagtttgatttggattatcatgattgtgcaatgagcaatattattgaaaagctgaattcgttttagtagattggattttggtttgaaatgttttgtgcttaagccatcttcgaccatatacactatagcatcttccctaatatatttaaaatttattaaatataatataataatatgaaaaaacaaataaatagtgatggtctggctacactatatttggtgtagctatagtgtcactgttgtaatgaaaaaaagttaatttttaacacaaaagtgtgcgttggagttggtcttagttacttgaacttgttctgctttgcttgtttggtttggggactctgaagatttcactgtcaaattttgacactcagcttttgggtattatttgtagta

SEQ ID NO: 178233 - DNA, 605 bp, Cannabis indica
cataagaaatagaaaagactattaggtaatgagtgttaagatattggtttggtttagagcagagtagctagttttggttttattagtttgttagttataggctatgtttcgggtaatgagtgttatggtagatgtaaagctagaataatagtttctttatttcaactgtttagttagttagatcgttaccagtcagccgaatctagtcctcatcacatatacattattggacatgatgggtttgctttttattacttcattgcaaatgtctcacagcttcatttcattcatctagcaaagaacaatgtttacaatctttaatttgcaacgaaaaaatgagtgtgtttccttcccttctatactagctaaatgttggctctttctttttttttttggtttctatttttgttggagtttggactaaattaatttagtagagtaagtcccaaattagagttaatgtgtgtaaataaaatactttatataaaatgaatgagtaaccgctaattagatttttttgtattaatgtctattattttattagtgtttgtactatttttactaacaaaaaaaaaaaaaaaaaaaaaaaataaaaaaacttaagt

SEQ ID NO: 178234 - DNA, 1708 bp, Cannabis indica
tttgagtctaaagaaaacactcttttttattactctcattttcttttaattgaaattccacttaattacatatgtatatttgttttcattgtgaaggaaaaagacctagctcttagcagccctgcagttaagaaagctgaagatgttgtaagcagtatgcttgcaaagggttttatattaggaaaagatgctgttaacaaagcaaaagccttggatgaaaaacatcacttgatatcaaacgcgtcggccacagttgcttccattgacaacaagattggtctaagcgaaaaactaagcatcggaaaggcagtggtgaatgacaaggtgagagagatggacgaacgataccaagtatccgaaaagacaaaatccgccttggcagttgctgagcaaaaggcaagcagtgcaggatctgctattatgaacaacccttatgtattaactggagcttcttgggtttcaagtgcatttagtgcatttgcaaaggcagctgaagatgtaaccatattgactaaggagaaagtcgaaaaagccgaagaggaaaagaaagagaccatttacagagaaagaacagcaatcatcagtgactttgctcatttccagctcgacgatgcctcggcaagagaacctccaactgtcccagttaattcagttgatgccaaaaagcttggaattatatgatcaaaatgaattcgccatcgattttttcattttatttttttgcaatgtggaattgtttgtgggtgttaatacaagatttgtgtcatcaaattttttgttcgaatccctcttgtctggctattgcaacgttacctggagaattcatgtaatattgttgataaggatcagtagtagctatagtacgagagttctggaattgtataaataagcttttagcatttttaaaattatattacttttaaaatatggttggtagatgaggatgtagtccagttcatttctagttattatttcccgctttaattatgttataaatgaactaaattggttcattcatctcaatttgttgatacaaaaaaggtctttgaaatgatgtgaaaacttttgatttgatttgattagttggcatgtgtgatcttgatggaaaataattgcactaaagcttaaaatataaccacgcatgcttatgaggtaaaaaaaaattgctttttctacataagcttctcattgctacatactacatagtaatgtagttacaaaaaaggggttgaatgaatcaaaatttatggtattggttaaaaaataagggctgataatatgaatatgtatggttttttcaaaatttataagaagtattcaatctatactttctttttacagtgagaaaatgaatcgaaattattttggtacctattatatgatgatggtattctcttgtagaaagaaaggtcaatttggtcacctttcaaccttgtctttatgatgaatgagtgtgtaagcgaacagaatggtatggtaattgattgttttgattgaatgatttccttttagcttgtaatagaagctgatcaatcatatatacttccacaaatactcgaggctctgttaaattattttaacacaaatattagtcattagacccctcaaaatcatttttcttttgaaaggtaagtatgatgtttgatttgttcatacctctacgcattcatgtaaatcgttgcatttttttgttctgatatgagtctgc

SEQ ID NO: 178235 - DNA, 1106 bp, Cannabis indica
gacttggaaaataaaattaaggaatttccataaaaaatgtgtttttaatgataaattatgtttttttatcttatttacagcacaaaatttagtaataaggcatattatttacttaatttacgacataaagtttacttaataaactgtgtcggttattttatttgttaaaatatcgtgtatatatatacatatatatagaaatgagacttgtaattaatttaaatatttttttaaccattattgaataattactaataattaggattaacaataaggagacataagattgttgtttatcttatttaagggtaatcgtttaccatttcaatgataaattattttttgatttacaataacacgtattgtttaccttattgaagatattgagtttacttaataagacatgttgaatatacttattaacagcacgaagtttgcccagtaaaacatgtcgtttacctttatttttgtttacctaataagacatgtcgtttatcttatttttgtttacctaataaggcatgtcgtttaccttattttagacatgaaatttacctaataagatgttttgtttaccatatttgttaaatgattcatctaagaatgtgtgtttcttaaccaaatagtaatacataagtttggaaaataacacgaaagggaattccttaaaatttatgttaataatgataaattaaatttttgtttacctcttatttaagaaatattatttatgttttttatagtatgaaatttacttaataaagcatgtcgtttaccttattttaggcatggagtttacctaatacggtgttttgtttatcttatttgttaaatgattcatctaagtacgagtgtttttaaccgaataataatacaaaagcttaaaaaataaacaccaaaggaatttccctaaaaaatatgtttttaatgataaaattaatattttaccttatttacgacatgaaatttatataacaagacatattattttttgcctaatttacgatactatgtttacttaataagttgtgtcgtttatcttatttattaaaatatcatacatacaaatgagacatgtaattaatttgaactattgtttctttcta

SEQ ID NO: 178236 - DNA, 1227 bp, Cannabis indica
tcgacgttttaatagggccctaaatcacatcattgtaattttggtgagagacacgctaaacacttctcggagactttaagatcaactaggaataaccctatcaataaaagacatgaccataccctaaaatcaacaatttgggaaaaactagggttcttggaaaaaccccaaccagaaaaccgatttctcaactggttaactggttgactaggtttcctgagggcaaaactggttacctggtttctcaggtcccacaaaaccagttaatcagttttgtgcagaaaaaccaaaaatcggccctcacaccacaattcaaccccaaacttcagaattttctctagagtacctgtattcatcatactaaactcaaatcaagcaattattctcagttttaaacccataaattcaatccaccattaaaggttaagatttgagttcttaaactcaaattttgcttaaccccaaaataataaccaagtctagcccaaactacttccaatattcctaatcaaactccagattagaaaatcaaacaaatagttcaaccacagaacttaaaaccccaaaaacatgcaaataacctagcttgagctaagaaacttcaaaaaggagaagattagagggttttaccttggttagagacacctagatcttgctgaaatcacatgaattcaactgagacacctagcttgagctaagaaacttcaaaaaggagaagattagagggttttaccttggttagaggcacctagatcttgctgaaatcacctgaattcaactgaaattccttcctccttgctggttgtaggtgattcgaaagagagaggtatgtttaggtagttctaggtttttcctatattatcatcaataaacttagttttttttttatattaaaagtattatctttagcagcataaaattcctcaaaaagacaagagaattactcaacaaaatgacattttagcgcttagacaaaaaacaaagttaagtgtccaccaagggtagaatggtcattaactaatcccactaatttcccgacactactaatatctaacaatgattccccgatataaaatattacaccaataaaatgtgactctctagtggcccaacgtcaatttccaccgttaccaagcacaatcacaggtaaacgagaaattcacatataacataattagcatatatatatatatataacttacataaatctccacaacatgcatatta

SEQ ID NO: 178237 - DNA, 659 bp, Cannabis indica
gtttacattaaaatcaaaaaaaattctaacaacacctccaactaaataactcataaactaccaacaataaaagatcaaaatattgaaacggaaactaattcaatatctattttatataaagtgtgcctatataattgaaatttttggtttatgagaaatttatgggtgactttttatttttatttaataaaataataaaatattattcatatataataaaataataataatacaaatcctattaatatttaaattgatatttgaacggtgagatttgatacggagagaagatttgagcaaacaatctgatattccaactatttgcaaatcgaagccataaattcccaataacaaaaactaagaataaatcggaacgaaagaaattaattatgtggttcatttacctctttcgattggaacaaagccgagcccaaacaaatcagattttcaagtatcaatacaacttgtacaacccatttgtttgtttttttttttttttgtttaaggttacacttgttttatttgagatatcaccctatatatgtttattaatttaattggaagtatctataaactactatgtgtatatataatttattgctacatgtttagttgcggattatcttcgtttctattgatatattgcattaaagggggtt

SEQ ID NO: 178238 - DNA, 477 bp, Cannabis indica
aggacctcggccatagatttcatcttgagaaccacatccatagacattacccctattttttcctaaaaacatttttcctcttcccgtgtgtagttaatctttccttactggtggagctccaagaagtccccgtttgtggccgtctatgaccttccatcgcatcagtgagagctgggttgaacaaatcctagcagagtaaaacttagggcataaaccctaacactatcttagtcctataaatagaaatactcacattgaagaaaggatctccaatctttgaaatttagagaattcgtagcaaactttatcctgtaagaaaaaaatcaagaaataagagtgactcgttgagtatgtagattttgaatacaaacaacataaaaaatttgttatcatttataaattagaattaataatctagtatattcccatatttgtttagattataaataaagattcgtaattatcaagcctcattaa

SEQ ID NO: 178239 - DNA, 698 bp, Cannabis indica
atttactttcttttaaaaaatacacttctctttcgattattatttccttattaattagatgatcaatatatatatggatgttttttttttttaaaaaaaaataattaacattttaccactcatttattaaaaatactcctctgtcgagtattatgggattccatctcaaaattaattggtaatgcgtgaagtagatcatgttcttatatatggcatggtggctatttttgctcaccaatcttgaatcaccttatcacaggccatgccatttgctcgcttatttttgttcggatctcaggcgtctttgcaccatctggatctcgtgcggctggctaaccatctggataggtgtggatcgaaagcccgctagggatatggctctgataccatgttgagaatcatggggttccatctcaaaaccaattggcaatgagtggagtagcccatgttcttatatatggctcaatacttttacatttaatccatgtgggacaatgttctccaatatcctcaacacaatacagttgtaaatatgctcattttgttaaacttttttttaagaataaaaactttattattataattaatgaagaaactcatttacaataacaaagtatataagtagaggaatagtctccaaccaatagtaaagcttcaaccaagccaagggcatatctagcaaagtatattaactgtac

SEQ ID NO: 178240 - DNA, 558 bp, Cannabis indica
attgattgggcaactaatgcacgatgtaaactgacttatggctagtttggcacatgtgtactgtagagaaaaatagttgtagttgtgttatgaaaaacagcaactgcagcagaactgtagaaaaaaatgagttaagtatttaataaattataaattttaaagtactacgaattgttaagatctattataatgatagtgataatgttataactagtttttataatcacaaatatataagtatttattttatataacatttttatttttatatatatttttttttcatgtttttcaaagtataaatttatatgcatttgataaaaataatttataatgtttttatattatattttatcaaatgtaaaagaaaatcagaaactcaagtatatatgaaaaattttaagttgatatggtttgttaatgttaaaataaaacataaaatatttttttttaaaaaaaaataagatatttaatcattatttattttattataactaatttatttaaaataggctaattaggatttttgtctcctgaactttgacatgtactaaatca

SEQ ID NO: 178241 - DNA, 567 bp, Cannabis indica
ttagattgatttgagtttgtgttgtatgtttacacagctgggaaaagaacaacataacaaaatgcaacagatgtggggagctggagcataacaagagaacatgcaagcgaagacatcaaaaatgaaaagaatcagaacaactaaaaacaacagtagaacaacgaaggaaaaataaacatatattggagcataggatactgaagaaaataacttacatacaaattttattatttttctaatactattaaaaatagagcagtacaataatatttaaaaaaatgtgataaataaataaaataaaacaactataaaacaaccttaaaacaataataaacaataacaaaataaaccagtaacaaaaatatatattcaatcctaaataatctaacagaaacatatttaacatgaagaactaaagtacatgaatataggaaaactacttctagcccataatgatgagagggagaagaaaaaaaaaaaaaaaaagaaggggagaggaggaaaaaaaaaaaaagaatgagagagagaaaatagagaaaagggtattgaaatagaatagtagataga

SEQ ID NO: 178242 - DNA, 773 bp, Cannabis indica
accattgctatctttgtgtgtgtatctatctatattgtatcaaagattgcaaaactttgattcaatagctgttattatttatataattaaatagtgttgactatcaaatttatgtatattaattaaaatgatcaaatctcaaagtttgatctcttctatttatttatataatataatcaaagacgtgaaggcacatgtaattacttataattagccatgcagctaccaccactcatattcaattaacatataattagttaaatcaaacaaactcctaataatcaaattcatatatgtttttgaattattgctttgtgttcatcaatcattcaatcttttctgcaatccttttctgagttctgaagatttgatatggctgaattggttggaggagctcttctctctgctttgctcaatccattggtgaacaagttaactactgaggtgaaggacttcttcaaaggaaaagatgccattctcaagctgttgaaggagttcataaactcaaagtgacattgttaggagattattttccgtcattgacagagcttgtagtagatggctgtgaggatctaataccattattacttccaagagctcaactcatgcaagcccctttgataactttgaagaagattagaattgacattgttcaaaattgaagcacttagacgaggcggcgtttcagcacctcacctccctcgaaaagttacaaatttattactgtcgtaacctccgatgcttgccaaaagaactacctacttctctgtctg

SEQ ID NO: 178243 - DNA, 734 bp, Cannabis indica
atcattatatctctcttcaaccgcccaaaaatctgccacgccaacttgaatttgtgccactcgaatattattccatctctcatcacattttccttttctactcaacttgtgtacctttcagttttggcatattatcacaacaagatgcaatatatcatatcaatagaagtttttgtttatataattacaacttccatctcatttaaaaattttaaaaaataatattgtcaaaaataaaattcaaataattataagtgccttaattttttaatttatttttatatacgtgcagttaattattttaaattttattttcaacaccataaattattataattttttttaaaattattagaatgagtagtataattataataaaaaattattattataaatatttctccatatacccaaacaaaagttcttactaacaagactaagttaatataatcatgtttcttctaggacatccacattcaaaatgtcatctatatcatcactcatcagtaatttaacaatgtttcataacaattagatgaccagatctataataataacacttaaacacatcttatgagtattaaatatttcttagtacaaatttgaaaagtaatttaaaataaaaactaaaagaaagaaaataatagtgaatgagtgatatatattccaaatccaaagttgtatgagatgagatgacaatacattggttaccttatcatgacaaaaatctgaac

SEQ ID NO: 178244 - DNA, 1297 bp, Cannabis indica
aagtataactcatgattctaaaatttaccattgttgagtcaagtttgagttcttgaactcaaacttggtcaacacaaaaattagccactaaaataacctcaagtaagctctaaataacccaaaattatcccagaaatcaacccaagaatagctagggtttagatagaatcatctctagaaaatcacatgttcaaaccaattaaaattttccaaaaaccaatgagaaatgaggagtttggtttacctttgaagaatccctcaattcctactaaaacctatagctgaattatctactggatgataaaaaaattggtaagaaaaagattgagtttctttggttctgagagggcgagagagagagaaagtgaggagagtgagtttcaatttaatttgaatttaccaacgtaattctttagataatatcaacctaataaattcacttattttctagctagaattcccagcaccgaaataagattattaattcttaagcataatttgccaaaatgccctaaattattactccttaagtaacattaggccttagaaaaaaaatgatcaaatactacaacctcgcctaatttcaatatcaaacatatttgccacgctaaaagaaaggtttaaacccaacccatgtgaccctaatggctaaactgtcgtattttcatcgctaccaagcaacaatcatagcaatacatttttcacatatgtcaagtataatacatctagagtttaataaaatatccagaattgataaaaaatataatactaaatgcttattcttgaaaataggacctacataatcaatcattcacatataataataaaatataattatttaatgctaattgccttactaatccttattctaagtatgaaaaaaatatcaaaaaaatggtatatgagataattttcctaaattttaattctatgtatggagagcttggatttcaccggctcatggtccccacggtatctaagataatatctgacaagtgctcgggttgacatggacactagtcatcagcatgcaagttgatgaacacaataatttttatactagtattaataatttttataggctcatggtccccgcatcttacttaataatatattaattgtaataaatcaaagatgatatttatttatatttaattttttatttaattatatacatacagtaactcccataaatttagagtgttaatgaacacaataatttttatactactatatataatatgttgatgttttgtatagaatattgtaattatttttttatacctataattgtaat

SEQ ID NO: 178245 - DNA, 888 bp, Cannabis indica
gtgatgaccattatcgacatgttgtcgatagcatgtcgatgaaaaaacaaattaacatacataagttatttgagaagctgttgacattttgtcgatagtatgtcgacattttgtcgatagtatgtcgacattaagtcgaccaacagtgtcgacgatatatcgatgcaatgtcgatgtattgtcgattttgaactcgaaaattgaaaaaaaccataaaacataaaataacataaacattcattcaaataagaaaataaaataaaacataaattaacattaaaataaaagttcataaaaaaaacattaaataaaactcaccacaaaccataaaataacaaattaaattgtttggcttgtgggtgagacttgcaatacttgcataaagatccaggcttcaccggtttaccattaaagatgcctaatttgcaacgacgacatcctttggggaaccctggtggtggagccggccatacaccagttttgctaaattgtgcttcaagttgtatcaatcttaactctttctgatttcgttctttttcaaaacgcctatcggcatctagaactttctgcatttgaggagtaattatgccatcatcctccagcttgagctcttcaggagttagaattgggaattcgcccttgttctttctagtagacatatttagaacttaagaataagagaaatttacctttacattttaagtgtaagagagaagtagaagacaagagcacttatgaattagaaagggatttgcttttatagagtagtatacatgttgggaaatgtaggaaaaaattaaatggccattaaaatgtgtaaactgtacaggtgcaaacgcatgaagtgtgtatttgtcgacagaatatcgatactatgtcgtataattt

SEQ ID NO: 178246 - DNA, 1102 bp, Cannabis indica
attcaagcagacattacttcggtggctaaactacaatctgggtttgaatgcaaagtatgggatccggatgaggctctcttttggtctttgttcgcaatttacggtactccttatgatgatgagaaacttgtgttttgggagaatttgtctagtaggattaatcaatgcctggatccttgggctcttgttggggatctgaatgtgattgctgcgaaggaagataaatcgggggggagagtcttttctcccaaggatggttctattttgcacagatttatgtttgatacgggtggagtagaccttgggttttatggttgcaaattcacttggaagaataagagaagctctgggggtctcatcaaggaacgattggatagagctattgttcaatctgattggctgaattcctttcctaaagggggtgtgcgaaatttttgcctatcctctcctctgaccatggccatatcctatttcgactctatcatggaaaggtctcgtggatgttcaccttttaaattttatgaagcctggctaaaagaagtagctgtatcgaaaccattcttcaagcccggaattcctctgcctcttcttcgctcaatgggaatctgcctaggagatttgaggcaatccgaattgctcttcaaaggtggaaaagggaagtttttggtgattgtgacaagaaattaaaggcctttggagtctaaactattagacttacaatccagggaggtggattctggttgttcaaaagatgaagataaagtcgaaaaggaaattgccgatttatgggagaaacgggagcttgtttggagacaaagatctagagagatttggctatcccatggcgatcgtaattcaaagtttttccaatcgtctactctagttagacgaaaacgtaacttcatttggtctcttaaagatgatcatggctctttagtcttcagagagcgggaaaaaggtgatatacttattaaatattttaagtcaattttcacctcgtctgatccgtgtattcctcatgatctccaagggctgatctcgggtgaaattactgattctgaaaatgggatcctcacgtcaatccctacacatgaagagatta

SEQ ID NO: 178247 - DNA, 1379 bp, Cannabis indica
attattggtagaggttcaaaaagtaaaataaaaatactaaagtaaacatgcttttattgggattataactcaagacttcatttagatgtataaaatgactttaccattataccaaaacttattttatgtttatagatatcacttttatttataaatatatgttgtaattaactaaaatgtatatatatttttttcccgatttttttttccagggtgggcgaatgccccacctcgcctctatgtgggtccgcccctagcgacaggggcgactttatattaatttaggccttaggcaaaaataaaaattagggcccaataaaaaagtaaagttattgagatttgaactcccaagctcttaattgttaaactaatcaaattaccactaaactataacacatatttaacatcaaaagtattattatttattttattactaactatattttaatttttttttttcaaaatgggccctgagaggtgggggcggcctaaggcagccgcctccttcgtcttagctcagggccgaccctatttaacggcaaaactacttaaattttacgttttgtaatacttaactacataatcttatttttttgacgataaaatcgactgaactctcatgttttgctttctacacttccatctaaaagtttaagttaagtaccacagtagattactcatgtttacacaagtgaacccgtcgtaaaattttagtggttcacgtataatattaattattaaaaataattcaaaagttataattaaaaaaaaaaattaaaagataaatttatttaaaagaaatcattaatttttttcaaggaaaaagaaaaagaaagaaaaattaaatataatattttttatataataattaaactattttttattattttaataattaatactatgggaaccactaaaaatttgctacgtgtgtaaacgtaaataatcaatgtggcacttaatttaagtttttaaatggaagtgtaaagagcaaaacgaaataggagttcaaaatgttttaccttcaaaaattaagtttatgtcattaagtattacaaaacgtaaaattcaagcgattttactttcaatattcttaatataatctatatataataaatataatattggttggtgtgtattttaaataaatcgtctttgtgtcatttttagtttaggcataacaatccaaaaagtgatttgtttagccgataatttaattgtgtcaactcgaaaatgattcaaacctatttaaagtaaattcaaaacacgttttatattgtgtcttatatacatattttgctaccaaataatattctcaagtttataataatttatggtctatttttttttttcttttttgagtggtagcgcaattagta

SEQ ID NO: 178248 - DNA, 623 bp, Cannabis indica
atgaagaataatttaataaatgagatatggagatgaagcacaaaagaatcaatatcaataattaaagtaagaagtacaatagctacactctaacctcaccaatattactattttaatacactcatttttgtcactaaaataagtatagataaaataataataagagagaaaaataaaatgacaaagtgtattttctctactctaaaatctgatgccattttcattgtatttagctcctatttatagtgtgcataggaccctaagctaatgaatatcgtggcttcaagtagtggagaaatgttccaaaatctgagcaaaatggccatgtggtggtctatcgtttattcatgcatcaaagagtgggcgtacagggatagttgatacttgtcttgtgaagcccacgttgattgcttcagaaaaagaattaaattggatcgcattactcttgtttaatacacatgcgtgagacaaagtagaattgggcccataatttgacgtgagagttgggccatgatttgagtttgagctgatagagaagttattaaatcttgattggagagagaaagagatggagaattaaaggttggcttgagcttcataatatatgtccatttgattgacga

SEQ ID NO: 178249 - DNA, 918 bp, Cannabis indica
attaatatggcgagatgagtttaatttcagtttaattttttttttttatatatatatatgtatatttaacaaaagtaggtttccattaattttctattgcaactggactgttacagcatatatggatctcattacctttttcattaatataatcatttataaattttaattaatatatatattaattaataggtataaagacaaaattagggctcggagaaatgaaattgtgtaaattgtttggaatgataaaacccatgctataccaaatcggtcaatatctgtcgacgaaaacaatgacagtaggtcttagtagtatttatgtgaagaacaataggtttggtcctcaattaataacgtacgtattatagatttatattgttatattcaccaaaacttttgaccatacatacacataaatatgtatacacgcattttcttatctattaatattattatcagtgtaattaattattaaattatatataatttaatgtaattataatttttaagaagtatcaaaaaaacatatctaaatatattaagtattattggtactcaataacaataatcatatatttatactatcactattgataatttttttaaacatcaatgaaagcatctgatttagaaatcagtattgctcaataagcactgtctaaatgtgatactttctgattaattagtaagattttataaaaaattattatattaaattatacataattttttttttttgataaaaagttatacataatttaatatttaattacaataataataataatcataataataataataataataataataataataataataataataataataataatatatcaatcttatagagttgtacacatatttagggccttttaaagcggcattcaatatatatatgatgat

SEQ ID NO: 178250 - DNA, 1228 bp, Cannabis indica
attgatatgtgcttacttccttccgaagtaaggtttaaataaatcttttttccgaagatatatgatcacttcctctcgaaatgagacttagaaaagtcttctcccgaagattcacacttgttcaaagtttttcttcaacccattcaatgaatagtatgagatcataataagaaaaccaaaacctagtttaacactttaggtttttacaaataaaacactcttctcacaaagaaagatataaaaatatgagactagaagagataaaaataatttggatgcactctaggtcatatttatagaacatagcaaccctagagacaaccacaaaaacaatttcccagctgtagaaaactttcttaaaaaatttctaatgtgcagcatcaaaatcgggttctgcagcagtagatcaagatcagaaaggaagctttccaaaatggaccaagatcacaaaattagacttcaaacctgtcaaataaagtttatttgatctgttctaatcatgtcaaaactgaaatcatcaattataaaaagggaaagacaagttttccaaagttagacaactttccataagagaattcagtctcttacaagaagtttcctaaaccaaatgagaccatccgagacagaatctttccttagaagaaaagagtaattaggggcacaaagttaatgtaataaaaacaatttaattgctcaataaaaatacatattcaataaaacataaaatacatacatatatactattaaaatttagatttttaccttattaccaaaattcggccaccacgcaccaccataataacacaatcttaaaaatcaagaaaaatcctaaaaaaatttacaaaaataaaaataaagtaatataaattactaaaataattagagattaaatttataccttaatggacgttgagattcaacgatttctccaccaaaagcggcagccaaagctaaaatcaccacaaccaccacctctaagctcgatttatcctgaaaaacaaacaaaagacgatcaaactttggggatatgttattgggtatgaaaaatgcaacattttaaaaaaaaatgggtaaaaaggaatgaaaaatggagaaatgggagatgggaggcggtggttgggcgagggtttcgtgaaggggttattggttattttttttaggggagaagatgaagtgagtaagacaaagggctgaataaggttatataaatcctatggctatcggttat

SEQ ID NO: 178251 - DNA, 712 bp, Cannabis indica
aaatggtgattagcaagattcgcattcttaatttctcattcagtgttaaacaacttttatatttactttcttttaaaagaattatttgtcaaccaaaaagaaaaaataaatttaattcatggtaattagtcttttgtgagttcgactttatttgtgtgagtactgcttgattacgtgcacttgcgtatagctttataatttttcgtaacattaatatgtattattaattttaacatgtttatgctagttttttgtaataataaattatttatgtgtaatggcataatgtagtttatattatttatgtgattatgtttcgtttggtataatcataattataataaaattactattacagttctattattgttttaaaaatttggtaatgatttataatataatcattgttacctcattttattgtttttttttttttgtgtataactgttacctccaaaggagaaacacaacactaagagaaatagagaaaaaacagaacacacaaaagtagctagaaccgaaagaaaacaaagggttcagaacccggctagaaacaaactaggacataaaaaacacaaggaaaaaaacaacaaaaaaacagaaaaaaccagatcagccatctgcctcccaagatggcaggaactgaacaaattggtcaattcaatgtcccaaactgcccagattgaattgcccagtcgagccacgaagttgg

SEQ ID NO: 178252 - DNA, 637 bp, Cannabis indica
tatgtattttgaattgcgacttgagttgtgattcaagttcctaattaatttacgatttagggttgcaaagaagaagaatggtagaggagttttcaaagtgatcgaggcgattgcatatggttgtctatgaaacaaatctagttttggctaatatggcaaaaaaaaaaaaaagggggtcttgcttcttcttttgtttactaatgaaaattattcaactatttattgtttatagtggctgaattaagcttctaaaaaatcacaaacaaaaaaaaatcacatacttaaaacttttttattactactttattactattataggacttctaagttccaatccaagttaaaaaaaagtccataatttagaaagaaataagttaaaagatatggataactttagaaatatagggcttgatcaatttgtccaatttccatgaaacatttatgatagggattgatttcacccgatactagccttctacccctacatatcagtgaaattgaaaaattatagtaaagtaaaaaatgacaataaagaataatgtataaataaaaatgaatattgtaaacgtaaaactaaaataataagtaaattataaaaatgaaaaaaaaattcgtcaaagtgaaaaaaaaaaaaaaa

SEQ ID NO: 178253 - DNA, 540 bp, Cannabis indica
aaaaagataagaatcaaggtactaacttgaatatagctcaaaaagggagctgtcttccgcaacaacaagcatatgacaacctgaaaacacacaagaatcatgggaatggaactaaaaatggcaaatatgaaatggtattttcaaattatgtacataaaatgtttcgtaccaaaatccagaaataactaagtctgaaattttacaaaaaaggtaccttgctgaaatacccagccagaaacggactgtgagtatgttttggttccaaaaaggaaaataacaaacccatcaactgccaaaagataacttcgtcaaacactagacattttccattaagtgaagaaaaaatgggactaaacagtaaaacttctgacctcttcatcctctaccaatgtcttgaggataatatcaacttcacaagtaaaaatctcacaggcaatgaaaggaaacctgaggaaaaatatatttgcaagatcagaaaatgcattaaagcaatcttcacatgtaaaacttgtaatcactttcaaaaaaaaaaagaaaaaa

SEQ ID NO: 178254 - DNA, 623 bp, Cannabis indica
tgtttcgtaccaaaatccagaaataactaagtctgaaattttacaaaaaaggtaccttgctgaaatacccagccagaaacggactgtgagtatgttttggttccaaaaaggaaaataacaaacccatcaactgccaaaagataacttcgtcaaacactagacattttccattaagtgaagaaaaatgggactaaacagtaaaacttctgacctcttcatcctctaccaatgtcttgaggataatatcaacttcacaagtaaaaatctcacaggcaatgaaaggaaacctgaggaaaaatatatttgcaagatcagaaaatgcattaaagcaatcttcacatgtaaaacttgtaatcactttcaaaaaaaaaaagaaaaacctacttcacacttcgacttctatcagcatcttcaggagcttcttcaacaatgtatctgataagttgttcaacctgggttctttctctcaaactacaaaacaaaatagtggggagacaaactgaatagatgtattcataaagacatagtgttcttaagaaaaaatgacacatgaaagtgactgaaataacactaaacaaccagtaggattatccaatttgtgcttaacttctgcagaaataaaa

SEQ ID NO: 178255 - DNA, 677 bp, Cannabis indica
gaagctttaaggaatttacttgttgtaacaccacaacaagtatctcatggtggttgattgaacctcgtaattcttagtgtgtttgttccaataattgttcataattattctttagtttttcagctatttaatcttttttatgtgttcttgatgaggtgttaattcaccacaaaatatacaattgattgcatatataagagacaatattgtatctgtgtttttctacgagaaccaatgtataatgaatgaatgtacatacaaaaagacaagacagagaaattagaacataataaataaatcatcaacaaaaatctcaagttcacttcatattcattttgttttaaggtcattttattgtaataattaataatgagtgttgagaatcatggggttccaactcaaaactaattggcaatgagtggagtagcccatgtttcttatatatggctcaatactttcatatttaatccatgtggaacatattctccaataatgaagtctatgatgatcttcatccttcattttccaactcattattcagacaaaatgatcattcaacatatgtattcttgcaattttgactataattaatagattggaaaccaaaagttacatattttggcaacaatttacagaattatatgacttgaaataatgtcaaaaacatgagtatgaca

SEQ ID NO: 178256 - DNA, 704 bp, Cannabis indica
atttcaatatataatataaaaattctttatataaacacaagtttagattcaacctttttattttgttaacatgtaagacaatgtgttttttcatttactagagagaattaataataattattccaaagggttagtaaggaaataataataataataataataataataataataataataataaaagaagataaaataagaagactataaaaagtttttagtattgctgttggaattgataactcaatggtctgtcatcccacttttctcattattttgttattaattcacaattaaaacaaataatattgcaccacatgtttctaactacacttgattatttcttttatgaaacaaaactcaacaaattaagatgatgtacacattacccaccaagggaatggcctcttattaattattttactataataatattgctaattaagctacttattacataattacattaatattataggagggaagagaccatcatataacacgagctagactgattaattaaggcatattaggcataatgagaacattaaacaaaaccaaaatgagtatgtccaaatatatcactcaatttactgctcactttttagagttcgatcacattagattttatccaaattaataatgaaaaaaacgttatgccatttgttagaatatgctaacttttaaccccaagatacacaatt

SEQ ID NO: 178257 - DNA, 689 bp, Cannabis indica
aattaatttaaaagttaaataaataataaataataaaaaattatgtctttacaagggtagcaattcgatcgtttatagtacgtttgaagcaccttataattaaagttgtcattaactataaaatttggatgagatcgacaataaatcgaaatcgtttagatatttttttagtacaaaatttttcatctatttctaatgtattttttttatttgacaaaatttattattcaatttttatttgacaaactttttatttgattattattattgttgttgcatgtgttattttattgttcactattttttttttatttaagcgtttatatattacaaccatgttttacttgagactcaaacccacctccaacacacacacacccacctatggccacttgagctagcctcaagtggttattttattgttcactattatactttatgtaatacaaccatcaatatatattaacaaataaaagtttaaaatttttcaccacaataattacagactttaaaattttatagtataagaattgttccatattagtaaatattaaaaaaaaaaagaactattgtttagaaaaaaaaaaaaaaaaaattacaaattattaaattaatttaaaaacttaaattaaaaaaatacatgtctttgtaaaggattgaactcgtgtcattgtacttgtatatacaat

SEQ ID NO: 178258 - DNA, 864 bp, Cannabis indica
gaatgattttgttataaattctttacttgtctcatcatataatttgtgatttaaaaaagacataaaaagaatattatcaaaaaaataaggtaataaaagattaaatcaaaaccaaaatagagataaaaaaaagattaaaaattgaaaaatcctcatcaagaataaaaatttcgaattttttttttttttgagaaatctgttataaaaaaacttatcatataattgataaaattgaataaaactcactatataattataaacggaaagaactgagaatatagtacctcaaaatagagatttacaaaaataaattgataaagttaaataaaactcaccatataattataaacgaaaaagattgtgagaatatagtacctatatatattgagattttttatttgatttttatacagatattttaggttttttattatttttttaaattcttaaattacacaattaatgtctttgatttgagatacaattaaatttagtgttagttttaatttttgatttaaaattatatgtaaataatttttttttttaattttaattgagagaattagataagactttgttgaatgatttttaattttatatagatatatagatagatagatttttttaatttttaatttttttgaaactttagttgttagatatttataaagttttaaaaaaaattactgtgtttttatttaaataattagaaaaaaaaaaaatatataatttaaaaaatgaaaaaatagataaataagttttaaataattataaaaaattagaaaatagataaatatttttgtaataattagaaaacatatcaccatatttagaaaaaagatatattaataaataaagtatttt

SEQ ID NO: 178259 - DNA, 549 bp, Cannabis indica
gttaattgatgagaaaaataatatatattggaaagtataaagttttgccaagtgtccatactagacaaaacttcaaagaaaaaagcattattatttggtattttatggacgtcttatattgacatgaatgtatatatcattttaaaattagtaagtgtttttcgtattaattattaaattataatgtgtaaaattcgaaattaaaatgtactaataataatgtgttacttttgtgatgtttggtactttaaaattcaatattaatatttgggtaaaggttaaggaaagtttttgtgtagtgtaatttttcactaaaatgagccaaaaactacttggtatgcacacatatacatttggtccatatgtatagatatatataatatattaacccaatcattctctatagacaagttaaggttagttcattattaagggcaagtcatgattgaatcactatatatgtcaacacacaacacaaggtattttcttagctagggttttgaatgatcatatatatatatatatatatatatatatatatatacatag

SEQ ID NO: 178260 - DNA, 667 bp, Cannabis indica
tgaaactataagggaactcatattcgattcgttagggaagcttggagtccactattgtataacatattcccaaccactcatgttattaagttcccaaaatagaaattgtaagaatcatcttctctgagaaattttaacgagtgaatcaaagaacataatgaacacaaacaggagttcatgtatactcaggattcagattgatctactaatgagcatcattgtgatatcgtaaactcttttcatggtaaacaacaaatttgatgaaagatgtttattacatatcggttcattcatttataatctaattatacacagtgcctttactatatgtccatctacatatgtgatccgaatcaaaattacatacactagaagtataatgtatagtaaatcgtacttaacagttccatattaaagattctcaatactttaatacattaccgacttattttattcatatcgtataatcttaattctcttgtacatccttacaagattataccttctccatacgaataaggaatttttttatatttaataattatactcttataattaatatatcatttattttataattgtatttcatatattaattactatttttatggcataaatcccaacatgcaatctctcatttgcattaaaagtaagtgtagctcattct

SEQ ID NO: 178261 - DNA, 560 bp, Cannabis indica
agtaaggtgtttggtggaagtgtacaagtgtaagtagcccaatgaggatgagaatgtaaaagggcttttttcataaaacacaatgataatgagggggtaagttgaaaaataccactttattaatcaattaatcaaatttacctctaattttatatttaattgaaacatacctctttttatatgtattgtacccaaaatactctgacataagagagtcacatggagagtatcttgaagtgataggggcaaaattggtaaaatatttaaaaaacgagataaaaatgatagactttagaaaaaaggataaaaatgaaaaaagataatataaaaagaatatagagtgtaattttctatgaggatgtaaaagtgtagatagcccaatgtaagtatatatattgggcgcccaatgagaatgaggatgtaaaagtgtagatagcccaatgtaagtattgatattgggctttttcttaatgacgggttttcccatgggcttcagttgactctttttggagtaacataaaattaagtgattatttcagaaatacacaaagacaataaaa

SEQ ID NO: 178262 - DNA, 549 bp, Cannabis indica
aaaaaaaaaagacaaactcaaagtctcaaacccttctcttctctctctccagcgacaaccaacgcacacatgtagaaggataacaacattttttttttggagataaaatgctattatatttaaagagttaaaatacaatagacattagaggaggtggaaattccctcaaccataaacattccctgttcaccgaaaaagcatactttgctaaagaatcagtaacagtattagcagatctataaacatgtgagatctgaactccatggaaattggacataagaatagaaatgtcatgaagcaaactatgaaaatcagaaacactaggagaactagtatgcaatccttttaccaccaacagtgagtctatctcaatgtagtgaataggtagattcaaatctttaagtcattgcagactaaacataattgctagcgcttccattacttcttgtttaaaacatccttgataaggttttgacatagcagccgaaatttctcccaaggaattccttaaaacggctccaaaaccatatttttgattcatagtattgc

SEQ ID NO: 178263 - DNA, 555 bp, Cannabis indica
aaaaaaaattgtttaaaaacatttgaaattaattataaaataaaaaagtaaaaataattttataaaacatgtttttagaaaatatttttccttttttaattcaaaaaaataaaaaaaaaacttattaaagtgttattaaacacacccttagtgaaacttaaccccacaaacaattttcttggtagtaaaattttctaaactcacatatcgtctttaccctaatgttaaatttgcaaaggtaagtgttaagctgccaggtctatgattacacaatggtacacatactatgttttgatttgtctacataattttaattatttttatcattataaaaattaattaaaattattaagagaaatttaaattaataaaaataaataaataaattctttttctttttcctcttcattctcattctccaacaaactcaaacccattcagacactaaaaaaaaaaaaaaaaaaagcaaactcaaaagtctcaaaacccatatccagcctccaacattgttataagtgaaactaaaacaatcttagcattgtattagttatagtt

SEQ ID NO: 178264 - DNA, 555 bp, Cannabis indica
ttttttttggctaaagtactaataaacaaaaaaaaaaaaaaatccaggtaagggtaagaatattaaaatattattttattattgagtaatttgcgggaaatataatttaagttaggggtgttcgcggtgtaggtggtgcggtttttgactatttttttaaactaacccgcacatgtagtttttctaatttctcaaaccgcacccgcactgcgaaactaaaaaactgtgaaaaccgcaacgcaaaaaatggtgtggtgcagtttttgtgatttggactgtcaccaataattaaactatcacaaatataacaaagtttgagcaacaattgtcaaaaataccataaggcttgaaaataaatatgaaaaaaaaattaagtttcaacaatacaataattagtagactttgggttggacattcacatattggacctaaataaatataaaaattggtatttttataatgtgcagtgcggtttgaaccgcatattaacaattcaaaacctaaaacttcaccgcacagcgcgatttaggaaaaatcaaaccgcgactgcaccgc

SEQ ID NO: 178265 - DNA, 920 bp, Cannabis indica
aattagagagcaaattttctttccacaaaaaccgaaaacaaattttatttcatttatataagtacacattacataaaacccaattatatattacacatatagaggtacataaagtacataactatttgtactgtatatatgtactatatagtttatctataaattaccttacttattggcaatggcatctttccaattaagtataccacgacaaggtttagtacaaaaactatatagtaaagaaaaaaagtgttattgttatgcatatccatggcctttagtagaagtccaccattatagggaaaattttgttcggtaaatgtcaaacttttctgaagatgacagcaaaggcttctgcaatatatataaccataagacttaatattctttccaaaaaaaaaaattctaaattaatgtacagaatatatatatgaattaattataggatttttacaaaaaatattaaattttaggtaaaaatttataattttattttcacacgactttttttacaaaattactgttttttataaaataattgtaaaacaacaaaatagaacaattaaaataacagtgaaacaactaaaaataaccgttgaataaccgtgaaaacttcatagtataaaatttacacagtatttttgcaaaaaaaaaaattcaactaacaataatttcattgttttaaaaacaccttaattatatatccacacatttattagaaagcaaaataccaaattattaataacgttaacatcactatagtagtttgtttctatttgttctcgtaactgaaattagagctaaaccgtattattacttttttttttattagtttaataagtaaaataattgagaaaaatatatagatattgtatgtaatgaaacataattaatgataataaaaatttaataagaaatta

SEQ ID NO: 178266 - DNA, 1153 bp, Cannabis indica
acttaaaaactagaaccaatttgtacatatgtttattgtgcatggatttttggagctggtcaaaaaatagagtacttagtttaaaaagtctattggcacatttttgaactgaagggtacaactacaatatataaattcaatggatttgacatctagagtgttcatcgttgttaaaaattccaagttggattcgatctcaatgtcaatttttttgtttcccctttaattgaagcctcctagtcatgtccttagtctgccatacataagctttcattcatgaaccacttaataaaaaataatttaaatttaagactaattagtagtaatagacattctcaaaagcactgctttttcctaaacgtgtaagatgaatagaaatggttgccatacagacaaactattggactttctaatactaaaacaagtaattgacaagcaatatcttgtaattttaattaaatctagttaacaaaattctaaagtcaaattaatatagtattattacaaaaaatatatatttttatgttttgtgtgaaagatgataaaattattattactttctactattataccctcaaatatttaaaatcatatttacttaaaaataaataaaagtcaaataataataaaataagtcttgagtaatacaagtgcaaccattaaatagtactgtagctatattttattttataatattacagtttaccgaaatttttgaaaaccgattataaaataaatagagcttaaggaatcaacaaaataaaagagaagaagaacaagatttttacatggttatgacattacaaagtcttagttcacgagtcaatattattagcttgaaaagcttttatgttttacacaagaataatgttcttactcgagcttaagaaccataatttcagtcttagcttttgaattatgattttacaaccctttgcatgaagatataatctcctatttataggctagggtttatactgttaaggttttcgtatgaaactagacccactgaagggtaaatacaattaatattgactttgggctgaattaggaaagacttgattcgtaagataacgatcatctacaattgtagggtccatttaatgttgacagttgttgtgtgctgccacattcatacaataaatgtcaaagg

SEQ ID NO: 178267 - DNA, 503 bp, Cannabis indica
tttcctctttgaataatttgttaattattcatttcctttaatattattttttttgataaaaatacatttttctacaatttcaaggtttttattataaattgaaaatatattttcattaactttttaaaattaattgggtagtcgaatgtgcaaaatttaaaaattttaaaaattcactgctacaatagtttagggtttagtaaaatttgggaatttttgtccatcatttttatttatatatatatatttaacaatgatttttttaaatatttgttatatttgtcacaattatccgtaatttatatttgtattattttaacatgaagagttaacagtgttcatttttaaaaatgtgattcaaatcgtccattgtatgcgtgcctattctattttaaacacatgcaacaacatattttactttacttttgtcaccataattattaattctaaattttcgtaaaaacggtcagagtggctattacagctacatatacaatgtcata

SEQ ID NO: 178268 - DNA, 603 bp, Cannabis indica
ccaaaaatatttgaaataattttccaagatctccaaaaaactccaaaacaccttcctattgccttgaataaattcttttaaaattgctttgactttttcaacccagttttgacttttcttagattgtaagcaacttatgctgctgagattgtcatagctaggatgaagagaagtagaagatttcttgataagtatgacccccatatgactcaattcattagagctaagataaatgtgcttaagtctaagaacttagacaaggcccgtggtggaaaggtgatggcaactgagcttctcaaaactgccattgagagtgatgatctaagagatcgagccttcaagctaaggcctcttatgtttagaactcttactgaacatcaagcttaattgatacagtatgattactatctccctgaaactgttgtctggaagccacaatacggtggtcctaatggctcctagaacacttgttgtagtgcctagtcaagattccacatgaatgcgggtgctacttgcccttgcatatgcatggttcatatccgtagataatttctttggtgtctacccttaccagatatatccaaatggctataggattctagc

SEQ ID NO: 178269 - DNA, 752 bp, Cannabis indica
aggtgagatgaagaagcaacttctgataaggaacagatcggagaacatcaaggtactttcatccatctcagtttacaatcgccaatgttctggaacatcttggaaaaaatggagttcgggaggttagaatacaagtctgcaacttcaccgccacaaagaagacagaacacttttgtgttcgtggcgatttaggaagcttagctgtgtactgatagatagatagataggttgaagcggagtggaagatactttggcaatttggagagttgtttttttttttttttcattataattattattatttttaataacaagacatacatattttgcatagatagaaagtggacaggaaaaaattgttacattggtggctcattctttttttttccatgcagtgctctcgaaggattgggttgaatagaattcagtagtttgagtaactgccatgaggttacttgaagtttcatctgaaaattttcttgaacgagtgaatgagtttttctggaacaaatgaagcttctttttttttttgtgttccaaaatgctcaggcctaatgtgaatgtttattttttggtctccatcatcgggttacatgtgttggaaatgataaaattagcattagtcagttcatttctttttgtagcttttttcattggaaatttcacgtataactctcgtagcaactaacggagaaatttaaattcacataatctattatgtagaaatcactagtaaaattatttttctcgag

SEQ ID NO: 178270 - DNA, 658 bp, Cannabis indica
aataattgttatcattattacaagctggacttttgtagccatggtgtcgagcaacgcagaatctgcacaaaattcttcaatgattacactcgttgagccataaaataatatctcaagctaaactaaactaaaccaacttaatatatttatttcaaaaaaaaaaaaaaaaaaaaaaaaaaaaaaaccaacctaatatatgaaatgattgatccttattagcttaagaatagataataaaaaattaattatatgcattggattcttgtacgtagtaaattaactaacctttttgagatttacactatatactctatactataaattatgagtgagtgagtgaatgtgtatgtgtgtgtggttaaattaaaagcagaaaaaagaatgagatatcagtatatagataaaatgacatcatattccagcatccttgtaatgtacacacaactttttcaaagcaaaaagtagaaaatattatttaatactcaacaaaagctttgttttgtggtgatgaaatgatgatcttgttattttatattcaggaaatgaaaagtgggtttgaactaaagtactgaattaaaatgcagaaaatgggttgaaaacaacacaaggagttgggctgtcatattcggtggtggttgagacttgagagagagagaga

SEQ ID NO: 178271 - DNA, 726 bp, Cannabis indica
ttttttattatgactaaaagtcatatttagtcacaaaaaatttatgttgtaactaaaagattgttactaaaaatagctatttttgttagaatttaggataaggtgaatgaggttctatctcaaaaccaattgacaataggaggagtagctcattcatcttatatattctattatttttccaaacattagcaatgtcagactctctaacaatttttgtagtacatcttcttaatattatatatattttttttaaaaataaaattatgtttctttgaaaaaaaattggaaggagaggaaaaataaaagaaagaataaataatgtaaaatgaatcaagtgaaattaaaagcgtccacgactcaacttatcttaatttcattaaaagttaaagatctaagtaatcatgaagtcaaacaagaaaaatgaaaaatgaaagatctaacaatctcaatagtttaagaaaaaaatttaacggtaaaaaagttcaaagaacatgctttagtacatgtcaaagttcagagaaaaaaaaatcttaattaatttcaaaaaatttgtgcccttatattaagaaacctttgattatatatataaaaatatatatatatatatatatatatatattatgtggttgaattataagtctataagatatggttagtttaatattgactaaaagtttagaaattaagtgttacacttacaacactacacaatattaattatctgcc

SEQ ID NO: 178272 - DNA, 788 bp, Cannabis indica
ttactgtattaattgtttgcactggtagatagcatattaacttggtatgtccaaccactactactcggtcaaaattataagatcccacagtacatagttcataattatgtcatttctattcttcatatgggatctcctaagctgatgtactgatttaacttattaacaagctaaatatttatttctgatagatatccaattatagcattccttacatccatccactaatatatactaatctcgatgccttataaatctttacttattaacatattccttcctcttgataatttctagaatgactgttgattctgcatcctaatacgaattttttcaacgtgctttgtcatcactcgtactttttatgttatgacttcccgaaagatttctcatcttgagattactctaagttaagtatgattaactccaagataagctcatgatgggttatcgaaaagtagatgcatcattgtcgttcctaattgcatttcctactttcatcccttcatcagttaaatctaattttcatcattccttttattgacctcttataattctttatcggtattgttcacttaaccttgaggagttcgtatcttaatgttaacttgaatcttgtcaatctcagcttattttgacatgtaccaattctcttgaactggtacaactttcaaatttccgtatcatttacacataactaccgttatagagttaactgattcaacgcatatgataaaagcaaatactactcatactgagtatacatagctaaattgggaatattcatt

SEQ ID NO: 178273 - DNA, 858 bp, Cannabis indica
atccgagctgccacgtgtcactatcggattggttgcatgtggacacgtggcaagtggagaaaggtggtgttggctgaatttgatgtgctattggacacgtggcacgctgagaagagaagctgaaaattgctttttcagcttgtggtccatgcgaagcaaacgaagctcagccgcacggcctgggcgtgtggcgcacgcacggagcaggtggggaggtgagagccacgctcgcgtggggagtgtgagcggacaaggagctgatgctcctttttcttgtacagccgatcgaatgggagcctgccacgtggtgggtttgtctctttgatgaagctagttttcgggcctaagttgggcctattcgttttagggtttaaatttgatcttacaaaaatgcttatttttcaataggttttgggcctcatttttatcatctttttatttcttttccactctttttctcaatcaaacacaaacaaaattaaatcccaaacaaaatattttcaacataaaaatatattgtattaatttcatgaaaatattataaagaattaattttattttgtatttttacactataaaatatgtagtattttagcatttaacacaacccccaactagcttattgctagtccctagcaattcaagcggataacaaaatattaccaagatgaacaaatcaaaacaaactctgactaatcgaaacaaaataaaatattggtgtaactctagaaaatactatataaaaaattacaatagatataattccagattttgtgtgtgtgcttcaaatcatattatttgctttaattcataacacagataatatcaaaaaaaatctttaaagtaaaaagtatcaac

SEQ ID NO: 178274 - DNA, 1114 bp, Cannabis indica
acgggtttttccgaccagtgggtggcgttgccgatgctcctcccggcggtggcattttgcatccttaagtactaattaataatgattaatatcatcaaaatataatggctattagtgagttagggtttgtgtgtgagtttattgtttttctacgttagggcatgtttgtaagttttttttaagtgttttgtatctctttgaatagtacttattatttgatatcatcagcaatattatatatttatatatatatgtttccttttcttttaattaattaatcattgtcattaatggcttaatgttatatggtttatctctcttttcttagctttattttatgtcagattcaacatcttattaaatattattatggatcatatggacaacaattttatatatagagatgaaaattaaaaagttcaaattccaagcttattgtatattttagcagcaatttactaatatttagaacatatatatattgataaatagtgagtttagcattctcctatgttatatatcatcacttcataatatactaactaaaagaatagataatattaaaagctgctataacatttttataacaatattgttattattctaattaagtattagatcttaatataataatttttaaaaatatcaatcacaagataataacatgttttgaattagacaccattgatactcaataaaaatactcataaaaaaataacgaaaaatagtaattaaaaggcaattaacttcttgaataattgatcatatataagcttgatcttcaaaagttacaacctaattaattaagatattatattaggatgagtacatattattgaaagaaaaaatacaccaaattttcaatgacatttggttggcaaattacacacatgacacgtacgtagtacatatactactatacgtacttaattattaataatgtcacgtgcgttataataaaccctacctactaccgccgccgctgccgccaccgccacctccaccgccgccacctttagcacttttgctaccacctcttcctcctcctccgttattaccaccgccaccatacccgaaaccttcgccatatccacctccattaccaccaccacct

SEQ ID NO: 178275 - DNA, 600 bp, Cannabis indica
gaagatgctcaggtggtgaggtttgggccgtggtggaaggaagagggtggcaatggctgggaagaaagggaatggtggtgggtggtggatggcggctaagtttagggcattgagagagagcacgagaagaatagatagaatttttttagaaaattagggttttttatttttattcttttttttatgattttagattaatttattgtaaattttatttatttttatatatttatttaaacgggccaataaaattattccatgtgtaactatgactacgtagacaataccgtgtgtacacatggacatgcccacatggcacataacagccaaatttggatgaaaatgtaaatattgctaacagaattatagttttgggggttttgtcgctaaaatttgaattttgggggtaaagtgcaagcaaagtgaaagtattgggggttttggcgcaattaacccattattaattgatttttataggagtttttacaaaaatactagattttaggtgaaagtttataattttactatcacggaaaaaaatttttacaaaaatattttttttatataaaataactgtaaaacaataaaacagaataatta

SEQ ID NO: 178276 - DNA, 707 bp, Cannabis indica
aataagtattttttaactcaaaaatatccattaaaaaaagagcaagaaacaaaaacattcgtttagaaaaatacccaaaaatctaaaaaccaaattttgttctctcataatcttccatttccatacattgatttaaaacctgagcttggtgaaaaaccatcggttctttccagttttgaacctctcctcgaaacgcttcttcgcctccttcaaagccgtgaccttcttatccttggattgaagaacatcaacgttaacaacatccttgagatcaacatcgagtgtgtaacgagtcggcatcaagtgctggtagttaacgagcttcacgaaggctttcactcgtgacttcttagcggttttcttagctgaatctttacggataaccttgcttgggtacttgttgattccggcgaccaaacagtgtccgtagggacgatcgcgagttccgtcgtcgaagttacggatgatgacggctttgcgtccagcgtaacgtccttggaggacgattacggccttgttttgcttcaagaatttcaccattttcgctctgtgcctctctcttctgttctctctctctctctctagtagtttgggaccaaaaaccctagtgtgttgtttatatagctgtacgaaaccctagtctttggttgtgttgttatttggtagtttgggtctttagaagtcgggccctagtttaaaggaaaaat

SEQ ID NO: 178277 - DNA, 986 bp, Cannabis indica
aaatgaagttagtttttttgttttgtttttttttttttttttataaaaaaaaggtctcgtttggtatataaatataaattaccatatttcaaacaattaaatacccaactaactggatcaaggtaaataattttgatatttacgttatgacacctaaatttcataacaagttgaatatcgtagttgagagatttgaataccaattatcacgtgctaagatttttcaaagcaaaagttaagtaaatccaaggaagtaaaaccaaacaacacaaacaaacatgtgcaatattagtagtgtagctatagtgtcacttatgggactctctctataaaatcaaaacagagattcaagtcattcttcaaaataaaaacacataataaactgatctcaaagctttgccaagagccatgcaagtactacaagtttcatggcaggccttaagtggcttccaaagcccaaaaaatctccaactgagaagcccatcaccaaagcccagattccgagtctccgccgtggccttaccaccaccaccgatgtcgccggatatagaagaagttttcaagtcactagagagctgggccacccaatcaattatcccactgctaaagccggtggaggaatcttggcagccccaagatttgttaccaagcccaacctataataatgtcgaggaagaattcttcgatcagatccgttcgattcaagatcgtgcggctgagattccagatgagtactttgtgtcttggttggagatatgatcacggaggaagcattgcctacataccagaccattatgaattctattgatgccattaaggataagactggagtttgctccagtccatgggctcggtggacccgcgcatggtccgccgaggagaatcgccatggtgacttgcttcgtacctatttatatttaacggggtcgggtcgatatgaccatggttgaacgtctatccaacgcttgattggagctggcatgggt

SEQ ID NO: 178278 - DNA, 743 bp, Cannabis indica
caattaatcctaaattctgacggtgcttttcgaatgaagttactgccaaaggaaaaggaaaaccatccctcatgcattaagtccctataaatagtgacctagcctcactatgaaagggatcgagagaattgttgtagaaatatactctagagagaaaattactcagagatcaattataagagctttcaggaggaagaagactttgttccttctcttaagtcaatacaatactagtggagtaggctattaccacacttacagggccgaacctctttaaaatttggtgttcactttactttattgttttcgttttcttttaattacattacttaattgatttattatttgactcactgtccttagctaaaagcgaggtcaacaggcatgttaataaagagaactttattcatatcagcccttgtcatatattaacaatttaacattcacacacacatcaaatgtttaactctttctctaatatcagaaatatctttattggctttttagaacataaatcctaacaactttttctcgtaatctttaacagtttgtgagaatttttataaccttgttaacactgatatcaataaagatatggtagttgttgttctgaccattgcacatggctcgaactcgttaaacttgtgtatttttttctgtttattgcttattcattctaaaacttgagatctcttatttatttgttctttgatttgtgtttgagtgtttgtttagtatttatg

SEQ ID NO: 178279 - DNA, 788 bp, Cannabis indica
acccaaactcaatttctcttatttttatttatttttttctgtacctcttttttttgtacctctcaatctttctctcttttaatctcgaaatctcctcttgaaacttgatttattcattatgctcaaaatgataagagttggtggtatatatatataagttcaggatatagatccgataaagtcagttgatgcaagtgctaatttattgttaagctagttaggacttaacaaacttctctggtcgagatcgatcatgtcagcataagtcaaagttttttcggatgagatatactcttccgagactaaggatcgaagcgcacactaaaggatttctctgattggaaaggtgtcagctggagtcgactatccgagaatcctttccaagagggagcagttgtccatccagaactcctttctggagaaaggctagcttttcttggaaacttcttcttgatggacaagataacctttcgagaaaactcttcaggagacaactaattttcatgaagacaaatatctttcagagacctttattatttgaaagaaattataccacaggactaattaacactgtgtttaatatgacttaattaatataattcagtcatatacattttgattggtgtatttgttattattacaaaatttagaaaatgtatgttgggcgcaccaatactataatttcactaaatgcactgtatgaaattaattgtaacgcatgcaatgacttgaaaacctacaaaatgcccgtataaatatcgaaacaagcatgcacgtaataatttttt

SEQ ID NO: 178280 - DNA, 670 bp, Cannabis indica
ttagggggcaaaattaatattgtcgaaaattcaagggtaaaatgtgctaattattcaaaaaaaaaaaaaaaaaaagttaacaaataaagttgggtcacaattttttcataaatgtagctaatggcaggggacaaaagtgtatcaatgaaaatcataaaaaacaaaagtaaaaaaaaaaaaatgtccataatgagagagagaacgagaggaattatttttaagcatttgagatccttgtagcctactctaagcttttgaattaaaaactgtacaacaacattagctatagttttgtttttccaattgttctattgatttttgttccctattaaaaaacaaattaagatgccaaagcaaaaagattaggtttcaatatcttaaaagtgatttcgattcctcagttcatggattttggaaaatcatagacattgagtgatgattctcgtatctcaattctttaatttgtaatcaaaagaaaaaatcaacaaactgatcatggcttttctataactatatttttttataaatttataataatcaataaccttataataataaattagaaagaagtcaagataaaccttcgcaacccttttcatcagcaaatggatagtgaattggaaatgtcattttatattgtaaaatattttttattttcaacctaacatgg

SEQ ID NO: 178281 - DNA, 747 bp, Cannabis indica
aagatcacatctctacttacaaaattcttttggtgattaccttcttcaatgctccatactttgtaaccttttactccttctagatatcccaggaagatgcactttcttgccctgggatccagcttcccttctttgacatgagcatacacaaggcaaccaaatattctaagatgatcatacctttcgtggcttgcctttccacacctcaacaggtgttttgaattcaattgcagatgatggacatctgttgatcaaataataagctgtaaaagctatttctgcccagaaagattttggcaaaccagcatagattaacatgcatctaactctttcaagtatggttctgttcattctctcagtaagtccattttgctgagggtttctgggcattgttagatgcttgccaatcccaactagtttgcaggtattctttgaactcatctgcacaaaactcaagcccattatttgtcctcaacttctttactttcttaccagtttgagtttctaacacagttctcagttctttaaatttgctcaatgactcatttttatttttcagtatgaaaatccaatcatatctagaaaaatcatcaatgaatataaaaaaaaacctggcccctcctcttgattttgttctagatggcccccacaaatctgagtgtagatagtcaacaattcccttggtagtatgcttcccaattccaaacttgactttggtagctttccaaagtatgcattgctcacaca

SEQ ID NO: 178282 - DNA, 710 bp, Cannabis indica
tttttttttttttgaatggaacagtagaaaaaataattaaaaaaaggataaaaatgacatttattttaaaataaatgagattgacaatccccaccaacctcataggactcatgggattagaaatcccattgttcaatctcaaattaatgtgtgacccatatattttattctcattccttatcaaaattgaaaagtaaacaatactttttgtggggatttgaaccattgccattaaacaactctacttcatcttctcgtctataatttaattatccttcacgatggaaatgccctcttcccccaactcaactaagggcaagcacctactcctaataaaatgaaaagcagggagctccacaacaaaagcgaagcgcgctagtagaccacatctgtttttcagctggcgtcaaattaaagcttgactaataggtacaatgttaggttttatgccctaaataaaactctatttcaatgtaatctattttattcaacatcaataaagaaacagaagtatttttcattcatttgtgtatgttttggttcaccttatcaattgcttgtctatttgatttataaattcatcttaaaccctttttcacatacttgatcatgtttattgtgctgtcatcacattggaaagtaaacatgactatgtgaataaagtttcctagatttatcagacacagggttttactgatatgataatctac

SEQ ID NO: 178283 - DNA, 667 bp, Cannabis indica
atctaagttagtgtgggtatttggatttccaaactctctttaactatcttagatggatttactgtttttataaaatgagttaattataggtttcgggaccagtactcatcattaattgtgatacattaattatcagaatagtttaacaattaaatcagataactaaaatattggataattaaataataaccataattaaatatattattaaacaattaattatattttataaatcaaattattaatttattacattatattaaaatattttaacattttctcttttattattgtatataaaatattataacattctccgatttggtcggtatttaaattaatttaccacttaatttttttaatgattatccttgctatataacaaatatatgaatcatgatgatatattttcattatatatattatcttccatttattacgataaatgtattacataataatgtacttaatgtgacaatgtacttgagcaaataaactttaaatcttatgtttattctggtcatctgaagataattttctcagataaaattaaagtacacatgaatatgagaaaatatcgaaattagagtttcattgaatattttagttgtacaacaaaaaacctgtatacgaaaagattgaatctcatctttattttatgatcctt

SEQ ID NO: 178284 - DNA, 596 bp, Cannabis indica
aaagtagctatttttttgtagtaaattaaagctatcgaaaaagaaaaaaaaagaaacttgtagtatatttgcagggttggccctgaatttttttaaacctaagaacattttaataaaataaagaaaaaatgagtccattaccttagaagcaacatgttcttctttttcattgctttaaagtcctttctcttttgttgtatcaaaattgactaataagtgaattgggggtatgtagcaagtgggattgacaaatagagggtgtcattggattgggcctaccccgttttagcccatagtcaatcttgtgtatatatatgttgtgtcttacattgttaatttttcaaaattatataaatctttagctaccaagccttaatcccatatagaagtttagtaattgggtaaacacaatattattcatccacatctcatatatatatatatatgctaaattttatttaaacaaataatggtactatatcctagcattgagcatagagcagtagtaaaccctaagcaagaaagactctctattgccacatttctaatacaaagttagattgtgatataggcccagcctcaagcttgattactct

SEQ ID NO: 178285 - DNA, 511 bp, Cannabis indica
gtgaaaaagatttcaagaaatttcaaaggaggaaattttcaattaaataggaaagtattttgaaatttttgaggtcttagaaaaaagaattcaaggatttttatgagtttgagaatcattgaagcaagatgaagatgaaaggaagaaaattttcaacaagaaaagacaccgatcaaaaaaaatattttctaccttgaggctgaagaacacttgaacgattgatgaagatgaaaccccaagaagctttttaaaggctcgggcatggaagactaggatgggaagagttaaatttttgattaaaaactctcttatttatagatgagttcaatctcgtaattatagagcaattgagagtcttttaaatttaatgttttaaagaaagaggtaaatgatcagaaaaaaagataaaaatttatcctttcccttctcattgaagcatgaatttcaaaattcttatggaaatatgactatgaatttgaatttaaaaggcaacatccattcctaatgctac

SEQ ID NO: 178286 - DNA, 803 bp, Cannabis indica
ataattcttttaatttgatgtttttaatatttaccattttttttaaaatttattatgtttaccaatttttcattcattctaccaattttagcctatatcacttcacaataattttcattcttaatcaaaattttgtcccaactttctcacaaacctacacatccatctataaagaacaggctgttcatccgatccaatccgcacttttttagtcaaacaacatccaatccgcactaagtgcggattttattttttggatccaatccaatccgcacaatagctcaaatctaatccaatctaatccgcaaaagtgcggattggatcggttactttagattggttactttttaatattaaattatttaatatttatgaaaaaaatattttttttttcacataactagcaacaaaataaaacaaattatagttattttatgtctccaacaacacattaaataaataaaataacaaataaaaaattagaagaagaaaaaaattgtatatataaaaaaatatttaattttattttaaattgtatgtagaaaaaaataaataagaatagaatatacattttatctattaaattttgcaatataattgtattatatgtattagacttttaaattactattttctttatattaaaatgttatttgtatatataattttttaattttgttataaatatgtgtggattggattggaatcggttacttttacatgtcaatcaacatccaatccgcacaagtgcggattttaaatttcccaatctaatccaatccgcacaagtgcggatatccgca

SEQ ID NO: 178287 - DNA, 815 bp, Cannabis indica
tagaaggacgcaaaaaagtattacccagtgtctacttaggacgcaaaaagttacctttagacaaagctacatagaaggattgtttatattatgagataagaaccatagtcaacattaactatttataaataaatacaaaaagtagctatagcagttatttattattatctcatctgatgtaaatatgaaacgtaaagattgtccacatttcatgaacggttacagggataagatcccaaaggaatacctatcactctaaaaatcctataaatagggacagaacctaagggacaaaggagggccaatttgagaaaaagagagaattattcaaacattttcttgtgtacgatttataaaatcccataataagatggtactcgtggagtatgaagaattaacttcaaaactgcgttaaaaccattcttgccattaattattattatttttaattatttatgcttgagtttgtttattgatatattcgtttccccccccccccacccaaaaaaaacttaccatgcggaaaagttcctttttattttaaaccttttgttagtacataattgtgccagcaaaagttttgaaaaaccttcaaacgattcccacaaaaggcggttggggatatgagctttccgagtgcaattcaaaaatattgtaatgaaaggaacataggagtttgtcgctaggtatttgaccaaataggatcgtccagttcctatagaacctatcactaaaatacaactagagagtgatagggctaagaggagtgaaaaaggttttccatgatatgagaaatgaaaactacttagccccat

SEQ ID NO: 178288 - DNA, 561 bp, Cannabis indica
attgtatgtcatcaaatatattaattgtttaattgagtaactcatgtcctctaatagtctaattaatattaaggtttataagtttttcaaacttttaatcttcccatcatagaatcatcatatataattaacaaaatagaatcaaaatttaaaaaaatcagaatatatatatacatataaaagaaaggaaatttccacatggtcaaacaatagtatatatatgtgagtgaagaatttgcataattgtcatttctaactaaattcaagtaagtgtttgttaaaatactttaatttatctttcttttttcttttttgtccacaaatttgcctttagaagttatttagatttgtattgcactaatatatattatagttttatatattaaataaaaattattgtattgctcacaaaaatattttttagtgtgtgtaatttgtgtatatttttattccttgtttaaaaaatgttcttcaatattataacattattaggacattcttatgtccacaaggggttgaaaattttggaaagcttttgtctcaacagcaccaaaccaaatg

SEQ ID NO: 178289 - DNA, 700 bp, Cannabis indica
gtcaaggacggttcaagaatcttgagcaagattagatttttgaccactatgactctgcatgatttgaggttgacaagttctctggcataaataattttggactatggaagattagaagagaaagacacataaggatattcttatctcaaagaagttatatataaaaagtcttggtttgctgtcaagtggatcataaggtacctcaaaggtacaatggacttggaatttgtgtattatgcaacaataataatgaagttattgaagtcattgtaggtttgttgattaattagattatgctgaaagcattgacactaggaggtccattacaggctatgcattcactgttatgggtggatgtgtgagttagaaatccaatcttcaaaagatggtttctctatcctcaatagcaactgagtatatggcaacaacagaagaaatcaaaaaggtgattttaagagggttcacaactaaattagagttcaattctgaagacattgcagtgcattgtgacaaccaaagtgtactacactcgatgaagaatcctatgtttcaaggtcaaaatatatagacattaagctacatttcatcagagatgtaatagccaaaatagaagttaaagtaaaaaaatattgggaccgaagagaacctaacaaacatgctaacaaagtatgttcttctagcaaagtttagactttgtcta

SEQ ID NO: 178290 - DNA, 685 bp, Cannabis indica
aaatgtataaaagcctgcctatgtttaagatactatatccattaattatgttatattattaattatacagagtatatcacatatgagggcggtccaagaaaaaatggagagtaaagaaataatagaattatgagactttaaataattaaaggacattttgtacattatgtcaaaaaaaaaaaaaaaaaagaataataataataataacattttgtacttatattaactatagtttgaattggcttagtggcgcctaatagcactactaccgaagtgcttaccgtcaataatacaattatatattagtattgttaactttttatattataatatgaagtaatttattttttgggggcttcaattgggccagggtcctaaacacaattctactctgattttccttaaactcagctcaatcacacataaatatatatgtatacagtggaatctctatctaataataaacttatagggatatgattttgtcccgtgatgtacttttacggaatgtaatccgtggtacattaaataaatctcaaggtacattaaatgagtatcagggtacgtttctactttataaccctaattacccctagatcaatctcagccgtcagatcaaataactctctcatctgacggctgtcatacatcacggatacaatccgtgaaagtacaataacaggac

SEQ ID NO: 178291 - DNA, 597 bp, Cannabis indica
atcgggcaagcatcaggaccgggccgcacaacttatttctttcaattcgtggctttgctcatgataatttatcgaccattgactattgatttgggatacatagaactatgtttcttgagttgttttgttctcccaaatctagatttcatgagcaataatgtgaaactcacatgaatatgtattttgaggagatagatagatagagtagtgattagaggtaaagtttatacccctatctaccatataactacaagaaagtacttcacaaaggttattaggttacaaaaggagagtgtagctggatgaaaatgacatctcagtaagagttacataaatgcatgcatatgcatgcctctggttatggaaaggagaagatttgccatccaaaaaatatgtaactccataatagaaaaaggggtcattggtaccacatctacaaccatgaagtggctattgttttttggtagttggagttgttgaattatatatgcacccatcccaatggaaatattatcactatgccatggcccattttgagctgaggttgctatgatatacctacatctattacctaaaccataaattggtgaagaaaaa

SEQ ID NO: 178292 - DNA, 588 bp, Cannabis indica
tatgacaaacaaacaagaatttccggcaagttattcattaccattaaaaaagatccaatgggttagtgttttttattttggtttaggtatttgattggattagagttataagattgcttcaaggtacaattaatattggtaatttgttaatgtgagctgaagtttggtgaaaacgtgagagactactatattaggggtatatatgtgtctagtactactaagaaaaagggacgttccttgtgattgggaagatatatagctagctagaccaaattaaatatataaatattatttttaatacaaaatataatcatatataatagcttcacaccaaattacacatcatagtaatctatattatataatgtgacattataatctttgttgacttagttgaaaagaggtatagaatccttttcttcttttgttttggttttatgtatgtacatatatatatgtgtatatataaatatgtagcacaattaactgtagtaactagctaggggcctgtttgttggccgaatatattgaccataaaagcaaaatcagggattctgatctacttctcttatcttatatatatatact

SEQ ID NO: 178293 - DNA, 1023 bp, Cannabis indica
cagctacaaatcgaatcaatatgatactaacacagataaaaacaaaaaaggtagaaatttttaacagtaaaacctaaaaaaaaaatcagggatttaaggataagttgaaaagtgacctcagatgagggaaaatctgagcattgagaaccgagaggatcgtaattagggcaacatgggtgtagacagggaggaagaagaagaagatgtatttgtagggttttcaggcgaaggtggaaaatggaatcagatttttttttttttttagtaaataaaaaaaataaataattggaggtggtgatttctaatttccttttcgtgattttacgttatgtttaatttttaatttgaccttggactctatttgttttgattaaatttatttactatttaccaatttttttattacaactttttaattaatactcgtacttaaaaaaaaatatatttcgatgtttaaaaaaatatatatatttcaaaatattattttatggtggtattttttttttaaattaaaaatatatgtaattttaaaaaaattaattaaaaaattataattaacagtcttatttatttttaaacaattatttatttattttgaaatggtttaaatttatttatttatttatatattttgtttggttggaaaaaaagataaaaaagtaaaaaggaagaagataattggagtggaatggtgtgggaggattgggccacctcattcatcactacaccagaacagttagatatttttattacattttgatattataatttcattattattattattattgttaaggccaaaaccgttagaattaataaattaaatataaaagcaatttaaggataagttaaattatttggaaaaaacgttaaacttttttttttaaaaaaaaaaaattaagactaaaattttaagatggagcaaccaacaaaataaatgcatccgtagatcttcattatgtttttgtccgaacaattgacaattttttttttaaaaaaataaaaatatatatatggtaggta

SEQ ID NO: 178294 - DNA, 516 bp, Cannabis indica
aattgtctcaaaagaagaaaataatttcaattgtagagttaaagctctatactttcaccaaaatatatataagcagcaacaaagaatattgttgaacaatttaaatgtttatatattattaagtaacaagtaatggtaaatatcagggtcaactcaagggtaaggtagtaaagacctacggccatcaaagtctaaaaaaatctttttttataaaaaggtcttattttttttttataaataccaaattttgtacttttactattttatattgaaaaatataattattttctaaaaaacaaaagacttaatttattttttaagatgcagaaaaaaaaactcaattatttttttaaaatattataattttaaatttttactactatatataaaaaaaaaaaacaatataaagtttttcatataaaaaaattacaattatgtttttttgtttcaagatctctaattagcttgagacaggcataattatcccaattagtaaattaccttgatagatcatat

SEQ ID NO: 178295 - DNA, 815 bp, Cannabis indica
acttaaaaatgaatataaatgctaacaagaatgaatatgagcaaaatgatattaatatgtgtaaccaaaacatacactaaatctatatatactattcacaatattatttacaaataaaaactaactatattaaaattaatcaatgcatttataatattcacatattattatttctgtataattatcaaattaggcctactacttacccaaattatgccaatgccaagccatcaaactgccttaaatcatttttattattattatcattattattttaaaatatatataaatatataaaaagaagggggtacagtgaggcatagggcgcacgttagcattgaagcataacgaaaatgtatggggcgtgcgcacctctgacaattgtgcttacttaccagtaccactactaagcttgcgatgaatttcagtactactgcgactcttcaacaacgccgtattcttctcttcagaccactttgctccgccattaatggaccttccctccaaagctttaaaaaaaaaggatcagaatcagaaattattaattaccacaaaaatataaataataacaaacgaaggatctgaaagaaaagtaaaatggtttggtacaattattaccaggtagaaacgtgaagagtaatagtaatagggtggagatgaaggctaccgaggcggctgaaatcctgagtcgtggaagtaggttctgagttgatgaaaacatttttcatatataactgatcggtaatggagaaagataataatgatatggtgaaaatggtgaagatggtgatatctttctttctcagtctctgtat

SEQ ID NO: 178296 - DNA, 802 bp, Cannabis indica
taaaaaggtagggaaagactgttacgatactgatgtgacagaataacagcaacaaagtgacaacccctaaacaatcaaccaaggaatcaccttcacagcagaagtacgaccgcacagttggcatgttgcagtctaggtggaactctctcaacaatgttctcagcttcacgggcatctgctgccttatatctagaaagggcatccagtataaaaaacttgaccccacctgcgacaattatcatttcaagttaaacaaaaaaacaataaataaataaagcaatctcaaaggaataacactaacagcaggcattggatgcaaactcaaacacaaaaataatatcaaaagcttaatacacccacacaaaaggcctattgattctgtgatattacaggtatttccgatgaaaaataaattaataaacatatacaagtaacaaaggagagaaacaaaactcactccgtgcattcatttaaagcagtaagcagctttgagagagtgtgactagtgatctcaaaaattggtctattactgttctcttgaatttcagcaagagcagccacagcatttgctacaaccattgggttgttgtcagatatcaaatccttgagagaatcaagaaaacctctatcctcaaccagctcagcatttatgtcatatagtttggcaacacatatggctgctgtcttgcgaacataaggatcatcatcctgtcaagaaatgaaattaatcagtaccaaaaacgagctgcaagaaaaaggaaacgctggcaaaatgactaatatactaaaaataaaataaaaa

SEQ ID NO: 178297 - DNA, 827 bp, Cannabis indica
atattggagtatttataaaagtgagaatactaaatatgatgtggaaaatgataaaataaaacattatatttttagataatgtgtaaatttttagcatatttattaaaaaataccaccattagagatgctctaatacccttttaataagagcattgttattaggcaccagtggtgcctaacaccttctcgatatgtcgcgttgtaattggctagcgatacttcctaaaagctattatattaaattatataagacccgatacttagtttaaccaataacgatattaacaaatacaaaggtagtggcctttagcatttctcttctaaccattctcccaataatagtcattattataaacttagagggtagaagtagaccatgaatatacacagcaaatttcccttcataggattctagcttataggcagcaattccaaggctaaggtttctgcactaattaaaaataataataataatgattataacaaacaataaactgtttcattaaacaattaattaatccttacatacataacatgctaatctgcatccattgtagctactctacaatgcagtctctttttgctagagttttttttttttttttttttagcttctctacccaagaaataagaatatgagtcagtcccccaaaaaacccaattttctatttaataataatataaaattattattattttttttttaaaaaaaagaggaatattggtaaacaaaccattactacttggaaaggaagatgaggcagagaagcaatctcaagttgacaagtgattgagctgagctctctgcctttgttgcctgcatgtgc

SEQ ID NO: 178298 - DNA, 761 bp, Cannabis indica
ttaaggttctttactattgcaagttgaacattaagagtttgtctggaataatttaattaatttttggagcatttactgtggaattagatgagcattctatatatttgctgatgcaggcccagagcaatacttgatattatcaaatcaggagaggattttaggatttccactactacaaaaatgccagagcaggggacatgtgaacgctgcggttacatttcaagccaggtatgtttattccagtccagcatctgcatcaaacagtgatggaatctgcaaaagtaccttaatgagttagacatataatttggcgttgtagcaatcacgtgttgatgcttttgtgacaaacttaaatatttttgttcttaaaataagtgcctgcttagtctcagtgtgatactgtcatcatctctattagcacataaatttgtggcagcctcttgatcacttactgttacaggaggttggaatctgtgtgcgatttcgatgtttagttttactaaataggaaactatatgctcatgtcttgttgtaatatatatggtttcgtaaatagtcattcttgatcttcaaaaaaaaagatacttttaaaccttctgtccatctgtatagttcttgctaacataaaatcaggaatagtaatttcattgttgagtagttcttgaatttcttctggaaagagtaatagggtatgagatttaatacttgttgacctttcctgattcagtggaagtagtagtgggtgtattaaatttagctta

SEQ ID NO: 178299 - DNA, 629 bp, Cannabis indica
tggcattcctttttgtcgcagcatggacaaagcaacataattataataatactttaagttaattttatttttatttaacagaagacgaaattataaattttatggcttcttaattatactgtatgtgctaaaatataactttttttttaatgagtgtttttatagaaaaatggtaattctagaagagaagaagagaataagaagagaaaaatcgtagatgtacaatagcaaaaacccaatcgtatttttttggatttaatggaatttattttatttattttaatatatataaataaaaaatgacccatgaatttctcaataactattttatttttaatataaagaaaaagtcacctatgaatttcttataaaccaagaattcggttatataggcacactttatataaaatagatataagaaaatatttaagtaatatcacgagaaactgtttatataaatatttttttattatgtgttatattattaattaattaattttttttatatatattttttattttttaaaaataatttagtgatttctaataaaaaaattactaacatttaatattgtggaccattaagactcatttactaaaaatatcttaaaaatggggtgttttacacg

SEQ ID NO: 178300 - DNA, 641 bp, Cannabis indica
ggaatttattttatcaatggacactacagtaaaactcaataaatataattctataattactaagagttcaattctatgtttatagttgagtaatcatggaactaataagggtaaattctattttggaccctgtgttttgtaaaagttacagattggaccctctgttttgttaaatgacaaaatgaaccctatattttttaaaatggtacaaataggatcctgagttcagtttttgacaatttttttgatataatcaacttgaagacaattcctaacacgaacagatgtagaaaatttaaccagttttgtcataacacctctaggattattattaagtttaatttcacaaaaaatcaagttatggtcctatttgtattattttagaaaatacagtcttttttattatttaacaaaacagaaggtccaatctataacttttacaaaatactgggtccaaaataatatttataaataatttatttttcatattaattaattaaataaattaagaaaaataaataaaaatagtcacgacaaaatctctctcaatggcgaccatagtcgcctctaggctgcacacaactcacctctcctctttgtaacctcgtgaccccaaaacgcttgggagaaataggacacac

SEQ ID NO: 178301 - DNA, 759 bp, Cannabis indica
aataaatctataaatattaaatttagattttgatacaataaccaataatataaaagaaaattttgaatttatttaatttagttatttaatcaaaaaaaaaaatcacaacccaatccatataatattagctatatgtaaaattgagagttactatttaattagataacaaaatgaattataaaaacccaatttttcttaataatatcatgaataattcttaattatatatatatatatatatatataatatattacaccatctttctaaagcaacaacctaaaagaaaaggtttccaactaacgaaatcaaaaagactacctttcattttaccgtttttaagaaataataaaaaaataatagttgtaaggaatacaagcacacacaaaaaaaaaaatattacggttcttaaataatttatactcatataaattttacctgtttgaacaagttactgagagacctgggcttaattccttgttgcaattgttgttcatcactagccttgtcatcatcaacaatctccttgacagtatcatctgtttcaatttcaaccttcttctcctccccaccatgatgagcttcagccaccaccacctccttctccttcgtctcctcagccaagccagggcctacgtctgcggtggcggctggagccaccgctactccttggccgctggctcaggaacaggtgcgggcacatcggccgctgtctcaggattcaaacctttggctttgtagcacaacctcccatgttgata

SEQ ID NO: 178302 - DNA, 666 bp, Cannabis indica
tcatctctgttgtttgagattaaaaactggtgacgacaaagatattggatctaagtaaatatttaagatccacatttatcttcttgttttgtaagctagatagctagtctgctttcttattcctttcgccaagcccaaaaattaatgcaaccacaggtttcaaaataggaaatggagaagtgtgaatcactaacaagaattcttgagttgagatcagtactgattaattaaggaaacttttttttaatttaaattgaaaccctgttcttactactttctgtactcttgaacaatataatccaagcacgtgcaagaaaaagcattttattttagaaatttttacatgaaaaatccattttgcacaatttattaccaaaatactcctacacgcctatatcaacttttttacttacaaagttggttttattacacaaataccacttagtcatcattccatccatcatcaatcaaatcctactctcttccctctcttttttcattttctatcaatcaatccatcatttcactctctttttttcttcttttctttttatttttaattttatttcagtttttaattttttatttttaattttatttcagtttttaattttttattttttcttcttctcttcccctgtacgaccctcgttctgttcttggaaa

SEQ ID NO: 178303 - DNA, 662 bp, Cannabis indica
agttatatccttaaatatccatattttcctaattcattgtataaaaaaaaaatctggatttatataaaaaaaaaaaaacctttgtattatctgtttgtatgtaatttaaacatgtttaaaatacttgaaacataattttttttaaattaatatattaattatgttttgtatttaaatatttgaatatttttttaaataaaatataatttaataaatttgttaataatatataattaaaaatagaataaaatacattcacatgtgaaaatagtaaatagtttaaatattttaatatttaagtttaaaaataatattttattattccaatatgcattaattttttgaaaatccaatatgcattaattaaaaattctaaatcttaaaaaagacaaatacacattttgttactcaatactctatacttggctaaaagaatattatataacgcaacaacttatcaagatttggtgaaaagcatgagttgatactaggaagaaaagaaaactacacctaaattatgtaattcatatacgtgtgattttttttttttttaattttaaaaaaacttagattagatacatacatagctaatttcgtttggtactaccaaaacttaaacctaaattacattaattaattaagtttttgtaaaataaataaat

SEQ ID NO: 178304 - DNA, 992 bp, Cannabis indica
ttagtgttgtgtcgaaatcagatttgtgaagtgaattacaaaggattgcgacacagatttagagggagtctaaacttgtttaagtcaattatatttgtaattatttgagattttactaaataatttcattctctgagcataaccccgtggactaagagtgttcgaaagaacactgataccacgtataattctcttgtgttaagtttttttaaattatgcaattatttatttctggttctagtttaattctgcaaatatatgttctacaatgatagaattacattctgctgctgcagactgttacaattgtatttttactgtaaattagtaaaattattgtcatttgtaaatatatagtttttcacaatgaatctacagattatttcattccaagaggctgtatttatgggcatcatttttttttaagaataaatagtatttttatagaactaattgtaagttatcattttcaattacattttgcttagtttttaagataatttattaatgtggcgataagctacacacataattacagtataagggtctatttaactaacttaaactagctaaaatcaagtataatgatctaaagcatccaaatatcaatttttaaattacggatacacaatttttgattttatcattagagtattatctatgcaactatttttcacataaactctcgaattatagtagaagccctagattagtcttagaaagacaatattcactttagacaaatatgagagatttttacacaaaatgtactaaaataaataaattttactctttcactgacacatggaatttttaaataattttacagactacacgatttaattttttaagatattttttttaatgtacattattatagatccccataaaaaacaaactaatgtagtataaaatgtaaagcagcaaaaaaccaacaaaaaaatatttcaaattcagtgcattccaaagtttttttttttttgtatctatac

SEQ ID NO: 178305 - DNA, 809 bp, Cannabis indica
ttctttttacacaggtagtaaaaagtcatatcaatatgctgaaaaaaaaaaaaaaagaaaatagcaaaaaaaaaaacaactatgaaacaacacaaaacaaaggtaatgaaaatatgcaaacaactcaaaaacaactgaaaaaaactacttaatgaagaagttaaaaagttatcacgataactaagtttgtgaaactacgtcttgttatcaacttcctcaacaccaaaccaaaagggaggagatatcttatatttgccctttagataaacattattatttgttttcctaaaactagaaaaaagaaatataaatttagcaacaataaatctgaagttaataaaattatacaaaggaacaataaaaaaaattacgttaatttctttgattggagactctaccctagccaaacatcaaaagcagcctccaaagttagctcaacaggttccccaatcttatcatccaatggacatgatccacgaacatatttcacaattttaatatcagaatcatcaggagaattagacacggattctaatttagcaacagaagaacctagttcaataaagggagacttcaacatagcccccttcttcttgtccctctttttaggaattaagattggtgtctcctcgaaaacaacaatgtcacagacatcattttgaaccaaaccgtgaaaaccaaaagaaatagatgtctgaccaacaacaataggagtagaggaagactccatctaaaataaaataactaatgttaaaaataacaaaacaataaaaagagaaaaattaaaaaaacaaaacagcaacaacttc

SEQ ID NO: 178306 - DNA, 1123 bp, Cannabis indica
attcaattactgatccagtttattcctcttttgctttgcagctatttttgctgctatttcagctaccagacctcgagctgatgttgcttactgtatccatgctctagccagaaggttgtcaaaaacacataattgggcggtacgacattgtgctgttattattttgtgtttgtaaaaggatattaggacagggttttgttattgtacatttaaaatcagtgaaactgtttttggttttgggcactttaatgcttaccagtacaatattgtaaatgctgtttctgtttgtacatgtccaaaaaaaactgaatgttggtttaactatttaatggttggaatgtaggtagctttgaaaactctagttgttattcatcgtgctctgagggaagtagatcctacatttcatgaggagctaatcaattatggcagaagcagaagtcacatgctaaacttagctcatttcaaggatgattccagcgcaaatggtatattatcttacaccatgtatttgctaaacaagcttttccttgagaatgctttatttcttactaaattaatgtgatgtatgctgccagcatgggattattctgcttgggtccgtacgtatgccttattcttggaggagagacttgaatgctttcgtgttctaaatacgatattgagacagatcgtccagtaagaagacactggattttccttgttgcttctttcttatctctcattattttagtgaaatatgacacttcttgttagacttagatttatttccttgtatcaccctctgttagttccagagaatttcaactcagaacttatcaaaaatgatttctaaatcaaggatgctgttagaagtaactaggtctctgtttcttgtttattattcttaagaaattagattttgtagacatttcatagtatcttttggcgcagagaaccaaggagttggagactgctgagctgcttgagcaattgcctgctctacaacagctttctttttcgtgttcttggttgtcaggtaagttttcttttaagtagtcagaggcacgcagccagttcaaattgtttttttttttttactattcctgagctcctgaatgagttactgattatcattatctgctgt

SEQ ID NO: 178307 - DNA, 1023 bp, Cannabis indica
caactacataaatccataaattatattggataaaccccacctttactacatatgtaatttttttaattaaaacatttaagaaaaaaaaaacagaagaaggcaaaaggctcattgatttccactatttatatcaaactatggggtgtaatttgttaattagtcaaaattagtttaacattttttctttttttttaaaggtccaactctaagtttaacatttttttatagaatgcaattaattatccaaacgttatatcatcgtggatatcgtattaaatgcagtatatatacagtatttaaagaaatgagattaaaaaaaacatgacaatgctactttcatacattatctaaattattatagacttgtgctgtgaatacatagacacagattcaaaacagtattttttttattttttttttgagtcacaaaacagtaattttaaagattagaaatttgatccgtaatttatgtagaaattaaaagaaatgaatcagaagaacgtcgttgagttgtgtcataagctaaattttcagttccaaggaataaaaccgttgaagaatcaatctcaataagaacaacctatacagtaatgtataaatatcaattcatgggatctcatgactcgtacatccaaacaaataatgttattatatcatcttatatttatatatttttatataatccgctccaatccgagccgactttacttgattgaaaagagcacagtattcaatatcaccatattccaatttccaagctttcagagcagttttgaaacaaaactcagagacccacttccttaaaactggtgtatttgccattgaaggctagcttaagcttagtataaagtagagaattcataacacagacgaggatagatagatacacccccaaaagcgcctactctctctacagtcagttccttaaaaaaagcaaactactttagtttcgccaaattttgtgtctttggtcagaccagtttgttgtctttctctctccttccccatttttctttctctctt

SEQ ID NO: 178308 - DNA, 1328 bp, Cannabis indica
ttcaatacaatattaaattatgatcaataataattatattttttacattttttattggagcacaattataaataataaactaaatataacataaatttaatttttatgccaaactaaacacaaattttacatcttgcattaaactattaaaagttggtttaaaaactattttcaaaaaacaatatcaaatgtacttacttgttctcaaagaacaattttcccttaaataaaatatttaatttataatatttcgtcattaatttaatacataatttataataaattataattacaaacactcctcaattaacgtacaactaataactacattatcattatatcactaatcattgtttcattacttctcatcggttttgtcttcccctttcttattggtttggtcttcaagaaagtcctcaaccttattctccacttcctccaccttcaaaacatatgtgaaagaacaaattaattttaacttttggaaatgcttgtagatatattttgatatactctttatctatttccatattcaacaatttttttaaatctatttttttttcatgaattattgtagttatttatgaccacttataaatttcaagtttttttttaataatttgtattactaaaataaagttcgaacagttacttactattacgcttataagaataaacaatctcgcttgaaaaaaatattttaacctattttgagtatagtaaattattcaaaattttttgaaaatttacaagtaagtaggtatatgatccaatccaatcgtttttctctaatccgatccaatctaattactaattaaatttaaaaaattatctaatctaataattaacgattagattggatcggttttaattgaattttaatacacttaagaatgacacaacacatcaaatctaaaacgtatgacatgatacattaaaaaaaataataataataataataaaacttaaatataatactaaacattataatactataatttaaactattagaaaatataagaataaaactatactcaattctatatatgattgtcattacactattgttcaaaaattatataaaaaaattaagttataaaagtacaaaaaaaaaatagtaattaattcaacaattattaaaaaaaaattgcaaaaaatagtaacatgtatttgagtttagatatgaaaacggattttcctatctaataagaataggccggctcaagtaaacacgacacgaaaaaaatactaggcatacaaataaacctactcttgaaaaataactcattttgaagtggatcgggcacgcacgtatttacaacacttga

SEQ ID NO: 178309 - DNA, 507 bp, Cannabis indica
aataatgtgtctgttatttttgttaaacgatccgcgaataaaattgcatatttctttgcaagggactcttattctaaagttggttatactattagtaagaattctattcctgctaatttattgtccttaattttgaaggacgtttaattaataaagatatatttcttttttttttaaaaaaaaatcaattaagaatatacgaagaaaaagaataatgaaaaaaaaaatcaacctagcttcatacatatgttgatcatatataagttctttttgttttattttgtaagttataatattattttttaaaatagaataaaaaatgtgacatcaatttataaattttgtataagaattttggttttttggatgggggagttcctcgaatggttctatctcatgttaatgaagatttgccgattaagtttgttaatgtaacttttttttcaaaaaaaaaacaatgataattttctttaactaaaacatgaactacattattgcaatgtgagt

SEQ ID NO: 178310 - DNA, 527 bp, Cannabis indica
atgggttagggttattagggtttattttttattttttatttttttatttttttaaaattgtttttttaatttttaattttttaatttttaaagaaaaataattttttattttttatttttaaaataattaattttttatttttttaaatatttatttacgtggaccaataaaattgtgccacgtgtacactgtgtacacgtggacattccaccatggcagttaacagccaaaaatggacggaaagggctaactgctaacagaacttgagtttagggagttttaccgcaaaattttagaattgggggttagttgcaaaaacctccctactttagggggttttgccgcaaataacccaacaatatattatattttttttttggtaaaatgcatatttaattaagaataatcaaaataaagctttcaaatgacagtattcttcagacccatctttttttgctggaacttcagacccatcttaggccaactccaacccaacaccatgaacccaataataggtttgttttac

SEQ ID NO: 178311 - DNA, 597 bp, Cannabis indica
ctactgttgttttgagttatactgccttgtgttttactggtgttttataaaaacacagtaatttttgaaaaaaattttaccgtgtcacagtatttttgtaaaaagttaaccaaaatttcagtaatttttgtaaatttccctattaagaactaccccagaaacaacaatcaataatgtattaaggttttaaatagtatattggtgtggttgttttacttgtatattgtatatcaataatttaaactaagctttaaatgatttagcatcaaaattaaaaaaaaatgactaatgaggaggaggcggatgaacctactcttttttgctttcattaaagaaaaccacccacttttaacttttatgtttgctcttttgccatattgtactagtcttatatataaattaagaaagttatacaaatttttaaatcaaaagactattatgacattctttgtaacatgattgttacagtaccataataagaaaatgttattataaagaaaacattaagttggatacgatgtaatttttagaaaatcaatccaattaccatctaattatacatgtacaaatttaattattatgacttacatttttaat

SEQ ID NO: 178312 - DNA, 650 bp, Cannabis indica
gttaagtatttaattatctctctatttttctctcgctctttgtctctctaactccggccagtcgacccattctaaggcatcgcatcaggtatggttttgagatgatttaataggaagatgatgagatgaacagattaagtggtgtttgttaggaatgctaaaattgatcatggtatttaaataaattaattgtatatatatgtatgtaagtatgggtttgatttttgattgaaattatttatctcatgttcttctgacgagaataaaattaactaatgacttttgtatacaaaaattgttcagatttcaattattaatgaaaacaaaattaagtgatctgatttgtttagtgatctgatttggtaattaaataaatgttatgtttagtgtgatttatagaaaaaaaaaaatatagttgtataaacttttaaactctattacaaatttgtaacttcagttataaaaaaatggtttataaagtgtaacatatagttataaacttttacatttggttacaaatttgtaaactttagttatatttttttaatttgtttgcaaatttgtaaaaaaaaaaattacagaaaaataacttatgtatttacgtttatgctcatctgtatttttgtaattatttaaattgtaatttaaaa

SEQ ID NO: 178313 - DNA, 764 bp, Cannabis indica
ttatgttgttttcgtgttattttttggaaaatcgtaaaaaatgtaaaaaaaacattctttgaacgtaaaaatgtaaatattttacaaaaaatggcgtcttattcctattaaaaaactacgtgatcattgatatttcaactttatatagggacttttttatttttacatttcaagacagtttttttttttttttgtatttttacgaaattttacataaaaacccctattgcaactaacagagcaacctaaattgtaaccaaagatcgtatagcaacccacatagaaatcaccaaagaaatcaccgaagaaacccaaactgtaaattttgaaaaaaaaaattagaaaaaaatagtatatatatggggtaattttctttttatatatatttatatattttaaaaataataaaataattagtaaataaatgtttataccatagtagaagatttttttttaaaaaaataataaaatataattagaaaataatttcaaaaaaagccaaaactttgttagagttatcatttatttaaaacaataaaaataaaatgagtgagtaaaaaaagagtaagtgatgagaattaaaaaagttaataaaccaaatatcaatttttgaaaaaaaaaaataaaaaaaataaaaaaatgaagtaaattaaaggagtaaataaatatattttatattaattaatatttctacaaactaataaaaaataaaaataaaaaaaaaagaaaattaaagggaaaaataaataaaaactaatttttag

SEQ ID NO: 178314 - DNA, 569 bp, Cannabis indica
atagtggcatgatggtcacaaatttaaaaaaaataaaataaaaaaccactcttaaaatttttttaattttcttttttcacattattttgtgttgatttattttcatacttctatttaaatcatgtttaatttttttttcatatacttttttatttaatattttgtcatgatatttaaaatataatttatttttaattgacaggtatatttttctaagaatatgaaaaagaagaaaaaaaattaaaaaaaaaaataagtataaattaaaattatatattttatataatctaaaaattattaaaatgtgttttttgggtgtaaataaacccccccaaaaaaaatctacaaacaggcctagattttgagttaagatatttaatctatttgctaagaatatgtcttagataattattttattttaattcaactttacatgatatattttattttgttagttaaaagaatagaagtttgttgagcatcaataaattcaggttgtaatctgcctttgataatcaattaattgaatcatctacatgccaatagaactcaatcaattatagaagcgt

SEQ ID NO: 178315 - DNA, 551 bp, Cannabis indica
gtaccttatgtaattatttcaaaagtaaattcatttagaattggttagttttacaccaaatttccttgatttgtcacataaatttaaaattattatgtttaattttctcaaaaactaataaagaataagcaaaaattttactaaaaagctttttctttcgctctccaattttttcattaaaaaatgtgagacaaaatattaatatagcccttatcaaaggttcttcactcatcaattaatgctaaaaaaataaaaataaaactctaaaaagaaaaataaaaaaaataaaaaagaaagaaagaaagaatgaatgaagctgaaaaaaataatgagactttataaagtgaaccacgcgcatatatatgttgattttttaaaatagaaaatcaaaaagggcaaaaaaaaaaaaaaaacgtgccggtggttggtagatttggagtacctttttcaataataaaataaaaaaaataaaaaattaacgaaaaaataaataaatgtgtatatttaatatttatgcagttgataaaaaataaaaatgagagaattaaaga

SEQ ID NO: 178316 - DNA, 762 bp, Cannabis indica
taaatcgatgtttattttaaaatgtaaaagcaacctaatttgcatgattaaattgaggagcagaaaatataaaacttagcagaatttgagaatagcttatccttgcattttgccagatttcgacctaaaattcaatgctctcattcccatatgaatatagaagctcatttaaatgattgcatttcttcatttctttgtattccaaatatagtaattttatttgcaaaatatatgatttatatagtacaaaattatgataaggacatttgtaattttggtataggagagaaattgtagttcatattttttatgtgatgatatatatataacacatcccaaccgtttgtcttaacttattacaatgaaaacaaggttaaaatagttcattatcatattgcgattgagagaaaactctctcagtgttcattgtcatattttatcattattattattattcatagtataataatgttttaagctctggtgtctttgtctatgactttgtatgaggctcgtgattggttgaaacaacgtcagataattctgccacgtcagctttggcaagccattccccattctcatttctttctttctttattatttattttctgagtattttaaagttattacttttaccaaccctacctcacctaactttctggtctttgaatatctttgtctctctttcaacgccaaaagaaaactccactacaaaaataagattcgaatcatattatctgaacattttctcatctcttctcc

SEQ ID NO: 178317 - DNA, 1249 bp, Cannabis indica
ctcaaatataaatatcctgggtatatatactatataatgttacatgtaattattattttttagtttttattttaattgggtattattttaacatatatgtatgattaaggtttttttaagaaaaaaaagaaattgtgaatgttattcttatttaataaataatatcatttttatttaaaaatatatttgattgaagtattatttatataaagaaaacgtaatattaagaaattacttcatatattatttttttaacttttatgaacaatttctgtattttttgcagaaagataacaattttttttttggtaacgtaaaagagtcacagtaagtttttttagatatatcaaaaatactaattttttttttattttattgttctaacaaaaaataataataataaaaaaaaatatctaaatatgtgcattaaatttaaatttatatcacaatatttgaagaaaaaaaacaacactttctatttgttgttttcttttttggaaaaacaacatttttttttttttggtatttgcactttaaatttgaatcttaacttatatagccacatattataaaaataatagaaaaatatgcaaaacaaatttaaatttaaattgtactatttaagaaaacacatttttagggccagtttggcacaactgtgctgtgtataaagcagttgtagctgtgctgtgagaaaaaacagctgtagctgaactgagtgtttggtaaattataaatttcaaagtactgtaagttgttaagatctattataataataatgataatgttataatctactttattataatcaagaatatgtaaaaacttattttatataatattttattttttatatatatttaattttttttaaatataaatttatatacatttgataaaaataatttatagtaattttttattatgttttaccaaatgtaaaaaaaattagaaacttaagtatataagaaaaattctagattgatgttatttgttaatgttaaaataaaatataatttaatttttttaaaaaaataagtagatttaataattatttattttattatattatttatttaaatttttttattttttaatatataataataagtaactatagtttagttaaaaaaaattattatagtctttaatctaaaatattttttttaaagtatattgggttggtaatagctttagcttttagcttgtagcttctccaaaaattctttaaaaagttaatttttaactt

SEQ ID NO: 178318 - DNA, 1422 bp, Cannabis indica
attgaaaagtgatattgacttgctaatgaggtgttaaatttttggtcgcttctagtttccatttgccttgtcttcagtgtttcagtattgggcattcagtttgcatattaccatgctaccacttaagtaagatgaaatttgtggtacttgcagtcgaagaaagcaaaacgcaggctcaggctcccttctattgtccctgcagcttatgccaaagtaatgaagaagcttaatttcagtggttaagaaaagaaacattggagtcttatgcaggtgctttaaattttgttcgaacaacgagaggttatattgctggtgccttgtgccattgtactctcttttcattgtttacatttcagaagcccaaattaaggagagggttctatagttgtttagtagttggttacttactgaaagtgataaacttggttgaggttccaatcaaaattatttcactgaggttttttttccccataataggtaataatttcctcattatatatatcaagtttcttaattctgttgttgttcattgaactaggacactaacaagggcctatgacactagctatcaatgacaattgatatgattaaagaaataccagtttatagtacgtgaatgaatgagtacactcccagtaaaagtggaattctggttccttctagtctaaatattattaagtcgaaaatagtttcatttacatatgtgataggggcaatagatggtgcattataagatctttcttttgttattgttctgtgttcttccttgttaagcatattcattctttgggttgaatatagagtatggtggagtttggaaagagtagagccttctttgtttaattgaatgtttatgaacatatatttcaaaacaaagatgctaaataaccagattttcattccgatattctttattattattattctttttacagaattgaaagttcatttaaaaaggctaaggatcagccgtgacagtgtgtataaaatatacgggatacccggccacctagtaaattcatgtttcatagagctaattttacaagtgatgagcaactcctagcttacatggactgaaaaaaggagctttggatactccgaagagtgggacaagccccacacaatgggcggtggcgatttattgacatttcatgcattgataagttaggtttgcaaggtaagcatgatctcagattaggttgtcatcatggtccaggatagcggccagtagctacctcacgagtcaaggacctttgaataagttcttcattctactctcattgggagagttatcaaatagaaatttgacaattgatgcttaaaaattgtccatagtcttttagtatgccacattaaaatgcataggaatttaatactttaaaattaattaaatcccaaaataccctcctcataccttccctc

SEQ ID NO: 178319 - DNA, 580 bp, Cannabis indica
aaatgattcttgaaattgttcagtcagatgagtatatatataatatatatttagtgtatcgtgactttgaaacaattcaagaactttaacaaaatacttacattgggtcttaggcagagactcatgcttgaagcttgggcagagactcgtgctgataacgtgttataaaataatataaaataatataaagtagatgagaagaaagaagaagaagatgaagagagaaagagaaagtgaatgagaatttctgagttgtttattccaatggggtgaacccctatttatacaaatacaagagtgagatattaagaaactaagaaaaagggaaactaaggaaaagaggaatgttgattacaattcatggtaataaataaaagatttggacatccacataattattaatatttataacaataataatatttttgatgaatgttatattattaaattatttttaaaaataaagtgttaaaaataatgtaaaataaaatattatattttttagataataataaaaatgttaagcatttaatatgttaatggttatgcattaaaactgtaaaagttgactaaatatatc

SEQ ID NO: 178320 - DNA, 604 bp, Cannabis indica
gtcttaaatatttctttactcttaaaaatttgaacatgagacagagacatgcagagttttaaataaggcacttattatagacatccaaggatagtgttattaaatattgtatatggatgttcaaactactcaaatcaattattaccataaatactattgtctttctatttatttcattaatttaattttctattttttcaatcatattttatataaataaaaatttactctattgaaataaactactacgaaaattcttgattgttaatctattcttcttttctatttagtatatttataatagttttataaccaaaaaaaaaagctattgttgtctattccttttgaataatacagctttttccttcaaaataaaacaaaataataatataataaattacaaaaaaaactacgttattcaaaagaaaatataacaaaaatatggcataccataaaaaagctaatagaaaagctcaatcctacgaaaaatggacagagtgaaaaatgccatatgtttcaaataatgtttcaaaaatatgatattgagtctaaattcttattaccataaaaaaaaaatctaaaattcttatatctgttataaaat

SEQ ID NO: 178321 - DNA, 617 bp, Cannabis indica
ttttttttctgttacattggaatggtcattccttctttttaaaatggaatagtcattccaccaaaatggtgaaagagcattccaatcaattccaatactttaaaatgcaaccaaacaaatgaatagaatgaaaattgtttcattttcatttcattccatttcattacctccaaccaaacgccatctaattgaattgaatatattagatgacaataaacaacttttagttgaaaatttacttcataggaaaaagaatatccattgggggatctccatttgctcaactatttattttgtttccctttgaagagcttttccaacttatagctacaagcttgggttaccatggaaggtttacttgaatggttcttttgctttctcctgactttgatccattttatttcaaataattccatggaagttgatatcgacaaacttatttatttctttccactgttcaagaagtgtggaatattgtccacgagcctttcttggatttggagaattcttttcaagtctttgagctcaaaatctcggcttagcgactatcatcaaaactttcttaccgcaatattatggaatagggtgttctttaaaatctttggcaagaaattgat

SEQ ID NO: 178322 - DNA, 511 bp, Cannabis indica
tctctatcacaagcaaacacaaacttttacatgattcaactattactctcttctttccttcaaaaaaaaaatatattaatcttttattattattattttgtaccttagtgataaacacattaattagtgacaagtcaacaaaaaattacagattaaaatatatattgtacacttggtctgcttattttatagtaaaaggagtgctactgtcaatttcttattaattacgatcttttagtaaatattcgtgcccaaaaacacataccggtattatttttttaaaaaaaaattatgacggtgttcgttttgcttacaacatcatccttataaatttttgaaaatttttaaatagtttatagtgtcgaaaataggtttgaagttttttgaatccacttagtaaatttgaatatcaagatatcaacttttaagtattgtaaactattcggaattttttaaaaatttacaagaatgatactgtaactataaataataccactataaaaaaaaattt

SEQ ID NO: 178323 - DNA, 1306 bp, Cannabis indica
aaccaacacgagggacttcaagtccattactaaacttaaaagattgcttaaagtgagaaagagaattaaccgagacttttgtttccatgagaaacaaaacatgaggagtttgctcgtggacaagcaaacgcaaacgacggaacgcactcgggttccccaaaccccgtgcattcagactgatgagtttcatgatgacttgcgggattgcgaagcaatcaccgctgaagagtcagattgatctttggaatcaaagctaacagcaaaaaccaaaagatccaagtccacttcatttgacaaggatgaagctacagcagagttatttgcacgacatcttttcatgagtgtgttcctcatataaatggaatcaaattgtctcttgaagacacgattcagattgatgttttcttggtcaggttgaacaatatgtgtagaagttacaccagtagtgaaagttgcagaagttgcagcagtggtcgcacagatagtggcatcaaccatcgaggatgagaggtaagatcctgagtttagtgacttattaaaagaaaaattggataaaacttaacgacataaatgaaaaattgtaaaagtgtaataagaaaacgaaaactaaaataaaatttcaagactaataattgaagcaaagtatattttttacgcagcatttgagtttatattatggaatgagatataataatattattatctatcaaaatacaagtactgatataatataataatacaaaataactgctacaaaaaataaataaaataataataattaatattattaaattacttgctaaaactaagcaacaaatctaaaaaaaaattaaaaaacaaataaaataataattaaacataaaataactgccgcaaaccgacagagaataaataactcaaatataactgtatattatgtatgattcaccctaaaatacttctatagaaaaacaagaaaaaagaaagaaacactaaagtggtaggtgtgtatgaaatttacagtagtatgcatatatataacaacaattaaacagagattagattctcaggtaacaactaatcaagccaattcaacataatactaatggagagaattttaaaacaaagtctaatttattagatttacataatgatctattataatatatatagtaaccagacttaaaaatggtgagaagaaaactacaataactctcacatatttacccataaataaagaaataatgacagtaaattgaaattaaaaaaagagaataatcacttatctatttgagatgactgatttacaatatcaacattagaccac

SEQ ID NO: 178324 - DNA, 1243 bp, Cannabis indica
agttgggtatttagatttttctaaacaacttaaataagatatttttcaaaattattccatttttgaaatttaattaaagtttttactttaatttgtaatatttcattattgagatatggaatataaatgattaaacaaaatacatatttttaaataatgagctttaatcaagagaaattcgatctccattgttggttttacatagctattgttttagtgagtaatcctccctaatggaggaacgttcattagcaagttagcgccgtttaatgaatatatacattttaaatatatatattatttattttttcagtttttataggttacttcacaattcaataattacaataaacctactctttagtattcatatggcatttcacttactactctatttttattactatatatatatatgtgtatttgcttggtgtaagtatctagcaatattttattctttaaatatttgtgatttaagctgtataataatatataatctatattattggatttttttttcattattatttagtttgactctattatttttctttattcactttctcattgttctaaagtagtttcttctatgtatatatatatattttcgtttattataagcataataacaatgttttttttgtaagaaatcatgaatagtgaagcgactgacctacaacaaggtggagtctttggtggcgccacgataaatgataaactttgagaaacttcggaatatttaaggaacaattattttttctatatttattttactttctctcttcttatctttgtcatatatatagatatgaacgaagtatcaatctatatataaatataaaggaaagcacaaaggagtctaggtggcatcttacatttttttttattgtatttttaaaattttgtgatattttcatattttgttaagaaataaactactacacatatctacttaaagtcccacatggtttagaaacacataaggtattatccatgtagattataaataacacttttgttatgcaactttctatgtccaataaatatttttctttattgatgtatattttatccaataagttttaaatttttatttaatatagaaaatctatatctatatataaatatataaaaaaaaaaaaaaaaaaagtgcaaaagagtcttggtggtattttaaattttttttctattgttatttttaaaatttttagttaactaattttctatatttttgtttagtaaa

SEQ ID NO: 178325 - DNA, 753 bp, Cannabis indica
ataccgagaaagacattagtcctctttcctcaaccatttcttttttccttttaaaatattgaatataatagaatgtaatatatcaatggatcgaatatgtggaatcaagaaaggtgagattggggtaaaggtaagacacaataaatgaagaaaaacatatgaaaagtgtagacgtagctggttttggggagacaaccagaaagaaaaaaatcaaaacttaaatgaacacagcaagattttaatttttatatgagagagtgtgagagaaaagttatatttatgcacttccaagttatttaatgtattatatgatttagaaaaagaaatcccactaccttattcagtaacattaatctgtactactggacttgtaagacaaaaaaagctccacccaattgcacaattgtcagtagcaaatttggacaggtgtttggctggtctatcacgactttatttccccctgaattctttgttttccaaaaagagaaaaaaaaagtgtatacaaacacatcataataattttcataaaaaaaaaaaaatcataataataatttacttacttctaataaaaaatattaatttactaattatttttaacttcagagtgagtaactaaatgctcccattaattagcctattaagttttctctcttcctctcatttaagagattttgaacaagatgaaatagcaaagggatgttgtagatttttttttttcttaaaaaaaagtgttggagttaaatatgtttttct

SEQ ID NO: 178326 - DNA, 658 bp, Cannabis indica
aattcaacatgactctagcatacatgttatttttcgtgcaagaaagatcactaggggtgcgatacgtattcaattctccttcgcgggatggaaggactgcttgaagtctatccaacccctcgtgatgctttcccattgatcttttcaagcgaagtctaagcttgaatttttatacaacttcagccttccatcccggaagctgaagcttgttacataaaaaatgaacatgactctcgcatgcacgttgtttctcatgcaaaaaagatcactagtacggcacgtctttaaccctcattcacaaaatggaaggactgcttgaagtctatcttactcctcgtgatgctttcaccctatgattctttcaagtgaagtcaaagcttaaatttttatgcaacttcagccttctttcgtccaggctaacgcttgcttcataatcattcaacatgactctggcatgcacgttgttttttgtgcaagaaagatcactgggggtatggcacatcttaaaccctcatttccattcctcttgaagtctgtcttacaccctgctttcaccctttgatctttttaagcaaattcatcgcttgaatttttatgcaactttagccatcctttgtggaagccaaagcttggttcataaaaatacaacatgactctc

SEQ ID NO: 178327 - DNA, 622 bp, Cannabis indica
attactaattaagtaaaggcttagccttaagtaaattgcaataaaaatttggctcattttttcttttttgaaaaaaaatatataaaatttggtatgtcaatgtggcggaaaattaatctattttttctaaaaagacacctcaatttctgtaattaaaacataagaataaaatttaaatgtatatcttattttatattaaaatggtcttttattatatttcaaaatagaataattattctattaaaatatataataaaaattaaaattattctattagaataacattctaatattttataatgcaatcaaactaaaatgataaaataaaaattatttcattactaatatcccatttcattatctttaaccaacaccatcttatcattaatagctaaactgcctctctgttggatgaagatagttttagttggaagataatattccatctctaattaattactccctttgtaaattatggttttcatcagtagtttatacctaaacaaacttggaataagtgagaaacaacatggtgcattttcttttctggctggattaatccaaaaaggcaaaaagtattctcaaatgtatatggtatgtcttactatataatacgatatat

SEQ ID NO: 178328 - DNA, 790 bp, Cannabis indica
  modified_base (674)..(674): a, c, t, g, unknown or other
agaaaagagagagaaatctcgaaattccttgtgagagagaagtgcccacacacaccaaacagtacctcaatcatagattggaagactttgaaggatcacatccatctgaaggacatttgagcttagatcttgattatactctgcgacagacaggaatcaagggttagagatctgagtggaaggagacatataatttctctgccatcactgtaaggtttcttaacttttatgtgtttttatttatcgttttagaagttcatatttaggttgttaaatcaacatacttgtgagtagatctaagatcctggtaaaattaattccaacatgatcttctttatgatatgaattaggtctttatagtagatagcgagtcccatatttttaagtgcaaactgaagattcagatctgtgattaccttttgaatttatgaggagtctacaccagtgatgagaatattgtccacgtagacaagtaaaagaactaatttgccttccttcttataaaaaagagaggagtctgctttggagtttaaaacccccattgcaccaatgactgttgcagcttgttgtatcaagttcttggttcctgtttaaggccaaatggctttgttaggtaggcaaatataggtggggaaattgggatctttgaacccttctggttgggccatgtaacnctctgtcttgaaggtctccattcaagaagcattatttatgtcaacttgatgtatttcccactgataacatgctgccatggtgaagtatactcgaaattgttgatggttttactact

SEQ ID NO: 178329 - DNA, 549 bp, Cannabis indica
ccctctaacaaaatttagactccaaattaatttatacaattaatgttattgttttcaattctacccaaaataccctccctatcattttccttctttctctgtctctttctcttctccactctctcttcctcttcctcgcaccaccgagaccaaccagatccaggcaccgagaccacccaaccaccaccaccaaacctcctttcctccaccaccgaacctccttatctactcaaaaactcagacgaaacccagaggcccaagactggtcggacctccatagcactcaagcatcaaaaaacccagaggccccgaatttctgtcttcgtcttcatcttcatcttcgtgtttattttttttattggatttatcgaaaggttatcgatagtttatcgataacatttatcgataggttatcgatagtatatcgatgacatttatcgataagttgtcgataggttatcgataggttatcgatgatttctgtttgcaaacaaaaaaagcagtgcgtagacaaaaccatcgataaactatcaataaagtatcgataac

SEQ ID NO: 178330 - DNA, 782 bp, Cannabis indica
gtatcgtttgtgctctttagcttgggaaccttcacactatctcattttaaaccgcatatcatctcgtcttgattactctgtactctgtgtttcctgagatttacatcttctgttagttgtttaatctctctagtttgtttaaggaaagacttaaacacatatgtaaccaatattctctgaggtaagcattctttaaactgcgaatggattattatctaatcttttttacacgtgtcgtggctatattgctgcttgaaatatgacataacaactacttatgttatttgaattatgtttatgtgttttatgaatagagtcttttgtttgactaaaataaagtattaattacattcttactgggtaagccactgagactagctcaatggtgagggagagatgggaaaaagagagaggtcatgggttcgtacttaagacccttaagatattagtaaattgtaataccactacgctacactaaaaagaaaagcttcttattgggtgcgtgtcgtttcatcctttcgataaattgaaaaaagataaaatgactatacaaggcttctcagtcgtggggattaaagagaggagtgtgttattcagttgagaatggatatttttctgtttcaaagaacaacaacacaattttcgagatctcctcaccaatactagtctaaagagccttgaatttttttttagctgaaggcattagagtctggacttttaaatcacgaatacgaaataaagctttgttgatatcagaactagtaaaaggtttaatcaaatgc

SEQ ID NO: 178331 - DNA, 782 bp, Cannabis indica
atttttttttatctttttacaaattatgacatagaaaatagttattttttgtaaaataaggcaaaatattggggtgttacagtacatatattaaaagttatattcttaataattcttttggttatatataatttgaagaataattagaaaatttccttttaaacttttcacattagatcttgcccctaaaatatacagtttgttcaaaaattttcactaatttttttacatttattgaaattgagttatttttaggttctgttttattattccgtttaaatgctgatacgtctttgtaaattagcaagtttaccccttaaactttgacaattatcaagttatactcctccaaataaaaatgagaatgattcaacatattattttggtgtatcttaaaaaattaattccgatttaaaaaaaaaatcattttaaatgattaacaaaattaaaaaagaaatcatttttttaaaaaaaaataaaattaaacgatttttgtaaaaactaaattacgggatcaaatttgagtttactttttttttttttcctaaaaatactagatttgtttaaataagcataattttttaagttttatttatattttttttaaataatttatatttttgttgaatttctaattatttttatttatttttttaggacatgatttgtaaacacaaataagtttcattttctcgtcacaaaatcttattattattttttttaattttttattgaattttcaataattttagtttgattttttaagatatatgtttataaat

SEQ ID NO: 178332 - DNA, 716 bp, Cannabis indica
ttcttaggagttagccatttactacttgcttcaacattatccatattaccctctttgttccccttctgatcttctttttccatctgggcagctactgaatttttttctgaagtgttccctgtgtccccatgatcatttccttgctctttaggagcagttttatcagccactgatttcttcttccacactaccttcttttccttgttacaatggacaaccatatgccccaaaccagcacaagctgcacaagtggttgggagccattcatactctatagtttgttccaccagttgccttttctcattgataaaagaaatagtttttggaggttcatccgatatctcaatatccacaagaacacgagaaaatttcaccatagacctttcttgagtcactttgtctatcatgattggcttgcctattgtgctaactaaagcacttagattcttcttcccccaataatgcagccccaatccattcaaccttatccacaccggaacagaattcaccattttcattgaatcaatttcagtagaccaaggcctaagcaccaccagtttcctatcaaagtgaataacccctgcttctaaaataaggtcacgagttgcttcatctcgaaaattgactaaagtgcatccagagtacatccgaaccaccttatcaatccctacgattaccccaaactcctctttacaaatccttcaaacactctaaac

SEQ ID NO: 178333 - DNA, 562 bp, Cannabis indica
atgatcacaattcaattagttttgtgagctttttatggcttttagatgtggcttctcttttcttaaattatgagagggctggtcctaatatttgaaaaaatcaatgtcgaaaaaataactctctgtatttttgtaaaaaataaaataaaataagaagtcgtaaaaatataaaaaaaaaattaaattatagatatgtaaaatataatttttcatcatttttaggcatttatgaaataacaactagaatctttatatataaaattgttggtttaatggtgtttattattttaaaggttgttttcttcacttgcctcctcgcatccattgttgcgccatgactttgatccaatctgcaaagtatagatatccgcacttgtgcagattggattgaattgaaaaattcaaaatccgtactctgcggattggatgttgattgacatgtaaaagtaactgatctaatccaatttacgcatatttataaaaaaatttaaaaaattatatatacaataacatttaatttaaaaatagtgtttaaaagtctaatacatataatacaattata

SEQ ID NO: 178334 - DNA, 961 bp, Cannabis indica
gcttttagcaaatccaacttgataatgcaactaggcttattgttattcctctcataatgcctaattatgtcctgacaaatgataatgttatgtcctataaaccttcccctaataaagccccattggttttgagagactaaattaggaagaatgtttttgattctagagcataaaagcttggttgaaattttgtaaagaacattgcaacaagctatttgtctaaaatcattaacaatattaggacactgtaatttgggcactaatgtcagaacagtagcatttatttccttgagcagttaacctgtttctaggaatgatgtcacaacctcatataggtcctctccaaccaaatcccaattgtcttgataaaagacacttgagaagccatgaggaccaggtgccttgttgctaggtatatcaaatagagcttgcttcacttcttctttcctgaacttttgagtcaacatttaagcttgctgagaattcactacaggccctcttgcaataattttatgctttactctcttcctgtcttccatttgagtgcctaaaagctccttgtaatactcaacaaatgcctctaaaacctaatttcattcagttactctagtgccaatttgctgctcaatcgaaaaaccttatttgccttatctttgctttatgcttgcataaaatgggatgtgttattgtctccattttgtatccagtaagctttagccttttgttgcaggaaagatgcataatctttctacacttgaatcagtttagttctagcttacaactcctcaacaattaaattatcattaagaggacactattgcagctcagtctaagctctctctaactcatttttagcttgtattattgttgtgtgaatattagaaacaccaacctggttaatttccttaaagacaggttttatggcctttagcttagtaaccacctggtacatctttgttcc

SEQ ID NO: 178335 - DNA, 703 bp, Cannabis indica
caagttagtgtgatcattgaagaggtatttattgtctagcttttcttcctttgttttcttgaaaaaaaatgatgaaaaatatgagttatgcatggatgattttaaagttgttgctgctgctagttgttgttgttatttctatgtttaaaatgttgatttaagtatgtttagttaggttgaattgcatgctagttgttcttgctttagttggttaatttccttgttaaaaagttaaggttttcaagtgtaaattgaggttttagtggctgtagtgtttgcatgaattagggttagttttctgcagtgtttttatgcttgtttatgaagttctaagctagttttgaggcttgttagtgagctttagccaagtttgagtttgaactcaaagcttggagctcacatggtgattttcatttctgtgcgttctgggctgtgtagttgctttagaaatgttctaggggttgtatagaacaggtctggaaggtttgaggttaattggatttgatttggttgagttatgaatttttgaagttctgcctgcgaggaaccggaattccggttgtgcatccggaattccggatgggtttcgaaaattcccagaaccggaattccggttgggcaaccggtctaccggttggggaaatttcagaaaccctagttttcctcgattttatgttatttggggtattgccatgctttttat

SEQ ID NO: 178336 - DNA, 619 bp, Cannabis indica
tatgtttcgtgtttaatgctgtattgatgtgttttaagtagtatttgtgattttttttatattattgcctcttaaaaaattaggaaaaaatgtgtattataatatatatttgtaattaaaggtaataaataaatataatattaattttggtatgatgattaaattattttatattataaaggtgaagagtttaaatgcaaagcatatatatttgataccctgtgatagtcagtagtcccgtgatctgtaagaagaaaatattgagtaagttgtgcaatcctacaccacctggaaatgtcgaagtgggataattctgagactgtgtaggtatgagactacatagttgaaaatgacttaaatggattgattgataccacctatatcagcaaggtgcatcttatttttcggtagcccatcacgaaagaactccacggttaagcgtgcttgcctgggataatttcaggatgagtgatctcctagaaagttttcacaggaagcgtgccagtgaggacaaagcacgcaggaaacactcatgttggtctgtaggatcagccatcaatctatgaaagcaattagaagtgacatactcgtgtaataagagccattattccgtgggtgt

SEQ ID NO: 178337 - DNA, 746 bp, Cannabis indica
tgattatttattgttattattgttacattgatattttttggtttttttaatttttttttctattgtaactctatttagttataacctcccaattagaatataatttacttggtcccaagtgtattcttggatagaggttctactgtatatatatttggaattagttgtgaactattaattttttaatacacattaattaaatataattataaaataattttaattgataaatattctcttttataatcaaagtaccaaatataatatcatataagttatcaaaattaaaattcttaactctcacataatagaaatatgacttataaaattgagtataaattaaagagtaataaaagaaagataaaaattaaaataaaaaatgaaaagtaagtatatcgtataattctctctatatcttttagtctgtgcatgttcataaaattgaactttatggtagtgtataatatgatttaaatttaaaattatgtgaaatttaatataaaataattagaccaaattttaccggacaatacatatattttttgtaatttactgttttaacacttaattaataacttttaatatttttatttatatatttaatataatttttatatacaactttaataaaaatttaatatttattgattttttaaaatcttttataaataaaattctttacttttagtgtattgaagtatagttaaaaaatatagggtaaatataatttatattttaagctaaat

SEQ ID NO: 178338 - DNA, 528 bp, Cannabis indica
catcaaatgttggcatatatttattgtgtaaccattggacttccttactataagctctaaccatacattgacaactagaaaaaaaaaatcaacaaattcatatatgttaatgatgaaagttcatttctttcttcacaaaataaataaataatatttattataaagaaaagaagatgggaaaaaaaattacccctttcttaacataactcgcgcagaatgaattttcctttgtaaattcttcaatttcattgaaaaattctaaacatttcttgtaacatactttcatgtactctggcaagttgtcagtagcaaaaatatcccacctgatgatcatatcatattaattaagtaaatatatatttgtatttatagtaaactacaaatctattttttcatattatataatgatgtataatataattatagctaatttttcaaaaaattctaacaaatttatgtaagaattaggatggaagatgcaaacaacttattgcacgagggaaacaagctctttgaatcaaaaatttt

SEQ ID NO: 178339 - DNA, 823 bp, Cannabis indica
aaacaaattgttttcactctttctcgtaaaataaggtaaccataagtatttgtcatgagaagagaccaaagaaatccctaataccaaagccaaatatgcacaacaagatcatcaggcatgtgagaagcaaactgcatgcagacttattaagatttactattgtcctaatgctgcttcataatactggagaatgagtttgaaatgagagcgcgactttccaaattgccttccaagaagaagaagctatcatcaaccaacaataagtgagagattgtacgaccaccctgcccacaagacacacttaaaatattatgtaactcaatttctagtttgatattggaatatcaacccctcaacacagacaacgagcatgaagggagataatagatccccttccattcgctccattcacattaattgcataagtcacgattgaaacacgcctcataatcagaccaatccgccctaaatgaaacctcagcttctccatcataccacgaagaaaagcccaatcaacacgatcataagccttaaatatatctactttgtacgccaaaaaccatttttaacccttcttgtgtcttttgatagcattaagacactcaaactcaatcatagcaatgtcagaaatatgcttccaaagaataaaggcacttcgttatttagacataatatcattcaaaacttcacgtagcctattattaatcatcttagaacaatcttgtataacacattacataaagtaatagtacctgaaaattactaagtcagagttggtgatttaacctttagaattagcatgatgatagtctcattaatagat

SEQ ID NO: 178340 - DNA, 181 bp, Cannabis indica
gtcaacttctctgcttacgcctttattcttttcagaaacaaagtccatctctctctctctctgaacccagcaagagcaaaagatcttatatatatatatattaagagagagaaaggaaaaaagatgacgattatttatatatatatatatatatatatatatatatatatactacgttagg

SEQ ID NO: 178341 - DNA, 684 bp, Cannabis indica
gagaagctttgatctgctcaattttatggataatttccagatatacagtgcattggtcaagtttcctacaagctcaagttgccagatatatagtgtcgctatccatctagtgtttcatgtctcttaacattgtcgtgtcgttgggaatgaccatgtctcacaacctcttctaccccaacttacaggcaatcgagttggaattgtgagttaaacttaaaagtgtgctccaaacatagacaaaaaatcatagactttattactacaagaatcctcattatatggaatactttatcaaattttgaggcacattcgatgatttccacacatcaatgaacaatttccttccttccacattgaggacaaggttaaagttattacgggtaataattaacctacacgggcaaggttgtttcaatcaatttgggagctttgtgcaaaaatcattaatttgtctctttttttttttttttttttttttaaaaaaaaatatattttattgtatataattgtaaaaattttaaatatgtaatttttataaaaaaattagatactttttcgaaaaaaatatataaatatttatttattataaaattagttcttcaaaataaacaaaaagtattacactaagtggagccaaggcataggtctcttagcccaccttcaattgccaatgttttaatttac

SEQ ID NO: 178342 - DNA, 635 bp, Cannabis indica
catgcacccaagccctgaaccgtacgagtttcggataaggtcggccgcatgataacgtcgaacttaaaggtgcacgtggccatttcaatcggtgattaacttccgtaggtcccacttgaacaatagtaagacaaagatgagtcatgaccgtacttatctaaccccacaattactcttctataaataagtgtcatttcttggaacttaaaaaaaagagaagaaaaagaaatcaatttcaaaaatcccaattctcatactccatctctctctctctcactcatctgctttatttaaaagaaaaaaaaaaaacgtggactgaagaaatgggtgtacccgagatggacccgctttctcagctgagcttgcctccgggtttccggttctttccgacagacgaggagcttttggttcagtatttgtgtagaaaagttgctggacaccactttagtctcgaaattattggagaaatagatttgtacaagtttgacccatgggtattaccaagtaagagcttgattacagtttgcaattcatatcagattggtttcaattactttttgaatttgtattaacaatatcctctttcccctgtttttaggcaaagctatatttggtgaaaaagaatggtatttttt

SEQ ID NO: 178343 - DNA, 518 bp, Cannabis indica
ctctctctctctctctctctctctctctctctctctctctctctctctctctctctccctccttcgaaaaacctagaggccatcaaaatctggggagttcttcatcaaatttctttaatctctagcagattttactcccaagctcaacctagaagctttaaggtaagagctttactatgttgtttgagaatttttcaagccttaagctagtttagggttagggttttaggatttcagggctggggagttaaattgagtttagattatgtttttaggtttgatttagggtttgcttgagtttagtttgagtgattttagtggctgttgtgataaatttggagaattgagttttaaaactcaactttttggttctttgatgggattttgtttaattgatgaagtattgtgaattgatgattggaatacactgtttttttgttattggagtgtactggaaagtttaagcaggttcggaggagctcaggattggtttcaggatgtaaaaccagaattacccc

SEQ ID NO: 178344 - DNA, 599 bp, Cannabis indica
gtaatgaactttctcgtgaaagaatcaaagattatgatacaaaaattctaccacaaaggcttcacgtgaatttttttttttttttttcatttataatcaagattggattttatgatacaagtcattatctatataattttttttttttcaaagcatatgtatatatatttatttggagaatttataagaggaggtcacggagtgactacgggtttaccaaccatatggtaaagtggaactattaaaggcaagagtagctcaatgaatatgctcttatttggaatttagcactatatttatatagagagaagatttaccacttatagcttagtacaagtagtgcactagccactaaactaggtctatgatttttatcttgttagggatagggtctaaaatcaggaccacaaccggccttggaggttaatattttttgttgaaataagataggtctccatgagagagagatagactataatgaaattatcatgttgtgacaaatttgaaaggattatttcatattgcaccaatattggaaaagattgtacgattcttccctactgagacagccgacactcttcaaggatccaaattatttt

SEQ ID NO: 178345 - DNA, 793 bp, Cannabis indica
tgactcacggtctcaaatcataccacggcaagaaattcatgcttttagacatgaaaaatgcatgaaacaatttttagctttcatgttttcatcgaagtcattcttaaacaattccgactctttgctagattcgctggattttgattcaactaaattcacattcattccgcattacgctgacgcattcaattcacattacgtgaatacacacacaggtaattcaattgcacccatttccacaattccactaagaacaggaatttcttgccatttacttacaagcaagccgcctcaacagcaattcaaccaaaaaaaacaatggatcaaattttgaccgtgaactttttgcaattgattaaaatcgcaaatctcaaatctcaaactaaaagaaattggacaataaactaaaaattacacaggaaacaaaaaccaacagagaaagaaatctataaacaggagagtttccacaatgcttctaaaaataattacattcaaaaaatgcaatcgaacaactgaaaactatgatataaaatataaatcaatgaaaaaatacgtacaaaaaaaaaaatcgcatctccatattccccaatggaaagcttcgaatagaaaacaaaaaaagaaagatagagataagaaaaagcatacctccactactatggcggcgttgttgttctctgttgattggctatagctaaaaaaaagcctgaaatcggtattcacaatctcagatccatacacagagaacagaaaaatggaaaatatccaactcttgtctccttggccattcgctctt

SEQ ID NO: 178346 - DNA, 952 bp, Cannabis indica
aattgtgtgctaagagttttttgtattgttaatctgtcggtcaattttgaggagggccaacttttacagagactttgtcgataaatttattttaaatattatttatttgagagttgttgtattcttactattgagattttttttattaggttttaatatcatcgcctgacgattaatttttttttattatcttattttgttttaaaaatgttttggggaccattcttaatatgttaatgagttggcgtgtagtattcaatgatacaagttaaagccctagctctttgagtgtgatgtttgaggaagttatagttttattgtttaaatttttagggacaattttgtcccatattgctcactgactttaacagttcatagtatgacaaagtatgtctttcggttagatgatgagctatccaagttcaagaatgttcatatgctgtttgcgaatgtttacattataaattcataaatgattttaatcactcgtaaaaaaaaattaatctcaaaaatctctccttcaaattaatatggaacttttttaataattatgtctgcacttatactaaaataattgtttttttaaaagtggttaggtatttttttttttttttttaggaattgtaaagtaattctttttttcttccttaaatttttttcggtaaaaactttgttaaagcatactacatttttctttgaactagacggatttattcaaaataaaaaagaatacaaatatacatgcacatcaacaacataataggtgcttctgtatattcttaattataaacaacataaatttataaaattaaaagcaacaaaaaacaaattcttagattttaattttcaataaaatgaaaattaaaaacataaaataaaacttataggttgaataaagattaataatagaacaaagaaatattaaacagtaataaattcataattaattaat

SEQ ID NO: 178347 - DNA, 954 bp, Cannabis indica
ttttgcatatttttcttaaaatgttctaaccatctttatttatcttttttttttcttcaatttattgttatatttcttttaagacttatattaaacattaattgtttggtcgtgtgacgttatcgtccatttctaagaagatattttgtaataatcgtaagatctatcgttatttattatatgaacgctttattttaaaatgaaaatattaaacattaattattttagtataacattatttctttcattaaattatatattataatagttaaaattgttttacattatttttttaaaaaaataaccatgcacctattcaagatctcatattagtccatacttagaatcaaaatcttatcaaaaagataaactagaataatataaagtacaaatattttactattctctcaattatgatacatcatctgaaattataaataacaactaagtatttaattttttaaaattttagattagtttttaattttcttttcaaactattattatgaattttttttctcaaaattttaagccatgcttttttcttttcaaattactatttattttttttcatactttatatatatcaaatatttttaaaatcactgataagacatcaattactgcaacaattaaaaattataatacatttagaaaaatagcatagtataacaaagtagacatgcattgcacgtaactttaatctagtatatatataaatctattattgatgcagttttttatcaacgagtctaagaaaatcgtaaacgagcaagataaacacatgtaaatatcgatcgaaacaaaccgatttatgaaaagaaatttgacaatggtgaacaatgaatttttatagtggttcactccttcgtcgataataagctagtccagttttattgatcttaatgcttaagaaaagttcttcaaaattattattctattctcaagtgagtt

SEQ ID NO: 178348 - DNA, 702 bp, Cannabis indica
catagatactgaactaagaatagcttgaacaaactaaaatgcaatccgtctctaaaatgacatttgactcgttattcttctttattcaactaagtgcctctttgacacttagaatctctgcaatttcggatcggcaactgacagaagaaatagttgaaaacgcctcaattaatcggccatcacagccgcgtgcgacaaaaccagtcccgacctcatttgtgtctttaaaaacctagtactattaattatttaaattttttaaaaatcaagagaatccttattataattataatatattcagtaataaatatatataataaaaaaattagtttgcaatttctttatatatagaaaataaaataactacctatgttgcttttgtaaaacaaaagtgataattttacccataaagaagtcaatttcatttttattattgtatgtctaattaaattattatgtaaatttccactattaataatagtgacaaaattggcattttccatagttcaattaatattttatcttgtagtgaaccatagttcattaatatttagttctaaagctaaataatatagctaaatattctatttatagtgctttaaatatgtgaaatgtatatgtataataactcacttcatttctttatctacatttggtaaagtggcaagttaaacatatttcaatgattttccttcaaaaaaa

SEQ ID NO: 178349 - DNA, 1093 bp, Cannabis indica
gactattctatctctgttcatattattaatgatttatatagtttttttttttttaataaaaacccccaaaatacaccacctattctagaacactataagctctaatgggattggggactgaaatttatttattaagaactcagccaaaatcaaatctctaatacataaaaggtaatcaaaccaccatagcaatacaacaaaatagggtatttagctaaggtgtgagctacctccttaacagatctaaatagtttatagatttttggaattttttataataatgtctaataatgataatagtgtaaactgtataaactgtatcacattgtatttttgttattttttttttttttattgaaaagactgctgattcaataaaaaaaaaaaaaaaaaaaacctcttaaatttttacatcttccattaaaaaatattaccaataataacagagcataaattacgggtatatatagactttatctattgacgttaaaatcatacaaatatataacagttgtggcaggacaacctataaattaatttgtaagtgattataaggggggaatttgatcaattattatggtgtcgtttagtaacacttttgttttttaattttttaatcacaaaatgaaagtaaaatttttgtttttaaaaaatttatttttcaaaaacaaaaatgcgtttggtaaccacttttatttttcaattttaaaaacagaaaacaaaagtgtgttctgtaaagtttatttttatttttattttttgattttatttaagtcgggtctaggtccggagtcagattcgggttcaagttaaaagtcgggtttagcgccaaggccgtagggaagtgatttgggtccgggtcaggtcgtaatctaaaagattgattaagaaaaaaactgtttaaaaaaatactaaaaagtgattttttttttttgttttaaaattttgatttctaattataaaattgaaaagtaaaaacagttttataaaacatgtttttgaaaaatattttcacttttctacttttaaaaaaaaaaaaaaaaaactgattgaaaaaagtgttactaaacgccacctatgttaatgtatatct

SEQ ID NO: 178350 - DNA, 755 bp, Cannabis indica
aaattgaacattcattaaaataactatatataaataatacaacgtcaaaatcgagcaatgcaaacaaaattttgggttataagtcgaacataacaaaaattcaaaattaaagttcttatgctttcaaaaaataataataataaataaataaataaattaaagttctcataaatataaatttcatataaacacaagacaaccaaagtctgaacaacactaataaaaattttaaactatcaaattttcaacaactcaacaatttcaacaaccaatttatagtctataacgaagaatttctttgcgaagaaattatacagaaattataactaaaaagtaaaactaaaaaaaattataataattttttttatctaaatatattgattatttataatagattactaaatgacaaaatagactatgtattttattaaatgacaaaatgaactttgtatctttcaaaatgataaaaataagactctagtttaatttttgacaattttttttttaatataaccaacttgaagataattcctaatacgaacagatacaaaaaatgtaaacaactttatcatagcacttttaaatcggattataataaaatttattttgacaaaaaatcaattcagagtcttatttatagcactttaaaaaaatgtcaaggtccattttgtcatttaacaaaatagagggtccaattggtaatttttgtaaaacacaaagtccaaaataatatttaccgaatatttaatataaat

SEQ ID NO: 178351 - DNA, 918 bp, Cannabis indica
atttggtacatgtcaaagttcagagggcaaaaatcctaattagcctagtttttaatatatatttaaaaatatatttagtatatttgaaaattaatttttttttataataaaaaataagaaagagaatatataaaggatgttatgtatgacattttttcttagcattatttttcaatacaatctttaaaagatgtcaaaaatatatcaatgtcatctaaacattcttaaagcatctccaatgctctaatagtaagactttggaaaaaaaaaatacaagttgaacttgttattttacaaaataaataatctaaaattatatctaccttaaaatctattaaaagaaattgataacttttgcagatgtattaatacattctttatcttccattttcttcaacagcaaattaaagatcaaattaccaaataatgttaacctgaaatcgaaatcaagtactttaaaggtgacttaatcctaactccttttgtgtagaagaagtggattatgagccaagtcaagcaatatctaatgccctacatatgatttgcaaatcaaatttagggtataagtcactatttgtttatatttaattcaattcttgtagtagtactgagagcactcacaacaagggagctataatagttaaaagctaaaaaaaaaatagctaagaaagccactaaggttagtttagtggtgagggagggatgggaaaaagggagaggtcatgggttcgaacccaggacctttaagctattaaactaatatataattgtaaaaaccattacgctacactcaaaaaaaaaaactagctaagagcttaaaattaagctctaacaaatgttttaaactcttaagctattataactcttcccaaactccaaaaaaattctctacatttagctcatgaatagtgaagaggt

SEQ ID NO: 178352 - DNA, 698 bp, Cannabis indica
tgatgtcttctttttttttttttttataatgatgttcaacaatcttaatgtcattgacaccctataaacatacaataatatctattataaaaataataaaaagatgttagaatattatatagacaaataacggaataaatttattaaatatgaataaaagttaattataattgaataaatacctaagagtattgtgttatcattaacacgtgaatcagtcaaaattagagttatgaattgaaacacattgattgaaatattcactatttcttcttctagtctcttcactaaatttgcaactaaaaataaagttttatattcacttgaaaattgtctgtactcacatgtagttgctacaatttttaaattttgcagtataaataatcttcactcaataacttcttaaacttataaactaaattttttcttattgtcgcatggattagattttcatgtatgataaatagtagacacattgagtatttaataattgataaattagataaaaaaaaaaaaaagaaataaatcactacaagaaaaatagagcattactgaggacaaatttacgttggtaaaaacccctacgtttacgttcagtattgcatcaatggggacgatttctttcgtcctcatagtatgttgtcaggaattttattctccttttcggaaattgcaaacttcaacaacttcaacaattc

SEQ ID NO: 178353 - DNA, 681 bp, Cannabis indica
aactcaaaaaaaaaaaaaatgtaccaaaaagtcagaaaatgaaaagaaaaaaatttactatttgttaataactttctgctctatttttacatcaagatgttaagaatggattttaaacaaaatattatgtgcatcaagttttagaattttcaacaatttatattactcataattttccttagaaaaaaataatgaagaaattacccctgaaacgcgagaaaccattatggttccaaaaaaattctccaggattggatataggaacatctgaaagacaagtagagcaatacctaaatttgaatacgttgttagtgatcactgatatcatggcatatttacttctaatattaaatgaataaataatcaattttattgaaatttgtagcagtaatgatgcatgttcacatgcataaaattaagcttggtttaaataattcaacattgcaaaactgctttacctgtgattgcaagaacttcaccaacattctctgttgagtaactcaaaccgccaaattttctaggactaactgcccataatgagaaaatctataccaaacaaggaaaatctatacacaatgagaattataaaatccttccaaatataactgcatgtgctgcaaagcattatttaattaatctgaaaatttacttaaacaatttaacagtaacactatcatgtac

SEQ ID NO: 178354 - DNA, 818 bp, Cannabis indica
atatttgtatcacaatttgacacctattaaaagtaaacgtttaacaaattagaacttttgcatctaccattctcttaagaatacaaatttagtattttctttttgttgtaatttcaacaacaataacactaagaattcaatttgaaacctgcattaaatcaacaacttgaacaacaataacatacacaaatagaccagttaacaacacaaagtaacaaaatagaattgaactagaaggagataacaagatttatcctagttccggtcttagatatcaatttgatccctggccatactcaagctgagaaaacatcaccattttttcattaacatggagaataagagagtagcaatacgagcatcaattcaagagcaacacagctctgcaacactcgagaaacacaccagagtaccagtctcagtttctcaattcctacccgagtacaccctctattcttaaccccttcaagaacatggtttcatagcttataaaaccaagcactcactctctaaactctctcttcattctctctttacaaaagtggaaagagtagcttatttataggtacaactcacagctagaaaataggtgcaaaaccggcaccaactaactaactaacataacagaaagttagttaagttagttaagtgtaggtgagttagttttaggttggtttagaggatcaacttccataaatttccaccttgattctctaaagcaatcttctagctatcttttcacagaagccttgatgatgttgatatctcaatatgttcagcaagtacgaatgttcacgcaaactgagacgatgcatcag

SEQ ID NO: 178355 - DNA, 1344 bp, Cannabis indica
ccgatgcaggcccgatgccggtccgatggtaacacaaaaaattgaggaagacaaaggcccgatagtgggcccgatgcatgtgtaaaaaaaaatagaatttgatatggctcgatgggtccgatgggcccgatggttggcccgatggtgggcccgatggagcccgattgcatgtgtaaaaaaatagaatttaatatggcccgatgggtccgatgggcacgatgggcccgatggtgggcccgatagtgggcccgatggttggcccgatagtgggcccgatggggcccgatggtctacagtgtagtgaaagagagaagaaaagagagggggtaatgtaaatgggggtattttaggaatattataaaatgtgtcatatcccacaaatatcaaatattatgagtttaagggaaaaatttcaagaatatgtaagcataaaaaatcaaatttccctttatatattttaataactataaatgtcccgtattgaagatgctcttagacaaagaaccacgtttgcaaggtgttttagtattggaataaacattcaaattaattaccgtagtgagtttttttttttttaatattttagaaaattaaataaataatatattgaataataattttggtagtcatttgagtattttagaatgaaagttgttacaaatgtgaaatttttttgactacttttaaagaaacttagcattgatcttattgagcaagtttttttgtttttttttttttttttgaaattaacttgtgcttcattaaaagaaccaggcaatacaaagcatacaagttaaatggatggcaaagaaccattccacacaatctcattatctagtcctaacccaaattttgcaacccaatgagccaactgattagactctcgatacacatgctcaattctcaggttaggactgaaagataataagtttttaatacctactaacacatcatccagaggactagcattccaattacaatgattaagtttatccactatagttttacaatcagtctttaaagtatccactggaagatgaagtaactgcacccaaagaatagcatgataaatggccttagcttctgccagaacagcagggatactcccaatacaaggtttagccacaccagctttgacagcaccagactcattagccaccacaataccataactatgcttttatccacgaacatcaatggcagcatcagtaaaaacctgcaaagaagaaccagaagtacttgtcgactccctatttgaactttgagccgacacatgagtctgctgaattttttgctgagcatccatatactgaaaaaagtaattcagactccaatcaaaagtat

SEQ ID NO: 178356 - DNA, 1016 bp, Cannabis indica
ggaaggcgttagaaaacaatacataataattttcagttattcagcaaaacagtatttgcacaaaaacatgccctgatctaagtatgtcatcagacaaattacccatcaaaataatatttgcattttgcacaaaaacatgcccatcattgtctaatttcaatgtggcaaagtaaaaagattgcctaagcatatttgtaagatcaattacctgtgcaatgtatggataggcctcatctacaatcgcgaattcaggatttccaactaaagctatgccttccagcaccccaattgccctgattatgagggcaaaataagggggtatccgaaacggatagtcaaatgttatctgagccaagtctgctgccagctcctggaaattgatatttttagcacctccaccttcaagtgcctgatcaaaaaccttggccaggacaggcaaaatgggttccaaattaacaccttctggaatgaaaccaagtttaacaaagtctctgactatggctccataatcacgatgtataagatgagcaattgcttcgatcattccatacttctgatcgtccgttaattttgtgacaagtcctattataggaaaatcaaacgtatcataacaagtcttcttaataaataaagcatcaatctactcaaaagaacattcttcaataatcaaaacaacaatacatcaagcactcaacaagagtgatcaaagacacatctgcaattgagataaaacaaattttttttgcagttgagatagactcatcgaagagagaaaaaaattgtactccatcaaaatctgaaaaatagatattaaaaaaactaaaagacatcaaaaatatagctgcatttttaaaagcagaaaaggccatgggttatgaatgtcctgtagtaaagggtgcaatgtattttgttaatttttcaaacatctataatcattatggatctattcttttaatgtatttttttctatcaaattttttatttttcgtatcatttattccttcagatttttaaaa

SEQ ID NO: 178357 - DNA, 1355 bp, Cannabis indica
attaagcttgtgatactattttgtaccaatttaaataatacgaggatttgatttatcatttaaacaaaataaaaaatctcatcagcaacgtttacaaaataattcaaaatatttatctttgtaattaattgaaccctatcctctatgagttatattttttttatgtaaacaaatgtattaattgtaatttgtatgtatgtatatagaataattattatactctctagctagtataaatattttaaatgaaatactaatgtaatggacactcgtagtatctagtacttttgtgaaatataatattattaatggtgtaatttgaattgtatgttttattttattttaacaaggattcgatgatacaaaaatactaaaattaattcgagagcgtcaccttaaattaatactagatatcttgatgacccaaagcaatgctcaaattttaaagaaaggatcaaaaagtgtttggaagatcaataatatttagatttttcctttaataatattatagctcatccaaaactataatctcgagatgaacttttgatcatgatcataatcatcacctatcaaaatacacgtactactatatatgtatatatatttaccaacattatagttatagataccttaacaatatggaaattcaactcgtgtttgaaattattttagttattaatttaactttattattggtggtggcgtttatatttgaaagacttttgagtacatcacaccaaccacttatcaagttcatgggctagccttctcctttttttaactttcactttggtaataaaaaaagaaaaacggaaagccacttttctcaaagttttttatttttatacttaataaaaggactgtatatttatccacgctgggctgatccaaacctattcaattaattggctataacattaatgaacttgagatcaattggttcaaggaaggaaattaaggaatgaaaaagtaatacaatatatctatgtaatcttattttggaattcaatatatgctatttgatcaagttgggttatgtgggccaatttaaagcaataaagtcaatatctaaaatggatatatatattacgaatttatattaagttgcacactaaatatataattaatagaactactttccagagaatattatatttggtatataaaaagaattgtcccatgacaaaaagacctaataattatggcaggcagcagcagcatacattttgtcagttttgcactatacctaactctcgtgtattagtcttttgaagtttgtggtttttgacagcaaaaactagggatcgatcgtgtattcaagtagttttcataacttatattgcaagccaatcttt

SEQ ID NO: 178358 - DNA, 1247 bp, Cannabis indica
aacctaaaagcctcataaagatcttcatcttcaataagagagatttcatcataatcttcatcaatgtactttaaggaaaagtcttgttcttcccaagaaaataagttgaagagatgaagaattttgtctttcagtccacgcaagttggttattccattatttggaaaaattgtaaaacgtcgaacactattcccatatttaacctgaaacattaaattgataaagcaaatcacagattgaaattataaccaaaaaaaaaaaagaaaagaaaacaaaacaaaaagctcaccttgactactacgctagattccatgagttgaagggtgatcctatgaatgcacagaaaataagtgatgatgatatataataatatatagtacagataacctttgttataattttgaatatgttgtaacaataatatccttcatttggggcttttttgaatttaaaataatatgtaatgttatttttaatagcaaattatctttttttttttgttgataataatatagcaaattatatttttctttaataaataacaaactaattttttatatatattttgctagcaatttttttaatatgaattaacaaattaatctttattatttgaaaatcaacgagagtttgtaatcctcaactgctcgtacattttttttcttcttcatttgatcgacaagtggaggtatcattacattataattaggagttttttcgtttggaaaaaattaatgtagtttaaacaataattaaaatatgggaaactaaatataaaagatcaaaagtaaagtgataaaatttaacgggtgaataaaaaattcaatcaacacaaataggagttaatttatactcaatatttaggttgatctactaaagattatcattgtgatataataatctgttggaaaattctacaatacaccccttaaaatagatacattgatgcactcttatctgttttagcacccgaaataattttttagtcaaattttttctcatgaacatatacgttatagttatttaagacatcctgcaaaattttaaaaaattcagaaaaatttaacacgccgaaaactacgttcaaacagtatattgcacgcgtgactattttattttatacgcgtgtaaaatagaactgtttgaacattattttctatattgtaaattattcagaattatttctcaaaatttttataagttatcttaaatagttataacgtacatgaatatgaaaaaaaaaattg

SEQ ID NO: 178359 - DNA, 621 bp, Cannabis indica
caatgttgtaaacttcctcaagcacacaaagttttcactaagcgagctctatttgttaatttactaaatctgagtatactaaaacatcaacaaacatacatatattttttttcctttttttctttggggaaggggtgacattaacaaacatggagcaaggaccatgcccgtgagttcaccctcagaaaatagaaatggcatgagaaaagccaacctgtagtagaagacatgcaattgataaccatgcgagaagtcgagtttgaagctcgaaaacctacaaattggcaggaaaagctggtgcggcatctgaacaactcagaattcgaagctaaatttcgagacgacgataccacggctcttctctcagaacattggctaatcgctgagaaggatagggaagtaagagaagccatttgattttaaactcgcacccaagaactaaaaacaagaagaagaagaatcagagagagagggattcagagttggaaatcttctgggaaaattattggcattatggaaaataaaaaagaaaattttggagtgaaagtttcaaaactgaaaaagagagagagacagagagaggtccacgaaggaaggcttatccagtgtgtgaaaggtaat

SEQ ID NO: 178360 - DNA, 449 bp, Cannabis indica
gtattaaaaaaaaaagttgtcaaaaattaagctcagggtcctatttttactattttagaaaatacagggtccattttgtcatttaacaaaacacagggtccaatctgtaacttttgcaaaacacagggtccaaaatggtatttacccttatttttctcctataatttgagacatcaaccaaattcattcctctaggctaaactaaacactagacaacttcaaataaagatttagtaaaaaagtaactaaaataagacttttgcaatagtttatggaccaagtctagtcattttattagtaatatactaggacactcaaaattcagcaataacattctgattccactttgaattttactcagaagagtggtcaaaatttaataccagataatttattataggtaagtggatacctaatccaattgaataataacaaatattatctcattt

SEQ ID NO: 178361 - DNA, 1089 bp, Cannabis indica
aaatcagtcggtttatggtcggtttttacaattttataaccgacctgtcagttacggtttttattttacgaaaattgtaactgaccgttaaaaattataaccgtataaaaccgaccgtacggttttggcagtttttagtagttttttcaatttggcagttttggacggtttattgcggtttttggcatttttggcagttttttggtataaccatttttttatttcaaaaactgaaaccgaccgccaaattcggtgatgacgtggaaccgaaaattcagtttacgatctggtcagtttcgatttatcggtttttatgaacacccctagatctgcctttcatggatctgaaaattgaagtcagtacattagttttatgcaaattaaactaaattttcggttaaattttagtttcgtagtagttttttccacatttttttttatgaattcgaaacaattcctattttgattgattctggtcatcttcacaggtgaagtccccggaattaacggtggttctctttctggttaaattttcgtgtcgtttgcgttgggttactgcgtggttgcatgatggttgtgtgatagttgcccaggaagcatgaatcttaggttgaaagtttgtataagtggtatttgtataaaaaaatttatttaggttgtatatttgtttatttgaccagctgaaaatatatttgtaatattgttactttttttaataaaactgaaaataataaattaagtaagtcattaatcaatcatcatgtgtgaaagtaaatcaaaactaatattgaatcacattaaagtaagaaaataaaattttatttatagattacatgagcaacagttaaaagtattcttaaacaatataagagctttaactaaattaataaataataatacgaacttttttttagaaacttgaagcttcacaaaaactagaaaagtacttttaaaaaaatattatatgccacaacatcattcttaaattctcatttatataaatatataaatatagattgagcttaaaaatgaacgaagagaaagatactctgtgatcacttgttctcacttctcactcctatttggatt

SEQ ID NO: 178362 - DNA, 724 bp, Cannabis indica
ccaagatagtacatttatgatacaatccaaattaatattaacaatttacatctatataaaatttccaataagacatccaaattaattcaaagagtcaaagaattaaacgcgtggactcacatttttaatccaatcccaaaaataacaataatagcataatagatatcagtttaattaataaccacactacactaaacaacaacaattaaaaaaaaactaagctaaacaagcaagcaaacaaacaaacacgggaaaagtaaaattaaaccactctctcaaattgataaaagttcacattgtccccgatgtgataaataacccaatgagagaaggacttacctgaggccccatctatagggttgaagctccgtcgcggtgagctgagttggcgtcgcgtggtgcccgtagctcaccatatttccaagtttttagcaataaaataattaaaataaaacttgaaatgccttgaaataaaatgaaatatgaatgaattaaaatttgagttgcctcccaatagtgcttaatttaacgtttctagctagacgctcaacttcactactgcttcaacttggatcaagtccacctcttacatccaataatatacttgtataggagatttaagtatagatgatttcagactttcttataggtgttgttagtttgtattggttttaaagtttaaagtaatacaattaacctataacaaaaaaaaatatttcaatta

SEQ ID NO: 178363 - DNA, 553 bp, Cannabis indica
ttataaatatgcttaattaattaattaatgaaaattagtgtcagtgtttgaattaatatttatctctcctttgttaatctttatttgaactcaacattattattcaagactgttcaatgggtgtctacacatgaaaattaaacacaatgtttgctggtttaaaatttatacaagaacatatcatgtgataaataatgggacaaggcatttggaccctatataccatagtagagtgttaacataaattgtggtttcataataataatctaaaatttgagtaaatcattccatcaaatttgatacaaaataatctatagaaattgctaaccaaactagggactagtggaagatttaaaggaattggttgagtgtgatagataatgtagattttttttaatttatgtttgtaacgtatgaaatggggaagtataaaatattcaaagactaaccaaattacgtttgtttgttttctattgaagacttgaatatattccaaactaaaggagttgatgatggacaatattccatcatcaagactttcttaattaaaaac

SEQ ID NO: 178364 - DNA, 747 bp, Cannabis indica
tcttgggttgaggaagccatggcgggaccacgacagcccagccatggtcactccgaaggtgcacgcaaaaacaaaggaagatgattagataggaagagatagagacggaagagagagtttttttttttgaaaagaacggaagagagaggttgatgaagatggtgaattagatttagggtttcaccatatcctttttatacccctatttattttttatctttttttatttcctttaataaataattaattaagagagataaaggaggtctttttttttctttttgtagataaaggaggtctttattttttatatcagccgcctctttctaatttttttgtttttttttaatttttttatttgtagtctttggtgacacgcatcatatgactctgaacacttttagagttaggcagtgcgtgtcactatatatttttatattttttaaataaataaataaataaataagttttagtgacacttcaaatgtatagtgacccgcattatgaaacatatatgtgaaatttttactgtcaagcaatgtgtgtcactaaaatttgatttaaacatttagtgacccacactttttgtgcgtgtcactaaattgtgtcactaaatgtataaattgtagtagtgcacaaatggtcaaggtaccacagcaaaaataatatgtatataactacgacttctaacattgctgaatctctaaactcaacaaatttagcagctagagaactaccaatcacaac

SEQ ID NO: 178365 - DNA, 937 bp, Cannabis indica
gtagttaactctttttttttaaaaaaaaaaaagtaacaaaaaaagaaaaaaaagaaaaaagcaaatagtgaataagtaattgcatattaattagtgttgacttttccaaaaatataaaataatatccatgtctctatcatttagtttaaaaaaaggaaaaatattaaaaagtacccattttatctaatatctttcgatatgttaatatcattattatttcaattaaatatcgggtcccatataatttaatgtaataatttttagagagtatcactaattaatcgcaagtcaatatatctaaaggtactaggcaccactagtatccaataacagtactcttaaaaaataaatacatttgacagaagcaattgaaaattttgaatttaggcacaatataatctatcatgatctttatcttctgatatcatcaagtttttcatccaatccataatttattggcatggttgaaaatagtgttgtaaatattggttaaacattttaacaaagcaataaattggactcaaagcctacgaggtaagaccaagactaaacacgaaaaatatagatttagacataacacaacgtaatacttagtacgacatgacacaaaaaatatgtgcttagaagatcattaattgttttgattgtaacaatagataattcatagtacatttgtgtcggagatataaattgttctatgtaattaaaagtgaaattcctagtctatagtagagtcatgatgaattaataaattaagaaatttacgagggtaaattttataacaatttattgaaagtttgattatataggctcatggttaccacaaagcctgtgataatatcatcttgtagaaatcaattaattggtttggttaatcaattaaaattcaaaaactaactatgtcatctttaagaattttacactaattataacgcct

SEQ ID NO: 178366 - DNA, 689 bp, Cannabis indica
tttttaatagtaaaaaaaagtttattagaccaatttaatgcttaggcacgttagtattctagaaaacaataacaaaaactattagaaagatactaacgaaaatacaaaatatcaagttttgagtacttttgtgtaattttaggttttgggatttagtagcaacaaatacaacaaaataagtattttttgccgcaaatttctcatgtcaaaataaatagggtttttttgccccctctcgaaactatgccacttctaaagttttactatttatatatataaaacttctcccaaactaaaaaactattgcaaatgtccccaattacattttgttcatttttttaaaataatttgttgatgtagaactatcttgtgatgctaagtaggcagttcaaaggtccaaataaaaaatacataaataaataatagtctaataatgaattatgtaaatatatatttcatagagatatttgtatggttatccccaataaattaaatttcaagtagcttaagttagttaatacactgcaactatacatgcgactcttacataagcaaattgtttgaaatattaacaaagaatgcaactgaatgaaaatatttgcaataatttttggtttatgagatttttttaagacaaaactctcaagggtcacaaggaaaatatcttatttattctatactttaagtaa

SEQ ID NO: 178367 - DNA, 595 bp, Cannabis indica
ccgatttacatattctgttgagtgcactatatcatacattcattgatcttattttctaagcaatatataactttaatgttgcatttacaagacctacctttccgtgcattccctcaatagcctttttagattcttcctcagtttcatagctaaggaaagcaaaccctcttggcctttttgctattttatccataaccaaattgactgtataagaagaaagaagaaatcctattaccctcaaaaaacaatcgtttaagaaaaaaaagaaagatactattacattgatatgtaacagcagtagaaccaacaagcacagtacagcatctgattttaccttcaacaagctgcccaaaattttcgaaagcatttcttaaactctcttctgtagtgcggaatgagagccctgcatgaagagattattagctgtagctttttttttagctttctctaacattactactacaatacagatctcttagagatgcataatgtattctaggtaaactagtaacaaattatagttagtttaatacaaatgcaaggaatgctctggcaaaccgttagcctgcatcaacataactacaaatataagagg

SEQ ID NO: 178368 - DNA, 717 bp, Cannabis indica
agtttctttcaatgttgatgaaactagtttttaaagtttgtattctttttcagattatgattttttatattgtttgttttttcatgatgatgttgatgaaactgatttttttttctgctgtttttaataaaataattagtttttaacaaaaaaaatagtagtttaaataaaaaaaaaatttaatttatgtaaaaaaataagatacaaaaatgtacactaattatatatattcataggttttaactattctgtaatgaggttgctctatttttatgatattattgtatttttttagtttgtataaaactagttttattattgtatgatatttgaacaacaatttttattttattttaaataatcagtttctgacacacatattattttcataattagtttttttaagtaactagttttcataactggtatttttattgttgttcacaattgagtttaaagtttcaattttttatttgattatttcaagaaactggtttttatttgtttgtttttattttgattgttttactaactggtttctcacattgtactgttttttttttttttttttattatttttattgattttttattgtcattttttgttttcctttttttttttctttcttttgtattttaattttattgtttcctctttggttatattttgcttacataatgtatgtttaaattcaatttctattttttgtagcaagc

SEQ ID NO: 178369 - DNA, 635 bp, Cannabis indica
aaaaaagtaaaaatattatcagtaaaaataattgataaaactatttttcattttttcattttttgaaataagaatcaacattttagaaataaaaatcagttgccttcaaattatttaaacaataaagttttttttattattacattttaaaataatttttttttttgtatatttataaaattccacatggaaactcttatagtaactaacggattaacttaaactgtaactaaagtccatatagaaaccactgcaactcaaactgtaaatttaaaaaaataaaaaaagattaaaaaataatctatggagtaattttcctcaataatattcaattatagtctattttatacttttttttataactattcactccattttttatcacttcaaaatttcaaataaaaaaaaattaccaaatatttattttaaaataataaaaaaaaaagcctagttaccaaatatatttttattttcttcaaaattgaaaaataaaaatatgtttccatttttgtatttaaaaatattaaaacaaaatttataacaaaagtatcctaaaaaattgaaaaaaaaaacaaaaaaaagtaaaagtaacaatgaaaaaaaaaataagcaaagcattaacaaaagaatttaga

SEQ ID NO: 178370 - DNA, 660 bp, Cannabis indica
cttccttcaattttattcacaaactcagcttacttttagtcttgtgaatcacttgccatcgagggttggcaatagctatctgtaagaaaaggaaaataaaaaaaaaaaccaaagatcaatgaatcaactagaaaaaaaataaataaataaataggagaggtaattaaaattaatgcttatcaatgcaaaaaaactaaagtacctggattccttgttcattcaaatttctatgcatatcttcaagacaagctattcctgatgtatcaatattcagcaaacctaaacagacacacgtaattgtagatattattataataggcaagttgtacatgttataaatcatgtttgatgaatttattatttcttttatccaattattgtttttttttttcgcacccatcaaatttttaaatcttttcaaggaaatatatacctataatgtatgtcataaatgaaatgcatctatctttaatgtatatatattaattaatgtataatatattaataagaggaaatatatcataaaatacttatgtgttgtatattgagtatacaagagaatgagaatgtactctttatataaagaaagtccttgataaagaataccaacaagaactaaaataataaactaactaaaataatatattaataagaggaaat

SEQ ID NO: 178371 - DNA, 787 bp, Cannabis indica
atttttgttgagtttctgcacaacgcgttagattcctctcttttgcgtttagatacttcttttcaccatatttggtcgaggacccattcttcgtcccttgtaatgacacttaagggtttagagtagacttcgtcttctcgattttacgcttttctccttttctctccttacttttttgtaatgtcactatctgtgggattcttgcacccgactcttgtcaaggaaaaccttgtgaggctttcttttttggcaagtgtccggagggggcctctttccagcggttaggggacccccattccctttttgaattagggtttggtttggggcctgactgctggattttttcgatctttttcagaaccaaaatgtctgcatctggttctaagtcttcaaagaagggagagaagcgcttggccaccctggaggaggtcatgaagggtcctgtggcccaagaggggcataagtcccgtgccaacgggtgggaagcggctgagcttcattctaccctgacctgcgcccatcagctggagcagattgtggtggtggcaggcatcaagccttcgacctccgggacttaccaccggctgccccgggacgaggagacgcccaaccacaactacgggggcttcggagcttggagccagacgcatcttatggccggggccatgctccctctccaagattatttcattaactttcttgtatttgtcggccttgcgccatatcaacttattcctcaagcttaccgcttcttcttctcctccggtttccaggccatggatcatct

SEQ ID NO: 178372 - DNA, 739 bp, Cannabis indica
aatggtaatgccacttttaatattaaattgttaattaatatacatttagtcaaaccctcaaacgtaccgtttgctttgatcgtatcgtttcccttcatcatatgtgtgtgtatatataatattaattatattaaggctaaaattgatgaatggaaaggcattagtaagtgaaaggctgtatatttttttttttaatttttttttaatttttttgaggttggctcaccatcaagctagcatcaacatgatcaatttagtgtcaaagacatcaacttctccatcaaggcattaaaattaactaaggcatgcatctatataataattttaactttttaatatatatgaagaacaagaagtgaaatatgaatttaatttttttttcgccatagtattttttttaaaaagataatttgtcatagtgttttattctttcttatttcttgatttcttttttgcttttttgttatatacaatatatacataatgctaaaattattagagaaaaaaaaatatgtaatatatattttaatgttgaattgaatgttcattctcctttgtaatagacagttagtgtaactgaattaggtggttaagttagttgaaattgtctggttttaactaacagtttctctaggatttagctttctgttattactattctattctttgtataaaaggatctgtatattcattttaatgatttgagctgattttattttcaatactctctgttctctct

SEQ ID NO: 178373 - DNA, 541 bp, Cannabis indica
atcttgtttttcttccattactcataacaccacaaataaatatgtcactctccctaatggcacaaaagttcaaattgaacatgttggcactgtcaaaattaacagctgcattactttgcacaatgtcttatttgtgccacagttccattacaatttgttatctgttcatacattattacaacatagaaattattctatgcatttcacaggtaactattgttacatccaggaccattctcagacatcgaagattgggacagctaaacgcattgggaatctttatgatccacagcagcagacaatccccaataaaggctcaccaattactacttgtaacattcatctagataaacttcaatgacatacacgccttggacatctatctgtaattgttactaataaaatcaataaaagtttatatttttctaaaatctcaacaccatttaatagtcctacttgtcatattgcaaaacaaaaaccttccatttccatctaacaacaatataactgttgcaatatgatcttattcatatggacattt

SEQ ID NO: 178374 - DNA, 787 bp, Cannabis indica
ccaagtttcccattcaatccaccttgaaatagcccttgtttgtcaagttcaatgagccctctctcactaacatgtccaagtctcaaatgccatagctgaatatcattgttggcattgtttattgcaggagatgcagtcccagttacagctgtgccaaccatgtagtaaagaccattcttgagtctacctctaactaccaccagagagcctctagaaatgttaagggtgcccttatcgattttaacagtgtatccatgattatcaaactttcctatagacaacaaatttctcttaagatcaggaacatacctcacattctgaacagaccttataattccatcatgcattttcatattgacagtgccagttccaatgattttacaggctttgttgttgcctaagaggactgtaccaactgaactttcttcaaagtgtgtgaacagatccttgttgggtgtcatgtgaaatgagcaacccgagtcaaggatccattcaccaccagagtcctcacaagaaactaccaacacatctgctgaatcgtagccacttgacacaatgccagcttctcctctttctttgctcttgtctcttttaagcttgttctttaacaagtaacagtcatctctgaaatggccctcctttttgcaatagagcattttctttccaatgacatttctgttcttggaattagaattgtgtccagactttgatttctgtaaatctcttctttctgatctctcgagcaaacagtcctctcaccagtttctgacttgtcatcaacctttct

SEQ ID NO: 178375 - DNA, 783 bp, Cannabis indica
ccgatgtaaaggccgggttacaaatgcaaagataaataaaattagtactacaaactacaattttaaatcatagaatatattatatataatagaagtaaaatgtgaaaaaaaaaatagaaaaccactagtcgggttggacgggttatttcagtttaattgggcgggttggacttattttcaactcgcccaattaactgattgggcggtttataattttgtaggatttttttagtttgtatttttcgtcgacttttcaagtttggtttggacgatttacgaaaatttatgtatagccctaagaataaggagcgagcgcccaagttgacattttgtcaacttgggcaattctaagaaatttttctaaaaagtattccgagcatattcaccgttttcaacaaagattgagatacaactattttcggggaccaaacgaaacttccaggtggcttaaaactgcacccagcgcccaaattaactaaatcagtttcttaaaaaagtgttccagacatttttttcgtcatcagaaataacaaaaaatacaagtaaatttggagaaaaaaccacaatcctaagagcatcaaaactgagcccaacgctgtggttgacaaaataaaaattatataataacataaagattttaattaattacaaaacttaaagtagagatcaaccatctaattcatactaattttttattttaaccaaaatatacttctttaatttagaaaaaataataattatagagagaccatatggaacaaagaatatattctttccttacct

SEQ ID NO: 178376 - DNA, 805 bp, Cannabis indica
atcaacaaaagaggagaggaaaatatttctcaaaaaaaaattgatgccaaaaagtgaaaaagaaaaaaaaaatataccttggggatgaagaacacttgaaggcttgatgaaaatgaagtttcaagaggcttgggtgtatgggatttgaaatggaagtgtgaaaattttgattgacaactctcttatttataagtgagttcaatctcctaatcctagaacaattgggagtcttttaaatttaaagctttaaaggaagaggtaaatgataagtaaaaacataaatatatcttttcccttctcttgtcaaattaaatttagaaattactatagaaataggaataggaatcaaaatttaaaaggtaacaccaattcctaatgctactaagattaaggaaaaattagagatttaaaagaaaaagataaatgataagcaaaagatcaaaattcttttctcttcttctttctctctctaatttttgaatggcattgtcaaataggattaggataaaataagaaaatttaaaattttcaaagaaaaagataactttttctctttttctttgtgaattaaatttcaaaaattcccaaggacaaagcaagggaatccaaggtcctaatttaattaggaatccttgaagagtagaagcaattacctaatactgtcaaaattaatgcccatttgataattttaagtgaaacgagctcggttcacatcatgcagtcaactccacacaagtgtaaagttgacttgtggggcaaatttaaagcccaaaacttttcctagtgacatggacattaatgtttg

SEQ ID NO: 178377 - DNA, 1080 bp, Cannabis indica
gctatatactttcatgtgttaccaccactagcttggagagaataaatctaaagtaagtattaacattcattattattttgttgaaagtatacaatacaatactattttattcattatttattagaaaatatatataaaatatgatttttttttatttttacattttaaactaattttattttttttatttttacagaaactcacacaaaaacttcataacaagtatagagcaacgtaaatcgtaaacaacggaacaacttaaattacaaccaaaatgtacatagcaatccatataaaaaccaccgaagcattccaaatcgtaaattaaaaataaaataaaaataataaaaaaaaagtaatggactatagagtaattctcttatataaggggtttagtttttttttttttactatatttttatgaaaattcacatagcaactcacataacaactaatacagcaatctaaatcacagctaaaatttataatttatattacaactcaaatagaaactacctaactaacccaaactaaaaattaaaaaaataaataaaaataaaacaatatatataaaataattctctaatataataataaaaataataataaataaaaaaggaaaactcttattacccacgtactactccacccgtagctatccacagtacaaaaaaggcgagactgcattaaaaggtgggtaaagaggtgcacgtggtcccaaattataacccaaaatcaaaaatcaaatcaaaacataatgttcttcaaattataaatacaccaaaatccaaaccaaacagtttttccaaaatttctgaaacatcaaaaaattcaattgggtggtcacataaatttaatgaaaaaggttttttttttttctctttcatcttggtacctttatctttctttctctctctcttctgataagttatttctttctctgtatcacagttgttgtttatattgagtagagacgagaccctgtgcttaaccattccaactgtggcactgaaaaacatggtgttttttatattatataaaaaaaaaaagacacaaatgcagtgaaaacgacatcccatc

SEQ ID NO: 178378 - DNA, 737 bp, Cannabis indica
ctaaaccctcatcttttggtgagtcaacacttgtaatatatctttaaatttaattttcatagtttaagtaaatatttttttgaacaaaagtcttaagaaatgaagagttttctgtcatactactaaaacacaagactttctatacaaattaatcaaaacgcttttgttctgtgaacaatcgatatgtgagtagacataattttaaattttgtgacttatctaaattagaaagattaaaatctctaaagttgaatatgtgagattgattttttttattattacttttaaggaaactattatcaaaagctcaagtgaaagcctcaagcaaaagagatacaatggaatttttttttatgttgcttaattacatgatttttggtgttaaacatgaatcaacacaatttattaatttagtggagatatctaggatttcaaaataagaaaatttggtattcttagctgagaatagagagagactaataaaatggtgatattaatatttcaagaagaaaacaaaagtatggatctattaatttttttttttttttttttatttgtttcatatgtcccccagtatatggctataacatatcgaacatcatctattatatatatcctaatatcctatccatacatatacatatataatatataaaagaaatatatttgtatacaagttgttatcctttaaataaatgagagaaacaaaatatatagaagcgtgaaagtcatgaaag

SEQ ID NO: 178379 - DNA, 613 bp, Cannabis indica
attatacttccactggtaaattaatggaactaaaggatagagaaataactagaaagatcaaatagtattttttaccaaaactaattacaaaccagcacatggagggctactcactgaaattgattatatcaatggacactgcagttaaactcagtaaatataattctaaaattactaagagtgaatctatatttataatgaaatactcatggaattaataaacaagagattatttgattgatgagactcaataaatagccaccatagctttgaagaccaaggacgtaggtggcttagttgtagcgaaccttgtaaaaattaagagtttgcaatttctatccctaaagtctttacatttcaagtttattatttgtttatactcgtgattatctttgttattgcattaaatttgaatatttgcatgaattgtctttggggtttttaaatttttgaaattagttaaaatttccaattcacccctcttggaaacatatcttgggctaacaatttatcaggcaaaagacaccaaccttgtcctaaaaaactaatggtaggtgcctatagcttatcttgtccctatgagatttgtattttaggttaattaatttaatta

SEQ ID NO: 178380 - DNA, 1245 bp, Cannabis indica
aacaacaaaacattttatgaaaataattttcaaagcgtatatattatgaaggaaaaattgaatatattctattcaattataaaattaaattagaaaaaagtatatcaaataaaaaaaaagttgaaaaagtattatgtaaaaaagtaatgaataacatacaagattagattgaaaatatagtgtgaatattagtttatgcaatatgaatgtgttttattactactttaatgtgtctaactactactctaatgtgtcttacacaaagtttctataaataataataaattattatattaataacgactgtagacaaatataaccctatcaaaaaattatattttaaataaaaaaatacaagccggatactacaagtataaatttaattttttaattgtaggtgggtccaaattatgtgacacatgttgaagaaagtacaaataatagaataacttttcagaatatttaacaataaaccccaataaatatatgtttactaatagagcgcaactcaatctgctaccgtacaaagcggattggaatccgacacctaggaaaaacttacaaaaatactagaattttggaataagttttacaaaaatactatcacacagaaaaagtttttcaaaaatattagtgtttttataaaacactagtagaacacaaaacaaaacaacttaaaacaacagtagaacaactaaaaaacaccagtagaataccagtgaaaacttaacacggtatagtactgcagtatgaaaacttataaaaaacacaagtaaaaaagtaaaaaataccgcctgacagtatttttaataaaaaaaatgacaaaagttagtataccatgtaaatttctcttttttttatccattaatcaaaaatattctcatattatattttattaaaacatacccacttttttaagtgggttgtctaatatactttcactctctattaattaagtctaacatataatctacattaacataaggagtctaatgagaacatgatttataaaagtgggtatatcttaaagaatataaaaatggaggtaaaattaaaacaaataaagtaaaatgagtgtacaatgtaatttcctcaaatttttatgatatttttttttctttttttgttagcaaagtgaacataagtttagggtctaaaatttgtcattttaaaagttctgttataaagacaccgtgttgattttttttgaaaggatcgatatggaatggttgcatgaatttattt

SEQ ID NO: 178381 - DNA, 579 bp, Cannabis indica
ctccatatttccatataagtattttaaaaaatcaaaatattgaaaggataactaatctttatttatttatttttcaaagtttttatgtgtctattttatagaacgtggtccgtcattggtgacaattattaagtagcaacaaagatatgtttttttctcttttatttatttatttatttcatgtaattgttgataattgttcatgaattaaaatgtgatggacatggacaatgatgatatcatcattgcaaacatagattgagaagttatattgaaaaaaataattattttagaaagaagtatatattaggtattaaataaactacaatatttttgaaatttagttattttgaatggtctaaaatgtaaatttttcataatttaatgagtaaatcgcgccaaaccacaataacttttatcaacaattaaattaaccccgaaaatttatttttagcgagaaatatatatcatgttaacattttgttattttttttctttttaattttctagtgttaagtgatatgttggattatttatgaatacacattacactatcttcatggacacaatatacatagt

SEQ ID NO: 178382 - DNA, 1308 bp, Cannabis indica
taattacacaagtataatttgaaatgaatttaagactcagattcatacctgggaaggagaacattcaagcagttgggtctgcaatgggctttttacagagcataattagccggcccaagaataaaatagcctggtataaaaaggggaaggagaaagtacaaaatgaaattttaagaaaagtcgccgttgccggggatcgaacccgggtcacccgcgtgacaggcgggaatacttaccactatactacaacgacattgttgattagaaattatttgtttagtatcaaatcatttacttagggaattatataatattcgaaaaaaaacgccgttgccggggatcgaacccgggtcacccgcgtgacaggcgggaatacttaccactatactacaacgactttttgatagtaaaatattatttaaataattatccagttatgtgttttaaaatatattttcatgttacaagctagggaataatagatatattatattattttttgtaaggagagaatggatagatattatcatcggtgctgataattttttaatttagtattggatggtatactaatattagtcgttttgtgttttaagagtttttttttttttttttgaaaaaagaattcattcataaactcaaacgattacaaaagaaatgacttctcaactcaaagagcatcacgaacataagagggtgaagcactagcttttagataacaaaatttgattagttaaaatgtaagccacataattagtttctctaaaaataaaagacaaactgattacagaggggtgtaagcaaaagcagttctttaatttgaaataacagcccgtcaatgtctctacatccttgtttcatgtctttaatcagttaaaccgctcaaagacaatttgtttaagagaaattacaccaaagagagtaacatgataactttactacgtaaatttggatatttcgtttcgtgtaatgttttgagaagtaattctcaaatacaaattaatggatcaaaaaatatatattatattaaatatggctatataataaattattattatttctttttataaaaaacattacaattcaaatttaaactcacaacatatctctcttaaataaaatgactgtataacataattatttttttttaacattcatatatctctataatcatcttaataatccaataacacatctaaaaaaaaatctttttattattgttttctttttaaataataaaataaaataaatacttatgtttttaaagaattgatattgtttttattataaaaaattgaaaaaatatat

SEQ ID NO: 178383 - DNA, 900 bp, Cannabis indica
aaggaagaagaaacatatttttaggtacaataactccctcttttttaatttcaatgatttttttttttatcaataaaaattatttctttcatatttttaggaagaaaaaaagtgggtttgtgagtgggtatgattgagtctgaaaatttaagaaaattgtaaggggattgttgtttttgttgtgctatgactattaatgttgttgcattttaatcttaaagttggtatgataataaatatttgtttgtttgtttttttaataaagaacattgaatattgttttttttaattatttttttgttactttttatttatttttaatttaatattattgttgaattaatatattttgttctaatcacatatatgtatttttttttttttgagtaatttcttttatttaaaattagaatgttaaatttattttacacctagaattcgaatatgttacaatattattttttttttagaaaaaaatagaatgttgtagttagtttgacttagaatttgtgtagtacatttaaactctttcaaattgtactaaataaagtgtaggtaaattagagactaaaatataatttaaaaaaaaaatttatttaaaagagtgattagttttcaattgctctaatatattgatattgacaaagccttagtaactatattctactaattatgtaaataattttatttgtgcttgtttatacttaattgtagatatattgactttggttttgaaatgctttctttatttggtttgtattattaatgagtgtaaattgttgcttgcagaactaagaaatatctcttttcattttgttaagcgttcagcaaacgtggtggctcatgcttttgctcgagcttctagtttatatcctgaatgtactttcagtatggggaaat

SEQ ID NO: 178384 - DNA, 601 bp, Cannabis indica
ggaataagaacgatgttggcttctaaaagttgttcttcaaaggccgttgttgtgaaaaaaattcttggccaaattaatcacatctttccccactatactccaaaacttttgataaaatccaggactcattccgttaggccacggagacttgtctggatgcatttgaaaaaccgctgtcttcacttcttcttccataatgggctgcaaaagatttgagttttgttccaatgaaatggaaggttgaatacactgcaccacttgatcccaatgagtattagaagcttgaaataactcattgaaataattgaccatcaaatcctgtaacccattatcccagccgattgtttgcccatttgagttttggagattggaaatttggttgtttcgacgtcttttaaccacatttgctttgctctttgtttccaaaatatctccttttgtgtcaaaacttcataaagcttctttttctctgctgaatatgtcgccatagcagctgcatcttgtcttcctttgacggctttaatggcttttttacattgtttgattctagtattgaagcttcccgtgattccttgatcccaaacagccaacacttcagcac

SEQ ID NO: 178385 - DNA, 695 bp, Cannabis indica
tctgatttctgaacaaccattaaatagcgaactctcttcgtctttgaggtgtgagtgcttacttcctctcaaagtaaggcttgaacaattcttctcccaaaaacctttctcttgctcaatcaagttgttcaaaccgaccctaagaccaatataagaataaatatacaaatactaaaaactagatgaataactaggttttcacaaaaaagaactctctcttcacaaatgataatatgcaaaaaatgaaagctagaagagttgaactgattggctgctctataggttttatttataaaacatagaaccttagagacaaccacaaaatcgtttccacagttgtacaaactttctaaaagaaaatcttgtttgcagcatcagaatcaggttctacagcagcaaaccagaccagaaaatgaaacttgccaaaaaggtattcgatcatgaacatggacttgatacctgccaaaaatagtgtgcttgatctgattttatcaagacacaatcaaacacattaaagagaaatagcaatggtcaaagttttcatataacaccaacttttcataagagaatttcttctcttacagaagtttccaaaacaagaaaatggacagctgaaaaagattatttcctttgatgaaaagatcaataaatacacaaatattaaaggtgataaaaaatggtttaattgcacaaag

SEQ ID NO: 178386 - DNA, 1237 bp, Cannabis indica
gtattgtattgtattatgtttgattgtgttgtattgtattagtattatttaatacaatattatgtttagtattgacttgtattaatagattgtgtaaagttatagtatattttcaatacactccactccaacaccaactacgggtctgagtcccgagtttgggttcgggtctgggtcccagtaaaagttcgggtccgggtcccgagtccggatctgggtctcgggttcgggtccaggtcctagtccgggtcccaggttcgggttcgtgttcaggttggagatttggtattgaccctgaatcctttgtaaatattataatacactaatactgactatttgttatgtattaaataatacaacatatattgtattaaaaattttggtcgtaataattaatacaatacattgctttatccaaacatagtattatttattatttaatagaataccacctttatacgacgtaccaaatgagcccaaaattatacagtgctgaaagttaaagagacaaaaatgttaattattcaatttaagaatgatatatgaactaattctcctacaaattacacctacttttttttaaaaaaaaaaaaaaattcctttatgatgctctttagttagtcaccctacccaaatatcctcatagaagaaaaagaaacactttggacaaaatggagaaaattgagcactcgacagttagcacaaacggaataaacatgcacgtggcgtcaatcgggaccggcccgacggtcttgttcctccatggcttccctgagctctggtactcctggcgtcaccagatgctctctctctcctcattgggtttccgctgtatagcccccgatctccgtggttacggtgacaccgacgcgccgccgtctccggagtcttacagtgtttgccacatcgttggcgacctgatcggccttctggaccatctgggtatcaaccaagtcttcttggttggccatgattggggagctttcattgcttggtacttaagcttgttcaggcccgacaaagtaaaagctatggtaatcttaggtgttgcttacaatcccaggaaacctgagatgagtttcttggatgggttaagggctttctttggggatgatttctacatgtgcagatttcaggtgataaactctctttttcatttttggcttggaaatatgtattgtgattttttctgaatataaaaactcgccctatataaaatagagactatagcattttt

SEQ ID NO: 178387 - DNA, 665 bp, Cannabis indica
aaaaaatgagtaagtaccaaaagaatgtgattttgttattattccaattttgtaatagggaggagcaggagaagattttatgattctttccaaataaaaattagggaaatttacacgttataccgatattttccattttatttcttttttactgctatacggcaattattatatttttaatgtgtatattgcttttttttctttaattttgttcaaacctatttaatttactgatggataaattttatgtcactttcatgtcaggttttttatttaatatactgattgttttttattttattttttttaaatttaattttaagtccaacatgtggtcccattttaaaatttatatatgtgtttaggtgattgatggcttacatcacttttttgactatttttttttaacttaaatttgtaaaaagtgaaatacccacccacgtgatctctattaattccaaggctttacatatattttttatttctctctctctatatctttttgtgcgttggtgtctattaaaaatttcttgagatttgtgtcttaaataaagaaaatttctttgagattagtgtataaaatgaagaccatcaaccaaggactttagataaaaccctctccccactcttactatttcaaaaatttacaaagctcactcctttca

SEQ ID NO: 178388 - DNA, 508 bp, Cannabis indica
aattatttagccaaacagaatatgaatagatacaaagcaaagacttatataaaaccaaattactttaaaaatttagacaaacaacttgagaccattcaaaacaaaaaaagaaaaaaaacacacttaatgtaagtaaacaaacatataatgttaagaaatatatataataaaaaaatgtccaattatctttacttttttgacaagataataaaaattaaacaaaaaaaaacttatcttttgaaaacttcttaaataaaatagtatcactctatatgaaaactaataagtttagtataatttttggaagaaaacgcttacaactacaaaaatgtcaatgctaaatgagaattaacacactaaaattgataaagataaagttaaatatttaacaataaaattaagtagctcaaatttttagtaaattaaacttatcttttgacgactctatgacctactaattctcaatcgaaaattcacccctgccaaagtataataactacattctaac

SEQ ID NO: 178389 - DNA, 734 bp, Cannabis indica
aatgaacccaaaccgggtcgtcctagcccaactaaaatttaaaaaaaaaaaaaattaatatacatatagatttttttatctttattctttacatcagattttattttgaatggaaaccctaaacctaatacataatccttcctctctctcctttgtcgaagtccaaaccctaacagccactcttttttgttttgaaaaaaaaaaaaactctctcagtgctctcactctcagctcagttaggaggaatggaagatcaatcttcttagccagttagtcgtgtccccttgccctgcccgtggttgtgcctcccatctagcagtcttctcccaccctcgtcgcgctagccagctgcactaggcaccatcgttgagctcttagccgcaccagccagccaccaccgtccagctctccaaacacgccagctgcacctactaacttcaacttgtaagaaatttctttattctttttctctttgctggatggaagtaaaagtttgtaagaattaggaaagattaatttcataaagttacttttttcttcggatagatctcatttattttttttactttttcttggaaattttcaggtcacctatgaagttctcctgtcgtaatccatttgtggacatctcttttgtgaatctgtggttttaatcttgtgattttaatatgtgaaaaatttagaaattatgaatttttgtttgtacatctctgatatctctatggttgtaaatc

SEQ ID NO: 178390 - DNA, 805 bp, Cannabis indica
ttattattattattattcaagaagaacaagtggaatgggatagaaatattaatcaattattcaatgctatatatttattgagattgagtgtaacacataatcctacttatacattaattaatacatacatatttatgttgaacttaaataatataatacttattttctaaactaaataaatgtggtaatatggtttggaactttagatatattatagcaaatacctttcttataaattaatttttttttaactaaataggtaatataaataatttatttagttaacttttatttattattttaaaattttaaacaactaattaataaaatattataaatatatttgtttatggcaaaaatgtataagtgccttaatttaaagaataatttggacaaaataattccaatggcaaaagacaaagtctccaagtgcgataattctagagtaagcgaacactttatataaatggcacctcacgattggttaacaatattacttaaaaactattttctaagttataccagacccgatacttaattacactaatagcaatatgacatcgagaagatgctaaacaccaataatactttttagcaattcttaaaaacttttatctaggctaaatacataatatatatttgattgtttcaaattcaatactatttggactttttaatgtatacataaatataaaactaaccccaaaattaaatacatgaaacaatccatttattaaaactcaaaaaccctgaaaattaaagacatacatttatagacttaaaataaatcggtacaaacaaaaag

SEQ ID NO: 178391 - DNA, 738 bp, Cannabis indica
ttcagcttaaactgttaagattttaaatacttagaaatgattggtattggatggatttgtatgtcaaaaggattaaacaaaaaaaaaataaataaagaaaaggaagagatgatgttattttataagtcttcttttttatttcatgccagtagcaaggataaggaaggacccaccttaaccaatccgaccatatactaaagttttatttttttctttttaaagttgaataaaactttgcacagttataaaaatattctactttattgcaaatttgagctatggtagcttattatagagcaaaagaaggttcggtacaataattacctcagaaatattatgtcgcttatactcattactggcctttgtttattgggaatgccaaataatagcaccatccatgcatggtgtgttctaattctatgactagtaaaaggcaaaaagtaaaaagtaataaacttatttcatataattaatgtatgtatattatatgtgtttgacatattgaaattttcctctctccacttagtttccttttggcttttttttttctctgcttcattcattttatctactttctagtctaataatgaaggaacttgaagcttgtatttaaagttttgatgcatcatacgttcgtgtctggcttttgataaagttttgactttaaatgtctcttaatatcagctttcaatctttatctgaatcctatgtttttcttttttttaactttgtctagag

SEQ ID NO: 178392 - DNA, 517 bp, Cannabis indica
tgtgtttaggcctaattatagaagctcattgtagaaatgacatgaaatatggtattttttttggtgttgacttattaatggcataataaaataatgtttttagtttatggcttttgtgttttatttacttttttgtaggtttttcacatcccatacttttgtaaataaaaactaaatttttctatattttatctttttctttattcttattttaaaatatattagaatattagtgtcaaaatattactatagcttctcttttgtcatgaagctagtgactaggtcttttgggtgaaaagtattttagacttttgtggtcggtgtaaatcttacattttcgtccatataagtaatgtcgccaaatttttagcgtaaattttactgttgcaagttctagatcgtgtgtaagagtatctctgctcgtactcttttaattgttcgagaagtataagctactcctttccagcttgtcataagtacacaggctatagaccttgtcttgaggcattacaatggt

SEQ ID NO: 178393 - DNA, 663 bp, Cannabis indica
ttctacgcgcaatgacagaggtctaatcttgtataaggccatctgctgttgatgcaaataactttgtaatcaaggcagccattcttcagatggttctatcaacagtccagtttgggagacttcctttggaggacctaaacatgcattaagctaacttcatggacctttgtgagaaatttaagatgaatggagttagtgagaatacaattcgcttgggattattcccattctcactaagggaacgagtcaagagttggttccatctacttaatcaacacttggaatgaacttgcactgaagtttctctcaaaattctttcctccagcaaaagcagccaagttgaggggagagatcaatagtttttatcaacttgacaatgagtctctctatgctgcttgtgagagattcaaagatttgatcagaaagtgtcctcaccaaggaattcaaaattagatgctggaccacaatctttacaatgggttgtgtggtactactcgcatgctcattgatgttgcagctaatgaggcattcatgagaaaaagttccaatgaggcatacgagcttttagaacagatggtcatgaataatcagcagtggcctagtgaaggagcaaattcaaaagaaagtggctggttgcatgagattaatgcaatcacgaaacta

SEQ ID NO: 178394 - DNA, 618 bp, Cannabis indica
ttttatttatttctttatatatatttaatatttgttgttaatttcaataactattttatcttgtattttgaaaaaaatttaatgtaataaatattttaaaaataattttaattttatataaaatattactttaacaagttttcttttatatttttttttaattttttcattaataatttaaaatgtattttatttatatatattttttagaatatattatgtaagaaacattaattaatggggtaacttaataaaagtttggaatattttcatcttaactctagcataatcaactttatcatactcactaaaagttatataatttactaaccttcaattagggctcaacatcgggcgggttgattgggtttcgagtttgcggattttggattcaaaaatttgtacccggacttgacttgtgaaatggttcgagttcacggatttcagactcgcgagtttacagtttgcgagttcgggttggccgggtcaacggattgacccgatcaactcattattttttttttaaaaaaaatcaaattttatgtggttttttctatatattaaattaagcatataagttatgaacttataactaccataatctatattcattagatt

SEQ ID NO: 178395 - DNA, 617 bp, Cannabis indica
tttgttaagtgtcactggagatagctgaagtgtatactaacatacatgtagcagaatttgtgtgatccacgtaatattaaaattgtattaaaatataaaaaattaaaattttaaaaataaaaaataaaaaatacattatttattaattatttttcctttttcctttttcaaaccctcgaagccccagtctacgaccctctcttctctcaaacctatgttgtcggtgtttctcttatcgaactcgaagcccatataggtggcgtttgctcctgtgatttgagccacccctcctcacgaatctcatcccaacggaacctaaatctatcagttctgagggttaggaagcgtgttcaggaatggaagcttaggctcttttctgttagtggaagagaggtacttattaaatctattgtccaaactattccaacttacattataagtatagtgtctttaagcttcttgtggtaacttgtgaaaaatttatttcatcttaggcaattgtggtggggttcgaatggtgataaaaggaaaaaaaatttgggtaaagtaggagatagtatggcagcctaaggcgataggtggtcttagatttcaggatttccaacttttaaatcaag

SEQ ID NO: 178396 - DNA, 518 bp, Cannabis indica
cacaatgtacacacgacaccatgtactctgacccaccttatctccgacgataagagcgaggaggagaggaagatgttcgttcacttttgggtcgcccgcaatggagaaggaaggtcagtgtgtcaactgtcggcggtgtgtgtgatgacttagactaaaatttagtcatggttttagtcttagtagggccggagtagggagcgacgaggagggaagtgatttgccatggggaagggaaggggtaagtcatgattttagtctttatttttctttttttttagcattttttatatgtgtgtgtgaaattgtgaataatgaaaatagttaaagaaatatattaatgtatacgggttactatgtggatggacttcgcctgaactcgtgactccttcaaaaatatccctgcgcccgcgcccatttatgccatgggtttaacatgcccatcctctcctatccaagctcctcaatatttccaatccactttttctagctatggatcttgtggcaaattgttgtgc

SEQ ID NO: 178397 - DNA, 862 bp, Cannabis indica
caacaattaaaaagcccaaatgtgtgaggaccttttatcccgatttttagatgataaaaagtctcacttaaaatgctaagttgcgtttggcaaatgcataaaaatagcctttctaacactgtttttatccgttttccaaacaaggcccttgttccaaacttttatttaaggctccaaaagtaaaagtgggatcaaaagttttatcccactttataatttttgaagtgtaaaaagtgggataaaaagtcccttttgatgtagtgagcatagatctattgctcataatattctaatttttcaatatctaatcaaaaactatgataggaaaaatgtctccccaagatgtgctttcaagattgatctaagtaaggcctatgacacggttgattcgaactttcttgaacacttactagcaggtttgaattttcctactaggttcataaaatggattatggtgtgcttaaagggaacctcctatactttaatgatgaatggaaggcttcaagggaactttaaagggaagaagagcctaaggcaaggatacctgatttcacctttgctctttgttctaataatggagtacttgactagaaggctcaaattcgaggctaaggagaaaactttcaggcattaccccatgtgcaaaagtgtaaacctaatcagtttatgttttgctgatgatttgattctcttttgcaagagctctaaacaggatactcatcacattaaagtggctctggatgattttagcaaaacaatagggctggttgctaatttagctaagtcccaagtgttcttggtggtgttcatgatgtggataaacaagctattcttgaggatattcgagttagaggacggggtc

SEQ ID NO: 178398 - DNA, 621 bp, Cannabis indica
attggaagtgtggttaaactggaaccaaatatacagtaaataaaattatgaagaatcaagttattaattatacatatggggcatatttagaaagaagaaaatatatagagcattgggattggataaattttatcacctaataattttagttttatcaagaagttcttccttagacatattgaaactaacttcttctaaaaaaactttttattattagagagctaaaatgttgaaaactcactcatgcccttaattattcaagtaatagagaatgttttggaaaaaaaaaaaaatatccaacaacctaactaattaataatgggtaatggggagcactcaatcacaactaaaagtagataatgaaaataattaagaatccactaagtacaataaaagtattacaatacaatacaaatgacaatatacatttttaagagaaaatagtcactccctaacaaaagactactacaaatttttaggagaaaaccccactatatattttctctctaaaactctctcacacttcctatctttgttgactctttctcactctcttgctcaaaatgtgatatctaaataaggtgaattcaatgataattaataagcaatttagtagcaaac

SEQ ID NO: 178399 - DNA, 1339 bp, Cannabis indica
ctttagtgtaataggggaggacagagcgtacagactgaaattttgagtaagcatcacgacacatgcatggggacaatgaattttcaacaattggaacatgccgcatgtgcatgttctctcaactaagttcacatcaccaactttctcacagtcagaaccgtcagaacctctaccaatgttaagcaattgttcaccgttacgtaggacgcttctaaacctaccatcctcgtgttgctttaccaaatcttcctcaaaatgagttgccaaaggggtagcacacttacttgccttttcgagatgctcagcgaaccaattttacagtgtgaaccttatgaaatcaactagagtagtaattggatattttcaaaattcttctgtcacattattaaggctttctgcagcgttgtttgtcattatgttgtacctatcgcctgaacaataaggacgagcccacttttccaatcttatactctcaacataagcagcgatgacatgatccatttgtcgaagcacctgtaaatgttatcacattttcctcttcgagcatgcataagcagccatcgatatttgcatgttacatacaccagctttgaacttgtgggtgacattcatagaaatatgtttgtcgcatgcacagtggcatgcttcggggaaaataacctcgatagcatgttcaatgctttgatgcctatccattacaaacactaagttttcaacctccccaatcacttcccttaacttctgcaagaaatacttccaagagtcatgattctcactgtcaacaattacaaaggcaatcagaaacaattggttttttgcatcgtacgctacaacaactaacattgtgcccccatacattgtcttcaaaaacttgccgtcaatactaatcataggaagacaaaacttaaatctcctcctacaagcatccagttactagaaacattacttgaacctgttgtcctctatgacaatgtcaataatagtactcggattcttttgttccagcatgtacaagtaaccaggtagctgactataagcttctactggcgtacccatcgcatacataagtgcctctcctgacatctccaagccttctcataactcatcttgatgccatagccctgaagcatatctctctgtatgtcttttgccttgtacttagttccatatgatctgaacttgttcttaataaggtggccaacaacccacgatgctgcttgacggttatcagcatgtctagaattcaggctacatgtgtgtttgttatggaatacagtaacttaaaacatgtcacaacgtaccttcgtcctccccttcactctccatttgcaattcgaaa

SEQ ID NO: 178400 - DNA, 843 bp, Cannabis indica
gaaacactaaggcaactccaattgtttttacattaattccaccactttgtttgaatcccaactctgatagcttcttatgtgatgcagcatagtcttcaaagaatgcatcctcattctagccacaaattgttaactagtttacaaaaacaataatataacttttttataaataataagaagattactatggtccattttacaaaattagttaaagggggcatgttaggttttggaaaatttcattcacctttgcataatgttccacatatcggcgaaactcaagatcctcgactaaaaccttatcagtaggaagtttcaagagtcctttcgaaatttctatctaaaaagttgtctgcacacgaaaacaaagaaacattgctattcaaattacaaactattggtggtgcctaacaccaaggccgaccttgaaattagcagagtttcgggtaaaaaatattattagacctgttaataaaaataaatatatggtatttttgaaaaacaactaaaaatatatattttaaaaagaaaattattgtttttgagtcttgggctaggttgctctaagttcaggtctatctcactttaactcagactcgatcgtgcctaacaccaccacgagttaacacttcagtaattttctataatagttattagttaaaatttataaaactcaatattaaattacatcaataaattataaattacaaatagttgaaagctttttcatatattatcttacttgaagtatgagttatcgaacttcaaagggtcttttgtccatgctccctcaaagcccgatctttctaaatgtgcctttccctattaaaaagaaaaaagaag

SEQ ID NO: 178401 - DNA, 512 bp, Cannabis indica
ggtcatgcaatctttgtttggatccactataacatattgtcgtaatcttttaaagtctttgccttttgttaatgtttgttttgtcaaacgatctgctaacaacgccgctcattaccttgctcgtggcgcttgtttttggtcagattgtaattttgttgatagcaatgttcctgatgttatcaacaatgctgtaatggccgatttagctattctttcttaatgaagttatctactttcattcaaaaaaaaaaaaaccaatccaccacgatcaacacagaccgaatttgaacaaaaaatggagtttaagaaacaaggaaacgtgcatttaagagataaggattgatagctcaatagaaaatttaaagatgtaaagaatccataaaagaaagtcttagaaattaaataaccgccttagcgaaaataaagataaccattatcccatcttatcactaataaccaaaacaattcatttaatattaatgacaataactagcatttgtagtcattttaaa

SEQ ID NO: 178402 - DNA, 794 bp, Cannabis indica
atttaaatgcttacagagtttcagcagacttgtacttcgctggttcttctattctattatcacaaggatcatagcctttatctttcaggaaaaatggatttgctttggaagaggatctagatgcaccgccagggcaccactttagactgaaagcggttcccttcagtaaaaacataacttttggagttgaaggtaatacattgtttttttgtttgtgtgtgtgtctttgttttaataaatttatgggtaaggattcagccctgctttaagaaatctttaagtaagcttgcattaattctctcttatggcaagatgttgatgcttacaatgtataacagagtacactttcaagcaatggttgttaaaatgaagagaaattgacttgttttttgataaatgatcatacaatgtcatgcaattgtagaatttcttgttttgttttgtttttttttctttcaagaaaatctttttgattttttgtatgtgcaagaaataattggattgccgaggagcgctcttgattttgcctaatggcattccttgcttatgtttggggcttgatgttgtgtttggtgaacacttcatatttataaccatcaagcccatcactctttattgttgttatgaacgcatacactagcatacatacactcacagcctaatctcaactctcaagtggcaacttgaattttttttatgaaaagaactagacaattattacaagcctattgttttcacccttgatagtgattttactgtgcctggcttgtaaagttcatatgcttgcccctgca

SEQ ID NO: 178403 - DNA, 842 bp, Cannabis indica
gtccactgcctatgtaggatttgatccctaatagatgcaaatgcagggggaatgttggcagtttggcttaggttcacaatgtctatccctctatcttcaatgaatgccctatctttcaatttcaaaaaccgctcttgagcatccatgttggtaaacctaactctatcaagattagagcgacccctaggtgggttggatgatgaagctcccccttcctcattgactcttgacctctttggacccatctcaccaaaattctatgttagactttccttactaaaattggacaaaagtccttaaatccaataatctcaatagtttagggaaaatttttaacgacaagaaaagttcaagggacaagatttggtacatgtcaaagtttgggggccaaaaatcctaattagcctttattttttattgtgtttttatatgttttgttgtttatattaggttttatttccatctatatttatgtttatgtatttttctttagtttttgctctgtgtgactgttttttcatgcttgtttttggttgtattacagttttgaaacttctgtagtccattcattatttatctttctttttaaatgcaggattgggtatacgaatttagtcatagagattattatagatccaagtgtgtttctacaagcacctactctgttattcttaatattaagaatactatctcgggtaatttgttgaagatgttccgagatacccaatttggtcattttttagatattctcgagttcgtattccatccccaaattatgcacagccttctattgagggagtttaaccagcccaatctgaaagaattttgggcaaaggttgttg

SEQ ID NO: 178404 - DNA, 567 bp, Cannabis indica
ctatttctcaactcactttcttctcaaagcaaatatttaccatacgaatttttaggattactatttctcaactcactttcttctcatttttctttttcaaaaatcaaaaataaataaaaagaaattttaaatttgtacaatccctgtttcaaaatatatatagaaaaaaataataatatataatccaattacttaaatttgatagtgatttataacatttaatccttacactacacttaaaatccatgtttgtcttctcaaagttaactatttaaaattctttagtaaagcttcaagtttcaacatttttaaattattacttacctctttctttaaaaaatattggaggaaatataagaaaaataaaatatttcaccaattatttttattaaatataagatcaaaataacaattttatttatcgaacgaatacaagtgagctattcaaaataacaactaatcatatgaataaataaaatataatgctatatagggcaggctatattattaatagacattccttactttataaataattgatacctatgctttatttatttatttatt

SEQ ID NO: 178405 - DNA, 552 bp, Cannabis indica
atattaatgtgtttttgaagaaacaatgtaatggaaaaggccaagttacttttttgcttgcattcattgatttaaggtttagctatagcctcataattatacgatgaacttagacaaaaattggacaactttgtgtggtgattattaactaagtggaccatatatatttagatacacagaaatatatatatatatatatatatattatgtatattgtggtttgtgggactcctgtggagcttcgatggttttcataatcctttacagttcaccatgatgagcataagtaccacttattccttcaagtacacattctaatgactatatataattgcataaaatactaagattctgtttgcccttcttttttctttcactttttgctatatatatataaatatatatatttatctattattacgttgagattctctattttattggcaacacttttaggtgaaagttaattaaattagcactttcgattttttagcattcgaattgatcctcaaacaaaagttcctttactgacctagctcaccattaattaat

SEQ ID NO: 178406 - DNA, 640 bp, Cannabis indica
atcttatattaatacaaattagatgttacttcgactcgtcacttagggttaccctcttagttatatattctcgtatctgggttcttgatttaaactttcttttatatcttaaacacacggctagttaccaaaaaaagtttcttgtctctcttaatttatcatttatgaaatgaaaattaaaaaaaagataaaaaataaataagggtataaaagaaatatgttgaaacccaaaatctcattcaccatcttcaaactctctctcccatctctatctttctctccctatctgatcaatctccccttgtttattttgcgtggctccagagtgaccacggctgggttgtcatggtccagccatggcttcctcaacccaagaaaacccaaagccctaacctctctctctcatctctctttccttttttcctactgcgatggtgctaccagggtacgatggccgctctttgactatggtggtccaaatggaccacatcataatgctcacaacatctggaaactcaaacaacagtggttcccctttcgtttctcgcaaccaaagcagatgtttcttttttttgcaccctcacgtggcccaggctccgcacgactcattcgtctttggtcttcttctcaaatgacagac

SEQ ID NO: 178407 - DNA, 729 bp, Cannabis indica
catatgcctactgcagccttctctcaaccacatcctggccataataccactacaaatctccccatcccaacatctaatccctcaattcagccttcccacaacactcattcaatgcaaacccgatccaaatccggcatacacaaacctaaagcctacactgctacttcctaccccttacccgagtctctcttaccaaaagaacccacttccctcaaacaggcactagtagatcccaagtggtatgcatccatgcaaacagaaaacacagccctcatcaagaataacacatggaaacttgtcccctaccacccttccatgacacttatagggaataaatgggttcataggatcaagctcaaggctgatggttcattagacaaatacaagtcgaggttggttgccaaaggctattctcaaactcccggcattgacttcaaagagacattcagtcccgttgttaaaccagccacagtgcgaattttactcacccttgctgtctctttcagttggccgattactcaacttgatgtatctaatgcattcctcaatggtactcttgaagagactgtctacatgcctcaaccccccaggttttgttgatcctacatatcctcaacatgtttgtcaccttaccaaggccttgtatggccttaaacagctcacgagctggaatcaaaagcttaaaagcactctgtacagcaaaggctttcaactctcaaaagctgacaa

SEQ ID NO: 178408 - DNA, 620 bp, Cannabis indica
attactaacgttagtttttttttgtacatgatataaatgggattttatgcgctatccgtctcacttgtattgcaatttttacagataaagtaaatatttaattttaaattataaagaaaaatataaaattgaacttccatgtatatatatattaaattgtaattattttacaagttaaatagtaaaattactattcattgaaataaaatattttatattttacaagttaaaagttaaatgaataagatataatatttaaattacatataaaaattaatgtgtagtgtaatataaaaatttagaaaaataaataatcaatagattaaatgaagtggtgagaagaatgctattatgctatatatttttataattaattaattaatgttatgatgttgaacatcatatataatatatatatatatatatgatagatatatatacaagtatataattcacaatatattaacatattaaattattatatgcacttcactcttttattgaagtgtagtgctataagtttcctttgagtaataaattgttagtcaaaattaccttgtggtgttttttttagtaagtgttaatttatcttgaaaatgatagaaagagatcgaaagtcc

SEQ ID NO: 178409 - DNA, 577 bp, Cannabis indica
gaagtgactcgagatgttggaaaagccttttggaagctagggagatttgtgtgaatggggctggaattttgattggagatggttcttgtgaaatatgggatagaccgtggcttccttggagaggcttggaagacatcaaagacaactttcaattccaaaacaaccaacctttgtggagggtcaaggatctcttcatcttagggactcgaatttggaatgagaaggtgatcaaagactgtttttctaaagagattgcagaggatattcttcgggttagagtcttgggtgaggggggggggcgatattgttctggaaagttagctggtttaggtcgaaattacttcagttaaaagttagcttattgggtcgaccccactttactacccatcggaccgacccactcgggccgacccactcggacgaacccactcgggccgacctactcagacccactcggacgtaccactcggaccacgatttgtctaccaacttttttttaatttgttttgttacatacaaaagtaagcatcagatgaccactcgaaccaaccatactaatttttatttttaattttta

SEQ ID NO: 178410 - DNA, 623 bp, Cannabis indica
cttggatccctcgtaactccattttcactcctgtattttttactggagatccaactataccgtggctgactatatcacaccagaaaaagagtggaatgtgagcaaattgactgctaatttttcttcagttgatgtcgagagaattctttcattacctttgtctcatcatgctacttctgattattgggtttggcatgctactggtggacagtatgaggtaaaatctggttaccatgttgcttgtttgttagctgatgatactttcgtctctgtgtccagcccacatgtttcatggtggaagtctttttggcaactcaaactacctcctaaagtgaagatttttgcttggaaagctattcacaatgctttgccggttgcttcagagcttttcaagaggaaatcgctcacttctgcctcatgtagtttgtgcctcaatgcttgggaatctgtggggcatgcaatgctctcttgtaaacatgctagacacgtttggaaagttgctggtttttcattcaataacagagcggctgtttccatgaaaattgaagattatttgtttcagatatcagaaagctataccaaatctgagttggaaatgattttttgcactatgtagtctattt

SEQ ID NO: 178411 - DNA, 762 bp, Cannabis indica
caaaacataacaaaaataataaacaaataagaacaaaaaaacatagagagaaaaggagactcccttgtcggcattgaacaccatggcgtcaagaacacatgaaactttacatgtttagtagctttgccttagaagaatcaaccatctcaatcccatgacaccctaatctaaaacaatgacgaacaactccattcaaaggaagagatcgcaagactaaaaaccacttgaaacatgcggctttgtagactgtttcggagttcatcaagtagcattggtgtgcgacttgatggggtccagaaatccagacgatttggtagagaactcaggtgcaaggatttagaaataatcatttttcccatttgaaagtttattttccacacatattctaatcgaataactaaagctaacagtaacaagtgaattatattgccacctctacattgagacactttcccttgtcattgtcacggttttggtaaattaaccatccaacggtttaagccatattccacttcaaacctttttcatgggtccctacaatagctctctgccaatataagatattgctaggataaaaatcttcttgttcttcatgattcagataaatattatccgggtttggtcatcagattcttatagttttacgattttctgaggtacaccctttggtttttttgttatcttgatgacaagtctaaatgcttttttggctgtaattttttacttatcttatacagtttgatctattttaatttctaaatc

SEQ ID NO: 178412 - DNA, 688 bp, Cannabis indica
gactcttcaatattccaatcacaagttattgagagatttgcaattgccttgcatacagagagatttaatttgtcaatgggaacaccaactagttccaatgactcaagatttatggcttcaatttgcttaacctccaaaacatgaaacttttcgagtcttataaccaagaactttaggcttgaactacgaatgtcaagctgatatggatgatccccatgaatataaatatcacaattaaccacaatttttcaaggaaaggggaacccaacaagagcttatctaccacagatgtatctataaagtcaacattagtcaatgacaaggattttaatgatggaaaactatatgaaaaaccagaatccaacaacaccatactcaactccaaaatagtcaaatgtgttgcctctattataggtatgcagtagaggtaaatgtcatctcccacttcttcttcgctcaagcaaaggtttaattccttcactttattctcaaacgcgaaagctacccattcatctaggtgaccatccttgcttctttcatagcaatccatttgaagctttaaacttttacgagtgaatcgccgataaaaaacatacctctctcgcgttgttccaaacacgggcgatataattgcagaattttcgctggtcttctgaagatttgtaattaacagtagtaatggagaaag

SEQ ID NO: 178413 - DNA, 654 bp, Cannabis indica
tcttccatttatttttctttctagtctttggttcttttctaattacttctatttatcatttactaaccaataacaaaaagagaatgaaaagaggtattaatatatattcagtgtgatgctattaactttttattgataatattgttaattgaagaagaccacccaccagtaatcattaaaaaaattagaatttttgttctctaattttaacacatattaaattatatccttaaatttttaaggtcgttattaagaattctcactgaactattaaaattgtttaatttaaataagattttaatccaattttaataagaaaaatctaacatagatgaaaattgatcaagaggcataatttagtacatgtcaaaattcgaagagtataaacgatttagtggatgtcaaaatctggaaaatatgatttagttataaacaattactgaattagtaaaattaaatgcacttggacaaaaaattttcaatccaactatttaataatttaaaaaaaaaattacgaccagaaaaattcaaataacataattatatacatgtaaaattaagaataattatctaattagcaaaaaaaaaaaatataaaatgtgtgtgcaacatatcttggaatgcaatgaatataggttttcttttttagtatct

SEQ ID NO: 178414 - DNA, 647 bp, Cannabis indica
ttttttagaaaccatatttagagagatcttttgttctcaccgcccacacaaaaggattgcccagccgttgatctgccaaaccccgagtccgatcgccggattcctcacgcgtgtggctcacgcgctgctcgtttcttcagcaaactaccccacgcgccggcacgtggaggcgcgtgtgacgaaggattcgacggcgtgataggaattttcctatcaagattaattaattgcagaaaatagagaaagaacgatagtttttggataaaatggcagaatgcctttcattaaaacccaggatttcgagagcctggttctctcccaaagttacaaactaaaaccaaattcttcacaccttttccttcactattgagtcctatatataataacaatacccctattacaattacacttatgccctttttattatatcccaatgcctatcaataccggccgcccgaaaatcaccttgtcctcaaggtgatggagttcaacttgtaacatcagtaggtgcgacctgtaatcgccccttgtcaaagaaccgagccaacaattgcaaggttttccagccaagagagagatgcccctttgcagcgagtcgacctcgatcaaaaacgagctgagcaagttaatatttcttccctttgtat

SEQ ID NO: 178415 - DNA, 821 bp, Cannabis indica
cagctgtaaaaattaataattaattatcaatagctaaagagtactaattaattagcatgtagaattccccttaaataaatatgatattagatgaatcttttttggtaaattaatggccaggtgaagttgtgtgtgtgaatttcatgaatatttaaatacctagagacagcctgggtgaagagaatgagttcatcaagtgaactgtacatgtcgaaaatatcatctattacatagataaacgaaatggattttgtaagcgcaaccctttgtttcgacaaggttggatcggttaggcaggccatggaccaaatactaccacttcaccggttgatctcttgcgaaagttaattccttagctaaaccaatgtctcgccaccaccttataatataaattaatgcaaaaagattatatacatacatacatgcatatatttatatattagctagaagggacggtttttcatagctgagacaaataaaaagtacttcgccaaaaataatttaaataataatctttgcatcctcaataatttccaaagtactagttaatattacctggtgacttgatcaatttccattctatgcagggactgaactctattaaattcaacttttgctagttgttgaaacaaatttatgtacccattctcactgggatagacaccaaaaaggtccttggctgtgaacttggataaacttttgtgagtgggattttgaagtgtagttgccacaaatttggcctgatattgatcataacgatgaagacgtgtcatggacgcttccaagtgttgagcactaaataaagcagcttcatcaaggta

SEQ ID NO: 178416 - DNA, 1093 bp, Cannabis indica
attctccgctcaagttggctgacacacctgaatagggatttaaggtaagaaaattgcattcgtaccacttagcaagtcaagataagttacgattattatcgcttgtgatttgattattatctattataaagatacgataattattgttttacaagaaagagtcattactctaaattgagaccgtagttaggtttcttacttatcggttacctcattaggtaacagtagtgacattagatgcttggttaggcttatcagggttacctcattaggcaacaacagaaaatagttactttatgaagtaacaaatataacttgtgttattaaacagatatttgtgtagtttagattgttatacatatatgattatttctacggtttatttgtgattgtttggaattatctgtatggttggcatgtgattattgcatttacttttcttgttgggtctttgtgactcacatgtgctttgttgtgcaggtaagggcaagggtaaattaggacagccatgagtcaacaattttcttcagaaagtatacatatcgacctatttggcttgcatagccgagttgtcaagggatggttttggtgttgtatttgtatagtattttagatacaaaatttgtactaaacttatggtaaaagttttgtaatagggatcccgaaactaaatttttaccgatgtaaccttttcaatttaagtttatttaaattacgaattttaattaaattgttaatttattattataaattaatttacgaaagcgcacaagtagcgtccttagaggctagggcgttacatctactgtaatgaactaacattgaagacagtagggattattgaactaaacttgtcgaaagcatgatcaagattaatgtggatggtgcaacttttgaagttaataatgtgtttgatactggtttcattgctcgggactgccgtggctctttgattgaagctttttctacatatccccttggtggttgtcaactcgctatagcagaaatggtaaacatcaaagaggccctcaactggataaaaaagaaaagcatatcgaatgtggtagtggagactaattaagttgttactgtt

SEQ ID NO: 178417 - DNA, 554 bp, Cannabis indica
ccagttcccaccgcctaataagtatgtatatttatgttctctcgaagttcagccgtataatttctttattctcactcttttgtagattcattttattcacatctaaacttttttccatggaaaataaatatgtttgttgagagaggaagggaaattaatatgcaagaaaaagaaaagtagtgagtgacaactactgcaagttatgtccatcttttttacacgacacaaaattagcacaagctcggaatatacaagtataatctgatagaaaaaatataaatttggacacaacacaatataatattagttcaaaaatatagtaaagtacaacataacacaaaaaaatagacttaatcacagcaccacacgtaagcacaaaagtaaactaatttaaaaataataataataataataataataataataataataataatacacatgtatttactaataaatatttaaattctaatcattctaattaatgttgtatatgattatgtgtaaagtatgttgaaaagttatataaaaactaattaaaactataaaataat

SEQ ID NO: 178418 - DNA, 716 bp, Cannabis indica
ccccttatcttgctttcggattttcatatccgaatcacttgcatttgctcatcacgatgacaaaacaaccataatgtttgacttcaatgcaggtactagtataaaaattatggtgtcattttggcgaagtctgaggttcgagtcccttttttggttttctaactttttttgctttaatgttttttgtcataggctcagcaagtgatgcacctagtgatcttggcaaaatgaagaagaatcatggggatattggccatactaggatggggtttaattcttcctttcggggcgattatcccaagatacttcaagcacaaggatcctgtttggtactatttgcattcagtgattcaattagttggatttgtgtttggtcttgctgctgttgtacttggacaacaactttataacaagattggagctcattttccaacacacagaggcattggcatctttattcttgttcttagcatccttcaggttagtctccttcttgtattgacaaaaaaatggtatttttcaaaaaatatgtttttttttttggaaaatttacaaaaatactggaatttaagttaatttttacaaaaatactgtcacacgaaaaaatttcaaaaatacggtgtttttagaacaactcaaaacaacagtaaaacaactaaaaaacaccagtagaacaccagtgaaaacttaacacagtatactgcagtatgaaattt

SEQ ID NO: 178419 - DNA, 618 bp, Cannabis indica
ggaaagcttcaggttcttggtcttggtactgcgttaaagattctcttctccgttgatggccacgagaacatcgatcaacggtaagggtttttgcttcatacttaaaattgatttcagtttttaaaatagaaaatagctcttaaaaactagtaggagtggtgtttggccaaattttttaaaaattaagtcttaaagtgctagaaaacagattatatcaaaaatatcaaaatgatattttctataacaattttttttttgtctagtttacatttttgctcacttaccggaccctggacctggattcggcccctgaatcgaaccctgatcccatacccgaacaacagaccttaaccccagacccgaactttaaccaaaccccaaacccgaacccaaaactatttttagagttttagtaaaacaaaatctaaaaatagtttttaaaaacctgagccaaaaatcattaaatttttaaaatgacaaaaaattattttttattctcacttttgaaaacataattttggaaactaaaaacagtcatacaacctctaagtttctcgcttaattgaaagaagaaaaagaaagaaatgtgctctgaacatttacattgattccactagt

SEQ ID NO: 178420 - DNA, 905 bp, Cannabis indica
gaatttaataaagtttacccgatattccaaggaataaagaacatttggtggttgttgttcattaatgataaccaattagccaatcgtcttgccgcatcgtcaaaagactgactctgttcttcatcgttgatcccatgcactgtgagaagctctgggtcgtaaaacttgaaaatttttctcagaccgttgatgctctcccatatgtgcctgccaaaaaaagtgttagtgccttataataatttaactataatttgatataaggttaattagattaaagaagagtatacatcattccaaacagcattccctggttgccgatgtagtcacacgtagcaacctgctgcaaatcctctccagataacgtgatctgggtacgcggtgcaatgaatcctcgggggacaggaattgtgattatatcacgtttatctttgagccttaggaattcatgaatcatccattttagcgaattagggatcaacgccatcttctcttccgtgaacaagtcatcttcccgtgcaccacggccttgtggagaaagcatcggagctttcccctttgacgcatcacgtcttgagggcggttgagcgagtggaccctaaacaaaacagaacataatatatcatccatccctgtataacgacaaataacacatatataacagtagtttgttcatccatcccaccgcagcacatatattcgcagaacctacttcactacggatgaatattgaagatattcaaactccactaatcattaataattaatttcagttgagaagttacctgggttgttaaaaattaagtgtttaggccaaggaaggaacatctggtacacgtccctaacatatctgaactcttcaagtgggactgggatttcagcgtcctcttgcaggaatttccgaaacc

SEQ ID NO: 178421 - DNA, 770 bp, Cannabis indica
gttattaaaaagtcataaaataaagagtacgggttaagacaaagcaagatattatcaactacctttagttatcacaaaaaaaatccaccacttctaattatattataatgatcgatcacagcgtgtgtgtatatagtataattatataataagatagacattagatattaaaaaactatatataaagcccgtaagagcttctcaaatagaaatgttttctcattattactgaaaattctcttctctgtttttttttttcttttcttaatttctttccgtcttaatgggagagatctgagtacaaatgaaacatgtatataataacatgtgctatatatatatatatatatatatattgtttagtttaaaaggaaaaacaaaatttgtaagaaataacatcgacagtaattggaactagtataatcttaatcatgggaaggatttgattaattaaggactaaaaaattaaaaaaggaaactaaagatatattattagtaggtaccttaaggttccaaggggcttccatggccattcggtgaggattccaggcgtagaagccatattctttctctctctctctctgacgatatactttctgtctaaattataaactgactttgtgctccaatttctacgagaaggcctcctttatatatagaaaagaatacatatgtatatgactgctgcaattaaatctaaatgtgttagattttattactttaaaagaaaaatagtaataatcaaaagtagttgattattttttgtgtaa

SEQ ID NO: 178422 - DNA, 734 bp, Cannabis indica
ttacaattataactaacaaaaatctattttatttagagaaaataaaatgggaaaaaactaacatttgcttttaattaatttttaaataattaaaataatcattaataaaaatttagaataactatccttaacaaaaaacttctccttattttttcttctatttttcaatttttcattttcatcgctaattaataatactgaataaaaaaaattatttattttgagtaattctttctacattaaaaaccaaactaaaataactgatatatataaatgaatacctttatagttagataacttggaaaaggtataataaataaattttaagaattgagtatatataaaattttgaatggattataagtattgtgaaactttctaaactaaatattatttttaaagtttgagggatttggaaattgaaaacatcattttatataattgattaactaaaatatattaaggtgataaaaattgtgagactttataactaattctttttgttggaggttgatggacattgtagccatggaagaagaaacaatgttttttcaagtcaagaatagtaaaaattatcttatgagtacgtactactattgagatttatgatagaattattaataaattctatttggttccaatcgagtaagaactctacaaatttaaattgaatatttttgttgctcaattaattaactaagattatatatgtgtaccttaattgactcattcaa

SEQ ID NO: 178423 - DNA, 707 bp, Cannabis indica
gaattaacccagaccgcttcaaaaattaaactcaaggtactactttaccgagtctagcttaattatgtcttagacgcataaccctttatccaaacatatttatcaaggcataacttccaacaccacatatatcactagggtaataaccctaggctactaaaccactcatgttagggtaataaccctaatcccggttactaattattcacatatatcatttccaatataagcgccaccgtgtataactctacgtgctaactactgtcttacctgatgtcccgcaatagtagagattccaaatccccgcgtgctcctgaccaagtgctggtaatcctagtcacaatttcgagatttacacaaataggattaatcccttattccacatccataaaatatatacttggcattcaaaacacaaatattcacatagatctcgaaacaagctttctaacggtataaagaactcccaaaacggagtccgaatcacaaagttatggctattcgaagtttgcattaggatatgcccagaaagaaaagggcgggccagggcatgcaaaagccatgccgcaacacctggattcaaaacccagaaaattcaacaaaaacttcaaatttcagccccaaaaccaccttcaaatcaacccaaatcaacgcagaactcaaattaatcttccacaagctagcaagtacaaaggtaggcattaaaa

SEQ ID NO: 178424 - DNA, 807 bp, Cannabis indica
aaaattattatttttataaatttgattttattcctattcccaattctattcttatattgccatcttaatttcattttttttgtttttattgttatgtttttattctttccaattaagaatagaaatggaaataagaatcaaatgaaatttaaaatacataaaaaaaaagttactaagcttttaattccatcatataattttaataattagataaatgctatatttatgattgaaatatatttaaaaaaatcaaaattttttcatttcattacctctaactaaattccactttagtttttagtttatgttgggtgtaccactagagttttacattggctagaaatagaaaagatccggggtaagatgtacattattttcattggaatgaggctttttggagaaagtatccaaaaataaatccatgagagcttaggctcaaagtaccaatgaggaaatagatggtgtccgacagtccttacaaattatatcagagttggattttaaaaattaatcatgtgaatgaatctttggaatgccaaacataaaaggtgaagcttgctactaaagctgtcgaaagttcaaatcaaatttgaagggagttcgaatctagctggtaaagggattcatctagcttactcattaaaatcgagggattcgactcacaatttttcaagggagttggaaatatgtcttaagtagttaagtgttgctcaaggtttgatctgtaatcgtctgaggggaggcaaggtggttttttgtttgaagggtaggattgtttggtgtcactaagcaaagttctacattgtc

SEQ ID NO: 178425 - DNA, 583 bp, Cannabis indica
aatttatctgtggacgtggatatactataaatatatggggtccaatccaaattagggatcaaattttccaacccaaaatataagctaacaattaattaagatgattaattgatgaagtcatacattgttatatgtcacattccacagtccttggccataggataataattctacattgacttgacttgcataaaaaatcttctatatataattttttttgtgagttatatatattattcaactaatttaaatagaggatttttacttatatatgtaattaacaaactaatattacagatagcgattaaaaaaattaattatcttatgattgcaccttcttactgaaatttttcaaaaatttcagacaactacagtatgttctaattagtgtatatattacacccctattgaaccatatataagagcatctgaaaacaaaaaaaaaaaagaaaaaaaccaaaacaaaccttcgaatcattcgaacctctaccattgaagctatccaaaaatgtcaatcaaagctagctaccgaagaaattcaccattaaagttacacaaagcttcgatcctcaaaaatcaaaac

SEQ ID NO: 178426 - DNA, 929 bp, Cannabis indica
gtacatgtaaagatgaatactaaagggtgcatttttaatgggtattacccgtgaatgggtaatattagaaaaatttaaatttttatgataatttttctatttaattaaaaaaatttctcatttttacattatatgagttgggattggttcatcagctgaaaaaaaaaaagcttttcggcaaaaaagttataaaaaatttgactttgatttaaatatttttcatataaacatgttttgaagtgtaaaaatatgtattttttgatattttctttaattaagtaactaaattaagcataaaaattcaaatttctcttttattattcgttatcagactaaaatttaatggtttaatatttttaaaattaatatttatagttaaatttatttagtactcattaatgggtattacccattatttagtattctgaatactaaaaggtattaatggtgcttgtgtcaatattgttattagtttaattaaatataagatgacatctagtttaatgtactaatttttagaaaatattgctatttatgtctaaatgtactaagtaccactagtactaaataacaacgctcgtatataaatatataccaaacttgagtttaaaaaaaaattatgtaccaaactattatagacacaactttttacacaaaaaacgtatacacataataacataactcaaatttgtttaaaagttggtcaacatgtaaatttattgtgttaataaatgctacaaggaaaatttccaattcacaattaatgtttcaccttctatttttcagaaggtgtgggtctaagtgagttatatatctgacatgattaaattgaaacaacaccaaccactaccaataccaattttgagaccaagaaaaaaattcatcctcgatacccttttttttatttcaatagagatgtttagcctttt

SEQ ID NO: 178427 - DNA, 866 bp, Cannabis indica
ataacgctaaccattagcgtccgtattataaacggacacaaatggagagaaaaaaaaagaaatagaccaaacacatttgagcgataataaactcattttttttttttaatcatgattatatcttttaatcattttttggtgtagtcttatattttatacatgtatatgtgtgtacaatgttaataaaagtgacatattttttacttgtagaaaatcagggcggacccttaatttgggagccaaaaataaaaaacatagggaaatagaaaataaaataaattattataaaataatgtatggaaattaaacacaaaaatagtaataatttattttatttcgaaaaagaaagtacatgaaaccaccaccattaataataagagtgctaccatcaatttttgtgcctaaaaatatatattagaatgtttttttaatttttttatatgacaattttcgttataattacatcatcatccttgtaaagttttaaaaattttcaaataatttacagtgccaaaaatatgtttaaaatttcatggtagattaaaatatcaaaaattctattttcgaaaattttctaaattttataagaatgatattgtaactataacaaatatcattgtaaaagaaaatttgaaaaaaaaaaactgtatttttcaagctaggagttgattaagagattataggagattgttattaacactactataataataataacacttcatttgaaatttattaaaagaaacatttagaatacaagtttcaatattaaaacaacaaacaatgaaattttaaatacttatgccgctgtttacccaaaacaaaactatgtcttcaattcgaagcttccgaaagcttgtttgcat

SEQ ID NO: 178428 - DNA, 1301 bp, Cannabis indica
agaagaggacttgcccctaaacttaaacccatggcatagctgcaaccccctccacccaaagtctccctctaaaataaaattatttattaattaacaataaaaatggggaattaccccatatactatttttaaattttttttttcaaatttacggtttgggtttctaaggtggttgcggcgctagttgcaataggggtttctatacattttttttgttgcaatttaggttgcagcgctagttgcaataggagtttctatgtaaaattttgtaaaaatacaaaaaaaattatttagaagtgtaaaaatgaaaagtcccaaaataaattaactaatattataatatgaataatgagccaattaataagctaaatagaactatactaagtagtacaatatcagaaatatattgatcaataatcaaacttaaacttatgaataacattacctttttaacaacatcattgtaacattgtaaaaatctcgatgcatcaaaggaaaatgaagtcataatccaaccattccatctagaaataccacaatggatattcttgagaaaaaaataaaatataactagtcttcaatcccactatttcaaccaaaaaaaaaaaaaagccaaattgaaagttaagtataaattaaaaacctgctatatatgtgcaaaaagataaaccaaagcatgaaagcatgagaagtattaaaatttagtatgttgatgaaaaaaaaaaatcctatatatacgacttaccaaaaaacgtacagtgtgccacgattgattactttgcttattaatatgcacattttttgtaacttacattcaaacctaaaacaatatgtgttttcaaccgaattccttaaaaggaaaaataccttgaattccttcttaaggttaaaaatactttgaaagtagaagtattttcagctaaaattccctattatactcgaaattcggctacatttcagaagctgacatgtgtgctacaagaggaatatgaatcaacttcaatgatatagtaaagttatatcattaaatacaaattaaaataactcgtaatcattaaataaaggaatgatagacaatagttaaaactcgttggttgtataagtctcaagcgagataaggataataactattgaactgatattgacgagacatacatctacctcggaatacatgtgcaaaaaaaagaggagattcatctattcaagcagactaaataaacaaatacaaccgactcgggtaacacatagcgaggcaatcacctcgcaatacctaatcaaatgaaggaatgcagcaagatgaa

SEQ ID NO: 178429 - DNA, 1089 bp, Cannabis indica
tatatagtaaataaacttgatagatgatttgtcaattaaactctaattatttgattagttttagataactcaagattttgtaaccttcctctttaaaagtttaattagataattaatgagtactttcttaatagtttgtaatgattataaattttatgaattgggattgacaggaatgtttttacaaaggatgaactaaaccttgaaatagcacatattgctcttccctcagctctggccttaacagcagatcctattgcttccctaatagacacagctttcataggccatataggtttgtattaattaatctaactacttgcatttgtattaaccaagttgtaatgatcatatatatacatgacataatattaattatatatataggtcctgttgagctagctgcagtaggaatatcaatagctatattcaaccaagcatcaaaaatagccattttccctcttgttagtatcacaacatcttttgttgctgaagaagaagccgcagccgaaaaatcgctagatgacattgaaatgcagctaaaagaagaactcaaaaaggatttatctcttaaaaacaatggacatgaaatggaagaacttgtatctctagtaggtaacactttcccttatgaagcgttttaattaccaattggtgatcagtagagtaactcgtgttccttatatattctctttgttcataaaaactagactcagcttccacatcttcatctataacaagtgatgaaatcagaaaaaatgatgcttcaacatgtcaaaaggcatactcccatcagcttcatcggctatggttatcggtagcattctcgggttaatccgaagctttgttccttattttagcagctaaaagaatactgatttacatgggtgttgattctgtatgtgcttcaaacttttggtcagttaattttgtaatgaagatatgtaatgtttttcattttgcattaataattgcattagtgacttgtttattttaatggacagaattcaccaatgcaaaaaccagcaatacaatatttgagtttgagatcattgggtgccccagctgttcttctctctttagctatac

SEQ ID NO: 178430 - DNA, 1092 bp, Cannabis indica
attacattcatttggcctaagatattattatttgagacaaagaatctttactactagctcttagacctttataagccaaggtacgtagggttcctttcccattctacatgtatacaaagataataaatttatattaaatatactacaataatttggaaactttatacaattggatcatttaatattatttagcgatgaacatggtgtgttttgctactgatttagcaaacattaccaaatacattaaaaattacgtaatagtacaccaaggaatctagactaagtatataataccaaagctttttgatccattaaaaatgtaaatttatacattgggtatggaattaagaagctgagcaggcaacctagactgctgtatctagtttcgcagatatatatatatatatatcgtttataaaactaaatattaaggacacatcaatgaattttatatcacatatatatagtaagtgaattgttaaaaaataccactagttcctactattttctttagtgtcatatggctattactgtaattaagtatcaagtcctatttaactttaaaaatagtttttagataatatcagtaactaattatagaataactaattgtagggtgtaaaaaagctgagtactgctggcgctcatatagtaattatgaaatataatccttattattaatttaatctctaaagaacgttcggtagccatgcaatgacgaaatataaaaactgctatatcctctatctcgatctcggcacctagagctaccttaattaattattacctaaacaaattaaacaataagggcttgtttggaacgccgtattaggtcgtattgtattgtattgtattatattgaattggattatatatcatatttttatataatactatgttaaactttaatttatactaaaatattatatatttaggtatccataaaagttaataccacatatagttttagataaaaatattacataaaatacaattcaatataatacaatacaatacaatacgacctatacggcattccaaacgaaccctaatagtattaggatgtgtggatagcgagaaatatttaataca

SEQ ID NO: 178431 - DNA, 991 bp, Cannabis indica
gaagtatccacttgaacctttaaggaaggatgatcaaactcctctaagttattcttattaacagcctgaaaagaaattgaaatcaattaaaatccatatccttaaaactaataaatcaatttagtataagatgtaatcctatttaagcaatatttgtctaagaaaagaaatcgtcccatataaaggcaaaacaaaactacacaataacagcaccaaacaagcaatataggcacaagtttctgttcacggcaaggcaggcttcactaaaaatttcctcaaaccaacaacttcaaaactaaccaaactttttaaggaacatgagcttttctaataacacaaggcaatgaaacaaacaaaagaatcattaagaatctaaccaacacaataacgacaaccagagaatgacagagagaaagagaccgttttcatatgcacaagtactttcttgttagatggacaaaacatctccccagaattgataacagtgacaatggttgcagagttctcccaaagtttacactcaataattaacccacttaaaaccaactgagcaatttctttgccgcatctcctgaaaaaattaaacaataatcataaataaaaaagtaactggttatcatgaatgagctactaaagctaaagaaaaaagcaaaatgccctgacccttgtcataataaatgcaatcactcatattaaattacacaagttctagtgcaatacgaattaaataattgacaaacaacaattattagttggaaaaggagcaaagaagaggagtcatacatgctacacagcattgctgaaatgtgattaatgcataattttattgcacagaaatagatctgatcatctgtggcagcatcaggaccaggtgtatttgaaggaacaaactctgttgcctcatatatgtcctgttcaagaagacaatatttggtttcacctatacatacacatatgtagcaagatagtatttttaaaaactactcttttt

SEQ ID NO: 178432 - DNA, 567 bp, Cannabis indica
ttagagggccaatttcaaatgattcagattctcaacttatatacaatttgttttcagagaatggacccatcaacaaatattaaagcttggggagaatataagatcatagccatttgtcaatcaaatctagaagattattctttcataaatgttatttgcatatgcccatggtgaaaaattaaaattgtgttttttattaataaataaatatttcacttagtttttttttttttttttttgtcaaaaaaaaaaagacaatcagctttagaaactatgcctattgagactacaaatttcatgatcagtttttttttttttttttacatttattatgtataaaaggatgaaaaaaaaggtctttaatatgggggccctgtgcaatggctaacactactaaaaactcccttttaagtccataaaagttggactagataaattttcgagtatatttgtgttgaacatgatagctcgggacataataaaatgagtatttttactagtaatatgacccataaaagattttgctagtagcgtctttgtgaatggatctgtaggttatgttttgac

SEQ ID NO: 178433 - DNA, 752 bp, Cannabis indica
aagggtaatttgacaaaagactcattttagtcattttacacgataagttcatattaataattttttacttattaaatattatcgatattttatttgatttgaaaaattattttataattaatattatcgaagagtttatttaagcaattttttttttttaggtggacacaaatgaaagaagatagaatgtctttttttccttctgccagacttgtaaatggtttccaaattcgtttaatgagacgacatgtggaagatgaagaatgaagatgaaatatacttatttttccttttttttttttttttttttttacttttttactatttcattttgtttttcttttgatgtacaaaattgctttaatttttgtcaaacaacaaagatttcaaaagatgatgtaaaaagttcaactcttcccccttatgatcttatatcttgggaggtatttttgttttgtttttcttggttttgctcatgtggctttttccaagataaaagtatgataagtttatttttattgtgtcaaataataaataatagtagtctcatcatagcatcacaaatttatcttcttttactaagttaatcattatgcagggctaattttaagggtaagtaatttaagggtaagtaagtgagtcatgcgccaagggcccaaaaattatgaaaaaaaaatatattaatatgtagataaaatattaaatataagaaaatattacaaatacaagttggtgcagtggtaaataatctt

SEQ ID NO: 178434 - DNA, 791 bp, Cannabis indica
agtggctgtcatgttattggtacaggtctgctctttcttaaaatttaaaggattaattttgagcatgttgatcttcgttttttttttttcttctggttttttatgtttaataattttaatctaatccatacttattgtgttcccttctcaatatgaatgactcaaactccattttgggtttgattgtgcatacactcttttggttttgtatgaatgtgataataactttgatgtaaatttagaacaagatttctttttttttttggcttggtatgaaattggatttcttttctttccattatgccaaaacaactcttgtacttaatggcagctttctctgaacagaccttctccacctctaccagagttgcatttatcagaagaaatggtaaatgaaatggcttcattcatccgcattcgcgtcaataatttactcagagtttctcaagatattgctcttggtaaagactcaaaattgttcttcaaagtagctggatacctctgtctgatctcctttgttggtggcatgactgattttcttactttggcatacaccagtgagtttcaactttattcaaaagtttgattatcttcaatgtcttatgttaactctttctttcttggttattactactcacagctatcatatagtttttagaagtaaatcagtggccaaaatatgaacttgtactataacaattaacaacaagcaaggtctttagtattaactaagtgagtccttagaattttcagattctgagtataaaaaagaaaaaacatctgaaaatgaa

SEQ ID NO: 178435 - DNA, 766 bp, Cannabis indica
ttgtgaaagataatctgagtaagcggaataactttctctatccttttcaattgagcctaagtagtaggatttttggaggaattattctcaatatcttcagctttccttttgtcctttttttgcattactggggaaggatccccatgcaagtgacaatgtccgttcataagcacgcaattcagcatccaacttgtttatgtcagacgagttccaattgttaacagcgaattggttaaactcaggtgagaagctgttgagaacaaaatgaactctttgctctctagataaaacacttcacaacatagctgctttctgaatgttcatcatgagcaagtgtgaagtgatactctaaccaggagtcatcttcacacttttaagttcattcctaaagacatattctagataaggattggggtttttgttgtacattttgacactaaaaatatcaataaacagaattaaattattggttcaataaattcgtacacaagttcagaaagtaacaggtaaaggaaatatgtttgcaaaaataccaaaaataaatatattaattatttttcaaggttttcaacataatgaaatacaatgtcccaataggtgagagtcaaagataacattagttgaatagagtagtcagctcatctaaaatgtacatcattttagcaaccttttattcgattaaataagaatccaatgctgtcccggtaagcgagaatcaagttattctcaaattatgagcttccaccattgtttcatatactgtaag

SEQ ID NO: 178436 - DNA, 688 bp, Cannabis indica
tctcgtacgaagggtggtcccctgtcgtccagctacttcaatacacgagtaaaaattcttctaagggggctcaatagttagctttctttgcatgtattttatccaattaataaactttttgcagaaatcctaggcgggtcatgggcatgtacatagcctccctttagcctataaatacccttctactttacgaagggggtcaaaaatgaagataatcaaagctctgctaaaatttctctaaacttttctcttcctcaagagaaacaaagggtacatagttagggtttcttgcatcaacattgtaagaaaatcaaacacgccttcaaaagctaatagactgactcatggactaaggcttgttaaatcctgtaaaaaaatctccatatatttgttattgttctttaccatttttaagctcttattatattagtttttaaaaatcttgataaacattttggtgcttttattcagagctgaagaaagatttgaaccaccactgctactgcaacaattgtgttcactcaaaaaatagtgaccaaaaagacccctcaaagtggtcttcacattgtcatcgaggatgtaaccctctttctctagagcatggtcctgagccatgcgaggggagggaatacatcaaacgctgacaacaaaatggggatcctagtgtcgatgatagccaaagtgtcag

SEQ ID NO: 178437 - DNA, 804 bp, Cannabis indica
caacttttccaatgacttttttgactacactaacttttccgataacttttcggcgactttttcagtgaaccttattattacaagttttatcaaatttatttattatttttttccatatttcaaactttattatatatctgagaagactataaattacctaagtagacctactattgcatagaaattgatagtaggaagataatcatattaggccataatcaatagaaacaattgaaattgaagccctaatttttattaactgttaatttcctttatttatttgcttcctacttccactagttttcttactttaattttctttcttaatttgtattcaactaaatagaagtaaaagtttaattttaaagtacctaactacaatctctgtgggatcaacctcactcttggtaagtttactacttgttacgatacgtacacttgcgtgtgcaaaataccacaatagatttctctctttcgcgacttccaaaacaaaaaaaactaacaagcagctgcttccccacacaaagcatctgcaaaaattcaaaagtttggtttgcacccagaccaccacaccttgaaaatctctagccacgacatcaatgcacatgctatccagcccaactttaacatcacaattaagtttaagccactccttacggaggaggaagccaaccatccaccactagcaggggcggatggagggaagaaagggttgcgcagtaatctgcataagatatagcaatagaaatcaatgcaatggttaacattaacaaatttttgttatttatgttaccttgttatttt

SEQ ID NO: 178438 - DNA, 607 bp, Cannabis indica
agtccaaaacctaaaaattaaactccaatgtactatagtatcgaagagagaaggctcacatattactcattagaacaaatcaaactttttgaaggtcaaataattaaaagaagaaaaaaagaaaagaaaaaagagacaaaaagttagatcaaatattatgacaacttgattatcatcatcatcataatattggtgatcagaccgacttgataagaagaaggaaaaaaaaaataatcacatgcaaattgcatataaaacaagctatatatatttacatttttcattgatttataaatgtagtacaatattcaattattgtgatccccactggcaatactagtgctttgctttttcttttttttcctttgattctcttcattgaatattttatagtacttgtaaaagatttgaaattaaatattgttgctgctttcttgtttctatccttgctttcattgtttttttttatattatatataaaataataataattaaaaaataaaatattactagtctttttttttgttttttgtctaagtaaatgtacacctattgatttgatcggacaggttttttatgtatctatagttatattagtctagatacg

SEQ ID NO: 178439 - DNA, 858 bp, Cannabis indica
agatcattaactcacactcgtactgaaaatgtaaacttaaaagcagcaatgataatcaatcaagcatgaattataaacttgaactttaatagtaaccaacagaaaagtaaagttgacaccttctttaacgaggttcaaacaacaagttagagtaacttgtgtctatatcccaaggaaacaatcaacatttaaatctttattaatggaagcaattgtgattacaagatgattgagctaaaccagaaagatcaaatacaaagaaggcttgctcttgaccctccccaatcactctgtctcactctatcttatctctctcgaatctgtttagggtgatctcacttcaattctcaaaaccaagggccaagagttgttatttatagcttgaacaatttccccccaaaaccaactaacttaactgtcatttaaacatgaaaaatccgagagtgacatttggcacttatagatttatgtcaaaaaacactacatatatatgggtgttttaacggtggaccctcgaaaaatgggtgcaccaatgcactttctttgtatttttaatatttaaatgtaaatctcaatttttataagaaggtatatattgtaattacttaaaacattctgtaaagtcttaaaacttaaaaataaatcttaaaatatggtatatcactagtaaaaaaaaaatgaagcttcaatgaggacaaatttcattagtgaaggtgtctttttttataagtgatgctatcaatggtgacatgtcctcattaaaaagtcatcagtaataactcatcgctgaaggtaagtatcagtgacgaaattcaaagtcatcactgaaaataaatatcagtcacgacaatgtcgtca

SEQ ID NO: 178440 - DNA, 587 bp, Cannabis indica
aaacactcaagaaatatatattactagtgatctaatcatatttctaaaaataatataaaaaatcctaaatcatattttatagaacctttattaaataaaaaaaaataaaatgagcgaaaacattattctgaagccattgttattttttatgatggggaaagagagaatacattaaccatagtattttttgaggaacactacatatttataggctcattatagaatgagtttttgaatatttataatttgactctttaacaaattataaattaacttatagtatctactctttatttatatgataattaataccattttgatacccataacataattgatcacttaaatttaattttgtatcacactttataatagcatatatacattatacataggtactcacaaataaaattttaaatctaatatttagttcgaatatctcaaataattactaacgtacacgactataaaaagttaaattaatttttttttagaatacctaaaaacagataaagagtagccttaatagcatttttttagaaaatagaaaatggtgcattgtagaattttttatacatatatataaa

SEQ ID NO: 178441 - DNA, 793 bp, Cannabis indica
aaaaaaaatatttagtgttattcgtaaattgtattattaataatttgtaaaattcaaacaaaacgcaaagaaaataagaatttaactataaaaaaaaagtttatatatatagatttaatcacactaaagtaatatttatctaataatataaatagttcttagctatatagattataaaaaaaataactatagaaataattattggctatataaatttgaatataaaattaattattatttaagaatgtattttctaattattaataatcacttaataatataataaaacataaaagataaaattgatacatacatcatcaatcaaaataaaaaataaatgtatatattatgaatattatattactcaactttttttaacaaattatattgcactatttaattaattataaacttgatgaataatttattaatagttttatacaccactatctacatatttattatttcaataattataactttataataatataaacattgtacatactacaaaattgatatttattagataaatataaatattattttaattaacgatttttataataatataaatcattatgtaaatatatgtctaaagaccgcgcaaagcgcggttcgttctctagtatatatataaaggaaagacattaaggagttcaggtggcaatttgtatgagtttttcaccctctctttgatttctcaattttttattttatatattatcaaataattaatgtgtcttctcaattctatacttacactattgtgtagtctctattattatactac

SEQ ID NO: 178442 - DNA, 564 bp, Cannabis indica
atactgtcatgaggtgtcatccaagtttgttggaatatttccaatccctaggcaatcattgcagcagcctttatttccgttacaatagaatctttttgattctctatcattttgtaatgattgttttcttttaccacgtgtaaggcagggatttcatctctaccatctctgtaaactctatgattaattataaatacaattgccctgcatcagcctccttgagctgatcattttctctactgcatttcttagaaaattaactaaacatacacgaagtatatatagttgaatgcatggaagcttctatttccttcaactaacactacaaaagaaaaatttatttagtgtgaacattttagtcataacataatttttttgtgactaaatataatttttagtcacaagaaattaaagcacaatatttagatacaaggttcctaatttagttttaatcacaacaagtattgtggttaaaaatacatttagtcatataaattttataattttcacaactaatacctttagctacgaactttttaagcacaatataggaattatatttta

SEQ ID NO: 178443 - DNA, 657 bp, Cannabis indica
ttttttttttatatatttttagagtttcttgaaaaaacaacaaaaaaaattacaacaaaaaattacataaaaataacatctaaataacatcaaaacaacaacaaaaaataacatataaataacaaaaaatcaacaataaattaacatgaatacaacataaaaagaccgtaatttctagtaaataaaataaaaaagtataaaaatatttaaattctgtgaaattgtattttgtaatttttttattgttattgtgtatttgtgaaattatttcatttataaatagactcattataatattttttattttatataaaatatattttcttaccaattaacttttttgaagaagatgagagattaatacatcatagagaaatgatggaaaattatccatccaaactagctcgctatctaccctaagtgcacgaactgctaatttatgtataattttattagtcgtacgacgaactaaatcaaagatactttaaaaaaattagacaataaactagtaatatcaagtaaataacctagtttattacaaaaacaaaaatctcctcaaaaaagctaaaatcaaatgctaaaaaaatcaagattcaaacgaactaaataagtaaattcaagagtaagaatcaaatctaaacgcaaaccattaaaaag

SEQ ID NO: 178444 - DNA, 807 bp, Cannabis indica
gcttctaccactgtttcatacttattagttttaagtagtcactgtagggattagtctaatagaaaagaacatttacaaagcacttatctttcgagatctttacggtattaaatgttcactggatgatcatccataaggggaacgaagtctagggtctcgaggtcacattaaaatagtaactatgtaagaccaacaatggagatcaaatatctttaaactaaagctcattattttagaagaaattatattttcattttgatatctattttaatctatttattttactatatttatttaattaaaattactaatttagataactaaatataaattttaatttaatatttataaaattataccttaggtagatctgagaataaataaaatttattttccatccttagtattaatttttaataaatattatgaaaattacttatatgagttcgtccaaaattaattaaaaataatttccaaattaaatctaattttctataaatatatataatcaaatttaaaatctaatgtatttaataaaatatttttttttgaattttatattaaaataaaataaaaataaatcttaaaaattattctaattcatgttggtctaaaattaataaattaattgttcaacataaatataatttttcttattttaaattaaaacttttgtaaaaaataatctaatacttaagtatctttgaataaattaacttaaatattaatttttactatttaattaaattacaatctagaaaaaaatcaaaaaatagtctaacttgtaaaaaataaataatctatata

SEQ ID NO: 178445 - DNA, 604 bp, Cannabis indica
ataatgtcacttgaaagtagggtaaatgttccatatttcattaattgcatgagttttttcaatttctatttttttcttttagtcaaaaatggactaaagagaatagtctgaagtcaagaccgaaagctccaatgtagtgtttacttgtgttaatttgctttatatgctcttgaaatctctaaataatttaggcttatcattctaattatatttatttgagcaatttgcggcgaaacccccttatgttttgatttttatacacttaacccccttatctttatttttggtggcaaaactcctttatgttttaatttttatacacttaacccctttatctttttttttgtggcaaaacccccttatgttttaatttttatacacttaacccctctatcttttgttttggtggcaaaacccttcagtttacttttctttgcaaatttaaagttttagttaaatattaccgttaaatactaactggattactactgtatcgacttcgaggttttaccgttacatatacaaaggtgtatacagtggtcatccaattgatatttaacggtaatatttaactggcgtgtcaaatttgcaaagaaaaataaac

SEQ ID NO: 178446 - DNA, 680 bp, Cannabis indica
tatctatgtttagcgctcccactcaattgcactaccatgttcccaaaatgtacgtatcaccctgaccaaaaagtaggcttaactaaaaaatcaaagaacatgtataatactcttgagatcgaacctaaccatgtcaggattaagatctatttgaactatgatcaactaggtgatattgaactaaatagatattacggtatatttatcatatctgattcaaagttcaatatcgatcccttccgatgcatactccatgcatccaacccaatctttagtttaactaatgccctggaaaggacatagcacttatccaaagtgtaagtaaactatgttgtagattatcatatcagttaaactcaatgtactaataaatctaggaaatatatatatatatatatttttataaaaggagaagggttctcattaatcaacaagcaagttacaaacaaagcctcgaaaaaaacagaggcatgacagcatctaataaatcaagttaacagcctacacattaaaccttggctattagaatcaatcctcctttgtttatagctaaacaatctataatttacaatccttttaatctctttgactatatgacgaattgtgtaagacctattatcatgtgtacatttgtttctatttagccaataatgtaagactaacagtcaacagacagcatg

SEQ ID NO: 178447 - DNA, 648 bp, Cannabis indica
  modified_base (605)..(605): a, c, t, g, unknown or other
aaatggtcattgaagacagtaatactaacaacactactactactctactaggagattgagccatgacaaaattgtcactgcccaagtatatgacacactaggtttaatcaacgtacaaaaaaaaaaaagtaaaaatttcacaaaatagtaaaaaaaaatctacaagatgcatggattgagggtccccacaaagaccccacgtttgattgccaagtctctttttgtttagtcttctccaacatgcactggcccagccagacctctctatctctgaccatattcacgagatctctctctaaatatataactgagttgactcgcccgtttttatgactctaactcaccatttggtattgtgtatagtacactatcttttagtactacaacaaaatgaaagagctggggcctaattttgaatttacctttttatatggttgttgttgttgttgttgttgttgtttgtctttattatgagtactaatgatgcccattgtactggctcaaattcatggttgaacccattgaagcaaacttagcaagctcttgttgaaagaaatttgaagtagttgtactacaccaccaacaccaagaaaatctcagtcatnttaccatgctcatcattttccggtattcgctgatgatggcggt

SEQ ID NO: 178448 - DNA, 770 bp, Cannabis indica
gtgaggttttagccacgaccactttgggtggtgtgttagattttgtgttcgtcttggctatgctcatgttttggtagaattagattgtcttagtgttataaatgaccttaaaatttatttggtggatcattgttatttagggtgtattattagagatgctttggcttattgtacttttcttagtgatttttcttttgcttatttttctagaattgctatagtattgctcgtttattgacaaaactagctcttaccttagattcattttgtttagtagtctagctattccaattgtattagtacttttttgtaaaccaatttttattgattaatgatattgccatgttactcttttcgatttctatagtggtttacttgcgaggatttaatgatgccaatctttttcaacaaagaaaagaaacagcaaaacaatacatttcttcggattttgataacaataaatcaacaagacattttattcttgttttactacagtacattggcttcggttggaaaattttaaaataagttatttttggcttacaaaattagaaaagtacttttgaaaatgtttggataaaaaataaaaaataaaaaattcaatttctaaattttattttaatttttttttagaaattagggtcctagccaaacgggtcattgtagtgaaagccaatggtaatgttagtcttattttttaaaaaaattaagataaataaacaaataaaatactatcaatagtatattattcatcatttccaataattccc

SEQ ID NO: 178449 - DNA, 779 bp, Cannabis indica
ttgtctattgattctatgaaatttctttagctagacaaggtcctatggagtaggtattgatcaccaaattatagaaaagttgggtgtgtattattcttaattgaattttttatatatatttatttgcaatgttaattgtattaattaatgtaattttacttttattaattattgtataattgaatctgtcataaacttaaggaggaaaaaaaaaagcaaatatatgttatcttatcttattttaggatattatattattatgttattttccttgcatcatcatctaaaataaaatttggtataaatattataatagtaattattcaaacttgtttttccgaaaaaagaaacgtgtaattttaagatcagctaatgcaaactcaaatataaggccaattaagatcatggactgaattcattatcgaggtcaagacatccagatgcttaaaaaaacactttgtttaggcgagataaaagtccatcaaaacaggttttcaaatagcattaagtagtgcttctggaaaggtaattaatgagcctttagatatcaagcttattatctcgtccattaattattaaatcccacaacatcaagactttatttttaaagattatgttcgagaatcaggcattgcgactaaggaaatagaataattgtcaattaagtatttatgtgtctttgaaaatagaacgcgttttaacaactatcaatgcaacatgatgtggcatccacatcgacagaagatcacctcataggtcgagcttcactagatggatct

SEQ ID NO: 178450 - DNA, 668 bp, Cannabis indica
atgtgtatgtgtctatgtgaataagaattatttttcttgtgttttttattacaaaataaataaaatgcaccaactcaatatattactaaaaaagattaagaaattagaagtttgtgtctttttttaattaatatatattacatattataattttttaaaaatatatataattaagtgcggattggattggatcggttactttttgaggtcaaacaacatccaatccgcacaagtgcggattttagatttttcaatccaatccaatccgcacaagtgcggatatccgcattttgcggattggattggattggatcgtgcggattggattggatcggatactttgtgaacacccctaggttaatgtaaattatgtgttagagttaagtggagagtgaagctatattgaacaacctactcacaaagtgactatattttaatgaaatataatataaggtttttttcatgagttattcttcaatttattccttaaaagactttttttttattatctttttctatataaaatataataagtatttttttttttttttagctataatgtatgtatagtatatataacaaatatttataagagtaaatatatccttagcacttataaacaaaatgaataaaattttatggtctcaataaatataattctaaataac

SEQ ID NO: 178451 - DNA, 611 bp, Cannabis indica
gtgacttgacacgtaacatctaatagattgtacaatccctgcttccaacacaaaatcccgggaggcttcatcacggaatttaacgagtgaaagaccataattcattctaaccactttttccaattccatatttcctcaaacccttaccatccttcttaagcgatggagagaaatggagccttgcacccacatagctcgcctttgtggagagctctgcccacatctggtgagatcactcctaaaatttctgtccagtaccttcatctcgttccaatcatagttgaagtatgcagcatcgaactttgattgagatactcttgcacctcttggattggaggaaactctccaagactccatcaagtgcatcaatgaactcagtctgtgaatcctcctgattcgcgtttcattgttgtggacattgtcccacatagaataaatggtagagaattgagccatatataagaacatgagctactcaactcattgtcaattaattttgagatggaaccccatgattcttaacatggtatcagagccttatcccttgcgggttgcgggcaagtgatcctatccgatccgcacctatacagatattgaccatgtccactctg

SEQ ID NO: 178452 - DNA, 914 bp, Cannabis indica
tattagtagaattataaaataaaaatgataataataataaccttttagacttcaggaagaaaagctaagcatataatgaaattttcttttcgtacttaatatttgctttttaccaattagatgtattcaatttcaatataaatacttcatcataattttcttcatagaaaaaaacttcatcatgatttgaatgaaattgtaaagagatgatgtaatttcctcctactgatcttatatatcttcctattttaatttaatgattatgatccttatatacctaatacctatttgttttattacaatatatttaatatagagaagaagaagtaaaaagtacaagcaaaagtgatatgaatcacaaaaagataaatgtatacagattaaatttacagaaaagaatgacttatatatataagacaaaattacaccaaaattttgaaaacctacaaaataataaaattataaaatataaggtacttgattagcactaaacaaacaaaatgttaaaaaaaaaattatacaagaaaaaattgtctaactcttttccattttttttacaagaaataatatttaataacaagaaaaacataatttttaaaaacttattgaataaatagtgtcatcatctatcgaaattagtaggtttaatctaactttaagatctctcttataagacaaaaaatataaataatgaaacacactaaaaactatcaatgcaaataaagaattagtacactaaaattgataatcataaatttaaaaattgataatgttaatgtaaaataggactgtggacagattatacaagcaaggaattatagaagaaaagcacttgttatttgtgtggaatggagcctgagacacatgtgacatgaccacctattttttaggtgtgaatttacaaaattattagt

SEQ ID NO: 178453 - DNA, 662 bp, Cannabis indica
attatgttcctttatagggacttttcttttccctcgttgtgaatgtatataggttgaagattggttttaaacttcatagtctgggccaataatacaatctttcttgcaggtgctttggcatactgctccaaaaagttagtgacaggggttatgtccgcaataagattgactggatgtacaggcaagctaacatcaccattccaacaaacaggcttggtttggcaaaagcttttggattggtaagtgtgggaaaataagattgatttacaatcagtttttttgagatatcaacagtattaaaaaatctgggccagtttggttagtttcttattcagttagaatatcccattagttatggaatatattatcttaacatagtttctattttagttgctagggttaacttatatacacactgtctgtacgtgagttatttatttatttatttttttgaatgtgaacagtagagaatctttccacaaataagtatggtttgagtatattgaccattttctccatttcatgctctatatatgacattacttcttattgcctacaggtagctgcatctcacttggacactgtcttggataagttgaaagatattctagataatgtcggccaaagtatctttcagaggtatacacccagaataggagttt

SEQ ID NO: 178454 - DNA, 1282 bp, Cannabis indica
aggatattagaaacacaaaacaagtaaagtttgtatcgattaaaagcctttctgtggttctgttaagttgtaaatatggatggaagcaacacaatagttctgaatttttttttaaaaaaaaaaaattggtataaaattttacttttatattctaacccttattttattttattttaaaaaataattttacattttagttcttaaattaaattttatttcaaaaataataatgatttttttttttgaataattgcataattatattaagaaccaaagaagttaaatctcgcaatcattacaaattaaggtacctgggacggaggacgaatttattataccagttacattaccgctaaaagctcatttaactatattgtgggcagcaaagttacataatctagaaataaacaaaaaattacagccaatcaaaaggttcgagagcgttttacaaatacatagttagtaatacccccaaacagaagaagttccctttagagtattgatcaccgtctcatagtctctctctatgatcacaaaagaatgctttccacgtattgctgattccagactaataaacaagttgcagtttctccaatgagaggtcagaaaagttgacggatattgctagccatccacagaattgactccttatgatccctcaccaaggccatcacacacattaagtcgctaccaacattaacatcacagttgattttgacccaatcatctggcgggggagaccaagcaggaggcgtgcaaatcaccggtgcaggaaacaaacaaaggctaaaatcaaacaggcaacatcccacacaggtgtataaaattagttttttgaagttgcaggttgctctgtgagggtaattagaaggcagattaagcttagtcttaaggttagagtccattgttgtatcttttcgaaggttacttccatagtgaaaaatataatgactattataaacagtctttgaattgttgggttattgctttgtagtgtgtatagttcaaaggtttttggaataaaattttcttcattagcgccaaaatataaatatataacactaagttacaaatctaaaaagaacaaatgaagataaacattaactaaaataataatttaataatcaaattgatcacttgaggatcttagccttgaagaatatcaataagtattttgagaatcttgatatattcttgagatgtttgatattgttggtgagctattttttacataatccttgtttgctcattttgaaaataattgcgtatattaggatcaact

SEQ ID NO: 178455 - DNA, 1235 bp, Cannabis indica
aacgcctttaacaaaagagatcataaacactaaacaatccaattcagaagaagtttagattaaaaaaaaagcattgcacctttacaccatcagtttttggatgatattttcgagtaggcagcctgatacgcctttgtgataagtgtcgagtagtcagtaacgacgatatcctaacaggagcaggtttgtctagtacctataacaggaaaaaatccataagcagtgtctttgagtcatcacaaataagttttcggcaacagcctccacataggaattcaaactcaaacagatccaacaaacaactagaaggacttgaatttcagaacacgaaataaactataatttattgttacttacaggcatgctagatattccatattgaactgatggtgaggttcctccatttccaattgacatttgtggcaatgcagggagtgttccgaagggattagaaggtgccggttgaagaatgggggagctttgaggggcagacctgttaaaaaagaatacacaggaaccaatatgatttattctttcaaaacatatataaattttccctttcacagaatttagggaccaacatttattaaggcccgaagcttgtaaattacaaatttaaagattctcaaacaaagggtacagaactagagtagacaaagccacacaagaaatatatatactttggcaaagtgaaaaaatttctaggaatatctactaactatcacatagacaacgagcattactgtcttaaaggaatcgggacgtgacacaaataaaaatttcaaatcctattaagatgtaatggtgagtagaagataaagaggaatatatatgaacttacaaatttgcagagttattacccaagattccagtgtttgcattggctgcaacaaaaacagataaaagtcagcagtattataaaatttattcagaactgtaaaataaaaaatatatacataacttacatggctgcatcataggaaaggcaccaaaccctcctgaaccaacttgttgagatggctgattcattgtaaaagccgaagagaaagatggctgcaggcacaaacacaaaaaaaaagtttaaaaaaatgaaaacaaaggggaaccatgtcatgataatttataaatcaaacaagtcagctctttaaaaaccaattaacagttcgaaagatatgcattgacacagaactcaattgtttaaaaaaaactgagaccacaaacattcccaatacaat

SEQ ID NO: 178456 - DNA, 1278 bp, Cannabis indica
atctagtagtttgtcgtctattactgtaactaacacgttggaatattgtatacagtacacatgtgtatactggacctagtctctgtctcaagagtacatatatatattatgcatctcattgatatttaaaaattatcaaatggtacgtaactccaagtagccagatttgacaatatatgctctttatttaattttaacaagtttaaaatgaatggattttgacatttttcacattcgacacagtagtgtccaaaatagtagtggtgaaggctgcttggttaattagacatatatttttcacaataatgatgttgggattgatcactctttagtccacaaatatatgatatgatccctttcggtatatggaatgttgacacttgaggctgcccaaatgattaactttttgttacagaaaatattgaaaacaggttcaaagaaaaatagatttttttgagtatataattttttatattgtaaattattttcaatttttcaaaattttagtaaaacgtgcatgcaatagactatttaaatactctattactatttaagttttggttttaaaatattagtagaatcataaataaaatgataataaaaataacctttagacttcagtaagaaaagctaagcatataatgaaatttcttttcgtatatactttatattgtcttttaccaaattagatgtattcaatttcaatataaatacttcatcataagtttcttcattgaaaaaacttcatcatgatttgaatgaaattgtaaagagatgatgtaatttcctcctactgatcttatatatcttcctattttaatttaatgattatgatccttatatacctaatacctatttgttttattacaatatatttaatacagagaagaagaagtaaaaagtacaagaaaaagtgatatgaatcacaaaaagataaatgtatacagattaaatttacagaaaagaatgacttatatatataagacaaaattacaccaaaattttgaaaacctacaaaataataaaattataaaatataaggtacttgattagcactaaacaaacaaaatgttaaaaaaaaattataacaagaaaaaattgtctaactcttttccatttttttacaagaaataatatttaataacaagaaaacataatttttaaaaacttattgaataaaatatatagtgtcatcatccatcgaaattagtaggtttaatctaactttaagatctctctataagacaaaaaatataaataatgaaacacactaaaact

SEQ ID NO: 178457 - DNA, 594 bp, Cannabis indica
attttgttattaagttgtagaagaagaaaaaaagagaaagtgcagataattggaaataaataaattaaagaaaaacccaatcgtagatgtacacagcaaaaatctaatcgttttttttttttagatttaatggaatttattttattatatataaataaaaagtaatccatgaatttctcataaaccattttatttttaatataaataaaaagtcacccataaatttctcataaaccaagaattatgttatatatgcacactttatatagaatagatattttgaatatatacgattataataaagggttttttatttttacattttaaaatagctagtttttttacattttttttataaaattctacatagaaatttctattgcaattaacggagcaacttaaatcgcaacctacataaaaatcatcggagaaaccattttaacctaaaccgtaaattaaaaaaaaattaaaaaaatactatatagagtaatttctctctaacaaaataaattttgctgtgcttttagattacatgcatcgatgggatatcctattattacctttctaatatagtgataattcagttagtattta

SEQ ID NO: 178458 - DNA, 735 bp, Cannabis indica
taactctaaaatcacttttttttataagctatttgtttttcaactatcatataattttaaaaatgataactcacacattttttctatcacttactaactctaatcactctccaaacctatttatgtattttctttctctctttttttttttcggaatacttttaccaagagataaaattatattgaaagttaataatgttattttaaaaaatatattatattatttaaataatagtacattaaaaattagtaatgatcacaaattaaaaataatagtcaatttttgattagtatggttgaataatatattatattatgtaatgtactattatttaaataatagtacattaatgatcacaaattaaaaataatagtcaatttttgattaatatggttgaataattaatttaattatttattacatcaagtagagatggtgacaatattagatatagagataacaaaacaaatgatagcttatttcatcagcatgattgaatcacaataagatttttgagtaaataatgacataagtacttaatattttgattctgtaagtagcattaatctaataatatttttagcattataagtattaaatgtttgtaaaactataatctctatccaattttatcagtacatagactccgttattatcttaaataagatacatataatatccaaattttaaattgttgaatcgggttaagttgaatttacatctaacttttcatt

SEQ ID NO: 178459 - DNA, 558 bp, Cannabis indica
tgacatgaaaatggtggccttaatatcatgacttgcaataagatcattgttatggggagatctacaacgaaatagagcagacaatttaacagatttcttaataagagcttagggattcataaatttggaagacgcttatactcaagcatatggagtactttcaacaccttccaccattataccgaattcccaaaattcacaaatgatgactccatttatttactctccaccaactacctttacaactcctacagtttatggaccaagtacttccgtgtagccagctgcacatgttagttttttttgatctagagctgcacaaacatgatacagtgctgctcccagaaaaatgaaccacacagctaaagttctagagtccaacataacccagtcttagagtaaaaggaatcaaagggtctaaactagagtgattctacaaaaaggaaagacccaagagtcaagatacagtgagtacacaagtcttttagatactcaagagaataagtataagaaaacttgtaaacatggttcattacaagaagcctcgaccaatgtaca

SEQ ID NO: 178460 - DNA, 1214 bp, Cannabis indica
aattatgaatggttattaagaaatcactaacgtacgtcaattatatgtccacgcgcgtccaagcttgtaaatataaatatatcataaaataatatgttatactaattctacaatcttaatttaaaaataaagttgatcatgtcctcgttgacttcatcattaaatttcttgcctatttgactacatagttaaaataagtagagttctagaaccatataaatatcaagataatttccatttttcaaaattcaacatgtttccttttaccaaaattttcaagaaaattatcttaagtttccaaaaagacaatacaaattaattagtaattagattagactattgctgtaaatacaggccagacttttaatttaactcgatacaaaatcaacacgatcgctcaaaaagcacgagtacgactagacacgaaaaaatacgggcttaaatatgacatgacatgcaatgctacaaattaattgtcacgacacaacacgaaaaatatgtctttaagcatgacacgagacacgagaagcactaaaaatcggcacgtaaacacgaatagtagcccgaaaagcatgacatgctacaagcgaaaaaaaacggcacgacatattaaaattcttataatatataataaataataataaaatatcaatttatcaaatataaataaaataaaataataataaaatttatatgtaatgctaaatattataaatttataattaaagcataaaaaatgattatatattaatttatttatagagtgtgttaaaaaaaatttaaatatttatattctaatgttaattaattttttttatctgtaaaatattgttcaaaaattatataaatataattaaagttataaaatatacatataatttaataattgtaaaaaatataaaaaagtaaaacatgaatttaagctcgaatatcaaaatgggctggctgcttgtttagaaatacgggtcggtacgaacaaagtacattatgaaaatactggacgctgtgtcgggcctacccttaaaaaaatattagcacgacatgacacgactttatatttttttgtggcaaaaatacgtgacacaatccactttttaaaatatacgaataaatatgagtcgaacgagcacgacatagacgaagtctagattagactagaaagaacaaaagatcatggatacatgcatacataaatcgtgtacgaaatgaaatat

SEQ ID NO: 178461 - DNA, 773 bp, Cannabis indica
attaaattgtattaattttaaataattaatttggactattatatatatatcacatattttggaaattcttaaactgtgataatgtgatatatcaaatcttttattaaggtaattaaaaatatttctagccgttgaagaatatctttgaatatttgattgtaattaaattatgtattaattgtatatagtatttcgtgattaaggaaatcagctaaaatagttattgacatacaaatacgtttttaatattaatatttgttgaatttttcttgataattttttttttaatcccagtcaatattttactatttaaatattagttttatttaagttttagtggtttttgttaaagaattcgataactaattgtaaattattttttaaaccatttgttttataaaaataaacttgttaagaatgctataattgtgtatataaacctataatatgcacattgttattaataataaacggtaagtttatctcaatatattcaaactcatatagtaattatccttaatgtgatgaaataatttattataagtcatacaaacatatgattttaacatttattcttagtttcgggtaaaattcaaaggatcaatatatgcgttttgaaaaatttaaaggaaatattatgtaaagaaaataaatgaaaaaaatataaatcttaaaaataagaaaaaaaagaaattaattagttaaagtttacaattataaaccttaattttttttttaaaatttaattttcttgtaaagttatcactgcagag

SEQ ID NO: 178462 - DNA, 767 bp, Cannabis indica
ctaaaaaaatgcatggcgtattttggaagccacacttatcctccagttgtatgcatctgatagttttagaatttattaggaatgttgtccatctcctatactatgccctcttcccgcggacattctatgagctcaagacggacattgacgttccacttgggattagtcatatctttgaagatttgtctgcttttatccataggaatgtcgttttacataaaaagaatcaaacaaaatgaatattaagcagttaatacccaaatcaaaataaggcggtaagggtacaagagagtcctcctcgttaacttcttggagaagtccccatcggaccctatatccaagaatgatttgttcttaaataatataattaggaacactttgaaagaaatgaaaacaaacagaacattgtctgggatcagaaggaatccggacaaaatgcgcaaaacacagcatcatccccagggaatgctgccatgaccactggaatcgacagtcatgtggaaatgacaaaacccaaaaatccccagtgttcaaagttttcaaagcatggaaaggttctaaaactgcgagtacctttctaatgtctctagtttactagaaaaatcaaccaccctacgacggcggaatacatagttccgatcaacgaccagtacaaaaataaaacccttattcagagcatgaacaccgaacccacggtagccaagaaattgaattgcataagaagaaaccaaaaattcacaaaaaaatgttacttacttgtggtgatt

SEQ ID NO: 178463 - DNA, 1149 bp, Cannabis indica
gagaaagtgtacctaaaaaaccaactagttattatctctctttcatattcatcaagaaaaaaaatacaaaaactaatccaacaacagaaattgagcctaacaacagggcctattgactaaaattaacaaaaatacaaaattacacaatcaaaaaatgatatgagaatccaagacaaacccaaaatcccgacttgaagatcatatgagtttacctatatatgttcttcgcgatcatatccaatattagcaaaccctctcgagtgtcgagtaagatatagcaccctatatagaaaaaataataaaataataatcggtgctattttgaagtagcattgtgagtcctaggttgattagagtagccgaaagaccactctaacaacctaagaacagagttgctaagtaattagaactctaaatcaaaatttatttggagacaagttgtaaatgtgacatgacaaatgaaaccatttttataatttctacagacattgtatacccttaaacgacccacatgtaacttggagttggacccttctatctctcatgtgtggctacaccaaacaacattgagaaaaatatgtccaataaacgaataacaacatttgctaataattattagtcaaaatcatcaaactgagatgagattattaattaataaataatttactataagtggaggaatttaagagctatatatatcttaattacatttatttattcagtagtatcctaattttgaatacttgtaattcttcaaatcatgtcattaacccacccatctaaagtgaattaattatttgaccttaatttgcgaaagtcttaactttgagcatcaacaaattaaagatggagttatattatggggtttagtcaacttaattgtctaataatttaatttgttatatatattttttaattgaatttcaaatatgtctattctatataaagtgtgcctatataactgaaattcttggtttatgagaaatttatgggtaactttttatttttatttgataaaataataaaatattatttatatataataaaataataataaaacaatcctattaatatttgaattgatatttagcatattttaactctatatataatcacaactataactctagaaattaaaaatatatatat

SEQ ID NO: 178464 - DNA, 1194 bp, Cannabis indica
gtggtccataatgtagctaagtgggcattttcccatgagaagtttggtaccatgccactatcctccgacaatctattttgtaacgaccgacaagtctaactgattttgttctaatatatttgcacgcttttcttccaaaaaaaaaaaaagaagaagaaaagaaaagagtacacttgctaaaaaattggccacacatgttaaataaaaaaaaaacaaaatttcaacattatatcaaagcgataatagataatattataattaatatgggatttttcaaatattatggaaaataacatttaaagtaaaagtatttgcaaatatctaaataaattcaatttcttgtaaaataaaagataagacatgagatattttgaactccctccaataattatatttatagatcttaatatatgatcataagtgtcactttagatacattattaaaatttctttgtatgatatgacaaaaaaaaacctttaatacttatcaaagtaaattaaaaatcattgtcaaataattatatatatatgtagcaaaaggaactaatgtataattgaaaagaaaatgaaagaaagtaaagtgaaatgaaaagaagaaaaaatagtacaaaagacactaacataagatataaaagagtatacttacttacaaattactaattagtattcaaaacaaatatatatgtattgtaatatataaacgcttaaatgataaaaaaaaattcaaaataaataaggattgtaacttaactaatcaaaacgatggacatagcaacaaaattattcttatgttacgaagttaagaatgactttttcaattacgaaaaaacacatgtaaataatagtattttattgtaatttttttaaataaaatattttaaaataaagaataattaagatatttactttctaactattttattatatctttctattgtaaaaaattagtatacgtctattatttctacactcgaagtatattgtcaaattgtgtctcccaaatcatttagaataattgagctatgcccttactgttaccactacaaaaattatgttctccatattttgaaaaacaacatacaaaatttaagagcacaatctaatcaaattagtatgaactgccttatgtatttttttacacggaaaagtttcaaaaatttgaaaagtagccatttaatgtatcatattctgtac

SEQ ID NO: 178465 - DNA, 574 bp, Cannabis indica
tgtggatgatagtttctggacattcgattatccggttcttaaatccggtgaaggataagaatctccacgtgataatcacgtggttttctatcatcttcgttattttttttttttttaacatcgtctttgtatttttattttcagttttttaatgtacttgtaaaaattggattgcccatgttttagctttttctgggcaaacaaaactaaactaggtgaactcatcaaaataaataaataaataaataaataatctaggtgaaaaataatttttaatttgtattttataatttagggtgctggttatttttttccgatgtttaaagagtttttttttttggtatgtagtttgatgtttaaagagttataattgtagttttattatataatagtatatatggtacttatttatgatattttataaaaaaattatagggtattattttatatattattctttatttttttgttaaattatggtttagatttttaaagtggttgtaataggagtttctatgtagaattttataaaatacaacaaaaatgtattaaagtgtaaaagtaaaaaagtcct

SEQ ID NO: 178466 - DNA, 853 bp, Cannabis indica
atgtttgggagggaaaaaacagaatttcctttacaaagctcgggaaaaaagaaaaggatgcataccatattgataagatacaggcctactaacaaaaagaatattaacgctacatcttaagaataatagcttaaaaatctgtcaaaactaaataataaagacaaaaacaccaagtagctcaaaaaaagatcataattcaatttaaaattacaatagaagttatctcaaaccagatcagggaaggttgaagctcaaccaaaatcgagataaattctaactcgggtcgtactaaaatagatcatagttaagaccatgctgaaataagatctgatcaagtaccaaccgagatatgattacctcagattcaattgaagtttagataagttgcattcagaacagtccgagataaactaagttgagattatgctgagataaacctgtttatataccgattgagactcagttacctcatactcaacaaaagttatattttacccgaactaagctgagatagttatatctcaggacaatccgagataaaccagaaactgagccaatgtcaaagtcaaagtatgactataactcgatctaataagcaaaataaatcaataatcaaaaagtgttaagcatctaagatcaatcaaagagcatatcagagtttaaatactgccaataataaaaatagcataaaagtcgagaataaaatctcatctcaaaaccataagaaaacaaagtaagaatcgaaataaaaataaaataaatccaaaaagagaagataaaattcaaaatataaaaaactaaattactaaaaaattaaaccaaatccaataaagtgtaacgtaatcagtacata

SEQ ID NO: 178467 - DNA, 580 bp, Cannabis indica
gtgtatctggaagccaatcctagtttctcattcattgctctgcatagaataaggaatatttcactaagatcgtggacagagaataatatcatgcctaaaaaataaaactaaacaaattgaagatcaaataattaaattacattaattacccacgatcaaaagacacaatatgagcagctatcaccgtgatcagatttccacatcagcatacacgtattgtctcatgggttcggcttcgtcgggtaagcccaaatctatgtataatttgtaaactccccattatagagaaagagttactaagtacgacctctattattctattaatatacattgaatccttcgttcaaatggttggaaattcttgacttatctactcaagaagagaatatagggtgctcatattcattgtaataccttaggcttttctagccaatttcataatattagtgactcatggagtgaagctcattaacattccaaccacgtaaaaattttagagtgcctttttctatatgttactctcttagtcatattctctttagtctctaacattaaataatttgtttttcgtaaaatttct

SEQ ID NO: 178468 - DNA, 1207 bp, Cannabis indica
tgaacgtatttattattttttttttaattcaggctggttcatagtctaattttattacatgtatcaatattatattattgctcaaaatataagtataataatatatatctcaaaggaaaagattagtggaggtataatttgttgcccaagctggtgttggagaagattggtgagcacaaaaaataagatcaagcaagtagtagatatgcaacaattttgctcttgcatgtacaaaatcaaccaaggctatttggctcttaatattggtagaaggtttggaatcatttatcagttccaaagcatcgttttatacttttacttgcaattctaaataaagtgaaaactaaacagggactattgaagtttaaaatatgccaagaatcaagttgcacggtatgtgaaatacatacaaaaactgattgttcgctttgggcttagtatggaatgtttaggccccgttcttccatcttatcaggccgctactttaccttaacttccacattagtactaatattgtccgctttgagcctaacgtctttcacgtattttatttttaggtacccttctcccaggccttatactaatggagtaaatgaaacacttatatctacgataactcttgcttattcttattctaatatgagacttgggttaataccacaacaatcctctcctcaaaccaatgatctgattcataaaaaataaaaaaaataaaaaataaattgatagatgaattcgtcccatcccattggttgttttgcataacgtttccaaatctataatatgtatttatatatatatatatattcttttgttattttacaatatatatttagtcagaaattaattaatgttaaaccttttactagagccaaatgattatatacttgaattcataattattattatccgaatatgaaacaaatatttgatatgactgaatctgtcgaatggccatgtgtaatatctattatcattgttttatttgcaatattaaaattttcaatagctgagttgtaaagaataattctgtcgttgaaattaacaaaattgcattaattattatttttatgacaacgaatcaaaaggccacattgcccatcactagaaatgttacatgggttttctagaatgggcccacaataaaaggaaatgatcatttcgccccttctagtaggtcccaaataagtattcatttcagacctac

SEQ ID NO: 178469 - DNA, 802 bp, Cannabis indica
gcatggttttcttccatcatggaggctgttatagaagattcagaaggacttccttccttggaaatatcataaagacataagacacaaatcaaaatcaaactcaatacaaatatatatttaattcacataatcaataaaacagttaaaaaaaagaaagacccatctattcaaagaatcaaatcaagccactccttgtatttatccattcatatcaataaatatgtgattgctttttttgaaatttttcaagcatgcatgtatgaatttactaatcttacctgctaaattaagcctcttgcttatctgggtataaataaattaacagcttatgcaataatactgaaaaggaaataaaagaaaagaaagaaaaataccaggttggtggtggaataatgattgggttccaatctaaagctattatcaactctgagagcttctttcttctccccttgtttttgaacttttggaaattgaggagcagccatcttatcttatctcccaagtaattatcagaaagcttagagataattaaaaagaaaaaatcaaaattatgaaaatattctattgaatttgtgtatttttttttttgctaaaaaggaagtaaattttttgtttttttttttttaaattttgttgttgagtgtgtgttttgtagtacaaagtatacaaaagtatgcaatttggtttgtaaggaaaataggggagagagagagagagagagattgtggagctcgagagttgaccaacaagagagagaaatgtatttggtttgtgaagagaagtgagagagagcagagacaac

SEQ ID NO: 178470 - DNA, 659 bp, Cannabis indica
cccaaatccacttgtatagggccggccacttttgtagggaatttaaactgatattttcattattttaatgccaaataattcaaacctaaccctagtggaatgctataaatagatagtgaaggcttcaggaaaattacacttctgattcagaaaaaactgagcctctctctctctccctatctttagccgccacttccctcttcttttcttcttcaatatttcgaaattcttagtgtatgagtagtgcccacacacagcaagtgatacctcaatcatagtgaggaagatcgtgaagaaagactttcagcaagaaggagtttcagcatcaaagattcagagaaagagatccaggttcagatattgataatgctctgctacagaaaggaatcaagggctagatatctgaacggaaggagtcatattattccgctgcacccaatgtaaggtttcctaaactttatatgtgtttatttcatcgttttagaaagttcatatttagggtgttaatcaacatacttgtgagtagatctaagatcctggtaaaataatttccaacatgtattaatgtaaagtgatttgtaaaacacacagaaaaaataaaaactaaagtttttcgaacaataccaaccgtaaccaaaattttcatgtgtatatatact

SEQ ID NO: 178471 - DNA, 681 bp, Cannabis indica
gaggtaaaaatgatagattttaaaaaagaaggtaaaaataaaagaggacaatataaaaaaggtatagagtgtaatttcctctctaatatcgaaacatattttcattttcttgtaaatagcccaaattcaaatgagctcgggcccatctccaactccaactggcccttcttatgcaagaaggtttgggcctggtattacgcggacaagtcacaaaattggaagatttcacgttcctcatctagaaacatgaataacacttcccaaaagaagttacagcctcacattattatcttcccattcatcttcagcctctaaccccaatcgactagtcaccagcaaccattaatttaatcctaaaaagaacgaaggttcaattattgttacagcccttctatatttgcaaacatgcagggttccttacaccattattttattgcttttcttaaatatcgatttatattttttattgctttaataatatttatttggacttatactctatcaaattgattttttatcctaaaaaagtagcttttaataagaataaagtacacaatctagttattttgaatgtatttttaaattttctaatatttttgtaaaaacaaatcgtaattagtttatatgaatattatctcaaaaatgaaaaaaattattaatttgtacaaaatatttgaaact

SEQ ID NO: 178472 - DNA, 594 bp, Cannabis indica
gtggaggtggaaactgacagcttactcactgttcaagcaatttttagtacacaacaaatgtcttcggtatttggtttggttactaatgattgtaaaactttactgtcttcttcaccaaatactagtttacgttttgttaaacgatcagcaaatcgagtggcacattttgtggctagacgctctcgattttactctgatcgtagcattcttgagaataatgttctagctgatcttcaagctattttgtaattagaatgctcatttcaatgaagttgatatttcattttacaaaaaaaaaaaaagtcgatgcatatgagttttggcagggttggtcttgaaatataatgagttattagaaaaaaataattttagtattcttatttaaaaaaaaatgatatttttaaaattaataataaaatgtgtaattttaaaaaataaaattttagttgtaggctaataataattattagtaaatattattacaatattgtgttctcgaaagtaaaaagttaaaaaagactatcttccaatatgacaagccatgtgactcatttgggttggtccatagcataaaaaaatatttagattaattat

SEQ ID NO: 178473 - DNA, 513 bp, Cannabis indica
ttttttaaaaaaaattgtatatacggaattattttaaagaaaattattaattttttaaatttatatatattaaaattaaaatatgtgagattaaatatttaatttttagcgccgaaaaaatctaaaaatattaaaattattttgtaatatggaagacctcgaggagtggacccttgtaaagtccacgcttttgttttattactcccatgttcgtttggatagatactcataataataatatttaaattcaaataataataatttgatttaataataataatggatacttttgataactacttttgttgtctttgcatcaagcatttttctcatttggatggattatgtaatttttaagattcttttatctctttttctttctcaatagaaatttacacaaaaaaaattcatctttaaatttcaatgttatgttatgttattagggacacgattttatcctgcgatgttcttttacataatgtattctgtggtacattaaatgggtctcaaagt

SEQ ID NO: 178474 - DNA, 596 bp, Cannabis indica
caagcccaggcaaaattgcaggaaactagtatgtgtagttcggtttcagcatatactccacacatgggacagatattttcaaccaacacctttttaatacaaagattgactttagtggcaaggcaattggaaatccccctccaaacaagatctttaactttgggaggcacttttagtgaccataacgtcttccaacattcagtattttctgatatggccgcagggtgcttcaagctttgaatgagattataggcacttcgtacagagtagaaacctattttctctgcaacccaataccaagtatcggcatcatctaaacttaaagggatgccgagaataatggctgcatcttcaggagagaaaaagtcccttactaatatcaacaatcccagcttctagagtgcatttagaaagagacaattgacagagaagttctcaaggccctgcacgactggaattggagttgctcgatcagtaatgggaagccacgggtctgttgtaatttgcacagacaaacccccacctaattcttttcctactaaaccagcttgaacaacgttcttagcagcaaagatactgctccaaacgaagcttgg

SEQ ID NO: 178475 - DNA, 1230 bp, Cannabis indica
agataatgcataatctcaaaggaaattaagatattattagtgataagccttccaggaatgaaagcactttgagtttctgagatgacatgatgaaggacacccttcaaccgattgcctaacacctttgagactattttgtaaatcacattacaaagagcaatgggccgaagatcattcatagactcaggcttagactttttgggaataagaacaatatgggtatcataaagattagtcggaaactcaccaaacataaaaaagttttgcaccagcttcactatatccgaaccgactatgtcccaaaacttctgatagaaccccggattaaaaccgtcaggaccaggggatttatctgggtgcatctggaacaaagctctcttcacttcttcactttcaatcggagccataagatcatgattcatctcagtagttactcttccttggacacaattagtgactcgttcccaacttatatccgaagcagtaaaaaggactgtataatagtcaatcattaccgtaaccaatccactatcccaatccacccacacaccattgtcattcttgagagaaacaatctggttatttttctttctcgtattagcacaagcatgaaaatatttcgtgttcttgtccactgcttgtaaccaaagttgctttgatcgttgtctccaaaagacctctttctgtgtaagaatctcaaaaagctgtgcatgagtatccttatatttctgtatcgaagtatcatctcgccgccctttcaattttttcagctccttgttacatcgagcaatacgatccttgaaatttccggttatatcttttccccattcagcaagggaagtgctacaacactttattttcaggtgcaaaggatcattattaaacattccccaactatcatgaacaatttgcctacacataggctccctactccacgcattctcaaaccgaaatctttttgagaaacacctccggttttcgaaatgcaaggtcaagccaaagcggagagtgatctgaagctgagacttccatgttaaaaagcttagcagccgaaaaaagagtgttccaagcactagtgattagagcacgatcaagcctaacttcaatccaatttggagtccctttccccttctcccaagtaaaaggatgcccgacaagatccatatccagaagctcacactcgtctacaacttcttgaaaaccatctacaagccaccgaggataaggacg

SEQ ID NO: 178476 - DNA, 803 bp, Cannabis indica
atgattttaccacaaaatctttcctctggcttcaagtaaaattcccacaactgcaacataaacgtgtaccataaaaccattaaaaatcacaaaataagtaacacaatagacacttacaccgcataaaacacatgaacagtttaaaagataatgtcataatgaactcttttgttacaacttaactagttgagactacactccagctttaacaaaaccttaaatccccctactaactgccttaacagaacaagcaaccaatacagataaacacaacggttcccattttttccatatcaaataaaattcagcaaaacttaaaacacttacaaaaaacactatgaacactctactatacaaaaagaaactaaatagaaacttttcaacacaacatataacaacatacacaaaaaaacctaaaaagattctaaacaaaaaacctttaaaaaaaacaaaaaacaaacatctcaacctccaaacatcaaaacagaccctataaaaagtctaaaataacaaaaaaaaaaacaataaaaaaaaacaaaacagtcactgatcaactaataaaaaaaaaacaacacatcttcactaaaaaatcaccaaactaaccttggctttcgaaggaatagcaatactactttcatcctcagaatctagatctccttcatcaacctctgccacactcttcaactttaacttcttcgatttacgatcatcaggaacaatatcaggcacacgactctttttcttcgccaaagaactcactgaactcttcttcacactctcagcaaccttctcgttaattttct

SEQ ID NO: 178477 - DNA, 801 bp, Cannabis indica
atcaaatagacaagcaattgataaagtgaaccaaaacatacacaaatgaatgaaaaatacttctgtttctttaatgatgtcgaataaaatagattacattgaaatggagttttatttagggcataaaacccaacagtgtgatggctagcaaactttcgtcagctctcaatgaaagcaccaaaatatttacagagattaataatcaaataatataacaaccatgacaacaagcataattaatcaagttaaaaaaaaaaggttaattaggatttttgccccctaaactttaacatgtaccaaatcataccccctgaacttttctagcagttaaaaattccccatgaactattgtaattgttagatttaagaacttttgtctaatttaattcaattttactatttcagtaattgtttatgtactaaccatgctccccagactttgatatctatcaaatcatgcccctcgaactttgatatgtactaaatcatgccccctgaactttcatccattttagactttttttactaaaattggaaaaaaagtacttaaatccaacaatctcattagttcatggggcatttttaacgaccttaaaagttcaggaggcatgatttggtacatgtcaaagttcagggggtaaaaatcctaattagcctaaaaaaaataaaccagtttctagactcttaaataataaatattgaataaaaataaaatcaagcttcatcaacaacataaatgaaaaaaaaaacacaaaatgcgagaaattataaatctaaaaacaataccaaaacttataaaaa

SEQ ID NO: 178478 - DNA, 625 bp, Cannabis indica
cagaagcataaaagtctaggtgtgcaaggattgacacggaaaaaaatttagaccatttggcatatagtctaatctttctttgacaatggtacccttagagttgttattgtgccaagtgaacatgtctccatcaaaatataatctatgcgttttgttttatttgtactaattattaatatttttctctctctttttgttttttttttttttaatttctcgcattttttttttcttttttctcaattttttttcttcatttttttactccatttgtttttttttaaaatatattttttaagtcttttgtacattttttattatcttttttctctcgtatttttttaataattttttttcgttttttatcttatttatttagtagtaaatatataatagtataaaaaattatatgagcatatatatgatatttatctttttgtgttgttattcttctctttttcataaatttttgttagttattattttattatttttttaaattttgtttgttagtagataaaaggggaaaaaatcaaatgagctcatgtttagacatgtcgatgattttacctttattagataaatttgtaccagattatgtttttgtttaaatataattttttta

SEQ ID NO: 178479 - DNA, 684 bp, Cannabis indica
gattatttgttgagtgtgatctattacaattgcacacgggtcgggttatcagggtttcggggtttcggggtttcgggtttgggttttcgggcttcgggtcttggaaatgcacaaccggacccggttttcgggtgtgcgggtatagtcgggttcgggtcggttatttttgggttgggtgtagtcgggttcgggtcctattaggctgagcccgaatgtttaatctatgggatgcgactgagccgactggtatgggatgcaactgagccgactgacgatgcgactgctctgggatgggactccgccggcgaaaagaaccagtcgccgactcgccgtcgccggtcttggagaagaagaagctttggtctgatgcgtggtaatggtttaaaggtagggtgccgacaactcaagtcgactggtgtgggtgagtcgaacgagtcgagtcagtggactggtgtgggagggacgctgggtgtgggtgagtcgtgtgggtgggacgccggtgggtgtggttgagtctgtcacttaaatgaaagtgaagtgaagtgaatatagtgagtgatactgtgatagtgaaggaatacgaatagacatgcagtgacatgagggtttttgtatttgtttgaaattaattgattcattcaatgaacatgattaaaaatttcaaatagtagtgcttcgggtgct

SEQ ID NO: 178480 - DNA, 943 bp, Cannabis indica
aataatttttaatcaaatttattctcatggtcatataaattatacttatttaagacatcctgcaaaattttaagaaatttgaaaaagtttaacacgccaaaaattacgttcaagcagtgtgttgcacgcgtgactattttattttgtacgcatataaaatagactatttgaacattgttttctatattgtaaattattccgaatttcttaaaattttgtaggatatcctaaatattataacgtacatgaatatgaaaaaaaaaattagactaaattttttttctggatgtcgaaacaagtagagggtccatcaatacatctattttaagagggtgtattgtagaatcatcctatattttattagtagtcatcatataattatgttataaaaaaaaccaaaataattaatttataacataattatatgatgactactaataagaatttaaaattttaaaataaattaataaaaaaatatttatcaaatcaattaaatattatatattttatttttttaattattaaagtgttcctacatatgatcaattaatacacttcgaaaaacatagtgaatattcgtatccttgatttgtctatgtcgaccagaaaaatattagaaactaacattttcatttgatatttgcattcttgatttgtttatttttcatttatgttattctttttaattttataatttagtgttatgttatttttattttatttaatattaatattagtatttttgttaattgttattgttattttgtatttttcaagatgttagcattttaattaaatcaattattacttttgtaataaatttttatttgagcattaaaatgtaagattattttttataagaaattaaaacaagggttagaatacaaaagaaaagttttacaccaaattggtgtagattcaaaatctaacaccattaatggtg

SEQ ID NO: 178481 - DNA, 703 bp, Cannabis indica
aaagcctcaattgatgatgcatcaatgagagggaaggcaattgcgcaggagacaatgctacacaaaacaaagaatttctatccagatctaagagcaatatatatttatatatctatatatattttcttagtaaatgttcttattttgttcattgaaaaaatggatttagctttttgttatttcaatttccaaagaggatgatgtggtatttaataagagtgacacatggagagcatttccaaagtctagacgagtatttttccttcaacgatctatctagagagttttatgtgaatctgattaagtgtaaacattcagtatgtattaaccggatgctcgcctgtatgcaactgttcgagcaggtcctcaccatccaatgaagccaaatcctccgagcaggataacaaggctgaacaagatcttcaatgatatttttcgtaaatatatttgcatttatatctcaattacatgggaaggagccatttgcacctcgggagtaggataacttgccccacttgcattacatgggaaggagtcatctgcacatcgggagcctacgatgggttaatatcaccccaactgcatgccctacccttttttggcctctcgcctcgacccataaaatattaaggaggaaaactaaaactccctttgaaccgtcactcggtatccaaccgaacttagcttagcttctcgtgctttg

SEQ ID NO: 178482 - DNA, 611 bp, Cannabis indica
tagtttattatgtaaaaagtttgctccaatagtgttcaatagcttatgcgaatttgtcacgtagaaaaaattgatccaaatttaaattacaatacaccatgaaacaaaatttgtatcacaataaatgcacaaattttatatttatttttatgtcatttttaatattttattattaaattaagttattacatcaaaatatatttttttacatttattttttattgctttatataataaaataacaataaaattaataataagttatttttaataaaagtattaattaaatattaaattttacatcaaattttgcaattgtgcattggagtacaaaattaaaaattgatgcaaatatatcacaaaattattttgtgtcaaattataaataaaacagttcaaaaagtaaaaataaatttttttacgtattgatatattttattaatttttaaaatttttaaatctatcatataataaatttttctaaaatatttagaagaaaaaatagtcaaaatttaattgtgcatcaaaacatattagctataattacttgtacaattactatttatttttctaaaaaaaaactaaataaacaactaaacaactaaaactaa

SEQ ID NO: 178483 - DNA, 538 bp, Cannabis indica
agctaaacttcaaaagaaaaaaacacttctcaagttatatatatatgttcggtcagctaagtgtaaacaaaaactgatcatatatatatataatccaaatcgaaaacattctcaaaattgcagtttaccataaatattgtatatatgaaatatatgtagttcaatatacatgtaaatggtcagttttaatatatacttaaagcagtgagtgtatacacatgaccttatctatattactatgtatatatggaaaaaggatcttggcagagaaaacatagccaaggaaaaaagctagcgtggcacttgatacattttataaaaaaaaatatataaaataaagaattataataatgtattgccagttttttttcatatatacatatgtgtcaattatatctatatatatatatatatacaataagatcgtaaaaaatttaagggtaaacccaatccatatatttgaaacccccaattgatcatgaagaaagtgtgaatgcttagtgaactgaatatatatacatatgtgtatatttcacta

SEQ ID NO: 178484 - DNA, 588 bp, Cannabis indica
gaacacacaaaaatccaatttttcatgctttcaaacccaacatatatcatacctaaaattcatcaaattgccatgcataaacaaaaatttactctttacctatccaatctaatattggtttgaaaatgagctcaataagtagctcaaatacaaatccataaacacaactttggcatgcaacaagaatcaaaatagcacataaatcatcaagcatatgaaactcagcaattcaacgcacaaacccagaatttcaaggttaattctccataaattaaatatcaaaaccctatccaaatattttaaaacagcatggatgattcaagcataaacactataacacgaccatactacaatcaccacaattcacataattttcactaacatgcaagcacaatacttaagaacacacataacaccattaacaagcttaaatccaaaatttcaaacaagtaaaagagattaatgatagttactttatgttcttcaagctcaaagtaagaaaatacacaagatttaaactagaattcaagcccttttccaaaatttgtgttgagatcataaaatggagagatagagagatcagagaga

SEQ ID NO: 178485 - DNA, 542 bp, Cannabis indica
aataatcatttttaatgattctttagttgtattcacataaatacaatcatttttttttttgacaaatataaaacatttacttcaggaaatgtttgtcaaaatctatatcgatattagattacttttcattgtcctcaaagaatacaagaacatatatataaatatgtattcatctctttcattatatatccatcaactatataatgaatattacgtttgcataatcttcaggatatatgcaagattttattgaggacgcataatcatcaggatatatgcaatattttatcgaggatgcataatcttcaggatatatgcaatattttatcgatgatgcataatcttcaggatatatgcaatattttatcgatgatgcataatcttcaggatatatgcaaatattttagacttacgtacgtagtagtagtcgactaaattaactttccttacggtttaaggtaattaattagtcgaactaaattttaatttttacgacgtagtagtagtcgactaaattaactttccttacggaaggtaattaa

SEQ ID NO: 178486 - DNA, 811 bp, Cannabis indica
tttattctattttctccttgattctctctattttttaattttttattactaaaaaaatatatttatataccattttaaaaaacacacatataaatatctatttaaataaatcctacagttttctattttttccctttttctactaatattcaactattttcttataattccttctttgtatattttttttttttttatgattgaaagttattatggcctttgaatattttcaatgaagtcaaccacatttaatatatataagagtatgtatgtatattatatatgttttttttttcctttatattagtgtacttctaaatatccacgataactattataatttaataagcaggttttttattttatgaaatatagtgtaatgtcaaattattatattagttagtaaaatcaatatccttagatggaaaatataaagtgagattttttttttgcaatgatataaaaagagattcttaatttggtaagttggagaagaaaaaaatatttattaaattttttttttggtaacgcaataatctttttatcactcctgattattgttgtcattctcagctgcaaaaaatgtacttattcatcaaactgtagtttgaatcaattccagtaatactaatatatcatctaatcatttagttacatatgtttaatatgattttggtattttgtgtacgtcttgaataagtagtttatatttagtggggagaacttataattattttttgggttaatatctacaattatttttaaagaatagtttataaataaatagatattgatatggttagtgatttac

SEQ ID NO: 178487 - DNA, 537 bp, Cannabis indica
  modified_base (113)..(113): a, c, t, g, unknown or other
tggagttgcaatgatgaagaccaacacggttgaagagctcttagacacaatggctggaatggagctatgtcaaccgaaatggtcgacacttaaaggaagggaacttggattcnggtgccaagagttgctagaatgaatgttatagggaacaaatgggcgtacaatgtgaagagaaatgctgataattcttttcagatgtataaagcgagactagttgccaagggattcaagcaaaggtcgggaattgattttggagaaacctacagccctgttataaaagcttccacttatattgactattgcagtttcgagatcatgggagattagacaacttgacattaataatgcttttcttaatggcaagttggaagaagatatttttatggaacaacctcaaggggtttgtggatgcatccaaaccagattatgtttgcaaactaacaaaatccctttatggattgaaacaagctccaagagcttggtattacaggctcaaaaatactcttgttaacgggcatttcaagaactcaaaggctg

SEQ ID NO: 178488 - DNA, 697 bp, Cannabis indica
caaaagttaatgtctcatgattcatcagtgcactggatttacactgatgtgatagtcagcgataatgctcacttacaccttggataagtgttatgttctttccaggacattgacaaagtatgctagtacaaatgtatggagtatacattaggctgggaccgatattgatcttggtaaagatattataatcttactgttgaacacgaaaaaaaaatgatcaaaattattattatttaagtaccaatatttctcttaaaagttgaaaggaaattattgataataaaataataataaacaaatagtcagtcaaattaagagtcaaattaggagactctctctactcttcaacttcaactgtccacttctctattttttctcacctattacgttacattggtggtgaagttaataaaagaaaaattaaattaaaaaaataggctatacaaataggagtagtggagaacagaaacaaggatcgacactttaaaaaaaaaattgagagagagagagaaaagaaacacggagaagaaaaactacgatactttttgaaaacaatacaaaagcttcaagggtaaattattcacggaatgctctcattcctatttctttttcttttgattatttattttgttcctctctctattcctattctctctattcatttatgaaatgctctcattccataaatgaaaatgga

SEQ ID NO: 178489 - DNA, 548 bp, Cannabis indica
attattattattattattattattattattattattattattcttatgttttgaaagaattaatagctatcaattggaaccttaaatttttagtttatttaattattaattataacaaactgaaaaaaataattaaaaaaaaaaagaaagaagattgtttataaatcaaagttagatctttcctttcaaaaatatgtaaattgaaaatatgtaatatttttttaacaaaaaaattaatgaaatatgtaagatttattttcaaagaatatacaataaataagttttaattaaaaataaagtttggttgtaattggtaggagttttgagcagttttgggggcttagaactctaatttttttgagttttttctacccagacaacctaaagtcttactacaaaaaaaaaactacctttagtgacaaacttttagtcacaatataaattttttgtgactaaatgtgacttttagtcacaacaaaagttacttgtgactaaaacataatagttagatacaagatgtcactaatttagtttcagtcacaataaat

SEQ ID NO: 178490 - DNA, 645 bp, Cannabis indica
ttccaaaatcaaagtctacaaaaagtgtttacaagtggttgtgttaaggacatatatgggtagcaaagaaagatcttaatacagctacagagcatttgcagaattatgagtttgataaggctgagaaatatgtggatcaagctatgattaaacatcttgtatgttgtggtgacattcagaacaataaaaacatcactatctcaactgaagtggcttatgagatagaaaatttatgaagagctatgcttttcttcagagagaataattgagagactctagtatatataattatgtaattactaatattagtacttgtcataattcagatgtgtagttgcattatataattttgacaagattgaaataaaatgttgggtgttattttttttatgattgaattgaaaagtcaccaaaaatatggccaggagaacccaaggtcatagagaattgggagttttttttttttttacttttttctttttttttgatgaaaaactacgaaagcaacaagaaaactatgaaaaacaatcgaagaaaagacgcccagataggattaaaatcctcatagtcacggaacacttcagctggtacctggtgatgctccaatctgcctcttaaggaattgctgcaggcccagctcgcaag

SEQ ID NO: 178491 - DNA, 641 bp, Cannabis indica
gtttgaataaatgaaaaatctttttataagaaggtaggattgataaatttctcttaaaaaaaaaaaaattgtgtaaagttatattttaaaaattagaataattttacataatctttattttatttaatgatatatttttttttatatataatgattagaatcactcatgaatttacgattcagacatttacaaatagcgcaagaactttcttgaatctggatagcttatcgtctaagcaaagggtatgctttatcaaaccataaactgttaaagtcagcgagcaacatgtgacaaaactgccttaagaaatttaaataataaaactataacatcctgaaacatcacactcaaagagctaaagctttagcttatatcacttcatatatactacacgccaactcattaacatatcaaaaataatccaaaagcatctacaaaacaaagtaagataaaaatgaataagtcccctagcaataatattataaactaataaaagaaatcctcaataaatataacaactctcaaacattatatttcaaaaaaaattatcgacaaactttttgtagcagttggtctttctcaaaattgacctacatgttaacaataaaaaaaactctaatatcatacaatttaatggaaa

SEQ ID NO: 178492 - DNA, 820 bp, Cannabis indica
gttgtacttgatccgagacaagctgctatagaaaattgatttcaaaagtcaaaaataaatatttatgtaaatattttagctgttttttttttaaaaaaaaaaatagatattttatgtaaataaaggtaatttccctaattgcaaaagaattgcaaaagtttgtataatgggtaatttccctaatttaatagatattttagctgttttaaaaaaaaaaaaatagatattttagttttttagcttaattattaattataaaaattataaaaaaatatatcttttttaataaaaacgtaatttcctttttttttgaagacggtacgaaatatatcagtagtagtagtttaaaattttaaataaaagatatatatacgttgataaattatttaatttaaaattaatataatataaaagattattctgattaattatatttgtaatagaagtatataattctacattcactataaaaggatgaaagcataaagcatttaagctcacttacctacgaactgaacaaagaaactccaattcaattaattctctattattcatcaacaaatacttcaattttcaattcaattaaaaaaaaatgggagctagtggttttcgtttgctgaatatggtgcggccttttctttcatttttacctgaagttcaaagcgcgaatagaaaggttacactcagagacaaaatattgtacagtgttttagcattgttcatatttttagtatgcagccaattaccattgtatggtattcaatctataaccgccacggatccattctattggatgcgtataattcttgcgagcagtcgt

SEQ ID NO: 178493 - DNA, 587 bp, Cannabis indica
tatagagtaattcttgttaatcatattaagaattatgaggtttaatctgaattatatgagtccatattttgcatttaatcctttataaaacaatgttatccgataacttgcttcatctcatattagacataattgtagtgtaggtgaaaagtgtgtataattattggaatttatatatatatatatataatatatatatatatatacatatcttgtttttgataatgttttcttttccatcttagggagtggagtcaaatgcaagcaaaccaagttttgaagatatgatggagcgggggccaaggcaaggcaccgaccagtaccacaattgggtcaggggcgtgccatagaagaagacacaaacagagtattaataactacatttatttataccctcttcactcactcctcaccttttctaatttctttcattcttctattctatatacctttcttcactttttatatatacttatatactttcagaacgtgtgtgccaccttcatctttctttcttttttttttttttcaaaaaaagaaaagttacacctaagaatcagtaatgactccgtgtgttctctaacaag

SEQ ID NO: 178494 - DNA, 527 bp, Cannabis indica
tttataatagttaaactatatattgaaggaaatcttgatatatatatattgaagggaaaatttaccgttattatgtataacgttattcatatattttcaatgaattttgtttgttaaactttaaaaaaaaaaaaaaaaaaataaggaggctggacctggtggcgctgctggaggaggatactggggagctgccactgacgaaaagagggtgtacactaacattgccaattctgagataaaaaatttcactctaaagccatctacaacgaacactactggtggtggttgggtggcaatggaggctggcagtggcaaaattctatggtcaacagctaatcctaccaatgacactgcttctggccctgttacagtggctaatggagtggtttttggtggttccacacataaaaaggacccatatatgctctaagtgcaaaaaacaggacatattttgtggtcatatgagattgggggcatcagtttatggtggcatgtcagtgagcgatgggtgttatttttgttgggaa

SEQ ID NO: 178495 - DNA, 688 bp, Cannabis indica
agctttagtgaatttcggccttgggtttgggtttaaggttcattattttttctaaaacccatctattctaaaccttaacctagagagaacctatatataaaggaaaacttacaaaagtactgaaatttgagttagcttttataaaaatactgttacacggaaatttttttcaaaaatacaatgtttttataaaataccagtaaaacacaaagcagaacaactcaaaacaacagtagaatacctacaaaatactagtagaacaccagtaaaaatttaacataatatactgctgtatgaaacttataaaaaatacaataaaaaagtaaaaaataccatctaataatatttttataaaaaataataaaaattaatataccatacaaatttctctatataaattgtgataaagctttgattaacaagtctttttgcgtgtgttgaaaaatactaaaaccctatgtgaatcagaaaagctttctctcactctctataattcgaactcactgtctctctaatctctctctatagttgattggtaaggacaaatgagattattattagtttttttgtctcttctcatattttcttcccactatcttttctcctcactttttctttaaaattatctttagtcattgcattttgagagagatgactaataatgctgccggctcgatggttgggcagc

SEQ ID NO: 178496 - DNA, 627 bp, Cannabis indica
agatgtgagatggtaacgtgatagtctaaaatcaatttaaagtcatgtttctttcttttccttaattttctcttttttttaattttttattataacataaatcaacaaatgtctctatttattacctatttaatttttttttatttgacttttatttgttttaacttatttcgttttatataaacatatataaatttttgtaaataaatttttttaaaaatatcaaccgtacacaaatttgacatgtatatagatttctttataaatttaaattctatatccatcaaagattttgttaagattttgatatttcttttttttttttttttttttttcagataatcaatagagctccaagcatagtatgcaaccttcttctctattcctctatataatctatatattttgccaaaatatatgattttatttgtatagatcttaaatattttgaatcttttttatatattactttttttttttcctataactctttttctttcttttttttgcttcacaagatctaatatggtgagttttctttctttatgtcttaaatttttgtgagttttctattaatttttttttttgtatattttcttcctaataaggtttcataatatattttta

SEQ ID NO: 178497 - DNA, 666 bp, Cannabis indica
aagtagtttctgtcagtaaaattcttataaataattgtgtccggcaaattttcacttcattcaatatgtgggtgtatgatcatcactccagtcttcattctctttttttgtgtctttgaatgtaccttggacttgacctaggatatgtagtgttgaacgaataaaaaaaaaaaaaaaaagaggaataaataaatttattattatttcattattggtttttaaaataataaataaaaaaaaatatatcagtcaaatagagagaaaataggatctcaactccccactcccctatttttactcatcctttacgttacaggataaaaaaaataataattttattggaaaaaatagggtctataggagaagttgagaacagaaaaaggatcgacactttaaaaaaaaaagtctgagaaagagagaaaagaaacacagagaaaaaaatataaacgatacttttttggcaacaatcaagaaagcttcaagggtaagtattcatggaatgaatgacatttatggaatgcccttattccatgaatgaaaatggatgctctcatccatggaataccctcattccacaaaattatggatgccctcatccatggaatgccctcattccacaaaaaaatcggatgctctcatccatggaatactcttattctactaaaa

SEQ ID NO: 178498 - DNA, 1151 bp, Cannabis indica
attgaccaaagttcgaaaaatgaaaacaaaaattgatcacgaccaatgctctcaatttttcaccgtgccaataatctttacaaaaccttttattgcaagaataatgctcacgagagataacattgacataatcattttttcaacgagggtgcgagccataatatctatgccaacctccaaaaaagtcgattcaagatctgcgtcattcacctcttcatcactatcatcacaaccaaacgaatcatacaaagctgcccaatcattatgatccatgttaaatattcaactactctaataaacacacttctaacccttcctcaatcaaacttgtcaaaaaaaaaaaacaaaggaaaaaagagaccaagagaaaatcacttgtacaagttttttttttctttctttttcagtgtattgtagataattgcaaatttatttacattatttttttttttcacatatctctttatctcctcttttgtttaaataaaaaatagtatgatcaattttttttgagtaaagttccatagagttttatgctttaattatcattaaacaaaatacaattagaaagcacattgtttcttagttattaacaatcttatttaaatacagcataacaagaatcattaatatagtccatagaaaaaaaaaaattatggatgctaattgtgtaatatagtatagactaatgcgcatataatgcagtgaatttattatatttatatataaagagtttgggtcactaccacaaaaaaaaaaaaagaaaaaaataggtcaaaatgggtgttgctcatttctcaggctcttactccccagtccccagtgatactatgtattcttccacattactatcaaagtcatctataaaaacctctcctgtgttcactctcaacaaccaagtctttcagacccatatcccaaaaccccttaacaacaacttccattcttcacaacctttgactctcaagtctctcaaagttagagcaatggacacccaagaaggagttccatcgatgccctccttcgattttcatgggattgatcagaaactggttgacagaatggtgtacgactctcttgtttggagttcacttcacggccttgttgttggtgacaaatctgttcaggctagttctatctctctctctctc

SEQ ID NO: 178499 - DNA, 536 bp, Cannabis indica
tcttttctctgttttctcttcttatggtttatgcttactgataaatttcaagggagaattaaagaaccaagtttcgagtgtgttagtactttgtgatctccatgtgaattgagagtttcttccaaagagaattgagtgtttttctatgtgagttgagaatttctcaagagatattttattcatatgagagttattttgagagggttttatgtgtagttgagagctatttttaagtattttatttttatgaataagagaagttttattgcttatctaatacaatttacaaccaccaaatgaaaggcataaagaacaattataggaaactaaaagccccaaaccaatctctatttttttttcacttgttttctctcaattaaaatgagagaaccaatgatacacttcttttttttcagcaaaaaaaatgatacacttcttttttaatctttgtagctataatttgtacaatatacatgattttttcatcccaccaacaaatatttctagcctcccaaatatagtacactaaacacttg

SEQ ID NO: 178500 - DNA, 917 bp, Cannabis indica
cctaaaccacactttttgggtcctaaaacatctgaccgaatcagatgtataatataggcacttaaaaaattttcagacacatatatctattctatttcatttcttttctttccattttcgttattttgttgcaacatcacctcaatcacctcacatttcttctaacatgtataatattaagcattaaaactaaaatatataatattataaacaatataacaacacgtcaatcaccttataagtttttttttaatggtgtatttctaataatatacaatcatatatacatattatattcataaaaaattaatgatgaataatacatatataagtttttccaaaaaaatatatatcaaccataaattagtttctccaaatacttcatctttcttatcatataaatttatggtgtgtttggtgaattaaaaaattatttatttataaaataaatatgacagtgataatttcaaaaagttgatatttgaatttttttatatatatattaaaatatttttacaaatacaaaatctaattaataaatagttaatgttgtagaattaaaaatacttaaaaaaaataaaaaaaatacaaatatatttaaaaaaacaaaccgtcgaaatatttcaatattcagatttagagttattatcttattattcaaatatgcattcagatctctaaatcttaaaaaaatcaaatgcacggacaaaaatacatgaaccaatttaacaaaaagacataagaagttttatgttattagtttcagtcagttttatgagtttaatagatattaaattaaggatattattttatattagcggtgaagcttttttatattttaattaggaaacaaattgtgttttaagtgaaattgtattatttttagtaataattaaattataaaactatataaattt

SEQ ID NO: 178501 - DNA, 570 bp, Cannabis indica
agctaaatgtagctaagcttgttaaatatttctgttattattgaaaaaaattgactatttcgattgtccaatgatattacagggtaagacagtaagtaaatgtttgacatcataaataaaaaattattttttatatttaaaaatagaaaattatttttttgaaaacaatgaggcttatttagccttcttttttaaaaaatattgttacaaaaaataagaattttgaaaacaaaaaatattgttttctattttaaaaaaaaatttattgttaattaatattatttttagaaaatactaactaaacgtgacttgtgttttaaaaacttcaaaaactattttttattcttatttctaaaaaaaaaattaaaaacaaaaaacaaaaaataataccaaatatgctcttcgaccacttatgtgtagctatttggcctacaatgtttggttattttaccttaacaaaataaaatgtgcagtcttagttaggtttgatttttcttctgttatttataatttgggtaaggggtttcaacttgcaacttctactttttaaaagaaatttagtactactaa

SEQ ID NO: 178502 - DNA, 681 bp, Cannabis indica
aattattaataagtaaaaaaaaatcaagactatatatattgaagatatgtatatagtgaatagggaaaatgttaaaggtgagaaagagtagacctactccaaagactctaactttttgtatgctttcactttactatttgccaaagcttttcggccatgccaatatattttgattaccacaataataagcaaatatggccttaggtttgatgaaactggcccaagtcaaaagaattctctccttgttctgttatcaactaattttttcaatgtgtatttaagcatatcaaattagtaggaattaatagtcatttgtttgttcacttttgatgatatgaaaatatatagaagaggaagggccttacaagggtgctagcttgatggtttttattttctttttcatttccatgatcattttcatactttttaggctttgtcaatatcaggccatgcgaccctattatagaacctctatataaaccatgtgattagttttattgcatgtatcattacagttcttacattttcaatttggacagaaataaacatgcagaacatatacctgtcttcaagtcaattgtgttcttgcaaaccaactcgagcagtcattcttaaattatgttcatgttgatatctgaaaaacaccaatactaatacccatacataataataataataata

SEQ ID NO: 178503 - DNA, 635 bp, Cannabis indica
tcaatcttgcaaacttattcacaaagttattaccaacatcaacatttgagaagacggcagacaagatcgaaattcgtcgattagaagatctccacaaatgcctaaatgagggggagttagtttacactatactctttttcctttgatcaagttttcagcaagatttttaataaggcagttattatggacatccaagggggagtgttataaatattaataattatgtggatgtccaaatcttttatttattaccattaattgtaatcaacattcctctttttcttagtttccattcagaaattctcattcactttctctttctctctttttcttctttcttctcatctactttatattattttatattattttataacacaatttcctttttcgtagttttatttttttatttatttatttttggtatataagcttattttcagtcaaaaggttttttgtttctcaatcaaatccggaccaatttttaaatctgcagcgtagttaaaatcaatacaaaaattgtaatgtggtaatattcgaattttgacctgatactagtatattttcagaattttcgatgggttggcccatgatccatgagcaagcctatgaaacttgccttgttccttgaggaa

SEQ ID NO: 178504 - DNA, 918 bp, Cannabis indica
tacattcaaaattcagatgaaaaattaaatatagcaacatattgcattaactttcataaaaaatcattcactagtctttaatacagattaatgaagttataaaatatcacacacatatatatatgtatttatataatgatacctgtcaaatattatctctctgtttaatcatgcacatataatttatataacaaatatatgcactactgcttgtcaccgaaaacaaaattaggctataaactttaggttaattaggatttttgtcccttgaattttgacatgtattaaattatgccctatgaacttttaagatcgttaaaaatgccccctgaactattaagtttgttgaatttaaggacttttgtctataattttagtaaaaaaatctaacatggatgaaagttcaggggacatgatttagtacatgtcaaagttcgagggacatgatttgatagatatcaaagtctgggaagcatgatttagtacataaacaatcacttaaatagtaaaattgaatgaaattagacaaaagtccttaaatccaacaatctcaatagttcaggggcatttttaacgatcttaaaaattcaagggacatgatctaatacatgtcaaaatttaaaggacaaaaatcttaattagcctaaactttatattacttaatgaatcaataaattgaagaatacctcatcattccttaaaagcaaaagcacatatattccaattaaaaaaaataataaatatatataatacatctcgaaataaaatttaaattatcaaaatcatgaaatcacaactccaaattataaatgaaagatcaaaatcccagtttagaatcaaacaaaatttcccaaatttcttcaacataaaccttaatctcaaataatgaatcaaatgtgactctttatactacttgtt

SEQ ID NO: 178505 - DNA, 643 bp, Cannabis indica
tttaataaataaacgttggcagggtttttttcattcctaaagtgtgaagccagtcaatgagtttggaggcacaagctcccctcactatttatgaatggcacatcattttttttctccctcatcccattttttacttaaactcctcatgaaatttagaataaaaaaaaatcatcttttttttttttggacaaaaagatatgcatctcattcgtgtatggacaaattaatccaccaaaatagtttagaaaagtagtagggacaaacacccccaccatagccatgacttgggaaagaacaagcgattgtcgccaaccaattggctgtcttgttcgctgtgttggaattattttaccaggatcttagatctactcacaagtatgttgatttaacaacctaaatatgaacttctaaaacgatagaaaattaaacacataaaagtaagagaaatcttacattgggtgcagcggaatatatgtctcctcccactcagatctctaacccttgattcctttctgtcgcagagtataatcaagatctgagcccgaatgtccttctttgttgactctgaattctacacagccttcctcactatgattgaggtattacttgatgtgtgtgggcactactctatcacttagagaat

SEQ ID NO: 178506 - DNA, 580 bp, Cannabis indica
tataaataaaattaaagaaaaaactataaaaatacttttcatactgttcaagcaatttctagaatcaacaatatttttattttgggttggttattaatgattgtaaaaatttgttatgctctatacaaactactagtttaagttttattagacgatcagtaaattgagtagctcattatatagctagagaatctcgattttttctcttattgtagtattcatgatcacaatgtagccattttgtatgcttaatgctaaatttcaataaaattgatattttatgtttaaaaaaaataaagcaataaactagattttaaaaataaatttgagttgttaactcaagacttttatagaaaggcaactaatgaatataagattggtatggtaagtaattaaataatttttttttggcaacatttatagaatactagcaaaaaattacgtgcgaggcacgtatattagtgtttaagaaagcttaataatttaaatatgttcttaagttaatcaaaaaataaactaaaaattgatgttcaaatacttaagaaaatgcaacttaattgttgtgtgtaagataaaaaag

SEQ ID NO: 178507 - DNA, 684 bp, Cannabis indica
tatttattagattattgtatcaaattaaaaaaattaaatatagtacagacttaaaataaatttataataaaaaatagtacaaatactatatatttattttacaatatttaaaattttgaattaataaaaatattaaataaaaaaataaaaagaaaaataggatatagtgacactttcatgtgtgtggctataacctgattttttatacgtctatagtgacgcgcagaaagtgaatgtaaaagggtttagtaacacgtgtgaagtgtcactaaaaactgccttttccagtcacccctattagtgacgcgcgttgaagtgtcactaaaaggtttttagagttactcaatgtgtgtcactaaaacccgttttttctagtagtgatggccactagttgtctccctaactccgtcaactcttaataatatcatataagtactacataatcatataataaacctcggatgtgaattaaattattagaaagaaaagaaacatatgttttttgttaatcacaataaaaaagacctccaattttatggtaaatactattaaaaatttatatagtagagtaaactacttaaaaaattactctgatagattcttttctgttttggtatctaaagaaaaaatttgtctaattatttttatgattacattagtagtaactatttaaaattatttgta

SEQ ID NO: 178508 - DNA, 714 bp, Cannabis indica
atataatgttgatatccagaagattttttttttctgtttttcttgaaaagtatttggtaggctaagctaacgaggaaaggtctctcaagcttcaggaataagagcaagcaagtctagttttgttgtgtaagtcactgtctttattcgatctaagttgatagatttgatacatatatagtaaagaaaagctcttatgcagggaaatttcccaattttgaacgcaagaatagtaagtttctttccttgctacttgaaataatgtcttaccacactcatactagaagtcaaagaaagtgagcctgcacgagttgaattggtttcaaactacttgtttgtgtttaatttttctagctttcattattaatttttttgtaatggattaagatatagattagtaggataattagtattaattattattatttgatgattatatattaatattcatgatgtgggtcttatttttaaaaaataggcatgagatttataatcttttaattttagagatttttattaaactctaagtgtgttatttatgttaaatgagaaattttacaatttttataattttaccttggtgacaataaaaaatgtgatagatgaccattagagtcatatgtggtaacttaaaccctttatctaagagagacaatcatatgtttgattttggaatatcgagattatgctagattatagtgttggactatttactta

SEQ ID NO: 178509 - DNA, 853 bp, Cannabis indica
acagttgataaaaaaatgaacactaaaaaattagtgatgaactgtttcagttgccccattacataatagacaagtaacattatcagtaatgccaaacttcagcaatctatctttaattttaattctaccaagcataatatgacataagatgaagctatgcttaggaatattgtgtctgctccaaacaatattactcaatgtgactttatctggattagaggcaagcatttgatatcctttggtaatttgaaacctgttggatacaaactggtttatatctaccaatctcttagctttttctttgatcatgactagtttctttcaataccaactagcttgagttggagctttatacgttccaccagtccttttcttttcacatagacattatgaatctatttcacccataaattgtcttcctttttggcaattgcccaaatatatttttgttggaatatattttatcagaacctagatttactaacaagtatgtttttaacatcttaaatatgaatttctaacaatgaaacttaaacacatatcaagtatgagaaactttaaattggttgcagcagaattaaatgacttcttccactcagatctctaaccttttgtccttctctatcacagagtataatcaagattttgagtcccgacacctccttccagtttgtttggtattctttcacagtcttacacactatgattgaggactaactcgcttatgggttgggctgtgcactcaatcactaaaggctcaaaaaatattttgttgaaagacatttcttagattttcaaaattagaaagaaaagaagaagagaagcttcaaactctatactgtctgacagttgt

SEQ ID NO: 178510 - DNA, 784 bp, Cannabis indica
ctagggaggacatttgagctcttgctcgtcaaatattgtattcaagccgcaccttctgttctgaaatgcgtcgactacgaatagaatgttgatcattatgtaatttcagatgaatagactctataaaatttattagtgcattgtgtgtcttttttttttttttctatattgattatgtgttgtgcatattttgcattgtgtgagttattttttcttttaaattgtattgtgtgttgtttttgattatatttgtgatcaatatttttattttatttttattcgtgtgtgtgtgtgtgtgtgtgtgtgtgttgtttttgcttcatttggttgaattgatgaaactggtttcagttgactttattttttatcattattttgttatgatttttcacagggtcgaaactggtttcaccgggttcaagggttcgaaactggtttaatatgttttgagagttctataatggagttgctccattttatgatgttattgcatattttttatttcaagttacttttttattattttatttacaggtttgaaacttacacttatattttgttttcagattattggtatgcgttgtgtgttgttttgattatatttgtgattagtatttttttttgtatttatgtgtgtctttttttttttttcattttatatttagttgtctgatttcagttaactttattatttaacatttatattttgttatgatttttcgtagcgtcaaaactggtttcacaggatcgaaactggtttcacaggttttaactgttctgtaat

SEQ ID NO: 178511 - DNA, 508 bp, Cannabis indica
catatctatacaatctcttttatgaaatctcttttaaaatattatatatttaaaaaaaaagtgtaataaacaatttgatagattgtaattattttatattgtatatattttgatgtgttttgtataaaatttttactttgtctatttttctacatgagaatatcgttgttttgtatgttttattgtattttttattttattttatgtgaaaatcacatgctttcttttgttatttttttttccctttcaattttattgtattgaaaagcaccctatatattaatatatgatttatatgtttatatattttctttctttttttaattttatttttatctatatttttcaatcaaaatacaaatgttgcttcatatacctctctttaatattatttatttttaattaataaataaaataaatataaacaaaagacttaaaaccaaaattaattgaaataggatataataattattgatcgttatttgtatcaattattattattattatt

SEQ ID NO: 178512 - DNA, 550 bp, Cannabis indica
ttcatgcagaggaacctcactcagatgttgcctttgaggctgtcctagaggcctctatggaaaccatctcgaaagtcactttctttgggacatccaaaaagtctaaagggaaagggaaggccaagatttcacctcccgttcaaaaattcaaagactccatctgggagatggaccaaaagaaaaatttcttttgttcatatgggatgcttgaaacatacactaatgaagtgggattgctcaatgtatcgggactgatgtgacataggatggttgtcccaaaggagtctgcattcgtgagcacggatgggttcagcgcctggatcaacttctgcaccagaccaaagagtgattctatccaacaacccttgcttctttattactttaactttacttttgtggtagatagtttaatcatgccttaaccgcgtaggcaattatgtactagctttaaagactgttgtttaatctatgtatgtatgttttatttgtccatacttgtgcttgctttctctttccacttatgttttttttttctaggtccactcggtag

SEQ ID NO: 178513 - DNA, 810 bp, Cannabis indica
cttactgaatttgtaataggcagcccactacattgtagagcatggaaccaagccttcttaataatgacatgaacaccaagttgaaggccaggaattatcaagttatcctccttagagtacaatctcattttaagacaaaaaaatacaataataaaaataaagcaaccacaacaaaaaacaataaattaaaaaaaaaaaaaaaaaaaagtaaacactcacttgttgtcacttttcattcccttatctaaccatccgttgagtcttgagtaagagaaaaatcaagtggttcaccaattttttcatctaatgggcaaagacctttgagaaccttaatgtctcctgttgatttaactcgattactaaggccagaactaaaatttctcacaaatggtgagtccaaatatgatggaagcttagtcttcctttttgacataggagtaacacattccaacttactcttgtcactatcaatataaggaaccatggtcgtgcaatgagaagaagatggctatgaggaaaaaaaatcatataaatatacttataacagcaataaatataaaccattaaatagtaaaaatttagaaaaagtataatggataaaactatacaatttttgtcttcatcgcatccaaagctttataagcattttgcattgtctcctccaataaagcgtctgatgaagaatccaaaaaacacccaccattatcattctcagtacccactaaagcaactggtgttgcaacttcaagaactttatttgaaattgcgccatcatctttaacctgcaaacaaaatatacaaaataaaata

SEQ ID NO: 178514 - DNA, 675 bp, Cannabis indica
aaaggagagttttttgttaaagaaaaactaagaaaaatgggtcaaacaaaatttaaaaaagaaaacatatgcgaaaaaaaaatataagtaaaaagatgtaaaaaaaattaaaacctaaaaccatgtttcttttttcaaaaaaaaaaaaaaaaaaaataaacgtaaagagaaaattaaaatttacaaaaaataaatgagaaaagaaattaagctctcacaaattttatcataaaaatgataagtatatattaataaccaaagtattaagagacagattaatgtattaaacagaaaaagtaacatactcttatttatgtattttaatattaacttacataaattttaattttataaataatttaaaaaactactaattaattattaagtactacatccatataatattcaacaccttaagattttacccaataaaaaaatcatttaccaaaaataataataaaaaaaaacccataaaaggcaaaacgacttatcatatccattattaagattaagatatatttgtaacagttaaccattcaaagatgatggggttgaattcaaagattctctctgaagtttgtgtagcttacatagtgtgaatatgtgaaaactatgtggcaactttcatggaccatacttaaagtaaatgtattgtattaaaatcttacttcaaac

SEQ ID NO: 178515 - DNA, 796 bp, Cannabis indica
gaaaggagagttttttgttaaagaaaaactaagaaaaatgggtcaaacaaaatttaaaaaagaaaacatatgcgaaaaaaaaaatataagtaaaaagatagtaaaaaaattaaaacctaaaaccatgttttcttttttacaaaaaaaaaaaaattgcgtaagagaaattaaaatttacaaaaataaatgagaaaagaaattaagctctcacaaaatttatcataaaaatgataagtatatattaataaccaaagtattaagagacagattaatgtattaaacagaaaaagtaacatactcttatttatgtattttaatattaacttacataaattttaattttataaataatttaaaagactactaattaattattaagtactacatccatataatattcaacaccttaagagtggagagtgattctgagagtgttatcaagaaccttaaggactcgtttggaacgccgtattaggtcgtattgtattgtattgtattatattgaattggattatatatcatatttttatataatactatgttaaactttaatttatactaaatattatatattaggtgtccataaagttaataccacatataattttactataaaatattgcataaatacaattcaatataatacaatacaatacaatacgatctaatacagcgttccaaacgagccctaaaggtgctgacaccttgtgagagaatgaaaattatgtacggcaagtgtaaacgtctctcctacctcgtgtgtatttctttgttaattttttcttttttatttttc

SEQ ID NO: 178516 - DNA, 698 bp, Cannabis indica
ttagtggagtaattatatattatttcttctcttaatttataacttattttagaccaaataacatgtccaaataattatatatgcaccggccttgttaaactttttatcctttagtactgtttttgaaagatggtatatgcatacgcatgcatgcttttgaattttatatgtatgaaacgtgtaccatgtgggaacctacttttttttttttttgtatttaagcgtttatatattacaacatgttttatctgggactcgaaccaggacctccaacactcacacaccacctatggccacttgagctagccccaagtggttgtggggaactacttccaacaagacttatatatatatataatatatatatatatatataaacaatattaaaaattacattcattcatgtaagactttacgcgatatgactaggtatcaacattcattttagctagattttatttggtaagccttataagagtcggattaaataataaataatattatgtttgaataaaataacatattatattaattattacaataaaaaaatttagtacaatataaattgtattatttcatacataacaaatagttcgtattagcttgtattataatatttacaaaggatttggggtcaaccccaatctctaactcagatccagggactcggattgggtgtgggttgtaaggattttatc

SEQ ID NO: 178517 - DNA, 709 bp, Cannabis indica
aaaaacaaaaaacgttagatttatttgatgtggtacgtcaataatagtatagtaataatactattataaattaggtacaaatattataatcagggccggctctaggcatagccaggttaggcccgtgcttaagactcactcagttttaggggaccttaaataaaaaaaaaataacaattttacaatatatacattaatttttttaataatttttaaaataccatttatctttatagttaaaggttaattttttttttttttttttgccttataactcatttcaactcaagacagaccgtgattataaactcccttaagtaaaatataacaagaagagttaagtacttgctagcttcacctaatttagtaaaaataacatgtgaggataacacattagataattatagtctattgatattcgttttaaaaagaaaaatactattgagatgcaatttagaataaaacttggggctttatgttatccaaacaacatgtggaatgttgatttatttatttattttgtattgctttacatattttaattaaattaaactttaacctgaaattattccgaaaaaatatatcatagaaaaaatcactaataataatggtgtcttatagaagtgaaaaaaaaaaaacattttctttttgcttgaatagaagtgagaatttcatttaaaaaaagaagtcttttacttttaatattagt

SEQ ID NO: 178518 - DNA, 521 bp, Cannabis indica
ataacttaaaaataactaattaatttctaagatgtatacaaataagttttggaggtaaccaaaatgcatatcaaattatatgatacaaaaataaagttttttatataaaggtaactaattggttccttatcaacactattagtaactaaaaagttatttttaaaaatgcaggaaaaaaaaacaaaaaacgttagatttatttgatgtggtacatcaataatagtatagtaataatactattataaattaggtactaaatattataatcagggtcggctctatgcatagctaggttagacccgtgtttaagactcactcatttttggggcccaaataaaaaaaatacattttacaatatatacatatttttttaataatttttaaaaataccatttatctttatagtaaaggtaattttttttttttttgccctataactcatttcaactcaagaccgaccgtgattataaactcccttaagtaaaatataacaagaagagttaagtaattgctagcttcac

SEQ ID NO: 178519 - DNA, 749 bp, Cannabis indica
acccccaccccccccccccccccccaaacttcatatttgaatatttatttattaattataaatgagataccgaataatgaaactcaaaaccaatgcatcaaccattaacattatttcaacaacaaaataaaaccaatgaaagggattgaatgaacttcgaaacaagtgtttacaggagaaaaacacaattcaataagaaatgtaaactgatcatactaaacaatgctcacaacaatcaaacaatcataatcaaaatctcaaaaaacacgtaaaaaaccaaacttctgatcaatttagtggaaatgaaattataagttgattgaacataacgaaattcctaatacataaatacaaaaagttgagaggaaggagaggtttagctggataagacctcaatcaaatcgaaccgtggagtgtgtgatagtgagatggtgattagggttttaccttttcttttttgaaagttgaaagagatatgtggtagagaaagaaatagaggagagggagtggagtttatgcttcttaagcgaatagctcctgacgaaggaacgagagaaaaggagagataaatagtgcggcgtagttcttttcagtggaccacttttctcactttgacacctcagctcactgaaaaaaaaaataaaaaatcagctttcaaggcggcacataattctattttattatatttacccccaacgtagaaaatctataaaggtattttttttttttttttttgaagtaagttacac

SEQ ID NO: 178520 - DNA, 888 bp, Cannabis indica
atatatttttttattaatttatttatgcaaaagtaataaattttagcgattttttcatttttaaacttcgaaatatttttttaaggaattgtccatagaaacttttattgcaactaacggagcaacctaattacaactaaaattcgtataggaaccaaaattagtaaataatcgctatggattgcgtttaataaagctgatgaatgaatttaaaaaaatttactaaaattatatatatatatatattttagtaaataaggattgtctttaataaagctgacgaaggatttacaaaaaaaaaaaaattattttcccaaaaagtaattatttaaatatgtatacttgttgttgttgtatatgatttaaattaatatatatttttttattaatttatttatgtataagtaataaattttagcgattttttcatttttaaacttcgaaattattttttttttttgttttttagggaattgtccatagaaacctctattgcaactaattaatggagcgacctaattgcaatcaaaattcgtataggaatccatatggaaagcactagagaaactacatgagaaactcaaactgtaaatttgaaaaaaaaattaaaaaatagtatataggctaattcccctaaattttaatttatttatatattttctttatcatgtatcaagggagtattttggattctcatcccaaaggcaaatttatggtgattagttcactctatattttatattgtaaattgagtaatatatgtgtgttatgttctcaaccaaagggaagattgtgatgagcagttaactctatttcctcataatcttgtgtaacttgaatctatatgtgtgttatattattactcatggggatgtatgtaatatgacc

SEQ ID NO: 178521 - DNA, 1202 bp, Cannabis indica
aattttattttatttttgcaatttttgattccactgtaaagaatatccatttacatatattttgaccaagagagaggttgggttattgttattgaacatttttcccaaaaaagtagacattcttttgagagattagacgtgtgcaatagtgaagtgattgattaggtaaccctaccactgtgtaagtgttaggcgcatgagccacttaaaacaacgcgttgattgagctaatatgtttagaggataatgtctgggtttggagggcccatttaaataaagataaacctatatgatcaacacgtaaacacgtaaagagtgaaagttgaaaccatacaaaatggcctaaatagggaaacaccactaccacttcactcacttttgtagtactaataggtataggtggttcgttgactcaccctcttccacactttttgttttgcacaatgtccctttcatcatcatttcaggataaaaatacttgcttttcagaattagtatttgattaacttaattttgatcatgtaatgatcaatcaataacaaaacgacacacgtagccaatccaacaggtttcagagtcgtttgttcgtttggttcgttaggcatactcgcaattaattggttaacactaattaacaattatttgttagttatgaaatttcatgtagaatcaacacaactgaaccagttgttcttataaatggttgaataaatactatattctagcctgttcgaatttgattaactctttctttacaatttcgcccttacttagtgaaaaattcacaaatagacatagtctaatttgagaattataattgattaatcaaaaccaattatatgagtcttacaagcaatattatctcaactagtgcggggaccatgggtctatataaccgagcttccaataagtagatcaagaatttagcactaaaattcactaacttattaattcttcgttgaatccacgcatagaacttagaattgcactctcagtatatagaatgctctatatgttccaccatatagacacatcattagttatccattgttataatcctaatgtgatcaatgatcctctatatgaatgatctacactgtaagggattagattaccgtacaccctacaatgtatttattccttaaaacacttgaccccgtataaatgatatttcagcttatgtgaaatgagtactccattaa

SEQ ID NO: 178522 - DNA, 787 bp, Cannabis indica
ttagaaattttgttttttttttttgtttctttttaatggaaaattttagtactcttactagcaaatatccaaatttttaatttcacggaccctattgttactcctatttctgaagtttaaaataatattttccaacgaagagttcaacattgacaatctgtccagtgggatccacttacaaattgcccaacccacctaatctcacgccacgtgtacacagcccctaaaccatcttccttgctttagtccctcagctctaattgaccaaaagagtcaaaacgccacagaccccaatccgacggcccatttcattttttcccttctctgatcaaccccaaccctcccctcaccgggcgccaaaaatccccccctttttttttgttaaataaaataaaaaagacccaaagaaagtaagaaaagaaaaaacagagagagagagagagagataaagaaacaaatccaggaagagcggggttcagtcagtctccagttatcggtccgagttttcgaaccatggacctccagagctctgtcaaacaagccctaaatgcactatatcatcatcctgatgcagcggttcgtatggaagccgatcgatggctccaggattttcagcgcaccctcgacgcttggcaggtgacctgtcgtttatctcctctttggggatttttgacctatcaacgatgcttttcttcaccttttcggatttggatttctattggactttgattccttcacttgtcttggcgatttagcattgatttggttattgttcaagaaattagat

SEQ ID NO: 178523 - DNA, 757 bp, Cannabis indica
ccaacagtgggatagcattagaaaaatttaataaatcgatacattgtattaagtattttttttttatctcaaggagatcattaaataaaaaatatcgcatgcaatcactaaactttactttcacacgctttagacagtgaaatctgtgctggctttgttactgttaagagaccaatggaatcaaaagcactctttcttagcatttttaaagtaattagatgaatataacaaaatttaaacatgctcatggagggatcttacttaatttaaacaagaatgccaatcatgagccacaatgacccactgttaactaaaagagccacttctgatcgatcgtataagattggtgggcataaaactaaagaattccacattgataatatattgaaagtaaataccatacatagaatgcatgagttactcctatcataaacaattgattttgaagtggaacctcatcttacattaacaagtagtcattcaattcaacatactatacttgaaatgatggtgtggctccataccttgactgcaggtttttttttggcctcaataccccttaacagttaatccccaggggatgggaggtgaaccaaagcaggaagaagccctcgtagtcagagtgttccctagatttatcagtagaagcaatatgttaccctacataaagaggaacttgttatcagtagtttaaaagtaactttaaacgattgaagtttgaaagtttcttcaaatattttaggttaaatactatttt

SEQ ID NO: 178524 - DNA, 1353 bp, Cannabis indica
gctttattgtctgttgtcgcattgcatattggagtactcgccgttttaggttgaatactcgcatttatcatctctcaaacaattctatcttttaccagctaaattacacttcttggtgttgtgaaattctagtaacaacaacaagaaaggaatctaactttctttcaaaataaataaataaaataaaataaaaaagaagaaaggagaaaaaaagaatctaatcaatacttaataaaaagggaatcatattaatacagcatattatttttagctaaacctacctgtaagagaaaaagaaaagaaaagaaaaaaattactattgatatttttgaggaccaattgaccatacttcaagaaatatctttgccatttattcaatatctatatacatgagtgcactcttaatagatattacacgtgaatgtgtaaaattagaaaattttgagtttttatgcttaatttttctatttaattataaaatctctcatttttacatcatatgggctgaaattgttccatcgcttaaaaaaaatttaaaaaagttttttagcaaaaaaaaagaataataataagtaaaagttgagtttcacttcaatatttttatctgaatatatttttgatatagtgtaaaaaaagatattttttgatatttttttaattgagtagtcaaactaagcctagaaattcaaaatttaattttattatttgtcatttgatcaaaatttgatagtttaatatttttaaaattaaaatttatagtcaaatttatttagtaactatttatgagtaatacccattaaaaaatattccatatatatacatatctttgccataatggaattctttcactctgtttacatttgtgcttagtcttaaaggcggatccaagatttaaattagggagagtaagggtcgaagaagggcaatcactcattcttaaaatcagcattcttaagaccaaagagtcgggtggaaaaggaggagaaagcacactagagggtaaatattttttttttacatgttaaaaattaatataaccttatattttcataatattaaatatagtttaaagtaaaaaagaaaaataacaaatataagtctttattcaaaaaggtaaactttaaatattaaaagtaggggtgttcataaaatattcaatttaattaaatctgtacgatctaatccaatttaattaaatctgtacgatctaatccaatttaatctctaaagtgcagatatccacacttatgcggattgaattggattagaaaactcaaaaattcacacttatgtggattagatgttgtttgactacataaaagtaaagtgaattcaaatccacatatatatata

SEQ ID NO: 178525 - DNA, 790 bp, Cannabis indica
taagggaaattatcaagcaaaggatcaaccatccacttcactatgacactcctcttcaaggatttcaggtacataaaatgtatatatatatttgacatgggaaatatgagacattttttaacatttattatttgtaagtgtaaaaatatatcactatgtttcttaaggttaacaatttataagtaattcatagttttttatattacatcaataggagtatggtactattggtatttggtatcacttatgtcatttagcaattttatgataatttagcacatattttgtgtagaattatttaagtcttaaaagttgcaacatcattttaatatcgttttttgtactgctacaagttagaggagctaattcattttcaacccattttatttgtattcattttgacattatagaaaaagagtgaactgttaaagagagaagctatatattgtcaacattgagagactttgaaaagagagaagatcaagagtgattatttatttttatttttttttgagagagaaattctccactatggttagggtcggctctaaaagttagttatgtgtacatcttgggcccctaacactaagattagttcgaaattgtgaaaaaaaaaaattatttgtatcatcaaaataggaccagcaattgttttcacatttacagtagaaattgtgtttttgatcaaaaccattgtagaattaatcaacattttgttaatttggtgctcaatttagtttagtttttttttaagccttcattatttgtgataatgcaatattttatgtac

SEQ ID NO: 178526 - DNA, 552 bp, Cannabis indica
tgttcctaatattaccaaaaatcccataagaatagctttgttcactaatgacaataatgcctttttttttagaattttatcctgatcattgtgttgtcaaggatctggactccaagcaacctctaatggaaggacatcttagtcatggactctatatcattcctccaaatcagcttcagtccaacagccttcaatctttacaaccagtttttttctttttatataaataatgcacaagtgagccattgtaataattccccaaccaatttttccttatgacataatcggttggctcatccctctactagagttgttaagcagaacatgtcttagtgtaatgtttcaggaaataataaaacatatgttgatttttgtgatgcttgttgcaaaggaaatatacataaatttccttttcccatttctcaaactgaatacacaaagcctttccaacttattcacagtaatctatggggaccttccccgtattccctcctcacagtaagcttggtatccatttcattgatgcttacagcagatacacctgggtttttc

SEQ ID NO: 178527 - DNA, 675 bp, Cannabis indica
ccatgaatctgtaacaaaataacatggagcaatattagaattcaccaaaagtgctttgacttagaaacaaaataataagggagtgacttttatttgttcgacgagaaatattggcttactccttagacatctatttttattttcaactgggcaagctttccaaattaacctacaaagagagccactcatgtaataactatagaacaattctcaacaaaacaagtgaaaattattctttctttctacatcaactgcaccaaattaaacctgcaaaaggctttgacgactgtgattaaaattacctgtttcacctctgccaaccaagcagtgaactccggtcgttttgtcctacaaaatgcagtgcacgtacagcaaatatatcacttgaataattttccacaattctatgcatgtactcaaaaatcaataaactatttaaatgaaaataatcgtttttgctcgattaattacatggatacagtaacaatgagtggaaatacagagtggaaaaataatgatgctaacaatgatgaagagattgatgatgattacctgtatatacataaaaaaaattctacttttgattgttctgaccatgtctgtgaacgaatcggaccaatcatagcaatcgtgctacatcgtaacaatccaaatatttgagaagccgtcttggat

SEQ ID NO: 178528 - DNA, 604 bp, Cannabis indica
aagagacattgaaattggtgagcgagacggagtcgactgatattttagggaggcggggacggagtacgagccagatgatgaagattatagaagcggaaacgataaaaaaagctaccatcaaagcaaagatacgacggatgaaggtagtgcgtgctggatcgtaacgatagggataaccgtagttggggttattaggcggcggttgctggtgatggtagggcggcgggtaaggataaccattgggattagcagcgttgggttgaggctggtgaggataggtggaagcagggtaacccgttacgggtcttgaggtatccgccattgaagaaaagcttggattttgagtgagagagtggagttggaattttagagagagagagagagagagagaattgttagtgatgagagaaaactaataaaggaagtaaaatatgcgtaaggtcggctatgttgcaatcaattctctcactaatatttatttctttttacaaaccgtagtgtctcacgtgtactgctacgttgtttttacttttttaaatttagaaactcttgtttgttgtaatctattacgtttttataaactattcgcggcagttcatactag

SEQ ID NO: 178529 - DNA, 613 bp, Cannabis indica
ttattgattgtctaaaactgatctaatacaaagagagtaaaactgaaaacaagttgtaacaggaaactgttacaagtaaccacttgaaacaaaataaaatcaacaactaaagctagcataaacaataataatattattttaattctccccctaagatgaaatgtatatattttttaccttcatcctagataaaagttcatgaaaaacagtagggtaaagatattaactaagtataccagcaaacaaattgccactattcacatccaaccctaaaactctcctcgaatgctctggcgaaaccacctctccacccttctgatcatcctcttcaaaaccggccactcgaatccctttccgttttgttgagaatcatgaggttccatctcaaaaccaattggatatatgggctatttttgctaagatgatggctattttttgctcatcaatcttgaaccgtatcagagtgaacatggtcattatctgtatgggtgcagatcggatagtgatcacgttgcccgcaaggggatatggctctgactaccatgttgagaatcgatggggttccatctcaaaaccaattggtgatgagtggagtagcccatgttcttatata

SEQ ID NO: 178530 - DNA, 745 bp, Cannabis indica
ttgataactaatcagattgtaaagagttttatttagggcataaaacccaacaccttctcccactggcaatttgttaactccccagaattcgttcactgaagtttcgagacaggagtgcaagtattcccccaatgctcaggagaaggaggctaacccagagggaaggaaggtggtggaatcaaagaaggaatggaacggaggattttcatacggccgaggaggcgggccttatcatgcccccaactcctcatgttagtcctatcttggaactgccggggtttgggcaagccccaggcagtgaactcactgcgaaagttgattcgtagtgagaacccggacattgtatttcttatggaaactaagaaatctgatgttgagatggaaggaatttggcaacggctgggttttggagatggagtggcccactcttcttcaggagcctcgggtggtttggcattgttctagaaagcggggtggaatgtgtaaattcacagtcttaatcatgataaaatcatcgttcgagttggggaagacagaaactttaaatcttgggtggggtgctttatctatgccccccggtaagagctgatcaagaatccttttggaattcgatgtcagagatggttggcgggttgaatgaagcttggatggccatgggagacatgaactcggtcctctgtcaaaacgagaaggttggaggaagacctgtttgtgactcggaaggcaggggcctaagaaacttcat

SEQ ID NO: 178531 - DNA, 721 bp, Cannabis indica
tacttattatttgattcatgtacaggaattcatgattctcccagttggggcatcttctttcaaagaagctatgaagatgggtgtagaagtctatcaccacctgaaggtaggtgtcttctttctctcctcttaaacacactttattgatatgtgcaataaataacttattcaaaataatcataatgtgatacaagaaattatttagtatggtatataggaaattgcacgtatgagtgatgacttgatcaataaccaagaagtatcgttatccctataaactgtagagtataaaacttgtacctaacaataatataagatgattatttgcatgataattgatgataaaataatatcttgttaaattgacacaaacagaataaattccaaatttagctaatttagttataaaagatacttatctgtgatttcatggcttaagtggtaatcttgaaaaaagcactaagacaaactatagcctataagttcaaagcacaccttatatcctttaaaggggaggacatcttcccttggcttactataaacagcttatcatgacattatatcccaacaatatgtttttcatatgcaataaccaataacaggatttaacaactgatagcaagtcccaataaccagaataataacaaattgcacaaacacaacaaatacctacaactatacttgtgatatgggataacatgttgtgactatgatttttggc

SEQ ID NO: 178532 - DNA, 538 bp, Cannabis indica
gggtgagattattttctaaatacacaaaatatttcaaaaaaaaaaattataaaaatacgattgtatagaattttaaatatttttatgattttatttacaaaaatatagttttttttatcagggtcggcccaagtatgggacagattgaccattgcacaagaccccccatttttattttatttttttttttaagaaaaggcctattttttttttctattatatatacataaataaaaaatttataattgaaaatttatgaaccaatcgtaagaaaaaaaaaaaaactagtaatagaattgtagttttaaaatgtacataatttttttttccaaagagcctaattttaaaattttgcacaaggcccctaaaatgtttgggccggtcctgcttttgatatatttttatgttttactcttattaatttgttgttaattttttattatttcatgttcttttttttttttgttttgtatgttatttttttttatttgtaaatttactttatgtagttttcatgttatgtagttttcttgttgtt

SEQ ID NO: 178533 - DNA, 702 bp, Cannabis indica
attaaatacatccataaataaaaaagactcgtggactaaggctcattaacgccccaaccacgtaaaaatccttctctcactttcttacagctcaatagtataatcatattttattagttgccgaaaacctcggtcaacagtaggtttgtagtaaatcttattggtttaaatttattaaaattaaattaattcaaattcaaattcaaattaaataatacaaacctattaaaattaaattatttaaatcttataaaaaaattaaaaaatgtagtaactctataaattaggatatacattatatttcttttcattttttttttaaatttctctcttcaaatagatatatatatataagtttgtattatcaaatgtgaaatatacatattacaaaatgatattattaaaaacaatattactaatagataatgaaaaaaaaaatataacttattagccctataatcttctctttgtataaacaaacatatttaaagaaactataaattctcatcccattaatagaaggatttaattctctcttaaaaaatagaaggatttaaagtaattaattaagaaaatcaatgacatttttgtcatttacttaagtaaagcccaaaaacaacattctctctttaatagagttatagatttacttgagggtttagggtttggttgctacgcttttactaaattgtaattgaaatc

SEQ ID NO: 178534 - DNA, 489 bp, Cannabis indica
ctggaagcagcttagacatcgaatgtgatttaaccttaaaatgtaaataccaattaacttctaagtataatattttttttgagataattaaaaaaatattatttatatataatttgtttactaatatttgaaagcattattcttttaatgaaaacaacattactttttattatagaaaaaaaaaattactgacattttaaaatgtcattcaattgaatcagttaaattatttttacaaatgtgattatgttataatttagtgacactttaaatattattaaaattaactatttataaattagtaacattttgtattaaatgtcactaatacatataaatgctaacaatttcaaaaaaaaaaaaactgtaaattaaataaaatgtcttttttttttcttttcaaaaattgatattttttaggcaaataccattaaatttaaaatactagtattatgatagtttttatgactaaattcaaaataattctac

SEQ ID NO: 178535 - DNA, 573 bp, Cannabis indica
atcctgagctgttcatattagatttcgaggacgaaatcctttttaagggggggataattgtaaagaccgcttagctttaatttagaaattagcagataaataggacttaattatgaaaaatatttattagtattgaattatttatttatgatgatatatttgaattcagaatgcatttaatatgtcacattatgctattttataattttgcatgttttggcgcccgacaatattggaacactgtgtatggctattagaatcaaatcttagtatttttagtatagcgggacaataatttaaacattgggaatgtcgggaatagtcgggattttagaatttcccaaattaccccttagtgctattttatgacttttagtgtgggaggggcaaaatggtcattttgccatttatgttttgtcttttgtggatttttaatttaagttaataatttattattaacctatgctttggctgaaagtaaataagaaaaaccttttctttttattcatttttcataaaagatttcattagaaaaaagaaagtctctttgtctcaagctctctctctctctct

SEQ ID NO: 178536 - DNA, 804 bp, Cannabis indica
ctccagcaagaccataccgcaaaaagagtttaaacaacgaggaacaaaggagaacttacacacatcgaaattcttgactaagctaaaatagaaagagaaacatccataattaaccaatccggaaggattcacccttaaaaaaattgttaattacattagtgagtccgagaaaagatgaatagaggtccaagccgaactaacagcccacaccaatgccatttgtaccgctctcgcttcagcctccaaaggagaagacgctttagcctgggcagtcatataggcccaactcccattgccaaaatctgtcatcaccgtcgccaatcccgcaacaccatcacgccaagaggcatctacaacaatcacaatatccacacccttcctgcatatttcagcaggcagagaacttgaaacagaccctgttttaccaacaggaagagaagagcaagcaaattcatttaaggaggatgatattttgagaagaattttatctaaatccacagcacctccttttaatcttactaaatttctttgctgccatatagccaacgcaacacaaccaaaataaagaagaatctgagactttttgacgtttgaaaacgtaatacaaatagcttctatcacctgaatcaacgaagcacaaggaatagattcaagacgacagggaaacataccagaaaatcagattgctttgaccacagaccattctttaaacaaatgcagacaactctcttcagcagacccacacaagaaacattccttctccgataagaaggggagtcttgatttcgttgggagggcctctgt

SEQ ID NO: 178537 - DNA, 1479 bp, Cannabis indica
taaaaatgaatgattaaaaacacctagtaatatgcatataattgaaagttaaacctgagatttggagaaattggtaagcatttgagtggagaagctttgatgatgagtagtagtagtgctactactacaccttccaccagaccttcttataacctggagatagtcactgtacaacttgctcaggaaagaggctgttgcagccaattccagtagtgatgccccatcttctactctttgcaccaataatccacctatatatatataataactcttaataaagcactgatgattatgatgactaataaattaaaacgctcatgatatgtgttgtgtacatatatataaatacctggggtaaaagtggtgttgaagtttggagccaaaacatacgagcacattagggagtttatcatagttgttgactcactcattgcgtcttcgtatggaaagccaagatcattaaacatttggagacgacttagcaaaacctaacaacatattattattttcaatatatcaattatcaatatgtacaagtcatgatgttaacgatataattaagaaataatgtgcattgctatttggtacttaaatgtcgaatatcataccaatttagtattttttataattggtaataatttttcatattatttattaaatcataatatgtgagaactaatattaaaattagagatgtttattggtactacatccaatatttttaaacatatttagatccaaatccaattatatattggatgttaaatttatatcattttcaaatctcataccgatcaaattcaatcatacgatcgatcaatttgatcggttttatgcattggatgtatttcatatatatatttattggtattttccttgatttatccaatattttagacctagtatttttttttaccggatcaaatccaaaaaaaaaatattataaatccaaggattggactaaattcatccaatcaaaaaaaaatgtaaaattttaattttaatttttatatactatatatatttttactaaaatttaattatctaaactaaatgtaatgtccccatttcaagtcttcattgggtccttacatccacggaatgaatgactcttataaacaagatgcaccaagtcaagcacgcttaactgtggagttttttcgtggtgggctacccaaaaacaagatgcaccttgttgatataggtaccaatcaattcatttaagctctcttcaactgtgtaatctcatacctacacagtctcagaatcatcccacttgactttcaccaggcgatgtgggattgcacagcttacccggtatttccccttacggatcacggaactactgactgtcacactaaataaaaatattaattattttattgaatattaaacacaatattcaacattcaatccaatcgaattggatatttaaaaataatattcaatctgatccgatcacaattgaatattcaatgt

SEQ ID NO: 178538 - DNA, 605 bp, Cannabis indica
aataacatcaaaataataacaaaaaaaatcaacaacaaattaataagagtacacgtaaccgtccagacaaaggaccccaccttgtcagggtttgttccctactttagacccacagagtgtgcacgtcatcttacatcctcaaatggtccccgcttgtacatatgctcttcaccccgtgaattggggctcgcccaattggcccaaagtcaataaatattatattttatcccatcagtgtagaacattagcccttaatgcaaagggttgaaaattcaattctagagtcaagtcttaagaattagggttcatctcataaggcaaaaacatttgtaataaatactttaaaggttttctagctcaataatattaatttgtggactaaaatgtattaacctcgaaccacgtaaattttttgatattttattatctaattcattttttcttaagcttatttaatttataattaaattttaagaatatttgcatatttattttactatattttacataacaaagttccagacccaacaagtagtgtttattgttgtttcttattttgacttattaagaagaagttagttgtttttagctttgtctaatataaa

SEQ ID NO: 178539 - DNA, 827 bp, Cannabis indica
gctcttctctcgcgacaatctccttccatgttcatctcttggggtgctattaagggatgacatggaattacctttgctagtatatgcagttgagatcttgttccccactcgatggcttttgtgatagaaatgcgatgcttgggttttgcctttaagtatgccactcaacactttttgcataccagcgacaatactttctagcttcttgctcttccaatggaggtcacttatttccacttcataatagtgagcctaggagcttgaactcattaagtacacttgcttttcctttttgggccaatgccttaaagttttagggtttgatggcacagatggtagaaggcaccacaccagaaatggccttctcgatagttgaatacttctatcgataaggttagccatcgatgttgttatcaagtcacgtattgcagggggccctttggccttctccaacgataggaggttgatgttctcttactatggtgtctgactggttttcatctgagtgaaccccattttctcagagacgatgggaatgtcttgacatcttaaaaattatagtgaatggtttatgaactaacatagctagaacttttcattcctgcagatatcgccaaactgttgacgataagaactcatcaactaaacttagttagaaaataaaatgcacaagggtgaagatgaaaaagcttaaagcaaaactcataacataatggagaaaactggtattgtattgatcctaaatttctacaatatatttcatcctcttcatgagagtagaggtattatagggagtctctaatagctccaaaaatagctaaacgtgt

SEQ ID NO: 178540 - DNA, 739 bp, Cannabis indica
gtaaacacatactgttagatttttaaaaaattctgaataattaaaatttttgaaaatataatacataagcaacttactattttatttaaactttatttttatatttaaaattatttaaattttttaaaaaagatgtctattatataacaatattatacacaattcttataaaaaaaaattagaatataattcctcttagtaccaaaaataaaagaacaatatttatttatatattttggaaaaaaagttctctgccatgggaatttaataacactaataataattatatttaattaaatatgctaatgtatatgtgatttttttttgatattttttaaatatagatattttcatattcttttacaagttgatcattatttatcattttattttatggtatatcatatctttatatattaaaagtgcctatctaacggcatttcttggtttaacattcttggtttaacagaatatacttaaaaataaaagaatattctgttaaatttaacgattaggtttgatctcccgttaaaaaataaacccaataatttaacccaaaaaattaaacaatcttttaaataaacaatcttttaaatattaataatctctttttaaattaaaaaaatacatttttagccacatatctctctaacaaacctatcttgggagaatattaataatttttttaaaaaagaaaatatagataaaatatttagaaaagataatataaaagaagatt

SEQ ID NO: 178541 - DNA, 692 bp, Cannabis indica
actaatcaacttaatttaaaaaaaatatcccaatttaagtttatctaaaaataattcaaattaatttttaaattaaatatattttcaaagaatatctaaataactaattttctagaaaaaatttacttaattatcaattttaaaaatattctaatttaagttggtctaaaattaattttaaaaaaaattattttcaacttaaatatattttctatgaaaatttaaataatcaagtgtctagaacaaactaattagttataacttctttatttaattaaatattaaaaaaatacatatagtttatcttgaattaatttcattaaactaagtgtatttttcttaaattaatttcaaaataatctgatgaaaaataaatttcatatattttaaaaattaattgtattgctaatcaattttaatttggttaaactattataattaacctaatacaattatttaaataaggcaaataggccttcacagttggggttcttcatgtgagagagggttgggttcagtatgttgtacccattactaatggcaccctaactctcacacaaggcccaaaagagaggaatttaaccttaattaaataagagttttttgcggctaaaccttctcaattgtcgtttcacttgcatttaaccctccaagcttaaattttgacggtaaaatcctccaaactactgaac

SEQ ID NO: 178542 - DNA, 773 bp, Cannabis indica
ctgaatacgaaaggcctgcattatttttagatattcatttaggttttagtttagatttgcaattcttcctaatagggatgttgttgggctcaaatttgattgaagtttttgttttgttgttgttgtcaatcgagtggcccacctcggtttgatggagaacgcaaagttcggtggtgacagagagtcgggtaccgtggaggtcctcgtcggtcctccggtgagtttggtgtgacaaagtgggctccgctgattacagaccttcagtttggggtaagtttaaaattgcattgcattgtacttgttgtttctgtttagctttttttatagttgtgtgactgagtagttattcactttcaattgggcaatgtacagtttaaatatttaagcctttctatgttttcaattggtggaaatttgattacatagcctaggcaatgtgcaatgaaaaatctgactacttgaattaatgaaagtttgatctaaaaggttttagattcaagatttttgttattgtttggttattgggtgttgaagtaatgagtttgctatcggcaactgttctaagtaaccgatgcttgtctttcgtctagctatatgattagaaaaatgtgctctttattaaaccaacattgtttctttcttaatcagctgtgtttttttaattccagatgaaatgaaaaatgcattagtcattcctctgtctttttttagtattgattctcattcgtgtttcggaacaaatttgcaggggtctggtggaagacctggtttcg

SEQ ID NO: 178543 - DNA, 645 bp, Cannabis indica
taatgataatcttaaaatctattgaaacctttgacgaaattaaagcaatactaattatcattttttttaacaaatactagagtccttctttgtgattgtgtgggggaaatttcatattttagccctaataaaatactcaatatcaaaatttagacttattaattttttgaacaaattgattcctctaatttgaaaaagttcctaaaatacccctaaaataaaattttcactatctctctgactttccctctctctctcgctctctgactttccctctctctcgctcaaagactttccctctctctcgctctcttcacgaacccacacgaaccagaccaacgtacccacagcgtcgaccacgaaaccaacaaacccacgccgtcgtcgaccacccacgaacccaaccccacgaaccaaacccacgaacccaatcgacgaaccgaaaccgtctgtcgatcttcgacccaaaccgacgcaaaactgccgtcgccaccacgaggagaaactgccgtcatcacccacgagcaaaaaccgttgcctacaccacgaaattcagttaaaggtaagatttttttttgtaaaaataatatttttcatagatttggatgccaattattgcatgttgttcagattagtggatttttt

SEQ ID NO: 178544 - DNA, 816 bp, Cannabis indica
ctgattatcacattagtgtaaatccaaaacactgatgaaacagggacttagtcttttgattcatatgatcacaatcacattccactgtgttgacaatactgtaattgtgaataaacatatgatctggacttaactgattttgtgtgtaaatataataaacatattaaaccattagcatgcaaacataaatcacttcaaatttcttatattgataactaatcagattgtaaagggttttatttagggcacaaaacccaacaaactcccacttgcactaacataaaacaaactgtgcaaataagtcaatcaggcgttaatgattcttagtccacgagtttatattattagcctcttttggtgaatgttatgaaattacaaagtattacagtgcgatatattctgtggaaaagcatattgctagggattttagcaacgtgacggtagataaaaaaaatttgtcctcccttgccttcaaaagaatgaggctatgtataagcacacatggggcaaagggcataccctttacctatcaagagtttttgtcttccacatgctactaaggcctgtactacgtaaggatgatctgaccatccactgattggaaccttcttcatcgtgtggtgtacagtggctagggagtatttctgtacgactttggacacgtgtcgtgcaaacatctctcctttacgaaatagactctacccaggtcattaggcaaaaagcatgctcgagggtacatgcgtgcactaccacaatctggcacaagggacaagatctgatcctgtgtcaaaaaaaaaagtataatcgtccatggag

SEQ ID NO: 178545 - DNA, 635 bp, Cannabis indica
ttataattactaaattgttttggttatatataattaggtggtggaaagaatcagattttgtacacaaatttccatttgcaagagataggattgtagaattgtacctttggatattaggagtttattatgaaccccaatactgtttggcaagaaatattttaatcaaaatcatagctttggcctcaattgctgatgatatttatgatgcatatggtacacttgaagaacttgagctcctaactcatgcaattgaaaggtttgaatttcaaattactcatatataatatgcatacataaatgtattttcttctattgtctctctctctatatatatagactaattattaataggataatttttatataaaaaaaattataaatttaattttatacattattttttttttatatatttttaacgtttttcattcttttttataatgttgtaacaacctgaaaattatattccatatttttgcaaaaaaaaattgtaagagaaaaaaaaactataaatctttaaaaacataattttttagtttttttttctttgtagttttaataaataattaagtatatatgttttaatttgtagtgggatataaattgtgtagataaactgaatcaggaatatatgc

SEQ ID NO: 178546 - DNA, 854 bp, Cannabis indica
ctcaatctttgattaactttatgggcctctcacccccacacttccactataaagtagattcaccatatcacttttcaaataaaatcttttttatttttacatgcacaccatataataaaaataaactaattattcaaaaataaaataaaaaaaaaagaacaaaatcactttgttagtttatttttgctttatttgtttaaatttttttttgaaaacttatcaattttttgagaagtgttgcatatatatatatatatttataattcaagtagaaccaattatcaactccactcgtactagcccaaaatcgagtcaacccccacaaaaaaaaaaagcagcccattatcattatggaaggtccaaacccggttgtctcactagtacgcgcccaaaacctaatcaaccctacccaatcaacctgtacccgaacctaatcaaacttgattcatatatgggcgggttcaatattaatttttcaatacccaaaagatgaaaaatgtccccaaaacataatactcgcccaaatgtgcagccctaataaaattttaatggcctatattgatatttcctcattatttaaaataaaataaacatacataatcataaaatatatatacatatcgtagaacctaagagcttataactaaatagaattatactagaaaaaaaaaagttaaaatatttattaagacttaaaaatatataattattatcatttaaaattattcttaaaatgaatattcttaaataaaaattctaataattattttcattttcattctcattcatatttaaacttaaatataataaatatacataacttaaaaatgaatacatatgatcccaaaaaaaat

SEQ ID NO: 178547 - DNA, 720 bp, Cannabis indica
acccattaaaagagcacccatatgaaaagaaacaacagtgtattaattataaactaaaatattcacaaccttgaattgaggagagaggtagttctttataaaccagaatttaactggacgattggtgttcttcaagacgctcaaaatcatgattttcagaaaacgttcatatctacaaaataaaaataataaaaaacgacaaaatggtaaagtttgtgtagacattaaacgacgagcaaacattaaaatagagtatactttaagaaggaaaaaaaaaaagcctcaagagtgtttactttctgatttgatcatcagggatgggagcttattatgtgattgtatttttacttttattttttgatgtaattcttttacacttcccttgggcattctctcaacaaaacaaattgatgaagaaaaaaatggtcaggagctatattggcttaactttcagtgaggaagacaactaaaaaaatgtcaaggtagatttgatatcttgccctcctttctgtaatccccttttccatcactcaaaatcaaatttttgtcccgtgtaaaaataaatataaatatacaaaagataaaacaaaaacaaaaaggagaaaaacttacaagtgaccagaagctatagaaaagatatttattgtcgttccatgtcgcccaccctttccttgctcctgaaaacagacatatcaataattcaataatccaaagaagtcc

SEQ ID NO: 178548 - DNA, 913 bp, Cannabis indica
atcgtcggccacatcgcacgcctcaaaagctagccaaagggttttgaaagtgacccatttggcattattgaggtagtcccgcaatatctgatcagactcacatagtgtagtcaattcttcagtggaggggccaccgctcatcttcagtcccgtgatcaatccaaactcagaccttccaaatctggcctcggttttacccacgtaaaaccacacttcatcattctttacctaacgcactcacattcctcaacagaagttgatgcacaatcaccccggagaaatttcagatcattcgcattccaaaaaactccaaaaggagtttccttcaccctctcggtcaggttaaaggcttcaaactttgctttaattgaagcaaagtacccatttcctcggtaagtgatacgcccaggaaaatgttcagccaagggcagaatgagttctggaggcatctggaaatacaaacagaaagattataaattgcatatacgtcgcatagaaatcgcacagaaatcgcataacagccaatgaataacatattacatcgcacaaactcgcacataaatcgcacattaatcgcactaccagaaataattacattctgtttcctggttggcaacatatttgaatataaatcgcacacaatcgcacaagacatagacaaaaatcgcacaaatagaacaattgcagacacagtagtcataaatcgcacaaactcgcacaagacatcgagaaaaatcgcacaaattcaacaattacagatacagcagtcaattatcgcacaaaatcgcacagaaatcgcacacacaacccacaacgaaacagatcttaaattgtatccctaatcgcacacatatcgcatacacatcgcacaatatcgcacaaaatcaaaaaaacccccaaaatctatctccct

SEQ ID NO: 178549 - DNA, 829 bp, Cannabis indica
aatatcaatatcaataaataaaagaatgcacaatagttatggcagcttatttaaggttttttttcttaatctttacttccttaatttttcaagttaatcattacatgaaaaaaaaattatgtttaattaattttttattctattcaccacattcaattagctttagattaacattaaatatacttttcatttatatatgtaaataatgtaacgtatttgagcatgttttgaatgaatgttatgacctttaatattaacaattttcagttacaaaaaaaaaaaaaaatattaacaattttcagttttaatcaacttaattaatattaatccattcattcaaagatccttgaattaattgagaaaattcaaaagacaataaaaagaaaatgttataaatatatgtatatatataaacgaatactacttttgagttactctcaactaaaacaaacatgcaatcattcattaatttaaaatcacttatattatatagtctttaattgctagagaaaattcaaaaaggcaaaaaaaaaaaaaattaataagtctatatatacaagtgtggtgtactacaattgcacacatgacccacatttttatctgaataaacatattttttttactttcactatttatgttgcaatacatatctttcatgttattgttctcccgttcttcatatgaggcttcacactcacaatattatatttttcaagtattatttacatgtatgtcatatctttcaatcttattattctctcatgcaaagaaaataatattttatatactatacacaaaatagaactatcactatatacatggatgatta

SEQ ID NO: 178550 - DNA, 526 bp, Cannabis indica
cgagagtaatactactctctattcgcgtctctctctctctcacttttctgttcaggttgatggcgtttgacggagcttcttatacgacgggattttgggttgacggagcttctagcttcgtgttcgaggttggggcttgatgttcatggcattggatctgaactagtttttttaggtttattttgattttaaaatataaattgtgtatgactaatctcaatttttgtctgtttgatataaactaatttaggtttttttttagataaactaattttggttttttttacataaactgattcgggttagtatgtaattattttgtaacttttagagattaatatgttattagtttaaaattatgtgtatatagctttaaggtaaattgtataatttataaatttaattaattaaaattattattattatatttaattgtattaatatataattaatttaaattactatttataatttttattatatacaaaatttgtaaaaagaattgtatatatatattttttaaaaa

SEQ ID NO: 178551 - DNA, 819 bp, Cannabis indica
ctgcttcaaggaaaaaggaaagtctcagatttagggattttggaaacagaaaaaacgtataaattaatataaaaatgttaataaaatgtatttatgaaaaaaaaaaaaaagttttataaaggtggaaaacacaaattaaaagcgtaaaaacgtgaaaaaattaggaaactagcgtgtaatgggtaaattccctatcattttttaggggaaaatatatatcatatccttataggattaggtattctgtttttatataaataatacattagttcttttaatcaatacacgcaaaacctaagagtacttccaagatagcaaataggttctcttcttccaaaatttagtgacttaattattaaacttacaacaccatgaacacccctaccatttacaacatgactgtagatctagatttagattcaccaaatgattttttactatcaaactctttggcccaactaaacaataacttcttagtttttaaactaaatttttgtcatcaattgttaccttttggagacattactcaaagagtacgtaaaagaatatcaacttctcgtacttcatatttttatgatcctttcaacttcattagacgtattctacttgaacttggcgtgacagattcaacaattttattttcttttaccaacgaaatagaaactagtctcatcaatattctcaacgatcctccatttgcagcttctaaaatcgtttttattaatatttttattgttgccacaagtattccagaacaagaagaagaatcgaatatcattgatattacttttagggaagcacttaatgctattccaaatg

SEQ ID NO: 178552 - DNA, 776 bp, Cannabis indica
atgtaatttcctttaaaaaaatttcaagtaaagcctattaaaaatgttttttctcttttagtttgtgatagccacggttttcccacactaaggaaaactataaaaccttttttcactttttaattattattattattattattattattattattattattattataatatgtgagaatatataaatcaataattcattccaatatatgtctaaaatatttttataacaaagtttatgttatagtgtgaagtttttgcttagaaatacgagtacagtctcgtatgaagctaacatgtagacccagttcttgatagaaggatgacgtgttagtagatagctcccataaagctaatctcgcttgacataaacttgcgagaggatacgatcgagacaaggtctagttgcatgctatacctcgcatagtcaaaagaataagcaagaccaagaggagttaatactagtcgcacttataccgattatatgcgatgaccaagcagacctctcctgcgactagtaaaaaatcatttatttacatagatttttggtccgattgactagtgtgttcgacgactcgccagggacttacatgttccacattctcaaacacatagaaatgtctaactatgtgatcaaagatgaaggtaaaacattcaaaaaaaaaggccttcaggccaccttgcaagtaaaaacgcgatagagcctgtgaactcgtgtgttggaatatgaacatgccaaactcgacttatcaagtcgcatacgttgctgaatttaatac

SEQ ID NO: 178553 - DNA, 939 bp, Cannabis indica
actttcatccgtagctatatacaacgccctgacctcaagtctgcttaccaatatccaatggctatgttgcaatggttcaaaatatttcccgaatgggacgcactcctcatacaagagtgggaaaaggttcacaacaagaggctcgtgggactcaatttcccaactaatgaaaacatagcaaatccattgagatgttttacaatcccgctactcaggctacatgtcaatttagacttaacatttatgataagtgtcaaaatacataagtcgagtgagcacccacttatcgtaatggaaattccgaagcaagactgctagaaaagaacctatttgccatcaacatggtgatttcaagtgacatatggccaaaacccaaagatgacgcaccatgggaatattatccgcttgaatacctctaaaaatagaaaggatatgaatacgtacaaaaaacactatgccaatgaaaatgaggtcgacgataatgatccaattttctaagatacgtaatacccaaacacagcttgtaactgtccattctcactcaatgatcttgatgaaaaaatatgtaggggactagcaatatctcaactcgtcaacagcaaccctactacatcaacaagtggcaacaagagagcaagtccttcatttgtgtggcatgaagatgatagtgacacaaatgagtgcctgaacctcagtccctcgcatgaacccattagcaaaaaaatggtaaagcatgcaaagatacccatctatacttgtgtcgtgtttgttttatgtcataaggtggatatgtgactactaaagaagtcaatccattgtttcgtgtaccaagacctgtgactactcacaagaccaacagagattcttgctcataaaaaactgacatctgaagataagaaatcatacagacgacaaagattcatctggccagctaaaaag

SEQ ID NO: 178554 - DNA, 541 bp, Cannabis indica
gacaaaactccttaaatttaacaatcacaatagtttgaggggaatttttaacagctaaaaaaatttaagggacacaatttaatacgtatcaaaattcaggagaaaaaatcattaattagccttaattttttgttcatcatgatcatgatgaagcaaattcacctctctccatgattaattaatagttttatattatattataaattttgaattgttaaacatgtataataatttacacgagagttggatacatatattccatttggctgaagaaaattaatttggaccaataatttggatttgacgtatttttggcgtgttataccttgttttccccaattttattatggctttcaaagaaggattgaccaataagtaattatatttgttggtccgtcaattctgaatagtttcataaagtccttttcatgaacagattttctttcttctttaaattgttatccaacgcactgtttaatgtttaattaatatataataaatgaactaaattatacagcaatactattatataatttagggt

SEQ ID NO: 178555 - DNA, 1054 bp, Cannabis indica
gccactgttatttatattatgaatcaataacagagtttgttacagagtaaagaaaagttagttacaactgtttgaaaacagaaaaaccagaagaagaatttaactaacagctgctaactaactttttattctaacaaagtgtttatgaaaaatgagtacaagagtccatatatgttactgtatgccaccattttattttactagatagtaatctgatttagacaaaaatatatatatatataataataataaaactagtttgctaatgtaaaagcattcacaatttcatatcacaatgagctggtataattggatttaaaaaatccaaacaaattatatgaaaaaatttgacttgaaaaagtaatctcttcccttgtactcaaaataaattgaaaagtttacaacatataatattaaaataatataaaaatatagaaaaatttatcttaataccacataatgtttatatcgttacttatataattaagtgttaaattttatatttaatataataattttatagaatatcactaattattggagtgatattagacaccactgatgctaatcattcgcaatgccccactaattaaagcgtcacatttacactaaaaatcccactaacccgacttgaaactcaaaaaaatggatttaaaaaattatagactgattcactgggccaaattcaagtttgattactttaatacccgaaaaaatcagattacacccgaactcaccctaaatccgattatatataatttatttattttctctcatttttttatacattttttaaaaaataaacttaaaaaatacctaattcaaaacaataatattataatatatcatttttattttcttcaactccttttattttctttcttttcattattactgtttttattttatgtaaaaatgtataaaaaaaggccagccaatccgaacccaatcaaaatccacccacacccaaacccaaaagctcagcagtcacacaacggacgagtttggtaagctaattctatacacttcaaaaactccgaaaaaaaaaaccttc

SEQ ID NO: 178556 - DNA, 738 bp, Cannabis indica
attcaaaacattcatttatattataattatattattaaatattaataataaaaaatcttatacacagttttaaaaattgaaaaaaaaatattccatccatcttcaatcaaagaaaaatcattactactctaatatatatactataatatatgaaaaaaccgtgtttttagcaaatgtcagttgtatataagaaaatataaaaactgtaagcgtttgcagcagcagaagtaattctgctacagcaaaacagaacaggcagaatataaaatatttgcagaaaaataaataacttgacacaagagatttatacgtggtatcagtgttctcacgaacactcctagtccacggggccacgcccagagaatgaaatcaattaataaagtatcaaaattacaaagacaattgacttaaacaagtttagactccctctaaagtattgccgcaatcctttgtaatccactttatgaatctgacttcttgaaacaccttcaagcccgaactcccttcgtctttgaagtgtgagtgcttacttcctcccgaagtaaggcttcaacaagtcttctcccgaagaccaagtgcttacttcctcccgaagtaaggctttatcaagtcttctcccgaagaccaatctcttgttcagtcaagtagttcttcacaacctctaggacagagtaagaacagaaataaacaactagaacctagatgaacaactaggctctcacaaaacaaagaaacact

SEQ ID NO: 178557 - DNA, 1035 bp, Cannabis indica
gcaatacttagaaacatgataggtccattcaaatctgcaaattatgggagtctttatttaatgaaatttttacaaaaatactagattttagaataaaagtttacaattttactgttacacgaaattttttataaaaatactgtattttatagaataaccgtaaaacaacaaaacgaaacaattaaaaacaacagagaacaacttaaaaacaaccgtagaaaaatagtaaaaacttaacacagtataccgtacgaaacttacacagtatttttttaaaaaaaatctggcccacagtaaaaaggggtaagttgaaaaatgacccttttattaatcaattaatcaaatttacctctaattttatatttatttgaaacatacctctttttatatgtattgtacccaaaataccatgacataagagagtcacatggaaagtatcttgaagtgacaggggcaaaattggtacaatgtttaaaaaaagagataaaaatgatagactttaaaaaagagggtaaaaataaaaaaggacaatataaaaagggtatggagtgtaatttcctccagtaaaaaagaaaaaaaagttaaaaatttaagtatgtggtgtaaaaatctcttatttaattttgggcttagagacatatatagcccgtttaattttgttattaaatggattaggtagctaactaattggttcacattgatagaattattcacgaggctatagtattgggtacgacaaactgaacctaactctccctcacatgaataatcccaattgtgaaggcccattttccttgtttaaatagtcgcattaggtaattatattagtttagcctaataaaatttgattagaaacataattaattctagaatatttgaaattaatttttcaatagattattttaaattaatataaagaaatatacacttagtttaagaaataattctagataattaatttctaagtaaactagtttatatttttctaagtatttaattaaatgaaaaattaatatttaagttaaatttttcttt

SEQ ID NO: 178558 - DNA, 671 bp, Cannabis indica
aattaatttagtagttagtacagttctgattggatatgagccacacgatctgattactaaaggaggaccactttgaaatgattaaattttaggagatgtcctaaactaccacagagattacttctataacaagcaaaatctagtttcacttccacgcgtgtgagactgtgaaaattaatatcttaaaattaatttattaatacaaaattatttgccaaatttacctccatttataattaagaaattttttacaatactatcctttaaaagaaagaggtacactaatgtattgtttaggtatttgaaagaatttttttaatttattttttttttataattgtatacgttatagttatttaaaatattttaaaatttttaaaaaatttaaaaaaaatttaacacatcgaaaacaatgttcgaaaactctgttgcacacttgagttttttattttatacacatgtgaaataaatagtttaaacattacttcttatattataaattattttaaacgtctcataattttacaagatatttaacataggtgactataagaaaaattacactaaattctttttcctagatgtcgaaacaaataaagagtgtatcggtgcatccttttataatggagtgcaccgtagaatcactctataattagttttctataatattt

SEQ ID NO: 178559 - DNA, 1356 bp, Cannabis indica
ataacacaaatctacaattgttaagtgatattggattattgaactcaacctaaccaacccttagcttaacagccccaaaatctcaaaattaaagctcatacaatcctaaacaaacatctaacagcaagccctcacaaacacacacatacacagaacataattcatcaaaacttaatttaaacttaactttaaaaccctaaaaccctcaagaacaacaagaaagcttacctcaaactttggatggtatctagagttgaagaattaacaaagaaatgaagaaaataggcttagcttcttagggttttctcctggtttcctttaagccgaaagagaggagagagagagagttaagaaattgtttttgtttttctttttgttttcctacttaattaactaactatataataaataaataaaacctagatagtatattcccatttcagcctaaacataaggccaccaaagacaaaacccaatcccaccaaattaccaatttgccccccccccctcaacgcactaaattacaattaaaccctaacggacatttggtcatttaactaatccgccaaactgacacttaaagttctaaactagtgcggaatatttctaaatcaatccatcctatattgtcgtgatatttctaaccactccgtggagctttccacaatcgatgggcccgaaaacattttaattcaaaagttgtatccacgatacccacatatttcaaaataatttccgtaattaataaattacgcttcatttaatcatttaataaatttaccttaattactctaactaagatcataatcttactcaaataccaaaataataacatatttaataaaatatgtctaattaaatactattttaatttccgggatattacaataaatgtcagagattttcacatatacctcacgtaccgccaaccaaacttagaatgatgacctcgccctacccatttgctacatgggggatcgacctaattggggcattatccactgggcgaggaggagctaagtatgtggtggtagcagtcgacttcttcactaaatggacggaggccgagcccctcgtatccataacctacaagaaagtccttgacttcgtcgtcaagaacattatctgtaggtttggaattcccataaagatagtatccgataatggaacccaatttgatggcgacttattcactgaattctgcgataggaataaaattatcaaaagcttctcgtcagtatccagccctcaggaaaatggacaagtaaaagccgttaataaaaccctaaaggatactatcaagaagaagttagacgctaccaaaggcagatgggttgacgagctacctcaggtgct

SEQ ID NO: 178560 - DNA, 727 bp, Cannabis indica
ctagatagtgtctagtacttttctatgtgtcaatatcgctattggtctaactgtatcgaatctcatataattaaatataataacttaactaaaacaatgctacatgtctagaggtgctagacatcactaatgcttcttaaaaaattattattttaaattatacgaggctcaatacttaattacattaagagcattgttattgggcacaagtggtgcccaacacctttcataggtggtactgtacaattagttagcgatattgcctaaaaattattttcttaaacttaattacactaataacagtataacaccgaaaaaaaaatgctagacacctttaatacattttaacaattctcttagagtaataatgatatcatactaaaaagagtgttaggtatttctctttattttgtttttattatctattggctatttttttttccttgtagattggacattggaaacataaggctcaaattccaatgcttcaatggaagaagccatatacaatgaacttggccgggaagatgcctcaaaggggacattggagtttcactcttcacaaaatatggcatatctatctataaatatatggattggatgaaaataatcaaattcaatacattcacaaattttgtaatagtagaggcaaagtgaaaaaaaattatctaaaaaatgtgtaaatgtgaagatttaaaaaatatatatataacatgctaataaaatt

SEQ ID NO: 178561 - DNA, 677 bp, Cannabis indica
agttgtctaaaaatccaatacatccaacatccaatcgaactaattagtattttcatttagtttggatgagtaattagattttatattgttatacgtcaaatctatatgtatatatgaaaattaacatttaaagttttaccttttttttttcttggattggatggatccagtccaatccaatacatactggatctaaaatattggatggatccgatccgatccaaaaaatactaggtctaaaatattagataaacccaaattaaacaaataaatatatatgaaatacatccaatggatagaaccgatccaatccaacatccaatggatgttggatcgattggatgacgaaattaattggatcggatcggatggtaaaatctaacatccaatatatgattggatcggatctggataggcctaaaaacattggatgtgatccaatgaacaccccctaagcatgttactcaaataaattttgtatattgtcatttttcttttcaaaacatatcctaatataattttatatttttatttaaaatactcaaaaattttagctactatcatcaacaaaagtttttatcatattgatcatctctaattaacaaggttgacttggagttttattgtactttgggaatttttttaaatctaggtgatatttttaaaaatcacaagag

SEQ ID NO: 178562 - DNA, 510 bp, Cannabis indica
gtaaccttagacatcacaatcttcatgtagatatccgatttagcaaattgcttaaaagatgacaattaccacaaaaaaaaaagacaaaagacaaaaaaaaggagggaaatgaacaattttagagatgttttgtttactatgataaatcctaaaactataaattattaaaaagaatagttactatcttcttactatggtagtcaagttgtctactttgtttcatatgttttttctcaaaatttatgtacatttccaatttgaagaaatacaaaaggagagagaaaaacaatatagtgtgccaagccttaaaatagcaacttctattgaatgtccacatatattttacttcaacttagaatttaacttgatatatataaaatgtgagattcaaaagttgtttaaaatatgatacttttaggtttgataaatttatatggtattttataagttatatatacatatatatatatatgtaaatttaaggttttttttttttttttagtagtcaaa

SEQ ID NO: 178563 - DNA, 565 bp, Cannabis indica
tgtgatgctttattcctgggtaaagggtttcaagctgaactatgtcttgttgtactgtaccaacaggcacgtaaagttgtttataatttgctcgtggtttcttatcactacagcactatgtttgcagggtgcttcaatacctcaatgtgtaaacgggacaaacctcttgatacctgtagcagggccaatcaatccagaggatatggctgtcactggaggaggcacacgtcttcaggatcaagatacatcggcccttccattattatatgattttgaggaagtagaaggtgaattggacttcctcacccgagtagtcgcagtaacattttatcctactgattctggaaaaagccctatgactctgggtgaggtagaatgctaaaatgcaacttttggactcattttatctagtatttgagaaatggggatttgttccttctttttttttttttttttttttttttgtgaatcctcaattgcatggctgttacaaaaactgaattacccgatcattcttctcttttacttgaaagttcacgtgtttgaatgcaggatagtgtgcagt

SEQ ID NO: 178564 - DNA, 609 bp, Cannabis indica
atcttgatctggttgtagccgtcataggcgtccatgaaggacaatagcttgaattcggaggtggcgttcaccatttggtcgatccgtggtaggaggaagcaatcttttgggcaggccttgtttagatcagtaaaatctatacatacccgcaatgtcccatttagtttaggcaccaggaccggtttggccaaccattctagagaatacacatcccggatcatgccactagttagtagtttgtccacctctttctccagggcttctgccttcactgggtcgagaggacgtcgcttctgctgaactggtggtatatccgggttaacgttgaggacatgggtatgacatgcggacttatgccagtcatgtctccttggcaccacgaaaaaatatctgtggctgcccttagtgcttaaattaatttttcttttcctccggctctagtcttgttttatttcttttgcttatgtgcaaagcttcatgccttttgactttatgtgttggattgttattttttttttcttgtttgttttgttggattgttattttttttttctcttctttcttagttttgttggatttttatgagttttgattattttttattttatg

SEQ ID NO: 178565 - DNA, 566 bp, Cannabis indica
aatctattaatacaagtcaatatcaaatataatattgtattaaataatattagtacaatataattcgatatcataccatacaacgctgtataccaaacgaatcctaacaaagtttctactgacgaaatgtgaatgaaattataactttacttacattaaatatttacattgctaaaaagttagtagatctataccacttaaaaattcaaaattttaagcatttatatagtaaatatcagaattgttaaaagataccattagtgcttagcatcttttgcagtgtcatatcgatattggtgtgattaagtatcgagtctcatataacttaagaaaataatttttagttaatatcgctaactaatcatgagatactacttatagaagatgttgggcaccactaatacttaatagcaataattagtaaatatctaataaaatctagaaaattgagcaatcctccattgggagagggagggcagagatgcagaacataaagtaaggaaaaaggaaatctatcatgggtcccaatagctgagttagattgaaccaataggatagtgccacgc

SEQ ID NO: 178566 - DNA, 813 bp, Cannabis indica
gtcaacgaatccttgtagtgttatggttgcttttttgagacgtttttctgagccgatgttgagaaacctctttgttttccaccaaaatgatgggtacatgcacctatatatataattatcaaattaatttttagtagttattagcttattatcttcacgttattattatttaacttccaacgcaacaaatgtggtttctaaaaatatatattttttaaattataaaatatgtaaatttaatattaattgtatcaatagcgattataagttaaattttactataaaatattgttattaaacacttctaaacatgtcgctttgtgattaactagaaatacttcttaaatattagtacaggaatcaatacttaattgacacaatagtgacactacatataaaaaagtattagacattgatattttttagcatttctttcattataatacatcataaaaatctcattttattatattaacatccaaatttcaataatattttattaaaataaatatatatctaaaagaaattgtcataattttccaattaatttaatttttgtatataaatttaaaatacctgagagtgctaattttggtggcatcttcataagctctcaagaactcataacccatgacacttccttcaccctcaagacaaccaagttcgaacccgaaagccactttgaacacattatcgaatccaaacctctccaaaacatgttcaaagtcgaaaaacttcacccgatttcggaaagtgtttccaaaaagaggaaccagcttggtttcgagctcgagagctacgttgtccatcatg

SEQ ID NO: 178567 - DNA, 711 bp, Cannabis indica
aatgatgtagttagaacttgacttctttatgcgaaaaagcaatgctgaatgatggtgtacatgagaagtgatatttcaggtgtaaaatatagtaaattaatgcttagggatggtaatgaaaattatgtttgaggcaagaacgatgcgaaatttttttgcgataatttatgatgagatttgattaaaaaaaatttaggacataatgtaactcaaatttcttgttcttcactctatatttaagataatgcatattctaaatgtatagatttcaaataaataaataaataaaacattacttcaaatgtgaaaaattatgtctcaccaaagctattatcacatttcatcacaaaccatcttaaacccatagtttttccctcaaaactaaaagttttgatgttattgttcctaaaacattattaagtatcaattactattattttttttgtgtcaaaattaaattttcatgatactattgttaaagcctttttttttttttgcgtaaaaattaagttttagcagtatcattgctagtattttttgtccaaaaatcaagttttatggaactttcattaaacacgttaattttaataaatgatttcttttattatttaatatatgtgttcgaaattcatgaatttgtgtcttaccttatgcttggcatagaaggagaatatggaggatatatacttataaaggatatatatatatata

SEQ ID NO: 178568 - DNA, 862 bp, Cannabis indica
  modified_base (768)..(768): a, c, t, g, unknown or other
aagaaataacttttaattgctacattcatgaacctttacctttatctatatagtttctaataagtttgaaaaccaatatttgttatctacggttatattaattccatatcttttgactgtgccatgatgttgatgttgagagtcaaatatcttaattttgataatcatcatatatataaatgaatttcgtttattagaactaaaatatgaaatctattatatatacattataatcatatcatatcatgtatatattaaaaatatttttttttatcaagaaggaacaatttcattaatcaacaagcaattccaaataaagccaaaatagaaaaagaaaaaccagctgctaacaaaacaactacttacaaaataaatactctataaattttctctcatgtctattcaagctctctcttttaactattgttaatctataaaacatgatttttttaatatcctgtacaatgctagtgactgtgcttgagtaaccgttgaaaacacaatcatttctgtttaaccacaatctataaatcatagcagccatgacagcaataaaaattctataagttctgttttggctgataaccaccaaccagtttttccaagcttgatactccttcggccaaaccccaactcctagccaagtctgtgctagatttgccaccttttgagtagagtctactcaaagaaagatgttcatttgattcagcaacttcagcacaaatcggacactctgtgttatctaatacgacccgaaattgaagactnttttatcccttgttaacagctgagcatttacagtcttgccacagatgaaccgatgcttggaactataactcgaactccaatctaactcttgctg

SEQ ID NO: 178569 - DNA, 689 bp, Cannabis indica
ttttaattttaattaaaatttaagttgcaatgtaaatttatgtaaaaacacacacaaaaaaaaacattataattaaagtataaaaataataaaaaaccccaataaaaattatgaacttagttaaggtttaatgtcctaagaacttgatttaatgtactttaactcaaagttaaataaacccaatgttggatcaatagaactcattatataaaaacaaggatgaagccaagagagagaactcattcattaattcattcattcatattcacttcatgaaaattaacaaagccactcccaagataggagtacacaaaaaatagaatacaaaggtagaaaaagagagaagactagacaagacaagactatagtaatattaaaaaggcctgtttcttttaagcttttcagaaactttggccataatctctagtcctcacaccccaccaccaccaccaccaccaccacccacttacatggaagagaatcttttagtagtaaaaagagaaaaaagaaagaaaaataaaagaagtcaaaaaacttagccaaaactacagaaaagggggtcgaacatgttggttgttaagaagaaaaaaagggtaagtacaaaaaaggaagaagaagaagaagaaacacttaagagaggttggtttggaatgatacattatggtaaaagaaaagggtaaaaagtaggt

SEQ ID NO: 178570 - DNA, 1506 bp, Cannabis indica
ttaagtctaaggtactggctatatatatagtactagatattacaaatacagtaaaagtaaattaaccctagactatacacatcaaaacaaaaaattatactaaatcgtttttttttctagtctgtatggatatatgtgggggaccacaccacatgactacttatccataaatcatatagaacttttaagtgtatcgactcaacataaaaaaaaaaaaaaaaaaaaaaaaaccctaagtcaagagattcgtaatattataataagttgtactagctactactatatatatagaccatgagttgtactcaaaaatatacttgccacattttctacaagcaaaaacaatagagagcataataatatatatatttatatatctctactcatatatttctcaagtatatatagttatttaaatggagtcaaaccgtaagagaaggagtttcatgaagagtaagctgatgccattctacagagccagctcaaagccttcttctaataattataataataataataataatagtagtagtaatacgttgcaatacaaggttatgaataagccaaatcagtcctctccttcggcagcctcagtagggtttttggtgcaccaagactatctcatcactcagccaaagccaaaagtgtcatttgttatgtcatcacatggcggcggtggaggtggcggtggcggccgtgactcctcggtggttcaacttgaaaagctctatggtggtgtggctgttgacgagggtgttgactcaaaggctgctaactatatatctatggttcaagaacgttttaagcttgaacgagtcaactcagaacgagtcaagtgccaagacaagagttgatcagatgatcataatatataaattattattattatgacataactacatttacttcaaagtaagattatatttttatatttggtacgtctagaataattatatatatatatatatattatattatatataataatataataagtagttcagtagatctagagagagagatcatgagaatgtgttagtacttttgctttcttctttttctttttttttaattgttatagttaattagtgcaaacccatcatcatcaagttgttaaaagagtttgattggagttatatgagaaatttgtactaattaattaattaatttttccttttatcatgcactatatatatattaactgttctatgttaattccatatattaatttatttatatataaaaccctaactacaaaaactatgtcacattacaaataagtacccaacttgagtttatattattcccttgtattttctattattttcttatggtactagtatatactatttattgcatataaaatatatatattaggtgtgtatgaaaaaaattcagtatattttaaggtagtgtagtttgtaaaaataatcttcaaaaatgtaaaaatgtcgacttttattttatatatttatcctacctcatgtaaaaagttaattttagtta

SEQ ID NO: 178571 - DNA, 1290 bp, Cannabis indica
acgagtcaatgtatttggccgaaaggctttgatgtattacaatgaggtcttacaaattgaagaaccatagcttcttactatagtctcctccctcttaggtttttctaatctagactagtaaaaaaaattctagagataagatgaatcgtttgtctcccatgcatgaaggtataaagaggtatttataggttaggatccatatttgagaatacccgtgactagttagtgtttggttcaaactgggccactattagagtaaatacataacttttagacccactgacagtattctagctcatggggcaaaagtaattttttacatttgatctcattttttaaattaaaagtaaaaaaaaacaccaagtgtacttggtcatgaatgctcatttttattatcttaagaatcattaatgatactcattttaaacaatgaatcattcaaaaatgtgatatgatacttctaaatctaaactgaataaatttaaaacaaaatcaaaagaaatataatagaaagaaaaactaccaccgtgcaagtagccctgatggtgggtgtggttcatgttcatgtaaattgtgtggtcctaatgggcccaacaaccccaacaattgaaaaaaaaaaaaacaaatcatttatttctttctaaaagtgttctttgcatttttctcacaaaaaaataaaataataattagaggtgttcataaaatagctgatccaatctaatccgcaaagtgcggatattcgcatttgtacgaattggatgttgattaacatgtaaaagtaaccgatccaatccaattcatatatatttataaaaattttaaaaaattatatatacaattaaaattttaatgtaaaaaaatagcaatttaaaaatctaatacataaaatacatctatatatttcaaaatttaatagatcaaatatatatttcatttttatatataaattttttttacatacagtttaaacaaaattaaatattttcttatacattacaattttttttctttctttaaatttgtcatttgttattttatttattttaatttgttgttgagatataaaataacaataacttgttttattttgctagttatgtgattttttttttttgttttttataaataatattaggggtgtgatcataaaatagcagatctaatccaattcgcacgatccaatctaattcaatctgcaaagtacggatatctgcacttgtgcggattggattagattagaaaattcaaaatttgcacttgtgcggactggatgttgattgacatgtaaaa

SEQ ID NO: 178572 - DNA, 567 bp, Cannabis indica
ggggcggggcggggcaatagcttgtcggggcggggcgggtcagaagcggggcggggcagacccgccccatttgccattcctaggcgtaccaaatcaagaaaaagagaagaagattggttttgggacactctctctcagtctgaggccgcccaaataggccaatccaaattcaatttgagtcacaagtaactaagtaaagtaaccaactttaattctttctttctttttattattattacttggaaacaacataaattgttgttgggactactaacggttgatgaacataacatgcaactgttccacttgccccttcaaattcctcaatcaacatcaccattctaactatattaataatatatttgtttttggctgaaataaaaggggatccagatctttcttcactcctttgctcattttagacaatctcagaaatcacgtgtcagttataagagtcttatatcttaacttaatttaaattgagtcattggtagtcactccaagaattaccatcacacagatagcaccacctctagcaaggaccaagtctagcttgaatcccttaca

SEQ ID NO: 178573 - DNA, 622 bp, Cannabis indica
atttttattttttttttttgttttttttttttttttaaaaaaattatactatatacctcttttaatttgatacttttaatttttactcttaatttttacttttttttttcaaaatttcttatatttatcttttttttttaatcattctaccaattttacttctatcacttcacgatattttttatttttctctaatcaaaattttgtgccaacttttcaacaaacctacacacctatctacaaagatacaaatctattatgtttgaaattatgtcttaattatatgagtgtgtgaagataatttagttacaatacttataaaaaaagtatatttaaattaaattttatttaaaaataaatttagttaatatatatataaaaaaaagagatattcgtcattttttattctttttcaaataaaaatagaggtttccatattaattggcaaattaatcagtcttatagctttattttgttatctcataaatccatatagctataagctatctaacataatgtttttttttttttttgaaaagaaaaattaaagaaaagtatttttttattattattaactagtcaatagacccgcgcgttgcgcggtttttataattataaaaaa

SEQ ID NO: 178574 - DNA, 667 bp, Cannabis indica
agtagacggtaaattattactaatttaacagttagtaaaccttaatatgtatgaaaccaatgaatgataataatggcttgatttcaccaacgatgaactattacaaaagcttttacgaaaaaaaaaaagaagaagaagaaattaaaaaaaaaaaaaagcttttgtgttgttggagtcttgtgttttgtcatatatgatttgttgtccgttcaaccaaaataaaattctccttggacggcaatacttggatcctcacacactcatccttgtcattttgttttatgtataatgtatgtatatacaaagaaatgtttgccttcattgtaaaagatagagcaatcacaaatggcaaatataaatacaataaaaaatagattatctggcttctacaattaaagatttgtttagctaatgaattcacttcaagattatacaaataggaaaaaaataatgcagtttatttttatatggtagaaatgaataataaaaaaaatatgagaatgaaaaataaacaataattaaaatacaagatactaaacaaaagatcataaataaagttgttaaaattcataataataactatcaccgaaaaagtcatcggtgccaaaaaaaagtaactagaaagtcagcaatgctagaaaagtcattaaaaaagtcaccagagtta

SEQ ID NO: 178575 - DNA, 670 bp, Cannabis indica
taatttttaaatttcatagaatttcaaaaaaagtgatctggttcgacacaacatctataaattatttaaaaaagaaaaataaaaagtctaaatatcatctctcaaacaaaaatatactccttagacataaaataaatttaagttggtgaatttattagaaactttactttgggttcaatagaacaacatacaatttccataattatacggatatgtattatttaatacttttagggctcatttggaacgccgtattagatcgtattgtattgtattgtattatattgaattgtattttatacaatatttttatgtaaaattatatgtagtaataacttttgtggacacctaaatatataatattttagtataaattaaagtttaacatagttttatataaaaatatgatgtataatccaattcaatataatacaatacaatacaatacaatacgacctaatacggcgttccaaacgagctcaaaaagataaatgaataaataaattgaaaatttgaaaagaaaaaaatgaaagaaaataaaaagtaatttaacaattttctaagaattatatttgatgaaaattataattaaggatctgttttaaattactttaataattagaaagtcaaattttcaactgtttatgtagaacagaatagaatactaaaa

SEQ ID NO: 178576 - DNA, 1192 bp, Cannabis indica
atttggcatgatgatagtgtcatgtgttctctgctaagcaaatcataccgtcagaaaataaacgtgctctatactacaagctagcacactcattttcagagtggtgaagtacttattctcacagccttacaggttgaatgtgagcatcttgagaatgtgaacagttaggtgatgtgtagtgtagtgtatgacttaataaattttgttattgtggatgtccatgtatcattaattgttcccctatttaattaaaacaaaaaaaaaagagatgtttagccctaacagaaagaatggtgagaaagacaataaaagaacaaaactataggtcacggaaaaggtaattagaatttttaattctcaaactatgatatatgtatatcaaattatgttctttcaatttttaaagtcgttaaaaattacctttgaattattgaaattattagatttaaatttttttgtttcattttgataaggaaagtataatatgaatgaaagtttaagggacataatttggtacatgtcaaaattcaaaattcgagagaatgatttggtaaatatcaaaatttgggaagcataatttagtacatgacaatcacagaattagtaaaagtgaatgaaattagacaaaaatctttaaatctaacaatccaagtaattcaagaaattttttttaactgttagaaaagttcaaatcacgtgatttgtacatatcaaaatttaaagagaaaaaatcctaattagcttgaaagaaaactcttaaatgtgagccttcttcaaatattaaaacaatgttgtttaaactttcttactaacttatttcagagtattactattattttagagtattgttattgggtcactagtagtactcagtactttctataattgacgcctcacgattagttagcgatattctttaaaagttattttattaagttatatgtagacatcatacttaattacactaatagcagtttgtcaccgagaagactaatatacactaatattatcttttagcaattctcattattttgaggttgcacaatatcaaatgagatggtaccaataatatcaaattgtactataaataatatagggatatgattttgtgccgttattgaacttttcacggtatgtaatctgtgatgtcggcaaccgtcagatgatggagttatttgatctgacggctgag

SEQ ID NO: 178577 - DNA, 580 bp, Cannabis indica
agttagatatgtgtggaaggaaaggcataattgagagaggaaaaaatgtggatatagggcttggatttggttaatgcttttattatgtgatggtacttacaaatttggaaggaatcatatttttggattggacatattgaggtcctagtttaaaataaattgatgttaaataaggtaattgttgtatttgagttttagtgtggatataaatgatttaagctcatttgttacaccgtgttgttgtgtactgtatagtattatgttaaattatattgtattgtattaaataataaatgatttaagcttatttagtacattgtattgtattatattgtataatattatattggattgtattgtattatattaatattatttaatataatattatatttggtattgacttgtattaaaaggttatgtaaaaattatactatctcataactcgatcctaactccagacccaatcttgaatctgggttaaggtccaagtttgagattcgggtccgagatcaaagtctagagcctagacccttttctaattattttaatacaaattaatacaaattatttgttatgt

SEQ ID NO: 178578 - DNA, 538 bp, Cannabis indica
agcactcattgaaactcaagtttataaactgataattatcatctgattctgatctataatcataattacaagaaacagaaaattctacttctactcataactgtggctcgcaattttagtcctgctctaactgcttcgattttccctacttttttcgttacaactatgagccaaaactgcatttcccacggttcactactgtaccaatggtgttcctaatcaaaccagggtagatcatgcaaagtttggcacaaggaaaagaaaaagatcatcttggtatcgtaatttaaacaaccgaaaagaatggtccagttccaccttgtttatgagggtcaggaatgcttgagtagcaatagaggtgattggacatgttccaactccaatcttgctttctatacacattcattttaggccatctgtttattcttacatagtgttctctaatctgttcctcaccaatgaaactagtaacagtacaataacaactttcatgtcctccccataatgggtcatcaggatctgctgtttggctcccatc

SEQ ID NO: 178579 - DNA, 566 bp, Cannabis indica
gttgactcaaagagtccatgaatttctccattaagtaataaagaaattttttgggtagtaatacataccataataagtttaataaattatggtgggaactgaaatgcattgagcatctcttcaataaatccccattctatagtgtcatacgctttttccaaatcgattttgatcatttaagtcggcttacaactcttcttttcatataatctcacaatatcttgacagactatgatattatgagctatgtaacgtccatgtacaaatccaatttgattttcagctatcaaatctagaaagaacctgcctaagtctcgaacaaataattttggtagcttccttatatatcacattacaacaagattttggtctaaagtttttcatactaaatatccaatcatttgactttagggatgagtgtaatagttgtagcattgatttcttttagaattctccttgtattaaaaaaattttagcactactgctgtcacaatttcatctccaactaactccaaattgtcttgataaaagatctctcaaattcatccattacaaaaaactcttaa

SEQ ID NO: 178580 - DNA, 517 bp, Cannabis indica
  modified_base (484)..(484): a, c, t, g, unknown or other
gggtatcctaaacttaagaaggcattcgtcaaattctataggcttatgtcgggaatactcttggactgcaggaacatgatagactctaaaggagacttaccggacccggatgtgctggcattgggggccccagtgttgggaaccaagaacaaggatttaggcctgacaggcacccgatctatgcccgcttccaggcgaagggtcctcccagcggcggcttaggctttgatgtaggccaactcttgttctctcctaaagaggtacttctgataccggtcctctgccgaggctatatctctgcccggggtgctttctccgcggctgggtgcaatgttggggcaaagaaccttcgagaggttgaaatcatccaccgactggctcctagagatcagcttgccttccggcagttctccgtcgtgccaagtcccccagttgagattgttcttttcataagtggagaaggtcttggcatgttggagaaacnggttggcggagccgtgcggaggataggtggaat

SEQ ID NO: 178581 - DNA, 868 bp, Cannabis indica
tatccacttttaactgagtatacccttgacgactctttagaccaaacaagatgatcattaccttgagtcaagtgaagaggtaccttcaaaatgaggagtctatcgctttcttcaaacaaatccgaaagtatctccatgtcccaagaattaccatcaacagttaataggcttccaaccttggcatgctcgagggccgggcgagacgagatgacgaaagggttgtcatcatgtggcagccaagattcattgaggacattgatgtcattcccattgccaatacaccaccgtacaccctttttgattacttcctgagccccccaaatatttctccacacaaagtttagattattatccagctcaacatttaaaaaattacctcttggaagtatcgagctttgaaaatttgagaggccaacgcttcacgtcttgtgagaagacgccatccttgttttctgagaagtgccaaattaaagtcacgaaggcatctgaatcccatacctcctatgtatttatgctttcttaaccgctcccatgacatctaatgaataccacggttttgacccttggatgattgccaccaaatttacacatcatctactcaatatctctactgatatccaaagagagaagaaaaacactcatcgcatagttagggaaagattaagccactgtcttgatcaacacctctttacccgctcgcgaaagaaacttgatttcccaattctgaagtcttttgcgcactctatctttcaaaatatccccaaagaccactaaattttttttctttctgatttaatagtgctagggcaagccgagatataagcttcgctcctcagcttcgcgcataccccagcaaagtactaccccg

SEQ ID NO: 178582 - DNA, 699 bp, Cannabis indica
agtataatgactgtgtgaaacacgattatgttgtctgtttaaaaatatcactaaaatatatataatgacatttgtagaaataatacaaatttaataacagtttaaaaaatacttttacatatttgtaagagttatacttatgtttaactcatgattgtagataaatacatattttgattttatttttatatttttttctaaattatatatttatattattttcttctaagaaaattttatataatttttagttttaatttttttttgacataatatttaaaatatattttatttttatttaataggttaatttgtaagaatatgaattgaaagaaaaaaaagttaaaaaaccctaatataattaacgatataaattctatataaaataaaaattattaaaatagaatatctttataagtttttgtatgtaaataaaattcccttaaaatgttcttttcttcattttttttaattctcaaaaaaataaatgaaaagttcatttaaaacaaaaaaaaaaaaaataatttattagaagtggatatcatttatatgaatagatggccaaaattggtgagcgacgcatcttccgctacaattgcaagcataacataattgtagtgagatattattaccatattttattagtgtaaataattatttttcaataaatgacacttgtcaatagtatatgtggagagt

SEQ ID NO: 178583 - DNA, 723 bp, Cannabis indica
caataaatgatttaaacttaaaatctcagtagaattttaaccattatttttaaggtaaaaaaaagcatagattaattttaactttaataggtggcactatagcttaaaaataattcaatgcaagtatgtatatcattcattcaatagcacgagaaaaatgttagtgtatcgctaatgttttgtactatttaaaatcgtattattagtataaacagcctaaaataactaaggaacaaacgtgtagctggagcaagccacaatatcatagctctatcttaagataaggccatctttgctaaactatgagctaatatggtattgtgatctctcttaccatgagtattaaacgaataatagtaagacttacaaatattattctttaataaagattatataaatattaatagagaccaataacaatcagagtagctcttacaattattataaatattattctttataaacaatctaaatgacctaaacgaaatatcctaaccaccaccattaaatatatatagtggctgttggggatttctcaaaattcaacaccaagattatataatattttaaattaatggacagtgggcggtgtacttgaatccttgttgataaatcgggttagctagggttgtctattgtaatcaatggacaaggcattccatatgtatgtatagtagtcattctatttcattatattgccaatagagacaatcaatcatttcc

SEQ ID NO: 178584 - DNA, 573 bp, Cannabis indica
cactggctatactttagcctacaactaaaaactgacagctattcccccccccccatataatataaaacccttttattcaattcatttcaacccctctctgtcacactcactcactcactctcaaccatgacaatctaccaatgccaccactatcacctcctctctctccatcctcgctctctcgtcaaattttttggagtcaatcacaactgatatgaaccctatgcatcatcctgcactaggttaatctttaataccaaaatgattagtaccctaatcccaaaatgattcctcaaaacccaaaggttcttcatcatctaagtgaaaagtcaactcattctcttctaatccatagtaactgcatacttatgcgagaaatctattctcgaaataataccaaagtttgttaaactatcttaaccagattaacactttctttcctattctaaccaaccagatagacctaattaatctactttttggagataactaattctctactaattaagtaatggagtcccaaaaactctaaattataattatcacaaagcctacccagtttattactcacgc

SEQ ID NO: 178585 - DNA, 711 bp, Cannabis indica
gtcacttgtcacttatgtttatgctaaggaaaaggggtaaggaaacgttaaggaaggggacgtgccgacagggaattaattaattggctgtgtaagtttggtatgtgagttgtgtttgggtgtgacttagcagtatctttttttcattcatcttcttcttttatttgcttgaatcgataggttgaaacctaacaaaatcatgtacaaatcagttcgaaatgcatatttaacatgtgtttgtggtttaattaatatttaacacgagtttaagttttaaattatcaaaatcttttatggtcatttttgtataacacacatgaacatgtaaagaaagagaagaaaaatggagggagagaaagaaagatgaaatagtgttacatgaaagttgtatagtggcttattaagtaaactgttagtattgtctagcttagtaaacatgaaatatcattggctaaaagattatcaatgaaatgaatcagaattaggagtcactacataaaatatatatatatttatatataataaatatatgtaaatgagaatggtatatcttttgatgtattttgtggtgttcatttatgtgggatggagaagaggaaagataaaagggtgagttgtgagaggagtaattttgaaaaagaaagaataacatattttaaagataatacataatgtggaatgttttcacctctaagtatagaaactcaaatt

SEQ ID NO: 178586 - DNA, 755 bp, Cannabis indica
taatttctcataaaccaaaaattctgaataaatgtggagccaaacaattataacttgatcgagccaaaaaaaaacaaatagaaaaattctttagcaatatatatatatatatatatagtagtaaattcttatttagaataaaatccaactaaataacataagtatatttagaaaacctaatcgtagatgtacaacagcaaaaacttaatcgtatttttttggatttaatgggatttaatttattttttatattatatataaataaaaagtgacccatgaatttttcataaactattttatttttaataataagccattttatttttaatataaataaaaagtcacccatcaatttctcataaaccaagaattttattatatagacacactttatatagaataaatatatgttgcttctaagtcatccattagtttttttttttttttttggaaaataatgaaattcctactacatacatagatctataaataattatgatatgcaatgcaatctatcaaaacttggtccataatatatgagagccaaatattcagtagaggaataagaataagtttgatacgccacccaaccaacacattttgtcaacctcatatttccattttagtggatctaattaagtctatccattatttcttatgtcctcgttataagtgagaactttagatgatatactaatttttattattttttaacaaaaaaatactatcagtacggtattttttaatttttcact

SEQ ID NO: 178587 - DNA, 877 bp, Cannabis indica
gttagttttaacctaaattcaagtatttttgtaagtttccttaaactaatgggacgtacaagcttatcatgtggtgaagcatgctaataatttatttattgttttcatatttgactttttttcctaaattatagggtaggttttttttttttttttttttttgttatcttgaactagtttttattcttgttctttcatttgctggtggaacctcttctctctgtatcatgtatttttccttcccaatttcttgtatttaatcaaagcaatcatctattcaatttcttgaagaagttggtgattcaaacattattagaaaactaaaaatattagatcattcgaatcatctaaacaaatattattcataatcaacataaactcacatttaatttcaacaccaaaagaattcaactagataggaatattataaatcaaatacatttggttatattgtaaaagcttagttttgaaacattaagaaggtgcattaaaaagaaaaaaaaaaagtaaaatactaatgattcacataggggtttacataataataataataataataataataataataataataataataataattagatgcattcaattatattggaaccaaataaaagggatccatttgattaaaatcaacgtttaaaaaatattctcattcatgagagtaaaagtgaagcttttacttaagaagaaccccatatatattgtatttattattatttaacatttttatgaaatttattttcccacatatgagaaacagaaaaaaatcaacaagaacaaagaagattattttattatgctcaattactgaagctatgatacaatatgcgttaatataaggcaagcagcaagaagaagaccatgg

SEQ ID NO: 178588 - DNA, 592 bp, Cannabis indica
atcatgatcacattgactatttttgtttacttttttatttgttaatatttcatgtgatgtgggtacttgttgatacttatgtacttaaacagataataatggataatatgttacataatatatagaaatataattataagataaatgaatacattataattaataaatatctgaaagttatagaaaaagtataatcttgtaaaaatgtacaaaaaaattaaaattatacgatatgaataaaactagtcattggtagtgtattaaagtaaaaagaatttttaatataaaactattaagtacgattttactatatactatatttttagtgtgtaccatttttaattcaaatcacatatgtggatatcaatggtggagtcattcaatttgtagaatggaacattcttaattcatgagatgccagagaactatgatgaaaattgatttgtcaatatgatgatttttttttttctaaatctcaattgtccatggaatacaataagtctgtgtttactcaattgaggtatgtttattgctagaacaagtggggctttgagcaaacaaggtgcctttcattgtgacacattaattgtga

SEQ ID NO: 178589 - DNA, 614 bp, Cannabis indica
gagaattactattgacattatgagattttttatgagtactttttatgaaagaagtttttactaattaaatatataatatttaaatcttaaataaatatttattgttttataatatttaatgtttaatattgcaatatgagaaaatgatgtagaatatgattttttttttttgataaatatggataattcaagattttatttatgactttttctagtataaactaaaaaaaaaaatctgtactagtagatctctttaaagggttgttctaataaattttttatcggttttggtatttagaaaaaaaaataatctaatttttttatgattgcgtacgctataactatttagaactacttgtaaatttttaaaaaattttgaatagttaaaatgttgaacaataaagtttgaatagttacttatcatgcgtataagaaagaataatcgtgcgtacaacaaaatatgtaaatcttgtttcgatattataaactacttggaattttttgaaaattagcaagtagtaccactactacaaatatcagaattcgcgacaatcctaaaaatgatttttttcgaggaccgtcggctaaaaaaattaagtaactgtttaaaaccg

SEQ ID NO: 178590 - DNA, 637 bp, Cannabis indica
actcgcaaaacattgtattattccattgaaaagaaatgatatacatacttttttataaaaaaaaatatatatatattttcactaataataatttactaagagtattgttttttaaaaaaaaaataaaataaataaattattattttattaaaaaatagcttgaaactgacaatatcatacacaaataaattattactattaaggtcaaaagcaaatttatcctctatcacaaataagctaagattattttaattttaacattttaacatttaaactcatacaaactcttcacaacttctttatgatataagtcacattttttgtatgtggttgaatgtttcacaattttacaagaaaaagagaagtataataaataaatccactagcaaagaaaaaaaaaattaaaaatgtggaaaaatagaaaatgagtgataagtatagattgaaaaacttttatttgaaagaataaataaaaaataaagatattgaatcattaaatataacataagttttaaataaaggctttcaacgaaacagtagaaagtatgtaactcgcttactatctcattcaactacagttttattgtatattttatagaataacaaaacacaacaataaacctaataaaagtcttat

SEQ ID NO: 178591 - DNA, 943 bp, Cannabis indica
ccccctctcccccctacataaaaagaagaaagaagggcaaaagtatcagcattctgacaaaaagtagcattatagggaaacttttcttgtatatacattatgtaagcacattaaattttcttgtattacatgcattgtagtctatgttcaactaatcagttaagatgaagtcacaggacaacctcataacaggatagatactagaaaaatatttcgatagcatatgaaagccttatagcttcatatgacacgtctacagtgcaccccttaaaaaagggtgtactccctaaccttcatattatcagtacctaggtgtactcccttaattgtagttatttaaaacatcttgcaaatttttgagaaactccataataatttatgatgttgaaaatacgttcaaacaatttatttcacatgtgaataaaacaaaacatgcatgcaagcaatagactgtttgtaatccaaatcccaaaaatttatataatgtcctaaataactaggatgtgtaccgtcttacagaaatattggaattacaactattcacattctaaaaacacaatggggatggggatggggatgcaccgttgtacccctttttggggtgcacttttgaatttcctactattatataagaaacaaacttttatcaatgatattattttataaagaaaaaaaaatcaaggagcgataagttatctgactatcctcaagaaaaagcaaatatacaaactaaagcaaaaagaagaaggaaaatgaaactgaagagttttccagccaagagttttttttttttacttgaatcagccaagagtaattaaaggaagcagaaaatctactttagaagccttgtgctgttcctaatccacagtagccttgttttattttctcattaatacaagaattgttttatttaaaataataaaaacagaaaatcgtttatttc

SEQ ID NO: 178592 - DNA, 666 bp, Cannabis indica
ctcattattatattcttctatgcttttttttttttttcttttttttagttttatatctaataattcaatgtgtaaagacataatgtataatcatggtggtgagagatagagaaagattgtgtcacttattgtttttgtttttcttttgagtatcttaaacttttattattaaaaaggacaaatgatttttggtacgcaaagtataataaattccacaccaaatggaggcatccaaagaaagaagacattttcttatttaattttttttttttttcatatataacacatcttataatgccataaaggaacactactttatattattatttaaattagttaaaatctaatcatgtctaattcaaaagaatagagtgatccttttgtaggtgggcacatgaagtattagaatacaatgatgcaaagtgttgttctttttaattaattatttttatacatataaaaaaaataattaagaagatggaagaacaccatgtggggtgactggcattaatttcaatacatgaacttaatgtaaaataataataaagaaaaaaaaaaatcaatttcatttttactatagtcgaatacttgtagtctttataagtatgttttaccccattaaaaaaatactaaagattacttgtgtcctagtttccaagtactata

SEQ ID NO: 178593 - DNA, 633 bp, Cannabis indica
taatttaatatatatataaaaatggctaattaagaatttttcccccaaattttgacatataccaaatcataccacttaaacttttttggccgttaaaaattctccttgaactattgggattgttaaatatttattcatttgtaacttaataagataacgttaaactagattacataataaatgaagtttccaaaaaatagataaaaaaaaaaaagattacataataaatggagattctttaattaagataattaaaaaatattaattaatacaatttttttaatttaatatatatataaaaatagctaattaggaatttttacctccgaactttgacatataccaaatcataccccttcaactttttttgccattaaaaattccccttgaactattaggattgttaaatttaaggacttttgtctaatttcattcaattctccttgaactattgaaattgttaaatatttaaaaagatggtagtggaacaatgtgagcataaaaaaaaaagttaaaaaatgtaagaaaccaattgttaggcgattaatgtaattaaaatatataatatctattaaaatgaagtttttcctcaaaaaaaagccctcatgtatgttttttctttttttggactta

SEQ ID NO: 178594 - DNA, 615 bp, Cannabis indica
atattttaggagataagatatcaaataatgtcaaaaattcaaaaggcaaaaatgttaataattgttcttttaaaattgatctttttagtcaatatatacaaatatatatattatattcccttagatacatacccaaattaaaatatcttatattaataataatatgatttttttggcaataagatagattaattaataataagttgttggtggagatccttgacatatgaaatcggcaatatgacttgatctctctatagtaatctagctagagcattgtatgtacatataactactagttgggttatggcctttcctttttggtttgtgatttttctttttgtgacaaacaatcctttcctttccaaacatacatgcatacatattatacatgactatacaaaattcatgaaacacaagagggatgatgagaaagtgaggaataatactttataaggaattgaatattttgcataattgaaaataaagatcaaaataatatgtttatactcgtgtataaaataaaatatgcacgagggcaactaaatgtttgaaatcaattttcagttaggaacggatccaactagttagagcttatactaaaaaaataaaatt

SEQ ID NO: 178595 - DNA, 740 bp, Cannabis indica
acaacccaatttaaatatgtaaatcaataacgcattaatattaaaaaaaaaacttaaaacaactaaaaatcacctttataacaactaattgtattttttttttcttaaaaaaaaaccctacatcaaaccaacaacacggcgacaaaaaaaaaaaaaacccgacaacaaaatgtgtcaaaaacaaactaaaaaatatatacaagaacaactatatataaatccaaaattatcataaaaaaaaagacaacagctcaactttaatatgcaaataaattagacataatatattgagtcaacaacctaataaatacaaaaataatttaataaaataaaaacacctacaaaatattgcttataatacaccataaaaatttaacatatattattttaatatatgttgaacaactaacaaacaacttgataacaactctaaatcaactaactaataatttaataacaacaaaatttatttacggtgatacgtttcaaaaaaaaagtacaaatcattaatataaactcattacattttacccggcaaaaaaaaaacctcaattaaattaaaaaggaaaaaaaactaataaatttgagaaaaattaatgataatgagttaaatccaaaaatgacacacagttcaagatatacctaagattatttcaaatatataaataaacttgaaatcaacctaaatacacatttgaaaactaaatatttatccaaaattatataaaaatatattacta

SEQ ID NO: 178596 - DNA, 1025 bp, Cannabis indica
gtatacataggtagcttttacgactttattctcttattgggttccaaccaattaaatgattctcaataatataatataattaattataaattttctgtatttatttacataaatcttattatgtttgtcagctgccatatccaaatcacaataaagcacttatatataaatatataataattaataattaattagttgtagctagctagaccaccaaaaaaaattgtattttttctatatttatatcattattattttatttatattttcactctttttaaattacaaaatcacatgcaaagaagaaaattaataataataataataataagttaaaagttgaagatcaagaagacaaatgtttatgtttattgagcatagatttttacagtcacaagataagacaataatattttttcttggtactactgatcacctatagcacccagtattaattgtcctaatatttttttattaaaggactaattaaaaaagtcttaaataatatatatacacaatattcctatatatagtcaaagccatcacttgccaatgaatgagatatgatcagtagtactaaaccaaaaaaaaaaaaaaaaaaaactaaagaaaaaacagatctttccaaaagatatttgtataattactttcttggaaaggtatttaaccagacaaatcaaacagagacatatttgattaattaatattcaaaataaaatatgtaactttttttttactattatatattcaccgtggattgaggggaccatcacaattcatatatggtggctttgaaataaagtaataatagagattattctgtagtccgtgacccacacattcacacactctcaatcaaatagatcatgcctaattaataattatttcacatggtaaaaaaaaaagaaattatttatatataaaaaaattgatttgaaatgtaataaaaaaaccaaaaaaaaaaatatcagtataatgtttaatactaaccaatatgttctattactattgataatatttttaga

SEQ ID NO: 178597 - DNA, 673 bp, Cannabis indica
taaaaaataacaagcctgagagcaggggataagcttgggggataagttggtaaggcgcgaggccaacaaaaactaagaatttatgaaatagtcctagagcggtagcatttccccggacatgcggtgcggctgactctacactccaaaaccactgtagttacagttgggcatctctttatctcaggaaagacggtgaaagactccagaagcagaaggcttgatcccagctactgtgacaatcttctctagttgatgggcggaagttagagttgagtgcaactcgtccgcctcccagccggtggatcagcaagtgtacttctcctggaccacaggtcccttcatcacctcctccagggtggccatagtgttagatcctttgcttgaggatttcactccggtcgtagggacagacatgccttgagattagtaagattttgaaaaagagaaatccagcagttagcccccaaaccaaaccctaacataaaaggagggaatgggggtcccctaaccgctggaaagaggccctctccgaatgtctgttagaaatgaaaaatctagggattctccaaggcaaacatcgggtgcaaatatcccaaaggcagcgaaagcagaatagaaagaaaaaaaaatgagagagggacataagtataaaaatcgtgtcatgctctcaaca

SEQ ID NO: 178598 - DNA, 641 bp, Cannabis indica
gtaaaccataataattttaatatattacactagaaaaaaaaatcccaaaagatgtattatagcgtagcgttttatttgcattttgattcaaaagaaccggtaactttttattgatagctaaaagtctgatatgttttcttctgtatttgattatgggttttgcatacttttaatctacatttaataaaggatgtttgatgatataaatatatttttaacatattttattaaatgcttactattaaagtgaaaaaaatgtcctggaataatatttattataatttttgtattttattttttttaattattttgtaataaagtaagaaaatttttattattcagcatatattaagtaataatataaaattatttgaataatattttttttggaaataaaatcatcatctttattaattgcaatctatagtgatcacattattaaaatctggagtaacatcactactcctgataacacgatcaacaactaaatatgatcctcgagttaaaaagtgagcaacactatttgcagaacgtctaataaaattgacagaaacaactctcaaatcatttgaataatattttagatatgcttgctattaaaatattttagaataaaaagtacaaaaaataatataaaaaat

SEQ ID NO: 178599 - DNA, 747 bp, Cannabis indica
atggatgaagaacaattagagtacgtcctcacctccatatattttggaaaacggaatctgaaaacaaaattttttcactaaaatcatttctttaagtgagaacttgagttgtggtagaagtagcttagtttgtgaaagaatagactcaaagcttcttttctgctataattggtgggataataataattttaagagaaaaatcatgtcaataaaatgtgcttgaactggagtaaataaaattgttagatcttagccaaaatgtagaaaactaatgtgtttatcagggaggagaaaaaagtggaatcaatggctcgccttatgttatgaagtgattatatgcaatagtttcaaagaataagaaattttattcctagatgctatattagtccaaaacttaagatactcgaaaagatagttgcgccattgtttaaggaattggaatattagggatattaggattcgagcttaagagtgagggggaggacatagtgaccaaccactctgttgtttagtttaatgaatggctcaaactttccttagtgagtatggttctttctccttgatggagggagattcctatatttattggctgaatgaataagaaaaatttcacatttttcatttcttctttttttccctttacacatgatatcaatgctattttcttacaggaactagcacaagccatgatcaagaaaaagacttttcagcgctaggcaatgcatgaagcacgatcagatgaaataa

SEQ ID NO: 178600 - DNA, 727 bp, Cannabis indica
aagtagaaaatttagctccaatggtggtcaaggctagaaatcttacaaagaccaggaaccccgttctgattaggggtgtcagaaagtattgtagatccaaaaatgtaccacaagagaagggcttttgagccattaatgccaaaaaatggtgtctggaaggcccctaaggtttatccagcaaaggacatcaaaaagtctcttgttaacaagcactagcctaagtcaaccaagcttagagcgagtatcactccagggacagtgttgatcattttgtctggaatgttcaaggggaagagagttgagctttcctctgggttgctcttggtcactggaccacccaagctcaatggagttcccatcaaacgtgtgaatcaatcttatgtgatcggaacttccaccaaggtcgatgcttctggtgtcaatttggagaagtttgatgacaaatattttgcccaaggaaaaaacaagtctaagggtgcatttattgtttttaagatccaaactttgaatctatatattgaattattttagacggtttggtttttcacatctaaatgtattttttaatatttttaagtatataatattaagacatttattaaattatattttattttaaaagattatttaaatattcaaatacaaaacataattaatattttaatttaaatattcgaaagtggagttacttttataccatttgtttcatttactcaatatgttagtg

SEQ ID NO: 178601 - DNA, 627 bp, Cannabis indica
atgaattttatattgatgtaatacatactcaaaatatttatatataccacgtatttttttttgttttagaaaaaaaaaaaattggtatttaaattttttagggaaataattttgggatgtttattagggtaaacttatttaagtttttaaatacatactatatttttgtatatacaaaaaaaaaaaattatattatatgtatatatttatctgatataatgaaatatttgtttttgaggaactttggactaagcattattagggaaaatttgctagagttcttgattaaagccaccacaaacagttagtattttttattgttatatttgtttattatatgttaatttgttttaatgtgtaaataaatgtaatttgtataatttattaatcttttgtatatataattaaattgtttagtgtaatttttgaaaaaacagatttaatatagtttaaaataaataaattttatgtaatgttttttaagtgttactaattgtttaatttcttttagttatatgtaagttttatatatgtggagataatgtgaatttataatgtatttgaacattgttggagtgtttaggacaaatttaaaagtttttagataggctgaaatgtagttgttat

SEQ ID NO: 178602 - DNA, 1192 bp, Cannabis indica
gttcttaggttgttagagtggtctttcggctactctaatcaacctaggactcacaatgctacttcaaaatagcaccgattattattttattattttttctatatagggtgctatatcttactcgacactcgagagggtttgctaatattggatatgatcgcgaagaacatatataggtaaactcatatgatcttcaagtcgggattttgggtttgtcttggattctcatatcattttttgattgtgtaattttgtatttttgttaattttagtcaataggccctgttgttaggctcaatttctgttgttggattagtttttgtattttttttcttgatgaatatgaaagagagataataactagttggttttttaggtacactttctcatcatatttagattatttttaataagtatatttattcaattttttaatatttaaaattaattaaaatttaattttaagaataaccatactattgtgccccttaatctatttaacttgttaaaaatagtctttctataattttttatgcttacatttaatttgtctatacatttggtttgaaagaattgatattgatgatgtggtagctagtcaaaggataaagtagtaattttacttcttttaagaggaaaaattgattatgagatgacataagtgatgataaaaggaaaatagagttctcatttattatattacaaaataaaaaacataattaagaaatgattttaacaaaaaatatttcataaactctttgaaaaaaaaaacgatttaataaaaataattttattaaaatgatctcgaccattttttcttgtcagttcaaaatagaaggtctatgttctaaagaaaataattatacaataaaattttcttcttatttggtcagttcaaaattatggtgttgttaataattgtgttgacagaaatttatttttttaaaagtcaagaaaagttaaatttattcaatcttgttttagattcttattatttttcttttttattctattattttgtaagattttttatttaccatttataaacatgtttttattcttttttttcttaagggtatataaattttcaacttaccatctatatatgtataatgccacatcatcgatttaatagtcaaattgaaatagaactagatagaagatctgtttctccaactgatatatgttactt

SEQ ID NO: 178603 - DNA, 617 bp, Cannabis indica
cagccaccaatcataataaaataaaataaactaaaataagataaaataaaacacacaccacccaaaagaccaaacaccccttttaaacccttacataaaaaaaccctagggacattaataataaccaataataatcaacttttttttttttgtgattttattctaaaatcttgtgtaaatggaacaaaaattgtaaatagtgaacaaaaatgtagcactcattttttatgctaaatttaacacaaactatcattaagccaaatttaaaataaatatattttaattacaaccattaatcattagcaactaactttagtacatatgtttaaggctaattaagatttttactccttgaactttgatatgccaaattatgcccctgaactattgaaattgttagatttaaagatttttgtctaattttagtaaaaaaaaatctaacatggttgaaagttcagaaggcatgatttagtatatgtcaaagttcgagaagtatagtttggttgaaatcaaagtttagagaacataatttagtatataaacaatcactggaatagtaaaattgaaataaattaaacaaaaatctttatatctaacaatctaaatagttcaaggat

SEQ ID NO: 178604 - DNA, 882 bp, Cannabis indica
cgtgtttagtttcgaaacagtttcttgagagaatccgggaaactcctcctctgaagcctgaccagattgttgttgttgatcagaatcgccacctataacacaacgatcggaatattcatgattgttgttgttgttgaacgaagattgtttcgaagtcttatcctgggatttaggatccgaggaggaggaggatgatgatgaatctttattgtcgtttttcgaatcctcaagaagagcacgaaactcttcttccaaaaacgacattgctctctgaagaacagagcttgctctgttcacactagcattgaaaacagggtatttccccaactcgttcgaaagtttggatactcgtctcaacgcatccgaaaacgacgtgtcgttttctgggtctctaccgaatttgatgagactgttctgtccttcgttatatttatcgatcatggactccgtcattttacagagtagctccaccgagtttggagcttctcccggcacatctgaatcattcaaactctgaaagaatcatcaacgtcttccagaatctgattgtggttcatatgggaatcggaattggcagctcgattttcctcggcattattacaaacattgtccttctcctccgtcttattttctccggcgagctgagattcagattcagatttaggatcaggattttcatggccgtgtttaggagttcccacattcccatcttttgaattacttgtggatttttccatgatcacgtatgtcttttttccttttcaatgatcaatgaatctcaacctcaatctcaatctcttactctaatcttcaaaacaaggaaaatggattggttttcgaagaaaaggaacgatgatggatcgagagaacagtcatggaccg

SEQ ID NO: 178605 - DNA, 801 bp, Cannabis indica
tcttggtgtcaaagacacacatagctccagactatattctttctgactgtaaatctttggtggattatatttgtaaggctgctacacattatttacttctgaataggtttgcaacaaatattagaagcttgttgtcttctctccctaatgctactttcaggcacatcccaagaccagaaaaatgaggatggtcattgccttgcaaagtttgcattaggcttagatcaggaagcttgttggaaagctcacaatttcactctgtaatctgtatcctgtacactatggtttattttgaaatggatacatcattcttattaaaaaaaaaaaagcggatttaatatgagatgaaccctctctatgattatcccatgttaaattgtcaccttcaatgggcaagtcaatcaaatcatgggagttaatcatctcagaaataaagagtaaaaattggtcctttctttttgacccgacatgtttcgaagaattcagaacaaaataaatatctccaagaatcttccaagagccaccaaactttacaccaagatttaaaatatttgaccaaaacttttctttttataaaaataaggcagaccatacacacaagccgaaaatcaaggataattagcggtcagactatacaaaaccaaaaatatgaattttggataaactaatattctaaaaataaatccaaatttctaagctaacaaaataccctcacattaattatcttaagttaagcttgtttatactttatagtttcaaataggtacgtgaataccagtcacaacaactaaataatacatt

SEQ ID NO: 178606 - DNA, 806 bp, Cannabis indica
ttgtattcccgagagtaaggatcgtctccaaaaggatgtctaccgttggtgataatgaaaaataaaatgcacccgaaactaaacatatttcctttgattgtttccgcagcatcatttgctttccaaccaaatttattacaatctaacataatagataattatagtttctcagttagtacaatgaatatacatatataaactttattataaagtgattaaataaatattacaacaaattaattacctgatgaagaatattcacttgttttagtcatacaagtatttttggccaattctgctctaagaataccattcacttcttttcgaaccaaaatatttgatggagtaagattcaaataaacttttcccaagttgtgaaaatcaataagttcctcaattatatccctataaatgtaaatatataaatatgttaataataaatatttttctttttaataaatttaatcacaacaaatacaatacatattaatttatttaattacaaaaattaagagtattgccactcacttttttcttcataattaattaactattctaattatattttgttgcaaacttacactatattctaactaattatttaacaattaattatatttttttcattacacagttctaacaccaaataaataacaatgtataaaataaattattaattttttaataatattttattttcattttttatccaaagacaaagtcaaacatattgtatagtaataagtaataacaaaaatagacaaaaattgatattaagtatattagctgctgaaaaaaatatataa

SEQ ID NO: 178607 - DNA, 851 bp, Cannabis indica
cgagtcaataatattaaacattgtaataatggtgttttaacaacttttctctcaagagtatctatttaaattttgagtcttagagttagaaccttttacattatggtaagaccctattttataaactgtcatgcattatgaatcggacaaatcgaaacctgattagggtttgtagccgatcatggtactgttgaccgtgacgggacatgagtcgtagtttggtgcatggaaaaaggttgtgtcgtagtagaagtgtaatctcaaaggagaatacacatttttgcaagttggtagagatgacaaatctctaaatttctcataatatactttctttttctaaggtaaaagtgttttaggatgtaacacaagaacttctgaaaaagtcacacatcttaatactactctcgcagcctgaaattaggtacattagtgttgcccaattttgataaagactttgatagaagagattctcaataaattggtatttaagaaaccttaaattgtgatccaaccattcaaatagagttgaaaatattaagaaaacaatatatattcctcctttttttggttacaactattgttttagttatatgtgatatttcccatttttcgtagaggtgttatgttattcattaaatatagaaaaaattatcaccaacttaattgcaaagtatgtatacaatctcaaaatatatataattaagaaaagactaaatattattttacctaatttaaattaaataggatctcaatgatatttggcatcatgaggaaaaaggtggaaatgaaaatttaagagaaatcatataaaataaaaaaaaaaaaaacaatagaccaactaagaacctttg

SEQ ID NO: 178608 - DNA, 650 bp, Cannabis indica
atgcaattctctaggcccaacgtcgctttccacagcttccgaacacaatcacagaaattaggtaattaaatataaaatagcataaaaacatatataatatataaaatatatttctaaaatatgcattccataattattaatacataatccttaaataattaataatacaaagtattattcataggcggtctttacataaatacaaaaaatatgggttattattttaagaagaaaaaaatattaatgctatagggtaaatatggtaggattgatttttactaacaatacacaaagttctacaataaatcacatttacattaggtatgcacattttctttgtcggaattgaccttgtgaatatttgtccttaatagggtgggaatttttcgtctaattaagaaataggacatggatttcatatttacatttgccaattatcacatcagcgatacgtgtataatttaacattaaaaaaaaaaaattagatatttttttaaaaaaatacattaaactaaagatcatttaatgattaaaaaatacgtaaaattaattaaaaaataaattaccttttcaaattaattacatatatgctgttgacatgacatgataattaattgggtaagcagacatgtcatcattttatttgtcac

SEQ ID NO: 178609 - DNA, 509 bp, Cannabis indica
attttttatctacaacttttagagagacttcaattatataatttagagattgaatttttaattttttttttttatttcacacacatttaagttgtgttttctttagtatttgagcatgaatttttagtttatttttggattatcttaagaacatattatacttaaattatcaagttttcttaaacactataatatattacatccagtatttacttttaattgtcaaaattataaattacattatttagatatacataataataatctcacctaataagtaataatattttttctttaattgttaattatatcttttaaataaagtaaaaaatacctaacataaaattagtatacgtgcctcgcacgaactttttactagtatatatatatgtatatatataaatgagaaatatgagacggtgatatgttaccttaaaatcggcactatatattcccttattaattctctcattttttattttttttatttagtatttataaatattaat

SEQ ID NO: 178610 - DNA, 599 bp, Cannabis indica
gtagagccggttaagtgactaaccaacttaactaaataaactaatagaaaaggaaagatccaacaaaacttaccaacttgtcctaacaaaatgaaaaacagttaagaactataactactctgatagtctactagtagacaataatacactataacgtgttacaccctcaagatggacggtataggtcatagacagacatgttatttatatgtgtagttagaactgtggagatcatcagtttggtgaaagcatctgctaactggaggttgctaggaacggggatcaatcgtatggccgagttgttaattttgtcacgaaaaagtggcaatctaattcgatatgtttggttctttcatgaaaggttagattgttggcgatatgaatagctgattggttatcacagtatataaaagcttggtttgtttgagggattctaaggtcagtgagtaggtattgagccaagttatctcactggtagttgcagcaagcgctctatattctgcttctactgaactacgggagcaataggttgtttcttagttttgtaagaactaagcagtctctaatgaagatgcagaatcttgtagttgagtcatcta

SEQ ID NO: 178611 - DNA, 569 bp, Cannabis indica
aaaagacaaggagtgtgtgattaaaatagagtttaactttttcttgatatatattatatggcatatttttatatttatgatgatgagttttaagtcttttgtgtccttcaaggacttaaaaagctatccccatctttgaccatagcagtgactactcacttcatgggttacatctctctccctctctctctcatgaaatcaaacatgtattattatgctatgcttatccccatttaatattttgaggtacttcttgtgtgttgaaacttgaaagttgtggggctgtgaagtaaatactatatagtactatacaagtgcatttatattctttatttaatattttgaggtacttcttgtgtatggaaggttgtggagagtggagtagagtatactattgcatactttaaatatttaagggctcgtttgtaacgccgtattaggtcgtattgtattgtattgtattatattgaattgtattttatgcaatattttatgtaaaactatatgtggtattaacttttatggtacacctaaatatataatattttattataaattaaattttaaca

SEQ ID NO: 178612 - DNA, 935 bp, Cannabis indica
atatttaatgtaaaaaaaaaaatttaaagattatattccatattaggaaagtttgaaattgactccaaataaattagatactaaaaaatctcaatacagatttttacttttttttaaaatactaataagaactaattaaatataaaattttaaggaaatcaaaatatcttattaaagttagttagggtttcttttcaaaagaaaaaaagatcaattttaaatttaaaagcttacattttttttcgcattgactatattttatctgtatatatatgtattttcctcatcgtaagagtaagaaaatttcattataaataagtgagaaactttttcattaaacaagttaaattctagaaagaaataaaataaaataaacaagttaaatctcgaagtaataaacgatggaaaattcagtttttgataaagacttggaaaagaaatcagtttttgattttgatgaagaagtagaaaagagtgtaaaccctaatgcacctaaatggattaggggtccactccttgcaaaaggaggatttggttcggttttcttagccgaaatgattgaaacaacacatgttctaagggggcgtgcacgctttcatcaacctatggttgtcaaaactacgttattttctaagggtgaactcgttaatgagaagaagattctagatcttttcgtaaattgtccttttattattcagtgttatggagatgacacaacaattagcattcttgattgtggtaatggcattgataaagaagttacattgtataatgtgttcttggagtacgcttcgggtggaacattgtttgatttcattaaggattctccgctttacaatgagtccaaacaaatcaaacaattcttacaagagattttaataggtgttaagtgtattcacgaaaaaggaattgttcactgtgatctaaaattagag

SEQ ID NO: 178613 - DNA, 879 bp, Cannabis indica
atttttaaaactgtaatcatgatctagaaactggttttccatatgagatttattttgaaacctcaaacctcaaaaccacccatacacatcaaaaaccagtttctataaattaaacaaagattataactgctcaaacacaacaataatttcttcatgcaaaataaaatccctacaagtttataactaatacaatattttcaacagaaactacatagcttttcagattacacaataaactcacaatttattacaacacattgactctaaaacccgaaattactaaaatcatcataaaaatcatacccaaaaaccagtttttaaaaaatgaaagaaaatttatcactaaaaccaacaaaaatcatacccaaaaaccaacaatttttttttaaaaaaaacacaacaacaacaacaccgaatatcaacaaaaattaaaaaaattaaactaaacaaccaaattctaaagcataaaacaaaacccaaaacacaaaatactcaaataatccaatatgaataaatacaacaacacactaatcacttcgaatgaaacattttttaaaaaagaagaacaacaacacactagtaatcttaaaacagaaataaaaaaaaatagcaataaaagagaaaaccccaactattacccagatatataaacagataaaaataaaaattaaaaaaaaactcaaaaacaatagtagataaaatacgaaaataccttcacagacataggcgacttcacaaactcagttttccacaacagttcgaggccgttttcctcgagggttcttcgaagttccagcagcttgttttcttttaggagtcaataggagaagtagggctaggtgggttatctttgagatttttcttacccatttttggttt

SEQ ID NO: 178614 - DNA, 577 bp, Cannabis indica
tgataacatgactatgactgtttaatcaattgtctcatcaataatatgttaatgttacgtgtataattaattaaaaaataatttattttttaattattttatgtaatttattaattattaaattaatttttaatttaataattttttaaaaaatacataatttttgttttcaattttaaattatatacacgatgctaatgtaacaaaagactaaattattatattattattttatttactacatgtaataaaatttgactaaaaaaaattaatttatgatgtcatgaataatttagaaactatttataaggtgctaaaagattttaagatacaacaatacataactcatagtagttgccaaatatatatatatatatataaaagattaaaatatattaattattattttactggtccacgtatagttgttttcattgctgccactccgataaaatccgttttgttcaacctgttctatagataagagtacggacttattcattcttattcactagcacaattattcattcaataatattaattctctttctctcacaactcctctttttttttattc

SEQ ID NO: 178615 - DNA, 474 bp, Cannabis indica
ctagttttactttttactaatttattaattagtaaatacaaatttaaaaacaaaaaaataacactttcaaaatttttaaacagttttttttcttaatcaatcctttggattacaaccagacccggacccaaatcccctcctcacggccttggcgctgaacccgacttctaacccgaacccgaatccaaccccggatcttgacccgacttaaataaaatcaaaaaaaaataaaaatgaactttacagaacacacttttgttttctgtttttaaaattgaaaaacaaaagtggttacagaacgcatttttgttttttaaaaataatttttttaaaaacaaaaattttactttcattttgtgattaaaaaattaaaaaataaaagtgttaccaaacggcaccaaaataaatggaaaaaatttaattgggctttcacaattgtgataggggtcacaatgtggatttcttgaagcaatt

SEQ ID NO: 178616 - DNA, 647 bp, Cannabis indica
ataattaaatttgaagtcgtgttgattggtggagttacacgaccccccaaacaaagtacttagtattgaaggaagatagtaacaatcaaagacatacttagaacacttataaattcatcttccttcactcaaagcaagtataaaatagcggaaggatacaggtattgctttgtccgcttcgagttaattggagtaaaaaagtgtggagaagattaaatactctgaagtatagctttatattttggcttacaattcaagatagattgaagactaaggaaagattgtttcgattttcaacattatctctacacttgctgtcagttttactatatgggatgaaacatttatcatttatttttaagtgctccttctcctatgattgtctatagcaggtaaaacagtgcctgctatgagaacatcctctagtcacctagctgatctggtttgacagattggaaggaaaaaaataacacactttaggaagaagtatttttagcagttatttactgcattggtgtatcagctatggatggctaagaaatgaaagttaattttctccattctcatgataattcaaagaatattgtacagaaagttaagattgcatgtaaggattaatgaattcatttcttaaaaaaaaaataaaa

SEQ ID NO: 178617 - DNA, 549 bp, Cannabis indica
atcttcgtcgcagccagtccaaacagccgctgccttcctgctttccggagaatcctgcaccttggggctccgtcgacaacgaagagagggactctggtggtggcgattcggattgttgaggagtatttctttctcctgaattaattaccttagtttaactgtgatgtgttagttaagtgtgctactgtttgtgtttgttatgtgtttactgtggttgttcaatttagtagtgtgtgtagtaagctttgaatgtgttgatcatttcttttgtcatgtgtgttataatttgtgttagcttgcaaatgagaaacatattgcttgtattttcagcttggtttagggtagcgctcgatgatgaaacatatccattttcctccatttgtggagtgccttggtttgtgtgttgaaaatgctaattttaagtgttatttttgtctaaatgctagcttatgaggaatcctttcaaatattgtgtgcttgtgttatcccaccataccttgagtttttagaatagctaacactttgagagagtttaagcgtctagaatta

SEQ ID NO: 178618 - DNA, 551 bp, Cannabis indica
cctgcaaggtctgaggacccgactgagagttcattgcagccacacttctatattcggggaccacctctgtgactggggaccacctgacaccaagcaaaggtatgagaagcaaggccacctctgcgacgtgtagcctgaaagcgacgcattgtcatcttgagaccacgttgtacttcaggccattagagcctataaattatttttcagatgtgagagggggttgaaaaattattcttgtaacttgacctcgagagagcaattaatatcattttctctccattttgagatagcattttgatttcatatttcattttttttttcgtcttagatttgagcttgaagcatagtttgattttccgatcaaaaagttagttaacgagttctcaccgtcaacaaaaaaaaaaaaaaacagagatgagcaactaacttaaaaaaaaacaaaaaaaaaagaagagaaaaaaactactttgaaactttaataatttaaaacaataaaaagaaaaaaaataaagtaataaaaaataataaatagtaaaaattttacttaattc

SEQ ID NO: 178619 - DNA, 522 bp, Cannabis indica
ccagatacggacatgaatgccagactattatatttttggcactcaataaggaaagagataactttagcaagtaagatgggctagatagttagccattctcttataataaacacaacataaatatcaatggaaattcttagattggagagctatatctctaaaactactccaaaggtagagtgcttcacgtcgttattgttaatggcttcacacattctttggcaatccatttccataatcacaaaaatatcccaaatgcgtacatagaagaaaacactaccagtactacactatcaatacttgcagcaatgaggtttaggggacagaccaagggatagctgatgagccaccatcacacttgcatcatctcctaaaaccactttgatctttcttttcagtgagttaaatcgtgtcctacatcaatgttgactttgattctaccaacctgaggtgaatgccaatgacaatcagcttcaatgctctcctcttttgtccttttttctttttgtgatgagtgatatt

SEQ ID NO: 178620 - DNA, 642 bp, Cannabis indica
cgtggcaatggagtccatactcggtcgaatcgagaagttgaaaacattctctgaactcgaatactttctcagttcttggagaaattcgagatcgcaaatgctaatgatttggcgaatccttactttctttcaaatggcgataatccaggtgctgtgcttgtccctaaaattctcaaaggcagtgagaattcagcacctggagacgatctatgctgattgctttggttgctaggaacaaagtaaaattcgtcaatggaagattaccacagcctgatgaagatgacgatgactacgatagctggtgtcgatgtaatagcaccgtgatctcatggattttgcacgctatttctgatgaaattgcagacagtatcatgataatgcagcagaaatctgggctgagttgcatgaacgattcaatgaaagaaacgcacctcggatctttgaagcaaagaagatgatgcaaagtctagttcaaggatctaattctgtcacaacatactatactcgagtgaaatctctttgggatcagataagagaacttcgcccaccacctgtttgttcctgtggcgcagtgaaagtgatacaagagtatcaagaagaggatagattgtttgagtttttggttggatttaaatgattcct

SEQ ID NO: 178621 - DNA, 538 bp, Cannabis indica
gttcatggttgatgatgatcatacatgtatatatttacaaccaaaatgtcatcactacccttcttacataaagctttctacaaaagcccaccaccccaaaaaaaccagaagattcaaaaagatacaaactttcttcttttcactcttctgtgactatcacagcatccttctcttcaaacttaactgccaccaaaaaccttatagaaacctatcaacacacaaaatagaggaaccataatcacaatcactaatcacaaacttattagaaaaagatcaaacctttaatatttgatttcctcatttacctgttttgggtcataaactgcatattcattatactcaagtgaactatcttcatgctctgaagggattaaactcccacaagggactttgatatctcctcccaagtcaagtgctctgattcatctgttttctttctacctaaacctttcacaccaactttcttctcttccaaagactttgtatcctgtttttgtcaataatttctcaaatgctgaaatgttcaataagaaaagag

SEQ ID NO: 178622 - DNA, 683 bp, Cannabis indica
attactaaactaaaattatttcaatcaatatcagattttttaattaaataattaataaatatataggtaactaatttattctatgattttaattctctggaactcaccttcaaaaaaaaaatctctggaactcatacaagattatacacctacataaatgaatatgaaattttataataaattatttaattaattaataatttaataatcaacatatttaaattgttcactttatttaatgtttaaaatgtctattacaacccatttcaaaaacaaattgtctattactcataattaacccagcccttacacttgttccatagacctaatgcagtttccacatttgaattatctcaaaattttatcacctatactcaataggatgacactctgggcctttatacttgaatgtttttctatttgtgtttgacatcaatagtcttgctcaaagtttgtttcatcaatatgcaagccattgatattaaccaacaattctttacattttaattctccaaaggtaaactatcattttgtccaattgaactagtcaactttaaactagatcgagggcattaatagattgagttcttgatccaaagacaccacgactctgatgccacttgtgttgtgtacacaacctgcactaatcaatacaaacaaccaaaaagagtaaacaaagaatg

SEQ ID NO: 178623 - DNA, 665 bp, Cannabis indica
gaaaaatacatgtaaacataaataacttctaatcttctattggtaacatacaagaatatattgaaatggattttatttagggtataaaattccaacaagaacgtctaaaacagacacccgagtgaaaagttatggccataatacgaatttcaatcctcccataaataccaaaaacggtagactattttttcctactccaaaaacggtctaccatttttcacaggaacgggaaatatcttgttttaacttctcaaaaccccaccaaaatctaaccagataattgttgaatttcatagaacgatcatacattatccatacaacattctctacgtaacaaaaatcaaaaccatgactctcaaatcaaaaatctgctaatgagagaccaagctttgagcttaaaagctcaaaacttgaactcttatctcaaaatagttacaaaatcataacaagagcattataaccaaatccaaaataccccaataacaataccaaatgctcacttaaacccttaaaatcacagaaccaaaagtcaacctttagaacctaagttttcatgaaagaaagaaccaaatcttaactttagcctttaccccagcctggctactcctaacttccactaccatggatcaagagctaaaaagagtggaagaaatcaaaagaaaaac

SEQ ID NO: 178624 - DNA, 410 bp, Cannabis indica
tcaattggttggagagcttccaaaatgttttttcgaaactccaagacttacgatttctcattttgtcaaacaataagttatcaggaaaaattcctagttttgttggcaacttgttttggattacatcattacatctgaataacaacaattttattggaaatttgccttcatccatgaaaaattgtagagacttgtttcttcttgatgtgggaagaaataatctagtggggccaataccattgtggataggagaaagtcttctaaaaccttaagattctcagcttgagatccaatcattttaatgaaaccatcccccaaaatctctgtcatttgttaaccttcaagtcttggacttttctctaaataacctctctggaagtatattgtcactgtattggtaattttttcat

SEQ ID NO: 178625 - DNA, 511 bp, Cannabis indica
ctctaaaatatttctattacgatatagtattaatgatttatttattgttattattattacatttgattattttttggtttttaattttttttttcagtgtaactctatttagttataacctcccaattagaatataatttacttggtcccaagtgtattcttggatagaggttctactgtatatatatttgtctttcttccattctctttaaagttgtagaaaatggtgagtcaattgtgtgtatcattcatataaatggcatatatttatacaaagtaggagaaactaaaagaggaaagaatcagagaaaatagaaaaagaaataattacaattgaccctattttctagctaatttacagttaatattctaacaaaagtgaatcatgttgcttaagggagatggatgtttgtttagtccttttttcatttgagaacaaaaagatcatatttttgaaagaaaaaaagtttttctcatgaaataagatctgattagtatactaatttgttta

SEQ ID NO: 178626 - DNA, 895 bp, Cannabis indica
ggatttttattttatttatttatatttatttttagaaaaattactacatatattaattttaagaaattttatttacaccccaaaaatttctaaagacaccttattttaataatttttattttatttaaaattaatatctttaattatactaaattcttttaacttttttcttccaattcatataaacctattaaacaaaattaaattatattttaaatattatggcaaaaaaattaaaataaaaaattatatgaaattttcttcgaaaaaaataaaaaaaaataatacatgaggtaaaaaatataataaaaataaaattaaaataagtattgaaattaacataaaataatgtgaagaaaaaaattttaaaaaatattaagaatacttttaaaaattatttaaatttatatattatttttaataatggggtgtatttataagtttatggggtgcaattagaactccccattaattttttaatttttttttaaatttacagtttgtgttattatgtaaattttagttgcgatttaaattgctacgttataataaaagtttaaatttctataaaatacaaaaaaaatatttaaagtgtaaaatagaaaataaattttattaaccaacatgatcagttccaaacaatgtaacaatttagtaagaacagattccatactaaaatgacaactagaaaataacatgaaagctcttgcaaagttatcagctaccacattaactgatcgtttaataaaaaaaaatagagacattctttaactctaaaaagagttgtttacatttagcaatgatttgtccaagcagagaaatcattcgaattgagcttcggagggcttgaactaccgtcaggcaatcgatttcgatgatcacacgctgccagtta

SEQ ID NO: 178627 - DNA, 581 bp, Cannabis indica
tttgtgtcaattttattttctttctttgagtcaatgaattgacctttataacacccactaaaattatcatacttagagggctttgaaatttttagcttaattaattaaaccaattgaatgaggccaagaaataaaacattcctttaattgtgattataaatgtgtccaaaccaatagttttatgacattatttttctttgtttttgcttagtgaggggcattataataatttccacttagaattggagggttaatcgaatttactgtattgtcttataattaattaaatatataaagagtttttacactcacatcaaatttctaatttttttacttttttattacaataatttttttttcaaaaatactgtgtaaattttgtactgtgaattatgttaaattttcacgattattttttagttatttcaactgttgttttaattgttttattttattgttttacggttgtttcataaaaagacggtatttttgtaaaaaaattcgtgtaacaataaaattataaatttttaccgaaaatccaatattttataaaaagcgctatataaaaatccactcttaga

SEQ ID NO: 178628 - DNA, 757 bp, Cannabis indica
acatggcaaaggagggaatggcctgtatgactgctttgattagtgtttcttttcctgcccttgagaaaaatttatcataccagatattcatcttagaagatacattttgattaatgaccttgtaagttgtacatgcagaagattttgtaagaaaacttactgatgggtactatttgtaggcaactgatcacccttaaaaaaaaatgagtgatttagtcattatttttaaagctgaggagaaacagagtatatgggatgtcgattgacaaataaaagtaactgattcaattcaatttatacatatttatatatactaggcagttaaaatacaatgtatgtttggatatgaggtggtaattacaaatgaatttctaatatcttgtttgacaaaacagttagtaattacacaagaaaatagtattttttagtagttaatgtttaaaatagaacatttttagtaatgacacagcataattatactcaattcttatagggccatgaaaattaaagagtgtaatttaaaccctcaattacacaattgcagtgtaattatatagtcatacaaacttgaaaaattaatgtaattacctccaattatacatattttagtagtaaattagtcaacataaataacataagtttaactctcggttacaataaatacttaagttaattttggtaagataataataatctaagttatagttctgaaacttctgtaggtatctggctgctaattgttaagtaaattaccaag

SEQ ID NO: 178629 - DNA, 661 bp, Cannabis indica
cacagttttgagagccgacacaaataggagccagagggtaaattcgtggttttaggtgattgatagatcatttatcacgtgaaagaagctttgaggagcaagtatgtagtgggtcaaaagggccttttgcatgaagtcgtgggtgtgcggtagggccggagggccaatcttgagtacttcgcgaagtgattatgtgaaagtgagcacttggtgctgcattggatgaagttggattgcaagcctcgtctagaagggatgcattaattttatccttcgataagtgtcttgctcaattgccaccaggaggatggtgcgccaaagagttggcatgtgaagtttccagggggacttgtccagagggactaagcttcagtggaagcgtgttctgtaggtgccgttgggtacgattagcttgtgaacctcacccctaggtgtgcaccatacttagtccttgtcaaatggagtatgcatttggtgggtgagctactattagaggatgtgttagcttcagagtcagtgttgcaagggctacttgattgactagaggggcattgtgatgaactcagaggagttcatgttagggtaagtattctttagagacactactccatgggtgattctaaatagcgacagtggcataagttcttaatcaagtccaaag

SEQ ID NO: 178630 - DNA, 646 bp, Cannabis indica
tggccgaaagagagagagagagcaattctctcgaattttctaagtttctaattttttttaacaaatgagcaaaaatgacatatatcttacctttatttcaagctaacatatattaaataaatcaaataattacataacattaagtccacaaaaggacaaaagcttatggggcaaaatgactattttgcctctcccacactaaaaggattaaaggggcacttgagggtatttttgggaaattttaaattcccgaccaatcccgatattctcaatgtctaaatgaaccgtcccactatactaaaatactaaattgtgattctactgagccatacaccgcgatccatgttgccgggcaccgaaaatacaaaattatgaaattccactatatgacataaaaatgcatcttgaattcaaataagtcaacataaataattatttaaatagcaataaataattttcataattaaaccctatttatctgctaattttcgaatttaaactaagcggtctttacaggaaaatttacatagattactaacttttctcaatttattacatttatactgtcaggcggtatttttatcttttttactgtgtatgttttttttatacgacagtttagacttttttttttttttttttgttt

SEQ ID NO: 178631 - DNA, 806 bp, Cannabis indica
aaaattattaaaaaaaaaatagtctcatctcaatgtcacatctataaatagtttagaaaattaaataatttttcttttttaattttacatataatttaacacttcacggctagtacttataaaagtttcaaaaatataaattaattattgttactgttaaaaattaaacttaagtatttatcaacaaccgaaaattaaaattacaatttttaatgccataaattactcaaaaaaaaaagaattagtaaactccactctatatttttcttctaattcattccactttccttcactttctactctaattttctcacaccacttttcttctcaaccaaacaaattgtaaaacccaaaacttttcaagaaaagaataagtggaattcatgtaaaagtttagggaaaaaacattcatatattcacaactacaaacttctatcaatacataggaaaacaaaaaaagaacagaagaaagagaaaacaaaccaaatacatcccccaagccaagccccacattttacaacacctgtggtaaattttctgggaaaaaaaaacttatctttcttccataatcactatacttctttcattctattggtgtattacaaaatattttagcacaccagtgagtgaagtaaggtttgtaaactatctcgacttttcgaaacaatgatcgctctgataaagtgtgaggttcgtagacttatctcgattgtttgtagcagctataagcaacagcaaccgataaagcagcacaagcaactgctaaagccgcgtatgtatcttcacgctcccaactctccaaccat

SEQ ID NO: 178632 - DNA, 547 bp, Cannabis indica
acacagggtccaattagtaatttttgtaaaacagattgtccaaaatagtatttacccttattttaacaatcaaatatttcctttaggttttaactgaaataaatattcatatactaaaataataataataataattaaattttttcgttcaataaatgccccctcaagcaagtgcgtgtcatttatgtaaacgtgtcttgcttaagatttttttttttatatattcctttgtttgacatactgattgagttttttttttttggtagcatgtctacgtttggggctctatgctctcaaagagctcttgatgaatttgggaaagaagtcaatattgggtcgcgttatcatcgctctatgtcattaacagaggttcaagcatctaataaccaccaagatcatatttctctttttaatatcgaggatgccagttcaggagacttaagataccattcttctgatgatgataacgttgttcactatgttagaggttatggtgccatttttcgagcaaatctcttaggatatgttgatagtaaagatgatgggg

SEQ ID NO: 178633 - DNA, 856 bp, Cannabis indica
gataaatcttgatcctcatcatcatacaccagtcttcccacttgaaatatcatctgtcataatatttctgtcaccttcttccatattgagagagctcgacaacccaccgaatcgaacaacaagcacactcacacatggacaagaaataggaacaactcaaatcatgtcaaaagacaagacttatataatgttaaactttgctaaaaaaattaaattaattaaataaatattaattatatatatttttttggcattctaattatatcaataaacatcaatcaaaatagacatatttatggtaaaaatttatatttctatggcacaaaattataagtttatgatatgtatatggcatgttttgttttttgaattacttaatgtaattttacactccttttatgtaagggcatttttcaattttaaccaaaaaaaaagtaacaatattacaaaaatacttccagctagccaaataaacaaacatacaacccaaataaaaaaattacacaaataccactcacacacaccttcaacccaggatccatgcttcttgggcaactatcgtgcaactacgccgcaacccaacgcaacagaaacgaaaattcaatcagaaagagaaccaccattaattccggcgacttcacctgagaaaatgaccagaatcaatcaaaacaggggctgcttcgaattcataaaaaagtgtaaaaaaaactactacaaaactgaaattcaactggaaatccagtttaatttacataaaataatatcctgacttcaatttttagatccatgaaaggcagatctcaaaaagttgaactggagttcccaaacaatccaactcaagtataatctaaaaaaa

SEQ ID NO: 178634 - DNA, 538 bp, Cannabis indica
tataggatgctactataatgcatacagtatagacaataaatgttacactcacacaattaagactgtatttcttgacatgattactaaattaaatcaccttcaatttatacatcactattcattacatgagcgatgtgtgttacactaacacttataatatcgctaaaaccttactttcttggtagattaccttgatcattggcggatttcaatctataccaattaatcataaccaacatatatatgaataatttttttttaataaatcgaaatatgcatattgcatcacaaaactattacaatctttacaaagaatcaataaaagttacttacaaagctttatataaaagcttccacccaacccttatcttcctattcaagtttcgaatgttatggatatgcaatctattacaagtcaacactcaaaatttttctaaaagctacctaaacaataggaagacacttctcccattgcaccttgtttttgacctaaaaatggttcattattgattcaaaaaacctagccaaatttttttag

SEQ ID NO: 178635 - DNA, 707 bp, Cannabis indica
aaaatatatgaaattttattttccagccaaaatagatagagagtttactaaaagaggttgtactgcaaacttaaccaataatatatacattaaacaattgtactgcaatatatacttaagtaataatttaattatatttttaatatacactatattcattagtgaaaacttgtatataataagtaagttttttcattcattttttttttatgagaattgaatgtagtagttacaaattatttatttatattatttataaagatttaataaatatatagaaaattcttgttattatttttgctattataaataatttttttttttataatagtgtgcgttatagttatacaagacatcttatttaatattcgtgcatattttatttaatcacagtataactgactattttgaattttaaaattttatttttaatatcgtaaattatttaaaaaaaaatttcaaaaactatatataaagatataatttcttaaaatacataaaataagaaacactcttaaatattgatagcttcttaaatattgatatttatagtatttttttttagttaacatcaatagataatacttattaaaaaatagtttgtatgtattatataattaaaagttttagttgtcacatatataggttattatacataataaaaaagaagatgtgtacctctactagtggccttgaccacgtcatac

SEQ ID NO: 178636 - DNA, 590 bp, Cannabis indica
gttagtgtctttttttattttaacttaatttcaataacatcatatgttttttgtaatataccgtggtgtaggaaatccttcctggccgcatgttggcttgtcacatataattttttcattgcgattgtataaatctattttttttatgacatgcgtcacatgacatgtaataaaaactctggacagtatcagttatttttattgccgcctcaatccaaaaatattttttctacatccaaattcaaatggtgttaataatataagatattgaaacaaaagttttataaagtaaatattgtagtagtctttacctcattcagttgcagatttttcgtcaactctgaaatttggatgttagtcactatttcgctaatatatttaattgtgcttctaatttatgagcacgtgatcaaaaacagtgttgtaatgtactctctgatttttttttttttttttgcctcaggtttaattatgataaattttggtgggttttagtaaatgtttttctttttctggtttgtcattaatagctagaacatggagaattaataagattgacattctttttttgttcgcagcatgtacaaagt

SEQ ID NO: 178637 - DNA, 551 bp, Cannabis indica
ttaattattaactcatgaattttgcagtatgagtttggattgagatcttgctttcatgatgattttaatctcataattttaagagttgcccttgggtatgtattgtctgtttttcatcaacttaaacaccatatgtttattgttttattttgtgtttgcttacaaaagtacatgataaaacttgttacagtgtggtagttcaattcgtgtctgcctatgtgacgctaccattgtatgcacttgtgactcaggtaataaatataaaacgctttttcatttttatatttcaaaacattttttttttttttgtatttttatgaaattctgcaaccgaaaatcataactaaaaatcgtatagcaactcatgtagaaaccactttagaaacccaaatcgtaaatttgaaaaaaaaaacttaaaaaaataagtatatggagtaattcccctaaatataaatatagataaggtcattagtgttgaaattcaagaagaaaattttttagtctaatttttttcatagtcgtgtatgttatagtaatttaagacattctgc

SEQ ID NO: 178638 - DNA, 631 bp, Cannabis indica
aactaatgacaactattttagtcacgttgcatgtaattaaaaaattacatttagttgcaaaacaattatattatgtgtaaaagttgttactaattaaacatgacatttattttgtagtgtgcattttattttatttttagaaaaaagttattttgtttaaaagttctgatcaactagttattttattataattaatatcactcatgactcactcttactaaacaggttacttattttggatgcggtggaatttgtctaagtgttggaggagcacatgttgtaatggatggaaattcagctttcgatttcgtaaatgcatggtctcaaattactcgagccaaacccaccatcacaactccaccagtttttgataggactttactctctcctcgaaatccaccacaaatattgtttgaccacactaatgatggatatcgactccttcatcaacccaatcaagacaacgattatgatgatcttaataataataacaacaacttcatcaaagtgattgtagtcaaaatcactaaggatcaactcaacgctttgaaactcaaagctaataataatttgagcacattttcgattttggctggccttatatggaaatgcacgtgcatggcacgtgaac

SEQ ID NO: 178639 - DNA, 652 bp, Cannabis indica
ttggtaatttgtattccgcgaggtaatcgtataactcataatttaactaattatgttttggttcacaatatcagtgccatatagattgaaattatatattaccttcttgtgctcatcaagctttttttgcataatgtgcccaatcttgtaaaatattgtaacttaatgcaagatttccatttcaaaataaataaataaataaataaataaaatgacttttagatataaattttgttttactaagataaatttatagaaatattatctctttttttaatgacgaaagtttactatatatagaagactgatatatatatatatatatatatatttatataatataagtgtgatatttaaacaagccatgaaacaaaattagcaatctcattattcattttagattttttttttcgttactatggaaaaaagattggaataagtaatatatatgtttaacatggataattgcaagtgcaataaaagacaccaggaagggcacctgatggtgccacacatgcagattgggtaactggatatttggcaatgcatctttgttggcatccttggtcaaatcctccttgcttacatgagtaatctgatatcactgctctacatgtatctcccatcaccactattttgctatcacctgcac

SEQ ID NO: 178640 - DNA, 543 bp, Cannabis indica
gaagaaaacttacttgaggtccatgctacattaacaagcgattggcaccataatagtgtcatacaagataacttgaaagttatccttgtaaatgccctcaagcttggcatgacatgagtttgttccaaaagtagcaccaacaacacaagactttagatgatatgcttggagagaaatcttcggtagctcataacgggtataatatggtaaaagtgacattaatgaaaattaagaatccattggtggttcataatataataacgttgacgaactcaaatcaacaactacaagtggttcaacctccaataacacctctttcttgctttgctcatgaccatccacatcgttaattgtgattaataacttcttcactgaggatgggtgttgcttcagtcaccaaatcaaaatcatcacttgttgagcaagcatctaatgcacccatttttttagttaaaaccacttcaaaggggtcttgctcttcaattataagttcaatctcttctatgtattcaactaatggtgcttctacattattcaaataac

SEQ ID NO: 178641 - DNA, 758 bp, Cannabis indica
agtactttcaagatgagaaaagggttgtgaatacttaaaattggaaaacaacgagaatgaaaaggatttttcacaatcgcaatttaattgctttttttataaccaaaaagagttccctaacatagaaatgcctattacaatttaaagtgaaacagaaaataaaatttgaatataaatcttaaaaaattattaatattctcccaagataggtttgttagagagatatgtggctaaaatgatttttttaatttaaaaagagattattaatatttaaaagattgtttaattttttggttttaattattgagtttatttgttaacgggagatcaaaccaaatcgttaaatttaacagaatattcttttatttttaagtatctttaaaccaataaatgtcgttagatagacacttttaatatataaagatatgttcagtaatttattttgaattcacagtaaattcttctccattttaattatgtaaaaatttatttaagggtttacttttttaaaatataattaaataatattaatagaatataagttttttattctatttatttttttacgggccttttttatgccataattaacttatcaatactatattttatctttttcattctttttcctttaattttattaaaaacaaaatataataaaatattgaaaaatagggtctagcctagctatttgcatgcacgaaacacttgagtgttctactgctgttgtggatattttaacacgcaagtgtacgtat

SEQ ID NO: 178642 - DNA, 683 bp, Cannabis indica
ctcgggtcaaacccaaacccacctaaaaagacccgttatatatataatatacaacggccccctttttaaagacaaaaagatgtatgtacttttattaaaaaatgtaaaaaaaaaaaaagtgatatttttcaaaacaaaaggtcgagcccaacccgaaatccaatctcaacccacccaggcctgtcccaacctgcacccgacccacttgagcctgacacccgaaaacttggtccctaacatgggcgggttcagtacctataaagcacaaactcaaaacctgaaaacctaaacctgaaaactcaaaacccgagaaaccaacccgatatgtagttacacgtgcttattcacaaagcaaaacacaaatctaccaatatttttttatagagtaatttgcggcaaaaatacttaagttttatctcgagtagcagataaatacctaagtcatatttttggcggtaaaaataccttccgtcacacttctggaacttccgtaggtacctctccgttttcttccaagtaagtgtccaggtgtcacccttttattagcccacatcattaattcttatttttttattttaaaattcattaaaacttatttaaaaattatttaaaattaaaaaatatatatattttaaaaatgtataaaaataaaataaaataaaaatatatctgaaacctaaaaa

SEQ ID NO: 178643 - DNA, 649 bp, Cannabis indica
ttctaacttgtgtgctgctgtcctttctattcttaataataatgctgatatttcttctattaatgatgcgaatattgttgctattcctaagaaaaagaatgctactaaaataagagattttaggccaataattctttgctctactatttataagattgtttctaaagtattagctaataggttaaaaaatgttcttcatggtattatttcttaaaatcaaagtgctttcattaagaataggattattttttatactgttttcatcactaatgagatggttaatgctattaatcataggaaatcgggtaagtctggctgggtagctcttaagttagatatggagaagatttttgatcgtgttgagtggggttttgtgaaggctattatgcagcatctccattttcctgttaggttcattggtcttactcttaaccgtatttcttctgtttcttttcgtcttcttattaatggctccctcactaataaattttcttcctctagaggccttaggaagggagatcctttgtctccctatatctttcttcttgtttctgaagctttatctgctgctattagattaaaggaacataataggctttttcaggggatttctatctgtcgtttagcacccgtcatttctcaccttctt

SEQ ID NO: 178644 - DNA, 810 bp, Cannabis indica
gtaaaaactaaaaattactttgtttaattttgatactagttaatacttaatatagtaaacgtttttggtctggagagggaaataccctctattttattttggtaaattttttgatatcatttaaacatggtctataagtaaatgacttgattgttaggtatttatttatttgtttatttgaaattagattatttggtcgcatggctttgtgattcttaaaaaaaatgggacaaattgtatttgtacattctttttttttaaatgaaatttagtttgatttggtcgattgcatgtcttttacttttttttttttttttttttaaattttttatatatatgttattttttcaaacaatgaataatttattaaaaagaatcaggattgagtatatcaataaggaatgataaaaaaatcatttatccaaattgatttatctcctacctttagtgcatgagttaatttttaagtacctatattgacgataaatatgaattaaggatggtttaaaaaaagattaaatattattttggattatgtgttttgtaaaagttatttattagatcttttgttttgttaaatgacaaaatgcattctatattttccaaaatggtaaaaatggaactctgaactcaattttcaacaatttattttttaatatgactaacttgaagacatttttaacatgaataaatacaaaatgtaattagttttgtcataacatttagataagattattattaagttttattttaacaaaaattcaattcaggatcctattgtgtaatttaaaaatacaggtctatttgtta

SEQ ID NO: 178645 - DNA, 903 bp, Cannabis indica
ttgacggagccttccggatgcctcgacttttgtaggacttgccggagttggtgattgggtcaacaccttgattgggtgagctggaaatgacgctcaactttcttgaggccattaggaggcaaaaaaaccagttttttcaatgacggggtatcgcgtctccgcccctatcatgcgcttactgacgtagtacacgggatgctgagttttttcttcttcccggactaaggccgcgctgaccgcgtgctcggagacggccaagtacaggaacaagtcctctccgagaacgggttttgacaggattgggggcttggccatgtgctctttcagttttttgaatgcctcctcgcactcgtcagaccattcaaacttctggcacttcttcagaatgttgaagaagggaatgcacttatctgtggaccgggagataaaacggctcagggcagcaacctttccggttaggctctgcacgtctttgtgtttcttgggggatggcatgctcagaagagcttgaattttttctggatttgcctcaatccctctttgactgacaatgaagcccaggaacctccctgatttgaccccgaaagtgcatttctttgggttgagcttcattccgtatctccggaccacttcgaaacattctgctaagtcgtccgcgtggctattgcacgccttagacttgactaacatgtcgtctacgtacacctccatgtttcgcccaaggaggcctttgaacatccggttaaccattctttggtaggttgcaccagcgtttttcaatccgaaaggcatgactaggtactagtataccccccttatcggtcctgaagctagtgcactcttgctgtgtgacaattctttatttaggttataatcggcgtacgcgtccatgaaggacagtag

SEQ ID NO: 178646 - DNA, 653 bp, Cannabis indica
cgccgatgtggattgctgcttgttattacatgtgtgatctggatcaccgcgtacaaataaaaaaaaaagagaagtatatagtataattttctcctaatttctaaatttgatttcatctctaatgtaaatactaaaaaaacaattgaaatttgttcacattaattacaataacattaaaattggattctaatcagattagattggtaattggatctacaatttaaaaactaaattaaaaactgatccaattcaattatatctaatgcatatattaaaaaattaatttatatttatatataataaaaataaaatttatattttttacgtaaaataaatttatattttaattatacttttactgtttttttttaattatttttaacatttttggttattttgtttatttattttcataaattttgttctattttattactagcaatattttaattttagttattttaaatttttaattgcattaaacttgtaaggataatatttttatagactattaaacttaattgaagggtggtatatatttaatttttacgtatttttgttcatatttttatgtaaatattaaaagttcagtatgtaattgaatatctaattagaaaatcgatccaatgcaattagtaattggattggatttt

SEQ ID NO: 178647 - DNA, 633 bp, Cannabis indica
gccagtctaagacaagtggtctcggtcgttatttcgagataataggtgaaaatagattcgaattagtattgctaatatatttgatagttgcagtgaagaaaaccttaggcttttgagaggcctggactctccatgatgcagagatagatatactcaattcatgcttaactcatttcttcccttactcacctatatatagaacatattcttactcacaaaactaccctcaaatacaatgactcaaataccattttttttaatatattaatattctttcatacttgcattttaccagactagtattgagtgagtgtggatccaaaactgtaatcgaaatggaagtgagggatttgctgaaggacaaaaagttttgggtcgcctcctcctcattgcctgggcagccggtctccaggttcactctttttcattttaaaattatctcttttcctcaatctaagttctgggactttgctttagtgttatttggcttggtgatatttcaatttcaatttttttttaaaaaaaaaatcttggtttttcaggggcacatgatgtggctgcaaagaaaggactccttcaagcaaaagtttgggaatcccagcgatgacatgatgaagctggtaaataggcatg

SEQ ID NO: 178648 - DNA, 710 bp, Cannabis indica
cacatgttccagttcagccaaacatgtatttgattcaagcaagtctgtccaaaagagcaatcaaaaaaaagtgttccatcgattcttcttccctgctgcacaatagacaaattttatcaatttcaggttgatacttggcaatcctatcctttgtcttgagtaggtaaagcatggccatccacataataaaactatgctttggatagtttagcctactccaaacaatcctcggccaatgttccttaggttcggccaagatgagcttttgatagccttgagtgatgacatacttgttactcaagtgatccctttcttctaaatcataaatctctttcactctctcttttatggccacaatctttctccaataccaactatcattgtttttagctttataatcccaccaaggttgcccttttatgtatacacaatgaacccatttcacccacaaattatcttctttattagcaatggcccaaacatatttaaacatagaaccaatattccattcagttacgtgtttgagccccaaaccccctgctgatttctccttgcaaactgtcctccaagctacggcagcaacccttttgagttggtggctgtcactccacaagaaactcctgcaaattgcctcaatctcagcaacaattttctttggcatcaccattatttgactccaatacctaaagggcatttcatgtctcttgaat

SEQ ID NO: 178649 - DNA, 836 bp, Cannabis indica
accatattctatctctattggtcactttttttggccaaatacaagagattcagcactttgtaatattctttacttgtgctatgattacatcacttcttaaaactttgttttcccaaaatattgaatttcgggagccccacaatgtatataccaaagctgcaagtgcagcagccattacacctcttcgaaacttgctgattttggcctttccaagccatcttataactcctggcagcggtcttttgcacatgttccagttcagccaaacatgtatttgattcaagcaagtctgtccaaaagggcaatcaaaaaataagtgttccatcgattcttcttccttgctgcacaatagacaaattttatcaatttatggttgatacttggcaatcctatcctttgtcttgagtcggttaagcatggccatccacaaaataaaactatgctttggataggttagcctactccaaaaaatcctcggccaatgttccttaggttcggccaagatgagcttttgatagccttgagtgatgacatacttgttactcaagtgctcctttcttctaaatcatagatctctttcactctctcttttattgccacaatctttctccaataccaactatcattgcttttagctttataatcccaccatgattgctcttttatgtatacacaatgaacccatttcacccacaaattatcttctttattagcaatggcccaaacatatttaaacatagcagcaatattccattcagttacctgtttgagccccaaaccccctgctgatttctccttgcaaactgtcttccaagctacggcagcaacccctttga

SEQ ID NO: 178650 - DNA, 841 bp, Cannabis indica
atagattttaatactattaatctaaaagtttgaggtagcatgatttggtaaatatcaaagtctaaggagcatagtttagtacataaacaatcactgaaacagtaaaattgaatgaaattagacaaaagtccttaaatttaacaatctcaatagttcagggggaatttttaatggccaaaaaagttcaggggcacaatttagtacatgtcaaagttcagggaaaaaattactaattagccttataattattcttttcgattgggggtttgcttccgtcgaggttgtagattgttgtaattatcggtttgctgtgcggtgtggtgcttcattttttattattatatttaattttgtggttttttatttttcttaacaattatggtgattattcaccactttaattattagattaataaatggaagctttgttttttattggtttgttagtacatcaatgaatccaattgcttccacaaaaatcttcacaaaattgtccttttattaatcggttatttcccttatttatgattttaacggccaatttatgacaaattaaccttttagtaataacaaaataattacgatttataattaatcttaattcaaaagtatattataattagaaaataaaaaattgttctttattaaagggtaccatacttttatttaattttttttgtaaaggtaaaaacaagttctcttaaaaaaaaataactttttattaataataaaatcaataacatttcccataattattccataaaaccctatattcatatcatcacttctacttcttgcacacaacaccatgaccacccattccactaccacactccatacc

SEQ ID NO: 178651 - DNA, 719 bp, Cannabis indica
aacaccattaaagcagtacggtctattatttttattcaataaattaatgatgataaactataaatgaaaatatattaatttcatagttgaaatataattaaatacatacaattaatattgattactattctaattttcatttataataattattcttttcgattgggggtttgcttccgtcgaggttgtagattgttgtaattatcggtgtttcattttttattattatgtttaattttgtggttttttatttttcttaacaattatggtgattattcaccactttaattattacattaataaatgcaagctttgttttttattggtttgttagtgtatcatcaatgaatccaattgcttcgacaaaatcttcacaaattgcccttttattatcggttatttcccttatttatgatttaaaccgccaatttatgacaaattaaccttttagtaataacaaataattacgatttataattaatcataattcaaaagtatattataattagaaaaataaaaattaagttcgtttatttaaaaggtgccatactgttattttaattttttttgaaaggaaaacagttctcttaaaaaaaaaaacttttatgaataataaaatcaataacatttcccataattattccataaaaccctatattcatatcatcacttctacttcttgcacacaacaccatgaccacccacttccactaccacac

SEQ ID NO: 178652 - DNA, 552 bp, Cannabis indica
aatctcaacaaggcgtgccccaaagactgttttctacttccaagaatagatcaacttgtggatgcaaaaaccaggcacgaaatcctaagctttatggatgcctattcggggtatagtcaaacttgaatgcatccaccagagcaagaacatacacgtttctgaatagatatgggtctgtattgttataaagccatgttgttttgtctaaagaatgctggtgctacctatcaaaggttggtgaattaaatttttaaagaccaaattggacaaaacatggaagtaaacgtcgatgacatgctcatcaaatctaggaaggctcgagagcatatatatgacatggagaatgcttaaaaatcattcataaaatacaacatgaaactcgggtaagtgttttggttatattgttaatagcttgaggtattgaaagccaatcctaagaaaattcaagcccttctcgatatgaaatcacaacaaaagtaagaagtccaaagcttaaatggtcggataatccttcaacgtaataagaattttgaatcgacagaggaatgcgag

SEQ ID NO: 178653 - DNA, 1248 bp, Cannabis indica
ctcccgaagaccaatctcttgttcagtcaagtagttcttcacaacctctaggatagagtaagaacagaaatagaacaactagaacctagatgaacaactaggctctcacaaaacaaagaaacactctcttctctcaaaagataaatgtagaaaaatgaataatggaagaggtaattcgaatggttgctctctaggctctatttatagatcatagaaaccaaagaggcaaccacaagttcgaattagcagctgtacaaaaactttccaaaagaaacacgatctgctacatcagattcggttgctgacgaagcagatctgcccagaaacgggaaacttactaaaatcgggtccgatcttctttcaatgcttgattcctgccaaaaacagattagatattctgattgtatcaagatacaatcgaaatcaataaggaaaaggcaataaacaaagtttccctaaaaaagacaactttccaaaagagaattccttctcttttgagaagttttcaacaaaggaaagttcagctgaaagtgcaactttccaaacaaggaaaatggcaactaataaccgaataaaagaggtaagatttcgaaaatgaatgcatagcaatcttaccataaaaaggaaaaattattttgtcacctaacttgccaaaaaaggactttacattatatatacgttactaatgctcttgtttgatttttggtattttcgtttcttaaattgccctttgcttgtttttaatatacaccactacaaaaatagtctacaatgatgtactttgagggttattaaaaaaaatttagtatcctttcatgtttttaccagcagagaaaatacagagaaaacagagagaaatctagagaaaaaaagtagaaaatatagctgctattattgattatttccaactaattaatacaaagaaaagcaagctatatatagctgctaataatagaaacagaaaaaaaaacaaacactgcaacttgcagtaacaaattctaactgttatgacagctaatcaaccaactaactaacaaacgaacaactttgatactcccctcaagatggactatagatattctttagtcccatcttgtctttaatgctcttaaactgattaggataaaggggtttagttagaatgtcagcaagctgatccttaattggatgaaacattgacaatttgacagcttcctctttggccttttctcttactaggtgacaatctatctcaatgtgtttagttct

SEQ ID NO: 178654 - DNA, 529 bp, Cannabis indica
aaagataataaaaattaaaagaatagggaaagagaacacctggagagcaagcaaccatggatagcagcgatattgatcctctaaaaacataaaaactgaaaagaaaaaaaaatgataacaaataacaaaataagatgacaaagataaaaggaaaaagagaacaaacctgtgtacaagatcgggaaagcactactcaaggctggtaaaccggagccacgaggatatcctcgacaggctggggcaccctctctatgtagtgtttcagtctttggccattcactttgaattttctcccatcggttgggtcttcgacctcaacaacaccgtgggggaaaacagtttttacaatatacggcccagtccaccgggatctcagcttcccagggtggagatgcaggcgagtgtcataaagatgcactcgctgatttggctcaaattctttcctcaggatctgcttgtcatgagccgcttttaatttagccttgtagatccttgagttgtcataagcatcattgcgcaactcctcaat

SEQ ID NO: 178655 - DNA, 1073 bp, Cannabis indica
atcattatcaattgtcaaaaacatcttattttcattttttctcctatttttgtgagcctccttcacctataaaaggagagctcccttacctcattttttcacatttagaaaactacccacaaggtcagagcttctctctctagatttttatttctctagaatttggagcttctgacacttttgtatattgctgtaattaccatctcatgagaaataaaaactcaaattagatgtagccccatgatgagtgcacatttgtacactcattcttagtcaataattagatgaattagttttaattttttttacatatttgatgtgttttctctaagtgtgtaggtaggtttgtactgaaaaaatattttgtgatgggctgagatctttgagcccatttttgacaatgatttcatcactttctcaaagagcttatgaaacccaaaatgatagagctcattcccagctttccaaaacatgttaaatcatctcatttggagctcggatgcaaaagttatgcatgatttactgagcaaggtcaaaataaaaaaaaattggtgttgtgcactatagcgcagggggtctacgctatagcgccccgctgaaaaaaaaaatacgaaaaaaaaagataatataagcatgagttcgggattttcctcttaggcactatagcgcggggtatgggtgctatagcgcagcacttatcattttttttaaaaaaaatcattattctaagaggattgatctatctttgttggcctatataaagaagcatgtaaatcatattgaggaatgaatagagagatagaaacaagcaactttgagattagaaaacacattgaagagcaagagagaagagacttcaaaaagttatcatcaactatcatcattaagagttcttttcttcttcttcttcttcttcttcttcttctttattctttgtttagttatttaattatgaacatgactattatggttattatgtttgtgattatgaactaaacactcattctagagtgttgatggaactatttttagatttaaatttaagtttttagtattattcttcatatttgttc

SEQ ID NO: 178656 - DNA, 522 bp, Cannabis indica
gagatagcagagagagaatcaccgagaggaagattagagaataatgtttgtttaaaaaaattatggaattttgtaaggtaaagttttatttatacattgttattttttcatattattagcagtgtagttttttttttccatatttgttttagttatttttaatgccataaaaaagtaaatactatcatattttctcatatttataaaaattctcctaaagttaattatcataatatctttgtttagttaacattatgctgtcttgtttgggttattttttttttatataacaacatttttgttaccttcaaaaagtttaagctagcacgtactgtatagtttattaataaaattagtatatatatatataaaaaaaaaaaattttttcatctatatattataattttgttgtgtttaagatactactttatgattttatgttttttagaactatatctatattgctttattagataaaattattcatattatatcatcttgtaacttttaaatataaattaa

SEQ ID NO: 178657 - DNA, 545 bp, Cannabis indica
ttggatattgtgacatatgatgattggtacaaactgttcgaattcaaaataaaatatgtaaattttttataaaattgcaccagtaataacttctaaaaatagagtttcagtttagacattttaccatgaaaataaggccagctagcatgatttttaatcacaaacaagaagacatcaacaagtggtggtttcagagatcctacaaattattaatttttaaatagcatgttgtcaagttgttgcagttgtgtaaaaagggatttatattatacaaacagcatcatgaatgttagaagaggtaattaacaaatttactattcaactaattatcatggtaatatgaaacactcaaacttcaaatgctttgttaagagaattgctaagttaagagaataaagagacgaaacttaccaatttctaagccttctttggaatatcttttagatcagcaagaagatccatctgccccctttcaaaaagctctttgcctggtggaccagttgctaaagacacaacaaagaattatacaaatatgctcccaaaag

SEQ ID NO: 178658 - DNA, 839 bp, Cannabis indica
ataaatataaaaataaaaagtcacccatgaatttctccatgaatttctcataaaccaagaaattcagttatataggcacactttatatagaatagatatatgctattgcccttataaccctagggggttattaactaattgggcttatggggtcttttatggtgtactataatttaatgagccaactatagtattaagggtgctctcatgtgcctttaacacataattaagttgttaaccatcccattatggttattagcaatattaggcacataattaatgatggtgtattatggaattaaacctatgattgtattagtccattataaccattctaacaaggtcctcaaacaattccatcatttccatctcaatattactgtcgcgttccaaaaccttcccaacatcatgattaatggagtccatcaaggagaacagagagacaccacaacgagaaaacaaacactaacccttagagaagctacaaagagctaaaaaaacacaagcaaaaaaaaacgtctagagaaaaccagtaaaagtccactagaagactagaccaaaaagatgagccatcaattcgcggatcatgtgatatagtatcttatacttcacatatagcaatcaagggtttttttgagcttctaatttcattttgttttttactattttgtagaagttagaaagctttttcattactaccatgaaattgacctgaaattgcaatatctttttgcttctagtgtaactattttttttttacaaaagtaatccctattatataacttgtgtcaaaacatgttattacttaaattttatgttttgtaatcttatctagaaag

SEQ ID NO: 178659 - DNA, 871 bp, Cannabis indica
gttttttaaaagtttatattcatataactaacatataatgttatccgataattacaatgatttaccagtttcttaatctctcattatacatggtctggtgttctaaattgaactctggaacgtgtgcagaatgctcttattcatgaaggaaaggagatgtcatcagttctttatacatatcgtagttgtgtcaaagcgctacctcaggttaatgtggttatagttcaaagtaaaactttccttttgaatctcaacaatacaactctttcacattactcatttttattcttactcttttatagcataaaaatacttacctaaaatttaatttttcctgcttcctgcagagaaactttttttagtgtcactgttaaccttaggtcttgtagttgtagacataatccttgtagttctgttgggccttttttttttccagtaagcaagttgtacggcttctaacttccacacttcttaccattattttctgatgctatgtacatcatatatgctgttggaatgatgtttcagcttcctgaatccatgaaacaaagtcaaggtgacttgtatatggaaacttatcaagttctggatttggaaatgagtcgtctgcgtgaaatacagcaatggcaagcatcagctgcttctaaagtataagttcatatgcatttttttattattattatttatttttctcaaaatgtagtattgagaatgaaatgttcaccttagtacaaatggcatttttctgacagttagctgctgacatgcaacggttttcaaggcctgagcgacgcataaatggtcctacagtaactcatctgtggtgtgtaaagtcattctttcatattctttgtgaaacatctctctctct

SEQ ID NO: 178660 - DNA, 773 bp, Cannabis indica
gagacgaaggagaacctgtagagaaagccatagtaaaagaaaaacaattagaactattaacccaatcgtagataagaaaaaaaaaagaatttttactaaaagaaaaacaattaaactattagatataccccccggacaaaaaaaaaaaacttacgtagagaataaacaattcattacgtacgtgtataacatggtaataacatatttctaatattcacaacatggaccaagttttctttttttattgttgtatattattacatatatggaatgctttttcttggtctcattaattcaaatatatcaagtatatggatatggacatggtagtcaatggctagctatgacactcaatgtatttatatattattaatttatttatttgtttatttttttgtgcatatatgaaaggaaaaagtaaaacttccccgatttgttgcttttaattatgaagtctgttgacatttaaaatttaagttagctttgaatgaactttgaatattcatattcaatatatatattccttaaaccagacatattttgaagaaaattttgttgttcctcaaatcctttttgtccactaaaatataaacaaaattttaacaaaccataatatataactacatgctgccacatgttttattttttattttacttacatatgttatttataaaaaggtactgttgatgagaagaaaaaagtgacaatagaaatcactttcataaacttatattacatatgttaggtattactaattacatggaaaccgtaa

SEQ ID NO: 178661 - DNA, 602 bp, Cannabis indica
atcacatcccgccaaactcttataggcagcctaaaactcatcataaagtaagcaatcatgcccaaagttagagttaggaaattgtgccaggtatggtgtaaacaaacacgataatatatagtggcttttttaccaccatcataagttataaattccccaataataaataaaaatggggatcaactaaaaaactctctgtaatatatactctcataaatatatatagtgactcgtggactaagattcattaatgctctaaccacgtaaaaaatcatctcttttaacattcattaactacttcataccgctctaattactggttactgaaattcttagtcaatattttagtacttttgtaaaaagtcataaatagcctaataacataatggtaaaaactagaaatacttcgcgtccacaacataatgctttcattgcataatacattcacgtgaagtgaaatctgctaaagctggcttagatttataattgtcaaccaacaaaactctctctctctctctctctctctctcatacaaacaaattgtctcttgctcacttggaagagttgtttatgtatattaaggctataggtacgtagcatga

SEQ ID NO: 178662 - DNA, 508 bp, Cannabis indica
aatatttctaaaactcaagtaacaaatatttgatatcaaaattttaatttatatgtgcaatgttcttcaatttatcactgtaaaattactattacaaatgaattatatttgttactttcagttttaataataatgaaaatatatctaaaaaatagaggtgacttaatcactttatttataaaaatagtgtttttgtctaaattaagaaaaaaaaaaaaaggaaaatatataataccaaataatctatttataaattttttttatataactatgcgatgatctaggtatctaactaataaattaatagtaaagaagaagaaaaaaaacaaaagacttttatctcaaaaaattaaaataaaaaaataaactgtatcctacaatgataactatttagagactattttattttttcaaaaaaaaaaaaatctattaaggaaagaaaaaactaatttacttatttccatattagaggtggaggtaggatgacacatattggtagtaactatca

SEQ ID NO: 178663 - DNA, 874 bp, Cannabis indica
gaggttgttgtctaacacaacaccaacaacaactaacaaattgaaagcttcttaagacaaaaaagcaaggtagattggttgcaatttggagatgaaaattcagcctatttccatgcttatattaagaaaaaaaaaagggaggcaaataggattacaaccttaattgataagaaagacaagattgaggatgactatacaaaagttatcactcattttctttcttattttaagggtttcatggggactacaactgtaactacagaatctattcttccacaaatagtgaaagaagggccatgtctttccttagagcaacagatcaatctcatcaagccttttactcagcaagatgtgaagaaaacactatattctccataccagatctaaaatgccctggaccggatggcttcgggtcaaaattcttcaaaagtatgtagacgcaaagaaatctcatctgctgtcatccaattttttcagcatgggaaactaccgattcggcttaatgagactcttctcatgctcattcaaaagactgaaactccttctcaagatgtagactacaggccaatagcatgttgcaacacttatacatatcgaaagatgatttgctcgagattgtctaaagttctactgatccttgtatatgagaatgcgttcattcagaatcgttctcttgctcataatgtactcatttgataggatttgttgaagggataccaaagagagaacatctctcccagacaatttatgaaagttaatctaagcaagcttatgatacattgattgggaattcttgaaatcttgcctaaaagcctctgctttctgagactagttcttacatggatgatgggctgtgttacggaatttcgagtgt

SEQ ID NO: 178664 - DNA, 704 bp, Cannabis indica
cccctgtgaagccccttggcatagaataaaagcacatcaggcacataagaccaccagcgcttttcattagctgaattcgatgaaccagcagtacttgatggtatcttcccatgacctaaatcagaattttcttcctgacgcttcctggcatcagcaagcacttcatcacaatacttggccatgtagaagaatcctttctcccacttgggctgtaattcctttaccctagagtaaaaaataattacttcttctttctgtttctgcccagtgtaatgaatccatctagcatataggagaagagtttttgcaatatcacgactctcactcgaacattgggtatcacaaactaaaggtgcagagtttagtggaaccacggacagactactaatggatgatattgctgcagatcctacaacttccacagacatattcaggagtgattgttgcaactcagctatggcaccatcagatctcctggtattccacaaaagcttagccttctccatgtgtacattaggagcacctgaagcttgggcttcaaggatggctcgattggccgtttcataatgaccagctgtgcgacaaagctttgcatattgaagccaacaattacctacttgagcaccaaagaccactggtaccgaaaaacccattcttcgaaaaagctaaaaagaggctccctgtccatagtgacggctgtgtaa

SEQ ID NO: 178665 - DNA, 652 bp, Cannabis indica
gatttttcccaaacctctcacatagttttcttccaaggactatcaacctcatcgaatttttgaggtgccaatctcaccgaccgagttgtttttctaccagtgccaacttcacttcagccaatagttttccaaaggactatcaacgtcttcggattgttgaagtaccaatctcactctcggattgttgtagtgacagtctcactataactgggttgtttataataccggtgccaacctcacctcaatcacaatatggaaatatatttgaaattacaagcaaattcactctagaagtatgatgatacaatagaaattaacctagagtgataagcaagcacacttgaaataaataaacacaaattttggctcaagtgtgtttggttgttgtgtttatgaaaagatgatagttccttagcttagaacacttaaaatgatgttataggatgaatagaagctcaagcaaccttaatttttgagtgaaaaacgagcttatatagtgtaggaacaaaaactagccgtttatagccgttagcacatttttaaaaagaatcctgggaaaaacagattacctattttaaaatggactacctttttgtaagaaatggactacctattgaaaaatggtaggtcgaaaatcaggtaggttcaaaac

SEQ ID NO: 178666 - DNA, 697 bp, Cannabis indica
aatattcttaaaaacatgaactaatttaatccaaccccactgagtttttttttttttaaaaaaaaaaaacaaaagtgagataataataataataataataatagtcttctgttttggattgtgcagttcagatgatttcttttctttagtttttacccttttggcatatatagcattatgcatgtcgtggtagtggatgactaaggatgcgcagtatattttatatgtatatatacccatttcccaatcaataaactgttacaggacaatattagaagagggcattacataaaataaagttgctgccagcttaaaataatttattgggtgttgcatgtccttactcttatgcttatatattcaagctgatctttatttgtttttactgttgaccttatcatttattttttttcttttttattaatgagaacttacttgacatcatgttgaatgcaggaacggagagactttagcctacatgtcttaagtccttactcaaatatatacatgaaatttttcacatgtagatatatacatgtattaattcactttcactcaatttattaaagcctgttgtgaaagcaacaactcaacaagaacatgaaacaatggtaaaagatcaatgaaccaattaacataaacacaccatacagttacacttaacacgagaattagaacattaaaacataaagaccac

SEQ ID NO: 178667 - DNA, 967 bp, Cannabis indica
tgaataagcacttcggggataggttggtaggaccataattctatatccagaggctcaattaatacatacacagagtccaaccaagaaatagtaacagacctgacccaaaactgtccaaggtccagcatcaggaacaaggcgaactcggataaactcgaaagtgttttacgtaatcaaccaaatgttcagcagatttcaattgcaacatggatgaacatgtcaaaggagttgacaaacctgtgccaaagtaatgtataagtagaagttttgttaatacatacaattcattccagctcgttgctttcgttcttggccatctcaatgtacagatccgacctggaatctgcatcaaataccataatctgcaccaaaaaaaaaacccaaaaatccacacccccactaaaaataaagatacctttgtcataaagaagttaatttttatattatcaaacaaaattgattgttaattatttaaattaaattgtttaatattatttattatgtgtaaatattttatgtaatttataattttcggtaaaaatgttttaaatttttgtaattagttagctatatttttaataaaaaatattaatattagtattataaataaaaaattaaaaatgatatttttcaaacatgtattgtaatagttatttgagttttttttttaaaaaaaaaaaaaattcttcatttttattaattgcaattcaagtgattacatgattaaaatctggagtaacatcactattcctgataacacgatcaacaactaaataggatactcgagctaagaaatgagcaacactatttgcagaacgttgttgcgaaaattattaaatactacgcaagtgcacgcaatcaagtagtatactcacgcaagtgaggtcgaaccaaagaggcaaccacaagttcgaattagcagctgtacaaaaactttccaaaagaaacacgatctgctacatcagat

SEQ ID NO: 178668 - DNA, 535 bp, Cannabis indica
atactcactggaaccaactattttggaagaatctgtaagtattggaacaacgaaaacaaattaaacattatcgagtatatatcgatctaatacacatcaaacaaccacaatatataaaatgctattagtaattgagtagcataatcaaacaactgcatataaaaatatttagaacaaaaaaaagcatttgctttagagattttttaattttatattaatgatagaaattttattttatataaatgaaaataaatatatacgtataataatttatattattagtcatttttttaaaaataaataatagttaagtatccaaattcagtcaagccaaagtgtaaattttgaaagagttcaaactatatttatgtataacacaggataccaaaaataattttaattaatcaaatgaaacatatctaaatcacataatattacaaaatatatagttaattaaaagttttgttactcattattattaattatcatctataatctataacctatataaaagtgaagaataattttttgggtc

SEQ ID NO: 178669 - DNA, 925 bp, Cannabis indica
aagccccactccacacgatcataagctttactaagatccaatttgagcgccatatagccttctttgcctttacgctttcttttgagatagtgcataacctcaaatgctatcataatattatcagtaataaggcaccccgggatgaacgcagattgatttgaggatatgatctgaggcagcacttccttcaaacgattcgcgagcaccttagatactaccttatacaagacattgcacaaggatatgggccgaagatcccccatcgaagtaggctgcttcttcttcgaaatcaaaacaatattcgtgtcattcagaccatcaggaatactaccagtcacaaagaactgacaaacttggctcacaacatcactcttcactatttcccagtatttttggaaaaaacctggggtcataccatcaggactaggagatttatcaggatgcatattaaacagagcacttctaacttcttcttccaaaaccggcctaagtaaagacaaattctgatccacggtgatcgaaggagtaatctcctcaaccacagttgagtaatcgatgacatttgaagtaaataacttagtgaaataatcaaccataacattgggcaactcatcctcccaagtaacccaattacccacatcattcataagtcgagttattgtattgtgtttctttctagaagtagctttagcatgaaagtacttactgttactatcaccttcttgaagccacagctgtttagaacgttggcgccagaacacttctcgttgattcatagtttcactaagattcagttcagcctcccgaaacttctgaacggatatagcatcccgccccttcttccaatattggatctcccgcttacaatgactaattcagtttttaaatgtcatgtatctcacgtcccccagcctttgaagacgta

SEQ ID NO: 178670 - DNA, 825 bp, Cannabis indica
ttttttttttttgtttttccactattctaatttgttaatttattcatgataaacagcgatttgggcattaagctctggttggttcatgtttcactgtcatattcgattgccttttttccttcacttgtgtttgaaatcaaagttttggccttttctttcccgttgaatagtgtagtagataatatgacaagacaagatttttgtgcttaataaacattggtagtatcagttgttgtctcctatttattgctcaccatattctcagtagctagctatttatacaccagcttcaggttgttgtttttctttcctgatgaaaattgttctcgctgtttgttttcttaaattttgtttagaaacaataatatcttcctaactttggctctctcacttgtacaatctttcaggctcttgatattgatccgaatggcggttcttggattgtttttgcattggagaatcacaaatcctaatgacgatgcaatctggttatggtttctttctgtgatatgtgaaatctggtttgctttctcttggctacttgaccagcttccaaaactctgccccatcaatcgtgtttctgaccttaatgtcttaaaggagaagtttgaaacaccaaaccctagtaatcctagtggaaaatctgatcttcctggcatagacatgtttgtatccactgcagatcccgaaaaagaaccgcctcttgttactgcaaacactattctatctattcttgcagctgagtatcctgtggagaagctggcgtgttatgttctgatgatggtggtgcgctactaacgatttgaggccatggcagagctgcta

SEQ ID NO: 178671 - DNA, 517 bp, Cannabis indica
ttttattatttttttatctttttatgtttttctttttgtttttttttttaattttcagtttttttttacattgattatttgtacttgctattggtactcttaatgtacttaatgctatatgagtgtggtaccatattgatttagatttttattatattatttttatttattttatgatatttgtactattttttggtaaatgattttttgtctatcattgctatgtcaaattttaaggtgctcaataccataatgacctcgtaaccaataattaattagcattttttaaaattatttattaaattaaaatttgtgaccaatatgctatcttaatatttttattataaatatgtacatatctttagtaatttcaattagaatttttttttttttacatttaatctaaatattttatttatccttatttaaaaataaattgataaaaaataaaaatgatattatcggatgtctacactcttataatatgtaatatcgctacatatttttttattattaa

SEQ ID NO: 178672 - DNA, 1080 bp, Cannabis indica
gctaaaaccaccaccaatgtctctatggaccgatgagcatagcgattcgagtcaaccatttcgggtggtggtccttccattattggttgaagttgattgtccatataatatatggctatgtagaatgagtagtttcaaccaaggaaaagacagagaacataataagagtttagcttagaacttagagagaatgagacttgaacaaaagtgaaagtatttatagtacaaactataatgtatttgtgtgtgtttaggtgagagaattacattaattttgaaaatgaaaagtgtttttagcaaatgcaacttttgatgctttggatcttctaagtgtgattatttcacttgtagctttttgttacaacttttttactctttttgattttttttttttttctttcattacaataagatggtgatgttttaaggtaaaaaattataaatgaagaccagaccaaaccaaacactcatcagagaaataactctgttttaatgaataaataaatttctgagagtactttcaacatgtcagtaagtaatatatatatcttgaataggctctcttttaattgaaaaaaaatatatatatatatatatatatactaatttggattcccaatcttttttctttgtctttagttatatcacatgttaatgtctaatatatgaatccaagaaccaaagtagattttaatcttgtttttcttcttgaaactttcccccaagttcttcgttttttttttttgaaaatggcgttttataaaataaggagttagacctctcggtcattacaaaggatagagacaggtatggaatgaacatccacccttccggatatagagttagcaaaagcccacctggccacattatgagccaaatagttacaagttctagaaataaaagaaaagttacaacttaacatcaaagtagaaagctttttacattgttgagtatagttatcaaattcccaacaggtatgagtccccgtcaaggtcttgattaccgtcattgaatcactctctaccaatacaaagcggtgctgctgagaaaccgctgtctccacggccaacaagaccagct

SEQ ID NO: 178673 - DNA, 738 bp, Cannabis indica
gatgctttggatcttctaagtgtgattatttcacttgtagctttttgttacaacttttttactctttttgtattttttttttttttctttcatacaataagatggtgatgtttttaaggtaaaaaattataaatgaagaccagaccaaaccaaacactcatcagagaaataactctgttttaatgaataaataaatttctgagagtactttcaacatgtcagtaagtaatatatatatatcttgaattggctctcttttaattgaaaaaaaaatatatatactaatttggattcccaatcttttttctttgtctttagttatatcacatgttaatgtctaatatatatatgaatccaagaaccaaagtagattttaatcttgtttttcttcttgaaactttcccccaagttctttctttgtatttactaatattatatataaaaaaatttcatataataattatattgaaacagtcatattcattcataagtagtatgtatgtatgtataggttagctatagtttgtcacaatgtagaaaacaattttgatgatgggtcattttgactaagagtacctttcattttctgacccttcaggcttcacaaaaggactcctgaccagcttgtccacatggtgatggacataaaaacaataccacataagttatatgtgtgttagttcacttctcaaccatgttttaatagttaaattgatacaatttttgaattatttatta

SEQ ID NO: 178674 - DNA, 602 bp, Cannabis indica
aaactttgcagttaacacttgcccccattccaaaagaacacttttaagtgatcttttaactgcaactgagctattctctaagctctttgcggtgcacctcgtccggtgaaacacttgatatatcgcaccgaaacattgatgagacccttcaatgaggtaggtgggtcacatgtcacttcttatgtgttcatgtgactaaccctatcctttgatctcatctcgatttaacggttgtcgttcacctcccctccttataaataggatcccactctttgcaattctcatctcatcttcacttcatatcagttgctatcttccttagtttctcgctcttctaaatcctccttacacctaagcctttcgacatttttctctttctttgagtcttgacgttgtgagcctttatctacagcttgatagggagtataggcttgcacccgtaagccaaagagaatggggtttctctagtcgtagtgtggggtggttttataagcccacaacacattagggaactccttgacccacacccctttgagtttctccagcttggtcttgaggtttttcttgatcactttgttggtggcctccacctagctgttgac

SEQ ID NO: 178675 - DNA, 554 bp, Cannabis indica
gttgttaattttttgttatttgtattattttttatattattttaatattatttagatgctactttcttattatttttatatattttttttgttatttttatgaataatataaaaatataaaaaaaaattaaacgtaaaatataaaaattacctaaagtaaatttcctcttttaatgacatgatatactttgtcggtgtaaatatttagtgtagtgttaagaaaaaaattaaattgggtatagaaaatctaaaatgacctctgtctacatgcgaattgatttcgcatttaaagcatccgtgaaaaaagaaaatgaaaaattcacacgaaatatgatttttgcccgcactatacaataaagaataataataattaattttttttttgagagaaataataataataattttgatgaaaagaaagtgataagtgtgactattaaatttgccacaataataatagttattattatttgtccattgtatacaactgcacatttatattactacattattacgcaacatgttgtttctcactatgtgaatcattttaaaag

SEQ ID NO: 178676 - DNA, 783 bp, Cannabis indica
gaaaagaggtgaggtgttgaatcgatctcaatgctgagccttgtgcatcttacattttgcaccaatacaccgtatttatagagcgaatatttgacacgctgctacacgtggcgcaacttcagcttccgggacccgcaatattactggcgctgggtttagagaagcgtggccatgcaaaaaaggaaaaattggggaaattataaaaataaaagaaattattacttttattgaaaccaaacgaaacgaaacgaaaggtgctcgaatgaagcgggtgacccggtgagtgtgacactcgtgaatgtatcactgaactctttattttttttttttgttaagctgttatatatatatacgatacattttacaacttgagactcgatcggactccgtatcactaagagtagtgatcttgctacatatatttaatgtggttcaacttttaaaataaattttgagagtataaatgttaagtgttacataaaaaacaatagtaatgcaagctcgatcctaggaataaatgaattaggcctgtgcttaaagcttggctatttcagaagcaagaaagaaattctttttcttttttaaaaactttacattttttttattaattttgtaaaatatttatattttttaaaaataaaagcctaaaattaatttttttttcttatagtctactcaattttaagatgagcttttatgataagataaattttagagttgttattaaagtactttttgtgtgaaaaataatcaaatgaaaaaaaaaaaaaaaaacgtaaataa

SEQ ID NO: 178677 - DNA, 525 bp, Cannabis indica
ctgggatgattctgagactgtgtaggtatgggactacacagttgaagagagcttaaatggattgattggtactacctatatcaacaaggtgcatctgtttttcggtagcccatctcgaaagaactccacagttaagcgtgcttgacttgggagcaatttcaggatgggtgacctcctgggaagttttcccaggaagcgtgcgagtgaggacaaagcacgctggaaacactcgtgttggtctgtagggtcagtcatcagtccatgaagcagccagagtgacgtactcgtgtataagagccattattccgtgggtgtaagggcccaatggaggcttgaagcggggacgttacaaaaattgtaataaatttatatatataaaaaatccctacaaactaaattcaaatactatacatatcatatacataaacaaattccacacttatatataaatattcttttaaaatgtaattaaaaaataaaaatcagatctaattataaatatatctttaaaaatcatactaaaaa

SEQ ID NO: 178678 - DNA, 1060 bp, Cannabis indica
cagatatcaaataaaacaggaatacatacctagatagtactttgaagctggagatgaaaggaaagtgctttctctctctctctctctttcagtctgggagggaaaaagcttattactttgctttctttgactttgattagctgagctcttcttcttcttttctttttcacttcagtcagggctaaagaagtggatgtgaacgaaaatatgggtgaaacgacggcgttttaagggtgcgtttgattctgacagccggacaagatcatttgctgggctatgtatgaaacgttgcactgttcaaacatttaatactcaatatactactacttactaccattgtctgaaaatatttcgcttcctttataaagtatttaaactctaccacgctctatttaacaaaaaaaaaaaaaactactaccacgctctcatgtttcacgcgcttaccttaaattacagaaaagaaaaggcaaaattattgttcttttttttttctttgagagagaacaaaattttgagatcatgtagtacatgaatactatatgtataaaatctcaccttaaaaaaatctctaaatactatttttttttcttaaagatcacgtagtactatttttgttttcattgttttttaaagatcaaatggtaaaacaataaatcatacagcacatgaatttagattttttttccaaaaagaaaatattgaatctctttaaatttgaaataaattttctgttcagtccgtttattttttttttgtttgttttgctgatttttttttatatatatacaaagttttttcttaatcaattacttgtgatagtaagataaaaataaacatgtggaatgtgttcatacttctttttttcattaacggtacttttctttttctctgattaccttaacgtcgtacttaccatataaatgtttattttgaaaaaaataaaattaattaaataaattccatcataggcaatgtcaattgaagaacaagccaaaattgattccaaaatacaatcaaggattcgccaccaaacatgcaatacagaatcaaaattttaaaa

SEQ ID NO: 178679 - DNA, 511 bp, Cannabis indica
ttatttttaatcaaccgtatttagtataaatcttttggtggatttatgagagcattttgatatctttcataggataagattatagtaggaattttaatttgttcatacaattagagacatttatgctttggtatttaaagtaattataattaatttttgttatatgagggtatatattttatctgttttttaaaacgtttagaagaatttgtgaagttgaaaacagagtcagttttgcttgtttctttttacatgagaagtaaagctaaattgttttttttttaaaaaaaaataacactataaatttttttataaaaaaattgtacagttctatatataataaaaaaaaaaaattataatttctcgctagcaatgttactatagtaaaaaatttctatacatggccatgaggtaaaatgtcaatgttatttgtatttgtttcatgctaaaaacattattaatgtttatttagaacattgaaatttgaaaccacactaatataatttaaata

SEQ ID NO: 178680 - DNA, 1136 bp, Cannabis indica
tgggggttgagcctggtcctacaacctacctacaagctttcaaaccgaaaagttgattgtggtttggtactgttgtttgtaggaccatccttcattcatgcatgctcatatttcaccatcacattaactcccatataaaaccagacaaattatacttttttttaattatattaaaaataaaaagcagtccctatggaataacacacatctcttactcctcacatgtggggtcctttcccacgtgctgtaggcctcacccctcacccactttacattcatatcaaatgacttataatattgcccaattttcctataagctacgaaatcagtgcaactaaattgttattacactatgtttgaggttcacttcttctgactacttgtaattctgtatcattttgatgaagtaaatgcttactttcttttccggttcgaaaaaaatgcttactttcttctttgtttttggttgatatattctatttaaatttgaattaaaaacattacatattatatttaatccaaattttgtaataatatcctaaaagtgaaatttatttttttattcattgtataaatgaaatgttattctaacataaaatttctcatattatattttgtattaaatttcacaacgttaaattttatatattactattgaaattcacttttacggactaaaatattcctatacaccacagctttcagccaaataaaatataatggagataaaaaatgcagtagcaaaataagtaattagaattataataacattacatttaaaaaggattaatgaaaagaaaagctaaacagtacaatcgaattcgaaggctttagacaaagctacaattactaaaccacagcagggacatgaatgtgtagagtagacaacactgtgtggccccattgccccagcagtagctaatgtgaagttcaattcaaatcctactaccactaaacataaaacaaaaaaaaaaaggcaaaagataccctattatttgcctgtaaaatgtgatttttcttaaaacctctatataataagctggaagcagaaagatttttccttttgttccaactcattcgaatcaagctgctgatataccactagagcagtcgttcgaagaacatcgtgaccagac

SEQ ID NO: 178681 - DNA, 675 bp, Cannabis indica
aattatataaatatatatatagttagtaattcaaaattaagttaaaaatttaaatttaatttcttttaacatgaaatggaaaatattttaaaatttttaatttttattatatataaaacaaactatatatataagttttttaatagaagataaatctatcatttttagctacaacttgagcttcaataatagcgaaacgggtcacaagggtcgacacgaacacgaatcgattttttgcgagtcaaattaaggttgagaaaattaaacacgagtcaaaaacggatcgacacgtttgacacaaaatatagaagcgagttacataaaatatgatacaaacacaacacgataacacgttttgtcaccccctaatttgaataaaaaaaaataaaaaaaaaaaacttactacaatttaaaaatctttttaagaaaatttaagatttgtagctactcccctaaaacgacttttgagaaacaatttaaaattaaatatttacgtaattttaatttacttatgaaagatattttttaatgatatctaaagactttgaaaagtaattttcatgaaaaaataaaaataagacaaaatttaatgctattttataccttatacttttaactaaacttagccaaacaagaccagtatataatacacttgcattccaaagtgaaggttac

SEQ ID NO: 178682 - DNA, 569 bp, Cannabis indica
ccccgaatctgttggttattagacggggatgggacggggatggggcggggatgggggcggggattacattctccgtacattaaccgcccaatttccatctctataaaactaagtagcggcccacgtgttgctttctgcaatagcagcccatcttattgggacccacagacagcacctcgtcaaccgactctctcttgaatgtgtttgtctagccattttgtacatactaagattacaatgttcataaaatagctaattcaatctaatttgtacgatccaatttaattcaatctacaaagtgcaaattgtattattatgtgaatttaccgcctgaaaataagtccagtcttgtgctaacacataccttaaaggatagtgatgacacatcaatatacaattctcatagaactgatctcacatgattttacttgcgggaagaagttagtgagacaatggtctaatcgcatggctgacatgatcaaaaaataaacatgatcaagagaaactagtgctggtcacacatatttgtgatatgtgatgattaagaaatcattttgaatgattaagaa

SEQ ID NO: 178683 - DNA, 570 bp, Cannabis indica
gtcttctatgccatagcataatagaattgatcacttacgttttttcgaggccacagatgcaaagttgctggtggaatttccttgaagaacatagaccccattgatcatagcaccttgcatcaataccactgctcctttttgtaccattaaagcccatgattccaccttgactgagcatccgtcttctaacatggccacagaaatcaaatttctctttatgttgggaacatgtctcacattctgcaattcatgtgtgttgcctcctgttagttgcagctttacagacccaattccaatcatctcacatgctctattgtccccaagtctcacgaatccaccatcaactctcttgtactccaagaattgatctttgtctggacaaatgtgaaaagagcatcccgagtctataacccaatcaacaccagagtagtctttagaagcaaccattacacctgcactttcgtatccatcgaagtcattgccttatgaagctatgtcgacattcccatgtctcttgaaatcatgtttctttagttcaggacagtctttttttaagatggttagttttat

SEQ ID NO: 178684 - DNA, 551 bp, Cannabis indica
ttttttattatgaaataaacttttcattaatcaaatcgagcatatatacgctttatttgtgttaatgggacattggtaatttttaaaaaaaaatgtgttgcattaaagaacatttttttataaaaataaaaagagctcatctagagagctcttattacattgcaagatataaagaaactcacataaagaacttataagacatatttctacattgcaaggcaaagataagttacagtagtagttgtattacaatagatatcttctagcaacatgtatgaaaaaatttactaagttgtaagggttaataggcttacaccactcataaaaaaaattgattccactttctcaagattaatagacacaatctactcatccactaaacaataaatatttgatgtcgcccgccatcttttagcatccaaaatgtcacgtatccaaccaggctggcaaatatgtcatagtagagttaaagaagacccgtctcatctttatgcaaaatagattcacattcatggataaaggcatagagtttatattaggcctaagttcat

SEQ ID NO: 178685 - DNA, 651 bp, Cannabis indica
aattaagtaattaattaaagtaatgatgtgaacagactttggtagctattagtgaaataacgcaagagataatgaagaacaacccggacttcaacaagattaatgtgagggatttcaggttcctggttctatcagtagggactgggaataataagacagagaagaagtacaatgccaaatcggttgctgagtggggcccactctcttggatatatttcaatggaactgctcccattgttgactttttcatggaagctagcggtgacatggttgattatcatactgctgtcgtttttcaagcctttgctggttctcgagatcatttccttcgtattgaggtaacaattaataaatgctagcatggcatggctgttaataaataataattatatgtatattattgtatatatgtatgcctgcaagttttatggatctagctagtgtacaagtttcaagaaaagttttagtatcgatgatatatgtatatatagttatttaactcaaagtcaattatgtagtttaatattacatcagctacttaaaatatcattatagaaaaatggctacatattaatagagaagtgctcaaaaatataagtagtgctgaaagatataatagcacatcctaatagtttctctactttatttttt

SEQ ID NO: 178686 - DNA, 745 bp, Cannabis indica
aaccgcagcccataactctgtgccccttagcagactagataaaatgacctttgaaattccatcccatggttaagtagcaaactattgcagcctaattaaaattctaacttagtcatagatcaacctctccataaggtttttggacttgttgctatcataatattgacagatttccaatccttaagatgcttaatggtggcattttcaatttgcatcaacattcaacactgattaaaaagaatggaatattggaaaaacaagtcaaacagccacattttctgttgaacttgagtttcattgcaaactgattcagcctgcataataaaacataaatcaccttaaatttgtgataatataattctaaatatttatcatccacttggatagaacctctacattcattcagtattagagttagcccctagtttagaaatgcagtgtctatagatttaccatatctagctagatgttactagcttagagataaattctatgatgcttggagaatataataaaccatatgacctctctacggtttttggtattcagaagaaaaaaatagaaaggttgtatacaaaattaaaataatattatttgattttttttttaagaatgtttatgcaatttctatgtattagtttaccttctctctcatcctccaatttagaaggattcgttttaaaggattatttagatggtaaattctcatattatctttattaattgtttctgccacccttattaa

SEQ ID NO: 178687 - DNA, 601 bp, Cannabis indica
acaagttatttattatttatttttatttaatttctaaattaatcacaaccattcaatagtaatccaatgacttaaaaaaacgtaaccatgatggttacaataaaaatgtaaccattgaaacctcttccatatatatatattcactaatatttaattagtttcattatatttatatttatatatatatatatatatatattttaatttcaatttgaatgtttccgaaaacagagacaagcaggatttacgtaaagaaactttggagcaacaatttgaagtggtaatatatatgtgtgtacatatatatatatacttatataaattatttggtagaaatttgatgggaaaaatgagagtgcatgcagattcggaagagaacagcagaggacaacagtagtaggagcggtggtggattggctcatacatctcatgtgatgcaatttggtgatttgagtttaagtaatcaatttgtatctacttacatgggtgataaccctccaactacttctactatacataataatcatcaactcaatcatccctcttcatcatcttcacttcgcgtttcacagcgagatgccgatctatttcacttttccta

SEQ ID NO: 178688 - DNA, 847 bp, Cannabis indica
aatcatcccaactcttgagcccaagatagagcaatgacacttattctaatcaactttccaaataattttggtaacaaggaaactatatttgtttatttcttcttcattcaattcgaaaattctaaatgactaaatcaaaatcccatagagaccaataaagttgtcaaaagttaaaccttttaaacccctcatcacatataaggttataaaatacaatataatgtcacattgcattaatatataaagattcatatgaaggcatgccaattgccaaagatatgccaaaaggttaagactttagcctaagcccattgatgtagatttcaagttttatacaatagaaagtgctaaataaatttcattttggcatatacaatacatatatatacacacacacacacacaaaagtgtcatataataaaatcataacaaggtaattgaagtcctataagaactgaatcaagctaacattgcctaaacaaacagtcttgttctcaaagaccaatattgccaattccaatactttcctaatgatattataatatctaaacactacttctatttattattaaattatatgaattactataattattcaaattttttagaatttcataaattttatcattaactttcacattttgggacaaatatccaataaaaaaaaattaaactttctacatttcattttggcataaatatatatatgtatatgtatatatatacacacacaaaagtgtcataataataaaatcatagcaagataattgaagtcttataagaacaattcaagctaaaattgccctaaacaaacacattcttctattccttcaacccaaatacccaa

SEQ ID NO: 178689 - DNA, 1022 bp, Cannabis indica
accaataaagttgtcaaaagttaaaccttttaaacccctcatcacatataaggttataaaatacaatataatgtcacattgcattaatatataaagattcatatgaaggcatgccaattgccaaagatatgccaaaaggttaagactttagcctaagcccattgatgaattagatttcaagttttatacatatatatatacacacacacaaaagtgtcatataataaaatcataacaaggtaattgagtcctataagaactaaatcaagctaaaattgcctaaacaacacagccttgttctcaaagaccaatgttgccaattccaataatttcctaatgatattatactatctaaacactacttctatttattattaaattacatgaattactgtaattattcaaatttattagaatttcataaattttatcattaacttccacattttaagacaaacatccataaaaaaaaattaaacttcaatagaaagtgctaaatacatttcattttggcatatatataattatatacaaatttatataataataaaatcatagcaagataattgaagtcttataagaacaattcaagctaaaattgccctaaacaaacacattcttcttttccttcaacccgaattcccaaattacccttttcaatttctcaaaaaccaaacagagaacaaagaaaaaaaaaatacctcgacttgagtttcaagaacaatttcttcttcggtctcagtggtttcggtctctccagaagcaaaaggcacaaactttacgaaccgcagggaattgtaggtgaaagcccgagaaagtttgggtttggcgacttttctttgggtaaaggaaacagacaaaggtttaggataattggagatagaagattgaaatggcggaagcgaagcttggaaagagggaactctggtgctgagagtagccatggctgccattaaagctaagcttgaagtaagagaaagagagataaggatagtgtttagcagtaaagcttcagacttctc

SEQ ID NO: 178690 - DNA, 723 bp, Cannabis indica
caagaataatttgaggatttttgttaaatataatagacaataatataattgaaaatatgaggtaacaaagataagaaatataagattcattgtgcttcctaggataaagtcttatcttccaaaacaagtatctgaatgaaataaaacaatagtcagtaaatacatttgagatatttttttctaaactcaagtgcaaagagtctcttgaaagggcaagattttttggcaacacatgactaaagggaactcgagttggtattggaaaaaactcctcaagctcaaatagactatctctcattccatgatatttgttgctgttgtaaatagaaagtttaatgttagcaatttttgtaactctattcttaatgttgagaaagtatattatactcttgagtatggaggttcttattttgaagcatagattcatgctttgatagatagtgaattctcagttgttgaccagagataaactctaaaggttacaactgtctattgcttttccttattgtccaggttgtaataattttgttgaaattcatgatcacttgttctttctttatctttttttttttgtttccttgatgcacaagatctataaatgagtgagttttgtaaggtggctcattgtgtatttagattgcaaagtttagatttgacaactaagatgtcatatgttaattgttgttattgtggtctattttatttgtgttactaaaaatcttt

SEQ ID NO: 178691 - DNA, 676 bp, Cannabis indica
cttatattttttatagtaagtttaatcacacaaatagcattaaacatagcaactaataaaatcatacaaacaccataggtacttttcgccctaaatctacacttagcattcctcgcaattttcgaatggtatcaaaagcttgcctcagccctctttaaatagagccaaaaattcgagtccccaccacccaaaaaaaacaagcaatttcctcttatcttcgcagtttctcgttgtcagtttcgtgttgcgacgactgatagtattttgaccatatctctctcaatataactcggaattgaacaatttaagatgttttggaaagataaaagagagatttagaactttcattcagaaagtttttcctagaagtgaatggatcatagtcaaaaattggcttgaagcttcagactttattttcagtcacaaacgaagcatgttgaacatccaaagaaatttcaatttttttttggaaagtgatcactattaactcttgatcacgaaattaagagatgacaatgcaatatttgacccatttgaggcaataggaaattactctaagctaaaagaagtttcctttcttcattagattttttcatttttgctcaaaaagacttgcagaacactaaaattactaaaattgaagatctccaaacatttttttagaaaacaaataaaa

SEQ ID NO: 178692 - DNA, 860 bp, Cannabis indica
atcattaattttctttaaaaaaaaccttaacgagtgagtcaaagaaactaataacatgaacaagagttcatgattactcaagatttagattgatctgccattgttcatctttatcatatgaattaggtcttcatgggaaaaaactatataaaatctacagacaactaaaactatcgtacaactgatataatctcatttttaagtagtttggaaaatgtatgttgatgcagggttgtgtgggaaagatgggataactactataagtttgagttatattacttgaggagttgatggggaagtgctatttgttgctgccactgttctaaggtagcaaatgactccattgatgggtgagttaactgctattcaggatgacttgaaggttggaattcagcgaggtgcacaatcgttcatagttgaaacagattgtaggagggcgattcaattgctttcagagacggataaaagttgtcgcaatcttgacggactgctgcaacaattaaaagtttacttcggcacactagtatttctggtttatttttatttttagagaagttcaatcatgtggcttgccaatcaaattttgtatccaaactatattatgtgttggggtttcaccccttgtttgtcaagttcttcgatttgatgagtctattttccttcgtaattttttatgttgaatcaatttcaatttttttaaaaaaaaaaaaaaaactcattagttaattccaataaattagaaaactaattgcaatttttgtttgttttgaatttgatttcctttttgtaatattttagaagaagagcttagagatgataataacattataagaccatgctagaaaataacattaaaagtg

SEQ ID NO: 178693 - DNA, 629 bp, Cannabis indica
actttagagtcattgcttgttttcttattgactaacttgtacgaaaagaattgtattgctatatatgtattctttgtgattaattatagttttagttagttttatttaattttaataacaataataataatttattttaggttgtggtcccaaatttagaagaagtgagtttgaagtggatgttcatatcatcatctatgtcctttcaaaatttgagagagattcgtatatcagagcatgatggaatgataaatttaatgaattcctccaccgctagaaatctagtacaacttcagcaaatgagcatttatgagtgtaaagaaatgagacaagtaattgtgaatgaggaggaagctagtgagaatgtgatggtcttccccaaattagagactttagcgcttcatcgtttacccaatttgaaaagcttcaactgcggaaatagtgagatacagtttcctaatttggaaaaagtaattgtgagtgaatgccctcacatggagaatttctcttctggaaatgtaatcacttctaagttggctaaaactaattacaaagttacagtatgaatccgttaacctgtgatgcatgaagagggcatagagaagatttggaagggtgatctcaaaacg

SEQ ID NO: 178694 - DNA, 638 bp, Cannabis indica
atataattcttttttttagtttaattgtagtgtagatatgtataattttaaaaaaattgagtgagtgatttttataaaatatacaaactatatataattggtattgtaacttcgtggtccataatgtggttaagtgggccttcacccaccaactgtttggctctattccaatttctctttttatttgggaatctattttgtaatgaccaagtggtctaactgatttaatttgtttaatgaatgttcacgtttattataaaaaaaaaaaaaaaaacaaaaaaaaaactaatatataagatttagtatcctcacaactatctattttgaattataaatagatataaacttctttcgacttcttacaaaatattataaattgatataactaatgtcatttatcatatatcattatgtttgttacccttttagttattcattcaatgcgtgtatactctttgactctttgagtacgagttccaatttttttatgttactcttgaatgagttaagctaataaattaaatattagtttatttgtttattattaaataaatttttataatatgagtatttaggaaacagtgatttgtaaattagtaaattatttgtagcacaattatatgtatgtattaaatatt

SEQ ID NO: 178695 - DNA, 644 bp, Cannabis indica
ttcattgtgttttatcgtggcttcttctgttaatccacgtattattttattgaagtttgttatatttatttggttcatatacgcagatatgctgtagaaatttaactttgatattatatatggattacatattttatggcttatgtcggcttatatcttctccgatatctattccatataaattgtgtctattttggtttttgaaagtttttgaaaaattcatgagtaactttttatttatattaaaaataagatagtttattattaaaaataaaatggtttatgataaattcatgaatcactttttatttatatatataataaaataaaaataaaataaattctattaaatccaaaaaaaaaataggattttacattttctttaattaccgtatttctaatcctaaggtttattattaaaaataaaatggtttatgaaaaattcatgggtcactttttatttatatataataaaataaaaataaaataaatctcattaaatccaaacaaaaaaatagggttctagattttctttaattaccgtatttctaacactatttgattatttatgtctcttttataaaccctatttgattaaagttaagattataagattaattcaaattattgttcatatattgatt

SEQ ID NO: 178696 - DNA, 774 bp, Cannabis indica
atacataaaatctattttttaaaactatattaaatgtgtttttttaaaattaaactaaaaaaataattttttatactataaattaataaatatacaaattatatttatttacaaattaacatataagaataaaaaaaataactaactttttgtggtcgctccaatcaataactctagcaaattttttctattttatgtgtcttaaattcttaaaaaacaaaatattttttatattatatcaaatcaatacatatatataacttataatattttacatattatatcaaatcaatatatatatatatatactagtaaaaagttacgtgcgaggcacgtatactaattttatgttaggtattttttactttatttaaaagatataattaacaattaaagaaaaaatattattacttattaggtgagattattattatgtatatctaaataatgtaatttataattttgacaattaaaagtaaatactggatgtaatatattatagtgtttaagaaaacttgataatttaagtgtaatatgttcttaagataatccaaaaataaactaaaaattcatgttcaaatactaaagaaaacacaacttaaatgtgtgtgaaataaaaaagaaaattaaaaatcaatctctaaattattgataattgaagataacatctatctaaaagttgtagataaaaaatctctttttcacaaattataatgtgaaatgttttagttaaaatactttatatatatatggaacacttctaaatgggtaata

SEQ ID NO: 178697 - DNA, 551 bp, Cannabis indica
tatttctcttgaattataaaacttgtagaatcacattctattaactttttttgtacgaaaaaaattcccttaaactatagcaactatagcaaatatctttttatttcattttgttcattttgaaaactatttattgatgtagtactgatgtgccgttaatatggtgtgattcaaaagtcttagcaaaaaatacaagcctaaattgtgctctaaaaaaaaaatttaagaatatatttgtgacacgtgactacatcaaaaaattgatagaaggtaataaaaattacactaaattgtaattttttctagtcgaaagaattttcgcaatagaaaaaaaaatcaggcaatagaacaaaaatttagaggaccaaattttacaattgtaatagtattggggacaaattcttatttatcctgcaaaattgtactatatttgttgcttttgccaataatttgttatttattagtacttaaatgaaactaattaaaattcactcaaaaaaaattatattatcgttattgtcaacatataatttttttttaaatgttgtaat

SEQ ID NO: 178698 - DNA, 869 bp, Cannabis indica
ggcagcatgaccccggtgagtaacccatgacaggttcaccaactgcggccttaaaagccggttgagctggaccttgagccgtgaagttttttccccaaatttgtaggcgaagttgagattacctttggtttttctgtttggtaagcagacgctttaactcatgtgcttctcgccactatcgcttttgtaattatccagaagctccttgattgggatctggacctcgccgatctctttatcgccgaagctgcaatcggagaggagcttgattttgagggttagcatgttctgttgtacatgatcggagacgggctgcgatagaagctcattgatagcaacgtaaaaatgaatttgaaaaatcaaaaaaataaatatttatgtaaataaaagtttataaaattgaaaattaaaagggaaattttatttttgcccttaataaaacccccaatatcaaaatttagaccctccactaatttgtacaaatttattctattgattacatcaacttcccattttaccctttaccctttattaaaaaataaaaaaaatggtaaaaactaaaaaaacttccctctctcttcctctctctcttccctctctcttcctctctctcttccctctcgtgcacccctctctctctctagaaaaaattgaaaaaacttccctctctctcttccctgttgaatgtttatttctcggtgggcggtggtagaaaaccggagcacaccccaatcactcaagaatcttacaccattataatggataaattgtgttttaagcattttgttagattttatgtagtttgctttcgttatatgtgtcgtatttattggaactggtattttttggtctgaaatgatagagatctt

SEQ ID NO: 178699 - DNA, 722 bp, Cannabis indica
gtgaatgaaatcaccatttattaatagcaagtaaattggatggttcaaattttctttggtttttcttttttcttattattatattatattccgaatggaaatattaaatttacttcatcaaggcttgttgtcttgccatttgcaatgaagatttgctttggcctttcttaattagagaatacagaacgtgaatcacctcataaatcgggtacataaataaaactgattgcatctattattactatatataaaagagacgtttgatgccctcttaactttttcatcttcttctttatttttattattatatgtagaaacgttttttttttctttttacaccatattacattgttcttttgaataatacaccatattacacttggtagttttattcttcataaatacacattctttaatgggaaaaaaataagaaaatttcaaaaaaggtaaaatattacaaaaaaactgtgggccggcccaatcaacatttgtacatgtaggaaatttaagatataaatttactatcttgaccctacaccaacaaaacaaacaaatcagattaaggtcaatttcgacctttccctgttcactttgacttttcaaagttaccccaaaacgaccccgttttgtctttgaacaaacctaggaatggatcgagaacctctcatttccttcctttctctctgaaatgctagaaccctagcagagagattctcaaagag

SEQ ID NO: 178700 - DNA, 556 bp, Cannabis indica
tcgaacacttaatccaaacaaaaaaaaataccaaaccactctcatatttttttactttttacttggacaaaagataaggtttctgctactaattgcggctaccaacagtctttttttgatttaccattatgctttttcaactctcaaacgacatcgttttcactctctctctctcataccattatatacatagaaaaatggaggagagagaaaaaaggaaaacagtcaaaataaaaattaaaccttttttatatatacactctcacacactctctccctctcactcttctcacatacaaattacaactatagagagagaaagacaagatttttcccattgattcagtctctctctcatcaagcttcatcaaaattaatgtatgttctttcttttaactttttgaattgaaatgtttcatggtttgtgtttataaatataatcttattatttttttcattttttttttctgtcactttctcacagattttccttccatagaaaaaaaaggatgtgagtagagagattgtggtcatttttctcctattttcccacagg

SEQ ID NO: 178701 - DNA, 618 bp, Cannabis indica
atttttttaaaaaagagggtgaaaattaaagacatcaaattaaaacttaaaagaaatattatagtgtaatttcctccaattaacttgggacggacctactccggctcaaacctaatatttatgagtgaatatgacaaataaaaaatttgatatttattgtagtataaatttaacttatgctatattttattttaaattcaacaaaacttttatatgggttaaatttagcatatattatacattataattagaattcaattttatgttaaatgtatatacaccactattataacactctattgaagatacaccattgcattcacaaatcacaacataataatataattctaattgtttttttttttcctaggaatttatacaaagtacttaaactcaattttttttttactacattttccatgaattatttaaataaaaattgttattttcatgttagtttcccataacaacaatgtaaaaaataatgttaattttgaaaataaataataaaaaaataacttatattctctaaaaaattaaaatttgtaaaaaatataaaaaaaaattatagacccataaaaatgtatttttttttgtgatttgtaggtatttatagaa

SEQ ID NO: 178702 - DNA, 502 bp, Cannabis indica
gaacaaagaagatttctgagagcccgatcgtccctccaccaaaaccctaatgtcaacgtcgtcgtcctctctggaggtgaagaatacttttgcggcgaaatcgatcttaacgcgctaaagactttcaaaagtttcctttctggcgaccgaggacgtggcgggtagaggttccgacgaaacgtaatgagttcggaagattacataatagcaatcaaacggtgctgaaaacatttcggtgttactgcttcaggggttagtgtcatattagtcgaagcaaaagatgctttaggtggaaaggtttttccactgatctattttacacccatgttagcaccaaacttattctttcattaaaattcattttcttttatgcttttagacttgttttcgtttaaagttttgaatagtatcacttttaaccttagtttaggttcttattacggggaaagaagggaattggtgaacaatatgactggtctgttaagctcagatcatagttttc

SEQ ID NO: 178703 - DNA, 795 bp, Cannabis indica
cttacattaaattatgcataataattaaataaatcttcactttttttttttattttacacttgaaaaatatgttaaaaatatgtttcaaatatgatttttgtaataagctaaatattaataataacttacttttaaataattaaaaatattattttataattattaaaaattatatattactttacaaaaattattacattaacaattttatacatcattttcacaaatttaatatttttttatataaattaataagataaataattgtctgaaactaattatcaaacaaccaagtgaaccatttttgtcaactttgcgaactaaatcaaatgtttatattctgataatgacataattttctccaaatattaaaaaataatataattttaaataattaaaatataattttatgataatttaaatttatatactttgccttaaaaatattatacatttttaattttaaatattacctaacatatttattatttattttttaaaaacaaatatataaataattaataaaaataaacgtgtatatctgaccctagagtggaggcaaaatatagtcttccacatgatattattagatatatcaattgtaaatgattattatattattttctttaattattgttatttttttaaatgcttcaatttttatgaatttaatgttaaaatagaaagattaaaatatttcatgaaattaaagaaaaaaaataattaaataacattctataaaatgaaaggacaccaacactcacagtttatttacaatgtatatgatacaattt

SEQ ID NO: 178704 - DNA, 772 bp, Cannabis indica
cattatttttactttaaaaaaagccaaatagtagtatgtaatgaaatagccttaaagataggaaacaaaaaagacttttgtccaataaataaataaataaaagataaaagaaagactagatcatatcgaaaagaaaaaaacagagtcatggtgactggtgagactgagattcctatattaaacaaaagtattaattgtccaccacctaggaaatgtggaagaatataaaacattaatactctaaaccattattacaatatggatatgaactcgaatgatttctccactagctaacaatccaaaagaaacccaacttcatttttctttgtgaaacactaagtaataacactgttcttgaaaggctgagaataaaattgggctttgaaggcttatactctgttgattcaagaggccatagcggaggagtagcaatgctttggagaaataaattggaagcccaacttcttcgtttttctgcaaacttcatcgatattcaaattgattctccaaattcaacatcttggagactcactggcctttatggcgaaccaaacagagagcaaaggcatctcacgtggaatctcattcgtaaccttcaacatttatcaactcttccttggtgcatcatcggagacttgaacaacgtcacaagtcacaatgataaaagaggaggtaacaactacccgcagagattaatcgatggttttaatcaaactttatctgattgcagtttaattgatcttgatattgttggttatccattcacttggga

SEQ ID NO: 178705 - DNA, 771 bp, Cannabis indica
aaatcatagaaaatgaattagaatgagataatagttttaccaactaggaaagattgatgaaagaaagaaacttggataggatggattatggttttagtcctttgtctcttaattttcttttaaaggaaaaaaaaaaataaataaaaaattgaaagtgtaccctgcattgtaaaatccgattaattctccttaaccttctaaatagataattagataagaatatcatatctttcaaaacttaattaattttaatttaatttcttttaaataaaaccctttaatttcgcatcacgcggcttacgataacaaacataacaataagaaacataaagtttggagagaattaaaaaaaaaaaaacgtttttgttacattgttgcactttcgaatctctatttttagttaattttgattattatttaaaagatcttcaaactggtgactcgatcaacactatagcaagtatttttttttttttttttttttgtaatttggatgcagtacagctaaaaatattatagtgactgagatttagattaaaccttttaaggtaaagaagacatataatcaatctcaattcattattattagtctgatacatatatttatatatttttgagttgattgtgtagcagcattgttttgggagataagagtgaagaaatggctggaggatttgtgggtggaggagtatctgaaagggctcatctttatgagtacagaataactggatatttcatctttgcttgcattgttgcagctcttggaggctc

SEQ ID NO: 178706 - DNA, 838 bp, Cannabis indica
cttcttgttctcataaagattccatgcctgtaaataaatttgatattttataaaaaatattttaactaatacattgtaattataattagcttatagatattcctgtaataaattctatgaactaagtttttggaataataaattattcaaaaaaaaaaaatgtgtgagatttttttttataacctataatgtacataaagttttcttttataatatagggtgcttttttatggtacaccgaacaaaaaaaaaaaaaaaacaaatatgtgtaccgatgttaccttttttggttgttaatgtttgaatatcttaattgctttataagatactatatatttgtattatttaagacatcctacaaaattttaaaaaattacagaataatttgcattgtaaaaaatatgtttcaaactgtttatttcacacatgtataaaattaaatatgcatgtgtgcaatagactgtttgaacattattttcagcacgttaaattattttaaattttaataaaaaatgtgcaagaactatcaactaactaccatgtacattgtcatataatattaaaaattactttttttgttccatgaaatttgcaaataatttagccacacaacatgagccttaattatacattaattaggaaaagattaataattattacccgttgaaggaggtactgaccatctggatcactctctttaatctcagtgctcttttggccacttatgatttcaagcacactacaccataactataagtgtcagccttttctgacaattgacccatgaattgcatattcaggtgctgtataaccccctgataatgattaataattacta

SEQ ID NO: 178707 - DNA, 566 bp, Cannabis indica
aaagaaatatattattattaaatacatacaattaacttactttaaataaactccaacaaaattaacaaaaatataaataaaaatcgaaaaatagttaagattttgtacataaaagccaaatattaatatatatgtggtagtattataataatattacatattattatcatagaaaacataattacccaaaaatgaattcatcaaactataagtttggcaaatttccccttttctttaagataagattttgatatcatattaattaatacatacgtacatgtacagtatgtaaaaaatatatgacacgtcaatgctgatatgttagaatgaatgttaattacagaggttattactttttatcaatatttttttgacacaaatcaatatctttaatatattaattaataaagaaataaattaaaaagtgagagacaatgaaaagaatgtcattattaatcaatgtttaaaaaagattgcatcacacagtattggaaaggtgatgatacataattaatggatatagatattgtgtatatatatacaaaatctttattgaggaatcttta

SEQ ID NO: 178708 - DNA, 788 bp, Cannabis indica
aatggaagatgaaaaactaatgctaaaacttaataactcttgtgcctttcaagtctcatttacggtccatgcagcctaaagtttataggtctttaattatctcaagttttgtcacatcatacaatcgtctcttaggaaactaacgattattgctataaataattaagggcaattttcatgtacaatattacaaaaaaatgtaaaaaaaaaaaaacataattatataattctatacagaatatttacatataaatatatatatatttacgattttaacttgttaattacttttaatttataggtctttaaaaaataaaaaataaatagagcataaagctcaatatgtaaatataaaaattaatatataaatatttatactaggcggtaattatgtggcaggcatggtttaaatttaataaaaacaactacacgattaattatcaatataatattaatatattgctaccatgcatcgtaacagacataaaaatcattatatattgctattaaatttatgacaagggagtgacaaaaaaatacctgtacaagatcgttgcggtgacaacgtaggagactataagtctccggcaagttattctcaaatggtggcagcagggtaattttttttttcaaactttttttttttttttttagtgtaaactattgatggatgcttgtgtgaataggtatcttttgaatagttgtggtggtccaaataatgtttgtaaatgtaaatggcttagaatgggtgtcttttaaacttaactttttttttacaatattatgtt

SEQ ID NO: 178709 - DNA, 789 bp, Cannabis indica
atctttcttttactcttttaagaaaaattgaattatcgtagagcactcccaataattttttttctctatcattaaaaaatattattaaaatattattttatattttatagcaaatttttacattatattatccattattttttctatttttttatatattttattcattttaaatatataagattaatatatacacataaaagataatttaaaagtaaaaaaactaataaataagtttattcattgctctaaaataacactatttattattctaaaaaataatgtaaaattatgctatattattggtaaattggatcttctcttcattattttagaagggaaatttgaaattatatgcatattagggattaaaattggtatcctaatctaaaactatacataatttgtaaaatgggataacttttacttaaacccaattttaccccctcatttctaaactgactctctctctctctctagtcgtttagaaattgcaccaccacgacttcccactcgaacgaacgaacccaccgaacccacccaccccacggacgggaacccatccactgagcacgcgacgagtcccttttccccttttacggttttttttaatttttttttccttattgattagtggtagaaaatgttgttagttgatagatttaggttggatatgtgcattcttgattagatctagggttagatggagtagatctaggatctgtgatctttcgggcaaagaaaatccgattttctagtttgatatgagcttgaagatgaaggcccgat

SEQ ID NO: 178710 - DNA, 1177 bp, Cannabis indica
gaagcttaattatactttttcattttttttctcaatctaaaatattaacactttttcttcattatatcattatttaaacaattaatatcatattttcataataatacaattagagttatttacagtgataatactcaaatcttatcaattgttgcactaatttatgtccaaatctttctttttggcaataataatacaaaatttaatattttgttgcaattaagtagaaaccgttaatttgttgttgttaaataataatgtggcaacatttatgcaatacaaacaaaatatttgaaatacaaatttaataaagaaagtaataaatatatatagctatgttattattttaatttgaacaaaatattaacattatgcattgatactgttaaaaaaaaagttgaatacgtttttttgtaaggaagaaaagttgaatattaaagtacaataattaaacaaatttgaatataattattaccacaaatagatgtctcacacaattattcagaaacaatgaatagttagttttttattataagccatagagctttgagaatacaagtacactgttcttccatttatttatttattttgtaagaacttctatttatttataaaaacacaaaaggagtaattgaccttggccaaaaactactagtattatacgtataaatatatataatatttatatgtatatatgtgtatatatagttatatacaccatgattaactttcattaaaaaaggcttcgaggatacaggtacactgttcttccatttattggttgaatcggtcttgcgtttcttcataaccctaaaaattcataacaaattattttattatttttaataatactataaaatttttatttaagaatatatttggaaccgaattataaattatattcaaattgagaagttataactaaacaaaatacactaaaaaaggtataaaatgtaaataataacaagaaaaaaatctttaatactatattataataaaattatttctaaataaaaataaggctaattaggatttttgccccctgaactttgacatgtaccaaatcatgccccctgaacttttaagacaattgaaaatgccccctgaactattaagattgttagatttaaggatttttgtctaattttattcaattttactatttcaatgaatgttt

SEQ ID NO: 178711 - DNA, 507 bp, Cannabis indica
tttcctcaccaaaatccaacttcacacgtagtcatagagttttctaacaaaatgcctttttttttatatagaaaactaagttagtttaaatgaccacattaaaccaatatttacagtgtttaggatgatcgcacttcacattctcctactccatgatgtaatgagtgaaatatggattataaatgttagggaataaagttgggattaaacttcattaaaaccaaacgtttggaacattttatgctaaaaatcacttcaggctacatgtctctcaatttcagcacactcaaaataaagttttgtaactcctttcaagccctcttcaattcctaatatgtctcccactcattttaatcagctaaaagagttttataataccctccaacaactatgatcataagttttaatcccataataaatatatttatgtaacaactcttttaatcacactcaaatgttacacattttggcttaaaataagatgttacacaactatttttccaaaat

SEQ ID NO: 178712 - DNA, 502 bp, Cannabis indica
caatacaaaaataatttacatacataattaattttttcaacccatctgaccgcagtatattttttagagaacttacttcactatggatgcatatataagatattcaaactctactaatatgtattttcaagtaaactttttttttaatattgtaaataatataacataagcatactaaccttccaatataacgagaagtgatttttgccaaacaccgagcaaagaaataccagaaacctatttagcaaaaaaataaatattaagtaaaaaaaattaaacgtatagtagtatgtgtatatattatatatatgtaatatatacatttacatatacacatatatatacatatatatacacacacatatatatacttttacaggggttggcggttgtcacgcatgggttttttgagtgactagtgccacacaactttaatagctgttaaattgtcttaattttgatctaaaagctgatattagatacctcatatatcatttttata

SEQ ID NO: 178713 - DNA, 1295 bp, Cannabis indica
tttcgtcttcctcttatacagttagctttatttcggtctcatttaaatggttaaatttcccatgcattttccaggtagtaattggatatgcagcgctgccattatccacacatgctcagtatgtctttgcctcgttgatttattcttttattctgaacactcgaacatgaaaagaaacttatgtttacgatgcacttcttcctgcctcttctatcattaagagttaacgatagttatcaccgttaagagttaacctagatcattagggatagtgagtgttataaatgtggtggctatagctggaaactcacatgggcatgatcttagctgttgaattctgcatgggaaccaatcaattatgtgttatttcatcttccttcttctctcatctattgtaaaatcatataatcggtgtgtttgatttctctctctttctttattttatgatttctcaaactattatggttatggttttgctcaggttgcgatctgagatttctttgccaattatgaaagagttggttccacattatctccaggatactggcagggtatgcttgagatactgtttgagcttccgatgtgttgcacttattatgttttcagttaatgagtctctggaatggcttatttattactcgttttccccattgtaggagagacttgattatttggaggatggaaagaatgtctttaggttgcggttaagctttgttcatcattgtatcccatcaatgaacgcattagagaatttttttcttgagtatgataggcatactcttcgaacaagcccaccatggggttctgaattccttgaggttattttttttttttaatcaataatagttttccatttttctttactcttttatcttcataacatttaccgcattgagaaaaaaaaatctgtcttcaagaatttcagttgctgtagaacaaaggtcagttctagccttctaggtcccaaggttcaaaacttgtgaatattctgctcaagacattaattatagttaatagactataagtcttgttaattagagacttacactatagtattctccagcaatgtaattcaagtgccataaaagttgttgactatgccgatttctcagaatccattttcttgttctaattaatgcagatttcatctcactatgttaattttgattgcaggctacgaactctttaaagcgtgttgatttcacttgctttgctttcaatttcttcatcctattttgaatatgcttctccatcttctagtcattggtgaagactaaactcctaggttttgttaa

SEQ ID NO: 178714 - DNA, 555 bp, Cannabis indica
cctcacaatttcgaaataccctagtgatagagtagtgcccacacacagcaagtggtacctcaatcatagtctggaagatcgtgaagaatccaaatcaaagagaaggacattcggactcagatcttgataatactctgcgacagaaaggatacaagggttagagatctgagtggaaggagacatattattccgctgcaaccaatgtaaggtttccttaactttatatgtgtttattatcgttttagaaagttcatatttaggatgttaaacaacatacttgtgagtagatctaagatcctggtaaaataaattccaacatgaggttctactgtaaattgatttatgataatggtaaataatttgactataaggaaatgcgctctttatgagatggtctatgaattcaaaaggctttctctactatcgcatatccctaaacaaatgaccaaactgaagcgttaacaaatcattaagcacacaatcaaaaggaaaactcatagagtgcaaaagaatatggctagatgatttatcgcaggttttatgggccaatagtac

SEQ ID NO: 178715 - DNA, 767 bp, Cannabis indica
agttttaaaatattttgaagaagatttagtgcttcttaaatgactattttaaatgtgccccctctaataatagttttaattattaactttttatttatttattcagatgttaaatcggccattaatttctattaaaattggaagtctaatataacaatgggccattaagtggtacaaaatgtgcacccttcattaaataatattgattaaaccaatttatttaatgctaaaataaagcatggactataaagaaagttaagtggccactctattatcttttattttattatatatatatataaatatatatttttggacttctttattcaaaagggaccactaatatattatctcaggaaaataatgacgaattagtcatttactaccaaaacacaaacaccacattcatcccttctaatctaataaataaacaaatggggaacaaagaaaatctaatccacgtcaccccaaagtcgtgtttatccatatctctttccaataataaaactatgcaaaatatttaatttaatgccattgtagatatattgtcatttatttatttatttattttttcttcttgggagtgggtatagcaaatacacacaatccatcacattgaaaaaaaaaaaacaaaaaaaaaaacttttaatattttataattatgattctttgttgttcttgcagatctgcaagagagaaacaactccttatcttgaaactgttaagtcttctatcatgaagcttcgataacctacccatggcgaaaa

SEQ ID NO: 178716 - DNA, 801 bp, Cannabis indica
actattttgatccccctcctttaaccacatctgtttagcacattgcttccaaaaggcttctctttgatccaaaaccaaaaataatttctttttcacctcactatatctctgcatagaaatagggtcacggtacttcttcaactcttttaattcattcttgcaatttcggattctaatcttgaagttgcccgttacttctttaccccattcgcccaaactttcagcacacaacttcaatttttctgaaatgagaccagcagcccccatatgccaacaatctttaactatttcataacacatagtctcttttagccaagcattttcaaatttgaattttttgttgggaatatgaacttgcttaaactcagtttccagccacaatggacaatggtcaaatgaagaaatttcaagattaaaaagagaagcagaattaaaaacctggaaccaaagggagttgactaaagcacgatccaatcgacactctatccaagcagtagttcctcttcctttctcccacgtgaacggatgcccaaccaaattcatatcctccaggccacagtcatccaaggtcgcctgaaagccatccaacaaatgcctaaggatatctccgacccccacgtttatcttcctgccgaatcaaatgttcaaatcccctatcacacaccatggcaagttcgaatctctggcaagaaatcggagaagattccacgtttcgatgacgagtgagcacgcacaggttcaccatactactccccgttaaaacgccaccttacccttctctgaagactctaccaaaaaaat

SEQ ID NO: 178717 - DNA, 798 bp, Cannabis indica
attagaggtaaatttgattaattgattaataaaaatggtatttttcaacttacccctaatatttttaggttgattagtgcaacaaaaatatatttatatatttatatataaatatatatttgttcaaaacaatacattggatcatctttaatattttttttaaagtattacttacaatttttataaatgtacataaaaaaatttataattcaattaatttcggtagaaaaaatttgtataaaagctctaatttgttaataagtttaagaaaacaataataaaactacatgaaagtaacaagaaaataacatcaaaataacaacaaaataacataaaaaataataaaaaataataataaaaaaaaataaggtgtacaacataaaatacataaaagaccgtattttgtgtaaataaaatctaaaaaattgtaaaaatgttaaaaaatttcttacatgtaattttttttttgttgtttttttactttttttttgtaaattacccctatttaataacctttacaaaataaaatgaaagggtttttttttatttattaattttactttttttttgttattttactaaaattacatataacaatgtagaaacttaaatcgtaaccaaagttactcataacaacctacataaaaattactggaacaaccagcagagcaattcaaaccgtaattaaaaaaaaaaaacttaaaataataatatatgaggtaattcccctaaaactaaatataagagtatatctctagcttaggagtaaaacactcatttcatttgtaaaccatgtgg

SEQ ID NO: 178718 - DNA, 546 bp, Cannabis indica
gggcatgaccccccttttataaggattagtgggtcttttggtcttatagtccaaatagagagaattcattgtcttggcccaatgggctgaccaaaaacgttttatagcatgtctatgggtcccgagcgtgttagtacgttatgtctatcccattatggctcgatggcaataccatgcattaccgattatataattatcattatacgttaatatcgacactgagtgagcaacacttaattatgttaatctacataaaatattctaacacattcaccttatcaaaaataccgatccaaaaagtagagcgaaagaatcacttgtgatcaagaatagtgaagtaaaaaaaaacgagttagagaatcgaagctgacttaaaaaaattacaagtatcaattacatggattgtgctttatcgaatgaattatgtacgaggccttcaatctcagacgaggagcaggaggacaatggtggtttagatttcgctctaatggtctagtctgaacacgatcgggatttaggatttagattttattttatttattttat

SEQ ID NO: 178719 - DNA, 585 bp, Cannabis indica
aaaaacagaaagttaggctacaatccgatatttggaaacattttactatgattgaagggggtaatccggtggatcctagggctgcttgtaattactgtgggaaggattatgctgctgaccataggaaacatggcactagtagcttgtggaatcactacaaccatcagtgtgaacaaaattcaaataagggtgatggaggtgaagagaaagaatctgaaccaaaggaagaagagggtgatttggttgatacgccattgactgaagaagcttgcaggcatgctattgcgaggtatatagtatcggagaagttgccatatagtattgttgagagtgagggatttaggcagttcattcaggctttcttacccaatttcgagctctcaagcgctacacttgcaagagatatttgccagttgaatttggataaggggaaagataagaaaggttctgaagaataaaagggataccacttatagataacacatgtatcttctttaaaatgttattttacatgcgtatcatttcatactggctagatagtgagtgcaagttgtagaagatatttatcattctctattacttttt

SEQ ID NO: 178720 - DNA, 698 bp, Cannabis indica
atatacatcatcttatggataagctctttaaagatccaaaatgaatatcaaccatattaaatgtcacaaaagaacccttttttttatctgtttaatttttttatttgatttaaaattttccacccactagtaaaatactttaatttcaaaagtctatatatataactcaagcatcgaccactcactctcatactcatcaaaaacccttaatatctcaacattgctacatccataaatacatatatatactcgatctcccacctcccaaagagaacagctctataatatataatatttgaccaaaaccaaaagttactatatctatataaaaaaataatataaaataaaaggtaaacgacagtgaaaatggctagtacgacgtcgttgtacgatgttcttgggctttcaattggtgcaaacggacaagagattaaagcagcctataggaaactagcaagaatgtgtcatcctgatgtggtagctttcgaacagaaagaaatctcagccaacgagttcattaaaatccacgcagcttattccaccttgtctgatcctcataaaagagctaactatgataaagatctttccaacagatcaaggcgatcctttgtctattcagcctcgtctggtgccgccgcttcagccatggcatcatcgggattttcttgtagaagttgggagactgatcagtgtggtag

SEQ ID NO: 178721 - DNA, 1312 bp, Cannabis indica
aatcaaaatcacacacactagaagtatagtgtatagtaaatcgtataatctttattcatcttgtataatctcaattctcttgtacatccttacaagataatatcttttccatatgaataaggaattttcatatacttaataattctacttctataatttatgtatcatttatcttataattgtattttatatattttgtaatatattatccattaataacttgcttttagggcataaatcccaaaaatctccaacttgcactaaatgtaagtgctatttattctattactcttatagacgttgtttgacaatatttataatcattaaatagataaagataatatttagataaataaattagataaatgataattttagaaaaagataaattatttcatttaatgaaataaagtgacaaaaattaaagccatatgacccacatgtgtattcggccaaggcttttgatttatgacccgttctctttttcctagcccatttaaccaaaccctagtccaataaagagcttatttgcggaatatgatggagctttgttagataacttaattagagtgacttaacctaaatttgtcaagaaaagctgttcattttatcttccttaagtgaattcaaaaattctataaaatttttccctctcaaattattccaatagtgagttgagtatcaacccacactatttaaggtgatactcagatctctttgcagaagactaaaaaaatttgtcactttttgagtttaaggaagttatctaggttcatcacttgccctgctacagaaagggaattaagggatagagtgactgaacagaaggagtcactaatttttgctacaaccaatgtaaagatttctaatctcttacttgttatttgatcattttatgaattttatattttaggatgttagattattatgtgataatctaacatacatgctagtaaattgagatccaagtaaataagtttcattaacaatcctcagagccatggtaatgatttcatttcatgaaaatatggttttaaaacgatttgaattcatttggtgtgatttggatggtgttgaaacttatttactaggctcttattactaagatatatgttgattatacaatatataatctaacatcctaacatatgaaatacctattagataaataaataccttagagtttaggattacatagattaatggcagaaaatttaacgactctccgttagtcttatcctcaaatccttctgtagcagagtatcaccacgtattgaaccaggtatagctttctaaactagataataatctt

SEQ ID NO: 178722 - DNA, 550 bp, Cannabis indica
taccgcatatataaacaaatatagatgctattcactttctatcgtcactgttagattaagtggcacatttctttcatccaatttactttttttttttctatagtggactaatttttttaatttatttttttattattttcttttttgcatctatatctatttctattttttataatttttaaaaaacaacaattacatcgttaattattttgaataaaaaataatattattgcaatctatcttcaaattgatcattttgatacgtgaaaaacatatattttttttaccatcaccaaagaatatatctaaaatcaaaagtaattatttagtttcttttataaattgttcaaaaaaataacaaaatttttaaactcattaaaatgtaccattctaaaagtatttttttattgtgactaatttatctaaaaaatattaattttatatttaaaagttactagatgttattaaaaagtaagtaggtactacgatactaattggtttctttttaataataagttttactttgagataatattatctcatttatatt

SEQ ID NO: 178723 - DNA, 634 bp, Cannabis indica
gtgtcgattatatgggtatatagtgtcggttagtagtatataatcgatgccatatctacctatggcctcggttcttttataataactgacgccatagggtaacatttagtatcggttgttttagaccctacatcgtcgcttggatcaacgtcggtagtaaattttaccaaaatcgatgctgaaaggccttaaaaactgcctctaaagtccaaatttgtagtagtcctgggcgtagggcaagggacccatcctaggtcgactgctatgacttaggactactcaagtccaagatgtcatatatcttgccacatgttaaacattgatgttcaggtcactagaaaaaatttctggattaatagatggaatagtggaaagcaaaacggaccaaagttcaaatagtttagacctctaaaattttgtaaagaggattcatcgtaccaagccttaaagtctaagatagttttgcagccaattaccctaaaacaaccagccaccaaaaaaaaagagaaagagaaaaaaaaaaaaagtaaatagtagataggtagatagatgatagatgataggtgacgtaagaaaaagagaaataaaaaaagatagtacaataacagtatattgctatttgcatattaaaatg

SEQ ID NO: 178724 - DNA, 1400 bp, Cannabis indica
ccaaaagaggaaaaaggatggcccccgacccttttgttacattgggctgctcctcaatacctacgtgccttgcgctctacaccgcccgcgcccgtgcacttcgcgctctgcactgctcgcgcactccgcgctgcgtaccgattgcacccacgtgctcctgtgccttgcacccgcgtgcccccgcgccctcgcgccccacactgcccgcgcgcctgacgctacttgcacctgctttcccttgtgcttgtatcgcccgcgcttccgtgccctacgctgctcacgcttacgctccctcacgctcgcgcaccccgcaccatgcctgctccctgcgctcagcctcctacactttgttaatcttcttttccctcctggtaccaacattctaagcaaggaagtatcagacgagataatgacgacacaatgagtatagataatgtggacaaagttcatttcatctgaggtacaaaattaaaggggtatttttaaatgtaacttaggatgttaggtatattagaccacttaggatataacattaactgactacacaatgaagagatgaacgagctgaggataagcaacttgcgcttggaagaaacaattgcaaacatgcaaatggcgttagaggagctcatgggaggccattttgaggcacccgtaatcgggcgaagactgccagaataggaaaaagaggagcgagtaggcgtgaggatggagatattaaggtacttagacaaataacaccactgaatcctccccacgaaaagcttcaactcgaaaaaatccagaaccctcatcatgacccaaaaagaccgagtcaaaggcggccaaggagactgagagaaaagctctgtcagaagaccacagttgagaagcatacgctaacagtggaatcacttacaaaacgaaaaaaaagcaaagcatgccaccacggacctacaagagaacttaactaaaaggaggaaagagttagataaggagatggaagatcttcgacaaaggatagttttggtcacatctgagcattgtaactgggacaatgatgactttgacgaggaatccccagtctcaagggagattcaagcatagcctttgctcgtgaactttaaagagcccaacatgttaccatgtgagggcataacgaacccaaaacactgccgagatgcttttaataaaataatgaagatgaagagggtcacaagcaaagcaagatgccagtgcatttcggtgatgcttagagatgcaacatacaagtggttcaagaggttggcgcctaggactatcacctcttcgaaacagttcactattgaattcttagcccaacagcatgcgtccacacactacaccatcccaagaacaaacttggaaaatattaagcaaggaaagtgtaacaccctaactac

SEQ ID NO: 178725 - DNA, 1327 bp, Cannabis indica
agaaacgtaccctgacactcatttaatgtatcttgagactcatctaatgtaccacggaatacattccgtgaaagtacatcacgggacaaaatcatatccctatatttttaaccataaagttttaatgcttttagtaacaatgatatttttttaggtctcaattaagtaaattttttttaccataaagttttaatgctgcaaaatatatagagtgaaaattacattattaaaagagtttttactttttttttaaaaaaaaaaaaaaaaaacttaaagaagagagatatgaattatcggagatctctttttaatttgcaaaaatatgcatagtgccattagattatatttacaatcactacattattaattgttgagtttacgagttgagaatcacctatcttacacacatatatttaaatattaataatcataaatattttttaacgtaattaaaagacaaaattgtattaataatttatctcactaaattaatacattattgtcatttattaaacataatgctcaattattatatgaaatttgtcatatttataatagcaatacatatagacagaacgtatgttagagtctacatgattcgaaaagagttaaaagataaaaaatgagaagttaaataattgttttagaagtaactaattttatgtctccttatgttatttactatattcatttttgtatattggagtttcactctgataccaattaaaacaactaaattaatctataaaattcatttaaaataaaattagtcatgcttgagtagtttaaaaaacataaaaaattatacaaatatataaattgttatcgctatcataaatctcaattaatgtaataacaatattaaatcaattataattaaatcaagtaatataaaataataaaattttaaaacttattgtaacgctaaaaatatatattaattatataaacacaacacaatatgtaattttactctcttgtttatatgggataacaatggaatgcttctcaaaataattagtgtacattatttatttttaccatttatatatttatatatatatatatatattttacatataactaaaaatatatacaacatacataaatagggatatgattttgtcccgtaatgtactttcacggaatgtattccgtggtacattagataggtctcagggaatattaaatgagtgtcagggtacgtttctactttttaagcttaattacccctagatcaatttaagccgtcagattaaataactccctcatctaatggttgtcgtaaagtacaataaccaaacaaaatcatatccctacataaact

SEQ ID NO: 178726 - DNA, 621 bp, Cannabis indica
atttttgttatagcaaaacaaaaaaaaaaaaaaaaaaaaaaattaaaaacttttttatttaaggggaaaattcattcatgctccaaaatagagcaaaactaggaggaagacagggcaggtcttccatacagggaaatcactaatccaaatttggctaatacagtttctcaaatgaacactagcaagtgcatgtgatcttaaattagaattggaatggatcttgttgttgtaactttgtaatctaaccaagttacccaacatatgaaaaaataacatcaataacaataaataacttgcatatttggagacaaggaagcccaggtactaacattgtcaattgcaaattcagataaatagaaaagcaattcagcatgattttgtcaaaattgctgttattactgatccacaggtaatcatatttccacgttcgctgcgtcgtttttattatttaagtattctgcttttcctctaccaaagaattaatctcttaattgcttaacagatcatggatagaacatctctcaatcttgctccaaagtcatttgctttggaaatggctcagttctacactgatttattcatgcgacgagcatttctttcatctatcatgccttttaagcc

SEQ ID NO: 178727 - DNA, 1001 bp, Cannabis indica
caatttcttcagtgagatcagtagccaccaaagcttgaatgacaaaactagtatcccataattgactaccaaaactctgtcaaatcaatatatgactcttgtctatacatattagtatcaaaacttaaccattcattttgttttagtgcataatttaaatattttgtatactattttaaataaaggaaggttataattgtaagtatagaatttgtaatttctgttaacaaacttttacaaatttgtaacagtgtatttttttttatttttcttttgttttttttattaactaaaatttataaatttttaactaaattttatttatgtttatattatcatcacatattataattttgtaaacaatatttacagaataaataaaaatttagttacaagttgttatgaatttctacaaactattatatgctatattttttattaataacttttactttaaattgttaataattttcctaaatatttgggaaaattataacttatctacaatgtgtatatatataaatattaccttagttagctataactaatttaaaccatgcatggccatttacatctatatatagtgaatttattgaaattatgatttatgataataaaaatattaataagtatatactaaagaaaaaggttatacctgcattttcattccatcttcagcaacccataagtaatctggaattctagcaaggtgttttctaaaaataaactccatttggattttcaacccaacacgaaagcataaataacacctgttgattaaaataaaaaaatgttaaaaaataaaattaaataagaatctataatacttttgacacatataaattcaacagttgaattacacatagaaatttcatatttaaaaattgttttagtaaaaaaaaaataaataataatatcttcaatattaagttatattacttttcgtacacatccaattgtaatatatcgactatctcatcttcataatggatatgtttcta

SEQ ID NO: 178728 - DNA, 742 bp, Cannabis indica
agcgctcccactcaattgcactaccgtgttcccaaaatgtacgtatcaccctgacctaaaagtaggcttaactaacaaatcaaagaacacgaatagcctttcaagattgagcctaatcataacaggattaagaacatttgatctaggatcaactaggcgatattgacttgaatagatattacggtaagtttaataaatctaagtcaaagttcaatatcggtcccttccgatgcatactccatgcatccaacctgagctttactttaaccaatgctctggaaagaacatagcacttctccaaatgcaagtaaactctgttgtagattatcatatcagtaaaaccctatgtctgataaatctaggaaactttattcacatagtcatgtttactttccaatgtgttgacggcacaataaacaggatcaagtatgtgaaaagggtttcagatgaatttatacattatgtacatataatcatgaaataaatcatgtgaaccatgcaacattaaatgttatttctgatctatattaataagtaaatctgattatattgaaatgagttttatttagggcataaaacccaacagatacgcctaggttctgccacaccacaaacaaaaatactctcatgagcagtccatggccttttgttgattggggaattgacttagtaggattcctccccactaaaaaaggagaagttaactacaccatagctattgttgactacttcaccaaattgg

SEQ ID NO: 178729 - DNA, 781 bp, Cannabis indica
cacttattatatatttaaaaaatcgctaattatttataggacatcatttgctaccataatctctaataataatgttttatatcttttcttaaaatcttattttcaaggatgataagaaaatttcatcttttagtcacttgagtatctcatcatcattttctccacttcccaaaattcactaatttcaaatccaaagctaatatataatatcaagaaaattcttaaaaagtattagtagtgtttaatactcttttatatgttaatatcgttattggtccaactaaatatcaaattttatatagtttaacataataatttttagaaagtatcgattattaatcacaaaacgacatgtttagaagtactaaatactactagtgtccaataataatacccatcatcaaaatccactaattaattagtttgttaatttactctacaattcttatctagtaaatccaatatattaactggtcttatctaatttattaaaatattgacctttttaataaattaccaatcttgatatttatgatggcaaattagtagaaaagaaaaatctaatttaccaaacaatatgtaataatatgagaacataggtagaaaaccattattgattggattaaaaagaaacaatagtacaagtgggtaatttgctttgtttttctaaatttgtgtagaggagagaacatgaaaaaaggataaaagagaaaattaaaaaaaaaaaaaagtaataggcattatgaacacattttaatgcattcactactcaactcttaaa

SEQ ID NO: 178730 - DNA, 1026 bp, Cannabis indica
aatctaatcgtagatgatgaacatagaaataataatgaacaaaaaatgaaaaaaaaaaaaaagagtgagagaaagagagaaataacatgtaacagagaaagaaaatggaggaggaagaagaatgacatcatcaaaaaggtaaatttgtaattaaagaacttttttaaatataaaaatgaaaaacataaaatataaaaaagtttaaaaaagctaactggaataaaaatgtaaaaaaagggccaaatttagtatctagtgtaaaaatctcaaatatatatttagtaataacaaaagaagattgcaatattagtttgttaagttacgtcaaaaacaaaaggaaaaaaattaatattttaaaatatatataaataaaattttaatttattaaaaaaaataaaaaataatattgatattttaattttagttgatatatagaacggtttatgataaatatacctacttagtctattatttatttttttttttaaaaaaaatacatatagtttcaagaattaaaaatataataatttacaaatgtgagacaataggataagacaatgggtaagatacaataataattataggtgagagatagtgagacaacgagggtgagatatagtgtaaaatgatcaaatataaaaataatgtattatatttataggaaacattctaattttttcctacactacaaacctttagtgacaacataatttttgttgactatatgtgacttttagtcacaataacaagtcacttgtgattaaaataaagtatttaaatacaagttgtcactaatttagttttactcacaacaagtattgtgattaaaaatacatttagttataacaaattgttatttttgtgactaatacttttagtcacagatattttagttacaacaacatagaaataatgatttataattagttataatttttttacttttaatcacaagttttattgtgactaaaagtaagatttcttttgtagtgttactttatttatacttatttttataattattat

SEQ ID NO: 178731 - DNA, 574 bp, Cannabis indica
tagtaattacacagttacttacaaacacacggcgaattaaaactctatgagcaaaattgtgccaatcaaattgaatgaacaccaatataacaatcctccttacttttaggtacaagaacggacggtttctttaatattattcagatatatagctgtaactgggcaacgcattggttgccttatttattcagataattaattaaagctgagaatacggggatttgtacgtatggtcaaaaaagtggccacatattatttggatttagatcctataagccaactccaataaaatattaaaaaaaatgcgaaaaaataataatagtatttagtacacttttatgcataaatattgttatgaatttaataaatttttaatgttatataatttaatataataatttttaaaaagtatgttcaatactaaaatatcaaaatttgatgagatttttacactaaatttattttaaccacacttctaaaacctatcatatttataacattgtttacgatattctactattattaattgtgacacactataaaactatataaagaaataattctattaattttt

SEQ ID NO: 178732 - DNA, 666 bp, Cannabis indica
ggatttgagggcacttgactgaacggggcttaaaatgcaaggaagaatactttaactaatatgtaaaataattagtccatcaaacaagaaaaataaataacaaaatgacccaactacaaaatagttggttataaatattttataactaatattttattgtgattgatatctttattttgggtttgaattttatgattgtttgatccgtcgaggcacaaccgattccccaaccagaggtcgttttaatatccaaagacaatttacttggctgactaaaactgtttgtcaaggcatgggcacaaaggttgtgtccctcaataagtttaagctttgcttaagcttattggggacacaagttggtaaaactcttaatgggttcgagctaagaccctcaaatacacttaaacaacatcaggaaagtgaatatggggcatattgagttcattacaacaaaagattcaaatatatctccagatcagaatattacaacaaaagctagatcagtacaaaattcatcacagaggggcatattgagttcttttggaggaagcttacagttgaaagctttggaacccttgggtagggttcggatatccaaaatctcaaggtagttgttcatgcaaaagaaaggagaagaaattaatactgatttagtgataaacagag

SEQ ID NO: 178733 - DNA, 913 bp, Cannabis indica
ctagaactaagtgaaggatgttgctcggaaagtctctcagcatgaactaagctagaagacctagatgatccagtgttccttttctgtgttgaataactgctactgcatgatgtactagcactgcctttttctaagacattattactatttccatgcttccattgttctagtcgagtccaatcaagaactccaacatttaaaatcttttccggatagttttctcccttctcgatacgctgcagataaactggcaagttcgacatatgcttgacaagctcaccatctccaactaccttccccttgttcctttggctaaactgactccccggagattttgctgtatctctcgctaaatgccaacgcgcaatactgtgtggcgaatcaacatgtttttttgcttttaatctgtcatgagtcttaggaattctatttaaagggggtaagaacaccctctcctgcgctggttttgagatattccgaagtttagaactgtttttaagctcaatgctaactcccatgtcagcaacggaatctaaaagagtattagctaagttgaaactagattgtacagtagctttaaaccttcacgggaacatattagctgccagggcattgtgagacaatagttctcgctgaaagttctgcaaccctgaatttgaaaagaagattcgcataggtaagagtgtccactgcaatcaaaatgatatcaaaacaaatcgacaaccgaaaaatagttttaagaacaaggcatcattaccatttctttgatgaatgaacttaattgcattatacactatgtttcaagaattagacaagaaattgaaaaagataaatacaagtattgcattatgctcgtagtgttctatagaataaataattttttaaaaaaaaaaaaaaaaaaaaaaacaaaaaa

SEQ ID NO: 178734 - DNA, 497 bp, Cannabis indica
tttccctggcgttaaggaatacatagaaagtggtgactttaaaaaagatgtgccattgctggaagaagtggttataatggaaggtgtgcctcattttattaaccaagcaaaaccagaggagattagctcccatatacatgaattcattaagaagttccgagtttaatttgcttgaataatctatgtaaaacagagcagtcatgatacctaaatcaaataaattactattaattgtacttttagtagcttacacatcaattaataattgagtcatgagtgaatctgttgcttagttataaactaggaaacaaacagctggattctaaagcataattgaaatatatatatttaatagcacatttatttaattaattttaattttttttaaatatattataaatatataatgaatgtgagggatttattaaatttttaaaaagctgtatttataatgttatatttgtgtaacttgtctaatatttataggaaagttttat

SEQ ID NO: 178735 - DNA, 505 bp, Cannabis indica
ttatattgttgttaaaacttaatgagatgtttgttgtaacattaatatagttataattatctaaataaaaaatacgaataaatcttagtagtcctccaataatattgtacaatataatatacattgttatcagcaccatataatcttcaaggctatactgatatatcgtgtttttattaattaataatttatatattatttattaaaattaaattatgtgatatgcattattaatttaataatttgtacaataaaataccacttatcatttatctacgattatttttaaaaaaactataaaccatgtgtgggaaaatatatttataggcatgtggtaagtgagtgagtggtgactggtgagggtaagtaatgggaggacaggtggcgtgatattgtagaaagtgaaaagcactacaccaaaattaacaaatgttcggaaacacaaacaaacaccatcactaaaccataacttgttgcgtttgttgcgctaaacactatgacaatt

SEQ ID NO: 178736 - DNA, 761 bp, Cannabis indica
acgcttaaggaatcgtaaaatagcgagtacatacttcccgcaactgagctcttttgttgttgtggttgttcagttcagttgttttgacaattgacaatgttgtaacaggatgttccaacaacagaccctctcatgaatgtggcgacagcagaaattagagctttgcttgttgaaaaaatataggtactcaaagtatgcagcaaaagccagagccagaattcaagaactatccaccattggagtaagcaatctgctccataacacaacattaaacacacatattagcagtttcaaaacttgtttaaaatacttgtgttgagaaaataagcattgccctaagggaccagcctgagattgataatggtgtggagagcattgtcaaaaatttgagcaagatttttaactatgaaagaagaacaagatgggttcaaagcttcatagtaaagagaaaccatctttgaatccttgtgtttctcatcaacttgtgtattttgcaggaagaccttgagattgacacaaaaactggaagccaagcaagttggtggactcaacttaagacattgattcgaagatcatccttgaacatgtccagagatgttggatattactggttgaggatcattatctatatagttgtatctatatgtgttggtaccatctattatgatgtgggaaatagctatactgccatctatgctcgttcagcttgtacggcttttataacaggcttcatgacatttatgtctattggaggcttccca

SEQ ID NO: 178737 - DNA, 762 bp, Cannabis indica
ataaattagagagagaaagagaaagagagtttcagagctcgaggaaggagacagagaaaaacagagagagaaggtttaataatataagggaaaagacgaaaaaggacaggttctttttcttttggggagaagagtttaacagtgtttgtaagcgtattgggggaatcaaaacctgttttagttgaatttactattttagcctctgggtatttgggtaattacattatccgttgtgatggttgggttgtgaatatgtttaaaaggggttgagggttattttggggatttcctaaagcgaggctatgatggttctatgagaaagcgcggatcttattcaccgttggattaagggtcttggttgaaatcgacggtctgggtttattgttggggaaagttaaagcgtgtaggctagatactcgggttattatgtttgtacacgtggtgggattttattggattgaaatcctgccacgtcggtatatttatgtcctaattaaatattatcaaaaattgaaaaaaaataaaagttagattacaatttttttgtttagaatcttcttagagtatctaatgtcatttagttacttttttgctatttttttgatttgttaatattctaaaattggatttaggacttttttcaaaaaatatttcaaacactatatttttaaaattttcatatttagaataaaaaaatattttaaaaatgtaaaaaaataaaaatgattaaaaagtgtagtttagtgacatcttaaaatgctg

SEQ ID NO: 178738 - DNA, 1282 bp, Cannabis indica
aatatgttttatttcctagaaaaagagtaatgaaaaaagtgagacaaggtccaagaacctattatgcaaacaaattttgaactagttgttacatagaatattacaacttttatggccgtaacaaacaaattctacgaaaatatagtttaaatccagaaggtcaaacttgtcatacagaaataaataaatttcaaacagggcatatatgatctaacaaggtctttaatgataattcacaaattatttttcaataccagcagcaaaacataacaacattaagaatgagatggaaaactaggtgaggaaccacaaactttatattaagaacccatgacacaatcttggaataccataactgacagactgaattgtcactttgaagatgttgctcctttaaaagcatttcatatcaactgcatccacttgccttttactatcacttctcagactcagttactttctcaggaacatttgacggatgttaaagtctaaaatatgtaaagttgatggactaaatgatacaaatataaatattaggtaagtagtcacctccagcaattccttcagacccattcgtctaggttgtccattgagaatactgcagaaatataaacagtgaaaaaaaaaatgagtaaatgaattcaacaagtcattcatgcagagaaatggagaaatgggtaggcttttttattataaaaagaaaagatgtaaaagtagctgtattagaaaggatgtgaaaatacatccttttgaaaaagtcacaagcacaacaagattcctcaggttacgtcaggcaaaaaatttaactgaactattatatgccacaacaattattctcactacaggctaaaacagttacgcaaacacctaataaaaagctcaattcccatcattacagttgtgtcccatttcaatttatttcaatccttcatcttaaattaaataaaatgaaacaacataactccaaaatcaagtattatacaggaatccaataccattgaagtatctgaggtgacttacagccgatattctaatttaacaagaggacaaaaacctaaattcttagtcatatttcaatagtcacaaagaaataactcaccccaccatgttacagctaaaacctgattgaagagatgtaagacggaagagattgtttagaacaattgaagggtctgatccccgtttgagctgatacaacgaatttcgaaacttcaacatagaatcttctaaatatagcttttatgtgttgaaaaggaaaacaatacagcacaacagctctctc

SEQ ID NO: 178739 - DNA, 531 bp, Cannabis indica
tatattgtaacaattttaatcacatgacataaattaatttgtgattaattaattaaataaattaatattattttttattttttataattaacatataaaaaataaaattattcgagttagctagatttaatagatattaattaaaaatatttatgatatataatttaaaattcataataaatatctactaaaaatatttaaacaatttatatacacctaatataaattaaaatttaaattactaatctactttattttgtattacttatagaacaaataattttatacctaattttaaatattttaataattttgccattttaaaatttaaaatttatgtttttattttttcattttaattttcaaaatattttattcattaatattagctcaacaaatataaaagaaaattaataaatatatatagttttttttttttttttttgaaagtaataaatatatatttttaaaataatataattaatatttaaaattaccgcacgaagggcggctatattatctaatttaaca

SEQ ID NO: 178740 - DNA, 944 bp, Cannabis indica
caagtgagatacggtaattacaatgagtttgatagtgtggagactatgagtgagatgcgatactgatgataataaacgttaaaagtagtgacgactacaagtgagatacggtaatgaaaataactttgaatatagtgacaagtactagtaagatacagtactttaaacttatttttatttttcaatttacatagctaaaatataattttgtcttatattgtaacaatttaatcacattaattaattaattaattaatttttttattttttatttatttacacatagaaaataaagaaaatattggagttaattaaatttaagagatattaataaaaattgtttattatatataatttgaatttcatgataaatatctactaaaatatttaaaaaatttatatacacttaatataaattaaatttaaattattagtttattttattttatattatttatagtataaataattttatacctaattttaaatatttttaataaattttctattttaaaatttaaaatttatatttatatttttatttttttcattttaattaaaagtattttatacattaatatcaattcaataaataataaaaaaattaataaatatgaatttttaaaaataatataactaatatttaatactgaaaggcggctatataatctagttcattttataaaagattaaattgtaatccaataactaataataataaaaaaattaaaatttatgcgcataattttactttctaaataaataaaaaaaatatctcattttcttgactatcaaaaatatatttatatttaagattctttttatttgtctcaatctaatcaaattaatttttttttttactctctctcgacacccttacacccttatatatgtctagttttgaacaacgcactttcatatactgaaactgaatagccataatt

SEQ ID NO: 178741 - DNA, 643 bp, Cannabis indica
gaaattagatggtgtaaaaaaaacttataatacaacgtgcatatattattagatgttcttcatgaaagatttcttaatatctacaaacatttaaacttgagcaaactttctcgcacaagacaccaccattgtcataaccgaaacgaagagcgccgcgattccaacaatgaacaataaaattagggtatccatattgtttccataccaagaagtagtgatgagagtgcaagaaaaggttattagagagattgtagaggcaaacaatgaagagatgagaagaggagaggagactcttccactaattattggcccattattattattaaaagagacaataaaaatcccaataataataattgttgaaagggtcatacacaatgggcttgtactttttatccaatcttctacatctccaaacaatgttttgtgagttttattgaacaagtcttgtgctgttaatccttctgaatttttttttctctatataatatggttctacaaccttttttcacttcctgcatgtgacaaagaatatatatatatatatatatatatatatggaagaggtttcaatggttacatttttattgtaaccatcatggttacattttttttaagccattggattactattaaatggttg

SEQ ID NO: 178742 - DNA, 532 bp, Cannabis indica
aggaatttttaggtatggtcactatagcatattgtaggccaccacaattgacctgtagaactatgcatcctccacaaggtcattgccataggcaaacaatcttacacccaagatcattggagtggaattaggctttgcaaactccatttttttcgagcaagtaaatctttgagatactttgactgagatagatgtatgccatttactgcatggagcacatcaatgcctaagaaatatatgatttccccccaacgtgttttagagcaaaaatctcattcatatctgagattaatgttgatatgagagatggagagttccctcttattaaaatatcatctacataaatagaaattagggtagtgttacttacaatgtgcttgaaaacattaattaacctacctttgaggagaaaaaacaaaaggatgtaagaacatatataggctaatttgtcaaaccaggccccaagggcctattttaaaccataaaatgttttatttaacttacaaacactttatggttgagttggatcttc

SEQ ID NO: 178743 - DNA, 573 bp, Cannabis indica
cgaacgggtcccacctggacccgtttgtcccccagcgccaactcttccgtgcttgacacgtgtccgcctgctgccagcattttcccccactctagccattccatgctcgccacttgtccgctcctcctttaatccgagtttcagcaacaaatacatgtgcgccaagtgtcgctctctccttcaatccgccatttttcaaattattttgaaattacatttcaaaataatttataattttatattcctttgcatttatttggctctctttactatttctctcagtgaataaattgcactttgtatattttaccattttaccctcacctacctcatttatgcaaagaaatctttagaaaaaaatattaaaataattaatttattaattattttaattcttccactttggttataaataaggaagagatgagacctcttaagacacctctttaccccttgggggcatatcttagacacactctctttagtgtaatttttaaagtaaaaaaactatagcaaaatttctcttcacttttcttctcatatttctttatgagaatgattagcataatggcc

SEQ ID NO: 178744 - DNA, 1336 bp, Cannabis indica
gttatttttcattatgatctatccactttaccatttttttaccactgattttgtcgtttatcttctgctaatggtacattttaagagcagagaatatgagttttgtatattacttcaggctttaagtttggaatctacaagcaaattgcatattattggttgtgctatgtttatattgagcattcatttatttccttgcataaagtcgaagaacaccaggacttgacatttttctaaccttgtaatacacactgttcaacttcaaatgctttacatgctgtatggatggagaatgaaccattacaaatgtcagaatttgttaaatagagaatcacacttgagatgttgtagtctataaataaaagggtatggcgttggaattcacattatacacaaagtttcatatcctgatcaattgtacttatgaagttccccatgtgatactaattaagttttggaagctttggtgtactcatttttcagtcctctccttttagatttcgttctatttgaggtctgcaatttgtcatctgtatagtttgttaagtgttaatgaaggtccatatattaccattcctcaatcttatattggaatttggaataggtatagctgcaaaccctatgaccaaagatcaatctgagcccgaagagaagatattttccttttcagaacaggaaaatgaagacagtactattagcataactgttgttggagcttctggagaccttgccaaaaagaagatttttccagcactttttgctctttattatgatgattatctacccaaggttcaacttcatgactattatcatcatatgctgaatctgttattattttgtccatttggaaatggctgaccatttgagctttttctgatattattggtctttggcagaactttattgtgtttggttatgctcgaactaaaatgagcgatgaagaacttaggaatgtggtcagcagaactttgacctgcagaattgataagaggtaaataatctggtttgcaggtgcctctgcattaagtttcttctgttgtggtgattgacatatacaaggattatgcagggagaattgtgaggataagatgaatgaatttttgaaaagatgcttttatcattctggacagtataattctgaggaggattttgtagaattagacaacaagctgaaagagaaggaggtatttagacccttcttgagcttttgccatcaaccatttttaattataaccaatgtgaatcaccaaagaataaggcaaaaagtaacaaaacacgaaacaaatcctcctgcttccctctttggaaaagggaaaaaaaaaagaaagaagtgcct

SEQ ID NO: 178745 - DNA, 662 bp, Cannabis indica
actatatttacgacgtggctactttattgatcaattaacagaacgataaattgagtgttaaagtttagaaatttgaggatatacaataagaactacaatgatgacatacaacttttatatgattaggaataataaaaataatacatgatagaaaaaatttgattcataatactcacacctatttcttcttcttacataatcttacatctgctttttttttgttcaattcataataaattttttctatatgaaaaaaatacttttcctatattttacaaattaaaaaaaaaacttcacatatatatagttatgaatacatatatataaataattgaataattatttaatttaatcaatatttattattattatgtggtttttttaaaaaataattaatttaagatagatatttttatagaaaatttattaaaataatagtaaaatattaatttgtaaatttatgcttttataaaatattaaaaaattgagagaatctatatatctatataaaagataaatatgaggcggtgacgtggcaataaaaaagtgagttatcatatagaaaaataatttaagatacatatacagtgagtttagtaagtgaataaaaaaaataggtgagtgatcattttcaaaattacgtcatatttgaaagaaaaaaa

SEQ ID NO: 178746 - DNA, 626 bp, Cannabis indica
ttttcacgtcagtgtaaatttagtgcacagataaattgcgagactaaataatttgaagcatataattataattactttccaccgtgatgacattactgtaattgtgaataactatatgtttgggatttaataaaacttataatcacataataaacatgtgaacaaaacatataacaaaatcaagatatgatttcagatctttattaaaaactaaataagattataatgaaattaagttttatttaaagacataaaattctaacaataactataacgaacatcatcatgaaaagaattttgaaaaaaaatattctaatatatattttcaaatacaaaagttgattaaaaaacttataatagaaaattgatggtagcactcttcatgaatgaatatatataccttcatgtcatcatcatcttgaaatagtaattatataagtaacaatagaaaaataataatatttattaattaggaaaattactttattatatattatatttttatttttttttaaatttacggttggagttgctctagagttttttatgtaggttgctatacagattttgattgcgatatttaggttactccattaattgctatgaaatttttgtgtagaatttcg

SEQ ID NO: 178747 - DNA, 538 bp, Cannabis indica
tgagtgactcgctaaattactttccagggacttcaacttgaaactaaaagttttcctatcgataaataacatggtaataccctaaaaatctcaaaaatgggaaaaactagggttcaaaaaatcccccaaccggcaaaccggttcccaaccgaaagttcggttctgggtcaccaaccggtccactggttggtacaggtcccccagaaccagaattccggttctatgctaagaacccgaaaaaatgcccccatgacctcaaaatccaaccaaactccaccaaactttccagtatacttgtacaatggatttacaacataattcaaccagaaaatcacagaacaaaccaatgaatctcaacttcccattaaaagacctaaacttgagtttcaaaaactcaagcttgctcaaacccatcatcaaagttcaaaaactaacatcctgaactcaaaatcaacttaaaaaaaaacttagaattcaaagccctaaagcatacgtaaacctaacagccactattacacaaaatcacaagttcaaacta

SEQ ID NO: 178748 - DNA, 622 bp, Cannabis indica
tcctggtaaaataattccaaacagattctccttgggagcctgctcggttttaccagcgaactttcccttttcccattttcttgctgattgttattgttggactgtttaccacccaagcttgaactgcttgggtactggggtagctagacggatgttccagcaaaggaactttttgctgccaggtttttgctcaacctctgctcattgaatggcttcttcaagcttaatgaaaccatccgcacgatcaaggaagtcactcatagagtctattggtctaattttcctgatatctttccaaaaatctccaagaacattgatgccccccagtattgcggacgatttcctatctttggtcaatcgtgcaaccttagttgcctccgtcatgaatctcttgatgtaagcttggagaggttctcctagtctttgcttcactttgaccaggtcttctaaatgcaatgggtattggcgagaagaggagaattgtgcatggaattctgatgagaaagccttccatgagtttaaccttctaagtatcaacttgaaataccattactaggcagcctctgagagggtggcaggaaaaaatctgcacaaacatctcctcgtgctccttgcaggtcca

SEQ ID NO: 178749 - DNA, 721 bp, Cannabis indica
acaaagacgaagccatgacctttgtgcatcaattttctgttagacacgtagagagaaaacatagttttcatgcaccaacaatcattttaatcgtaatagtgaaaatcccacatttttgatactggtacccctttgtgaaatgtggtcggacccatctcggatatttttgcaacgtatgcacaatgaagttcatactagtcagacatgaatacgacgatgggtttcacgttacattttgttaaaatgttcctctaattcaaaattttaaaatattcttcttttcagggtaaattttaacaagttttttccttactcttatactcgttagtgttctcttaaattcttaccctacacgtcatcaatatccaagattgttgtgcattaattttatatttgacacattgagagaaaacgtagattctatgcactaacaaacattttaattgaaatagtaaaaatcttaaatttctgatagttgtacccctggcctagacccatcttggtattttttttggcactaatcaaaatgaattcatactactaagatgttaatatcaagattggtttcgtgttaaatttggttaaaatgcccccataattataaaatttgaaaatattcttcttttcagggtaaattttataagtttttcctactcttgaaaaattttgaaatttcacagggaaaaagcaaagatcgatgttcatcacttttctattgaac

SEQ ID NO: 178750 - DNA, 724 bp, Cannabis indica
tccttcgaatatacactatgttgaatgggttccagccttaacgggttgcctactcttcatctgggatgattaactacttacgaattcggcacagttatttcatttggactagccttttgccctagagtatttgaactgtatttgtcatagaacttcaacgtgtccccatctgaaaaacatagataacaataataaactatctaaattattaataataaaaaaaaaaaaataaatgtgacacttataccatcataatattttgccgatataagaaaacttgtagattatttttgcaggaagctttttgccaacgaaaattagcgtcgacaaatctattctcgccaaaataaaaacaccgataaaaactttcaccgaaaaaatattttggccaaatttagccgaaaaatcatattagtgtccaaaattctgcctgcagaataatgcgttggtgtaaagttattttgcctgcacattccggtcttgtgccaacaaaagttgtatcaccaactacatattaggggcttaaatttctagagaaaaaatgcacttgtaaaacattctcggcacaaataatgtaattttattgatgtaaagttgctctaacaaaaatcattttttcttgtagtgtaatagggtttctaaacaacttttgtattctaacttagtatatttttttttttggacaaagtgattaaaatcactcatgaatttacgacgcccacgt

SEQ ID NO: 178751 - DNA, 717 bp, Cannabis indica
agaatcgtacaatttttgaaatttttttacacggatttattcaaatttcaaaaaataaactcaataattaacccaaaaaattaaataatattccacactttctaatttaatttaataatttttttttaaaatcatgatttaataaaacaaaacgtgcattgcacgtaggttgcctctagtatattcatgtatagtgttaatataaaaataatctaaacatttaccattttcgtcaatattttatttgacatttgtgacaaaatttaacgaaaaaattattttataatacgaaaattattcaaagattatttttagcagactaaaaaaatcaagagcaccataaaacatagaacatggtttcgaaggaaataaaattattactacccttaatggaattttgacaaagaaacgaaaaagaaaaagaaatacccttaatggatttttgatgtgatcttatcgttataattacacccaaaaagtaaagggttggaatcttaatcctaatcttaattaattatttatttgttttgtttttattaaatttggggacatttggtgaggatgaatgttcttttctttctctttattattcttcactttatcaaattgggtcctattttattggtaaagcctcatatatggaaacatgcatgatccatccaaactttttttttccacaacaattgaagtgtctattttcaaaagaaaaaaaaaaaa

SEQ ID NO: 178752 - DNA, 673 bp, Cannabis indica
cttagggaaactcaacctagtataccaagcatagagtatggactacccaatcaaaccttgtactgcgccaacaagtgtcaaacattttattgcgcctctctattattgcacgtgatagttatctttctagcatccctcaacttaattcaaagaaacaatcattgtctcctctttatgatgtccaatattcccatgaagaaaagcaacacaatctcaactccatctcggtctactgatccactttaggagactaactggcttaacgacatcttgttctaacattcaaaacatctcgatccttccacatgcctacatcccctctaggatatgttaaacaggttcacctcccattgagatgaacttggctctaataccaactatcaagggctcacctttccaggcagcgaaatactcatacaacacctagacttctctaagccaataactgcccctgaagggacactttagaggtggttattaacacataaccgcctctgtaggtgtttttttttatattttttattttaatggcagttcggtaaaaaatgatgaatagagtgagagaaagtctgattttaaccaagaaatcatagatataaatgtaacatttcaaaataaacacttattcttaagaaaatgcaccacaaatctgagttagttgcgagaactacct

SEQ ID NO: 178753 - DNA, 664 bp, Cannabis indica
agctatgccgaattatgccatgtcacttttaaaaatcctctcactacttgccgtgatcttgatgcgtggtgcgaaggttttggtggaacgactcaccagaaaacagagatttttgggctgctaagtctgggattcctatgccacctaatcggttggtgtttgggattcaggcgttttcgaagatattaaccatgatctcttatctaaactagcttggcagttggctagtaagatggacagcctttggtgtaaggctttcaaaagcaagtactatccgagacagtcctttttggagcatcactgagaaaaattctgacagttttatttggcggggtattttgagtgctcggagaactatctgtgatggggcgtgtacgatcattgcttcgggggaggaagtggatgtgtggtggccaccttggatcccttggatgaattatgaggaattccgagctttgatggagagtgttagacaaaaagcgcccaacttgctttgtgtagcggatcttatgtatagaagaacgagaaaatggaatttgggttacttgagttttctttttggctcggaattgggtaccatacaaattgataggaatggggatcatgatatccttatttggaaagactcggatgttgggtgtttcagtgttaaaggggcttattg

SEQ ID NO: 178754 - DNA, 538 bp, Cannabis indica
acaatacactagactcattacactaaaattattaaaagacaaactaaaatcgttcaaaacaagttctaaagaactccaataacaaatgattgttagattcgaatactaaattaagataattagactcaaaaataacactattaaatctaaataaataccaagaaaattaataatagggtaaatagaaaagctcagctcacaaatgatgaggctggggatttgtatttataggctaatgattaccaaggaattacaattacaataaagaaactttacacaaaaaaaagaatacaaaaactttacacaacaaaaagaatacaaaaggtaggagatgtattttatgtatatttattgtttgttttgtttaaatttatttaatatatttttaaaaaattgaattagatttatttaatattttagatttagtatttattagattgaattggattcatctaatccaaaaaaaaaaaaaagacatacatttgaaatataataatataaattctaattattattcatctaaattaaataaaaatat

SEQ ID NO: 178755 - DNA, 589 bp, Cannabis indica
aatgtaaataatgcaatgacaaagtacacataataatgtggttgatgataatcaaaatatggccctgtttagaaattgtaaacgaataggaataaatgtaatatcctaatcttatataagattagtaagaaactggcataagaatcagtaatgagataactttcactacaaaacaagcttgtagctaagctctgttgttttttcccactgcatggaccaatttctttatcaagcctcagtctgcagcataccaaatctgaaagaaggatagtttgagtttttataatatatactagtggccattgacatgttaagatgttccatattatttaccagtgagtgattggtatattgtattgatcttttggtgggaaatgttcttcattttacataatgaaatcattccactaaaggtggtggcgatttagttaaataggaaaatggttcgcatccacggcatttagatcttttttcttttccgtaaaaaagaatgctaattaaccaggttcacacatcctcatcaacaaaatgatacaatgatcagttacatctaagattataagagagttttcactccaaagaaaggttt

SEQ ID NO: 178756 - DNA, 548 bp, Cannabis indica
tactgaaatagttttatctaaattctagaaataaataagatttctaccctaagtatgacattttacaattctaacttttatttctccgttttttttttttttgaaaaataaaataaaatctccccaaactataataatcattgtaaatatgaccattcgattgcatcttgtttaattttgaaactattttctattttggccacgagccacatgtataattacaattgcctaaagtaaactagctgaaactaagtataatatatagtattaaacataaaaatattagctttaaaaatataaatacatcgtcatataatttggcattacaacactatttatgcatagtttcttttgtttgttcttaacaataccataattccaaattagtgctatattagaattttttttttgatgaatcagtgaatttcaatactccaaaagcttttgtacaactctatagcattctccaacaagagaatctaaataatctctaatatttacaaggtttcaaaccatattctatctctattggtcactttttttttggc

SEQ ID NO: 178757 - DNA, 666 bp, Cannabis indica
taattggatgaactgcattcgttatcacagtaatttaatttctagggaaattggattttatttattttttttaaaataaaaagaaacttaattctcaccattcacatgaaatccgaagcctgttacgagtactgggactgtagtaaagaggtcaaatattgaaatttgattagcaaagtccggaaacaatctcattttgtgacttttgccttggaatactgcgttaatcgccatggcagaggttatgagaacaaaagccacagctaaaagaatcgatatcgctgaactgtgcctgagtgaatctgattaaaaaaatttacttgacgttggagttaaggtgtttgtagaaatgcgaaaacgaaaagagttgtaatgttgcttgctgacctactcgtggtagcataaccagtggtaaaatgaggaagagggcaacaaaaagaagtgcataagcacgagtgttccaccaatgtatgccgaaccattcttgtagaatgcccaggtgcaactttcctccagattcactcccacatagaacatcacctgtccaaacaaatttaacacattttatcacattattattattattattagcggtagcaatcaatgatgccactcagttttttgacgttaataattttgattaaaactaaatttagaaattgagac

SEQ ID NO: 178758 - DNA, 780 bp, Cannabis indica
cttgcttttactgggtcaaaataatcgtggattaaacacatctttagctattgtatctagagatgtctcgacaaaaacttggttacagtgatcccaatagcgagctagggccattcttctttccaagatcgacaatgtatgcctggtgtcgattgcggttcttatttacaaagaaccattctaactcgctagggttgtaagcctcgttaccgctagctggatgaagctataggaagtcttcccatagcgagatggtcacctcgcttatatgttcttgagccgatccgacttttacacttagtttgttcattgtacgctaagcatctccatgattgatacgagtcgctttctttggtgcctcactattcgcatttagcgacatatggtttctcgctattatattaagtgtcaatttatacattgatttctcgcctaagacattacagtcagcgggttacaaatatacactctggtacttacataattaatgagttattccataaaaataatggcatcgatttacattccttttatcttgacacgtgtccttcattgaagtggtagtccaattttgtgtataacaatcaataatagaaaggaatttttatgtggttttgtaattaaaatttacataatcaacaagtctgtattatctgtgagtactcttttatagtatatatgaatacaagataatattccaagtattttaaaatacttaatatctgaagaatttctaaaaggatccccttcttctagagtttctccctatttatagaattc

SEQ ID NO: 178759 - DNA, 696 bp, Cannabis indica
gctttggaagctaatgtgagatcgatttgattacacgcaatgggacttatttttaccaacaaagttaattataaattggtctatataatcttattcatttaattttattacctgcttagaaaagaaataaaggctataattaaccattttcttttgagctaagatttagttgtaagagtattatttataatggattatatataaattaaaaaaccagcctatattccaatatttgtttctacaatttttttggttttttttttttttgaaattacttcaatatatattatagttttttttttctcaaaactcaaaataattcaaaatattttcttatttacccacggaataaagagtcacatttttacaattttttttttcaattaaaaatgcacaatcattttcatactttatttattattttattatctatgtttttattaaatgatcaggcaaaacaataagacaaataaatatttttgtggaaaaattacaactaaatgtgcaaaaccaaatcattgaaactctaaacaatcaaatacgattagcaatgacaagattatcaaatcgaaaaacaacaatcgaacaaaaaataagagcaaacagagaatctaaaaccagaaatcaataaatgcataaaataaaaaaaaaaaatcatcaccaagatatatattggttcaaatcttatagatcgat

SEQ ID NO: 178760 - DNA, 529 bp, Cannabis indica
tgactataaaaatagtattttttattactactagcaactattttaatcagacactagcttttggtaccgattgacgattaagaactgacactaatgaaattggatttttgcatcagtagtataggtgtcagttataggaaccaactgtaatagccgtatttttttttagtagtgtctacctataattagaactaagaaaattatattttaattgagaggttataactaaatagaggtaaaaaaaaaatcaaaacacatttttatatcaaatataacaataataacaataaacaatcaattaatattatatcataataaaattatttttaagtaaatataatatttacacatatattataatttaaataaaactattaattctacctataaatttataaactaatctatatatatagtttattacaatatattttttcttaaataaaatatttttggataaattttttactagatattaaaaaggcacgaattcagacattgttgattgttaaataatttttaaaaatat

SEQ ID NO: 178761 - DNA, 654 bp, Cannabis indica
ttactgatacaaactcaatttcaggcttatgtgtattctaatccaagtccatagctcatggaaatcaaataaagagaaccatttctaggtcttccatagaagctgaatacagaatcacgactaacactacatgtaaacttctacggttatttgctttattaaaagattttagtatttttgttccaaatctgcaatcttatattgtgacaacaatacaactatacatattttagaaaactcgatctttcttgtgaaagaagaaacatattgacatcaattgtcacatagctcgagaaaaacgagtccaaagcggcaacctcaagctcattcatgttgcttctagagacaatttaggcaacataataaccaaaacacttgttttcttctcattttcatgagttattgtcaaagacgagtcttatacaaacaacatgtacacttctattataaataagttagttaactagaaactatttctattaggaatacttaattagcttggttaataatatgtcagtctacctaaccttataactctttttaatatcaataaagagaaagctttattgtcctaataattaacaataaaggttggccctaacaattattgggccctaaatgcccttttaatggcaattttttttttaaaaaaaa

SEQ ID NO: 178762 - DNA, 654 bp, Cannabis indica
agaagaatagctcagtgatttttgaatttgataaagacatctttattgaacattttttttttttagtcagaattgttaaaaaaaaacatttattggtaagaaaaaagtttaaaagaattataaaataaataaaagtattaaacggagctctattgggataaggatcccgtttaacatttaacgatcttagtcccgttccaatctcttgtggaaaatcctattagcagtggtgaagaaaaaggagacatgtgaaatcattgccctcctcaattttttgttcatataaattattttgtatataaatttttaaatattttacatttcgatcatataaaaataattttttattatttacgttcttctatatttttatatttatctttataaaatttagggtaaatattattttagaccctgtgttttgcaaaaattattaattggactctgtaatttgttaaaagacaaaatagatcctatattttctaaaatagtacaaatagaacctgaattgatttttgtcaaaataaaatttaattataatccaatctataagtgttatgacaaaattgtttacattttctgtatctgttcgtattaggaattgttttcaagttgattatattaaaaaaaaaagttgttaaaaattaagcttca

SEQ ID NO: 178763 - DNA, 849 bp, Cannabis indica
tttaaatagtcaatagagctttctaggccaacttctcttcttccaaatccaattccattcccatatgaaaagaaacttctttatttttattgtttttttttttcaataatatacctaacacattccaatcatcaacttccaacagactaattcttcacaaagttgcaataaaataactatatatttttagtaatttaaaaaaaaaaaacatataaatatttaagttgtactccaattcaagccaatacttaatacttcttttacataaataaaaaatagttttttttttaattaggaaaaaagaatgattagagggttacacagataagcatattattttggtcaatcaattgatgtttattcaatagataataggctaactagtagtcattagtgaattgagtagctaattccttttgttcaaattggttgaattttataatggataaagtaaaaaataaatatctagttggagctaaattttttttttcttttgaaaagaaaaatggcttcattaaaaccttcggaataaatttaatggaaaaaactttcagagaaaagagtatcaaggaataaggactatcaggacacccaatatagtgaagtaaaagtaaatttagccagaacataaactatactattaattaatttaggaccataaacaaaagaaataataataaatttattacaacaatcactaatatctctaataatacatcttaaataagattgattaataatactatttgttgataaacagtaatacattccgtatttcacaaacacttagtcactacccttaaacttgatagtaaatttaataaaaaaaaaaaaacgtattaatacttt

SEQ ID NO: 178764 - DNA, 608 bp, Cannabis indica
gataggttttcagtgaaattatggcttttatgtaggcactcaaaccgaatggaatatgtaatgggtttagaaagcttttatagagagggatttgcatttcattgaggaattgtttagtttatgaggtattagcacgaggatgaagatttcaaatattctattgtttgttatcagttttaacttatttttttttttttttgatttaatcagttttaactatttttaagcctcgacatgtgaatatcattgtagttgtatctttaccttcagtggtaataaaaaattcatcccaaatgggtggattctaaattccattagtttgaaaagggataattatagtgtttgccaaatagaatattaaatatctaatattttagttaattatgtgaaattactatgtctaattatactcagttaggactataaacatagaagtccggtaggatgataggctgtagactttgtttctagtttgtggattgaaaatttctatttggcttgtttctactgttgaaacgtcccatttaggttagctgagtgggcaaaggtggggatgggatggaccatggtgggtgtattgcaatcacacactaattaccactgtgcta

SEQ ID NO: 178765 - DNA, 587 bp, Cannabis indica
taaaaaatccaatacatccaacatccaatcgaactaattagtattttcatttagtttggatgagtaattagattttatattgttatacgtcaaatttatatgtatatatgaaaattaacattaaagttttactctttttttcttggattggatggatccagtccgatccaatacatactggatctaaaatattggatggatccaatccgatccaaaaaatattaggtttaaaatattggataaacccaaattaaataaataaatatatatgaaatacatccaatggatagaaccgatccaatccaacatccaatggatgttggatcgattggatgacgaaattaattggatcggatcggatggtaaaatctaacatccaatatatgattggatcggatctggataggcctaaaaacattggatgtgatccaatgaacacccctaggcttaacacatgtgtgtgtaacatttagtttagcagaagtgtgagtttttctagttaacgaaagcttttaatgagcagacttaatccaactaagactatgtagttaagttcccctaaccctataaatatatattgtctcatc

SEQ ID NO: 178766 - DNA, 510 bp, Cannabis indica
gatttataatgtcagagaagtcaaattcacaacttcacatttctcattttcaacatgggaaactcacttggaaataaagagtttcgagtccctcattttcacagaacaacatctctaagaattagtgaccaactttgccaaagcacaaaaacagactaagtgatgtcaaaatatcacttagacatcttaaagtacttgccttggacgtttttacacttattcagcgtccaggttgacgtcagatgtcaacttgggcattgggatgtcaatctaggtgttggatcatgaactacctttagtaaaacggttataactcactcaatattgatccaattgatgtgattaaacttgcattttgaagctatttcaatgctctatcaagtcatgtctcacatcccaatcacaattctgaagttatcaacatcaaaattcacgccaaaaaagttacaacaataaactttgggttactcgtagtgggactcgctgcgctccaaaaattagtcatcacca

SEQ ID NO: 178767 - DNA, 586 bp, Cannabis indica
aataattacccatttcccattttgggatatatataataataatattaagcattaatctacgttacctatttccaagaacttgatgaagactaatgatgagatcttcttcttgttgtgaaaacattcctctttttaaatcaggtctcaagtaatttatccatcttaatctgcaactcttcccacacctttgcaaacctgatcatcaacaaattatttagaatgaggatataattttattaattatattttacatgtgtattactatatatatatatatatatatatatattactacactaaccagcaagtttaggaactgagctccagcaaccaacaccaaaatgagtaatgtaattgaacagtttctcatcttcttcaggtgaccataaaccttttcttaacttctgcttcaaacagcatgaatgtcgttcccatttttttttttaagaattgtgatcaagaaactgatgtgtgtgtttgtctatatttatatatatgtgaggaatttgatcactctgacatgagaaaataaataatatagacttttatatatatatatatatatattgaggtggaagagagagag

SEQ ID NO: 178768 - DNA, 764 bp, Cannabis indica
aatgatcatcatagggctaagggcaagagtattgtttttagtatattagataacttcttggcaatggttattttttttttttttcactaattacttttagcattcctcatattgcaatgtcaataagtttggttaagtagctcgtgatgaggggaccaccatccaaatgagtgactctgtgtttgtatatgcctttatatttaactatagaattaaagcattttagaattggccaaaaaaaaaaaaagaaaaaagaaaaaaaggaaacaaaaattaaagcattagtaatgtacttgagttcatgggtagttgcttctctttattattaggaattgtttattttttttaatatataaattgattagaatcacaataagaattcatcatgtagcatcaatgattggccactaagataatttattgtctaatgaaaaagtattatagaataatttctccaaataaaaaatctccaaaagataatataattcctagaaagttgttaactcgcggaagtaggtcatggaaggttttcttgtccttccaaaagagtcctcaagaaagctaccctttctcttaaaaagagttccagatggctagttgttactcctaaaaaggaatttcgataatcgactctagttggctcttttctattcgagaagctcctctcgtaagtgcttttggttcgtgatttcggaagctctcatacacgtttccccggaagtcacctatacttacgctgcgtggacatcttgctcataacagag

SEQ ID NO: 178769 - DNA, 507 bp, Cannabis indica
attgctttcatctctctctaccccatgattactatatcagagcaaaatctacttttgtactttttactctttttcttagctaaagaaaaactacagtacctttgtagttggtactatattgtaaccacatataattaaacatataatataatatgttgtgtttgtaatgataagaagatgttaattttaggtccaactatgttaatttatcgatgggatttgagagggtaacaaagtaagtaaaatggtttttaattagaaaaaaggaaagaactggagaacaatgcgcaataacttttccatgaaaacaatttttaataaattccctaataaatatttattaatgatcatcatagggctaagggcaagagtattgtttttagtatattagataacttcttggcaatggttaattttttttttttctacttaattcttttagcattcctcgtagtgcaatgtcaataagtttggttaagtagctcgtgatgaggggaccaccatcca

SEQ ID NO: 178770 - DNA, 616 bp, Cannabis indica
gtaatgtattacaatatatatatatatatatatataaaaaaaaaaaactagaaatggtattgtcctaaagtaataatcccaaaaaatctccagaaaacacacttaacaaagtaattgtattaatgaaaattaaaaaaaaatctaattaagaaaacaatctagaaaagattaagttaagattaaaatgaaaaatggaagaaaaagaaaatcttccgtaaagattgttaatttatatgtttttttttttaccaattaagtcatatgaacattattaactaattgttcaattaagtagaaagtgttagtaatcgcaattttacattttttattttttatattttttgtagataaatataaatgagaatcatttacaatgacatcctttcatggattttctccaactaattaagtgtgatctttacttaacacttaaaacagtaagacatatttagccaaatcataagtatttacgttgacactccatttaacctgagcaacaaaaactttgtgagaggataaattacaacaagataagttagctattaaatctcaatataaagatttcatatacaaatgaatattcaaatcattagaaacgagtaaaggatatctttcc

SEQ ID NO: 178771 - DNA, 638 bp, Cannabis indica
taactagaaggcaggtcattacataagcattgattaattcaaacccaaataaattattatcactaatgaggtgatttacaacagacgaaatttgttgggggagagatgttgatcactctttaactcggcataaaacttcctctcattcaaatggttatgatctccaactattttcctttcttctagcaattttctataatttttctttttaaaaaatattataaaaataaatatttttaaaaatgtatattaaccccttcttaaaaaagaacttgtatatattttctatacacaatcttgaataataattaaataaaaataaaaatttagccccttaatcgtagctccattagtggtggcccatctcatcagatattgatgagttcataattaagggtctcttaacaaaagtacaagatgatctgcttaataaacggttccttcaagtaattacacataggttaagattatttcttttaccgaccatgtattaaatactaaagtaggttagataaaagtctgaggtgttaggctgagatagtacagaaataaattccttgaactaatcttaatttggcacaatgataacaccacaaatgagtgagtttcttctacttctaatctttatgacttatgag

SEQ ID NO: 178772 - DNA, 545 bp, Cannabis indica
ttatatattgccctttataaattacttccagatctaaatttatgttgaaatactgaaagtggcaaatttgctaattctccgaatgaaagaattctatctcaagatcaatcatataagcacatatgtgtatatatatagtgactacttagatgaaattaataatgactaattattcatatttttcatattttgtgatttcaactaaatagcaggactctaagattgttccaagaagtgtgaagtgttgagagcttgggtctcctaaagatagactgtttagttagttttgtgagatactgagatacatacacaatttctacactgggtcattactttcgttcacatattttccttttttccatttaacatattgttgtaaatttgtaacagtacctttactttctttgcataaaaaatatatagtttttagtgtaaatatgttaaatatataattatttccttaactaatcttcataataaaataaatataataaataaatcattgtagcgtattcgataatggttttaagataagtaataaagaa

SEQ ID NO: 178773 - DNA, 705 bp, Cannabis indica
gaccacaccatttcattacctatcatatgatttcttcgccaatttgttgaggttttcttttttcttaattaattttttaaacaaactaatttgtaacaggtagttacagttaatgtgacgtaaatacccctgatgcgtgccactaacttcgaacagaagataaggactggcttgcaaatggacacgtattgtgttcggcccaagttcactcagctaggttcacaccggtcgtacacacttgggtacatacgagaatagcccacctcaatatctgtttaatgggccttagccttacaaacatttataagagaaaattacactctataccttttttatattgtcctcttttatttttaccctcttttataaagtctatcatgtttacctctttttttaaatattgtaccaattttgcccctgttatttcaagatactctccatgtgactctcttatgtcagggtattttgggtacaatacacataaaaaaaggtacgtttcaaataaatataaaattagagacaaatttgattaattgattaataaaagaggcatttttcaacttacccccatttataaaggaaaactttcaaaaatattgacttttggtccaacttttacaaaaatactgtcacatgtcagaaattacttttattctgtcttcgccagtttttttttcttttatacagccaaacactaaaaaaaat

SEQ ID NO: 178774 - DNA, 544 bp, Cannabis indica
acacattgtttctcctatgtacattggaaatttcaaaggaatgatgttttgcagttgatggactttggatcgtgggcttagtgcccatatgtttggtttcgagcatagacctacttagttagtccatgactccgtggtcactaaatgccttttccgcttaatgagctaagccattttatgggcttgtgtcgttagtgggcctcaatattgcacccatgactatattaatggaggaagttgaaaaataccacttttataaatcaattaatcaaatttacctctaattttatatttaattgaaacatacctcattttatatgtaatatacctaaaataccctgacataagagaatcacatggagagtatcttgaactgacaggggcaaaattggtataatgtttaagaaaataggtaaaaatgatagacattaaaaaagaaggtaaaaacaaaaaagaacagtataaaaacagtatagaagtgtaattttctctatatttatttgagctgagatgcaaaatgcccataaatttgaaaactaagtta

SEQ ID NO: 178775 - DNA, 674 bp, Cannabis indica
atcgaactagattgccacttcatccgagacaaaatcaacaatggcactgtcagacttattcctatttccagcactcttcagcttgcggacgccttcaccaagcctttgacatctccaatacttaacacacatatttccaagatgtccgtttttgacatacactctccatcttgaagggagggtattaaactttacattagtatagttacagtgccttttattttacttgctactgcttgtttattttttgatgttttacctaaacttcacaagttagtttaagtcggttgggttgtaatgaggtccaagctataaaaggcttgcctctcctctgttattgatcaattgaattcagactctttcttttcaaaatagtctttctctcttttctcaacaattcaaatgaaatttttatcacttatgtcatctatcactcaattttcgtagctaaatatattaattatataaaagtttaaattatataatacatattaatattattttagaaacataattaatattattttgaatcatgtatattttaatcaatttacaagtttcgatcttacttaataaagaaataaaacttcttaaaaaaatatggaatttaaactgataataaatttcaattataggatctaaaaaatggggactaaaaatatattaacaataat

SEQ ID NO: 178776 - DNA, 646 bp, Cannabis indica
tggtggatccgtgggtgagggttttgttttctctgtagtaatctaaaatagagcatcatataacaaagcattagttctcactaaacatagatttcataatagtataccaataaaggatataattagaaaaataataggattactcagccatgattttgtatcaaattgtgtgtaaatgccattaatggagctatgatccagtggcttgatggtaaccaactcgaaaagtctgatgaattcgatgagaagatgaaggagctaggctgagagccaatcatcgccaagatggaggaagatgctccaccatccagcggcggcggtgttggtcctgagattgaagagctcgactaagatcttattattggttttgaactcactgctgctatcgtttgctgcattggttacagatggctctggtttatttggttccaaattttagttttattttcaacccaatttattaaaggtctttatatttcgaacgttttgtgtacgattttacttagtattattctatctattttggtgctaaaaaagaggcttagaaaaaaaaaattaacatctttaaaacaaaatatttttttctgggtgcgtagcccaccttagcctatgccaggtcttgcgagacatatgatcatttaaaaac

SEQ ID NO: 178777 - DNA, 231 bp, Cannabis indica
gataaacttctctcctctttgcatgcatacttacttaattagtagtacgtagccatatttaggtaaatgaaaaaattaacattaattgtaaactttaaatcaagaacatcatcagttgcacgagctatcacaatgatattaaatccttacatattatgattattttcaatgcataatgtataatttgtgtcgaatctagttgggtttggcttaaaagtcaacttgttttgt

SEQ ID NO: 178778 - DNA, 686 bp, Cannabis indica
caagttggtcctcaatcatagtatgtaagactataatgaatccaaacacaaggaaggagaatcaggctcagatcttggtgatactctgctacagaaaggatacaagggttagagatctgagcggaaggagtcttttaattccgctgcacccactgtaaggtttctcataacttttatatgtttatatacattgttttagagattcatatttaggatgttaaataacatacatggtagtaaatctaaatcctggtaaaatagttccaacaatttgctcatcattccattacttctttggaatagctgtccaaggactttaaaaagtagttccaagctgcaagggataggcgacccgagatgtccttgctaaccaatagaaagcaacaaccaagtgagacacttaaggcataagtaagtcgttttagcacagctgctacaagagttagaaatctaaatgatagtacacaacttactgcccttcatgttgggatcactactgatctatccactgttaggggcgaattgtgggacgacttacagggtcggccagtgaagaacatcactgagttcaacgagagggctcaggtgttccttcaaaaagatgaagctcaaaaagagatgaacttgtaatactggctcgggagccaaaccacaatgtttcaacagtactgtctcaactgagttga

SEQ ID NO: 178779 - DNA, 688 bp, Cannabis indica
ctgccaggagttcgttagttgtgttagccttacgggcattgagtgggttggaaagagaatcgtttaagagacacgtatcgcaattctttccattgttggtagatctggtaaggagtgaacacagttctggagaagttcaacgtgtactaggcgacatgttccattcatgtataggcccaattatagttgaatgattcatttttcatattttgtgaagatatatattactcactcaagtgcccatcatcatcatcatcatcaaatctccattttcaggttttgttcaccattggatttggttggtccatgaaagccttgaaggtagagccatattatatttttgttgatttagagtatcaatttctttgatttctcttctcattttgagaaaatgtatgagctaatatttaataatagaagatcagagaagagaagtgttccacatacatgagggtacctcgattgctgaggcttctcttctcctaaagttttcacacaatttgtagttttgactttttttgaacataaattatatgattaattgaatgtattttgaatttagtgcatgttaacaactcttgcatatgcacaaaaggatctgcacttatcattttgtctttctaaattatatatttttaaaaagattaattttttaattatgaattaaaaaagtgtttttttttttttt

SEQ ID NO: 178780 - DNA, 578 bp, Cannabis indica
agacatatacatgcaccaaccacaaggttttattgattccaactatcccacttatgtctgcgagcttactaaggccatatatggtcttaagcaagcttctcgagcttggtttgacaagctatcttctgtactactacaccatggttttcacttttccaaagcaaatcaatctttttttattagagttacatccactagttgcatctatattttagtttatgtagatgatatcctagttatgggcagaataatgatttggtggatcaactaatccaagaaataagcagcacttttgcatttaaagaccttggtttagttgattattttcttgaaatagaagtttagatggaattatgttgtcccaaacaagtattataagatctgtacaaaagtgaaatgcagaatgttaacactcagaacacaccaatgaatagtggtctcaaactatcaaactatggtagtgaaccagtcaaggatgcaaccttgtacagatccatagtaggtgctcttcaacatgctacaaaaccaggcttgaactctctttctctgttaacaaggtttgtcgatatatgcaaact

SEQ ID NO: 178781 - DNA, 580 bp, Cannabis indica
ttaagacactttaatctttaataggttgttacgacaagcatatagtacctacatctttattagttatatgatcatccccatgatgatggaaaatctctcataatatatagttattgattgtgcgaaataatctcatattattaatttattatattttttagaaaactacatcgtattaagttttgcttctattcttttttttttttttttttttgtgaaatttagatttgttagaaattattttttattaattaattacttttgttaataatttaaaaaaaaattaacgtgttaactgcattattcagtacttcatgaattaataatcttttaaaaaaaacttcaatttaaatgtatatcatttatttttattctttttattttagtatttataatacatatagaaatttaagatactctatactaatactattaacattatgaataaaatatacctataaatatatcatcggctatagatttacatcatcaacactaattaagtttataaaattttggagtttcttttagttaagtatcatcttacactattgttatttaacatcgtatcgagttcaac

SEQ ID NO: 178782 - DNA, 663 bp, Cannabis indica
tttgtgtgtgaggtgcatgatcagtattgatcacatcattgtgtgtgtgttttttttagtgatttgatcactttgattatgtgtgctttattatacatttacatagataatgagaaaatattgtgcatttttgtttgttattacatgtcttaacctaatattacctacatattactatatatgttttgtaaaaaagttgcatagaatatttccaataatatattatttgtatactattaaatgaaataattagtaaaattgaaagagtaattaagttattagaggaaacaattgatactttaattttttaaaaattaattatgttttagcattgaatatttgggttgttttttttaaatgaaaaaaataatataataaatttgctaatattatacaattcaaaacattgcaaaaatatattcagatgtaaaaaataaacagtctaattatttcagcattcaaattcagatataatatcttattacttaaattcaaatgtctgaaatcttaaaaaaaaaaaaataaacgcacctttaatgtataaaattaaaagagttccaccgtcaattacatttttttgtggaatgattttagctacttaggccatttcattttagcaaaaaaaaaaaaaaaaaaacttgtacatatatttataatttgtaa

SEQ ID NO: 178783 - DNA, 682 bp, Cannabis indica
accagctattgcacaacatcaattgccgactgctgcaactcgcacttccacgcaacattcagtacctgctcagcctattccgtggcaacctccacctgtatcatctctcaaactcaatgtggatgctgctgtcgatgaacaacggcatatcactggaatcggcgcggtcgttcgtgattctgctggcactgttcttgctgccatgtcaaaaccagtaattggcaactttgcttctcatgaaatggaagccaaagctcttttccatagcataaattggatcattcaattggaaatgccaattactcacattgaaacagatgcactcatggtttcaaatgctctcactgtttcttgtattgcaatttcttcttttaaagacttaattgtagacatatcatgccttctatcctctctccctaatgtatctattagtcatgtcaagcgccatgctaacatggcggcccatgggttagctagatatgctttagggttggatgaagcttgcttttggttgggtactatccctcctgtgatttacgatgttattgtaaacgatttatctttggttttatgataacagagtatttcttctaaaaaaaaaaaaagagataacctaaccattacagacattagagggccaatttggatttttgtactttaattcatgtataataccaccata

SEQ ID NO: 178784 - DNA, 702 bp, Cannabis indica
ttagatatttctctatggttgcttccaaattacttcctccttcctggaagttgaacaatatacatgtataatataatttcacagttaaatgaaccccaatgagaaaaattcaatgagaaagatggccttaccccattttttttttcagcttaaaacccaacatttcatagccaaaagaaaaccggccctagcaaagaacttcctatcacaatttaaagcaaacgcacaaaataaaatttgactaagaaactatataataatttattatattttaatgtattattaattttaaatatatcagttcaaattcaaatatttaatttaggatatttattattattttattatagataaataatattttattattttattaaataaaaattaaaagtcacccataaaattctcaaaaaccaagaatttcagttatataggtatactttatatagaatagataaccatcacctttttttggttttgttttaacctcaaattaatgttatagtcgtatatttatatataaattaaaaaaaaaatacaccaaacagctctatataatctaaaactatattgtttatcaatcttatatttttctctctccatctctcttcttattctcttttttttttttcatcttttgagatttgtgatttagaaattatataattacaaatctactgagaatactcatatcatctactc

SEQ ID NO: 178785 - DNA, 658 bp, Cannabis indica
cgaaccattgcactaacacgagcaacataagcaggggtatacaactgcccaccttcaagcctacctttcacctaggcacaaaaatagtcacaaaacaaaccactctctatcacttaaaactccatttaaacaatcaaaccaaatgaattaccaaactctcctatcttggcacagccctcttctattactcaaaaatcactcaaattccaaagttatacaacgttgtaaaaagaaaattaccaaagtcccaagtcgtggttccaacattgaagcaatcaattccgagcccacttgcaactgtgctgcgagctcagccaaagcaatttgactacattcttgaagcctatcattaatttcttcagcaacagaatcccaataagattgtgatataacttccccttgaatcaacatcaaaccaggttcttccaaaacaatttggtgagcatgtttctcaacatagtacaaatcaaccccaatagtatcagccaaatcaatcaaagaaacacgccctaatttatcaatttctagccacaatctcatcgcctcaattggtcctattttacaataagcacaaaaatcaaacgtcaaaaatcgatgatcaagacatagatagtatcgacagaattgagaatacaaaatgagtgagagagagagagag

SEQ ID NO: 178786 - DNA, 915 bp, Cannabis indica
cgttaagtcggacgcccccctagtgcatgtagatgacctttgcccccaatagagtgatctaattgcctttttagtagtggtagggctttaacaagagactttactcaattttaaaaagaggttaaaagattatttccttttaaaaaatcgggaacatttaacatttttttatctatatttaaatacaaaaaatatagttcaatccctagaatataagactatatcttgagggaatatcccctatcgttgtgggttgttggacctgtctcgcaattcattcagcctgttcagagttgtttgcacaagttggccagccagccttattttagggcttggtcggcatgtgtccttccatgggtcaaccatgtatggtccagccagcgtttttccacacatcttcattgttcagcttggccggtcaactttccttgcaaaggcttggcctccttggttgaacagacctctttagtctgacaaccgttcttggtcgaccaacttgttctcaagacctggccgacctacaagcttcccttggctggcctactagcttcccttggccagccaaacatggtcgaccaaggtcttgatggcctgcttaactccttttgcttattcttgcttgacagttttgcttgattgctttaggattcttgacagttgacatgtcgtgtatggtgactttgtcttattattgacaaattgtatttcatgtgtccttagtttttttagcactttttaaataattatataagttatattttaataaacaataaaataagaatattctaagaaaaataattgatttaacaatgttaattttagttgtttagaagtaaacaggacgtgtttcacgtacagttatttataaaaatttaaattacatatatgaatattaattaaacaataaaatcatac

SEQ ID NO: 178787 - DNA, 509 bp, Cannabis indica
atgaacatctccatttataaagctaaaaagtgggtcaatgatagaagttagtatatctgcaatcacacaaagatagaagtggtatttctgcttcctatgcttatccagagaaaacactagataacgtgaggttaactttaatatataaaaatttttcttttttaaaaataaaaaaaaaattattattaatattctccgagagatatgtggctaagatgattttttttaatttaaaaagagattattaatatttaaaagattgtttaattttttgggtttaaattattggttttatttgttaacgtgagatcaaactaatcgttaaatttaacagaatattcttttacttttaagtatattctgttcaaccaagaaatgacgttagatagacacttttaatatataaagatatatataaagccacaaaaactatgatcattaaatggcaaccattgtaaccatagacaaacatgaattagatatatctcaaaaaataactggacactaaa

SEQ ID NO: 178788 - DNA, 747 bp, Cannabis indica
tagcatcaatcacattgctcatctatctggtgctcttggtgttgcatgctggtatggctgctcagaaagttccttcagaacctacataatcagaatcaagtatcaaccttgaataggaaaacaggcatcaaatagagtgaaaatatttgtttacatttgattattttgattacattgaaaattagattgatatgtaacttgaatttggagcatcaatgattcagttgacatggtgaaaaatgataataataaaaaaaagtaatttattatatttctgttagaaaatgctatcagtcttcaaagatgaaacagagcaattgagataaaaaatgtaagttgtaaattaataacaaaacatactgtgagcaactttgtttgcaaatagtttcacaaaaaataaatacaaaatgcttacaatcattaatgatcaaactaaaaggagttgaaagtctatgattgcatctctcaaatgagttccattaaattaaattgacaaaaatgttattaatatatatatattttttttaagaaaagacagaaagataatatctaataataataatgtaatattttagtattgagtggttaaattataaaaatagatgattagatggtgctaggcacgatccctttagcaattttcatcattatcattattttttttttctcaaaaccaaaataaaatttgtatgtaagattaatttaggatatttccataaatacatagaaaaataaattacaaagaag

SEQ ID NO: 178789 - DNA, 608 bp, Cannabis indica
atgaaggtggaactaagtcaaatgtgccttaagatacataggcgaaaggattatcatgtatggcaatacatattagcacaagtcaacagcactttatctaaaaccgaaaatgaaattaaaaaacattgcatagcaacatgatggaccttaatcatacacttgcaatatcttgcatatttctgtaacattattgccaatatcatatgtatgatatgttaacatcataatactccatatgatacctaattaggagaatatgatatggtacctgactaaatattattattatcaccatgatgtggtagtcatgtaatggtggaagtcctgatgagtctaaattaaattgcgcaagaaagagaggcacatacatgtaaatgacacatacatacaggagaagttgtatttaactatctatcatcactattcactcaagatcagaatatcagctcccttggcaacaaaataattgtaagttatataagacagagagacaaactttaccaggaaattattagacaacattaccaaacaacagacataaaaaatgaaaggaaaaaacattaaacctacatttcaaaatataaaaattacttagttctagatgtagt

SEQ ID NO: 178790 - DNA, 697 bp, Cannabis indica
caaacttagacctttcgcagtcccgacttcacgacccgacttaaataaaatcaaacaaataaaaataaaaataaaatttacagaacactacttttatttttattttaaaattgaaaaaatggtatagatatattttgttttttaaaaataaaatttttaaaccaaaaattttacttttatttttatgattataaatttttaaaacaaaagtattgccaaacgccaccatgattgattaattgattttaaaaatatattcattagtaaaaatttaatattgaccattatcttttattttcttacaatttaatatattattattataattaacatgtagaagttacttattattattattattattattatttgttagtattaatgatatgaatatagtagttagagaagtatattgctgcaattcgatttattactatatcatcaatatcatgataaatatgctttgagagcactttctttttcttttttttttttaaaaaaaattcaattaaatattcaaaccacaatttcaaactaatccgttttaagtggattggtttggtttgagcattttattaatgtggtttgattttctaactttttaatttttttttttgtaacaagaagagtaatctttattcaaaacaggcaagaacaaccaaaggttacaaaaaagcagcagtccgagaccctgcac

SEQ ID NO: 178791 - DNA, 900 bp, Cannabis indica
acgacacgaaatgttttatttttttataaaacatgaaggaataattacataagacaccattttttgtaaaatatttacatttttacgttcaaagaatattttttttacatttttacggtttttcaaaaaataacacgaaaacaacataaaatcaacaagaaaactacataaaagtaacatgaaaataacatcaaaataacaacaaaaaataacatacagataacaaaaaattaacaacaaatgaacaagatttcaacataaaaaaaccgtattttatgtaaataaaataaaataaaaatcataaaaatgtttaaaattctgtgaaaccgtatttttgtaattttttttttttgttgtttttatatttttgtgaataatcccaaacatgaatatccgtatttcataaagcccacaaaatataagttcggctagcatagtacgcacttgttcactgtaaagtttatatatacatacaatttatatgaatgtattaattaattgtcttctccgattgatgagtagctctaaaacaatgggtaggctcatagatacattaatttatatataataggattgaacaaaaggatattatttgggatttttatatatcttattctataacttcaggcatgcatttcatgtagctagcttgcaagtaaactgaccaattgacagcagttgacaaaaactaactaaattaacaaacaaaaccatcccttaattagtatttataaagacccttaatatattaataatattttaatactctaattttaacaaaaccccttactaaaaaataatcattaagttcgccatacaaatcggatagtccgtgtaaaatggttttcacagttaattttttattttgatgaagttgaaaaatcacatatatatatatat

SEQ ID NO: 178792 - DNA, 740 bp, Cannabis indica
taataataacttgatttagaggttagttatatttaagaaataattaacaaaaaatgagttcaggattattatttctactttcaattttaaaatagaaggtttaaattgtcatttataaaattgaaagtttgatcgctaaatttttgtaaaacacaaaattcaaaatgatatttaatccaaataataataattattattatatgaatttgaattattttataattatgaaaagaaattattgttattttttttcttttacttgacatttatatattttttaattctctttgatttaagtttttcttttgtatccaaatttcattttttaaattgttaaattaattaaacaataagtttaaagttgttggagcttaattttaatatcatatcttctttcttctcttttttatctgaataaattatttagccacacaattttagtgatgacgtgataataataactattttttgtttgttataaatttttaatttttacttcttaatttaaaaaaaaaataattaaaaataatgaatttatttaaaagttagaaaaaaaataaaaaaaataaaaaaacccaaaaaaaaggctaattagcaatttttccccctgaactttgacatgtactaaatctgtcccctaaacttttttggccgttaaaaattcccctcgaactaatgagattgttaaaattaaggacttttgtctaattttagtaaaaaattctaacatggatgaaagt

SEQ ID NO: 178793 - DNA, 906 bp, Cannabis indica
aactgcccatggtgtaatgcagatgctgaaacatccttccatttgtttgttcaatgcccggtagcacaagcttgctggtgcaacatcggcctggcagtgtttcatacacaatcagtcacttttgctgcttggtttcaagtgggattggaaagttgggatgcagccactaagattgaggtttcaaatgctttgttggggcgttatggaaatacagaaatgacaaagtttggaatgctaaatctcctacggttgatcaaattgtcacttcagcaaaacttactttagctaattggttagatgctcaaaaccggttccagattccatcactcaaccatgagagtgaggaaaagaatgagcattggtccccccctgtttttccacagctaaagattaacgttgatggtgctctttttcaacaagaacacaagttcggagtaggaatggtggctagaacatcagctggtgccgtggtagaggctcggcagatgctacatactggtgtagtttctcctttattggctgaagcagtgggaataaaggaggcgttgagctggataaaagataaaaggtggagtgacttagtgcttgaaaccgattgcctcaatgtggttcatgattttaattctaataaaccaatgatctctccttatggttttgttattaaagattgtaaggcaattttagaacatcttgttaatgtttcaattgtttttgttaagcgatccgcgaacaaagttgcgcatgcattggcacgtaactctgttcttatggctgattgtactttcagtatggctaccctgccaactgatatttcatccttagttttggatgacttattttaatgaagttttatcttcttttcaaaaaaaaaattaaaggtaaaaacaattttttttttttttttaa

SEQ ID NO: 178794 - DNA, 868 bp, Cannabis indica
aatacctaacactactataaaatcacatatcaatattgatacaattaaatatgaagttcaacatattgtgatgggtctaaacaccagcaaatactctacatatatttgtttcttttcttttaattatatgttttcttatgtaaaaacaattttactaaatatagatgaagtcaataattaatagtttgtccatattatataacttataaagtaggtattccaacataatgacattgtcatgcatgtgaaatgtattggtatttatatttatatggtccacaatatttcatttatttttctaccatctttaaaggagtgttgtcgacattggttgttcacaagtcatgagactcattataacatagaaaacaaactcaaatgtcaattttacacaaaaaaaaaaacatcatacactcatcacaacttgttttgtatccttcttcccatctctcactcttagcattatctttggtgaaaaaaaataaaaccagctgtggtagggtacaccttacccggtaagttatattctgggtacgacgtgacaattttttaatcataacataaattttttattataattaaatattttttttttagtaatttagtaaaaatcttattgcccacttaacacaattacaagcactacaaagtcaaggaaacattaagttgcactgaaattttcaaaccaattcaattcatccatataagttttctctctttaaaaaatgaaaaaaaacctcacacaaatctttttctttattctattttacaagaaaatttatagtgtaaacttggctattccataaagcattgtttctagcttcccaaatattatagagagcattcaaaaatggcaaatgtacacttc

SEQ ID NO: 178795 - DNA, 681 bp, Cannabis indica
ccgaccatcggacctctgtcttcttccctctctcaaatcgcaggaaaaaaaaaagtttcagagacggtcggacgggttggggtcggactggggttgctctttcgggttggggttggggtcggaggggttggggtcgtggtcgacgggggtgagggtggtgatcggcgttggggttgacgtgggtgggtgagggtggttcgggtgagggtgggcggttggggtgagatagagggagagagagatgatgcagagagagagagagagaatattgtggagggggttattttggggtttagaaaaaaagattagtttttagtttaattttggttaggtaaatttttttgattttctaagtatagaaaatcaaatttccctttaaaaaatacaacatccatcttgtatacatttatatatatgttgccttcgtcaaacatcattttggattttttttttttttttttttgtatttaagcgtttatatattacaacatgttttacctgggactcgaacccaggatctccaacactcacacacccatctatggctacttgaactagcctcaagtggtttcattttgatttgtttaattccacattaatatcactcttatcgccaaacgatgggattttaattatttcataatccaatatataccattagagttagaatcaaacgatata

SEQ ID NO: 178796 - DNA, 667 bp, Cannabis indica
ctttttcttctttcttcttctctcttatgaaataacaacgtaggagttctacattcaaacaagtaattatgagtttggttagcttagatattatcatattaatgtcagttccacattaatgtcagcttagatattaaaaccactatttttttttgagtaataatatttgaattaataaattaaacataaagttgacacacatacatttatgtgtgaacggtttagtatttttaaattcaataattaaataatacaattgaaatttcaacaaacaagagtaccaacataacaaaaacatttaaaaactacatatataagtctaatatctatgtgtaagttattttgaataggtattatttcacaaaatcataaaaattataaaaataccattgtacgggatatttttactatttttatttttatgattttatttacaaaatacaatattttgatgtatttttatgttgtaatcttgttaatttattgttgatatttttgttatttgtatgttaatttttgttgttattttgatattgtttgaatgttatttccttgtaatttttatgtagcattcttattgttcgtaaaatattaaaaaaaaaattttagtaacgtaaaaatataaaatttttactaaaaattaatagttttattataaaggaaattt

SEQ ID NO: 178797 - DNA, 885 bp, Cannabis indica
tataagctgatgatcatgatcatcattagctttatttatataatattatagtttatgctctaattaaaattaataattaatattactaaaattccactataggctgaactgtattccaatggcattttgttttccacaattgtcaattataggctaatatctttctttttgccttccctttaaccttattcacacattaacattataaataataattataattaacttctaattacacactagttaatttttaatacatatatatgcatttggagcatgctataaaaaaatgagaattgtgcaatatgtaaaatgataaaagtgcctaatagtaaaattaatacttatcccttatttttacatattttaatttaatattaattattataaaaaattattaataatctataaaatactagtaccttcgtaatgatactctttatcataaaataattttatagatcctaatacaaacaatgccatctcgagagtacttatggaatgttcgcaccgcgctcactataaaaaaaatttactttagtcacaacataatttataactaaaaaataaaaatatgattaattataaatcacaatttttatgttctcactaaaatattcatagttaaaaatatactagttacaaatatactatttattatgactaaatgtgtttttacagtcacaatacttattatgataaaaatttatattgtgattaaattatcttgttcctttaattattaaaaaaaaataagttaaaagtactactatacatccaatcatccaaacatccatacatactcaaggcaacgtgccgaatgagattgatcgagaatgctacaatcttaatcaatcccattctgatacgtgactcgagatatag

SEQ ID NO: 178798 - DNA, 765 bp, Cannabis indica
aggatttaactacttgtatcatcattttagtgaaaataacaaagtatagctataagtcgttacgagtgagtaggtacatttcaatatcaatttgaagaatgaagttgtgaaacattcaagtttggaaacgcgtataaagacatgttagtcatgataatcgatattggaaggagaaaagtataaattttcaaagttaattgattaaaaattcaaatgtagtagtagtagtggtcccataatatgatcccatctatctttatttgattggaaggagagagccagctctccattcttaccaacaaacaaacaataaagaggaagaaagattccgttttccatcaaacttcttaacaactttattgattaatataatataataataatcattattaaggagatctgtgcaaatccaacaaagctagctttttattattattcttattattttattttaaacttgccaaattgttacgaaattaagttatttctagaagttacatttaaaaggatcgtgtgagttttgtaaaatacaattcaaatttaaagactagctagctaagagcaaaaccaaccaacaatggaaaccctgcatcagaatgttgggatattacagtgcttaaccatatatgccatgcccactagctatgacaatttatatatagtgtatatttgtgtaatatatataaattgaatatttatcaaaaaaaataatatcataaataacgattaaaataatatattggaataatatatataatggcatat

SEQ ID NO: 178799 - DNA, 740 bp, Cannabis indica
atacgaagctaattattacattatggcttattctcttatattatttgtgccatttgaattcgcatgcccaacacattgaatttagatgtaattctaatagagttatatggcctttattatttatgtataagattaatttgttcactctacactacaacaaataacttttttttcctatatgaacgcgtcatcttacgaaatatctttttatcatgtcacgcgttatgatcataaaacacatctttttataatatcgtgtgttacaaataaaatcataaaacatgatatcctttgatgatatctcatttcataataaaattttagaacatattgcgtagcacatttactacgacattttgtgttgcacatttactacggcatgttgtgcttcacattttccccagaagttattacacggcacataattaattacacctcttaatcgtcttatattcaatattcatattgttaaattttttgttttcacaaggaaaatcaaacacctgaaacccagatatatgatattacacaaatcctttgtatactaactacacatacatattgcaaaaaaaaaacaaaaagaaaactaatacatacacatacacgaaattttttactaaaagaaaaaagaagaaacgagacaacaaaaataatgttgagcagtatgataaaatgagatgattcgttaaaaataaaacaaataaataccaggtagtgattgaaagttaaccaatatcaag

SEQ ID NO: 178800 - DNA, 923 bp, Cannabis indica
acagaggctaacaaatccacagtttgtttaactctaagaagatactcgttcaaggaaagatgacctttcttgagattttgaagtttagttctgaattcaagaattttagctgatacctttagtgtgaagtacttctcgagagttttccagatctgccttgaggtttcacagccaaccatgcgtgttagcaaactttcagacatggatgacagaagccacgagacaagaagctggtcttgaacatcccactcaaagaaggctggattcagattgttgtaagcttgtatcttgatcggagagaaatttaagtatggtggagcagtgtcttgaatgaattgcaggagtcgatttcctacggatggcgagctagcacctgctgcttccatagaagatagttgtggtcatttagtctgacagagagattgttgctgaacattattggtgaagagtcacttgtttctttgtttttggcccttacagcaactccattaccggagttgagatttccggtgacaacattcgccattaacggcggagaatgctctgataccatgttaaacttcttagacatgatcaacagatcaaaaaggagaaaggaaacaaagaaaagtaaagagaatgaaacagaggacaaagaggaatgaaagagttgctttgattaggctgaacacagccattatatacaacaaacaccagaagcaatctctaactgaatgaaaggaaaagatacagctgtaagacttaacaaactaacaaactgtaacaaccgaatcataacagaaagcaacagacacttaaccaacttctaactagattacacactttaacatggttgattatcgaagtgttgctggcccatcatcatgaactcttctctcgtgattatcctagtgggatgttaacatgtacccattctatgtaac

SEQ ID NO: 178801 - DNA, 507 bp, Cannabis indica
aaataaataaataaataaaacaaataattgaaatctattcatttaaatgtaaagcacacaaatattaaataacaataataaaagattagacatagtggtcaagaagagagtataacagggaaaatgaccaaagacaggacatcatcataatctccaaaaacagtcatttttaaatcagaacacaaacttgaaataattttcaaaaaattaaaaaagaataataataataaaaaaaaagttgaattgcttttgattgaaaaagaaaaaagagcagaagaaaccttgattaccgtcatccccactccttccccaaatccataattcacctcaattttcatgattctttttttttttttttttttttactgaatattccattaacgaacccaataaagctttcatttttgtaacgaagaaaacaatctttttccatttccattttgatatttttgtctggtccccttttggtaacctgacggatttgagctagggttttgggttctgttt

SEQ ID NO: 178802 - DNA, 793 bp, Cannabis indica
ttatgacttaatacttttaattatgaattttttagtcaagaatgataatttataattagtcataattttttttttaatcacaaattttattataactattttttattttatttttgtatatatgtagtgcttttctcatttaatttaatctcccaagtcctcatcactatactttaaaaatgtgtaaaatcaaattttaaataagaaataaataaggatatattgctttagcccgatattgtcatataaaaaatataaatatatataatataaatggttaataagaaaagaaattataaaggaaaaggaggtttgaaatatatattggaattaataaaaatagagatctagaaggagaaagaaaggcatgcataggttgcagatcatcacatacattacttacttcgatccaaaggtccaatctctctctctattgatcgatctatatctatacatacattatatatatcctcaacttgtaatattattggatcaatggaagttgattgatcgaaccccactgttttaattgatagtgcaatatttaatatgcctgctgctttcaaaatatgccccacatttaatttatatataatttaattggcaattagtaaaaaaaaaaactgtaaatatattattgtggctattcttttctgagtggatattataatcctaaccaaagaaagtttagagatatcgttgaatcacctggatagtgaccgttgtggctcaattatcaacatcatctaatattttctcttttctttttacatttaatcccctaaaaaaacac

SEQ ID NO: 178803 - DNA, 709 bp, Cannabis indica
tatttaccataacatgtaccatcccctcaattcattctcattggcccaaaaacttccccatgtgatgaggtagaaacaaataggcctacagtagataaaccctatttatatatataaatttatcaatcgttatattttttttttcaagatagtgacgattacaaatgagatacggtgatgacaataactttaaatttagtgacaagtgagacacggtaatgagaacgattttaaatttgatgagtttcctatatatagatttctcaattgtgatattttttttttcctaattctattttttatagataagtttaatcacacaaaaataacatttatctaattactaaaattctatcatatcccatttcaaaaaaaaaaacttctatcatatcctgaatctattttaatttattcaaaaagatatatttgaaaactaactttataaaatatatgtctattaaattaattaacaattatcatttattgagtttaaaataattaaaaaaattaagaactctaaaatattaatttatttttcttttatttattttttttttttttttggaaattgaaatagaaacttcattgaataattagcattcagaatacaaaagggagagtaactcgtcccaagcattatactcaaaaatgctacgaccagagagaaaacaagagtgcctagaccacaacatgggcaactcggtttgct

SEQ ID NO: 178804 - DNA, 560 bp, Cannabis indica
agtagaatttataattattcatagtttaagtaaatatattatttttattaagtaatttgcggcagaaccccccaaactatcaatttacttgcaaaaaattattcaaaaaactttaaggttagatgttttttgcaagtaaattgatatttgaggaggtttgccgcaaattactcttaaagttttaaattttcattttaattactcattttaatttttattttgtaaaatatggccatgtaggataatttttttgtgacttgtcattgccacgagggcaaaattaggacttaacgagactggatagacgacaccttaaaaatgtaaacagaacagtactttggagggttttcccaccaaaatatgaggttggatagttttttgcaagtaaattaatagttggagggttttgccgcaaattactttacaaattaatagtgctagatctcgtatttataagtatttttgtaaatacgaaatctagttaactcatcccccaatagatgacaacttagactaggggtacaatagcaaaaaaattaaagaaagtttataaaaataag

SEQ ID NO: 178805 - DNA, 806 bp, Cannabis indica
cactctcgccaatatctagcgagcgaatgtggcttagaagtttagtctagtattttgagccaacaaagtctactttcaaaattctctttaatgctactatctatacaactcgaattcatacattttttcttatttatacacaaatttaagttagccaaatgccataaattgtacctactaatattcttttgaatataatataattttatgaattatatatgttattttttaaatattagtttttttttcaataaacaaaaaaaattaaaatagcaaaactcattaacttaaaggacaaaaaaaaaaaaccaaatctattaatgtatacacgccacatatataaaacattcctccttttgctattttttttaactaattttttcttataaaacagctgctattttttaaccaaaaaaaaaatatatatcacatgtgtacgtacatactaccataccgtataatttttatttcactttaatcttattaaccaaaataactatcccatactataaggtacaaattaaaggttgtacattagaattaccttatgtatatgctaaatattaatggctacacacaataaaatggttttatgttacttaatagagctttaggaggaactaaactattttaatttgtatcaataatgaattatttttattttcaattttttttatgttaataatattcatttcttttcctctcaaaaaaataaaataaataatcatttctttatattttttaatctttagttgaattttcttaatgattagtgtttaaagttggtctgtacgtagctggatggg

SEQ ID NO: 178806 - DNA, 684 bp, Cannabis indica
cactcaaacataatttaaaaacaaaactagttacacaacaaaatgagtaaaaatgaaatcacacataatacctcataaaccggttataatttataaaaaaacaaggtggtcatttccaaaaatactaaaaaggcataaatctaaacagaaatcaagtttcaataaaaaaaataagtaaaacaaataacacacaataactcaaaatataatataaagaaaccaattataattatcaactagttagaaatttgagacaaagaaacggatttcgtaaagcaaccaagatataaaaacttacacacaaaaaccagttaaataaaataaataaataaataaatcggttccttgaattaactaaatccccgaataactaaattaaataccagctccttgaattaattaaataacaaattagtttccgaaataaataattcaagaactgttttttgaaatgacttaaataaaaaactagatgcgacataaattaaaatagaaccaattccacaacaaaatgactaaaaacaaataactaacaataactcaaaaaccagttataattaaaaaaaaaaatcaatccttaaaataccaatacataaaattaaagcataaacagttccacaaaaatgagtaaaaaataaataacaaacaattacatagaaaccgattctaattaaaaaaaaaaaa

SEQ ID NO: 178807 - DNA, 493 bp, Cannabis indica
atttaatttatagcaacagcataaattaaatatatatcaataatactattaaaaataataatcttttgtatttgttatttaagttgtttttattacacattatttaatatactttcattataacacctaaataatattgtttagaagagaaatatatggtgcgtttaataatggtttttttaattagaaaagtaataagtttgtttttttaaaattaacatattttataaaactgttttaactttttattttttttaattgaaaattcaaaactttttaaaaaattaatacaaaaattactaattaattttttaaatagtttttttttatattttggtatttcgacccctagcttagaccttggaacagaaactctgaccctggctgcagtcctggactcagaccacggccctgttcctagatttggatctgaacccgacttaaataagtaaaaaaatataaattatagaacacaaatttattttttattttt

SEQ ID NO: 178808 - DNA, 737 bp, Cannabis indica
atgatcggtggggcggctaatacgtgattaaacaaatatatatatatatatatatatttatagaaagagatagataattaataataaagagtttcttaatataattaattgaacattttgttggcaaataataatgttaatgagaataattaatttgaacaaatcatgaaagctagctaggacagtatctctttggaaatctaatatgataatgtagtaataggcatgatccccgcttatcgcgtcaactcaaactattattattattgtgtgtgatatagactcatacatatatacaaaagtacaaaattaattactcagtcgtctcttctctacactccatcaatataaccgacaaaaattgttcacacttaccctaccaaattaaggaattaatttaatcaccaattaattctactaaatatgtagttatcataattaagagtgtagtcaaaataaatcatttcaacacagctccatttccgaacaaatatgccacttttggttcaccactagtagtactggacatcaaacaagtaagctatactatctttactttttcaacatataaatttatacttgatatatatttgcctatatctcttgtattgttcctcttgatctgaaatattactactctcttttcctaatggtataataatgatgtactgtttttttctgtcgtatatatcattttgctgaaagacatatctatgttatcgtaaaaattaattttc

SEQ ID NO: 178809 - DNA, 991 bp, Cannabis indica
aatgatattgatggaggccttttatctttctttaccccaacaaatgccctctatttttttttttaaatattttaatattattttatgagtattagattaatcgattttgattggctattcgttggcgaatgatttagtgacacggattaaaagttgtgcctccctaggtggctacctgtattggaaaactgtgagcgggagaaaaattaggcatgaccgtcacagatcactttatttatcctactatatagtaagagctgatatatccttttgctaaaaaaaaaagggaattttatttaagccccaacaatttttaaaggcacccattttaataattttagtttaatataaaatttatatttttaattgtaataaatttttttaatttttttcttctaatttatattcttaaaaaatatacttgtcaaataaaataaagtatattttaaatattatgacaaaaaattaaataaaaattatatgaaattttcatagaaacaataaagaaaatgtacatgaattagaaaaaattatgaaaatgaaatcaaaataagtattaaaattaacataaaataatgtgaagaaaaattttaaaaaaatattaagagtaattttaaaaactattaaatttatattttttaataatggatgtatttataagtttatggtgtgtaaatagaaatctccaaaaaaaaatcgtagaataattttattttataccattcatatcctttattttgtgtttgtcttttatgtacaatatcaccatttcttttgtctcttataagaaatgggttgtttagttatttattgctaatagcctaataatattaacaatatgttatttagtttatataattaaatttttggtcaatctatttaaaatagttttaagacaattaagtaaaattttggccttcttttattcaaaatgaaaattcttcattgatgatcaaactaacaaattctttacttaagaaataataattct

SEQ ID NO: 178810 - DNA, 720 bp, Cannabis indica
gattgacttcaattcgtatcattctctgcagggaatgatgaacaataaatacatgcctcatgtatttaaataacattagtcatgctcattgttattcttatactttgatgtttcaatgcaattttcttaacattctttttgggtattcaaaacccactataaaattgcatcaataataatcatttttaatgattctttagttgtattcacataaatacaatcattttttttttgacaaatataaaacatttacttcaggaaatgtttgtcaaaatctatatcgatattagattacttttcattgtcctcaaagaatacaagaacatatatataaatatgtattcatctctttcattatatatccatcaactatataatgaatattacgtttgcataatcttcaggatatatgcaagattttattgaggacgcataatcatcaggatatatgcaatattttatcgaggatgcataatcttcaggatatatgcaatattttatcgatgatgcataatcttcaggatataacaataactacaattgtaacacgactataaaaataaaattaaattaaaaaaattctactcgaaacgtcgaaataaatggagatgtatcatgagtacattttttttaaaaagagtggattgtagaattttccaaatggtatattttcaaaaataaataagtatgaataataattgattttttttttcaattttt

SEQ ID NO: 178811 - DNA, 848 bp, Cannabis indica
gtattaaaactttaaagctatataatcctttctattaaaaaaaaaacaaatgtattagtgtttgctagtttataataagatacgttaataagtaagtgccaacactaattaactaataacattatttaaaataaatgagacatgtagttttaaatcaaataatgtatatagattatactatagataaaacttataaatttttaaacctttttaattatagaattccataacatacatttttacacaaaaaatcacacgaactaattcacatatgataataaatcaaaatattgcttaatatattgtgcaaaaaaaaaaaaaaaaaaatcttagctgaagatgatgtttttttttttaaaaaaaactgctattttattattattatacattttgttgataatatatagttttttctttaaaaaagtggcttattattaatttatatatatatatatttttttttttgtaataaaaatttacagtattcattaaactgagaaatcagccaaagcaatggcaactaactcaggagacagaaaaccctcctggatagtacgacctgtggagaaagaagaagctcacgccatataatgagcgcctctgtttgcagatcgtttaacaaaacacacagaaacaaaagacaaacgagtaagcaaaagcttacaaatcaaaaacaataaagaccaaaatggagaaggcgtagaaagagaacttaaaataagcttgaaacacaaactaaactatctgtctcaagacaacatcaccccagaaaaaactatacaactctaaactagaagtccgtccttgtatcgcaactgatttcagccatcttaggtgtcgacccgacc

SEQ ID NO: 178812 - DNA, 858 bp, Cannabis indica
aaatggtgtggataatggatatttttggtttagtgagaaaaaagaaagaggatagagggagaatagtgcactagctacagtcacactgtcaattacttagctcgaataatttaaaaaaacccttaactccaatagtgtagtagctatagtcacgtgttaattatctcgcagtaaatatatatgttttttttttttttgacattttttgaaatatcatgaacaatttttgtaggttgagtactttttttaagaaaatatagaataacaacatttaaatacatcaaccatctttataagaaaaggtgtgaaattattaagatgatttgttgtttagttgtaggattatggaaaaataaataatgatagagaatgagtatcactttcttctttacttaccctttttttagaagtaaattaaaatatttgcgatcgcaccaatttgagattaaaaatgagattagcaactacacgaggttggaggattcacagtagaattctcatttttgtcaaatataacaattgttatatacttgagataaaatatacatgtactttttataatcttaaattagtatatctaattttttattctataaaacaacatatataatttaataaattaataacttaaaaagatatttaatcaatgacatttttccaacttacaagaaaatctggcaagtcaagtaaacaatttgctttgaagtatttaatttagattgaagatcaatcgaaataatgtacacaaataaaggcacctcaaatttcacttttgtgtataatgtctaatttctctttcttgtattgccactgtaaaatacagatatagaaatttacccattctaacctaaaaaaaaa

SEQ ID NO: 178813 - DNA, 569 bp, Cannabis indica
aaatagaaacctaattaattaattcattgcaaaatttgtgaaaatgtaaccgataaaatataagtttatttgaggaagctaataggttaagagaggttggaggatgagaagttaaccttgaataagagaaatgcaaatctagcaccttctaagatgatgggccgtcattaggcataagtgggctaaattcgcctttagggctcactcattctagaaatccaaataaaaaaaaatattttaaaaaacatacatatttttttaaataatttttaaaaatattatttatctttatataataaaagctcaaaaatttgctcgcggtgcttgtttttggtctgatcgtctttttactgagaacaatgtttcttctgctcttcagtctattgtgatagcggatattgctatttaatgaattatttttgttcaaaaaaataaaataaaattaagagctcaaattttttttttttactatgacctaatatcgagttttatattttacgagttttatgagtaatacaaattaagtatgacataacaatatattcaaaatttcagcctcaaccacctct

SEQ ID NO: 178814 - DNA, 717 bp, Cannabis indica
gatcatgcgctaccttcatctaattgaaaattaacctcttgcccaaaagatgaactagttttaaatccatccagtatgtccaaggccttcagcccaataaaatcctttccaacaacataatgcccaccacgagaaggaccaggcccaacaacaaacaacccccgacctgtaccattagcaaaagccatgtcatcacatggattcaaaatctccgaatcattttcttcaaggctcaaaatggtcttctctaaattaggcaactcattagaaggcttttctccctctaaatttgaaaacccaacaccattaccagagacgacaatgggtgtttcacgcatgctaaaagagtttttggccatccaaaccgtcaggcaacccgtacgaggactagtacggagccctgtagtcgttgtcaacgtttgcctcgaagcacacagaggcttagagaaaggaaccctaaggttaaccgtcccagatacacactcaactgtcaccggcgacgaagaaatcaacttgggtttcgccacagagaccttcgaggaaaaatcctgagaaggaacaatcttttcaccagaaaagacatccacatagggagaagaagcgaataaccatggtccgaatatgggaaaagggatcccaagattgttcaacaccgtgtctggggaggatagattacaaccgcatcgttgatgcctcagcctgccataatgaaagcag

SEQ ID NO: 178815 - DNA, 764 bp, Cannabis indica
ctattctagttttctttaacaatcattaacttctacacgtctgtataatatggaggagttaaaggtttgttaaactcatttgacatggcagagtttcaagcatatcatgaaggagttacaaggggctattattatatcttcaacattccaagcaatacttggatatagtggattgatgtcgttatttttgaggtatgattttgtgttttctttagaatttttcctaattgatattattagtgtttcactttgaaatatttgcaataccttgatcatattaaattctatgagtttgaatgtatcacttttcatttagaaattaattgccatgtttcctatattacagtgggttaattgattattttttaatttttaaaattgttcgttggtctttaatattgaaatactttcatttatgtattcatttgtttatgataccaccaatgatatcatgttattgaatgagtcatgagagtaagagttatccaagatatcagtggcttttgctggctgcctttgtatgttggttctatagctttgtatcatctcattctaatctgtaatggcggtttgttatgcttgcttgagaatattaaaaattgaggatatatatctggatagtctagtacagcacttgtcttggcgcagatgaagtttatgtaaacataagatcacagaccaagagtaaccctatattctttgtattagtttagttctgggttggttgtgattaatttgatttgtcatctctgaaaccatgacgt

SEQ ID NO: 178816 - DNA, 915 bp, Cannabis indica
attttttttttttcttatttaatgcttgtttgtagttcaaaagatcaacttcatggatctctatgtttatagatgttagttttttgtttttttgctagatatataaaataatgattaaattgtattaaatttaattatttttaaaatatataaaaattaatcttttaaatttatttataaaaaaatacatttaactaattttattaagtaaataagtttaaatattttaataatataattcattaatttgttaaaactataattaataaattgaataatataataactaaatttattataaagtatgattaattaattgtaacatctaatctaaatttaaattaaaatttatataaaaaattattatccaattatgttaatattttttaattaaatttaaatctttaaaactatttattttaaaaaaaattaattaattaatttaacaatgttaattttaactattaacttcaaaaaaaaacgttaaataaaaaatttacattaaataatcacatttaatataagagagatgtataacatttaattaaaattttcatagctgcaatagtttttttttcacgatttaagttgctctgataatttctatgtgggttgctatgtggatttaaattattctgttagttgtttatatgagttgctatgtaaatttctataaaatgtaaaaacactatgttttttttttcacgtatttaagttgctatgataatttctatgtgagttgctatgtggatttaaatttggatttaaattgttctgttagttattatatgagttgctatgtaaatttctataaaaatgtaaaaaacactatttaaaaatataaaaataaagaggccctaataatataatataatataataataataataataataataataataataataataa

SEQ ID NO: 178817 - DNA, 624 bp, Cannabis indica
gagagattggagcttaaactagagaattaagtcattccaaggtcaacaaaatgaattagatagtgtactaatagtcttatatgcaattatggaatgtttccctctattcttgatagctcagtcccacccttatttcattgttttttcttatttttttctaataattttttaattttttattttgtgtggtgattagcccccaccattttcatcatttacatacttttggagccacaattctcacttttgctgtactcatattaattttgtctatttaatctgcaaagtcatgaaagcaacacccaatatttggtcacaatctctaatataaggttgttaaattaatatgatcacactaatacaaagaaagtcatagtataagtagtaggactagtgttagtatataattattttatgtaatttcaaaatataaatgggaaaaaagggcttaaaacttcaaaattttgtattgtttcaaaaaaaaaaactgtaacaattcgaacctaacacactgtgaaaatatgttccctttattaagacatggcttcagaaagtgaatgaatccgttaaaatatacctaatatagtaatacatcaatagttcaacccccaaaaacttaacaaa

SEQ ID NO: 178818 - DNA, 1141 bp, Cannabis indica
attgcattgcttgctggaccatagcagttacagcctgtacataacacccacaaacagcattgacaaatacagttttttatatgagaataagattgttttatgaagaaagagtacgttcacccaagggccttgacatcctagattgagaacaacaatacactcgaatagagaaaagacaaaaaaatgaaatgaactgaaatgagattcgcgatgatatgaaaaaaatgagtgcaaagttgaaccttctctaaaacaagaacaaaagtatgtacttgactaattccaagaaactagagatggtaagctgtcattaaatgctttgtccttcaatccctccctcggctatgtttggaagtggggaaagaaagaggtaaggaaaattaaaaaaaaaaaaaaaaaatttactcacatctgatacaaaaagaattgtaatggaaaaaaagttgagtcaaaatttttttcatatcgaacaggaattttttattttctttattttccacacttcttttacctacattttccttacctttttctttccccactaaaatccaattttcaaacataacatagcctggaggaagccctaacatgagcttcccatatcttctataactttaattttggcgaacaaaaaaaggaagcttagtatactaaagtcttgtcttggtaaaggaagagataccgctgcaaatagcataccagtcgctcaatgaagtgaataacaatcgaactaaaactatatatagcatagagaagaaaaaacttttgttaagatacaatttacaggatttgaagcccggaacactaactcattaaaccacttgagttgttccacaaatagcaagtagacaaactaaccacacataaaatggtgaattaccataacaaagtcctaactaatacgacacagctaaagttattttcttgtagcataaagtaataccactaacacgaacatgtacacaggcatctagacatagtcaagtctaacattcctaagcaaacaaattgcacataccaaaactggaaaattataaacagcttatgaagcatacatacagctctaaagaactttctggttttaaataattagacagaaaacacaaatcctagctaccttttaacagtttgtaattctttg

SEQ ID NO: 178819 - DNA, 686 bp, Cannabis indica
acattgcagtcagcatcgcgtggttcttcaattaggcatgcactgcctacagcttccctaagtctggccaactcaaggtcttctcccaagcccaagcgggttccccactagtaggctccctatggtttgtctcttatgcatagtatcggggatgaaaccaagtcgttgttcttggggggtgcccccaaggagtcttcctacagttggaggcgcatgtggagggtcctcccttggaggcaggtgcctgtaactttgatccacctagatgcttgtatcagtctgaccactatagggtcctgaccgcctatagacctactggggagatctggccacccaaggtgtgtaagatctagcaggtcaaggcctgcaggacctagtaggacaaggcatgcagggtctggtaggacaaggccttcagggtctggcaggtcaatgcttgtaggatctggcaggtcactatagctctgccaaaatgaggccagacttgtggcacctgttttggtgacaggactcaccacatctgtagtgttcatggggatttcaattgtaactagaacctgagtatctggatctacaatctgtgggtcttgaagaagacccaaagatgcctatggtgcgacaggaattattctcatgtaacaatggtgtttgattaaatcgaatcaacgctctcaatgaaagcacca

SEQ ID NO: 178820 - DNA, 511 bp, Cannabis indica
gaaaagaaataagtacctgcttctttcttcgccagtcctcaacaccttccttgatcatagtcaacccaacaatgacaaccaaaggagcgattgcactgacagccgtgtaaggagccaatggagtaaaagccaaaatcccagtgaccaaaaagtaaaaattggccactctcctgaattgctcaaacaatgatttgggtaagaaagtggcaagtgtatactttgtggtactaacataattgtcactgtaatgacgaattccggcctcaaagcaatctgggtcgttgcagtaaacaaccctggaaaagcctggtcccccaatctgtgaatggtcttctttgaaagatgctttcccacatgtaaatgagtagatcttgctgaaatgcagcatcctccgtctgccacccctcatttttttgtctcccccaaaaatcagaaaacccacttagtcaaaactctaatttatgtttttcccaactgcctattctctcaccaactaatgtacctctcttca

SEQ ID NO: 178821 - DNA, 696 bp, Cannabis indica
gaatacttcaagaataacctctaatttgttataaaaaaatcaagtcccaatttaggccagttataaataaaaataacctctaaattgtaattaagaataattacatcttaataaaatatatacatgtattttgtaaatttatttatgtaaaattaataattttattttaaattataatacatgtatgaaattatatttactttaaaatatttctattatgatatagtattaatgtttatttattgttattattgttacattgatatttttttggttttttttttttttagttgtaactctattgagttatataacctctcaattagaatataatttatttagttacaaatatattcttaaatagaggttctactgtatatatataattctcctaattgatcaaaagtccactcggttaattatgcttaaaagagctagcatacattaattgattattaactcatctagctagtgatgtgactgatataaattacattttctagagtatctccaataatatactatttcacatgtaatcttcacattattttattccaatagcacataaattatgaaccaaattagtgtgcaccaaattttatattattaatagtattagattttgaatctataccaatgtacaattttttttttttcattttaacccttatttaatttaataatatagtttttaca

SEQ ID NO: 178822 - DNA, 777 bp, Cannabis indica
aacacgactattaaaatatatacagtaatttgcggctaaatcctcttaataattattttacttgcatttttaatctttcaatctcaaattttaatagtaaaatttatcaaattattaaaccgctaacaaatttaagatatcattaactgccaacgtagctccttgcgtgtaccacttatacatatatcacatttatattagtacacctattataattattctaagatttattttaaaattaaaaaataaaataaaattataaaaaataaaaaagaattactccatatactattttcttaacttttttttttttaaaaaaaaattacggtttaggtttttaaagtgattacagcgctagttgccataggggtttctgtacgattttttgttgcaatttaggttgcagcgctagttgcaataagagtttctatgtagaattccgtaaaaataaaaataaaaaaattaaaaaaccttttattttttagaagaaaaataaacttttttatcaatagataataatttattagacgatgataaattataaattttatctttatttaaaaactaaatattgtaaaatcatttcaacggttcgatgtactatcacctaaaggaaatcaaatgtcgatatacactaaacaaacatgtagacttttttttttgttgggtcggtgggtcgacattgaggagagatccaagccgagtaggagaaatgggatttgtaatttgtgcatcgtgtcattgttgggagttggatgtcgatggacattccaggca

SEQ ID NO: 178823 - DNA, 1411 bp, Cannabis indica
aattaaacaaaaaaaaaaaaaaaaattgaggaaacatagtattcatttacattattaagttataaataattttattcataatgtataacaatttcgttaatcatatatgtggtggtagcgaatctttggagttcaatcacatccccaactttaaaaataaaaatatgggatacaatgagataaatacgtaaattatgatttcgactaaagccaataacgcaattgaataagatgaaagtccttaatactactcgatcgttagtttcgcatatgaaataagaaacgatttcgaatgaagggcaccacccaatcttaattattgttgtttataaaacccaaagaatacttaattgtaaaaaaaaattaagacaaggatcctcaagcaagataaaactaaatgaaaaatgttaaaaaggcacttatcatgatgactatatcacttttgtgagttgttatatcgttattaatataattcaatatcaagtttctcttattatatttcaataaaaattatagaaaattatttactatttatagggtgtcactttataatagtattaatcattttagtgtctcataatagtgctcgtaactaatcgaatgtataagtgcataaacattacataattagataaaagaaagtggatggatgttagttagttggggtgtcattcctatgatgatcatggtgattttgatttaaatctttgatcttttgttcattgaaatttaatctttttatttttctttttttcttcttatttgtgtgtgtttttccatatattggccaaaaacagtaagaatttagtaaatgtatgcatcatatagatgaagtcaaatgaattgaaatttagagtgtataagtgatttgaattgatttgatgtagtagctaaggttgagttttttgtcaaattatggttgtaattaactagtgttgatgtgaaccaaaaaaaacctccacaaaacacaaatcaaggcctaccaaattagtgagtttacatgatcattttttggggaattatatgttactaattgtttgaatagttatatgttatagtatagtaaaatttgttaccattatttttttgcatatcacgaatctttggagtatgagaattatagaaacaattttatagtgaaaaaaaataagtagtgaagtatatttaacaatatcccaaaattgaaccgcttatatgttaatatttgatggccaaaatttttggtgtcaaagaagttttaagttaatttaagaattattcaggttgtgtttgaattaattgaagaactagattgggttatatttaaaaagtaatgaatcgattgacaaataattacttaaatatagcattatttttgaaatgaaactttgagctcatacgagtcatgtgttgagaacgataattgaatttt

SEQ ID NO: 178824 - DNA, 963 bp, Cannabis indica
aattatactatttgaaatactgattttatgggtcagaaatcagaatataataatgttcacaagatttgaagttcccaatcttttaatatcgtccttaattatactatttagcttgactatggtttgtcctctagacaactcaatttacaattctcttccccacaagtctgaatcacattcagaatttaagaggacgcactaatatataaatatatatatatatattttttgtcatttcttggaagtttacctgttgaattttcgtactgtttttaatcatattttcaaccataatagtttgaagaccataatttatatatttgctattttcgataagaaagtgtggtcgtacactcatcatagctcaaacaagagcaaactgagcatatttgatatttctcattctgggcatcactgggtttttcacctcaaggatatcgagaaagagagatgaaaaggtcagtaagtcgtatatggcaatatttttcggcttagacatcggctattcctcaacggccatccatattttgatattttttgccataaatttcattagattgttcatgaatgcgtgtcagtcaaagtttttgtttttttttttttttttttaaagttatctcaatctatgcaatttcatgctccataagttttataataaatggagatatttatttatttatttatttcccttatcacaccagactacatttattggttcagaagagcgggatcattacttccacgtttaatcttctggtttttctcaatgttatcttttcagggaggaaaacaacaagaacaaaaggaatatttatatatatattgatgtgaatacaaaacaaggaatactctatagggatctatattgattccaaagttcgagaccatatgtcttcttcttctttttggatcacatcactttcttgttcatcatcttctgtgattcaatccacacaggtgtcg

SEQ ID NO: 178825 - DNA, 700 bp, Cannabis indica
ataacatcataagatggaacaaccccattttataaccctcaaaacatgtgaaatcagtttcaaacctgtgaacccggtgaaaccagtttcgaatctgtttaccagtttcaaactagttaaccttgtaaaactagtttcgaccctatgaaaatcataataaaacctatgaaaccataacaaaacttgtgaactcatacaaaaccataaaattccaaaacatcaactaacaattattaaaagtaccaaaaatttgacatcataatgaaactaccatttacttaaacacaaattacccattttctgtttccttcacttcatcgtctttgtgacaaaccaaacgtagaacaataacaaaataagtttctacaataaataattacatgtaacattgataaaatttataaaatcaacaagcaaaataaaaatttatggtaaagtagtgtaccataacacataacacattgacataactgactaaaaaatggattgaaaccagtttttagtcaaacaccattaacataactcactaaaaataaaaatattaaaactagtttccataaaaacataatctctagttcaccatgcccctatcttaatgtgtactttgatcaatataataagtaatgagttgcgtactttaatacctgcaagagtacaaccgatgttgagattattaatgggttataaaccaaaaagttat

SEQ ID NO: 178826 - DNA, 584 bp, Cannabis indica
cgtcacagaactcatcaaagtctcctagcaatgtatttttagaagaaaagataaaaaaggtcactataggagttatatattcaatccacagcaaagatgattaagagttaaaagctatataaaaaaatcaacacatgcctggttacgctccacatagtcatccaagaagtctttaacatcattgacctgctctggactcaattcatcgttatccaacagtctcaatatcagttctaacttcataatatgagccttgtgtcgagtaatagattcctctaaatggacctgacataaccaaggaaaaacaaagaaattaaattatcaataaccacatcaacaaacaaaaaaaaagacaaaaatgtgtatctaaccaatctaggtggtcttgcttttcctttcttaacagtgagtccttcaatctcagcttcaaagttgtcaatctgtgattctaactcagaaacctactcaatcacaaaaacacataacaaaaccaaaaaaaaaaaaaaattaagaatacataaatagagtttaataaatatgagaagcaaatcacattttccataaaatttataaactcaaattta

SEQ ID NO: 178827 - DNA, 559 bp, Cannabis indica
gtattatctctagtattaaacaagcaaacggggagtaggtcattactcgcaaactaaggggggtcgaacctctataaatcttgtgtctcatttactttcagttcttattgtgtaacacgttgcaagcatcagtaataaatacgacttcattgtcgattggccgaatctaaatttaacaacttggtgctttcattgagagtgagttggaaatttatctaatcaaacgttgtggttaatgcaaggagaactctgactacaacttatccctcatcgggtgttcctcaagaccctatgaggtctgatcctgatattgttccagccaaaattggaatcaccacgaacccgacagatgtggccaatcatgccaacctgacaagcacaacaaacttcatcactcgagccttatatagacttgggagaaaatctcgagttagccagacttagagaggttgtctgtcaagtcagtcagactgaagaccacacattattgttgtgatgcatttgcataagagatacacgaatttctaagatggatgaatgacaaggagtacatcattac

SEQ ID NO: 178828 - DNA, 543 bp, Cannabis indica
taacatataagtgagccttctttactttattgaatttctctctttgctgctattattgttgttataacttatgattgagattatggccttgtttgatgattttcttatgcttttagctacttagaaaggtcatccagaaaaagacaacaataatgcagcttaattaattttgtcttttgattgaccaaccatgtttttgactactgaagtctcttactgctcataagaatctatacatgtaagtatttatacatactttttttccttaggctaaggctacttttgacaatattcaacaacaactatctgaaattttcaatctttttacttgtgaagggtttttgtaaatttttttcaactttcatggtaatagatatctttcttctggaattgccttgaagccataacaaacatggtaaaagtcatagtttgttaattgtttcaggtaataacaactttcaagaacgaataacttagctagtttgatctttctagtctttttgtttttgaattggtccaataatatgatatccattttaattt

SEQ ID NO: 178829 - DNA, 710 bp, Cannabis indica
tatttgattttatttctctattaagggaaccttgtacatgttaaatacatgattttgtattagaaataatatacagaaaatatcctactttgttgactatacttaaaaaattatttctctattacgtatcatttcctgtgaacttaactattttgcttttatggccttttgtatgtgttagtcaaatcatttgagattgggtgggatgatgatagtagtattacagaataaacagaatgagaaattgtattgttgatctgtaatcataatgagaacaagtatttatacatctaactcacaaagagttagttacaaccaggagaaagaagagataacaaacataacaacctggactaactgcctaataactaacataactgactatgaactaactaataccctctaatactccccctcaagatgaggtgtagagattgatgatactcatcttggactataagtagttgaactgagaggggaagagtgctttcgtcatgatgtttgctatgttgtgccgtgaaggaacatgagagagtttgatgtgttgttttgtgatctgctcgcgaacaatgtggcaatcgatgtcgatgtgttttgtacgttcatgaaagacggcattcttggagttatgaatggcagcttggtgtcgcagtagagagtggctggttgtgtgtgtttgattccaaagtcagacaagatgtgaatgagcc

SEQ ID NO: 178830 - DNA, 767 bp, Cannabis indica
gaccactccctctctctttcttccctcttaaatttcgaaattctagtgatgagagtgcccacacacaacaagtgatacctcaaccatagtgaggaagatcgtgaagaaagactttcagcaagaaggagtttcagcatcaaagattcagagaaagagatccagattcagatattgataatgctctgctacagaaaggaatcaagggctagatatctgaacggaaggagtcattatattccgctgcacccaatgtaaggtttcttaaactttatacgtgtttaattcatcgttttagaaagttcatatttagggtgttaataaacatacttgtgagtagatctaagatcctggtaaaataatttccaacagaatggcactgtgtgcctttagttcgatttccaggttcttcttcttgtcttcagtcagtttcatagcctcttcatcaagaacttcatgaattccctagtgtacaaggaagactttcatcttaatcctccataaattgaaatcatttgttctattaaatttgtccaccttgaatcttacagtagccatttagtttcaatagtttcttgatgtttgaagatcaatcttggagatttgaatgcagatcttgaaacattactctaatactatttgtggtgaaacacttaattcacaatgttgatcaacaacagtggcaagattgatctaaaaaaaaaacagcaaatgcaagatacaaataaataaaaatgaagtaagaacaagaactaaaactaaatttaaat

SEQ ID NO: 178831 - DNA, 693 bp, Cannabis indica
acttatttatttatctaacaaaacatgttttaacccacaaatccattttcaagtgcttaaaagtctggatcctcctcatcaacattttctggatgcttatccatgatctgcatatgaaaaaaggcattgttcaatatcataatgagattttttttaagactaatcatcaatattaagggatgaaaatgatgtacctacctctattcgaaaatattttttgactatttgttgggagcttggctttctagcaacctcagtcgattcaacttctacattctttcgatctgaattcaagtgtctagttgcgctctaaaaaattgaggaccaaatcaaacgaagataaaaaagcaacaaaataaaattgaagaaaatgttattgttttcaacatgaaatagttactacttacagctgcagagcatcgcaactcaactgagctatttgcataccaggggtttgttgattagccataaaatggctagtagaagggtgttggatgcctgagataacttgccaacataaagaggacttccacagactttgcctttttagtttaaaaccctgttgaaggcacaattgataagttatgtatatatggatagaaaacaagggatgtttattttattgaatagatttgattaagttctatgaatgacaatgggatattcggctctgaattcagcatagtatcgtat

SEQ ID NO: 178832 - DNA, 792 bp, Cannabis indica
cactaaaaaataaatgataaaattataataattggatacaaagtatagcttaaaaaaatagtaactctctaaatcatttcaagctatagggattcaagaaaacttcatccaagagatgggaattcaagcatgaaaagttccaaaaagggtgcaagcacttgttggtggagatcactcgaaaaaaatgcgaaccgagcgtttttccagcctttcttaaggcctcgttcgaggagaacaccacaaccaccacccaaaaacacaatcggttacaacttatggccgaggagaacaaaaatctaatgaaggagaaattagaattgcaaacacaaattgcacaattcaaagcattagaggataagttgttggattgtcttgctcactacatgggggacaataagtttaagggcttttgttagttttgattaattattaggttaacacacattaaattggtgtttttggtcaagcaaaaaaagaatcggttatatacttttgtatttttgttattattatatgttatgatatggtcaattaaagtttatattaagctcttcattatgtctttttttatttaaattattctaccgctaaatgggtccaaattttattttttctttgttatatagttggactatagaataaaacaaattataccgtttttgacaagagttcaaatggaatattgattggaaatttggttacaaaagcatattgtaatgtgggtcaattgatatcttattgggctagctatttagtgtaaatttaactattttattatattattttataaat

SEQ ID NO: 178833 - DNA, 1347 bp, Cannabis indica
  modified_base (1311)..(1311): a, c, t, g, unknown or other
tgagtctaccaaaaaataagtagtttgagactaaaagacagtaattagcacaatctaagaaattggtaactaaatgataatagtcacaaatttttggtcataaatatttataattgtgattgaatgcatttttagtcacaacatttagttatgaccttttacgaattataaaatttaaattttaaaaatgtcacaaataattcattgactaaatagcatttgtcatgagttgtgacaaaaatacatttaatcataaattatttttattgtggctaaaacgttgtgactaaaaatctaattttttgtagtgccaggaagcaaccaaagttatgatgtgtataaaagctatattaaattcgtgggaggatacccattagtggcttgaaacaggtcgttacaaccattttagttgaatgactattctatttcaaaatatataaaaattaagacacttacaatgcaagatggaaaaaatataacaattttttttttaaaatctattttttaatacatatttaattttattctattctatccatattctttctattactattcttattcttgtgatttcattcctcctaatcaaaggtacctttaaaagttacctttaaaaaaactctaaaaatacttaatggttgattaagcttgatatgctcaacctattttctgaaaataaacttgtctttacaaggttctataccatttcggtaggttttaaagtgtatgaacttgtatatccttaagtgaacaatattgtcactatttatattgaatttttcacttatttcatttgactttgagtagtaccacaaaatcttttgttgttatgaataataaactgagtgttcatagaaatttggctatttgaaagttattttttgctgttaaaactattctaaaggtttcaaaaataaataaatagataaataataacacagaaaataaaatacttataccacagtccacatgtctatcaatatatattcaaaataaaagaaaattaggtaggacatgaaatgtaaactaacatttaaacgagttaaaagaaatttcaatgctattttttcatctagtaaaaataacatataattttggcatttaattatatcattaaaaaaaatagcattgctattacgtgtcaatgatatatacctatattatcataagttaacatcttaataattatcagcgaaatttaataataattattgaattaatatattttcatgatatttacactaaatagtaattttatgtttagggaactactatttaactaccccatagaataataaatacactttattnttaaaaaaaatataaacttaaataatttttaaaatt

SEQ ID NO: 178834 - DNA, 578 bp, Cannabis indica
gtcacacaaacttacaacccaaaatctcatctttctattttatttaaataaaactaatttactttttttttacacaaaaatttcatctgccaatcaattcaattgaagaaactactaagaaccttataaaaataaaaacaattacatatacacttgtgtgtacaaatggatgtgatcttcgatccaccaaatggaaaatccttctcgattgaagtgggtttctttgatataatcctagaaattaatcaagtaaaagatagagaagtaccacgccatacctacaaatcaaccgaaacccttgtcttgaataataatcgccaagttcgaaatcttccaaaactctcacatctgcctaattatccccaccaccactcaaatctactcaataaggtgacgcagaactgtatagtcgccatatctgtttgtggaaattaatgagctatttgaacatagcaacggaaaagaaactgaaggaatcgttggaaggaatcgatgagttcgccgacgatttgtaacagtaaccagtaaccagtaaccagtaaccagttcgttgagaagaatgtgggaataaaataaat

SEQ ID NO: 178835 - DNA, 509 bp, Cannabis indica
gaatatgatccactatacaatccagctgttgtccaatactttgtaaaattcttcttaacccttttcaaaagctctaaaatgtagtcacccttattgttatacttgtaacagttgccccaaataaactgtacatctttgaatacatcctcagagttagaatacttaacaccactttcaagattgctacatattgttccgaaatccattagtgtgtctatcacatcaaaataatcctggtctcacaaaaaagaaaaattcaatttcagcttgaatgaatcttcaacttcactttgaaatacaggtgtgtttatatacttacaggaattccaaaagcaattggattaacaggggaattgaacggttcagcagcatccattttcattaccttttgaatcacctacaacaagcaacataaaaaacaataaaaaaccaatgacacaatactaatcgaaaactacattatccaacaattttaactaaccataagacaagtatctaactcttcctta

SEQ ID NO: 178836 - DNA, 651 bp, Cannabis indica
aattccaaggacagatcattgtctgccccaaccaattgctcgtttacctctggatcgaccggtacacatagtggataaaaatgtctttgcctctcttagtctccccgcacaataccaagggtggggcaggagccctaacttgttcggatccagtcttagcttgctcaggtccatccgagctccctccccaagaacctttggatttggcaaccttcaaggtaggagggtccacagtaggttgttccttagagagatcaatgacctcttcaactggtgccttctccttggatggagtttcatcacctttagacttcttggccggaggggacaagcccgagctccccctactctcttcatcagagcctcaatcatcttctgagacatttctgcacaggaaaaccaatacagtgagaagaaaacacaaaatatatgaaggcattaaaatcaagaaaaataagtgcaagttaaagtactctgcatgctggtaggagcgtttgcccgaacaagcacagatggagcatcattgtccgaagagtcttcgtggtcctccaggatggcttttccttttccttctacaggagtagatggccaagtaggcataccgggctccctcatccgaatagaacgttctattggcctctattcggtcgg

SEQ ID NO: 178837 - DNA, 892 bp, Cannabis indica
tacaatatgaagctcatgcattgtcttctcgtagtaaatgatatttacaacattaaatgtgaagacacctaacatattcctgaggatgctaagcttgtcaaggcatttaggaattattcctgctgttgacactgttaacaatgatatgcttaatttgcttaagcttgatcctattcatcacctcgaaaatacaattagtatgttataccgatgaatatgcacctaaggcatgcatccaaaggttgatgaatttcttgagaaccttacatcaaaacatataagtgactcggcaagactaagtacaaataggatagatatattatttaaaataaaagtggttgcatactatttcccacctattagatagaatatatgaaaaatagggaatgttcacgtttcatagtcgttgtacaaattagataaaaaataactgatatcctactcctataaatagcagtgatcacattgtaaaaaggacaaccaattttttaacttagaggaaattctattagattgtatctgtaaccaaagaacatcaaaaataagttagacttgtggagtgtgtataatttaacaacaaaattacgtaaaaaaaattattttctcatgtaataaatatataatatttattaagcattaaatacagaatatatatacatatagattattaattatcaactctcaattattaaagaaattttgagttaacaatgaatttattagttaattaagacactttgtaggtctaattaataaatatatttaaattttatatttttatgtaattataaaacaacaattgatatttaaataattagatgagataaatagcaaaatcggtaaaagacatagtgtttcattaagttgaaacaaaattgtaaaaatcaaaacc

SEQ ID NO: 178838 - DNA, 589 bp, Cannabis indica
gtaaggacacatcattttaagggaaattttaaaaataccctttttatattttatttacaatttcttacagcctaaagtttttatttgtttagcaaaatgtaaaaagacaactaaaaaaataaggataaataacaataaataaactataaaacaacccgaaaaataataataaaaaaaaaatcttatgacagttataatataactataaataaactataaaataatcaaaacagtggtttattatttttattgaagatgtatttttgtaaataaaaaagtttaaagcgtaaaaaaaaaataatctgtattgatatattttatattttttcaaattctgtatcatgtaattttctaatttaatattatagatattatttttttttttttagttagtaaattataagatattattatttgcaaatatttacaaaatgaggagtagtaaaccattttttttttgtaggccattttccacttatgactccccaaggagtccatggaattggcaatgggcccatcaaaaccctgataataaggcccaaattatactaatccaagcccaaaaagaaagagtggactttgatccata

SEQ ID NO: 178839 - DNA, 1092 bp, Cannabis indica
caatataaaagacaatatttaatatacattaaataactaaattaaactaaaatatattttgttaactaaattgctaaattgattaatttaaatatttaagtactacaaacttaataatttaatttaaacacttttaaagcaactatctctaaaattaatatggatttagtattttgagataagatacaacccaaaaaacatgaggttgtttttaaataaaaaatataagtgaagattagtaaattccaaagctcgaaaacaaaacatagacttttgtaatgaccaattcataattcgactaaattggtaagctctccattgtggcgcgcgcacacaaacgccccactccgattcgattttgttcgtttgctctttttataatttcctattcctatttttctctcttcttctaattattattactattttatttattacatatttgttttatatatttatttattttatttttgatattattacgattgcgtactctcccactactagaagcggcgcagttttatagagtcgatcttaccaattccacgattggacgctaacgtacgcatctcactctcctggacaaaatccattaacgttgctcaatcagagctccaaactcttacaggtccgacatccctatccctatacccatcccaattccaaatcccatttgtgtctttctctttctcattcattagggcttactcactctctgaaaaacccctaggcctgtttttggctttcttatttcttcaaagtttattattattattattatcagtatttgtttttatatatctataataatttggtttcagtagagggagtatatttctgatatgtggattgtggagctagttattgagagtgttatattttatatttgcattttattatatatatgtgcataaataataggtcgtggatttcaacttcaagcttcaattttgttttgtttttcgctatattggtagcttttgtgttaaatcataagcatgagctttattttattgaatttggataaactgaaggtaatgattcgtgctcgagatcgtgtttgttggtgtgggcactgaagctagggtaggg

SEQ ID NO: 178840 - DNA, 674 bp, Cannabis indica
gtaaatatttatacatagacttatgtcactataccaatataatattttgatttacgaaaggataacactatatatatttactatttattattttttttaatttcgggcccggtaaggtgtgggccctatgtacgaatctactctgcctaccctaaaactgactctaatatttatatatattggtcataaattcccttttattcatgtgaatattattatttgttcacttaatttaaaaataaagaagggagttggaccatacaagactttattatataatagtgttttaaataacattgtagaactctcataaatacaatgttaataaaaaaaaaaaaaaataaacaaaatagtaatgtatgaaaaccatctttaccaaaattttcaaacccattttagcaaaacacctaatcaacatgaacacaaaatctcaaaatgtaattaaaaggaaaatcaaaactttacccattcttttaaaagaaattaatgtaatttagagatatgtgtgggagttcttactaagattttataagtctatagggtatccccttcttttttattcaatacgaaataaatgtaaaatgatattatatttaaaaaatataaaaattcttttaaatttataatattaatagtacacataaatagtttatagtgacagtaattatataata

SEQ ID NO: 178841 - DNA, 532 bp, Cannabis indica
gctcacgtaattgttattaccacaaaaattaaacttaggtagttatttgcaattgggagttaaacttattaggtatttatgctgcaaattattctattataaatatgtgtggattggtaggataggaaacttttgcatgtcaatcaacatccaagtataaatgcagatgttcgtacattgtacattggattggatcgtgtagattgaattgaattgagtattttattaaaatttttaatatagacttataattaaaataaactagattataatattctcattattatagtagaatcttaaaaactcacatcattttaaaatttatatttaccaaacactcaactcaattttttctacaattctgctacagttgttgtttctcacaacaaagctacacctgctacaatttttaatgattataacaattacgtgagcgctcaactaacttcatacagtacttatcatgttaattaccaacaaacaggaacacaaatacattattttattatggaaataatcagttatataaatc

SEQ ID NO: 178842 - DNA, 966 bp, Cannabis indica
taacaaaaccaacttattaaaattgttcttactttattaagtgaatacatatatgatcagccaatatagaattttaatatgcccctcacgcacaatgtgtacaatgcaaaacaattgtgaactacaaatcaatattagggcatccaatattgtaaaactaagtttgttctcacataatattaagaaagttattaaatctaactcaacctaacaaaattaatgatctcaccttatttgtaagcctaataagcctacagtacactttttaattgttctactatttcactatttttttggcatcattaggattaggagaatgtttagtttattttttatttaaaattgaaagttataattatttaagattattaattcataatttttttcaaaaaattaaatagtttatacttcatacttcatagtactgaaaattagttaaaacagttagtttacaaatcacgtgtgtaacaaaatatttaaattaatttttacataaaaaattagtatataataaataattacgtgtagcaacaagtatttaaattatatttttcgagattgtaaacttttgaaatttttcaaaatttatagttaaacccaaggccaaccctaagtataggctggctaggccagcgcttagggctcagtcattttaggggcccaaataaaaaaaaatatatttaaaaaaatacatatttttaataatttttaaaatattatttatcgagcctaaatttttgtttttgccttatgactcatttcaactcagggccaaggttaaacctaaatatgtaatgtatatagaaaaaaaaacttaaactaaaaatcttagttggattgttttagttagagggttataccattaaatttttcttctaaaatattataagataaacaagtatttattgaagttaatatatctaaatttttttttaatttaagctatttatatattacaatctataa

SEQ ID NO: 178843 - DNA, 1035 bp, Cannabis indica
aaaattaacgaatttaggcttttacagaacctaatatagattttttatgaattagttatgatattttgaatttagatgaaaatatctagttttggatgcacgtgtgcgcgcgcggggatgagttttcactcggacagcacgcgtcttcagacaagggctgaccgagatatctcggacatggccctatctgaaggcctgctcatgccgagctccctcgaccaactaaggctgcacgcaacctattttctcggccatctctttgcatccgcgcgcaggggtatgcattgcgtatccctgtgcaccaaatttgttttctacatattttttgattcaaaaatcgtttttcattgaaacaaaattcaaattttggtagaattttgtgtagaatctaaattttcaattaaaaatctaattttcagaataaaattaatttttattaattttttaattaattaaaattagttttagatattagtaggctttaaattttgaaaatttgatttctcacaaaaatagccttatggttaattttgaaattttagattattttatttattttaattataagatcagatattacttatttttttattaaaatttgaatgatcttattttgatattaaaatattaataaaacttagaaataatctagctaaccatataagattttcaaaaatttgttatttttgaaatatattttattaaattaaattataagatttgaaaaatgttagtttttaatttcttatctcttattagatatttatttaaatttaaattttatttttgtcaaataacatgaaatttcttaaaaatttgttaattttgatttgaatagaaattttagggtttggtaaccataaaatttttaaacttgggatattttattttatttaattattagataaaattgataatatcctaactatcaaaatatcttatcttcaattttgtttattttttgttatatttaattgattaaattataagattagaaatataatattagaaatatctaaatttcaaattaagata

SEQ ID NO: 178844 - DNA, 537 bp, Cannabis indica
ggggggtttgccgcaaattactcatatatatatataaacaaaatcatgtgaatgtatggtagtacactattattatatttatttccacatctaaaaaatagatatttttagtttcaatttttttttttttaataattatctacttatttaacatcaatttaaaacattctaaataataaataactacatatgttataaaatatttaaaacttattttcgatatattaaattacatatttagaaatttttgaaaatttatgagtaccgtaaaatctctatttaagaacacaattaaaatcaaaaaaaaaattagtaggccattagaaaagaaacataatttttggccttttagaaaaaaaatatgatattttaaaattaataaaaaaaaatgtaaaattttaaaagggaaaaaaaaaatttgaagtacttaggtgggctctaagcacgaatctacccgcctataccccaggactgtgcctgcttgggatcaaatattatattcaaattgggagaatataactaaataaagttacacta

SEQ ID NO: 178845 - DNA, 969 bp, Cannabis indica
cttgtgaacatatgtttcagagagaaccgtgacaaacaggatatggcttggagattgaagtggaggaggctcaacatgttcagagaaagcaaaaacagatgattcttcctctgttaaggataaagtggaatggattgagtgagagagggagtccattatggtgaaaagtgtgatgatcgagagagaaggaaggagtggcagatgaagattgtgaagagaaaacccaaaaaacggttagagattcatgtatacagaagagggaaaatttgaaattgaaaaggtagttaaaattccaaaagttagttaaagaaaacacaactgctacagacctcacataaggcactatgtattctaagtttatatagaattacctatataatttttaatgttgtgattagaattgaaaaacaatttcattaatattctataatttttgtgctgatataaatattaaatttaacagtgttgttgcatgcatttcgtgtgaatgcgaggctatccaagagaaatgcgttgcgttttgattggcacgagttagacaacttacacgcgtgtggtgcactaaaagtgctttcggctcagttactacttccctattatccctttatttatgtcacattttaagtctttttcttaaataaatccaaacaaatctttcctaaataatttccaaatataatttaaaaactcttataatctcaaactactgctttaaaaaccaaaacaacaattaccattgaattttttctcaaaaaaaaaaaaaaacaattaccattgaattgaatttatatttattttttttaaaaaaaacagcctcattaaaacttcaatagtaaattcactaaaaaacaatctcaagagaaaataaaagtaggggtgtacaaaaattttcgtaaccgcccaacccgaataacccgcccaaaccaaaccgacaaaaccgataaaaaatacaaaccgacataactcgac

SEQ ID NO: 178846 - DNA, 755 bp, Cannabis indica
tttattgttggcgtgataaaatgtgacttgctagccgtaattaccggcagaatttgctcataaagtgtttctttgcttagttttctgtgcaaattaagacattgtttttcgacagtgaatgtctgcaataaaacaagagacattaattgacaaatactgtcagtcttttttttttttccatatctcttaaactctgttttcatgttttagggtctcgcttctagatctacaggacttcttgattttcacaaagaccttgtcagcctggaacctgcaacaaaggtgtgtatttttaatttgagtgttttgttagtggaactcaattgagaactcttagatttaattgtgtattgcttcattttagatacaattgaagtctttagctgaagaaatgcaagctataataaaggggctagaaaaggtcaagcaggagctgggtgcatcggaaaatgatggtcccgtgtctgaggtttttcgtaaggtcagtacttattttcattgtttattggaattctagattgcatttttttatggtcctcttttattttccaaattttatacattaatattttatggtactctatctttatattccatacgtacttacttgacatatgcttacttcactgctttttactgatgtgggtccttttatttaacttttttttcctcttaaaatctagacactgaaaggattcattactgttgctgagacggaggtggtttcttgtgtactaacctactactcgtgtggt

SEQ ID NO: 178847 - DNA, 868 bp, Cannabis indica
acatctaattttccctaatttattttgcaaatcggctaattcttacatgatttgtggcaatttgattattatatgtttgtgttttcctgtactgtttccctttttcagtcattggagatgtaagaggcaggggcttaatggtaggggtagaacttgtaactgacagagcagagaagacacctgccaaggatgaaactagtgttttgttcgagaaaatgagaggtacgaatttgaattgttgcacgtaaacatgttgaatcgaaacccttcagatagttctgctgtttaactccccaactattcaattgacacctaatttggttcctaattaaagagcacggagttcttcttggaaaaggtggactacatgggaatgtttttagaatcaagccacccatgtgttttaccaaagatgatgcaggtattactcttgcctctcttaaacacaatataatacttagggtatgtttagttatcaataataagaatgagaatgagaataaaaattaagatagaatgaaataaaatttaatattcatcttgcattaaattgatctttctgctcattttgaagtagaatagtgaaaagttattttataatgatatttcaatattttaaaatgcaattaaacaaaaaatggaataaaatttgattctttttcattccattctattgcccctaaccaatctcattctaactgagaaacaaagtggtggtatatgataaggaaggagtgtgagcttactgtttacttgtttattgtttgcagattatcttgttggatgctttggactattcaatgtcaaagctgtagaatctactttgtaaagtaatagcttcaagctgtgtaaagaatgagtttgaatc

SEQ ID NO: 178848 - DNA, 737 bp, Cannabis indica
tattatatactactatatatattaatatgatacaaacacataatcacatatatgtcacatatatatatctcatatatattactatcatataaaatagtaaatcacataatattcaccaccatgctcacccatgaatggttttcacataaaatctcttatccttgtattctcacaatcttgatttatctcctcttccattgaaaagggataagcttttgattgttagagattttataacaatggaagaaaatcaagatttattacaactctattgtaaaataatacaaggactaaaataagagattgattaaatatatgttacaatacatatatatacactatatatattatatatatatatgaaaggtagaagagaagattacaacacatgtaatataatatatgtatatatatataagaagaataatatatatatacactcactcacaaccttgagtgtagattagtggggatcaccatgacttgaacaaggtattacacctttgtccaaaagcttatttcccctatctctaagcactaagggaacattttcaagagaatggtcagctaaagttttcaatttgagagaatggtcatctaccactctctctttccttccgagtcttagttcccatttcatttcattccttttcttgtcctatctcttctccttttcttttaggtgttcagtgttcatgtctgtgggtgtgtggctgtgtctttgagttatcctcttt

SEQ ID NO: 178849 - DNA, 685 bp, Cannabis indica
tgtaattttgcggctcataatttggcgaggtgggcttttgctaacaatgtaactggtatggttaggaaaatttacaaaaatactagaatttggattaatttttacaaaaatacagtcacacgaaaatcttttcaaaaatactgtattttgataaaacaacagtggaacacaaaacagaacaactaaaaataccagtggaacaactaaaaaacaaccgtagaacaacaatgaaaacttaacacagtacacagtataaaacctacacaatatttttaaaaaaaattccgccccacagtataaaagtaaaaaagttaaaaatttcagtatgtggtgtaattatccctatggttaagctttcttctatatcagatagcatcttatgtaatgactgagaggtctaactcttactttatgtatctataaacgcttttatttaaaagaaaaagcccaagaatcttaatttgtcctaaaagttatttcctccctcatatgaacacttagagaaactctaaaaatgctcttaagaatttatcaagcctcatatactcagcttagtgtctaaggatgagcatatcctcacaaggttctaacaacaataattgatttcaactatatctctcacaagtaaacaatatgacctctatttataaaactagtaaacaaaccgcacttcccagaggatgtt

SEQ ID NO: 178850 - DNA, 653 bp, Cannabis indica
ctatgggggccagaggggttaggccctccaattttttattttttatttattattattttttatatattttttgaatagaaatagaacttcattaagaagacaaatagtccaaaagaatagacataaattcagtaggactttattaagatgacaaatacgtctaaaagaatagacataaattcagtaggaattgacctcccactaaagattcgatttgaaaaagattagatttttttatctcgtctctcaaataatcacattcattcgtggtgtgcctcacgtcgccatgttattcatacctcttgcttgaatctcttttgtttttacccctttctacattggaggcggctttcagtagtgggcgtgttccaagtcaccgaaaaatgttctcacgagtattcgtcaagttagtatattctgtgtattggggttcgtaccccttctttattttatttttttttagaggctcgctctggctttaggatttggcgctcttcttactctgagataggctcacttgagataagttaattttataaatatcagggtattttaagatattcgaagttgatcaaataccctaaaattaaaaatttcttaatggctgaaaaaaaataaggtaattattaataattaaatttttatttatatta

SEQ ID NO: 178851 - DNA, 649 bp, Cannabis indica
ctatgtacgaggttgtaatgtgagaattgatttttttttgggatagattacattatgttgtgcattattattgagtttttttatttttgtttgtttttcagtttgagaaaatgattaattaggactccaatgatcccaccaaaaaggctttgcttacttgttttgtttatacatataattgtaagaggaaggtttctgggaaagtaagtgagaacaagaaaaagaaaaaactaactcattgaagtttgactaaaactttattgtcaattcatattagtatattactaatcaatcatgaagaaatcaagtatacatggagaaaaaacaacttccaaatatgtcacacagatgcatcattataaaatattaattccaatgtaagtggtagttatgccaggtctatcaacggtcatgatgtactttttttcttttacgttacaacgtctgcacggtccattaataataaatgatatgaaacaatgatagattgattcaaaaagaaaaagtaacaatagaaagaattccatatgaacaccaatggaaaaccgtttacttattactgtcaaagaatacatactgtgatatctaactatgaattcctcatttctatattacatactattcggtctagtgtacgaaaaatgcaatg

SEQ ID NO: 178852 - DNA, 541 bp, Cannabis indica
taaattattaatatattcatatttttacccataaagtttaaaatttagtttttaaacataaaatagcccaaaagaataataggctcatatatgattcaaaattaaataaaaccttaagccaaaatataaatttctatacaaaattacacatagataatttatatatatatatatatattttaataatttgacaaaatataaagcctaaaattagggtatccaatccaacctaacatttttcttctaatctaatccaattcgattagataataacattttacaaaaatactgcttttggaccaaaactttacatttatactgggacacggcaaaaacaacatttatactgccccagcccaatttcattacttttgtactgcccaagcccaacatcatttcatttctactgtgaacagtaaaacacacgggaaacaaccttgttcgtgtgtggggagacgccggagacggaaatcaccaagaaaaaaccattaaatccggcaagaataaacaaaagcagtaaaatcgacgtcaataaataatc

SEQ ID NO: 178853 - DNA, 729 bp, Cannabis indica
aataatttaatgtaggtgcatttgggaggagttaaatgatatgagacaattattcaagttttatgacctggaacttcatgcagtgcacagtaaaactgatataaagaaggatcaaaattttaagaatgggacacaaagattgcctcattggttatcaacaataaaaagtcaataacaaatgttcttcgttccctggaatatcgggtaaccctacttaagagataattgaatttttttctttattattacttgaaattatttttacactatcttatatatatataaatatatatatatatatatatattagtgcacattgctgtttcatctagatcttatagatggccatgaaatttcccaacaaattgatgcgatgttgagaagtaataatttaattaatttttatataaaacaaatttaattagctaaattatatattaactaattaaaatataaatataattttcaatatagggtatgcgagatgttaaggggtcaaatgtgttcattggggcgtatctaaaaatattagtagcaaattacccaaaacaacctaaaaactaaaaatgtgattttatgtattgaatatacattagtgacatcatcagacatggaaatcctaagcagatactcaaccgatgtaaaagttgtaagttttaagttattaattatcttatttattaattaacaaacaatctaatatatactaataaaaaaatttttttttat

SEQ ID NO: 178854 - DNA, 712 bp, Cannabis indica
aagattacccatttaacaaaatccgttcttatatacaattgagagaaaagaaaagaaaagcatgtcatacccagtaggaattggtccatttctggtgcttgtaaagaatgctatgaacattatctgcatcaacaataaaaggtagaataataatcaaacccacataacaaaaaaatcatataataaataataagtgcaataaataaataaaaataaaatccaattacaagaagaatcaagaagtagaactctggattttgcagtgtccaaaatcataatgtcgttgtagttgcttttaattgaggttagtacttgatattcttcgtcttcttcctcttgttgtggttgctggtgcttctgtgagttgacattgggaatgggaggtcgtttagtggaagacttgaagataggaaatgggaatgtatttcgccatgacccattgacacaaaccacacggaaacaagaagaagaagaagaagaaacagcccatggaaggggtccatcatagttatggtgattgagaagcactgtagtattcctcaacagtgccattacttcctttcctcaacactgtccacttccactagcttggcttgcctttgttaatatcctttcttatcgactgaatttgaaaatagtatattgatataaaaaaaaaaaaaacaaaaacagaataaacaatataggaaactctacagtgatacatttggat

SEQ ID NO: 178855 - DNA, 573 bp, Cannabis indica
ccctcctaacaataggagtttaacttttcaaaaacgtaaatatatcacaccattttacattttacactattgttgtaagaggtaaaaaaaatggtatggcaatatcacactattaccacattttttataatagtaagatataaaaaaaattatgaaacaaacaaaaatttttttaaaaaaatataaaaatatttcaacacacaaaaaaattttatttttactccctgaactttttatttacaaaatatctcttcagtaaaaataataaactgtctttttagttgtttaaagtttatttatagctgtagtataattgtaatgatattattttttggttgttttatagtttatttataattattttataattatcgtgagtttaatttttagttatttttttagttgtttttttactttttgttaagtgaagtgtatttttgtaattttacaattttaaaagtatatttttataaataaaattttaggttgtaaaattaaaaataaacattaaaagaaaaatattattgaaaatttccccaagatatatattcatatggaagaggtttcaatggt

SEQ ID NO: 178856 - DNA, 594 bp, Cannabis indica
tcgcaaattgatttcgtaccaaaagtgcaatcaaaatgttattatctaaattgataaaccaacatatatatatctcaagagaatatatctctcacaaatttaattccacacataattatgcatatacatatgctgcaagtaacgattgaacctgagagaaataaaaaatttccaacagcacacatatatatacacagtaatcgataattacaaccaaagcaaatatatatatattcatagacttttaggatttccgtgtactgtttcaaaaaacagtaagactttttttaaagaaatctgatactgaattaatcccatgtaaactacaatcatatatacactttatcatataaatttcaatacttcaatcgcatatgcatatcgcatataaaactcaatcgtatatatatataaacttcaatcgcatgaatacttaatggaatattccaaatttgaaaacaataatttaatggaagatcaatacaaccataaattctcaagaactaatttagggatgctctgataccacatgttagaatactgtaaactctgaatatagccctaattaattcaagagaatcaaacaataagatt

SEQ ID NO: 178857 - DNA, 669 bp, Cannabis indica
atttgactatttgtactactttttaactttggccttgaccatttcagtcaaaagaccttttgttttttttttttaattataggttacaatttaagctagcataaaatatgttgttgatcttcaattttataagtctattgtatatttttatgagtgatttgctacatcttctatctgttatgttgtaattatttaattctaacataaattaatttaaataattactgtgaaacttataagaaaaaataattacacatataataaaatatttaagttttatttttgttaaattatttagattttttttttcaaaaattacaaataattttaaataactacaatatacaagattatgaaaataaaattacactattttttttttcaaaataattaaacaaatatactttatatgtaaaaacgctcttttaatggtttactataaatttttccatctaatatccgctatccaataataggaatagcccaccaataagacttcatattatttatgatgataaactaacaaaagtattataacatatttatgtgttgtgttatgtattgatttaacagtttttttatattatttattaaattaaatatgtgaaatttgatatgatttgaaccaaaaactcatataccatctcttaattggctactataaatttt

SEQ ID NO: 178858 - DNA, 1141 bp, Cannabis indica
atattatttagagtaatttacggcataaatactaagtttaactttcaattataaataaatatttaagtttaacttttggcggtaataatacttaagttataattttagaacttttgtaggtacctagctgttacgtgttaagtaaattgttacgtgacaattcttgatttgtccaagtcattaatttttttttaaataataatttaaatatactaatgagaaaatgacacatggataatgacttaacatttaacggtcaggtacttataaaattctaataatataacttaagtattattactgctaaaaattaaatttaagtatctatttgcaactatgagttaaacttaggtattaataataataataataataataataataataataataataataataataataataataataagtttatgaaattgttttaagtgatgttatgtttttagataaataatataaacataatattaataaaaattgaataaatacagttacaaaaattatttaaatttacaatttaactaaatagttataaaattaaatgtatatatatacttttctaattattacaaaacttcacaatgagtgctacaaggccggctctgagttgaaatggaccataagcaaaaaatcatttttttggtccttactataaaaataaatggtatttttaaaaattattaaaaaatatatatatattttttaaaaggtatttttttaatttgagcccctaaaatgagtgggccctaggcgcgggcctagctcgcctatacttagggccggcccagagtggttatatattgactatatttttttttgtaggaaagcataaacgaatttaggtagctgagagttttataacattctcaacacaatttgcttacttgggttttgagtttttcttcactttttgctcattcgtttatgcacagaagccaaaaaatggggacaattaattaggttataattttattggagttcttatatttgaaatacgatcttaagactcggttaaagatatacttgttgtggacattgtctcacatagaataaatggtagagaattgagccatatataagaacatgggttactccactcattgccaattggttttgagatggaaccccatga

SEQ ID NO: 178859 - DNA, 784 bp, Cannabis indica
attattcaattaatgcttaacaccacgttactcaatgttatataactgttactgttagtgtagctaattatcgagtctcatataagtagagctattttcataccatataagttttttttaaggaagaatacaataatttattattttttatttctcattttcttctttccattttccttactgttttcttttatcacgaaaatccaacttctaaccataccttcatataattttttttttcataaaattattatttaaattttttattttctaacgtttcccatctataacccaatgctgcatagtgcatagtcacattaataaaaaaaattatttattattattatttaaaaaaaaattgccgcattttcttttgagatgacgtggcatcttagctccgaccagtgtgtatataaaggcccctaaacccattctgaaatctcaacatttaacagttatcaccaaatcaaagagaaaaatgggagaccatcatcatcatcatcaccaccacctaactcaagaatcatcccaatccatggaagatcaacctctcaatttctcagctctccgcctcgagagttcacccaccatcactacaacacccccaccaccaccaccacccctgttccaactgcggcttcttcggctccggctccggctgcattacagaccactccaattccgcctcccacaaacgaccgttgccacctccttcaacacccacctctcttctttgccctaccgatcttaacgatcccccaacccaaaccccaacgaaactgtt

SEQ ID NO: 178860 - DNA, 802 bp, Cannabis indica
agtataaatacactaataaaaagagataacatttgtccttaatttataaataaagtgtaaaaaagagtacaaaagagggtctccttagcaatgctctataaatatataatataatatattgatagatatatagatttataaggattgtattttgttagcaatacttttgtacggttttggtacaaaaaattatttatatagtaaaaatattagaaaaaggaaaaataaattggatacttctaaacaatttttaaattgttacatcaccgcgttatattttcatttttatataaatatatatagaaatagatagattactatgttatataactactattttaataattagtaattacacaattattttcaagtacattataattgctgtaataaaacactctatctatacaatataggtaaggatgctccgcctggatatataagctaagctcttattttttttttcagaaaaaaattaggagaatttattctatatatttattttttttaaaatttacggtatgtagtttctaaagtggtttctctagtagtttctatataagttgctatataatttttggttgtgatttaggttgctccgctagttacaataataatttctatatagaattccgtaaaaatgcaaaaaaaaaaaatatttaaaagtgaaaataaaaaaattccaaaaaattattaatttattgcctttaagatttagtggacatgattgtaagttgaagcaatgacacacatactacctaacttgtgttaatcaatcaatattttttttttgtagagaatt

SEQ ID NO: 178861 - DNA, 679 bp, Cannabis indica
atatcgaaatcaactacaagtctaataataatataaaaaattaaaaacacgcatctcttgacagttaaactatgagtgaacagtgtacctcaatagatatactacggttgacagtcttctatgctcagccatttcaggcaacacacccataaaaatctagagaacaagaaaagaaaaagaaaaaacagatcagtgctttacttgactagcaagtactcccaggtgatattctcatgacaatatcaaataatgactagattacctgcaaaagtttgtccatgttttttgttctttgcaaccaacacggaacaattgttgatataagatcctcaaacacatgctgtgaatagttgtctatctacaaaagatgataatcacaataataagcatacaactaacatcaaagaaagaggatgttaaggatattttcattttcaaaaaaataaataaataaatctttgctaacatcatattcaaatttcaaaatatagattagaaatttaaaaaaatcccaaagtttacactagctctaatttatataactcacaaataaagcactacaaacagaaccaataaggcaattacattacagtagactcataactagcttagtcaagcaaatgaatatatcatcaaacctgtagtgactgtccgattctccaataacagtaaaaaatga

SEQ ID NO: 178862 - DNA, 831 bp, Cannabis indica
  modified_base (755)..(755): a, c, t, g, unknown or other
aactagttagtacttagtaggtgaacaatccttgtcacaattatatgtacacgtggctagcataatgaaatttccttccttccagctaaacacatacacaaactcacaattcacaaactcaaaacaaaaaaacacaacgaaacgtcgtcgttccaaacgcgataactattatttactttttccaattcaaaacaaagaaagaaacaaaacaaattacctccattcttctccccctccaacctcatccaaaactctagttgacctacaaacaggacaagtcacgtgcgaagcaagccacgtgtcaatacaacaaggatgaaacacgtgcctacaaaacggcatcactttaacgtcgtcgttttccccaaactcacccaaacatatcgctgttggaattaaaaaaaaaaaaaaaaaaaaaaactcctttagtgggcgacatatgtataatgtatatgctattataaagtagtgatacaaaattaagtgaccaattatgttatgggtatcaaaagggtattaaagtgtcatggaattaatgtgtagataccataagttaatttataatttgttgaggggccgaaattataaatacccaagagttattctaagatgactctataaataggtagtggtccccaacgaaacactagggtttctgtattctctccttccccactcagagaaaataactttagtaaaatagtgtattcttggtaagatcaaaaccttctctgcaatctccaacaatggcttcnggtaagtgcttccgctcatattttatcatcttcttcttctttaatttagtcaaaggctttatagatttatgattta

SEQ ID NO: 178863 - DNA, 723 bp, Cannabis indica
atggtattatgtacacttattaatagaaatttccaatttataactttaaaaaaaaaaaacacttaaattaaaaaaaaattacatactagaaccaaaaaatttaaaaaatttataaaaatatatcaacaatggaaaattcttttatttttactttttgaattttttatttataaaaatacatcttcagtgaaaataaaaaaactgttcttttaggtattttatagtttatttataattgtgttatagttgtcatgagaatttattttttgattgttttatagttgatttatagttgtcgtgtggttggtttcatgttgttctttagttatttttcttttactttttgctgaacaaagtgtatttttataattttaaaactttacaagaatatttttataattaaaaattttgaaccgtaaaattttaaataaaacgtagaaaataattatttttaaaaattcccctattaaaaatgacttgcaacataaatttaaatgtgaagtttgtgtataaatttaccattaaaaaaataagacttgtgtatgatgaggagtattattcttgacttggcctactaatttgagcattaattgactcagtaaaatcctgctaattaataactagaatgtctttggtaatagtatgtagaaaaatagagaaggaaatgagcaatattattattattactattattattattattgggttgggagacattattat

SEQ ID NO: 178864 - DNA, 708 bp, Cannabis indica
atttctatgtagaattccataaaaaagcaaaaaaaaaaaagaaaaaaaaaaagactgttttgaagtgtaaaaataaaaaacctccttttttcatacacttactaaattctctatatatattttatttgtatgtacattgatattagtgcaattctttctctatataattaaaagttcactatttatataccttttataaatatgttacctatatttaccattatctttctactatacaaaccatgatatgtaaaatggaatatgttaatacaatatgtcaatatgtatactttcagggtcggccctgaaatttagtgggccatagaaaaaaatttattttgaacccttatttataagaaaatatggtattttttaaaatcagtaaaaaaaattgtataatttcacaagggaaatattttttttgagcccctgatctaggtgggtcctaggcacaggcctagcccgcctatgcctagggccgagcctgtatactttcacattgttcttaatttttgtgcatggtgtaattattttgttttattatttttgcaacaaattattaagttatctattattatatatattttttaaaaaaatcacaagttaatctcttacttttaatattctatgatattttatcataagtttctgagtagaattttttctccaatttagtgacactctctctccatgcatctccatctaacc

SEQ ID NO: 178865 - DNA, 969 bp, Cannabis indica
gtcaacttcatgtcaaggcatagaacaaggaattctgaacctttgatataatgagcaataggatgagcaacatgaacatgagacatcttggtttttcagaaattttgccttgtaaaatttatggtacagagactgcatggaatcattaaataagcaatttgttgttgtaaatgaatactttcctttctttcttagatagtaaaaaatagtattcatgaaacaaacacaaaaaaaaaaattaaaaaaaaaattaaaaaaaaaaaaagaaagaacatcaacacacatttcaagatcaacaaaacaataatgcaaaactagaaaaacaaagtaaagaaacaaactaatatacagggggcgaagggcactttaaagggtgggatggccctggccccccctgaaattttgaagataatgaaatttataatatatatgtatagttattttttaattaactattataaacatatatatatttggatatatatataataaaatgagattacatatacacccgtatatttagcaacttaattactacctttgaatgtgatgaaaatatatttatggaaatatagttaagataaatactagtgtttctttatttaaatataattacaaaataaatttttcattttttttttataattatggacattgtacatatttaaaaccactcgtaaatttttaaaaaaatcttaaatattctacaatactaaaaataaagttaaaacaactcatgattaccacgcatataagaaaaaaaaatatgagtacaacaaaatattttaatctttttttatctaaattattttcatgattacgtaggttgtatttatctagaatcatctataaattcttacaacaatatttgaattgtttacagtgctaaaaataaggttaaaaaaaatttgttgcacacatgattattttttttaatttttttggtaaataattgtttgaattttattt

SEQ ID NO: 178866 - DNA, 625 bp, Cannabis indica
ctatacaaaaggaaacggtgaggggtggacctgaattctaacttgtatctattataatgtctattggatagcatgtgtaaccaaaggttctgaatttagcgtaatctggtacattatggaaaaaaaaactactagaggtgacttatgacctagcacaagtgtaggtagcatgttatgaatatagacagaagttctaatggtctcatcccaaagttttaagggtaacttgagctagtaagacaagagtattttccacaataaatttgtgttgtttgaaaaacttatacaagatttttattatttttcatgtaaataattatttaaacataaataattatttcatataacatgttaatctaaaatctagtaatgataaattatttttagaatacttaagtgggtgttgcacagcagaatatgactcctccctttcaaaacataatattttttaaaaacttagtacaacaaaaatataataaaaagagtgtgaaaataaaaatataaaaatgacaaaaaaaaattaggtattattgtaagatccccaatagtaaaagagaaattttaaatttctatacttaattgaaaaagtacataaaaaaatatctatttttataatatatcaaac

SEQ ID NO: 178867 - DNA, 485 bp, Cannabis indica
aaaatgggggctgacttggtggggacctgctttcgtttcattttttttcatggctggattttgtgctttctgcaatggaaaaagaacctctttccgttggaggcggcagaagcgatgcaggcccttctaccttccgccccaccgaaaaactggaaatacccccgtcacagatcgacgaggacctgttctggcaggaggtgatgaatagcgcggaagaaaaacgagaagccgcgcccacccctgccagaataaccggaggggcaacagctcaccgaagcccacttgcgcgagtttcgcgacatgttcaaggcgcaagagaagctcatagagcggatccgccatcttcggagaacggatggaatgcgtatcccggccgaaaagcgcatggagcgcttggtcgacatgatcgcggacgagcctgggggaatgcaaaatcttccgcatatcctaacggatatgcagagcaacggccgggagagtctttt

SEQ ID NO: 178868 - DNA, 616 bp, Cannabis indica
ttttttttatgttttatatttgtactaaaatgtttacattttagttcttagagtgtggaagagaaaatgagaaaagaattctctgtattgaatcgatcaatgaatgtacagagtatgagctatctatacaagctcaagaataaagagttacaatcggtaacagttttgttaactaactagtcacaacaatcaattaacgtaacaacccttaaaagtcttgaaatattatgtatgcttttcaatccgattttgtccttaaaagtcttgaaatgatttggaaatagggccttagtcgatatgttagcaagttactctttagaggatacatgagttttttttttttggtaagaactcatatgagttctattgaagttaaaaattagggcatcacaatcggggactccctaccctaatagaatggctaactaaataaccaccattagttctagtccttcttggtcaataaagtcaacagtagaattgtctagtctaggaatataagtaaaagtagacaaaaactaaaactaaaaacaaacgttgagaaccgagagagccagaggtctgatttccaaaccggtggacacacctgatgctcagctggtggtgagggccttag

SEQ ID NO: 178869 - DNA, 649 bp, Cannabis indica
tgtccttataatgcccagatttttgacagtgggtacacattggacagggctttttgtttcttgaagtctgattagcagcaggggcaggatctgtcttattggctgctggtgtggaagtagcagtggcagcaaaggtggggatggttcgatggccaatggttctttggcgttcttgatggacagtcattgaaaaaactttgtttagagggggacaagggtcaaggagtaatagctggtcacgaacagcatggtaagtttcattaagtcctttaagaaattgaaggacttgatcatgattagtatgatcttgggactgagttgctgcagcacaagtgcagggaagttttggcctcaattgatgaatttcatcccaaatggtcgtgagtttagtgaagtaagagctaagagaatcttccccttgatgaagataagtaagggtttcattgagctcaaagattcttggcccatttccttgattaaatcgattgtgtaatactgtccacatctcggcagcagtgtcaaggtacatgatgctgcttttgatctcaggtgagatcgaatgtaagatccaagacataaccatttggttacatcggatacaagaaccaaagagagaatcattagggagggggttggagggagtagtacc

SEQ ID NO: 178870 - DNA, 558 bp, Cannabis indica
gtatatatatgtatatattttttttattttttactaagaaaatttcataaaaatttttattttaatttttttgtcataatatttaaaatataatttaattttatttgataggtatattttctaagtttatgaattggaagaaaaaagttgaaaaaaatttagtataactaaagatataaattttatattaaattaaaattattcaaatgggtgcctttagaaaattttggggtgtaaataaaatttccttttgaaaatattaagtaaatagccaaatatcacatctttaggcattaaaattacttaagtgtccttacttttgcgtgctattattttttttatctctcattattctttattaatttttcttcagtttttatttttccaacaactctatatttctttttcattgagtaaaatatattatatttttcgttctacctgaactatatccaacattaatatacaccataatacaaaaaaaaaaaaatataccataattttaaatttatatagtatcttttactttaagcaataagctctagctaaataggtata

SEQ ID NO: 178871 - DNA, 1112 bp, Cannabis indica
gattggattcatgaagagaaatatattattagttttttgtaggttttgttgctgtatggggatctttatgctaaagttcctctactttgcttccaagtccaaacctctaaaattaagaaattttaatgtgatggcaataattttgagctattttggcacaaacccttttttaacaatgtttttttatatattacttttgagttattttaagtaacaagatgtgagtgctttaattgctatttagctctttgttctttatatttaagataatgaggtataattgctatttagcactttctataataacattgcagttgtggctagagatcatcagggtaatgtgatttgggtgcaaacgaaactttcgaatttttttgatgctttgtgtggagaagcagcagcttgttgtctgactttgaaggttgtgaaagataaaaactactagtttgtaattgtggagagcgacttcaaagttgtgatcaattcgctaaatggaaaggaatcttgttggaggcgtatcaattatgcctcattttgtaaaaggtctttccttttttttgcaaaatgtattttgactaatattagtaaaatttgtaattttatcgcctataatgtggtaaagtgggctttttcccaaaacaggttcggtttgatttcgttatctaccattcttaggaacattttatataattaccagaatgttttattatatatcaatcacgcttttcttaaaaaaaaaaaagaaaaggaaaagaacttcttgaggtcatccaacaagttaattagcaactagtgtttgatgataccatgccacatatagttcatatagatagatttgaaatatgctatttattagtatttacatctcttggcacgataaatctcttaaactcaaataattaaggttgaactccttaacatctacaattattttgcttttgtacatttttctgtcaattttgatctattaagtgcgaaaataaattactgctgtgtacataagtgtacgcatggtgaaattttattagttcacataatattaatcttaatataaataaattaaaaattttaaaattttagtaaaataaaaaatactctttttttttactttc

SEQ ID NO: 178872 - DNA, 726 bp, Cannabis indica
caatcgcactaccgtgttcccaaaatgtacgtatcaccctgacccaaaagtaggcttaactaacaaatcaaagaacacgaataacactcttgagattgagcctaaccatatcaggatttcgatcatgtgatctaggatcaacttagtgatattgaattgaatagatatttacggtaagttttataaatctatttcaaagttcaatatcggtccattccaatgcatactccatgcatccaacctgagctttactttaaccaatgttctggaaagaacatagcatttctccaaatgcaagtaaactctgttgtagattgtcatatcagtaaaacccagtgttctgataaatctaggaatcctttattcacatagtcatgtttactttccactgtgttgacaacacaataaacatgatcaagtatgtgaaaggggtttggatgaatttataaatcaaatagacaaacaattgattaagtgaaccaaaacatacacaaatgaatgaaaaatacttctgttactttattgatattgaataatctggattacattgaaatagagttttatttagggcataaaacccaacattatcctactaaggcgggggatattgtggagtggtgtgggaagtacattaaagattttcagcaagataatgggaggactaatggtggggggcctcggcagcagcaacaatgggaactgcctggtgttgggtcctttgtggtt

SEQ ID NO: 178873 - DNA, 879 bp, Cannabis indica
taaataaaacagttatacttgctaattcccaaaaatgactgccctagagatgctaatgattattgactttatttcttgtagcaatacactctataaaatgcattttctaagatgcatgctctagactttcaaagatttttccagattaattcacaacaatcaatatgcttttataaagaatagacaattggctcacaacattcttaatttccaaccttctcaaatgatatataaggaagaatgtcttggctagatgcatcatgaagatagacctaagcaaggcttattacacagttggatggttgttggtagctgacttattgaagggcctttttttcttacaaaatttattaaatggatcttggtttgtttacaaggtacctcctacaacttgatgataaatgggcaactgcaaggctctttcaagggagaaaaaaggttgcttcaaggtgatcctatttcctctcttctctttgttcttatcatagattatttgaccagaatcttgatcttgagccactatgcttgcaaggatggctttggttttcacccactttgtaaacacctcaaccttatcaacctttattttgttgatgacttaatcatctttttcaaaggtaatgaaaagccagtgaggtatattcacgaagcttttaatcctctttatgattcctctggtttgaaagctaacatggcaaagtcttcaatcaaatatggggtgtcaatgatagttgcaaaagggctattttgagcttggtttagattgaggaagtagctagttaatcttagaccaaccaagtggaaagctttggattatggtatcatccttgacaagattcataaaaatcttaacaacttggccaacagaaacttatcttt

SEQ ID NO: 178874 - DNA, 847 bp, Cannabis indica
caataaattgtaatttttgtaactgatacttttaaccacgaactttttaatcacaacatagaattgataatttataattagtcacaacttttttaagttatgattaaatcagaaatcatatcacactgttagaagaatataaagtttttaaaatttttgtagtttaccctctaaagacttgttttgattcattctttatttgtttcggcatttagaataatattttagtttattttgcgatcgcgtatttaaatttttttaaattttacaagtggtaaataactataacgtacgcgatcataatttttttgacttaaaagctctttcgtatatcaaaacagatagggagtctatcgaaacactcctttaaaagagtgtattgtagacttacccaaaaatttttaagatttggaataaaattaatttgagcaaaattaaatttaacatatcattatttttattttgtaaaatacaagatccaaattgttcatcttcttctccaatgggtgttgtcggccaaatctgggctagtgactctcgggggctttgcttcttaccattttcaagcgaaaggtggaggtctatttgttgggtctcggtgttggaaggtttttttgggcatcaaaccctatcttggggctggatccatggcacctgagtttttcaagcaagcggtcgctaacctgagtggctaggcatctcttttgagaggtctcatgcctctggtttggggttgcaaatggctctgtccccatgagttgtagggtcgcgatggtggtggggttttctcttggttctctctgtttcaatttcggggtgcgctgaccctttttaagaatgaacttgg

SEQ ID NO: 178875 - DNA, 974 bp, Cannabis indica
tgaatgaaactaatttttctagtcaaatataatcaaaacctgcaaacaatttttttgcacaaattagctaagtgggctctaaaaaagttcacaacttcataatcagtttctcaacatcttactattttggtgggactcttatccaaaaacccagacccgggaactgcctatttatctatcttggaatgtaaattagaaaaaggaaaaagggtccccaagaaaaagagacagaggaggcgtaatctttcttttctttttggtcataaaaaagcaaaacagtggtttctcacaggtagttttcttgatcaggaactaaaacagttttactgaacaaatgtaactaaagttcatagcacattaaataaattaaaaaacaatcttggaagaactttcttgagacgaaacaaactgaaatttgaatttgtttttttctaaaggtaacggtcacaccattctttagaatattaattacctttttaatggcagtatttgaatttgaagatttgaactaagacagtttgaaacagttccctcctaagcatgtctttggctaattagctggtccaataccttgtctttaacaacaaaaaagaaaaacttttcttttcgaaagaaaaggagtaatatcaaccgtctgatcttctagtctgagccacagatgttgatgaagaagaaaaacccagaaagaaaaatggctggagagttgaagattgaaatgtgtttggttcctgagaaagtaaacccacgacatgcagagagtgcatcttgtaggaccttcatatatacagagtcctattgggttgtttaatgtatttctttattattttttatgattctctgactacgtgggggaaaataaaaaacagaagtaaataatgaataatcatcatcatcatcatttttttttctttctgataattaatgttatcatcataatttaaaaataaatgaaaaaattattaatattccatgta

SEQ ID NO: 178876 - DNA, 774 bp, Cannabis indica
aactcttacgtagagttcgagagagaatatacatgaattccattttcattgctctcgacattaatttcattttggatagactagaattaaaaagaaacaaagaaagtataataatgtacggttacgatagattacgctagatagattccataaccaacaaacaagtgttataaagtgaataagtaacacatatatttatattttatatttatatagatacatgtatatatgatgttgaaagggaaatgataagacaccagtcacggaactaacagaagaaaaagaaagttttattaaagaaaaaaaaggaaaagaaatgaaagatctacataggtgagtcagataatgaggattttgcagatatagacatgaagtaattgatataaataaatgaatgattatgtcgttcaactacaaaaaataaatgaatgaatcatgcaaaagcatgggctctccataatatactatataacgtgggaggtcacagcatagcaacaacacatgaaaggagagggtagggcatttatatattgattttgaatatggaaccgaccataggattaatggaccccacaaaatgcccccaaaaatcctcattgggaataattaaggtgaaaagcaacgacatgacataatcacttaaatagaaagttcaactgccattattttatatagtcacctaatgatttgttcttgcttttttttatttttttctttcctcttatcttagtattttggattacttcttaattaaccctctaccaaaatatatct

SEQ ID NO: 178877 - DNA, 607 bp, Cannabis indica
atacttgaataatataaaattgtttatcttaaacactaatttaatataaatattatttttttaaaatatttatataaattttttagtaatttaaaaataatatataattttattgtcattatttttttttcttagaatcaatttaaaatttaagtaactattatttaattaataatattttaaattttaaaaacttgtgtataataattcaaaattatacattttcactaattttaatgaataagtttttgataaaaaaatgtataaataaatgtgtgataattatttcctttaaattctaattaaatttaaaatatattaataaaatttaaattaaaaaaacgaaataaaaaaaaaaaaaaaaatctcacctgcatgggattatttatcccaccctgctggatgggataaataatcccagacaaatgaggttaactggattagttatccagacttctaacatgcccaaacactggattggacaaactagcctgtctaatccaatccagtgctgcgtaccaaacgggcccttagagtttagataagggtgttgattagatcccatctaatatttttagacctactcagattcaatctaattatatat

SEQ ID NO: 178878 - DNA, 501 bp, Cannabis indica
atataatagtaatatttatagtaccttgtcgtttacaagatgagttggaaatctcatggcccttgaaattggataaacaccaagttgagcaagtgtttaaattaagtcataaatttcgtgacaatgtttacattccttttgcacactttcaatgatgtttttattttttccttttatctgctattattctcaatttttgttttcaatctcctctggatccatccattataacttactactagtaatttcttgtcctcccatttcttcttttatcatggaaaaggtttactaattatctcatgaaaagctttttgacagatatttttagattcttaacaaaatgcttacattacattcaaaaaaaaaaaaaaactaaaatacgacgaaagtcatgagtactaacatattatttaataaaataaacaactaacatatttatttttattatgtaagttaaatacataattaaattaatatacagtctatatcgaaagtaaaaat

SEQ ID NO: 178879 - DNA, 795 bp, Cannabis indica
agggtttgggttgagcgcggttatggaggcctcgagtacttgtgaagaagggtttaaagaaagatcatcaggtgaagaaggtgatgacgtggcagagtctcctttaggtaaaaagaaaattatggtctctttcagttatctgatattgctctttgtattgctactttacttactttctcttaaagatatatatacttagtaagaacaatactctcttcctaatattagtaagaaacaaaaaaaaaaaaaaacaaaaagagtagagagagacacacaaaaccaagtttgaaaataaccatgagaagagaacccaaaatctttactataaagtcattgtaattataatttaagaagttcattttgaaatacttaattccaaaatactatttttaagtgaccattctactaaattggtgtagaactattttactagaaagatatactaaaatttacataataatgatgttagattttgaatttatactaaattaatgtataattttcctttttattttaactctttttttaatttattttaaaaataataaccataaatattttgttgacaatatataattatataataattaattattatatcagctatattgatataaatatacagtttaaaatgtatatatttatttggtgttatatttaatgtgaattaggtgtgatttattagagttgttactaataaattatgcactaaattagtaatacattaaaagagtgcaatgtttgagattgtttaaaaaaaatttgtaattcactcattattgttaaatcatgtat

SEQ ID NO: 178880 - DNA, 633 bp, Cannabis indica
ttaaagagcagactacaaaggatcgccggcacggcatcgaatcctcatggtgggtggtaatgtcaggtaaggggaccaacggtggtaacccaaatcagaaatggaaggctgaggcttaccaaaacagtcggggattaatagaaagtttcaaggaaacagaggtggctgacagggtcgcgagtcctcattcaaatcatatccatagtgtctgaaatgtaagaaacaccatgagggtgagtgccggggcaagacttgtttttagtgtggcatggttggccactttatcagagattgtccagaacccaggacgtctattcactatgacgcaggctaacgctgatgctagtccatcagtggtgacaggtcagttatctataaatggttgttcgtatactatgttattcgattcggaagctacccactcttatatgtcgagtagagtaactgaaagtttccataaaccatgtgatgtgtatgctttggggtttagaaccctattacctttgagagacttatttgtatccactcggtggattcggtccttgtcttcttggattgacagttatgagttaactgccaatctaattgagttacaagtgtttgattttgacattaggggtgagcataaaatcc

SEQ ID NO: 178881 - DNA, 655 bp, Cannabis indica
atgttaattacttgttataattaatcaatatcaaaaaaattatttactcatacaggagtgtatgtatgatcttgtaagattacaagagaattaggttcataacatataaatgaaatgagttagtaatgtataaatgtatgtaacatttaatataatattgctagtatggtttactaagcactactaaatagtgtgtgtgattttgattcggattatgtttgtgtttattatgtttttggttcattcattaaagcttcttaaatatgaaacttacaactgttgttctaggaacataatatcatggatggctaagaacatgttatataataagtggaatctaaactttcggagaggaaagggttaattatgaaagtgaatttagttattgagctcaaatctataataagattatagatgaactactcatattaattcatggtacttagggatttaatagataattagaaggataaaatagtaatttgattagctttaattattatctaatgaattagaccacctattatttttcaaagctttttagccaaaaaaattttatgatcgtgtatattgtagttatttaggaccatctatatattttttaaaaatttttgtagtaggttactatgcctaaaataagattcaaatattttgt

SEQ ID NO: 178882 - DNA, 726 bp, Cannabis indica
tacaagaaaaaattaaaaacaaaaaacataagtaatttttttttttaaaattaagacatacataactgtaatttaatttttttttttttttgtaaaaagaaaaaataatagatccttaactttataaaaccaaagaaaattaaaaaacaaaaattttaggtaaacgaaatgcataaacaaaaataaaaatatatatataacattgaggatcaaaaaatttaaaactaaatgtaaaacaaaaaacacagaaaaaattcttaaaattaagcatacataactgtaaataatttttttttaaaagaaaaaaaataatgatccttaactttataaaatcaaaaacattaagaaacaaaaattttagtaaacaaaatgcataaatacagacaacgatatatataacattaaggataaaaaaaaccagcaagtcaatataaaaattaaaactaaatgcaaacaaaatcatctgaaatatcaacctgataagaatactcataaacaaaaaaatgtacaaaaatattaacaaaaaattaataaacaaattataccttaacttttttgaaccattccaaatcaatctcttatcctcaaattcgccttgtacaccaatcttacctctcttagactcacactcatcatcgccatgcttatccaccactttttccttaccctgtttctttttctaagttcttttttttattcaacactcttgaactcccaacttcatta

SEQ ID NO: 178883 - DNA, 605 bp, Cannabis indica
atcagaaaaattaaaacaaaaaacatagaatttttttttttaaaattaagcatacataactgtaattaattttttttttttttgaaaagaaaaaaataatgatccttaactttataaaaccaagaaaattaaaaaacaaaaattttagtaaacgaaatgcataaacaaaaataaaaatatatatataacattgaggatcaaaaaatttaaaactaaatgtaaaacaaaaaacacagaaaaaattcttaaaattaagcatacataactgtaaataattttttttttaaaagaaaaaaaataatgatccttaactttataaaatcaaaaacattaagaaacaaaaattttagtaaacaaaatgcataaataaagacaacgatatatataacattaaggataaaaaaaacccagcaagtcaatataaaattaaaactaaatgcaaacaaaatcatctgaaatatcaacctgataagaatactcataaacaaaaaaatgtacaaaatattacaaaaattaataacaaattatactaactttttgtaaccattccaaatcaatctcttatcctcaaattcgccttgtacaccaatcttacctctcttaga

SEQ ID NO: 178884 - DNA, 736 bp, Cannabis indica
attatatatacacaataaataaattatatatttatacaataccaatcacatattatttacacatacacatatatatatgtaatataccaattaactaaacattacaaagataggaaaaataaatctaaataaaataaataaaaaaaacaaacctgctaaagttttggccaaatcttttactcttctcgtcgtttttactttccgttactgtttcgagtaaagtatcccccccaatacttcaagcatggaacaaaaaataaataactagtaaaagaaaaacaaaaatgaaacggagaaatgaaaaaaacatagtgaaaaacacattacctgtcaaagaaactggcgatgcaatggcagtttacggtaggaaaaatgggcggagaagaggagggtcggaggatggcagaggaggaaaagggtcggggtggggtgaaatttggtgggggaaaaatgaaaaatattttctgagttaggggttgggattatatatatttttattaccggcgggacccgtcggtattaatagggattccgccagtattaataaaacggtcagaattatttgactaataccaacggaacccacctctactagtctaccggtattagtcattttaaattttgggcggtcaaaatcccgcccaaagtattagaggcggattttctgtcggtaatactataatttattaaatattttttttaattatttaaaaagtaatactggcagaatacattt

SEQ ID NO: 178885 - DNA, 574 bp, Cannabis indica
cctaaaagtaggcttaactaacaaatcaaagaacacgaataacctcttgagattgagcctaatcataacaggattaagatcatttgatctaggatcaactaggcgatattgacttgaatagatattacggtaagtttaataaatctaagtcaaagttcaatatcggtcccttccgatgcatactccatgcatccaacctgagctttactttaaccaatgctctggaaagaacatagcatttctccaaatgcaagtaaactctgttgtagattatcatatcagtaaaaccctgtgtctgataaatctaggaaactttattcacatagtcatgtttactttccaaagtgttgacaacacaataaacaggatcaagtatgtgaaaagggtttcagatgaatttatacattatgtacacataatcatgaaataactcatgtgaaccatgcaacattaaatgttatttctgatctatattaaaaagtaaatatgattatattgaaatgagttttatttagggcataaacccaacgttatggttgatccaaacaagtttgagtcagtgaagaattggccg

SEQ ID NO: 178886 - DNA, 935 bp, Cannabis indica
attaaataaaaataattttggactcagatcaattaatcaatatttgttttggtatgctttcagattgtcaaccaatcacgtatttaaattgttaaaacttgaaaatgggagaaaaatctggttcgaagggatggtgcggttggttactcgcttttctgattcttgctctggttgtgggtggcattgtattcacaatcatgaagaagaaatccggtaactctgatgggattgcaccggttcctggaccccctggtgccatttctaaggactatgccgacgccctcaaaatcgctatgcaattctttgacatacaaaaatgtactctcttttcctttttttttttttgtaactttttatttggcattataaaatagtttgtgttattaaatagaacgctattgtttcagaatagggtgtttcattcatgagctgagtgttttttttttgttctgtctgtaatttgattttgcagctggtgagttggtagacaataagatatcatggaggggggagttcaggtttaaagatggaaatgaagcgaaagtggatctagtcaaaagggatagtatgatgccggagatcacatgaagttgggttttccaatggcgtttactgcactgtcttgtcctggacgattcttgagtatggtgatcaaatggatgcagtagatcagttggagccagctcaagactcactcaagtggatcactgactaccttattaatgctcacgatttcagataatgtcctcattgtccaggtttctagtctttacgttaatctcattggctctttaagtaaacttaattgcggtccaagttttgtattagcttgtcatgtgctggaatttcttgctgtaaattttaatctgttttgtcttgtcttatttttcttagtgaaaaaaagtggtttctatagttgcgttggggggaggtag

SEQ ID NO: 178887 - DNA, 600 bp, Cannabis indica
tgagtgagagtgtgattgggattggtttgtttatggcataggagaccaatagagtgggttggtggcatcatggagacttgtgtcagccaataatttcaaccaaaacttgcaataatctaacattttctagggacagtcaagcctttttggacttttctctctatttttttatatagtcaacttgacataatttaataatttattttattaataacttagcctcctttggtcaccatgagatttgatagtcaattttataatttagttactagattaaaatattgtaaattttttattaggtgtttttgtagtacctctcttctggtatttagaaagctttttagtttattttttttttataatcgcactttgtaattatttaagattagctataaattttaagaaaattctgaataatttacagtacaaaaaataaagtttaaataattacttaccacacgtaaaaaaaaaaaatcaaaaaatttacaaggagtcttaattaaatataacatacacgattattaaaaaaaaaaaaattaaaaactctttaagataccaaaattgattataaatctattaaattaaccctttaaagaagtg

SEQ ID NO: 178888 - DNA, 826 bp, Cannabis indica
cacactttatatagaatagaatagatatatagtagttaaataagaccaaatttattaagatgctttcatgttttgaattctcttgtccctttttttctatatgtatttatattttatttattaagaaaaatgtagcggcataattacttaaaatttaagatttgtaagtgactataaacttaatattaatttttgcaccataaatatttaatatttgtaaaattataattttttttctaattttgtcagtacagactttgtgaatatatcgctgaaaataaatattggctttatgccgcttacaaacttaaaaatttaggtacttataccactatttacccaatatattaatataaaattgttgctttcatatatatatatatagtagttaaatagaacaaatttattaagatgctttcatgttttgaatccctttgtcccttttttctatgtgtgtctaaattttatttattaagaaaattcaaagaagtataaagttcaaaatagatatgatgaccactagaataggaggatatcattccacttaaatttaatttgtaaattattattttagattatattaaatgtataactaagtccacctaagtaaatctgggtccgcactgatcaggttggatatgatccaacttgatccagactagatgatgatctgtcttgccctaccctactagacaaatttttaagatcggatctgatctaactcagtttatttatatcaattctgatttgacacgacttagaaaagcaatggagacttttgctttcaatctctctctctctctctctctctctctctatgtcttgt

SEQ ID NO: 178889 - DNA, 623 bp, Cannabis indica
ttatcaagttcaaaagtcttgcaaaaaaccagtttaacttatctataaaagttgttcaagctgatgggggaggggagtataggccatttgaaaaagatttagctaatcaaggcatcttgtttaaacaaccttgccctaatactcatgaacaaaatggaagagttgaacgaaagcatagacacattactgaaactggtttaactctcttagctcaatctggtcttgatctttcttattggtggtttgctttttagtgtaccactcactctattaatcgaatgccaacacctgtgcttggcaaccttagcccttttgagtgtctgtttcgtgaaattcctgagtacaatattctcaaaccttttggttgtgcttgctatccacatttgaggccctatcatcatcacaaacttgtatacagatgtgaagagtgtttattcttggatattctccaaagcacaaaggtatttgtgtgaaaatgcaaatagagaatcttatagctaggaatgtctgtttttgatgagctgtcattccttgcctcaaaggtttttgcttccactctcaagtaatatttgaaatctcttcttgtcctactacaagttttttttactggtctctaagctatg

SEQ ID NO: 178890 - DNA, 770 bp, Cannabis indica
ggaagttgagaccatacttccaagcccatccaatcagagttttgaccaatcatccactccggcaagtcctccagaaacctgaagcctccggaagactcctcaaatgggcaatggaactgagtcagtttgacttgcattacgtgccccggatttctgtaaaaggccaagccttggcagacttcatcaccgaatgtaatgaagccgaggcaacagccaatactccggagccacccatccccacttggagagtattcgtggatggagcttcaaacgaaaacggttcgggagccggagtggctatgatatcacccactgggttgcggctccaggcagcactccgattcaacttcacagcttcgaacaatgaagccgaatatgaggccctaatagcagggctaaaattggctaaagctgtaggagccaagagggtggaaatctacagtgattcccagctggtcgtaaaccaagtatccggagaataccaaacccgcggcgaaaggatggccgcgtacgtaacaatagtccgagaactgctccacgagttcacggactataaaatagaaagaatcccccgagaaaagaacgctcatgcggactgtctggctaagttagcctcggatagtgagatcgaagagctgggggtagtacccgtggaacgcttggcagagccaagcatcaaaataaaagagaccacacaaacggttgggcaagaacccagctggatggtccccatcataaaatacataaccacaggtgagttgccccaagag

SEQ ID NO: 178891 - DNA, 718 bp, Cannabis indica
  modified_base (575)..(575): a, c, t, g, unknown or other
  modified_base (656)..(656): a, c, t, g, unknown or other
ataatggtccccatttgcatcgtatcttttcactcttgtatccccatcaccaagagaaaaactacagagaaaggtttgatgcaaattggaagatcataccaataaaggttattacaaaatcgattctatggactccggtacgcttccgctaatctatattctattgtttgattctcttgaattaattagggctatattaagttttacagtattcttaacatgtggtatcaagagcatccctaaattagttcttgagaatttatggaagtattgatcttctattaaattattattttcgcatttggaatatttgattaatcataccgtgtatatatgtgtgccactgctgccgatttgttcctggttcaatcgttcgttggtatatatacagtgttgcgattgaagtttttttcatgtatatatattggccatgtaatatgcaattaagtttctgtttttggtatatatatacataataaagttaaatcataattttattatctgactacgggaaaagataaattcaaatcttttgttttttatgcaattaagttttagtgtgtactgtgtatgtntatggattcattccggcttaattctattttttgttttcttgtttactcctgcgagaatgctatcacatgcttgcatttagngaatgcattgcatttctgttattaacttttttctttttgtttttattattgatttattatta

SEQ ID NO: 178892 - DNA, 1278 bp, Cannabis indica
ccaaaaggggagtaggatattgccacggaaattggagtcaaacctctataacaaacctggtgccacctttactatcttctctttcctatatacttttacttactttttgtgactccacgtcagttgacccaaattcgagtcgaaattttggtactttcattgatagcaaagactcaagataccatactgcaatatcctgagattagtaaatggattagcagtcctaatcaaaatgaattaactatatttgagtaattatattattatataattatttatatgaaatttatttgagaattatcgcatttaagttcccatttatgagttaggagtatttttgtaattttgacccaagaagggtaaaactgtaatttcaaaatttattatgctaatagactatattattatatagtatgtttatattttcttactgcatgtaatttttgacaagttggtacagttccgtcacaaccgagtatgttgggcccaaaccgagttcagggtctaaaattattttattgtgtgattgtgtagcataatttattagagaatatatgaatgtatttgtgtaagcgtaatgtctaaatttttcttagttgtcatttatgtggattagatgccttgtgggcaaaatggtcattggaccaattttaccaaaaatgagttaagtcattttttggatgaaatataaagtgaaatagttatttttttagtttttggaacacttccactgacctctctttctctgtaacctctcttggcaaagttttgatttttatgttggatttggcgtgatttgagaaggggggggggattgctgttagagcttgtaagaaccattgaggtagtaaactatccctttgttttgtgtaaattctgaatttaagttctggaagttgcgtgatgattttaggagttaactttgttgccaattttatgagtttgagtaaaaagcttttactttgttctttttggaaattttggcatgagttgtgtgattttaggattttaaagcttgaattatgtgatttaagctcaaatatttatatttttacgcatgggtatgttttgatgtagttaacacctattattctctatgttagacttgtgaaccaatttgatgatttcgatgaagtttgggttgagtttgtgcattttataagcttcaaaattggatttttgggtttttcaaacctagtcgtcacgaccagacttttggttgccgcgaccaaaccttacgggaagcattcccgatttttccagaacttgtttggctat

SEQ ID NO: 178893 - DNA, 887 bp, Cannabis indica
tttcgtgtataaactttaatatttatattaattcaaagcatatatctattattctatttatggaaatttacagtaaaacttctcaaaaaatttactctaatatagataagtttttaattttaaaaaatagcgataatagtctctaagctcgaaattcttgtaagtctattagtcatccttttaacatgtcaattaattcattcttaaaagatcattcgttgatattaaattgtggcataaatttttaaaaaatttactttaatacagataagtccttaaaaagtttactttgatgtaaataaattctattctaaaaaaattgtggttataattcctaaactcgatattctcgttagttcgtaggtatctaatttaacagttatgtttatagttcttaaaatttccatgtatcaaaaatttattagttcaccgcataaaaattatttaaaaattaaaaactttagtagtttttttcctttccttttattaaagcttaaccactcacccattttagtggtggaggcttgtcaccaacaagtgtcattccttcatcttcactttctttttcgttccatcccactatcccatgcacaaataaattaagtaaaaagaggaccaacaaacttacatgaatttaaaaactattattactgtttaattataaaattaaagactattagaattagtctcatatttctaatgtgtggaaataaatgtgacatataagatgaatggactactccttctactgtcaattaattttcagatgaaactccattcatctattcataaatctaacaaacactttttttttgtaatgtaaagtaaattttttaaagtaattttaccgtcattttattccttctatttatttaggcaagtgtgct

SEQ ID NO: 178894 - DNA, 604 bp, Cannabis indica
aaaatcagtgtattgggaaatgacagccttttatgtgctttcggtcaaatccttttttgtgtggaacaaacccagtttcagctcaatgacgatggctttatcgaaactgagcaggatgacaaattcttcattgacactgttttgataatcgaccatgtctaacaagaagccacaacaagttttctcctcagtttgtgacccaacttgtttttaaacaggcaaagatatcaaaagttcttgagataatggccaccgtgtttgcgcaagcaatgcatgccccattctctagtatttttgtagccaaatagtaaggtttaattttatttgatcaataatgtatagtagaaaaatgttataggtacattattattgttgtatcagagcttgaacattaatttcctgatgtgtgatgtagttgtttataaagtagcaagaaaaacaaaaacgagaaactaataatgagtgaaacaacaatcgagggaaatggtggaagtgatgttttcatatccatagtgtctttttgatagatgaaaaagtaaataataattgtatactaccggcattaaattgtttcattctcttaacgtggcttctcacaagattc

SEQ ID NO: 178895 - DNA, 647 bp, Cannabis indica
gatgcaaatttttagttgcgaaggcagcaaggcttttgggccaaatggattcagcttggcagtttccagtctcaatggaaagttattaaggaagatttgatggatatcttcagagcttttgaaaaggaaggtatcattcaaggaagcattaatcagacatttatttgtctgatccctaagaaactcaatagttgcaaagtcagagattacagaccaatcagcttggtaacaagtgtgtataagataatatcaaaggtgttttctcttagattaaggggagtgctggaggagatgatcatggaatcacaatcaacttttatggaagggcggcaaatcttggactcggtgctgatagcaaactagattgtggaggattatagaagcaaaggcaagagtggtatggtattcaaaattgatttttaaaagcctatgatagggtggagtgggtttttttagatatagttctgtgcaataaagggtttggacgaagagcatatggaaaagttgtgttccatcaaaagttaaagtatttggttggcttgtcgctttagacaaagtgaatgtccatgacaaggtgcaaaaaaggaagccttgcctttatatttcccccggctggtgtgtctgctgcaaaggaaacggagaagacg

SEQ ID NO: 178896 - DNA, 555 bp, Cannabis indica
  modified_base (405)..(405): a, c, t, g, unknown or other
atttttacttcataaagttactctcactgttagtgacttcaattaaattgctattagggtggttaaagagaatacatatatagtattttttttttacagagaaagagaatataatttgatttgttttagaatagaataagtttttggagtaatgatcatatgttatacaaaataataatatcattatcttgactacaccactatggctaggctactacaaaaaatgatctttcattgactcgtacaaaagaaattcctataccaatgactaaatcttaggaacaaaatatatataataataaatgaatgaagactttttatagtgaaagaattgttattttcatactcgactccatccatgcttgattatgatcaaataacacaatacctatttttttttttaanctaaaaaatactattgtataaagtaaaggatttatttgatgtttacactaaacaaaaatattttactagttttaataacaaaaaactattctaaactattactttaaaataaatatgagtgtttggcatgattggcatcctaattttttc

SEQ ID NO: 178897 - DNA, 693 bp, Cannabis indica
aaaaaataataaaaaaaatcttacacacaaaaaatatcataaaaacataatatcaagcccaggaaaaaaaaaaaaacttgttttttactacctacacttcttttcataacttttttaattggtattagctgacaaaagaaatcctttaaataattataagaaaagcttgtgaagtaattttaaattttcatttcaaaaaaataaaaataaaatatcaactttctgcatcatttattattttttttgacattgcatgttatttattatcgattcaaaattaaaaaaaaaaaaaaagttaaaaaataagtgtatagaataattttctaaaaaattaaattaaattttattatatttttaaatttataaaatataattcaaaattttaatttagatttatatataaatatatatatctatcttattttattaaaacttttaaatagttgaattattttaaataagttctctacgattgaagggattgttagcagtgcaattacataccttgtagtggtgttcatctaatccaatccgcactattttgctttatagtgcatccaatccgcactaagtgcggatttcattttttggatccaatccaatccgcacaataactcaaatctaatccaatctaatccacaaaagtgcagattggatcatgttatgttgggttttatgccctaaataaactca

SEQ ID NO: 178898 - DNA, 597 bp, Cannabis indica
ttcccccccccccccccaaaaaacttaaaatggaaaatagcattccctactaaaatttactataggaaagtgaaaagtagaaaaaaaaaataaccatttatgggggagttgaagatgtcaacacgatcccccactaaagtgtgatttgaaactgccattatgacaactaacacctgatggctagttgaatcgactgaagcgtgaccgttcacttcttcatagaaaagtcaccagagtaccaattatgtggagcttgcatgtctgccaacatctgtacaagtatcaaaagtccctatccgaatagatgtttgcacgaggacttagggggaaaatgttatctcaaagttttcacatctaatgtggcacttacacgtgccatagtcgtgctgacctttaacatgacaagagacttccaggcagaaatgtacctggcagatcccatatgatgctgatatccatgtgctctagatgggcttctagaaagaatctagctggcccattaacatgctagctagagaagcgagattgactaccttgcaagaatgtttcacaagtaatcccacaagacgagacaagtcctggaaaacgtgtctggcc

SEQ ID NO: 178899 - DNA, 646 bp, Cannabis indica
tttgcctcttcttctccctctgaatcaaactttttcttgccataatgattcaattcctattagtttcaatgatagaatccaagaaagaattaaccaaattttcccgatgtagaggcaatcaagaaagccgcataagtgaatatataacctacagaaaagtgggctaacccgaccaatcttgcttgaacaatggaaagagccactggtttatctctccatcgaatcaaattagccaaaggtgttcgttcatgagcccatgctaaagtttcaatcaattcctgccaatatccacgccaggagattaagaacataaatccagtagcccaaacaagatgtccaaataagaacatccacgcccagaccgataaactattcatcccgaaggggttatatccgttgataagttgtgaagagtttaaccatagataatctcttaaccatcccatcaaataagtggaagactcattaaactgtgaaacgttaccctgccataatgtgatgtgcttccaatgccaataaaaagtaaacccatccaatggtatttaacatccagaaaaccgaccaaactaaaaaagacatcccaacgccgaaactaatcacaagtaccgcctcgtcccggaccgactcacaaggaaaactagtaacc

SEQ ID NO: 178900 - DNA, 954 bp, Cannabis indica
gattgcctttcaagatgaggaatctggcaaaaggatgatgtttagtgagaacacaattggtcgagtttaggctgagattttttgacactatacataaacagattaaattaagattgactaattgaacacaccaattttccgaacacgaatataataggatcacatgaatgatcagccctacattgtaatcatctctgtttgtttgagattaaaactggtgacgacaaagatattggatctaagtaaatatttaagatccacatttatcttcttgttttgtaagctagatagctagtctgctttcttattcctttcgccaagcccaaaaattaatgcaaccacaggtttcaaaataggaaatggagaagtgtgaatcactaacaagaattcttgagttgagatcagtactgattaattaaggaaactttttttttaattaaatgaaaccctgttcttactactttttgtactcttgaacaatataatccaagcacgtgcaagaaaaagcattttatttaaccccttaaactatatctaagagtatatataagataacacttcttattttaagttagcggttttttcaacattaattacttatactattaaaatatttgcaatttgatattgaattatacaaagtataatatctcattatctcatgtaatacactagcaatacacttttcagaaacataaacatttaaaattattaattaatttattaatagtataatttataaagtgtgttaagagtaaaaatatatatatatatatatataattatagaattaattttgatatatatcatatcacataaaataaatatattttaataaaatcaaaccaaattaaataagtacacaacttacaccaaaaaattatctatatttgtaaaatagtcaaatgtaacaatttgtgggatttttaaaaaaggtaaaaaatagaatactgc

SEQ ID NO: 178901 - DNA, 791 bp, Cannabis indica
tttgaaaattaaatttacatatggcataacaaattaataccataacatagtttaaaaaaaaaaccatgaaaaatagtcaaaaacttaaagctaccatatttaagtaaaaaaaaattaaaactcatattgattgtaaattattcataaactacctgaattaaggcatgcatataataaccaagctaccaaatatatgattttttttttgaaagagctaacttagttaaatagtgtgtgttgcccctgattttgcctaatatacgtggatcaaccggacaaggacacgtggatcaaaagatcgtaacatttgaattacttgctaagtcttataaagaaaggcagcatccgggacctgcctcccggagaaggcatacggagccccctatgctcccggaggcctaagtatctgttggaaattattttaccaggatctatttactatcatgtatgttggattaacaacctaatatgaattctaaaacaatgaaaataaacacatataaagttagaaaaccttacagtgggtgcagcggaatattatgactccttccgttcagatctctagcccttgattcctttctgtagcagagcatcaccaagatctgaacctggatcttcttttctccttctttgatgcagaatttccatagtcttacatactatgattgagataccacttgatgtgtgtgggcactactcatctcacaaggatttcgaaaattttctctctttttctctcttaatttcgtggctttatgaagcatacaaagacatgcaagagaagagaacaa

SEQ ID NO: 178902 - DNA, 628 bp, Cannabis indica
actatatcatttattttagtgttgtctaaattccttaaacaacatttggggccgtctgtgggaacgaaatactttattgattttgaaggaaaatcactatggttggaaatgagacgacaagagataataacaatggatcaatcaatatcggaacaataaatgttccactcccagggaatggaacggcccccgtcgacactatcaacggaggagtgggacgaacaaacatcactcctcttaatctattccctgaaaccaccgttcaccctggagaaacatctacaccggcagccacagtggggtagttcccgcctataacacctgccgtggtatctgaaggtattatccagttgaccaccgcccaatataccgcattacaagatcaaatgtgggctttgcaggttgaggtcgatggacgaaccaggacttgacgtcctcctcgagtaccaaccacttgctcagacaacccttaagtgactaatactagacgacgaactaactgcactcgcatgaaacgtaaaaccaaacaggaaggattcgacttaaataagccaatgccgagagatcaagtcgcacaaaattctaatcgcgaggtacagtaggaagaggacccaaagcgacgcaaccc

SEQ ID NO: 178903 - DNA, 753 bp, Cannabis indica
aagtttaatttcaactatctcatgcatgaatgctcctttatcttatgtttaggttgggataaagctaaaagtttttatcacatttaaaaacgttatacgtacaaactttatttgatcaattagcatatatatatttaattgtacaaaaaaaaattaaaaaaaaaaaaaactatgtatttaatttatatatttatatattgagagcaataggtgtcacttttatctttattgatcggtataaaggcatttatgtaagcattttttaagaaattatagctaaatttctttttacatggtttgcattataattatatagatgatcaaaacccttaaagtaaagttaaattatagatgtttgaactttatttttaagatagtaattgattcaaaatttttttatgaagacatgtgaattgtgaaatgcatgttataagtataataatatatacaatcatgatatatataatgaaaatatttgagtttttttttttaaataaaatgcttttatattaagatagaaatatcataatacaatattaaagaaagaattttcttcaaccaagtacaatcagtgtccactaaaagaacgtccttagctaataaatgaacaatattattaacagatctgtagacataaaaaatttaaagttcaaaaatattagaatctaaaagagaaatatccgctaacaaacaatatatgaacatttgagttatatttaatttttctaatctaataaaaaagagtacctctag

SEQ ID NO: 178904 - DNA, 690 bp, Cannabis indica
atgcgggtgagatcacttacctttattttttcacacatccatcacgctgaaaagatcttctatctttcagatgagcgatctatcggatagccagcagctcggctcaggaggtcgcgcctttgacggggagtcgtcacaagagagagacagttttctccctacggacatctccgaaatggaggctgcggagatagagttaggtccgatgtcttctgtagacatcgagaggatggtacaggagctcgctgaacctgggacaatcgatatccgagatagcgaatccacagtgtcagcacgcgactacctcatccatacgagacatgctcccgacatcgaggtcgaggaggtggaggaggaatggactactccggtccgcgagtcaggtggggaagaagaggaagcggaagggagtgggacggactcggtcgacgactcccaattgaacgaacctttctcatgcgaagacctagtctcgagagtcgtcaaatctgacttcaccaccttcgtgaggttgaatttgttgcgactcgcgtttcaaagtcccaaaccctctcagagagcgcatcttccgttcaccaaccctgcgatcatccctacagaggacgtggtcatctcaatacccattcttcgatgtggtgtatcggtcccgtttcatcctttcgtcgcagccattctcagacgttatgacgt

SEQ ID NO: 178905 - DNA, 891 bp, Cannabis indica
gtctggatctgtgcttaaggaaacaagtaaacaagtaaacacgtcacgggttgtttatacaaatttaaattatatgtaagaatattaattaaacaataaaatcatatcaaataatttcaaatttaattttatgtataatttaaaaatatatatttattaagaaaaataataaattcatataaaaaaactctcaagaattctttaaaaaagagtttatcatacaattttttatataaaaataacaggcaaaaaaatatatttaaatgtacattatagtgaagaaaaattaaaaaactgaacaatcttcacacaaaatagtagatttaaaacaaaaaaaaaaaaacaaaaaatctataatttaaaataattattatcaccatatctcactttgtagtgaccactatatttaaaatttattacattactgtatctcatattattattaattaatatcctttctaatatgtttaatcaaattttaatataaaattttaataataagagtacttattctaaatttttacataaaacaataataataataataataataataataataataataatataaaaaatgatcatatcattttttatcaaaaaaaaaaacaaacaaaaagatatattcaattattataataaaaaaataataaaaataaagaatcctcacacaaaataaaaatctaaaaaaaaattaataaatctatatagaaaacactcattccaaaattattattatcgtcgtatctcacttgtagtagttatgctaaatggaagattgttgtcatatttataaaaaatttatttaataataatttagtaattaaattgtatcaaaattaatatttaatatttaaaatttttatatattttttaataaataaataatgt

SEQ ID NO: 178906 - DNA, 1312 bp, Cannabis indica
gcgtttgacgatatatatatagcgagttaaagatgaaagagacctaaacacaacaaacagctcagctcagcttattcacaaaaatctatttggtgtgatcaattttcctatcatcttctcccttttcattccggttttgctattttcatatcccaaaaattactcctatatttttcgattcattctaccaccacaactgcgtactctttcttctcttcctgggtatgctctttctcctttttctttctttttaagtttctgtagattgttttgtttctacttttcaatgttttagattcttaaatatattcgaaggttagggtagggtttggatctgatgttttgtgtgcttttcaagggattaaatcctttgagaatttgtttatttttcatagaaaagaaaataattcttgatttcctttatatgaatttatttagtttttcgcctgatgcatcgaattttcttaattctggcgaattccatgattgcatctttaaatagcaaaaaaaaaaaacaaaaacttttttttacttctcccaaaacaaactagaaatcttagttacatgattctcccagaaggatgtgtaaaaaatttatattaagggttgatcaattagcatatcatgtctggaccgtcttggataaaaatattagacatttttggtgtgatattagccaacaaaaatctagtctttagtttcgattactgggatttaggtttttttagaaatatgttatgaaagataattaagcatgttttttttccttctaagataattatgataatcttattcaaggaaaattcgataaaagaaaagccaaaaaatattcccaagtgatccttatctcatgaggggtggtaggaaaagaaggggtttaggggcccagctgttgattcttctatcttcctttttgttttgtgtttttaggataagtgtacacatttgtctgcctcatatgtgtataaaattatattattttgtcctgtctgacctgttggttttttgtttttttttttttatgctaactaccagtggatttttgtttttgctaaaaactatcaacaaaacttgatgtttgagtcatgggttatgttttaatcatcgtacttcttagatgctaggcaaattgttttatctaaggcttttgtgctaaaccctttttgtttacagactgtagaatcaatggcacacaatttctacgagccagaggcacacttggaatcgaatgaagacatttccatgaagcagaaatggggtatgccagcctcatccagaatctctgatcatgaaagcgggtgctttgagtggc

SEQ ID NO: 178907 - DNA, 564 bp, Cannabis indica
cagtttttgtcattttaaaaattaatggtgtttggcacaaatttttaaaaattgtttttagattttttcttacgaaaaaaaaatcaatattttagcaccataccataacattaacacattcggatctaggttcgggtatggtttcgggtctaggatcgaaatataaaatataatatgttaaacaaaaaaaaattatttttgaaaattgaaaacagcattttgatgttttctattttctagtttttaaaattcaatttttaaaaaatagtttttaaaaatttttgccaaatgactactaatagtttttaaaaactgtttttaattttaaaaaacagaaaacagtttttaaactgtaaagccaaacagccaatataaataatataaattttataaaattgttaaaatgaagaataattttaaagatatgatagaacgcgtttttagtttgattttttttttttatcttgtaacttcccataatgtgcatggcaaagaagaagaaaagaaaaggtcttttttacttaattttaatattaataagttaaaagagagagatatgggttc

SEQ ID NO: 178908 - DNA, 662 bp, Cannabis indica
tagagtagaatatgagattacagacaacttaaatacttgttcaaatcacagctccactcctaagagtaaacaccatcccagacattgagttttttgtcattgacacaagcctgaaagcttaattgagtgtagcctaacgggttgagatttccacccctatagactaacatataattccttgtcgtcttcaaatatttcaggatgctcttggctgcaatccaatatttttgtcctgggtttgactgatacgagctcactactctcggtgcttagtacactacaagaaaaatgggccttttacctacaaattataattgtaggaaaatattacgtaattgtaggtaaatgatattacctacaaataaacaaatattttagatttttaggtaaacgattgtggtgaaatatctacacctacaattatgtatatttgtaggtaaaacatattgtggacccactcctcttgttagatgttaatgactaagtagatgatgtgtcatcctatgtggcaatcatgtaagttgaaaaatgttaaattcttatttgtgcatgtgtcatacatttattaggccatatcatactttatcaagccacgtggcaacaattatataggtcatgttgttatacccaaaattagggtagaggatacatgtcaagattaa

SEQ ID NO: 178909 - DNA, 590 bp, Cannabis indica
gtataatactagaaactatcaattgagtgaaatttaagcaagagaaattgggaattgtcaaaaaccccactcaaaatacatgaacaaagaaaaaccctagaagatttcattcgcaacaaacccaaatgatagaaagaaagttcagagagaagaaccgcagaaggggcagaatctaaagtcggactgaagaatccgatcacaggagcggcaacgcggagagacggaggaatcatcggaggaagagagaggtgggagagagaatgattgtggataaaagagattgcagctgttacagtgcatcagagggtcttttccaggccagcgccatgtgggaacgaagaagagcttgagaactttgtcgtagtgaaccagatcagctgtggaaccgcacgaaatgcatctgcctgcaccgtattttagtacctgcctcacttgttgctctactcctccaacaaagaagaagaacatttttgttaggtgggatttgtgattttctggaagtttcttttcttactctgttttaaatttaataaatgaagaagaagatcacaagtagtaaggcggttattattaacgattttatgggaggt

SEQ ID NO: 178910 - DNA, 607 bp, Cannabis indica
gcttcacatgacttaaatgtatatttattttaaggggccatttttgtaattcagtattattgggttatgattaaaaaattgtgtgtttcattgaagaattattttctaaatgatttggaaacaaaaattaaaattttgtaaataaaaaattatttttaagaatataatttgttattgtaattgtgggagttaaagagattcttaattagattaaattattattaagagaattgttataaaaaaatattatcattgcttaatatctttttttagtatttattagtataactaaataatggattaaatataaaaaataatttttaaaaaatatcactaattataggcgtcacctataaatagtgttgggcacatttggtactctataacaatgctttattattaagtgaaaattacactatatatgcgattctataaaaaagtttgataaatatggcttttttaactttaccacctttatatggcatttgtttaaatttaaagttttttatggtattttctttaccactttttttaaatttaatttttaaatcccatatttaggtaaaaaaaatcacaatctcaaccctaaacgctactctctctctct

SEQ ID NO: 178911 - DNA, 732 bp, Cannabis indica
ttccatatcataattaattaatgataatataatccatgcatatataatatgtggtggtgataattaataagataaattaagtaagtagtggatgacactcatatattataataataattaaacaaatacaattaatggattatgatggagtattaatatacacatagatatgagtttgagttaattatggtaattaattagagaaggaaggaattaggaatattcttatctctaataaattgtccttggcgtgtacgtagaaatggggtggtggaacctcaccaattaaatgagactgagagagaccactactaacttaattaattatatattatcatcattaaccacccattaattaaccaacatctctaacatatgtataccctatgtatctatatatatatatatatatatatgcatgggttagtaaactagtatgcatagttaatatatattctaaacattaccctacttacatatagtaattaggtgatcaaatcaaaatgttgtttttattttaggtcatacgtggattttataagagcattgttaattattgatgggttaaggtgacgtactataattaattggtttttttttataatttttattaaattaaaataagtgagattcataaatattaaattacactaataacaatattacatttcacaatgctagacactttagcatttctctaaggaggcgtttggttgggaggaatgaaaatat

SEQ ID NO: 178912 - DNA, 766 bp, Cannabis indica
agtctaaacgattacgtgaaccaataatgatacctgaaacctgcaattactacatgtacatagttttgttagttattaaataaaaatatattaaatttgatactaactatactatattattagtataatatttttgtggtttattcaattttctcctaaaataaatgaagtagtagatggtagttgataaatagatgcaaatcaaatacctttcacttttttttataatagaataaaatgctttttcttttttatatttttttagttgttttaattcattaaaataaaaatagataaaatagtgttaactcaaaatttcgttaacacatgttcaaaaaaaattcggttaatacaaataagacttgataattaatgcttagaatttttattgtaataaatgatttacatttcgctatagattacaatagagaagacgtataattttatgtagttttatagttaaaatctacatactatttaagtctatattatttaagtttcttaggatgagtttacaatttggcagaatttttctaagtcggaaatttggtcatgttattttacaatgttggctctattatttataggagtagaataacaattattttttatctaatccatacaacattatggaacataaatattgcccacatttcatatacttaattaacatgcgaaaaatatatatatccgcccatgtttaaactaaaaagataaccgctatatttgactaagtcataataagtaattgtcgagcttgattata

SEQ ID NO: 178913 - DNA, 654 bp, Cannabis indica
gggtgaacttgattatgcactatgtggaatcggtatcatatacttttatgcatgctggtcgtgagacgggtttagttcttcctacaaatggtattcgtcagggggatcctatatctccttatctcattctctgtgttgaaggttttccgagtctcctgcggtaatatgaggttgatggcaagattcatgggtgaaaagtggctcatagggctccggttatttcccatatgctctttactgttgatagttatgtcttctgtagagctaatactcgggaagctgattctattatggagtaactacatctttatgagcaagcttcgggtcaacgaatgaattttgataaatcatttattttcttcaattctaatactaaagctgctatgagagattcgatctgtggacagttagggatttataaagccgatgataacaccacctatctcggtttgcagaatactataggccgaaagaagactgccattttatgctttcttaaggacaaattacaaaggtgtattcaagggtgggaaggtcgtttactctctcgtgcagggaaggagggtccttctaaaaacggttgcacaagctactcctagctatacaatgagtgtctttctgcttccagtggaaacctgtaggaattagaaggta

SEQ ID NO: 178914 - DNA, 656 bp, Cannabis indica
aagtacacatggtggtagtagagtttgatgtttcggtaattagcttttgagtatggaagagctatagctatagcttgggtacttatttatttcttaatttatttattaagtggagcatagtggtattagagtatctttaatgagaattgtttttttggacatcttgtaatagatgcttactattgaagtaaattagaataatgctaaaaaatagcatccttgatatcctttcttttatttatttatttattattatttttttgaattgggaattttatttattattattattttgtgaataaaaagtaaaaaaaaaaaattaatcattatattattttaataattttataagatgtacttaattactagggtattttttaattttacacttctaaaactagtttttttttttttagtatttttacgggattccacacagaaactcacatagcaattaacagaacaaagtaaattgtaacaaaaattcatatagcaacccacatagaaatcacagaagcaactcaaactgtaaaatttaaaaaaaaataaaaaaataatatatgaagtaattcccctaattactattgaaatatttctgaataaataaaaatgatatgaaaaagagaataaaataaaatattatattattaggcgat

SEQ ID NO: 178915 - DNA, 589 bp, Cannabis indica
taattaaaaaaaaacttattaattttacatctttttcatgttaggttgacaaagcttatgaagttattgaaaatgataaagcaactttaaaccaacaccctttcatttgttgtgtgagattttaattaataccattcatttttcttatcattaatttgtttattttagtaaatatttgatttaaatattttaagaagatagttttattgtaagaaaaaagtgagcttgaaatggtatagatggtgagttagtgttaggttggttttagtttagtagtttatagagtcatttaaaacgttatttgagtgttttcattttaatttgggcatattttaattttgttttcttaatttttcaagttttaatgtttgagtacatgacatccagtctatgagaataaatatattaaataaaatgaactttgtggaggttgaagttttaagatattttgaattaaaaattttaagttcgagaaactcaacatgtgacatttttgtattcgattattggcagaacgacattaggcaataggctatgagtgtggctctcttatttttttttttttggctaattatgatttttgcccttg

SEQ ID NO: 178916 - DNA, 941 bp, Cannabis indica
tggaaatcaataccatacatttaatttccattcccttaagtaaacatgtcataaaatgtaacaaaataaataaattaaataaaaattaatttctttcatttcattctattttattatctccaactaaataccacttaagaccatcaacatgaaatgcaaaagttgatctatatttggcacaaataatagttttgtgatattttgcatcaacatttattattatactctaatacataattataaatcttgatgcaaaatttaatatgtcatttaagactcatctaataatttattaaaaatataaaataataataatcatacaattgtaaatataaaatttaataataaaataataattactataaaagtcatgctaataagtatgctaactaaactttaataataaaatattacaaatggtataatagtaaatataaaattatagtatttattgtgattcaaattttgtatcatgctatattgtgatctaaatttgaattactttttcttatgtgaaatatttgcatcacaatttggtacactattaaaatagattaataaacttttaaaaagtgaactatatttaatatatgcatcacttcaatggagatactctgaaagaattgggttttcatatatatttcattccatcatttttctatgttcaactaatgtaatttaattaaaagctaatgcaatttaattatcagtaaactaatgtatggaaatcaatatcatacctttaatttccattccctttaagtaaacatgtcataaaatgtaacaaaacaaataaattaaataaaaattaatttcttttcatttcattctattttattatctccaactacataccacttaagaccatcaatgggaaatgcaaaagttgatctatatttggcacaaataataattttgtgatatttttgcatcaacattta

SEQ ID NO: 178917 - DNA, 659 bp, Cannabis indica
cataaggggattgattatacagacacatttgctccagtaactaagttagttactgtcaaattggttatgtcccttgtaccaatcaaaggttggcatctacataaactagatgtcaacaatgctttcttacattgtgacctccatgaaaatgtgtatacgtctctacctcaaggagatagacctaagggggagttgccaccaaatgcagtatgcaaactggaaaaatcattgtatggtttaaagcaagcttcaagacaatggtttgccaagttctcaagtgctttaatagaagaaggatttcatcattcagccacagatcactccctattcatcaagcactttaatgaaaatttcattttcctactagtttatgtcgatgatgtcatcccggccagcaacaacttggatgaacttgaagcattaaaagtcagattgcatgctcgatttcaactcaaggatttgggaaaataaagatatttcttggggtaagaagttgcaagatcagataaaggtatctttgtttcccaaagaccttatgcattacaattgttagaagactttgggtatttagggagtaagcctatgaatacaccaatagaagccaatctcaaacttggcctagatgaaaaagagaagttagctgatcctacactgtacag

SEQ ID NO: 178918 - DNA, 649 bp, Cannabis indica
aatcaattattctcttgtggcaactcaagacacaaccacatataatttgttgtaagtaaatacttgcacagaaagatacatgtttaaatgatagtattgattgtaatgacaaaatataatgtgaaaagaacttgtcttttgttgagctttaatggccacttgaattcatcagagtgttagagattttattacaatagaaaaaaatcaacatgcattacaactctattgtaaaataatacaatgactaaaataagagattgattacatagatgttataatacacatatatacactatatatgtatattacatattatatgaaaggtagtaagaaaaagaatacaacacatataatataatacatatatatatataacaacagaagaatatatatgtatatacactcacttactaccttgaggataaattagtggggatcactatgacttgaacaaggtattatacttttgtccaaaagcttatttctcctgtctctaaacactaagggaactctctaagaatacctttgggaattatcaagccttaagattttctagcaatgtgctttttgatggaaaatgttctctcaaatgagaaccaaagcctccttttataaatgtttatgtgatcacacttagaattcaaaaatc

SEQ ID NO: 178919 - DNA, 613 bp, Cannabis indica
actttataaaaagcaccacaccatatttataattaaggataaaagatcaaacataaataatatgaaactacaatcagccctcaatataaatctagggtttattgagagaaaatggagaaaataaattaacaagaaggaaagagaaatttttacaacattattattattgttattggaaaaatattattcccaacatttaaacaaatccctttagagatagacttagcttttttatttctttttacgtatattctttttaggctgattcttttcctctatttttgtttccctttttttttttatgattgtacacgagcaattgtcaacaatatttgtttcattatcattttgtttagtttcataaacaacatttgtttcatcaccacttttaaattttgtaagcaaaaattgcttgatcatcattttgtgtaattttacaaacgacatatgcttcatcacccttttacttagtttcataaacaatatttggctatttgcttcatcaaccttttgctcagtttcgtaaacattcatcactcttttactagtttcataaacaatatttgcttcatcattaaccttttactcagtttcgtaaacaacacttgcttcg

SEQ ID NO: 178920 - DNA, 752 bp, Cannabis indica
cgtggcaaagaattcaaccttccaaaatattataactcatttttttctcacttattgatcttataatatatttatgcaggaccaggctaccaatgttggtggagtacttactacttagtttaatacgaaattacagaactttgattgattcattttatttggttatttctatataaaatgacaattccaatctgtgcaggtagtaagatatgtacattccaaattaaatattatattgtcaagcctaaaaaaaaaaaaaaaaagtgatatgactgtttaggaagtgttcaaattttgacatacaatagtagttgtatattttgatctcttaaaggaagagtataaaaaaaaaaatatatatatatatatatatttatatattactgataagtgataacatgtggctacattggagaagatgttggctacttttatttctaaagcacttctttatataaaagttgattattcttctttgtacctacatgactgaattattctacataattaattgttattatttagtatatttcttattcaagctttatccatttaaaagtaagggagtaaatatatgtatacatataataatagaaatatattaataaccaacttgtcatataaaaacaaactcaattagcttagaattgaattgtgtagttgttttgcaaagaaggaaaaacaaaattactaaaaatttactagaagtaacaaaaagaacaaattgtaaaaaaattacgagttttttatag

SEQ ID NO: 178921 - DNA, 724 bp, Cannabis indica
atctggagggagctttggaagtcgttggatgtttcttggggttgatatgaaagagattcggtgacccttttgagcaaatagcttggcaagctctaggtagggaagtatgtgaccgaaggccagccatgggaacatggctatgtgaagcttattactgtcgacttggtccttcgccattaacgttttttcagttcgtgaaggagccatctacgtagttttttcaattgaattcttttttttcttctcagctcgttctgttgtaataatggctttatgtgaaaagctctcagaagattgtgatgatctttttaatctctttttcttgaaatgtaatatttttcatattagttcggtcgcgtattacaatggtggtatcaatatattattattattattatcttgagatggcgagatcaatattatatattatgaaatgctggactcatcaatttttataattactatatggaccccaattttttttatttaatatataatatgagaaaaaaaatcagctgtcccaaatttattctgccattcctgtccctccaataaatggttaccacctattctaatttttccacatcatttactaatctatttatatatctatataaaagagagatacgtaacatggcaagatctctctaatcattattatttgtttactcctttgattttctcattttttcaaattttttattaaaaacttataatattgact

SEQ ID NO: 178922 - DNA, 590 bp, Cannabis indica
cattagatagaaatccaaaaaccatatcattgagaggaaaaaaaactagtgggtgatgtactcagcacattgaataaaccctaacatcgacttaaatcttttagtgaagaggaagaagaagacgatgattgtagtagaaataatagcctcttcatatatataatgagtaaataagaaaccctaacattatgggcttctgctgtgggcttttctgtttttcctttttaagatttcttttcttttctttttgaaattatttcacaaatacacaaaaataataaaaaaaattacaaaaatacggtttcacagaattttaaatatttttacgattttttttattttatttacaaaaatacgattttttatattgtactcttgttaatttgttgtcgatattttattatctgtatgttatctttttatggttattttgatattatttaggtgttatttttatgttacttttatataatttttttgttgttttcatataattttgttggaaaattataaaaatattaaacgtaaacgtataaattttttacaaaaaatgatctcttatataattatctctttctttttccaaagga

SEQ ID NO: 178923 - DNA, 510 bp, Cannabis indica
aaaattaaaatatttaagaaataggaaaggaaatttaattatttcacttttgtctattactttagtaatttgcccaaaagtcactacttaaaaaaaaaaaaaacttagtgagcagcaacgagacaaatttggaaactactcttttgggtttcttttcgatttgaatgcatcccttcaaccagctaacattattatctattcacttttgctacatcaagattatcagataataaaacagagctagagttgaattttgatagaaagaaaataaagtttgcattggatgaatttgctttgataacaagcttaaattgttttaagcttccagagcatattcaggttaacaaccagcctaataggttattgaaaaaatatattcttgaaagaatttatgttgtctaaaacaattaaggacgataaaatgccattaagatgactaaggtgtttatagtgacaaacattttagaatgtaagagagaattcaccacagttgatgaattcattataaaa

SEQ ID NO: 178924 - DNA, 547 bp, Cannabis indica
agaagtttagtatacacatgagtgaataaagattagcattcattcacgtgagagactagtatgcagatatggagagagatgaaggtaatagtaattattagacatcagccacatcataaaaaaaaactataaatgaactcttagtagctaagtaagaattggaagttagaaatggtctaccataccaagattgtaataccaccacattcaccactacaaatctagtaaagcgaactcactaatttcagataatttacttgaatcctactggttgtagtatgtactactaatccagaagagtaatcaataggaaacatgtggtgtatggaagtaaagtgtttcattagtaaggaacaggtaagcttccctcttctattatattgacccacaagctaaaaaccaagagtaagtatatcgttcaaaaatgagcattgctataacgcatcctagagtgcccaacaccctagaacatggcatatcgcaaattgtaaaatttaaaagcatgtccacatttacattaaaactaatttaagttcaaatgtctggt

SEQ ID NO: 178925 - DNA, 636 bp, Cannabis indica
  modified_base (551)..(551): a, c, t, g, unknown or other
gtacataattcttgatacaatttcgtattttttgatcttcttgtagatccttagaataattttttggttgtgcaaaccaaagagaacgatgaccttgggttgcaccaagtctgaaaccaagtcgatttatttttgtcccacaatccccgctagtattactatacatataatgtatacatatactgaccttatgaatattaaatcttatataaatataaaaaatatatcatattcatataatatattaatataaattttctttttctacgtctaagtctttcagtacaatagttatatgacaagtgtgtctttttattggatagccccgtcccgacgcttgtcggtttaagttttttacttaaagtgttgtcctccgtttgtacctccagctttacttaataattaaagttaagcttcgttgtaagacgcatattatgagtggcgtttgtctgccgccggaagtaaaccaaacttttaaaatttaggagtaacatgctcgatatggcgattagttctagtatcataagtgtttcctacataggaacgtaccncgaatctgatcataaactcttcgcgctttgttgagcagacatagatatatatgttcctatagcatatacttctgtagatcggttt

SEQ ID NO: 178926 - DNA, 608 bp, Cannabis indica
ggaatcccatatagattatgacttgaatcaagtcgatttttttgaatctctatccatgcaatcccctcgacactagaagatattttcatattttttgtacataattcttgatacaatttcgtattttttgatcttcttgtagatccttagaataattttttggttgtgcaaaccaaagagaacgatgaccttgggttgcaccaagtctgaaaccaagtggatttatttttgtcccacaatccccgctagtattactatacatataatgtatacatatactgaccttatgaatattaaatcttatataaatataaaaaatatatcatattcatataatatattaatataaattttctttttctacgtctaagtctttcagtacaatagttatatgacaagtgtgtctttttattggatagccccgtcccgacgcttgtcggtttaagttttttacttacagtgttgtcctccgtttgtacctccagctttacttaataaattaaaagttaagcttcgtttgtaagacgcatattgttgagtggcggtttgtctgccgccggaagtaaaaccaaacttttaaaaattttaaggtagtaacaatgctcgat

SEQ ID NO: 178927 - DNA, 702 bp, Cannabis indica
ttttttttttttttttttaaccaggtgcccttggcaatgggatagggaatagaggatatggataggaaggaagtgacatttttaaaagttattagagaagacatttgggctccaccattataacaacttttcttcatattggcttcttttactaagcaacttcattcttacttacttaactttactctttaatatatatatagtgctttcttaatttcttataattattgatttcagattaattaatgtgctcaggaaatgttaattatagttaaggagagtaataaagaactatggtgtacttattttaatatatagatcactgactagttaatttattattatggtgtcattgactagtagtttaaatttttttttttttgtaatgttagataaccttaacaaatatagtatatagaaaaccaagcaaaaggcatatggaggtatttaaggtatgggaatgggatgattaaatctaacactagctacaaaaccaatgacaatgagtcaatcaacataaatattaaattaaccttatgtttaaggtaaactatatatatatatcgattattaattgttttactcattaataaacttttttttaaaaaaaaaaactaatttaatagtaaaggactcatgctatattaactttatcatagtctaccattcaaaatccagacacgtgaatgataactatgatct

SEQ ID NO: 178928 - DNA, 572 bp, Cannabis indica
tgaataaaattcagcccatgacaacatatgtgatggctgttatttgattattttgttttatgaagatattaagccctttatttttgtaaatatcataatcatgaccactgaaactggtattatagggcatttaggaatcatatgcattcaaacctgccattcccatagtattatgatatcaaaatctgaatgtatccttgttttgttgagtaagtgttggtgcctttaaagtttgcagtttaacaaaatctttataggaatctaaattaatttttcatattatattcaatcaatccaattccaatctcaattgagtaaagtcactttgtgggtattagacaagcataataatatctatgttataagctaaattggtcaatgcgtttagttgggaatgaacattctgctatgccctaatcacattcacaatcccaaattatcagattttggtttggccaaattttacgcaccaaaataacacatacgaaaaaattatgagctgagtcaaaattagatcggatagatcggatttggttagcgtatttttcggattctgttagcactaactccgt

SEQ ID NO: 178929 - DNA, 596 bp, Cannabis indica
tgaagaaaatcaactcattttccaccttttccactttcaataccattgtgtaaaaataatgattattacataaattataataaattatttttgtatgttaatggctatgccgtcatgtactccaacaaccaatctcattgtccatcttatattataaattaatttattgtataaatacttaagtttaactctcagttataaataaatacttaaatttaattttttgtggtaataatatcttataattctagaacttttgtaggtacctagctgttaagtaagtaaattgggacgtattaaattctaattggtccaagtcattaaattttatttttttaagaaaaataatttaaatatatcaataaaaaataacacgtaaataaatgacttaaaatttaacggtcagatagtcagatacctatagagtaccaaaaatataatttaggcattattaccgctaaaaattaaattaaaatatttatttacaactgagagttaaacttaagtatttatgtcacaaattactctttattatattattatatatctaagagaattattaaaaagtatatgtctattatctttttggtatcaac

SEQ ID NO: 178930 - DNA, 659 bp, Cannabis indica
aagtgtccacatcatggcatcccacattgtatacagatggagacattttataatggcctaaatacaacttctcgaatagtgttagatgcatcggtcaatggtgttagtttgtccaagtcttacaacgaagcatttgagattttggaaaccattacaagcaacaactaccaatggtccaacacaagagctccaacaagtcgaaaagtggtgggggtcattgaagtagatgcaataacgactttgacaactcaaatggcttccatgacaaatgttttgaagaatatgagtatcgggaatcctaagaatattcagctagctgctgccattaaaagtgcgaatgtctcatgtgtgttttgtggagaaggacatgtattaaaaaaagatgaaaaaaattcactttggggtgatcttgacaattgatggttatttaattgttaaaaatgactccggatgatgatcgtcaatttttgaagctcgaatcgacgtcttatagattgttttcgggtgatttgcgaacaaaatcacacttcaacttgggaacaattttttaactaaatattcagaattgagatatgagtgtgagacatgaaataacaaataattgaaaaagatatttcaaatgcacttggaattgcatcaactggagtaataatgagtga

SEQ ID NO: 178931 - DNA, 561 bp, Cannabis indica
ccttcgaagaaggattcggcgaagaaaggtttttgtatgtttctatccaatacgctctctccactcataagtcatatccaccaccgtagggtgacgctgatcgttctacatgtatgtagtacatcattaattatgtttagaaattaattgattaaaaatcaatattaaatgacttaagtggggactcaacacatattaaattatatttttttccaaaaataatcaatggccatcgatggagtcaattctattttcttttatagaattatttataaaaatggatttccttatttaatatgtgaagctcaagacataccaatcatgtatgtttattacttttgtcacaaatgatgaaatatattataaaccatctttaacattttcgataaaaaaaataaaggtatatttcgcgtaagcgtctttatcaaactgctcaaattaaataaatacgctcatactatatcacactgtataaaaaaataaaaattaaaaattttttaacggttgcggttacagttcgtatgttttccaaaccttgcggtgcagtgcaatttgcgattt

SEQ ID NO: 178932 - DNA, 542 bp, Cannabis indica
gcaactttacatccatgtagcagaccccgtgattcaaaccgacgaatggtcgctgaaaggccctcagcacataagataaaaaggtaaggggatagtggatccccttatcttatacctcttgaaggaactattggaccaatctcatgtttgccatgaaccactgtataacatgcagaagagacacaattcaaaagtagccgagtccaccaatcctcaaacccaagctttcggagcatagcttcaagaaaattccattctattcggtcgtacgctttaatcatgtcgagctttaaagccatgaacccatctttccccttccgttttcgctttaagtagtgtagtacttcaaaggagataagaacattatccgagataagtctatcgggtataaaagcgctttgattctcagatactattctgttcatgaagggtttcatacgattaaccacaactttagttatgattttgtatgagacgttgcacaaagcaattgggcgtaattgagtcatgttcacaggctttttaatcttcgggattaagac

SEQ ID NO: 178933 - DNA, 802 bp, Cannabis indica
aaaaattaattaaaatattttattttaccaagcgttctcttaattttttatttcttatatttgttatgttagttgctttatgagcttgtagcagtttattgtgtaaaaaaatctactgattattcatttcttctcatactgaggaggttccaatgtcgaaaaaaaaaaacaaaaaagtagctccctgtttggggtgtagaagtggacattgggttagtagaagctactgttataaatagatgagtatgatattattattagaaaagtatttggtggaaggctagtgctgatgcggcggggttccaacgtacgtcctacgtcatcacataaacctacgtactcgccagctcagctttctcccccaagtttgacccttccaagatgaacctgtacacaaagataccttcccaactttccacatttatctcgccaggttcttctcctcctgcattaattatcttattttccacgtgtttttatgaacaaaatacatccttatttaattattaacatttttattctaaaataaataataatcgatattttaccatgtttaacattattttgaagattcatttcttataatatgtacataaaagatttatttctttattttccattattaattaaaatatttcctttaataccctttatttagtttctaataataacaatcagtcttatcatatatatatataaaatgtgatatatatatttagaaaattactacaataaactcactttaaataggtatattgatgtactgttattattaattttttttataacctatatacattat

SEQ ID NO: 178934 - DNA, 715 bp, Cannabis indica
agttcggttcctacaaaaaaaaaaaagtggacattgggttagtagaagctactgttataaatcgatgagtatgatattattattagaaaagtatttggtggaaggctagtgctgatgcggcggtgttccaacgtacgtccacgtcatcacataaacctacgtactcgccagctcagctttctcccccaagtttgacccttccaagatgaacctgtccacaaagataccttcccaactttccacatttatctcgccaggttcttctcctcctgcattaattatcttattttccacgtgttttatgaacaaaatacatccttatttaattattaacatttttattctaaaataaataataatcgatattttaccatgtttaacattattttgaagattcatttcttataatatgtacataaaagatttatttctttattttccattattaattaaaatatttcctttaataccctttatttagtttctaataataacaatcagtcttatcatatatatatataaaatgtgatatatattatttaggaaaattctacaataaactatgtactgttattattaattttctttataaccatatatattatagttatttaagatatcttaagattttgaaaaattttaaaaaatttaacacgtcaaaacaatatttaaagagtctgttgcacgcgtgattttttaattttatacgtgtttg

SEQ ID NO: 178935 - DNA, 1325 bp, Cannabis indica
atgagaaaaaaaaatatctattaattaactttgtaattgattgggataaaaattgtaattagtttcttttacactcttttctattttactttttgtactcttgttttcattctttacatcatgtaactaataaattctatcctcaattatttaaatttatatgaaataaatgattgcaaacataatatattttagattaatattaaatggcatttggtaactgatttagtgtcttgtactataataattttttagggaaaatttttattcatagttaatcaaaaaagacaaagctctatatatcgaagggaaagtaaaattgcacaaatttcactaaagtgttagcttggctaaccacggcgccaagaacaaaaggagaaaaacaaaagggcttttttctataataggtattttaggcccaaattttacatttttagcttggtaaggaaaattaaacaaaaataggaaatctaaaagttttttttttcaaaaatacggacaacttatctcctgaagcacatgaatatcttttcaaggatgatatattatataaacaagacactactttttaatggtagactgaactgggcctatatacatatacccctatataatatattatatttcatagctataaaaaaggaaataaattagatcaatcatatctaacactatgttgaactcatgattgcttaattacactatatattgttctctctctctcatttatattgacctttaaaacaacttaaaatgcacatatgagtacatatatataaatacacatacgaggaatttgtatataaaaatttttcaatattattttttatctctcaatattgcataattttgtgtgattaagttattaaatcaatttttttttcttcaatttgccaatattcttttattttactgtaagatatttatttaatttttattggtgttgtatatagaattactattttatttatatatttctcaccatatatataaatatacatatttacacacacattaatatatattttgctaatttacacattaatattactgagagcaacatcacgactactctagactctaaattaaggatgacaaaagtttgttattttacataaagttattaataaagaaaactgatttcacacgatattcattgtttgtgaacacattcaactacacagtaacaacagaataacaactcttatagtagacacccaaccaatagtgtgaaacaatatgacagtggctggaagtgaaaataactcacgacactcaactgtgaagcaacttgacaacaacacaacaacaactaaacaactttt

SEQ ID NO: 178936 - DNA, 948 bp, Cannabis indica
gtatgtgaaaaggggtttggatgaatttttaaatccaaatagacaaacaattgattaattgaaccaaaacatacacaaatgaatgaaaaatacttctgttactttattgatattgaataatctagattacattgaaatagagttttatttagggcataaaacccaacactactatcattcctcgctcgacataaaattctttatggcgaactgaatcaaggtatttcttttcagcagcttatgaaacaaattttttagcctctcgagcatccttttttggaggcttgtgagcacacctcttaattttcggcatgttgacccctgcttaatgaaattcagcaacaccaattctttttctaacaatagtccaaactcacacaattgcacttcacagattcagaaaaaactcagagcaatatactaacacaaaccacaactgctctccaattgaaccttccaaccaaactagcttttctaatttaaatttcacaaacccggaacatacttttgtcttggtctaaaatagtgcgggcgttcaatttactttgctgctgagatgatgcgcgtgaatagcactcgatggtgaatacctcggtcgaatgcgcttgctggagcttgtgacggtggctggttcgtggttgtgcaggagcgaagtgatgctcggaggtgtgcgaaatggaggctcggtggtaatgatgagttgatgaaggcgaggtcgagcttgttgatggatggacgagtgatggtgactcacggaatgatgaaggatgcagagttggtggttcgagcttgttggtgagtcgattgggcagtggtggcttcgggttgtgggtcgatgtggctgggcagagggtgtaggtcgactggggcgaagggtgtgattgggtggttcagctgctcgggtggtggttcgactgatgtgcggatgggaatggtttgtgcaggggg

SEQ ID NO: 178937 - DNA, 588 bp, Cannabis indica
agatttgacctcattttgccctaaattgcgcctaaattatgaaagtgactttgttttggggttattttcttggtattatgatttacatttgtatttagttttgactttggtgtatttcaatttttgaatgagtaattaagttttgttcataagttttgatatgcgaattatattttttgactttttaagttgttaaaaaatttctttgaattattgagattgttggatttaagaattttcgtctaattttactaataaacgtgtgacatggataaaagttcaagtaacaaatttgtcaaaatttgagagttacgatttagtacatatcaaagtttagagattacaatttgatacatgaacaattaatcaccatgttagtaaaattaaatgaaattgaacagaaatcattgaatctaatactctcaatactttggtgagaatttttatcggtttaaaaaaattcgaggagcacattaatacatatcaaaatttagggaacaaaaatcataattagcttttctaaattatattgactcattttaatatcataaggattggattttagaagatggatttcattaatctcac

SEQ ID NO: 178938 - DNA, 612 bp, Cannabis indica
gaaaacaaatttatacctgaataccagcatggctgcaaagataaaaatcaaactctgttggatggcagatcttagtatcaacaacggtgccttgaaaaaaaaataaacaattgttagtaaccataacaagtttaaaaaaaaaaaaaaaactaaagcttcttctagctactaaatttaccaggcaatatattcccactcttgtctgtgctgctcctatctctgtgattattagcaaacagccgagtatgatgtcgtttttggacaactataaaagtgactggcggttggtagttgggttccaaagaagcacaagcctgtaccaaaataataataataataataattgttagccctatattctttcaaaataatttcatgattatatattaaaaccttaagaatttctctcacctttctgatagcatcaagctcatacagtagaacttggtaaaattgcccttcactcacaccatccctgctcaccattacatgaaggaaagccatattgacttattaggggtgtaaaaaatataaactgtcatctttggatgatatacaaaacatatactccgagtaagcataagaaaataagagtgcataaagttcaagtgt

SEQ ID NO: 178939 - DNA, 861 bp, Cannabis indica
ttttgagataaaggaggctttattttttgaatcagccgcctctttcaatttttttgtttttttttttatttttttattgagtctttagtgacacgcattgtatgactctgaacacttttagagttaggcagtacgtgtcactatatatttttatattttttaaataaataaataaataaataagttattagtgacacttcaaatgtatagtgacccgcattatgaaacataaatgtgaaatttttactgtcaagcaatgtgtgtcactaaaaattgtgcgggtcactaaattatgtcactaaatgtataaattgtagtagtataatttcccttaaaaataggaagataaggccttatttacataaattgaataataaaaagcataattatccttcaaaaatagggaagttgcttatattttcctcttatttttgtgggttgtcaaggtccaaatcaccacttagcttgttgtccacggatgaaggctgcacaccaaaggcttgccaagaaaaggttggtcggccatgttcctgctaggatctggccgaccatatgcatactagggtctggccagccatgtgcataccagggtctagccgaccatgtgcctgccagggtctgcacgttgcagatcaagtgcctggcagcctgcaggctgcacatcaagtgcctgccagcctttgcaattgttggccaacctttgtaggtgatggccaacctttgtacaccttttccttgtaaaggtcaagctttcttggtcgaacaagccctttcttggtctgctaattgccttttggccatccagcttgtgctcaaatcttgaccggccatacaagctcctcctattcggcctatgtactc

SEQ ID NO: 178940 - DNA, 779 bp, Cannabis indica
ttatgatttttttattttatttatagaaaatacggtccttttatgttataatcttgttaatttgttgttggttttttattatctgtatgttatattttgttgttattttgatgttatttccatgttttttttatgtagttttcttgttgattttatgttattttcgtgttatttttttgaaaaccgtaaaaatgtaaaaaaatattctttgaacgtaaaaatataaatattttacaaaaaatagtgttttatgtaattattctatttttattgtgatttttacaaaaatattaaattttaggtaaaaatttataattttactaaatttttaataagaatattgtctttttataaaataattgtttaacaaaacagaataattaaaacacgtaaaacaattaaaaaattatcatagaataactgtacaaatttaacataatatacaatataaaaaataagatatatttttgaaaaaaaaaatacctgttcaaaattgtaaagatcccttttttattgaaaaagaccatgtcaaacttaattatattttgttttaaaggaaagtgtcactttaatatttttttttttgatgtgatgtaggctccgtttagtttaattcttttttaatttttaaaataagaaaaaaaatcttttaagatatttggataaaaaaaaacaacatagcttgtaaagtctcgcataaaatttagtagtaaaagatatttagagaagttgaaagatagagataggaataatggcagcatggttaaaagggtttgcac

SEQ ID NO: 178941 - DNA, 693 bp, Cannabis indica
atttttattgggaaacttataaaaatactggaatttgggttaacttttacaaaaatactgttacgcagaaaagtttttaaaaatactttgtttttataaaatgccagtaaaacacaaagcagaataactcaaaacaacagtaaaacaaactaaaaaacacaagtagaacaccagtaaaaacttaacacaatatattacagtatgaaagttataaaaaaaaaaacactagtaaaaaagttaaaaaaatacctacctagtagtacttttgtaaaaaaaatggcaaaagttagtatagcatgtaaatttccctttttatttgaggaaattacattgtatattcattttatttttacttgttttcatttttgtcttcatttttatattctttaagatgtactcacttttatagataatatcttcattaaattccttatgttaatgtaaattatatgctaaacttaaagaaaaagtatatattgagcaactcacttataaaagttggtatattttaataaaatataatatgaaagtatttttgattaatggatataaaaaagagatatttttcaacttacttcttttttttttattattgtgaattaagttttttttttttaagaaaacgtcataattacttagataatatataaggataatgttattacctcgcatactattttttaatattttttt

SEQ ID NO: 178942 - DNA, 560 bp, Cannabis indica
caattcttcaggccagttgtttttgcaggccagcagcttcttcttcaaggtgacctttaggattttattgactgcttccgcctggccgtttgtttgaggcctggctaccgcggagaagcttttcactactccgtgttggttgcagaagtcagtaaattcctcgcaatcaaattgctttccattgtctgagactattttgtgaggcaagccgtatcgacacactatgtttttgataacaaagtccaatgccttcttggcagttattgtcttcataggctcagcctctgtccatttggtgaagtagtctactgctactattgcatactttacccctccttttcctgttggtagagacccgatgagatctattccccagaccgcgaagggccagggactggtcatcagggtgatctcatttggaggagctctcggtatgttcgcgtacctttggcacgagtcacacttttggacatagtctatacaatcttttttcattgttggccagaagtacccttgcctcaatattttctttgagaggctgggtcctcccgtatgatctc

SEQ ID NO: 178943 - DNA, 704 bp, Cannabis indica
gctaaggccttcctagatcaactaattcgccaccatcctgaagcgtgtgaaacttttgtttacttccagtagcaataagataagatgagaattctcgaagtcctttctacatttactggtgaggagagcctccgggtagtacaacatcttctgtaaccctagtaaggggaacacataatataacaatatgcaatctgaagtggcacccttatatgattgccacgtacaagtcatctaggaacatggataacatttacccccaagctctcgagcttacaactttctcccggaggcccatctcatgtctctctctatatatatatcactcgactctctctctaacactctctatctcagttcattctttctcaatctctctactccctatctcggtggacagccagacctcatcatcgaaaagaatcacacgcatttacctcaataatgggtaagtattatccaaagaatttctaaaatgttcagattagtatgtagtttatttttgatagatctgtgtggttgttgtttgcattggtgttgttttgctagttttttttttttgaaatggaaagatctggttttgtttccaaattgggtatttttaacaaattatcgatatatatatatcgatgttttctcgatgattaagttaagaaggtaagggatgataattttggcactttttcaatgttatatcgatacta

SEQ ID NO: 178944 - DNA, 530 bp, Cannabis indica
acaaaaaaaaaaaaaaaggaatgtgagtgtgatagaataaaatggtattgtgtgattaatttttatagtcttaattcttaaataagtaaacacaagaatgaatggataagaaatggaacactttccctattcttcattttcttcacgacttattacttaacattattagaaaacactgacttaattaatatcacacatataataaatttcaagtaaaaaaaaaccaaaattatataattggaaagaaaaattatccaaaattttcttcatcatccatttcaaaagaagtccaatatagatactaaatatataacattttagagctatataaggaagggaatgcctctaatttgtttgaaagttgaaatgcattaggttgaccattttggacccaaaaatctctctattctgattttctctcttattattattattattatatctcttaggtagtcctcacccgtccatccgcttcatctatttttttttattattattttttttccctactattgtcctcgtctctcttc

SEQ ID NO: 178945 - DNA, 667 bp, Cannabis indica
atagagttacactagaaaaaaaaattattaaaaatactaaaaaaaatatcaatgtaacaagaataacaataaacaatctttagtagtatatcataattgaattatttttgagtaaatataatatttataaatgtattacaatttagaataaaattattaattctacataaataaatttataaaatatataaatatattttattaagatgtaattattttggggaattaccccatatactattttttaacttttttttttcaaatttacggcttggatttctgaagtggttgcagcgcttgttgcaataagggtttctatgtagaattccgtaaaaatacaaaaaaaaaatgttttaaagtataaaagtgaaaaaaccccaattatttttatagaggtatactttattaatataggacttagaaaatatataactaattacaatttgaatgtcattcttattcagggccgaccctcaaacaaagtgggccacagaaaaaaaaaattatttttggacccttaagttagaaaaaaatatagtttttttcaaagttagtaaaaaaatacataattttaaaaggaaattttttttttgggcccttgggctaggtgggccctagacacaggcgtagcccaattatgcccagggccgggcctgttcttatttat

SEQ ID NO: 178946 - DNA, 549 bp, Cannabis indica
ttaagtgtcacttaaagaatttacgtcggtttataaaaccgacgtatataccgtagtcgcaaatagtttttattagcgtcattttcaaaacgacgcaaaaaacaatttttgacatttataaaccgacgctaaatacttacttttctattttattttatgtgtcgattaaaaaatgacgctaaatgtttcatggcattttaaaactgtcacaaaaaacttattatgtcagttcaaaaatgtcatatcaattgtcaaaatactttttttttttaccttattgcgtcatttataaaatgaagcacaagtgtaggtaaggaaaaattgtaaattttcatgcaattttccccaccctgcattatcaaattttagaataattctatataatagtaaatacataatacaaaaaaaagttaataataacaattttaaaactttaatataaaattaagtaatcgactcttttaacttaatcacataataccaaaattagtgttagtatacaaaataattccttttgttcattttcttgttaagtacactgagttgagt

SEQ ID NO: 178947 - DNA, 608 bp, Cannabis indica
tactgctgcccggttcttttgtcattttgaatcggaacaggcacaacccagttcatccgattactacagggattaacccaatccgaaatatgaaccggaaaagaaaagacctattgaaccgatcacaggaataccagttacagtacctatccgccaaagaggaatcctgcctgtagtatcggccatttaccccacttccctccacatttcatcaagtggtcatgctagagacataagcagtcatggagaattatgagatgatatccttgataagagaattcctactattattttactattctctttccttctcttaattgaagaaataattggaaataaaacaagcaagtaaaaaaaggaagtaataaacccccaccgaggtggaagacgtacgtacggtaacgtacttaactaacttaccaaacttttagttttttcggtttccggggtttttcggggtttagtagtttggttcggttacggtcgtccttacttaaatttaacgggttcggttaaaggttttttcggttttccgtttcgggttaggtagtaacgtaacgtcgacttagttcgcgtagtaatttacgttacccccgaaaaaaaccccc

SEQ ID NO: 178948 - DNA, 530 bp, Cannabis indica
atgaaccggaaaagaaaagacctattgaaccgatcacaggaataccagttacagtacctatccgccaaagaggaatcctgcctgtagtatcggccatttaccccacttccctccacatttcatcaagtggtcatgctagagacataagcagtcatggagaattatgagatgatatccttgataagagaattcctactattattttactattctcttttcttctcttaattgaagaaataattggaaaataaaacagcaagtaaaaaaaaggagtaataaacccccccaccgtaggtaggagacgtacggttacgggtaacgtacttactaacttaccaaactttagttttttcggtttccggggtttttcggggtttagtagtttggttcggttacggtacgtccttacttaaatttaacggttacggttaagtttttacggttttccgtttcgggttaggtagtaacgtaacgtcgacttagttcgtcgtagtaatttacgttaccccccgaaaaaaaccccccttaaa

SEQ ID NO: 178949 - DNA, 521 bp, Cannabis indica
aagatgggtgaggtatatgctaaggtgtgtaagacaaataataaaattcttaacaaaaaattaatatatgaacagctcaagctagacaaaccacataaacaacctcagaacctcttaatgaatttcaatattacgttcatacactaaaaaaaaaaaggtattaaaattctattaagaggtattggatactaagaaatcctcaggaaatgatcatcatcaaaatttaaaaatcaaagagaagaaacaaactttgatgatgaattgggtttggccataaatgattaaaaaatattagtaagaaagagcagcaataaggaggtaattgtgtaaaaaaaaatacatctatttctttcttgttttcttttttgggttcatcgattctaacctttcacttttgactattttttatttttatttttggtggaggaccgtaatttatgactagtctcaaataaatgatttttaaaagaaaaaaaatatcaaaatataagagtaaaatttgcgtgtgtggcaggatatat

SEQ ID NO: 178950 - DNA, 544 bp, Cannabis indica
tatatatagaaaaatcaatgaatcctttttgagtagctcaaaaaaaaaaaaaaattaaaaatataaaactctttcttgctgtttagaaaagaaaaaatatatttatcaaattttagttcttgtatgaagattaagagactgactaaataattacatttttctttattttcaatttaatccttttttttccctttttctttttcaaacttctaagttttatctatatattgtaaaacataattacaaagctctaattttataaaaatataaaatcctatttttttatcttctttttcattttcttttcttcaatctaagtgaaacagaaaattcattacatgcatttcttttaattatatatgcttaacaaaattattttttaataaatacaattttagttaaatataaaatgttgtttttataattattattattaggtaactatacaaaataaatttgtttttatattaaaatctaatttcattaaaattagattcatttaaaattttgttgtaatttttttaataactaatatcaattcata

SEQ ID NO: 178951 - DNA, 731 bp, Cannabis indica
ttctatagacacattcgatatcctgtctaacacattcaatattttattatactcaacttaaagtaattttgtaaaatatgataaaagtaagccatttaataaacattaaaataattttatcttcaaccattattctatattaggggtcatctacaaaggctttattactatcaatgggggtgacatattataaatacatttctttagtcatgaagaatcattcttctatttcgatccattccacttgtgagataatattattagattcttgaaaaaaaaaaaaataatggtgacagattatgtgcatgtacagtatcacaccataaaatctttttatttcaggaaaaataattaaataaaaaaaacaagtactctcgaataataaaatagaataatatgcatagtttatagactttaataatcgaacctaatcaaaaacgtgattagggtaaggtgaatagattgatcatagtggcaactcaaagttaggtataatacatgcaaacatggcataaagtgactttggcagcactctatgcatggatttctatatggaaaaaaaaccatttgcttaaactttcagatattaattattattattattgttgttgttgttaaaataaatgagcaatggatatagataactagataagcacacccttttaatttttaggggcaaaaaataaaaaaaaaaaaaatgagagattaaaagtacaagaaaacaaaaagaa

SEQ ID NO: 178952 - DNA, 634 bp, Cannabis indica
agagattaggcttgattaatcaaaacatagatgttaattctttttactatttgttctgagtttggattattatttgtacataattatagggggtaagttgaaaaatgcctcttttattcatcaattaatcaaatttacctctaattttatatttatttgaaacatacctctttttatatgtattgtacccaaaatacccttacataagagaatcacatggagagtatcttgaagtgacaggggcaaaattggtacaatatttaaaaaaagaggtaaaaatgatagattttaaaaaagaaggtaaaaataaaagaggacaatataaaaagggtatagagtgtaatttcctctaattatagctgggtgagtactgagtgctacatgttgatggatagatttcaaaagcccaataaaataaaaggtaaaggcccacgaaaagcccaaatcaaataaggttaaataagatttcactaattggtacatcatcaaaactgatataatgaatttccaagtctttttttttttatttattattttattttgttttattttgtctaaattaaatacttagatataacaattaaatctgtcaaagaaaaaaaatagaaagagagagaggtgcgacagtggagaa

SEQ ID NO: 178953 - DNA, 980 bp, Cannabis indica
tctatttcatatgcgtataaaatcaaatagttatcgtgcaatacactgtttgaactctatttttgactaataggaacggagtcgtcttcgagacaggacaagtctccaagctaggattggctaatacatttcatgaaaataagaaagaatacatgagaattgtttgtatatgattcaaaaacgagtagaaacaaaattaaataactacatttagctgatctttagccatacttacgaaatttcggagccatctcggctgcatacgaactcagctcactcgctcaggaccctctcgaacgactcctgggacaacatctccttcgttggttgaagagcttggttggtttgaacttttctcccgggctgtattttctatgatattcttgatgctttgtttccaaactccaatatcaatagctattggatttctagttgtgcctccctaacagtactctcttcctcgaaaataaccttgtcctcaaggttaggaatgttatagagctggacaaaagactcataatcttcccacgtggtgtcctctggagtacttaaagaccactgcacgagaacttgtcgaactactttgtcattgaccatctgaagtgttgtagctaagattgccataggaaccatcaacggtttgttggctatgcttaactccgataatggatagcatataggtgaattgctaccataaaacggcttcaagagagacacatgaaaagtaggatgtatgcggttgcctggaggaagttcaagagtataagctgctggtccccgacgagcaaggatagggaaaggaccaaagtaacgcctgcaaagcttgctatttaggggtgctcattggatcacatccaatggatttggacacatccgatccaatccaattatttattggatattaaacttttgccatccgatccaatccaattgaattgagtcatcagatccgatccgatccaactggatgtattggattt

SEQ ID NO: 178954 - DNA, 818 bp, Cannabis indica
ggttcatcaaatccatgaatgccgccggggcattagtgagtccaaaagacatcacaagaaattcatagtgtccataccgagtacggaacgcagttttcgggatatcttcctctcgaattctcagctgatgatagcctgagcgaagatcgatcttggaaaagaccgtcttccccttcagttgatcaaacagatcatcaattcgaggtaaaggatacttgttcttaatggtaagcttgttcaactcccggtagtcaatacacattcgcagggttccgtctttcttcttcacaaatagaaccggagctccccaaggtgagtagctcggtctaatgaatcccagattcagcaactcttgcaattgtatcttcaattccttcaactcagctggagccattcggtacggtgccttagacactggatccactcccggagccaattcaataacaaattcaatttcccgaacaggtggcaatcccggcaaatcttctggaaagacatcaagaaactcgcataccaatctcgtattttcaggccctgatgtcacaggttggctagtgtccactgcagtaactatgaaccctagacaacctctacccatcaggtctttagctttcaacaatgatattctcggtatgcgtgccccctgaactttacccacgaacaccgctgggttagcactactcgggctcaaacactaccatcttccgtttacagtcaatcattgctccatacttagacagaaaatccattcccaggattatgtcaaaatcagataattgcagctcaattagattggcggtcaactcacaaccgtcaat

SEQ ID NO: 178955 - DNA, 788 bp, Cannabis indica
tgtatgtattctctttgttgtataaaagagaaagtctggtcttttgctattattgtgtttttgggttccctattcatcgtcgtagtaggttactttgcaagggtaaccatgtaggtgatgactccaacggggacctctccaagtagttttggggaggccttccctgataccctattagtcatttggatatagggaattaactgcttgtgttttgaagatagtgacttgtatttagtacttgtaaatctcgaagaggctcccagagcatcttccatggatgcacctatggtacatgtagaccccgagaccctgctgtagaagaggggccttttgaagccgtccagatcaaatggcgacaaaaaaataagggcaaaggcaaagacaaagccacctctccatctcctcttgtgctcaataattctaattgggaaatagatcagaggccaaatctgtcgaggaattatagcctactggaggcgtattccactgatgaaggcattcgtaacattctaggactcatgtggcaacaaatctccgtcttcggggaatttccatcctaaagtattgaaggcttcatagcatggagttgggcccacatctcattcaaagctcaccttccccttagaacatatttcactcaattttgtatcaaattcatgctcctttctagcgccttccagttgcatacaaatttctctatatgtagtttgtattttgtaggtcctggggtcaagctagcgtaacccctgaggagatattgtactttctacgagctgaagtcgcagccc

SEQ ID NO: 178956 - DNA, 667 bp, Cannabis indica
atctttaaattgagtgtgattttggaaatgacacaatttatctttaatctttaaaaatctggtgctcgagatctaattttgttagacagtcagcaatctgagcagtaacagggacatgtttgacatgaatgtgttgttgtagaactttatttcaaacaaagtataaatcaatctcgatatgctttatgcgagcataaagtataggattttcagcaagaagaacagtgctttggttgtcacaccaaacaaaaggaactactacttgaggaatgtgaaacttatgaaggagagattgaacccatgttactttagcaacaacatttgcaagactacaaaattctacttcagacgatgatctgctaatagtgacttgcttatgtgtattttcaagcaacaagtatttctaaccaaaataaatgtcgtagccaaagattgaacacctaccatctagattagatgctcaatctacatcgcaaaacacatcaagggaaaagtttgaaactagtcgaagtagaagaccatgatttaaggtgcctgcaatgtatctcaagattcgttttactacagtctggtgtgtatgcgaaagggttttgcataaattgatacactttattacacaaaagtaagttagtttagttatggtggcatattgcagccaaccacaata

SEQ ID NO: 178957 - DNA, 690 bp, Cannabis indica
attgataattgatataaacattttttgcattgtcaatgtctatttaatgttgtactcacaaatatatgaatacaaaacataaccttacaaataatcacatcactcatacataaacattatgtaactaccaatattttactttccaaccaacctaatgcccacattttcctcatttcttcctaatacaacctattttgactattacaaccaatacacatataatactaataatataaaattattacttatttatacaaaaataggacttaaatagaatacatatttggtacttgtgattttattaaaaaaaaaattgtgagtatttgtcatgtgtgagtaatttgtggtatttatatcaagtcttgtctttttaataattagataaatagtaggagtaagttgaaaaatgtctcttttattcatcaattaatcaaatttacctctaattttatatttatttgaaacatacctctttttatatgtattgtatccaaaatacctgtaacgccccaatattttgccttattttacaaaatactaattttgatgcattatttaaaaaagtaatttaaagtactgtttggtaaataacacagtgggttttacgtaataaataatgcaaaaaggtagaatgatcattctatattaaaaactaaaaactaaagtaagttgtaagtgcaaaaaaataaa

SEQ ID NO: 178958 - DNA, 550 bp, Cannabis indica
attgagacatttgtccgatgtgtgtgtgcttggcctctctagttaatgcatctatttacacgtgtattacacatatgcatgatattatgtggatcaacttcatattgggatgtatttttttaatttgtggtgcatagtcatgtgaaaaaaaaactgaagagtaataaactgcaagagcaaatatgaaggacaatttcaaggtgattatggatgtatacactatggataatctagaataaatgcacacatgtattgaaacacttgacaattgtgaaataatggcaccataattgtaccatagtactaatgatgacagctcaagaatttttcatgacagcaaatgaattcatggtggaaggactcttcaacaccttctcttaaggtgagctgtgatagtattgctttattgaacctttgtaatgtgcgtgctttaatgattatattggcaacttgaaaatttgtttcgacatattttcttttcagttctttgttggggctttcagtttttcaaatactgtcagttttggacaataataccatatcctagaat

SEQ ID NO: 178959 - DNA, 507 bp, Cannabis indica
aacgttctaaatggacaattaggtcgattcatttttctttgttaaaagaactgacgaagatgtttgctaaaactaatagctctgctttgaaatgatttctacttttctagtgtggtaggtcgaatggagtggaagatatttttgttagagaacgagtttagctatctgttattctgatattgtagttttcttttcccgcttaatctgctattatagttgttgaacactagttttctgttagtagtcctgatcttagatgtactattttctaaactctatatgaatacaagcctagttctcaaccgatttattcggtctgaggttatttctcaatcactttcactgattcacaatttttaaaaagcatcacttgatgatatcggtaagaatatgctcgacttgaatttgtcagataacttatcacatgtagtcaactccgaaactaaggaaatgtgggaaaagcttagagctgccaagagctgatcaacgcactggcaatcaaaaaaa

SEQ ID NO: 178960 - DNA, 627 bp, Cannabis indica
cgttagcactcattacaaaagtatagacatgacgcttgcagtatcactcaaccgtcaatgcgtaactcgacgtacaattttcaagaggcatttaatgccccaaacacccgaagagaccctcgatcaagtcacatcagatcaacattgacagctagacggtcatcacccattcggacaattttctagccaaatgaagtccacgcagacttgagagacaaacattaccctaattttatcactatgacgtggcacttgactggtgacacgtgtataatatttcataacctaggcttatagttatacttttagtagcccatgaagattgatatgaagctcaagtcatacctgaatgacaggatgtctgtaaaggtcagtggtggacatccaactagcttgatcacgtgaataactcgcatgcaccaactagggggtgcgaaattgccaaattcagagatgaacatcgttattttcatgcttgcatgtcacgaagacaatccctatatttgtgggataaattcagagaataaaggcaataagcctagatttgccaatctctttattgtaattataggaaacatactaaattcccattttatttgttatcgattaagggaaactattcttcat

SEQ ID NO: 178961 - DNA, 510 bp, Cannabis indica
gaaaggcttcttataacttcatctcgttagcgtcagcgaggcttgcgaccctggcaagtcagaagctaacattcaaatgagcttcgaagaactctttgtaattaagaaccgcgattgacacaagacatgcatcgtcaacctcggaaggaaaaatggccccaactcgctattgagatcacttgaaccaagcttctgtcgggaaacctccagatacaataattaaagacgtgtttaatccacgatcattttgacccaataaaagcggaaaaatcacagctatatgattttcaaatcataacagcatttacattacgtgatatgtaatcaaatcccatgattttagggatgattattgtaaacatattacggtcaactttgtaattaacagcccactatgtaattataaatagtggcaagtaagatgaaaaggggacgaaaaaactcatacaaaagaggccctaaaaaaaaagtcaaaaatctgaataagattgactcgtggactatgcagaa

SEQ ID NO: 178962 - DNA, 581 bp, Cannabis indica
taccttatcccgcaaggtaaactgaatgaaaatgcaagcaacaagtccccaaggtaattacagtgtcttgcaattccccttcacagccaaaagaacttgttatgatgtgatatgtaacaagaaataacaatacctctctttttcttagttcttttatcaattaggcaagctcttcttaaactatcttcatattgttctattctcattaacaatatattgtatcactattaaaatttcgcaaatgtggttcaaataagtttcccattcacctcatcaatgatgattttgaaggttttagaattgcatgacaacattagggtcatatatagaaaccaggatttgattggactaaaaagtataagagagaaaaccatagaaaagtgaatgagttgattgtttgacaataataaattatgagaacataagttcaaacataatattgtttttttttatttcactggatgggatcatgggataaaattatcctaagttcttagattaagttatctcatactaagtaaattaattaatagtcaagtagagtgtgatcttaccaataaccagaaacaaacgcaaacttt

SEQ ID NO: 178963 - DNA, 558 bp, Cannabis indica
agtatttgggattaccccttttctagatctagacaaaaagaatgctgattttaactttcatccttgacaatcttacgtcaaagttacaaggctggaaggccaaaactttatcaaaagaccggccgagctactcttattaaatcggtgggcttgtccatgcctatctatgccatgcaaacgaccaaattgtctaatcgccttgtgaatcgaattgatggtctaattcgtgacttctggtggggttttgagaaaggaaaccatggccttcatcttagagcctgggacgaaaactttgccttcccaaactacgttgggtagggactgggttttcggaaaaacgaagggaaagtgaatcttgcctttttggtcgaagtggggctgggaacttattatcaggaaagcaatcgttatgctctaagattctgaaggccaagtacatgagggggagagagttccgtcaactgcagttataaagattctgactcctggttttggtaagaatgtagttaaagcaagcacaatccttcggaaaggagcgtgtaaaagggtggcagatgg

SEQ ID NO: 178964 - DNA, 628 bp, Cannabis indica
ttatttaatttttttggatttaatctctggagtggattttcaatttactctctaaaatgagttttgggtttaatctctgaaagtttaacaatgacaatatgactatctctaatgatttgattttagttgtgttggtttggattgagtcttaaatctcacgaattgaatctctgaaattagttttggcttaatctttaaaatggtattttggtcttttgaaaatgcagctttggttactattttttatttttggtattcttcttcttctactgttaccaatttgtaaaattttgattttaattttatatttttcagatctgtagaatagcatgggttctcgacccaatactgacactttctaattggaaaggatgatcgaagagggtaaaacattttagcaattgggactaatgggaaaattctactgtttctatttcaaaagtagtgtgagtgttctttgtattattattatgagaagatggaaagcttactataaccatgtgtagttattagagatgatgatgttctgccattgaaaaatgattttcatatgagaatgttgttttgttttgttggaatttattttagcaggatcttagatctactcacaagtatgttgtttaaacac

SEQ ID NO: 178965 - DNA, 793 bp, Cannabis indica
ttatttcttagaaaagtatagggaaattagtttttaacctttgttttattcatttttacggtttgggttgtttcgatgattattatgtgagttactatgtgaatttagattgcttcgttattgttatatagatttctataaaaatgcaaaaaaaaaatatttgaattgtaaaattgaaaaaatactaaaaatatatcatttattttacatcacatattaatacaaagataatttattccataattattaataaataaactatatagtatatagaatttgaaagatatgactaacaaacaaatggtaataatgaatgacaagtcaccttaaagtaaaattaaaatgtaactaatccaaaatgtaaaaatactgcaattttaatttattttctaaactccttaaaaaactattaattataaacttaggtatctcaacccatctcactttctcttcattcttcaattctgtaaatattttcttttgatgatgcttggaataaatttaagtaaattctttcatctttcattgtcactttacagtttctcttttacttgttagtgtaagttgtgtcagtgccttatctttttttccgggtcttttttcaggatttttttggaatcttcctttgggtcttctttcgggatcttctttcaggatccttttcttttgggtcttcttcttctaggtcttcttcttcagaatcctcttcttctgggtcttcttctttcgaaatcctcttctttattttcatagcaaatggatgatccacaacatctgagcagaaggtctttga

SEQ ID NO: 178966 - DNA, 545 bp, Cannabis indica
tctcagctatcaattttagaatacctataatctatatgatctcaaagtacaggtacaactacgacttataatatagtactaagctcttagaatttgatgattacttttcaatttattactacagtcaaacgattggtggtttttttttactgtaaaaaaagtaagtgataaattgtaaggttctgtttggttttgagttagatttcatttgaagcttccttgacttatattttttttcctttttatatttggatgaagttgttgctggtattgtcgtctttcttttttttttgttttttttttatttttttttttttgaagtattgtcgctcctttaatatactttagttataatgtctggattatctcaacatacgtttagcacaaggcacaaaggcagacctacgacttttatactaatgtttgattataaaatgtttggttgaatttggtaatattttaaaaaatatgttttttaaaactgttttatttttcaattttttgatttttaatcaaaatattttaaaaaaattaactttgaaaaa

SEQ ID NO: 178967 - DNA, 833 bp, Cannabis indica
tttactttattttaaggcacgttgcttacctaattagatgactttttagttaaacacaattccttaaaaaaaggtaaacaaaattccttaatttaggtaaacaacgtgtctaaataacacatgtcgtttaccgtactttaggcacgttgtttatctaataaggcatgtcgttgaccttattattttaaggtagtaatcattgtttgccttatttaaggcatgttgtttaccttatcttaagcatgttatttacctaaattaacacaagttgtttaccattccatttctgctcatataactgaatgcatttccattctcctatttaggatgttattttaaggtagaaatcattgtgtatatatatatatgtatatgttcaggtatgaaatttagtccaaattactacatggctaggttatactctgttctttacaattttcctcataaagatatttatatttactaggtagaatctacgttcaatgcacgttatatttgtgtgctgtagttaaaatttaaattaatatattcatcgaattgaaaattttaggtcaatatattgaagttgatttgaattttgaattttaaagaaaaaaaaattaattcattttaaattagaaggtttagtataaagatagtatttatattttctaaataaaatttagaccaacaaaccagacaattgattttgagttttcctttgaccgaatagtgataaagttcaatgtgaaactaaatgtatagaattaggacattactcacttgtctaactacatattagtctccaacacacaacaaatcttacgttaatgactcatctctccaattggtaa

SEQ ID NO: 178968 - DNA, 667 bp, Cannabis indica
atctatacaccaaccttcttgtaattcactggagatggttccactgttaccaagactactttcaattgaattagaagcaatacgcacacgttgacaatcataatcatggcctaactgagaatgcttgacctgtgtgtatccagaaaagatcttgttttacacacaagagtacaaatattctttcttgttcaatgaaaggaaatgtcaagaaattatagagctctttaccctatgtttctccgaacaataaattgccttttcgcaacttgagcacagtttaatccctttccatgtaccgcaccaagtacaagatggaactagaagatgaagtaatcagcaaaaccgttaaagtactcgatcgataagtgttaaaaatgtgactgaattgaatagaaaaaataatctaaagagcataatatgtgttatgttacaatcaaacattagggcccttggcaatagttttaagggttaaaaaatatttaattaaaatgtaaatactattttggaccatgtgttttgcaaaagttaccgactgaaccttctattttgttaaatgacaatttaaaacatgtgtttttcaaaatggtagaacataaaccctgaggtgttattaccagactggttacactttcacatgtgttcgtcttagataccgactttaggttgg

SEQ ID NO: 178969 - DNA, 458 bp, Cannabis indica
atatattgatgctctggaaagtttgggaatgtttggggatgatttgagtgagttttgggggtttaaagattgagaaatttcgtgttctctgcccagacaaccggaattccggttggttcatccggaattccggttggagttcatcgggaaatgctgaaatttgttttggccataacttttgactcgggactccgtttgggacgttctttataccgttggaaagctcttttcgagctctatgtgattatctgtatttgaaatgccatgaatttattttatgaatgtgaaatcaggggttaaccctatttgtgaaaatcccggattgtgtgtgactaggattaccggcacctggtcaggagcacccggggatttggaatctctactattgcggacgaacaacgtaaggtaacgacgtaggtagttaagttacgaccgtaacggtaaggtaagttagtcgg

SEQ ID NO: 178970 - DNA, 553 bp, Cannabis indica
taaataaattgtttaaatcttcataacaaattcatcatattgaattttttcaagctagcaaaaagaaaaagaaaaattataattctctttaggatcaagtcattgggtttctgattcatagaaagacaaaataatgcagatatatattagtgtcttcaagtgattgctttatacatgtatagattcccactgacactgacaccactttttttttaaaaaaaaaataacatatatgttattttagtttgtgttatctaaaagtaaggggtggcaaaacgtagtcatcatgttgtgttcgtgtctatattttatgtgacccgttttttactatttcgcatcaagcgtgtcgacccgtttttgactcgtgtctaattatttctaaccataacccaactcataaaaaaactcgtgtcgtgttcatgttgacccactactgacccgttttcgtctattaattaagctagaattgtaaaaaaaaaaataaatagatttaagctcaattaaaaaatttatatacttatgtatatatagtttgttatatatataatgaaaa

SEQ ID NO: 178971 - DNA, 758 bp, Cannabis indica
ttataacactcccctttggatatctataaaaactgtctcattaaaaactttgttgaaaaaaactcggtcaaaagaaaaagagtgaagtgtaaattaactcttcatcatttaggcattcgtggagatcttctaatcgacaaattttaatcttatatgtcgtcttctaaagtgttaattttggtaataactttgttaataagcatgcatgattaacacttgattgaatatgttagacaccaattaatatcgtcattttcttgaagatcatatattaagaagaacttggtacaaatgtctttggttctatctcctttattataactttgtttctggttgctctactagggttccacgactcgatctacgatcggtgccatggcaggtcgtggacgtcctcgaaaaggggcatctcagaggctaggtaagtcagggagagactcaaaaattggaagctaagaaacaaaagaagagaggtccttcatcaactccagacgtgaagaagacaaaatcgactgatgaacgtgatggggatcgaaaccaattgatttttttagagggtgaagatgatgaggatacgccttctggtttgaagcagggagaactgctccaggatgtgtttcaagagccgctttcccaaaatcctcactgcaatcgattttgaggcaggatgatatacaagctgatttcacctattttctcaaggctaatcagcaatgctcgaggagcatttcacaaggtaatactgctattccccctgt

SEQ ID NO: 178972 - DNA, 668 bp, Cannabis indica
ggtgtttgaaccacggccaaagctagggggaccacttcctcgactgacatgaccacctctgctaggagcaggggcgccatttccacgagatagggactgatgtgggggaccaccatatacatgttagtaggaccagtagcactcctgttgatataatgactgttttgagaactagagaaactaggtctgatgaaaggattgtacccccactgctttgttgcgtgaaaggttaagcctcacctttgtttgatatcaagattctttcttgtcaatacacacagattgacccattagaagagcttcaatctcagccacagtataggcatattttcttgttgtcacagatgtaacaaagctgacatcatactcagaaggaagaccattgaaaatggcttcaatatgatcttgagcagattaagagtgactgatcatggcaagttagtcaactatccctttgattttaaggagatagtcgttcagtcaaccagtcatcttggtgttttgaagttgagttttgtagagaccaacgttggcagcatcgaaggcagttcattcagggaggacctaatttgagttgtaatctcacaaccgatcatttgattggttgtcttctccaacatggaagacaagagccaagaaaccaggagattatcttgttgttcccaatc

SEQ ID NO: 178973 - DNA, 652 bp, Cannabis indica
gattgtcatgttgttcatgattcaatcattggataggtctattattgttcagacaaattatttgaggttgtactttagtgttgaattgagtgagcccaagtaatttttggagatacaaagaccccacttcacattatttaaatcagttttgggccaaattctttggtcaactgggccccagctagtttgaccagcccaattctttggtcagcccaccctcaaccctaccacattcaacatacccttcttcatttctctttgccagccgaactagccaagcaccagccgaatccttcttcacccacctcgcacctcaccatagcctccatcacgccaagctcgacccagccgcatgaccactcgcaccaactccaagctcttcgaacaacacccaatcgagctgaaccgttccacctgaagcgcaccgtcgatccgcattcgattcacccctacaacaaccaccataaacacagctactcgaccgagcttcatccaaacacgagccctatacagctcagcctgtcaccaatcgaagtcactcacgccatcaccacattctgttcaatcgaccacgagcaaactcccaagttcgaaccaatctttgcctctgctcaccatttgcaacctgacgccactcacaaccaggcgcatc

SEQ ID NO: 178974 - DNA, 815 bp, Cannabis indica
agagagagtgctagggtatacagagggtatcgtgagagagagagagagagtggcgtggggtagttgaagagttatttagggactaaaatattattttaatttttaattttttaaaataaatggtatagtgacatggcacacgtgtgaccaaaggagggactccccccacgctctctgcacgtcgcttacagccacacgtgattctcacgtggctatagcaacgcgcaaaaaagtgtggggatacctctttggtctacactcgtggcatgtcacctataggtcctttgctctttttttttttttttttttttttaatttttctataaaattatatattttttgttttatttatagtgacactccatatttttagtgacacacattccgcgtaataaataccgaacatttagaatctaatgttgtgtgtcactaaaaactattcttaattttttagtgacacacacttttatgagtgtcactaaatagtgtcactaaaggcctaatttatagtagtgattcaaaatgaccataatttaaataaagtagtaataaagaacctcacaaattacattgataaaaataaagtgaccaactatacaaaaaaaatagtattagttaaccatatagacaaatgaagaaaataaagactactacaataaccaaacccttccttatatttgcaatttttgatgaaataaaaggtcaacgtgagagcactaagtgtaaagataagatttgatctaataacactaatattttggatagataaaagattttaggccgacccgacgtaaacccattagagtaaaaatatt

SEQ ID NO: 178975 - DNA, 741 bp, Cannabis indica
tttcgaaacctcctagtgatagagtagtgcccacacacagcaagtggtacctcaatcatagattggaagactgtgaaggatcacattcaaagagaaggacattcgggctcagatcttgataatactctgcgacagaaaggatacaagggttagagatctgagtggaaggagacatattattccgctgcaaccaatgtaaggttttcttaactttatatgtgtttattatcgttttagaaagttcatatttaggatgttaaacaacatacttgtgagtagatctaagatcctggtaaaataaattccaacaatatatagattggattgaataaaatataacataaacggagcataccaaccaaggtatacccctacttaaaaccttttaatagtttgaaaaaaaaaaaaataattagtcggtcaaactccctacctttaagtttaacacgatcaacctgttggtatttggtgccctaaactaaaataccattacaatctaatctaattagttatcaatttaagagatttgaaatgatttatgcttatggtttaatatatgcacaaaatcagttaagtacaaaatatatattcattcacaattactagtatatgtctaacactagtggaatgtgattgtgagttagtatgattcaaaagactaagtccctgtttcatcagtgttttggatttacactgatgtgataatcaacgatgaaatgtacttacacttggagtaagtgt

SEQ ID NO: 178976 - DNA, 678 bp, Cannabis indica
aaggctgtagctgatggaccgtgagcgagcttatgagattgtacatgtcggggcggttaggcctggagcgtacgatcctcgggacagcagggctgagatttttgtaactgtcgttagacgacttttattttgatgtaaaagttaaacagttaaaacgtttgtaaatatttttataaatcgggatcccgagacttttgtaaaatggtttataagtttaatgaaaaagcaaaattttaattaatcacgtttttccataaacctcgttgattagcaacgagctgcacagtacgtttaaaaatcacgtaatacgcctaagttagttagggtgttacaatttggtatcagagccgccaggttgtcttccgaagatcgtcacgacatgtacaatcatcatcagcagttagctcggttcacggttcagtaagcctttattgctttagtagtttattttattcagttatgaaaaagaaaagcctgttaggaagcatgttagtagcctgatagtagaataggcgcatgtttcatttctaatttccaaattaagcggcattagtaagctcgccttgaatacgacctgatatgccaactcttggtttcgcaggcggttctaactagatggacggccaggcggactaccaggagtcagggcaactccgtagggtcggaatcagggacgac

SEQ ID NO: 178977 - DNA, 551 bp, Cannabis indica
gtctcatcacaattgtatacctttttaataatcagataaaataaaactagcttctgatttagagatctagggaggaagacttagttgatagtattgcactatcaaattggagtaactgctgtggatcaaacagagataattgctatggatcaatcaggtacacatacctaattattatatcttattattgcgttctatgttatatacaaatagatcttgggtttattattaattttccaacaaacccaaatcatgggtctccacactctgctttagagggaaagactcaatatacttcccacctaagcataacggcacacacatcatactaccgacctaagtgacaacttataatttattaataagggcaaacttggattgaaattaacaagcatatatcgatcgtgcatgatcccaaaaaatgttgactttggctgtttcgcatataaagaaagtgaacacgttttttagagctgaatttccattcaaaataacaaggaaaccaggaaacgcgtgaagataagagtttcattatcattttttgtttgttt

SEQ ID NO: 178978 - DNA, 716 bp, Cannabis indica
ttgtgaatattgtggataagaaatcttatagtaagataacatccttattattatggcacgatagatcgggtcatatttctaaagaaagaattgatcgattacttctagctaaaattcttcctcctgttgatgtttctggttggaatacttgtgctaattgtacttgtgaaaaattgactaaaataagaaagcagactgctaactatagtcactctttataagagattatccacactgacatcagtggaccttattccaccacgttgtgcagaaacaagtattttataacttttatcgatgttttttcttcttatggcctcacctacctgatcaaagacaatccaacgcttttgataaagtcaaaatctttcgaaatgttcttgagaaataattgggaagagtcataaaatttgttcattttgatcgcggaggagaatattatggttgttataaagaatctaaacaacacatgagaccttttgttgaatattttctagaaaattgtgtagtttctcaatacaatatgtcaggttcactgagcaaaatggcgttgctgaaagagaaatcgcactctcatggatatgttagatgcttaaggagtagaccaaatcttgcagagtttttatggggtgaagcacttatgactgtacttatatttaaatcatgttccaagtaaaatcttgtggactgggaggaagcctagtctgaatcatctt

SEQ ID NO: 178979 - DNA, 539 bp, Cannabis indica
aagtgcgtaaagtaggctcagcttcttttctaaagatcttgtagtatcctcaggtagtccgcttgttagattgaattgaatcttatataacctacggtagcttaagagactttctcaatagtataagtggacctctaaaaggtataagtatacattagtcttgctggttcggtctttttcttttattgtttatatgcccacattgaatagttttaaagcgctgtttagtgactttcatgtcttctgctactttaggaagattcagacagtcttttatgccctcttttaggtttgttttttccttccccggagtgcgtagtagctctagtaagtaccgtacgctggagtctggagtcaggagtgcggaagtttgtagctgcggggtggagggaggagatggcgtatgtctatcccactcccttcctttggtttcgagtctttcgttaagcaggaggcgtagcgcttcgtcaggtgaaggtgcaggatgtgcttcttccctttacttagcggcgttctgtcattttctacataaatagttg

SEQ ID NO: 178980 - DNA, 667 bp, Cannabis indica
tcagctatgtagagattcatatcattgagtatttgaatatttcaaatttaaggtgatattaaatatttttaggcttcaaattagactaaaaaaattatgaaatttgtggcttttctattgatacactatgtttgattttaaaggcactgaccatctaactcataattaaaatagtaagtcaaagtttaaattttggaataaagtcttcatagattcttaagtagctttgcttgattgaatttcattgtacccttctgtttgggaataataagacataaaattgtaataaattatatttcagctcatggtttaccacctcccctagccttaattagtcgttcgtaatcttatggagcaggtaagaaaggatattgtttcttatttcttctttcttagttgcagttttccacaatgtcctttgttgtatttttttcttaactaaatttgtagcatcttcttccaacttcaaggccaggttttgcttatttaatgtcaccataatgtcttgaatgaacccatcggcatgaaagactggttcgctcgtagattttgcacctgatcctgcacctctcatgcaaagtcacggcaagatttacaattacgagagtgattcgggctcttgaaacctgaagcatgtaatagccaaagatgaaatactagtcaatac

SEQ ID NO: 178981 - DNA, 1114 bp, Cannabis indica
ttgagagcctccttccttgctaatttcgaatccctctcttctgttcttcatattttttgagcctatagtgaaagagtacatgcccacccataacatgtagagtactcaatcacagtgtgtaagactgtgaagaatctaacacttgaaggaaaattaagctcagatcttgataatactttgtgatagaatggaacaagggttagaaatctgagtgggaggagacatattattctgatgccaccaatgtaaggtttcttaaactttatatgtgtttaattctattgttttagagaattcatatttagagtgttaatcaacatacttattagtaaatctagatcttggtaaaatatattccaacacaatcttctttcactcttcctctggctggtgacggtgctatggaccgtttacgctcacgtagatagaagactgggacaacttctagtactgagaaagaggttgttactactgttgctccttcttgtccttccgtgagagcttagaagaagaatagcaaaagaccatctctggataactcgaccgactggctgagtaatacagttgatctcactttcccatcttaatggctgcgcattctgagtttggcctacgccttggtgaggctgtaagctattattcctagaggattgagttcgatttgagaacaatcgggaaatagcttctatggagttgtccatctctcgctccttcaggtatgcatgaatttctatgtcatgattatgtatggataaacttacagtattactgagaaagaggttgttactactattgctcattcttgtccttctacgagagcttagaagaacaataacaaaataccatctctaattgactcgaccgactggctgagtaatacggttgatctcactttcccatcttcagtggctgtgcattctgagtttggcctacaccttggtgaggccagtaagctattattcccagaggattgagctcgatttgagaacatcgggaaaataacttctatggagttgtccatctctcgctccttttaggtatgcatgatttcatgtatgattatgtatgaataaacttacagtattattgtgtcagatcattatggtactctata

SEQ ID NO: 178982 - DNA, 528 bp, Cannabis indica
gaaagtattattataaacttaattaacttgtttaaaataatatgtactgtcaatatgcatgtcccacgttatcttaaattagttaattaacataaatggtgtgactgtgaaatataagttacaccgaggcatatagtacatattacagaaattattttaaagaaaagaagacaatagatttcaatttgaaagtaacgcatgttcctaaattaattcatacaccaaacttttgcatctaggattgggacatctatctatttattttgagaaataatagtgtagaattgtagattgtgtcttggaataccaggctgttttcactgtcttgataaagaagttaagattttctttttgtgggaatttaaattttgaacctttttttaagaaaaaaatatgaaactattaaattatgttgatgatcgctctttggaaagttaaatttgataataaaagaaagaggatcgttagaaaaatataaaaaaaaaaaatgtggaaaaaaaaacataagaagatttttttttttttttt

SEQ ID NO: 178983 - DNA, 585 bp, Cannabis indica
tatatataaatggacgataaaaaatataatttttttaatattaggaagttttgtgcaatagctagaataacatatgcttagctcggtcctaactagagcactcttaatagattatcaactttatataatatattaccaaaatctcttttttttttttattttacattaaacttttacattccataatatatgagtttctctatcttttctctatattatcaaaaaataatttaaaattatataaataaataattgaaaataatttttttccttttttcgttttccctctccttttctttcttttataattttctccttgtaaccttatgattaacagtaaaaatacacatttcttgatctcaaagtttacaataaattaaatttatattaatacttttgtgaaattaatgagatataattttattttaaaaatatttgatttagatttaatttattgttatttgtaggagttaaaaattattgtgacactttgaaaaagaaaaaaaaagtaaataaataaataaatgtggtgaacaacattagagattggtatttttagaagagcagcccaagagagccaagacc

SEQ ID NO: 178984 - DNA, 635 bp, Cannabis indica
aaaataaagtcaccaaatatttaattttgtccagaaattttgggagtgcaacacatacatattcaatttgcttgacttcgtaaaaaccaataatattttgccgtattcattgactacccagaatgatctagagtttaaatggtttatgtttttattattatttataatattttaaaaatattttattgtcttttgttgtcttagatataattttactatatacagccaaaaaaaacttcaaattttggaaaaactaatttcgatatataatgcatacaaggacttcatggaaaataagaaatagttttcctaaacatatatatatatatatatatatattaattttttaattattgtttactttttaatttatacaaaataataaagaacctaataaagtaaaaaaaacaaccttaatattgtagttgtaatagtacatggaattactaaaaagaacaaataggattaaatggtggagtgtacatgttggttggtagtgaatcaacttgcaatatattaatgatatgatcaaaattttagtatagtgatggcagtgtggtagtccaaatatctatgcccattagggccaatagcaggcaaaatttaacaagtaggttagattaattcataaaact

SEQ ID NO: 178985 - DNA, 633 bp, Cannabis indica
atctggcagactcaaaatgataaggttcacaataacaacctgggttaaattttatattgactccatctctttttgttattaagattatagagcttcatttggtccatctcaaccatcaacccgaggcaatgtctggcgctcccctccgctgggttagatcaaactgaattgtgatgttcgtgtggggttagagcacatgtgcatttctgttgtcgctagagatcatcagggtttggtgtgttgggtggttacgtctagacttaacttcacaaatgttgtgtggagaggcggttgcttgctgtttggctttacaagcgacgatcaagaagggtgcaattttgttattgttgaaagtgattctaaggtggtgattaacactctcaatggggtagattttagatgaaagattaaaaactactcgagtcattatcttagcatctcttctatttttgtgggttttgtcttttcaaatattaatcggtcttgtaatgttatgatccataatgtgattaattgggcgtttacccataataggtatggttagttggatgtaaaggccatacctacaaacttattgtatcacgaccaccaacacagggacggagctactttagctccaaagggggccgatgg

SEQ ID NO: 178986 - DNA, 583 bp, Cannabis indica
cttatttctttgttgcagcagccaggcatatggaagatctcctagctactctcgccgaggcatgcagccctgacgcctctctgcctccagctccatcccagctggtgacccccaggaggtcctcatccacgccccccgggacgatcgacgatcgtcttgataaacgaggagggggaaggtcgaggaaggtgaggtggacgttgcggccgcccttcgagcgcaagcggaagggcgaagatggttgagaccgagcctcctaagcagacccacgagggggacgactccagccgtcagcaacgactccgagagttcctcccgaagcggaggaatacaccgtgccgcacgacattgtgctgaccccagttcccccggatgaggagaggcaaaatctccgagttgccaagcacaactacgccctggacgagtaaagtcgggggcgacgcgtgaggtggaggccttaaagaagattctgcaggaggagcagcagaaaactttgcacgaggacgccttccgaaatccatgggacctgaacatggaccctttaacggattggttcaaccgctttgtcgggcctaccctagct

SEQ ID NO: 178987 - DNA, 503 bp, Cannabis indica
gataaaaaaactaactacgctatcagataatcgttatactgctgactcatgctctgctttcttcccttgcacaaactagaatttcaattctactaactctaacaattaattcagatgctcaattcataacactatgcataaccacaatttattcacacaagaacattgttataaaagttttactctttccaactgttccacaacccgatagctcataagcctgcatgcttacctctctccactaatgttgacaatatcctttggaatcaataggtcttttcgaggtttagaaattatggcttagatattcagaaatcgacaaaacacggttttggctcaagatatcataagcacacaaacagaacccacaagcttcttgctttttttttcaaaaccccatagtgttcccacattcaccaagattgagaaaagatatatatttattattttctaacatcactgaaataattctttccttctttgaataaacttttcccaaacat

SEQ ID NO: 178988 - DNA, 642 bp, Cannabis indica
caagggctgcttgggaaaaatctagtaccagatttggagttctgtgagcagtgtgcattagggaagtctacaagaatcaaatttggtactggaatgcacatcaccaaagcaactcttgactatgtccactcagatgtttggggaccatctagaattgtctcaaggggaggatcaaggtatttcatgtcaataatagatgactactctagatatgtttgggttcacatattgcaaaccaagaatcaagcattcagcaagttcagagagtggaagactctagtggaaactcaaactggcaaaaaggttaagaaattgaggactgacaatggcttggaattctgtgatgatcagttcaaaaatttctgcaaacaagttggaattatgagacacaatactgtggtaaagactccccaacagaatggacttgcagaaagaatgaatagaactatcatggagagggttaggtgcatgctcattcactctggattgcccaagaatttttgggcagaagctgttcttacagcatgccacctaataaacagatgcccctcttcagctacaaatttccaaactcctatggaaaggtggtctggacatcatgcaaactaccaaaaatctgaaaaacctttggttgtgttgctt

SEQ ID NO: 178989 - DNA, 749 bp, Cannabis indica
ttttttcattacaacaccattattctcagaagttgtagtttttacaagtagagagaaagtaataagctggtgaaaagaacttgcattatcaatggccaaaccaaatattcttaataagacattgatgagatactcttctttttaattagccaatcaaattgaactgcttattattatcttttttcattccagcaccataattctgagaagttggggcagagtctgttgtagcctgtctcttccggcccgactacctccacactttgcaaaattccactcacaagttttgacggaaattgaaccccaacaagtcatcttgaagcggattcagtccttccatatcaatctcttgtggacattttctgataaggattaatatagaggttttacttgtacattgggaatttatggtctttttcttctccaatttacaatttcacaagttgaattcataccatttgtagagttgtaaatgttcacgtattgaaccttgtgtagctatgtttgtgttcttgttcatattcgctcattttgtaataagcctataaataaaatatttcagcaatcatgaatggtgcttgtaaaaaaactctcaatgttgattcagaggcaattccagttgcgcaatgtatctcatagtcttcatcttcatcatcatcaacctcgcaatgggccaactgaaagtttaaagcagaaaagttgcagaaaggagaagagagagagatcaagagaatgatgcgtttgtggtg

SEQ ID NO: 178990 - DNA, 568 bp, Cannabis indica
cattcaacgaaatattgggaataattaaagagaagtttgtataaagtcttctaccctactctttgttgtttgatattcttgtattgtattatgtgttctcaagtgacatgtaaggatgtttatagaggaataaatagtttcacgtttaatggcatgtaaggatgttcataagagaataaaaatttttataatattacgagcatgctattactagacttatgtatttaaagcatgtatatgtaagttattatgatggagtacattttggtatttaagtaatgtatagagaaataataatacttaattaagttgtgtatattttatgggttgtggattgagcaataagacataggttaaatacatgtttgttgggtccatatgatagatagggaggtaatgtggtaagtggtgaaggacatgcagactcaacaccccgcgtgtcggtaagttaaatttcgaggacaaaatttcttttaaggagggtagaatgtaatatccagattataatagtatttaattttttttcttggcatattaatcatgcgtggataattatctcatttatttg

SEQ ID NO: 178991 - DNA, 849 bp, Cannabis indica
gaccactgtctaacctacatgccttgtgggttcgcaggctaagtcctagataatggacgcccagggaaacgtaagaggttagggtgaaatggttgagactagaggtggtcgaggtggtaaaaatccccaaaactcccgtggacgcagtagaggtcgcagtcgtactcaaagaggtggccaagagaatccaccccgggctcctttcgattggaaacagaggtttgttgatatgcaggcccaaatcacttagcaagaggaagagattcagaaacttagacaacgggatgctcttgttaagcctcccctgcaaccacctactgttgtgtttcttgcggtgtgttatagtgagatttctctcacctagaaactcgagaccagactcctctttaaaggacacgtgtattcagatttccaatgaaggctgaatgtccgtgagagatttctcgaagtttagacctcgcgcaggctaaaaatagcgagatactgtaggtgcgacttaagtcacaccgcataaccataattctcatcatgcagggtagatccaattcgcatatgtcagaacatgtgcgagtgtccccctctatacctccgcgacgagtatagagaccaatgccctactgatgcagttttggttcccgacgcgacccaactagccctaaccagaccaatataagttcgcatgtccagatgttaccagcttcaacatgcgacgtctacaacgggcgattacctaaggacgcagacgttccaaacgtatgtgcgaccctaccgagctcaacagacggaacatgaacggtcaactcgcagatgcgaaacgacgcatacgttgatgaattcagtaactgtcat

SEQ ID NO: 178992 - DNA, 677 bp, Cannabis indica
aaaggggcagagctacaaaaatagtcatcgaaaaaagtaagcgaaccgagaaaaatggtttagtgtaggttgttctcctcgacgagctgagtttagtggtgaaaacgcctcgtcaaacggaaaccgaaggtgaccgaaaaatccgttcaaagtttgaaaccccaaactttgacttgcgatcccgatctaacggcggggaaaggagctgcgccgcttggggtgaggtcgccgacacttgggcttccgatttatccggcgcatgaggttcggcggtggctggaggtgggtcgccggagtgtggtggttatggagctttgtgggttttcttttgtgtttgtgtttaaagagagagaaaaagagattgagtgaagaagaggacgggtgagtgagggaaaaaggtctgactatttacttttttttattacatatatatatatatgtctctttttttattttgactcggtcaaactgagatctcacattctcccctccttaaagaaatttcgtcctgaaattttaaagtacaacctcaagttgaaattaaataggtgaggatacttcatatacatctcggactctaactcccaagtagtcttctctgtggttcttccataagaccttgactactggaatctctctgttccttaacacttttagtctctctcgcaaacgatttt

SEQ ID NO: 178993 - DNA, 1111 bp, Cannabis indica
cttcatgttgatcaaatcgttacgagcctctcgaatgctttttataagtagaatagaatttgtttatctttcttcttcatcgtcaccttcttcttcctcctcataaaagatctctttctcttattattattatttctgctctccattaacgatctcaactcttcactatccatatatgaatattattcttctctgatgatattgatcaatatttaaaattaacttataataattccataccttccttcttcgttacttctttcagacaacaccttataaactgtactacgtcatagtcatggtgtttaatcattgtttctcgtacacgaaccactgttatttattcttttcttttctatttttttcaacattttcagtcctaccttttcataatgttagcgtagcccctactttattaataattacaaatagaattttttttttttttttttgttataattagtgaaaacttatactaaacaataaagtgaaagataattaatatgattttcggttgcataatgatttagcctaattatgataaaccaaaaaatacctcattttggattgaagttgtttcatcaactcagagagatagaaaaataaaaaaaaaataggaatttaatctaaatattttgaatataaacaaatttttcatataatataaaaagatatattattgtgattcttttaaaaaaattaaatagtttaatatttttaaagttaatagttaacttgacaaatattctatttatatatatatatatatatactagtaaaatactacgtgcgaggcacgtatactaagttttatgctaggtgtgtcttgctttatttaaaaataatacaacaaataattaaagaaaaaatattattaatatgtatattcaattaatgtaatgatgttgttagtaatgttaaaagtaaatactgaatacaatatatgactgcaaatcaaagaagttaggaattttgctattgattcttcgaaacaaacttcttgattgttgcgagaaaaaaaaataatagaagcaaaatacatctgaacagaccaaaagaacaaaaaagaatgaaatataaaaattgtaaatctcacaaaaaaaataagttc

SEQ ID NO: 178994 - DNA, 348 bp, Cannabis indica
atccagttttcaggaaatgcaggactctttctcttatctatgaggttgtacaatttcttttagagtccaagtttcttaagagaacacatcatgaattagaggatctgcggaaattgaggagactatctactgatagttttttagctcacatattccctttagattggcggaaatcgttggtggaaaaccatatttctttcagaggaacatacttttgtaagaattttctaaagcaattcacagttgaacatgccgtctcatctaatttgtcttacagagaacttggaaatgtggccatgtttattcttgtatcaggcaagctcaatgatgaactgtttcaaaagattc

SEQ ID NO: 178995 - DNA, 691 bp, Cannabis indica
gttgcatgtaatcaatatatatcactatttcattttagacatgcctactagtctactactactatagcactacactgctatagttataaaccgtttaacaaaaatcatgcatggtagctaaagttggtaagaattatcacaaacagtttggtctatcaaacaatctaccatctcaattcagcatcttccttttaacccataatttctctccaacattttccaaattcctagacaacattcccatacttattaaaaccaccctaaaatttgtactttcttcaatatcatcaaagataccaaaaacttggagaggcactaaaaacctctgctttgctaaaatttcagtgaccaaagttaacaatgaagattttatcattagctttggctataatggtggtcacaatctttggtaccaccattaatgtgagccattgcaaagaggtccagttcatatttggtgattccctgtctgatgttgggaacaacaagcaactaagtagaagccttgcccaggcaaacttgccttggtatggtattgattttggtaatggtcttcctaatgggaggttctgtaatggccgtactgttgctgatataattggtaggtaaaccatttaaatacaattttccagaacaaagccagaatatgtttgatattttgaaagttcggatgattttttttttttttttt

SEQ ID NO: 178996 - DNA, 1338 bp, Cannabis indica
atactcgcggtggtggtcaaaaagtgttgaaaaattagtggcgcggtgtttagaaatatggtggtggtgattgaaaatcaagtagacatgacctttaattttaatttgaaagtaatgttatttgtggattttattgttgaaaacctattaacataatatataggtgtaggattaagtgggtttgaagttagaaaaataattaatcatttaattacggttttgtgggttttggactcgacgaaggcagtgttaaactatgagacttcaatttagggtaaaaatatcatttttttcaaagaaaataacacttatgtcttcggttatttcacctatgtgttccgttatttcaaataactgaagatataagaatttatttgaatttgttttatttagtactactacacaaaaaagagctttatcttcgattaaaaaaaatctcagtaccaaagattattaaggtgaagacataggtccctaaaatactgaagatatgtaggggaccatcgatgtcttcaaaataattgaaaacgtacgagggacctatgtcttcgatcgatcgggaaatagctagatcgacaagaatcactataactacaaatttaacaaaaaaaaataacatttaacacaaacaaaatcgacccttagaaacacaagccgccacaccgaaaaaccacaaactatctgaaaactaaaatgataacaagtaataataaaaaagaaaagtgataagaagctagaaggaggtaaacttaagttacgccattgattaaggtgtgataatacattaaaattggcatgtgtggccgttgattaaggctccatattttcaaagctctcccggcattaatttttgtacttgtaatatattatattgttaaaaaagagtagcacgattaacgctcaacttgacttttaactaacaatcttacttatataaataaaaatatacatacattaattataacaaacttatccatctcttataatataataaactataattcttttatgtagggtaccatatatattataattttttttagggtaaatactatttttgtaatgaccgctctagtaatatgattagaaaaggcaattagcactaatttttattattttattattatttgtgaattaatttatttgtggatcccaatatttagaaataaatatttgagttataatttctcaattccggagattttattaaactctaggggtattatttagcttatatgtgaaatatgttaattttgtaatttttgctcggcgacaacggaaaatgcgatggatggctagattgatcacatgggtaagtttagaaccctatttcctagt

SEQ ID NO: 178997 - DNA, 687 bp, Cannabis indica
gtgaagctcaacgtggatgcgagactcgatcttcttgttcgtcaggctggttgcagggcgtgttggaaattattttaccaggatcttagatctactcacaagtatgtttattaacaccctaaatatgaactttctaaaacgatgaaataaacacatataaagtttaggaaaccttacattgggtgcagcggaatataatgactccttccgttcagatatctagcccttgattcctttctgtagcagagcattatcaatatctgaacctggatctctttctctgaatctttgatgctgaaactccttcttgctgaaagtctttcttcacgatcttcctcactatgattgaggtatcacttgctgtgtgtgggcactactctcacactaagattttcgaaattgaagagggaaggagaaagagaagggtcagccaaagatagggagagagaaggctcagttttttctgaatcagaagtgtagaaatttaagtgtaaatttcctgaagccttcactatctatttatagcattccactagggttaggtttgaattatttggcattaaaataatgaaaatatcagtttaaatttcctacaaaagtggctggccctatactagtggatttgggcctcactttttgcaattttgcagttttatcttttctgcatctgattttctcaaaaacgcc

SEQ ID NO: 178998 - DNA, 587 bp, Cannabis indica
gggctgttgcatgtgtgtatatagtatatatacatacaaatatgggaattttaaacctagctagagaatgcattatgtgtaatacaaaattgctgtgaaattttgggcataataattttgaaaggctgccactatcccaaagcaaaaaacatattgtaagtggtaggttgaataatgcttcaaaatcttgatttttctaaattcactagcgagttgcacaaatatacattgtgctacattccaaatttaattacttgaaagtctcctcaatgattgaaaccctacaattaatgttgaaaatctaattaattagcaattttaattacccactacacatgcatgtggacccatatatatatatcttccttcatgtacatatatatcatgcttaacctagctacttacaaagctgggacaccccttgtctctttgctccagatctatctatatgaaaaccttcctacaaatcataattttggattgatggaggtcacacataattaatggtttctcacttctatagttcttgcctaccttataatactcaactttatcagtaccagtgatttatatgtataattatatat

SEQ ID NO: 178999 - DNA, 586 bp, Cannabis indica
tttactatgatcactagtagttactaacatgaatcaacaacataaaattttgttaaagaaagaaacaagtaacaaaaattagaaaaagcaagattccaagattaatgattgagttgagctccttcaaaagctggaagacaaataccaaattgatgatagtaacgatagaccgatgtgatgatagttcgtcgaaagaaatcgaaacagaagacaacaacatctccaaccataagcttacgaagcttaacaaattccaaccaaccatcatatctaatcaaaacttccccatcatcacttttcaaaatcaacccaaccaccattggttccaaattctgaatcatttggtctttcaaagtaaccaaaaagttaccatcaagattcactcctgatgccataatcacttctaatatctctttaggcataaccatttcatgaccaacaacattagacacatcttcaagactcaattttttcacacacaaaattggttgtggcccttgttgtcgattacgctcttgttgttcttcttcttggggtaacaaaggacaaaagtccgattatttggggtttaatcggattaagttgg

SEQ ID NO: 179000 - DNA, 655 bp, Cannabis indica
gatttttctaaattcactagcgagttgcacaatatacattgtgctacatttccaaatttaattacttgaaagtctcctcaatgattgaaacctacaattaatgttgaaaatctaattaattagcaattttaattacccactacacatgcatgtggacccatatatatatatcttccttcatgtacatatatatcatgcttaacctagctacttacaaagctgggacaccccttgtctctttgctccagatctatctatatgaaaaccttcctacaaatcataattttggattgatggaggtcacacataattaatggtttctcacttctatagttcttgcctaccttataatactcaactttgtcagtaccagtgatttatatatataaatatatatgtattatatatgtacaatgtatatattatatgtatttagaattacagagattcctaaagggctaagctagcctttcgaagatttctatttttggccttggattattgcaagaaaaactgcattcattacttatacatattcaataatatatatgttgatttatttaattaagggatcgattgagtatattgctttagtcaaaagaaagtctatgcatgattatgaatacaatttcaaactagagcttgttataaatat

SEQ ID NO: 179001 - DNA, 706 bp, Cannabis indica
cttgatgagtcactagaataacatttttaatgctgacagcagcaatgacacattcctgcatatttttaccaaataaaaaagtgtataatcagaaacaaattgcatattttcatgcatgagaaaattgatcaaatttctgctctcttacaaaggttccatccattctactctctttcctacctaccaaacataacgtaaatcccaagaactccaatgtaacacaatatccctagccaatactgccatcttttgatacgaaaagatggcacatatctctggtcaaaggctctgttttcagtatccacgaccaccgtttgctccttgacgcctccggtatccccgtcatctccctccgccaaaaggtttcaaatgtacaaggtttcgatttatgttcaccaccaaatggtatttcaatttcctttcatgtgttaataataaaaggaatgccctcttctaaataggatatacttaaatttcactatgtatactctgcaccatattatacatatatatatttatattgagttcctgtatatatttaaaaatatatgtgcttattttttattattattaacttttctgattattttagtctaagttctatctcactcttagaattctcgtattagcatggttaaaatattgagcataaaaataacagtgtgtgtggatacaatggtgtgtcggtgtggtgattgcggtaaag

SEQ ID NO: 179002 - DNA, 573 bp, Cannabis indica
agatggttcgattagtctttcgcccctatacccaagtcagacgaacgatttgcacgtcagtatcgctgcgggcctccaccagagtttcctctggcttcgccccgctcaggcatagttcaccatctttcgggtcccgacaggcatgctctcactcgaacccttctcagaagatcaaggtcggtcggcggtgcaacccacaaggggatcccgccagtcagcttccttgcgccttacgggtttactagcccgttgactcgcacacatgtcagactccttggtccgtgtttcaagacgggccgaatggggagcccgcaggccgatgcctggagcgcgcagatgccgaagcacgccgagacggcgcgcgctgtgttccacaatcgaggggacgacatctccacgggcatatcaacagcccgggcttgggccgcccccccacctacgtccgactacgtccggtccgccgtccgtaccggtacggtacgtacggtccggacgaaccgggacccggtccttcctacccgttaccccggttcccgactaccgtaccccgggaaccgggacggccgactacgt

SEQ ID NO: 179003 - DNA, 554 bp, Cannabis indica
tttttttttttttttatttgcaaggtttattggttttatataaaattttgttatgcatattaatccagtacatgcatgatgcatacattatatgcgctgtctgttataatagtatttgttgttacttgttgctgtttttttcttcttctagcgtttgtgtgatttgaacactgatttgttttctttatcattccactagtcattttagttatctggatgatgttttgtttcatactgcagatatttgcacgaaccaagtacttctctttcatattttgggttttcaaccttttttttctcatatgcaaccgtgtttatgaaggatattccttctccatatttgggtgagtatcgtgaataggtttcttatattatcctttgctttaggtagtagatgaatgatccaacaacttttctttagctgcttacatttgtgcttgtttattggcgtagtcaacattgggcatttttggacaactttcgaggaaccttccgatggcacatatgcttcaactttggtatttcgttttccttgttctttttttttttttttt

SEQ ID NO: 179004 - DNA, 621 bp, Cannabis indica
gagatattaaaatagaattgcctttcgtctatgtaatgaaataattgactttttctttattaatttattttatttatttttattcattgatttaaaaattaacaatatatagaaagacatgatgaataagtagctcttaatattttatctaatattatattaaatgcaatattgttgaaaaactcaaatcaaatccatatttttatactaatgtatatgtctacttctatacatagtaaatttattattttgttgagattgattgatatagacaaatattataaatttattggaaaattatgagttgagttggtgtgggatagctaactaaacataataaaacacttgagaccatcttcgaattcattgagatggtaggccaagcgcacaatattgacaaagaaaagtatttttaagtaagttgtaacttatatagggtgtattgtgtacaaaattatttttgaatatttttttaaatatagaaattgaaatatatttttttttacaaaattaaaatctattttgctttaggcaaaaaataaaaataatgttttttatttttactatcggagcaccatcagtatagataagaatagaaagtatggatagtgaagttagaag

SEQ ID NO: 179005 - DNA, 672 bp, Cannabis indica
cctagagctagaagctccgaaacaagtatcaaatggtggcatttctgaactctgagttagtgggaagaagacatcttcaatacgactagactcgtcatgcttcgcacgtttcttttgtttgaaatgtgggactaaggaatggacattttctgatccaatgtccgactcagtatcagcatagttggcgccagtaaattcattatgttgaggaggacatctctcaaaaaacttcttcagggttggagtaaagtaagcgaatgtctttgatcacataatttgactcctcttctttgaatggttgcttggacaatgttgaatgaatggccttcacagatctccccaagtatggaatgcaactcctcacccaccaacgacagtaccaccacgtgcattgacccatacggagagtcctaggaatgtgaaagtggatgccagtatttctccttaactattaaaaccctaaacgctttagtcgatttcgtcttatttccacactgcctcctccctaggaatactcagacaaaacttaatctgagggcgacaccttgatcgaaaccaaactaggcgagcaaatctattaggataataaggttctaaaaatgcatcgttacccactcttacgagtagcaagaagaacgcatagaaatcaataactcaaatttctcatcagat

SEQ ID NO: 179006 - DNA, 544 bp, Cannabis indica
tcccacttcgattcccgccccgttagcatctccgatccgagatcagggattaattactccgttaggtcttttcggtccggagccggcccggccggtaatggacctacttaccttgcttgtgggcctgctgcagcccttgttctattggtttggtggttgctaccaagacgatttctttatgcccatcaaaggacctcgagatgctaatccacgaaaaacgatacgagaaattagaaagaactcatatacggaacgagggcgccccgtgaaaatacgtcggtttcttactcgtgcaaaggaactatttcttggcaacttggacaacttataacgatgtttgtcccgcatatcactaggaagatcgggatctttacaaaaggctttataaagctttctttcgtctcaattcatatttagccgcgagcaatctacgtttgtgatctcgtatatttcgtttctccgacatcttactgagtttccccctcatctttttgcaaaaagccgctccacggtggtaaagtctcatcttgtgtgttggccgaag

SEQ ID NO: 179007 - DNA, 744 bp, Cannabis indica
gtatttttgcaacagtatatggtaacccaactggtaggatttgtttgcaattgcagcaaggccttgctcttgggtttgtgcaagttttctatcacattcttcactacaattttagggtgcatcattaatcagctgttcctttcatgttgttttggaaagaaaatgggtagctttatccattttgaggatctatcctttttagatttatgtagagaatggaatacaattgtataggggcagcaggtggttttgtttagttttttttcctcctctgaggcagagcaggggagcactcttgctttagaatttctgttttgttattaattgtaaccatggttttcctccaccacatgcgaggcttttaatatataacggggaggatcctgtctaagacaagaggatctcttctctgtttcaaaaaaaaatgggtagttttattacaactcattatgttgcctgtgattggaacttgggtatagttgggattgattagatgattagctggctgtttatggtctttatagttttttttatttaagtcaattgcacgggttattaactcactctcaaattaattttctcttgcttgttatgctttttacgtcatttactttggaaattagaaatttgaagccctttgtggtcactggtcatgaataagagactttcaacttcttacttccttaactagttcatcttctttgttgtcaggcatgtgataatccttttgtattactgtgtaca

SEQ ID NO: 179008 - DNA, 772 bp, Cannabis indica
agcaatgatgaagattcagacggaagtcaagatgacgatgatgacgacgacgatgattttgatttcagcattctgagtgaatacagtcttgagatggcaaaccagcctcatgttaatgggactgaatcttctaaggtttcagaggagggtatgtttgaggattaagagttgggaccatggtaaataatggtgcaacatagctctagggggaaaaatggtattgatttgtaaagtagttagatagatgagagaaggcttattatatgcggcaaaatccattttttgttgatgttacaagaataatttaaaattgacacttttactccctataagactgaaaatagaaagaaaagaaaaagagaaaaaaaaaaagttaacttaataaaggctttcttttccttttgtatttgatgtttccatagaatatttgccttaaaacccatattagttcaaaataaagcatacaaaaataaaatcccctcaaaaacagaacaaaatatcctctcctatcttatgtaatttattcagcagaaacaagaacttatcaacagtgaaactaaacaaaaaagacctattatatgaaagagaattgttcttgaaactggcaacagtgctgaactccggctttacatcaccattccaccatcaattgtaaagacctaaaatgaaagaacacaaatacatatcaccttttccacacaaactatttttccttttggtctacaaatctttcacgaagttgcaagtataggattgtacctgtccagtaata

SEQ ID NO: 179009 - DNA, 554 bp, Cannabis indica
gtgcctaacacccttaagacgtgctattttgcgattgctagcgatattccttaaattaaaaactattttataaaactataaaggacccgatacttaattagaccaataacgatattaacacgtaggagagtgattaacaccactggtactttttttgcatttctcattaattaaacatagtatagcaccagcaatggagtatttttagtgtaggacagaagaaactttctcatagaaaaataaaaaacattaggttttgatgaaagtaatcaaaacctttctattaacccctcttttgtccccttttcatttccttcctaaaaaataaaaataattaaataaaaatctctttctctctctctctatatatatatatatgtatatagcttccattctctctctcactcactcactcactcactttgtcaaatccagtcctctccatcagatactctctgtacttctcctttctccttttcccaattactataattatctacttttatttctattttttctttgtgtgtgttaactatggagaattctctagcaac

SEQ ID NO: 179010 - DNA, 662 bp, Cannabis indica
atctttttattaatttaaaaatccttataaaagaagttaagatttgtaacttttttcaaaaaaaaaattttgaaaagttatttttaaaattaaaataatttacataatttctaatttatattttttttaataatacccaaatactttgagaattacttttcattacaaaaagatattcatataatacttattcaaattataaaaataagtcaaaacttaactaaataggataatagtatactaaatttaaattataatttcttcaaatgtcaaaactagaggtgcgcaacgatttgctacataataactcacctccggatgtattgaaatgtattgactagatttgtacttcttatgcagagttacatgatgctttcttgccttgcccaactccaacctcgagggtgtcttagagtcctcctcctcaggattggataaaattaaactgtgatgtgatagggtgggccttgaaagcatgtgcacaacggtcgtagcaaggaatcatctgggtgaagtgattcggattcacacagctcggctgggcttttcagatgtgttatgtggagaagcagcggcctgttgtttagctgtttcggtggctctaaagttaggttttaaagtttattttggtggagagtgactcgaggatagttatcaatctc

SEQ ID NO: 179011 - DNA, 618 bp, Cannabis indica
aatttgaaggaagtattttaccattagatacaattcccctttgtaaagatatgtaataccaagcccatactcatgctcctttgaccttgccatttctccaaatacattgtatcaaaagctttgtcaaattagaatccgtttgtgcatcacagggcaaaccatctaatgccgaagagtctagcgaaactaaatcaaccaatggagcaacagatgtggtgggcactcctcagaagaatacaagtgaacaagagaagaaaacaagtgagcaagggcagtaatgctgtcttgttgaaagacagattgtacttgatctggtttaacatttgcccactttttgtattgtaaatgtgcatacaactggcttaggagccaatgatatgtatcaatttaaattcaaaagtcactttgtttctcccaggatttaaatactgaaattcattgtacattcaatcatttttcttatgtttttttaatagataataaaggtgcagagattttggttaagtaaacaagctgacccttctaccagaagctgacattggaattagtattacaacattttacttggttcttcccaggatttaaaaatgaaattcactgtacattcaatcaattttg

SEQ ID NO: 179012 - DNA, 731 bp, Cannabis indica
ttaaaatttgtaagttactttcactaattactcttaaatatgaaaagtgtaatacaaattagcttcttgaagctaaattttttctttttcttctttttttttttttttgagagaaagcaagctgcaaaaacaccaaacgaaaaaccaagcagcagaaaaggaattagataaattcctcctaagcttcttccctcgacctgatggcttcttttgcaagaccatgggcgtccgtgatgaactgacgaggcaagtaatgcaaagatgcttcaggaaaattggaaaagagcaaacgaatccgagacacaagacgagaaagagcagagaggtcttgccttcttaaacttggtatccaaagttaaattgtatcatatgtttgtttatatgtaagtccatataattttttccatcactatctactaattaaacaacataaaaggattaacattatatgtatgtcatgtttggtttgatataatagagattaatcgaatcaaaatttttattaatttttgaaataaagatctcagatttggccaaccaacagcggagtcgtattaatactaatgcttgccacgtgttacacaataagaatagaaagtaaaagaatacagaattttatagaggttcggcccccttagttagcgggtaatgacctactctccttttagttgtattgatatcgagagataatactatttagatcactataggtgggatctgagatagctctc

SEQ ID NO: 179013 - DNA, 521 bp, Cannabis indica
ttcgtttttttttttttgaatttagaaataaaaaaaaatggtaaggagtgggagctgtagagtgtaaagaagagtggagatgagatctgacaaaggactctctacttttaaaaaaaaatgaaaaaaaaaaaagacaggtaattttattttattttatttttggtttttctagatttttaaccttaaaatattttgtttttattttgtcttttttgtttttcacttctttttgttgtgttgttaaatgttattattatttttattaattaacccgagatgcacacgtgtgaggattgtgttgggttttggcacgtgccctagttggagtcttggaccgttcttgttccaaagagacattcaaagttgtgttctttctattagaaatttaaaataaaaatattatttttataagcattttgtcttaaaaaaaaataatcaatcaatttgtaacactcttaaaggaaaatagatgtatgaaataaaatatatttagatattaaaaaaattaaaataaagaaagt

SEQ ID NO: 179014 - DNA, 567 bp, Cannabis indica
tacccatactaaacagcctctatgttatgttgtgcagacgtatacttaattggagtttatcataaaatcgtgttagaattgttgaaaaatattgtattggtctcaaataatgacatgcttcgcgtaatatgtatataaatataattacataaatatacacccaagactcttccaatttgcataggttgcctaatttcaaaactgggctcctcagtaagccctactttatttggggagtagctaactatagccatattgctatgtagttgtacaaacatgattaactcagccaagatctcttaccacaaccagatattctgtttttcatttctcaaaaaccctagtctccaatagagacaagtccaacacattacctaaggatagaacagtagctaattcgagataacaaatctccaagggtctaaaactgataataaaaactctaagcaatcatttatacacactaactgtctaacagaacataacaaacgaccaacaacattaaagccagctaacataactcagctaagtaaaaacaatttaactacttagctaagttagcttagg

SEQ ID NO: 179015 - DNA, 876 bp, Cannabis indica
  modified_base (846)..(846): a, c, t, g, unknown or other
aactctaaagtggaaaatggttcaaagatgtatttcatgttgagtaccataccagatacaacatatactatagttgctgttagcaagtatatggtattgactgggaagatacattggttgattatcaaatagattttaaggtacttaaagaagacaacatgcattatacttgcgtttagaaagtcacaaaaccaaatggaagggttttgtgacttgatatatgcaagagagaagaacaagatgacacaaggaggtgtcacaaacatgaagacaaaggtgtttattctagctaagttcaaactgaacttgctagggataaacaaatggtactaacccttggggtcattcaagccctcatagcatcatcaactatccttgggtaaataagagaatctgggtggaatttattgttacagattcacttatttacccttaagttgtataacaccactcacagggtttgacaaatatacccttacatcaaatacaacaaagacagttacaaagatagttataaagacagttgcaaagacagttacaaaaacagttacaaatatctatagggctttgccctagatcagatttacaaatcaatataaaaggaagtatttttctcagaacaatacaaaatataagagatacaagcagtaataaaaagtcacagtcagagagaacaacaacagaaataacaacagagaaaaagagagccttttcttcgagagttgtcatctccatgtcagctcctcgtagagatgttcatgtaaaagaaaagagagtttttatagtatcaaaagagagaaaaaatagagagaaatataaagttgtaaatcaaagattgtaaacctnttatttgagatgaatggattcaagctttga

SEQ ID NO: 179016 - DNA, 673 bp, Cannabis indica
acttcccttctcttttcctcttcaatttcaaaccttgagtgaatgagtgagtgcccacacacatcaagtggtatctcaatcatagtgtggaagattgtgaagaatccaatcaacaagaaggagaatcagcatcaaaggaaggagagaaagagatccaggttcagatcttggtgatgctctgctacagaaaggaatcaagggctagagatctgaacggaaggagtcattatattccgctgcacccaatgtaaggtttccttaaacccttatgtgtttatttcattgttttagaattcatattaggatgttaatgaaacatacatggtagtaaatctagatcctggtaaaatatttccaacaactggcctcagagccatggtaatgatttactttcatgaaatatgaattaaaacgatgatatgtgttgatttggatggtttcatgttgatctgtgtgttatatgatgattgattgatgcttgtgaaattttatgaaaaataattgaattttcgtttctggaattatttttattggatagtttggaaaaaattaagcaatttacttttttacagaactcaatttcgattttatttgaattagttatgattttttgaaaatcgaaaatatcagggtgcatcaaaccccacacgcgtgcggatcacttccatttcct

SEQ ID NO: 179017 - DNA, 540 bp, Cannabis indica
tttttttttggttgaaacatgaaaacccatgcacagatctcaattaaaatactagagccaattttgaatatatatatttatacatgcaaaataaaaataagaaagaaaaatagaaataggcaattgggattttaataacccatattgcattttcaacttcattaatttctaattctcctcacagggtaataataataacatcccaaccacagtgaggaaaattttacatcaaccatctttatacaaattgcaaaaacccattaaatcttttctcaaatgggtttctcaaaaagttagaaaaaaaaattaaaaaaaaaaacccaatcaaatggggttccaaaacaaacccacctagctttctagccacctctctctcctccaaaaaaaaaaaaaaacaaataaataaataagaatgaaaaaaaaaaaaacaaaaagaatacaaagaaaccctccaaaaaaaaaactaataataaagagaagaatttttttaaaaaaaaaagaattagaaaaaatttaataaaaaaataaaagaagagaaag

SEQ ID NO: 179018 - DNA, 585 bp, Cannabis indica
tttcaacatgttcgatgcctatgaatcgttcaatcacatacccttcttgtccacataacgaatattacaaccatttgctcttttatagatacatcacgagattcatcaactaaaatagaaaacacaatatcttccatgtctttaatataatgttgattgtttcaacaacacatgcatttacaatatctttctgaatctttggagaagccaatctaagatttttgggagcatttttcaaagcaacagttctaacttccttattatgattagttaaaaattttagaagttcaagaaagttactttgattattagaatcttcagactcatcatgatcacgaaatgcaagatttttactttttgtcataagttttgttgtgactaaaagtaaaaaaattttgtactgtgttttgagattattattttagcatgtcttaatgtttgtcttatttttgtggtgttttacttttaataagtggtatttttatttttcaagctaataccattgttttactaattggattaaattgggctcattcgtgtgatttctttttagaagcaatttattttgactctctctctctctct

SEQ ID NO: 179019 - DNA, 609 bp, Cannabis indica
ggtttgacgttgttgatgagagtgggtgcgcggtcgttcaagaatgagtcggcggtgattggaatatttggaagggagtgtgctaaggtggagggttgccggatgatggtggctcattccaataacctcactttttgtgaacaggttagaattaaaattattattgcatttttgttttatggtgatattttttttagaaggttttggaaatagtgaaaaaaaaagtcatacaaatattttgggagtagtttttgtaaattattaaaaacttaaataatttacaatattgaaattagagttttcaaaaagtttttcttttgttcatgcatgtaaacacataccttttgaactatgatttcagcatggtaaattatcttgatttttttacgtataattaatttataggaggtctactactaccaggaacactgttatatatatattttataaaaacaactaactaaaataatagattatgctgtattattaataatgaaaattaaaaaaaaaagtagactaccctatcacaaaactctccaatattttataaatataaactaaacatatgatcaaatgtccataaacatagtttttttaaaactaaacaaa

SEQ ID NO: 179020 - DNA, 816 bp, Cannabis indica
gtctagtgggacgttttatcactgatcgggaaattgatttccttgctatgcaacataagatggcctccttatggcgtccgggacggggtttatatgtcaaagaattagagcctaatctatatctttttcagttttatcacgaagttgatatcggacgagtgatcgagggcagcccctggacctttgatcggatccaattagtcttcaaacggttaagaagtggggagaatccgcggtctgtagtgctcaatagtttggatttctgggttcagttgcacgggatgtctacggagttcatgtcgcaacgtgttgtaagagatattgccaattatataggcagttttgtcgaagctgatccgaataactttataggcatatggagagattatcttcgtgtgcgagttacgattcgggtggaccgccctttgaagcgcaagatgaaattagaaaaggtgggaagtcctgtctgttgggccatttttaagtatgaagggctaccgactttttgcctcatctgtggcataatcggtcatgcagagaaattttgtgagaagctctttgatactccgtctcacttacttcaaagaccttacagtttagagatgaaagctgcaccacgaagaaggaatcacaccatcggctcaagatggttacgtaaccgccctgttccaagagctgctgctgcctcacctagtgagacaaatgatgggggtcaagagtatgttcggcggccaccagtgggggaagaggaggggttgtctgagtctgaacgtgatccgaatgtaagtggagggaatcatggtcttcaaggtggca

SEQ ID NO: 179021 - DNA, 577 bp, Cannabis indica
aatccggcatgacccaaaaagcttcgaactcccttaactgaaattggaggaggcaagttctcaattgtagatactttggctctgtcaacctcaataccttcttttgagattttatgtcccagcactattccttctgtaaccatgaaatggcacttttcccagttcagcaccaaattagagtcttcacatcttgctaaaaccaactccaagttactcagacattggtcaaacgatgagccaaacactgaaaaatcatccatgaacacctcgatgcacttttctattaaattaactcgtaaagtaaaattaagtaccgacctactactaactaaccctacccttcgtaaagtaaagtttggttcgtcggtagggacgacttagttcgaccaacgacccgaaaccctaaaaggtcggacttacgtttccggtaaaaacggaaaaacgaaaacgtaaaaaccgtaacctaattaggtacggaactagttggtaagtaagtttggttttttcgtttttcctttcgttagtaccttccccggttccgggtcgtacttaagtacgtacttttaggttttgggta

SEQ ID NO: 179022 - DNA, 1966 bp, Cannabis indica
tgtaatctagcaccagaaaagaggctaggatatcaaattaaacagacatagttacaagatacatcattaaaaaagaattttttttttaattgtaaatgtgtaaacgttatgagtagaatagctctcatgtgattcagatcacatattataaagttaaatccctttcttatgtcatacatgataaatccatttttgtttttgcatatgtttgctttcaagtagaatatgcgtcatgttgtaaaatttacaagtgataacagctaattccaatagatcagtgtgatattttaagtaaatgagtggcgtgagtatcatccactactgcaaaggaaaaagatttatggaaatctgtattcaaatggagcgtgatcatggatttgacttaatcttcctcatccaaaggaaaaagatttatggaaatctgtatttaaatttggaaaaatgaaatcatgaaaatgtataatatcaacattttttcgttttcttttttttttttttttttttgtttgcgggaaggaggagggaggaggaattaatgtaagaacctgacatccgcctcgaattgcttccataacaagatattttaattggtccttactgatggtaacatcttttaaatactcccttgccaaaatgatctgcagagtgaaaacatctacaatcagttattctttatttgaaatgaattattgttgcggtgtgataaagttgaaataggaagagaaacgaatgaagaaaccaagtgcttgcaacatatataattacaagttaaatttataattgataaagtcattattggtttgaagtaagcctagtactccagttgcttaaaaatagtgtcacaaccattgtcgaattgagctagtccacaatctaaaatgcaaaaccactagtttattttatgaatacctgagttttggcaacctctgtttcctcctcaaccatcttataaactttattactaaattcctggaattgagttgcaattccaacagctgcaacacgatcgtcaaaactcattggaagatctgcactgcagaagaagtgtgtctttagtagaaagagaatttatgtaagaagttaaaaatgagaatctattctttaggctgaaaggtgtgcacctcaagttgattgcaatccgatctaataaatgctcacgcacagcaccctcttccggattatatgtagcaatcaagagtggtttacaagggtgtcgaaagctgataccctctctttccacaatattaactccttcagtcaatacattaagaagcaaattactaataccctcatccaagagattgatttcatcaacatatagaacgcctctatgagcttcagcaagaaggccaggctggaaaatggtcgttcctgattttacggactcctcaacatcaacagacccaataagtctgtcttctgttactccaagtggaatctgaaagaccaaaaaggagggagatcatcagtatttttgtattgttcaatgagaaaattgagtgggataaactgctgagacataaagagagcagagagaatgcaactttcagtttggttagtgagacaatctcttgaaacccatggatgtaggtcaccttggcaaaactaaattaaaatccaggcgagacctcgagatagactgtgctcttggttgttgtattagagtgaatcattccatttttcgggtttacctttaaactaagacaagaaccttgtatggaaggactaaagaaaaatacctgaacaaatggagacctgacaacttgagtcttaatattgccagcagaatcatactctagtttttcagctagatcatcatcccaccttgagaatcacaaccaaacaatcattatcataagaaaaaaaagataacttccagtaaatttcttttttttttttttgaaacaagattaagatgactaaattataacaaaaaacaatgaaagcttcttcaaacttatgttcc

SEQ ID NO: 179023 - DNA, 1293 bp, Cannabis indica
gagtggcgaggaagacaagaatcgatatcgatcaagcatataactgccagctccattgattttactcaaataccctttccttttaacctcaatttacttcattgtcctacttctgaacacaaacctccactgggaatttcgattatagtcaaagaggaaaggagtttatcaacttatttaatttgcaaaatctgcggcagtcaattctctcttgagtctcattcggagtgccaatccggatgtcatttttctaatggagactaagaaaaatgcatctgaaatggaggacatttggattcggttgggtttcaataatagagttgatgtttctgctaggggtttatcggggggtttggcgttgttttggagacaggggtgggatatccaacttttgtcttcaaatttcaataacatcattgttaagtttggtgcggataggaatatctctgattgggtaggatgcttcacctatgctcctcctcgatgggaaaatagagaggctttctaggaaggacttattaccactatggaggagttatcctccccttggatggtgatgggagatctgaatgcgatactcaactcaaatgaaaagagagggggaagagagtggagggtcaaggcttgagaaattttatgttccatacgggggcggttgatcttgaagggataggggtgcttttcacttagactaatggtcaaaattgggacagtctggtgcgagagaaactggatagagtaattgtttctcctccttggatcacgatgttcaaaaaggcgcgggtgtgtaacctccctattagacattttgaccatagtgcgattatcatggatactcggctcgagcgggagggatttaaagctccgttccgttatgtggatgcttggagtagagatgcggattgttggagagtcatagaggaagtctggagggaagccgtgtggggctatcatagcttcgttctttgccgcaagctgaagttaactgcgaaagcattgaaagattggaatgtgcatgtttttgggcattgtcaatcaaaaataaaggctttggagaaacttttgatggaggttcaaaacagatcgcactctcaagaaaatgtggagttggaagcttcaattatgcttgaattgaatgaaaatgaaaaaagactcgagtcgatttggaggcaaaaatctcgagaagagtggcttaaaaatggggataggaattcctgcttttttccatgcttcggtggtagtcagaagaaaaaaggaattttatttgggccattgagaatgaggatggccagt

SEQ ID NO: 179024 - DNA, 482 bp, Cannabis indica
gataaaacaaacacattaatgcttaaaacttttgtacaacatccctcaaaaacaagtgttctattagaaaaactacgtacacaatctgattattaacttcatttaataatctcagctgttatataacatccaattcattgtaaaaacaaaaagtttcttttttagatttttacaacgtaataactcatctattatatttataactatataatcatactgcactacaagagtatataaatcctaaaaaatggtatcaaaacatcaatatttttcaatgcattagaacttggtgactgaataagcaaattatgtcggtaagaagattaaattttaagtatgagtttcatggtttttttttttttttttttgtaagcaagtttcatggtttttatgtctttcctaacaactttattagtagttatttgtaaggtataagaatgtgaagcgagatgccttaagacaaataagaaaatagagatgtc

SEQ ID NO: 179025 - DNA, 676 bp, Cannabis indica
gtaaaatatttccaacaattatttccttatttgtgcgcaagataaaaagggaaatcgaagtggcttccaggacacgctttctcacccttccgacatcacggtactagacctgcttttggacacgagctgtcactcgcggaaggtcattcaatcattgagctgaagtacgttcctagaaggtcttgtctaggtgggcctgacccactttattatctttagggacccactagtgggcctttgatgctaacctggattccacatgtcccttgccagaaaggtggataacacccaccattccacaatattagattcccaaaacaaaagttgtaagaatcatcttttctgagaaactttaacgagtgaatcaaagaaactaataacatgaacaagagtttatgattactcaggatttaggctgatctactatagatcattattataatatgaatttggtctttataataaacgacaagtttgatgaagacaactttattcatatcggtccttgtcatatataatctctattgtatacaacacattcatttagatgtcatactacatcagctatcgaaatcaagattgcttgcgccgaagaatgggcatcaatgaactgtactagcaaccattagttaaagattcccaaactttaatatgttgctaacttttttattcatgg

SEQ ID NO: 179026 - DNA, 1659 bp, Cannabis indica
tttcaaattaattaaataggaaaaaagaaaaaaattgtcagtacaaaagacacatttcttatcttaaacaagacagaagaggcactacgtgcactgtgtctagacacagttcatgtgccccatacagtgggagtctttattgcttttatctttttggattaattaattaattaatacaattcgataaatgtttgaatttaaaaagtagttaaaaatattttcagttggttgagatattccctcaaaataattgagatattctcttaaagttagttaagatattctctcatgtagttgagagattctctcatcaattatatatttttttgaataattaaatataatttaattaattgaatgttaactactataaatataagcctaatttgaagaatcggaacacttattttttctatactatttacaaatacacttagagagaagagaaattatttttatctcaagaacagttcttccttatgtgttgagaattcaataagaacaaattatacactttatcctagtagcccacactactccttgtgttgtgtgtggtggatcgaatcggaagattggattcaacttacgagaagttttgagaataccctgatagtcatcaagagatatttatttcttttatataatttatatttcagatttaatgtttatacatacagtgatcctttaagatataatacaatgataatcagattacaataaatatttgtagcgtatgtatatttagtatataaagtgttctatgtaccagaaatctgagttggatctaactaagtccaggtgttagctggcatctctcctattaactaccataaacaagaagaacctataaagtccactcaaaaatagagcaagacatttcagctcaaagttagagagataagcacctcgcaggattaaagagagagagagagagagaaagattgtaaaagaatttgaaaagtgagagtttagggattactagtcaaagctgtgacatggaatcacctccattgttatactcatatctatttcttcagtggaaagaaagcaagcttcatgaggatgtagcctaattagaattgggggaacctcgacaaaaacattgtatttgttccctcttcttctatgatctttgcttttcttttctattgatttgcacatgtgattgtgtttaccatagaccaaatttattcttgatgatgaacccacatttacattttaaaaatactgcaaaataataaaacatgtcgtgtcaatccataaaaaaatataagctataactgtaattttgttagtttgagtccgttaacttagataatcactatgatgataacacatgtcaccacttaattaagtcatttcatcaatatatatgacatagcccaatcaaatagtaacatgtgtcattctagtcattaccaaaagttaaccattcacagaaatagaattacaattttaagaagtttaagtagttatctcagccaattctaaacatatataaagcttagctagttatgctcaaaatattcctattctttaatttccccaactattgaagtgctctatgctcacaaactgtctatcattcatgctaactattattaattcccagtctcaaattttctgattcatatataatcaattgtagatgatcgaaac

SEQ ID NO: 179027 - DNA, 769 bp, Cannabis indica
tgacattgtgtacagtactctgatcgtgagttctctaatgagttagtagagaagatttgaaagtttctactttagagttttgagattagtcaaaaactgaaaagtgaaataaaatactttcaaagtgaatttggaatctgagtgtgtagcctacttgtaaaattagctggttcctaatgtacacaggtttactgatgacatcattccaaatagaatttccaaacaacagcaattccagccactaatataattttgcgtatgagctttgaactgaagaaagacgattttgtggaaggtgactctgctgtttctaacggtcttcctgtaatcttggaagacaactttgataagaacggagatatggggctggctttcttcgaatctggaaccaaacagagttagtgaactaccggtacaacataaacaaaggaaaattctcgattagtagtatgattttacctttgttctttaaaaatcgctcttcttcagcaacgcgacgacggagtacatttagtaaagatccaaaatataaggcgaaaactgtgcatgtaatggtgatgacattgtatggcatgctaaaatctggagtggttaaagggacaagtaatacttctgtgtaagacagaacagtactgttttcctacattacaaatccataaaaaaacaaagtaaatacaaaatctaatccaaagtagaacatgtttactataaccaacataatatttttgagctgtacctgaagttttgccaaaataggtaaggtctccaa

SEQ ID NO: 179028 - DNA, 821 bp, Cannabis indica
tagaatttccaattgaagggccaagtgagtttgaatcaggtgccaaaccatcatttgttactattgttggaaacaatagcaaagatggatttgaagaagcatcgattgaagccagtgaagccagtgaagctaagaaccaaaatgaccggccatctactggaaaagagtgcagacattttaaaacaatttgtgccaacatgttacttctgcaatagaaggggtcacataagacctcgatgttataagctgcaaacatatttgaaaaatatgattcaaccgtaaggttcattctcacagtcaaattagaataaaagaaaatttcctagagtgggttggagatctaagtttgaaaatctagctttagtggcacacacattcccattagccatgataaagatgagtggtaccttaatagttgcattttatttattttttgtgtatacattttcttaatgtatacttatcgaggactaatctactatacttttgagagactaattgaaaagtaattacatagatatcaataaaatttaagagtatctataattttagcttgaataattaaaattactatacttagatccaactagctttaaattaattaaatagattctcttactctaattatatgtgtgtctcctagccacattaacaaattatctcaaaaaataagccaaaaaaaaaaacaatggatagaaaaaaattgtaattatcttcataatttgaggataattttttatataaaaaataataatttggaaacaaaactttaccaatgtcataattctaggataagttatatgtatatatttttaatgagg

SEQ ID NO: 179029 - DNA, 759 bp, Cannabis indica
atgctgcatgggaggaagcgtgttgggactgtacacgcaataaagtctgacggcacatcccccaaacagcagcgctacagtaatgatcatttaagtctagcgacggctactctgcgaagagtcacgtcaatcataagacaaaaaggacattctccataaaaaccctacagcacctagggatttgaccatgcatcacccatggtatattcatcggaaatgcccaactttatggatacttacagacacatgtgtaagtacaattctagggattgccccactaaaacactataaataccccctcaaagctcatttaatggggtcggagaatcttggctgcttaagagcaaacagagaaaaaactcaccaagaacattctttgtattaaagagagaaacattctcccaagtgtaaaatctgtattaaagacatccataaatatcagtggctcgtggactaaggctcattaacgccccaaccacgtaaaaagtcttcatctcgctttcttacagctcattattatattcatattttattagttgccgaaaacctcggtcaacatatataaatatacatatttacacacaattaatatatattttgttaatttacacattaatattactgagagcaacatcacgactactctagactctaaattaaggatgacaaaagtttgttattttacataaagttattaataaagaaaactgatttcacacgatattcattgtttgtgaacacattcaactacacagtaac

SEQ ID NO: 179030 - DNA, 724 bp, Cannabis indica
ataattttctattctcaattacttgttaaaaatgagtatctttagaacactcccactactttttctactttattaaaattctataatctatgcatcaatatcttattatatttttatatcatataaataatatatttatattttatatttgggatatttccattaaagaaagattctttataataatttaatagattaatgctctgtgtatcagcacaattcgcgaaggtttcaaaattaattttttccagaaattattgctaaaaaaaatttaagcaactgttaaaaatcataaaaaaaaaattagatattcccagtagtactcacttagttaacgaaataggcgacaattttaacataaatccgtaagcaatattatatcagataattttaaaccgtcaggtataagaccaataaaatattcatttacctccaccaattcccctcagacctaattagctatagcagcctaccatttcaccaaaccccacgaaccatctagcaacgccccctctcgtcgtcaaacccacggaccaagatcggtccctcgtcgtcgtcaaaccccccacgaatccagaccaaccccctatcattgtcaaacccccacgaacccagaattagtaactttttttttattatatatatatatatatatttttaaaaaaactaattatataacccaaaccagaccctctatcgaagagtttgtttcttgtcactacaa

SEQ ID NO: 179031 - DNA, 720 bp, Cannabis indica
attgttgtttcacgacctagtctctgtgccatcataggtaaatcaggtgtgcactcacctgtaggtgaaagatctagaatctatacagggagtgaattaaatctgagccctgatactatggtggatatctgatgcgactacccagtttcggatgtcattttgtatgattggtattgagagctaggggtctagtggacgatgtgatatgcatttgacgtttgatttgtgattatttgtggtctctatttatacatattgatactgatgatgagatattttatttttataaagctaaccatgcaggaattttattaaaccaagggtcctttgatattagttgttttcctactgggctttataagctcacccctactttctctcattccacggaactcagtttgtatgctagtggagtgaggagtggtaccggttagggtaaagggaaagtcgttattagtttagttcttattctacttctttaacctactctaatgaaactagattttgttatttaagtctgaaataggagtggtcgtagatgacttaaattactctatgtactagttagaaatagaggaatgatggatgctaggtagttattttggttagttttatttgacttatttaattctatctatttagttgattacataactgtggggagtattattgttcttttattactgatgagtggtcctgattttgtttactaatattttc

SEQ ID NO: 179032 - DNA, 908 bp, Cannabis indica
gggaattaatggtgaagaaggcgatggtgggaataaagaggagaaaacacttctattaatcataaccacagcaatacattcacacaaacacacacacacacacatatatatatatatatattaaagatcgtaaggaaaaaaaaaacaacaaaaaacttacaataataaactcataccacacaatcacatccgaaatcaaatgaaaaatacaataaatacatattccaaaaaaatgaaagagaagagagatgagagactacctaagactgaggaatggtggaagcaggtggtggcggcgacttcgcctccggctggaattggaaggagtgcgaatggtggtggtggctccggctccggctgctgtgttggatcgatagagatggagctgagagagaggtttgctgcgtttagggttaataagacgaaaaggaaatgaaatttatatcgttgaatccttttattattattattattgaaaaaatagtaataataataaagaaaggaatgggtcaaatgaataaacaaaataaaatatatttttaatttcctattatattattttattttgtttgtagataagattgttgttataattaagatgataaatcatttacaacaataaaatttataggcagagtgttgagaatcatggagtttcatttcaaaatcaattggcaatgagtagcccatgttcttatatatatagttgaattctctaccatttattccatgtgggacaatgtccacaatattcttcctcaagatggtggctattttttttgctcacccaatcttgaaccgtattagagtggacatggtcactatctgtataggtgcagatcggatatggctctgataccatgttgagaatcatggggttccatctcaaaaccaattggcaatgagtg

SEQ ID NO: 179033 - DNA, 1318 bp, Cannabis indica
taagcaattatgaatccgacatttgggtataaaaagtgccaattgacaaccatttagataggcaaccgagctgataactcaggcatattggttaactggttggataccagttgatgacaccccactcatacgggatacaaaaaggggggaaatatccacataacccatacaagtcgggatatgagccagagaaacatctgaccaactactcccatgaaatccaagttaacaaattgttcaatccgaggccacaaaattcaactatgggcaacacagtagacgagctggttctgtctaaccgtaatcttagaggagatggttagtataacttctgtccttatacatctatactattcacaatgcccatatcagaagacccctaaatgaatcagtcttcaatagattgggatccgtacatgatctaagggaagatttaaatcacataagagaaagtcgggacagacaagcaatccctcctaacatccaaccaatcaatgtagacaattacatgcctggtaaagctctaaggggtccacatgtgacataggttggtcaacaggtaggtcaagttgatctagtggtgcaagcccaaatagatcaacttaagagcctagtccaaagcctgaccggcctaaaattcaccgacctaaaacttgactggacaaggagatcaccctttccacctcacatcaatgcccttgaactattgcacaacttcaaaatgcccacatggaggatgtataaaggcaaagaagatcctctgtctcatatgaagtgttggaaattattttaccaggatcttagatctactcacaagtatgttgattaacaccctaaatatgaactttctaaaacgatgaaataaacacatataaagtttaggaaaccttacattgggtgcagcggaatataatgactccttccgttcagatatctagcccttgattcctttctgtagcagagcattatcaatatctgaacctggatctctttctctgaatctttgatgctgaaactccttcttgctgaaagtctttcttcacgatcttcctcactatgattgaggtatcacttgctgtgtgtgggcactactcttacactaagaatttcgaaattcaagagggaagagaaagaagaagtggcagctaaagatagggagagagaaaggctcaggtttttctctgaaggaaaaatagaaaatttaagtgtgtaaatttcctgaagccttcactatctatttatagcattccactagggttaggtttgaattatttggcattaaaataatgaaaatatcagagggaaaaccctacaaaag

SEQ ID NO: 179034 - DNA, 744 bp, Cannabis indica
gtattttattatagatttatctttgtaatatttttgtattccagatatcataaatgaaactccttgcattaggagtgtgtgtgtgtgtgtgtttctccttatataaaccttactctaagttgattttctttaattttgtaatgttggtagtcagatatgatgcaaaccgaaaattgacatggtgacagacttatctcaaacagaaaagaaattcttaaagcgcaggtatcatcacccatatgatcatctggcttctcttgcacatcttcctctctatatttttctaacctgcttgcggcatgatgtacggatattgttaatctgatgcagatattaccttgtggagaaagcaaaggatgctaacattgttggtattctggtaggcacacttggtgttggtatgctctctcaatttttttctccttttattttcttcttcgagtggggttattgctctcatttgttttttttttcttatcttgatgagcttgcttgataaaatgcaaatgttgatgcagctggttacttgcacatgattaaccaaatgaaagatttgattgcggcagcagggaaaaaagcttatacgcttgttatgggaaaaccgaaccctgcgaaacttgccaactttccagaggtaagttttgtacatgcaaactggtaaactgtagtcttttctcttgggagaagtttataattcttttgataacatatctccatacatgactgttgcagtgcgatgtcttt

SEQ ID NO: 179035 - DNA, 727 bp, Cannabis indica
gtgtgtgcgagccaacctcagtggaacgatacttgacaatctcgggtcctatgtcattacaaaagtaaatcaataaggctctattccaaaacactgtctaaaacacgcataaaataacctagggttttctacccaatattatggtgaaaacaccctaaaataaaatacatcttttggctctaatctatttctcatactatagagctcttcataagcttcgaaaaggtatatagaatttctaaaacggacacccgagtgaaaagttatggctaaaatatgaaaaatcggggattcttgaaaattgaccatccagaattccggttggtgcagccctaccatccggaatttcagttcaccacaacagaaactcgaaaatttcagctcttcaaagtctcaaaacttgctccaaacctaaccaattgttcccaaactatacagaacagtataataaccataacacaacatattccaagctttaaaacacaataattcaatctctaactcaaaatcacatgttcaagtgaagaaaacttaattttaagcttcatccaatgcaactcaagtcaaccagccccggaaaccacccaaatcaatttttagcatactcaaaaatcttaactaaacataaccctaacttacttaagtcctacagctactaaaacacaaaacattactccaaaaccaattaaatcttagacaaagcatgaacttaccttgattgcttcta

SEQ ID NO: 179036 - DNA, 1220 bp, Cannabis indica
ttatagttatttaagaaatactgcaaaattttaagaaaatttggaaaagtttaacacaccgaaaattatgttcaaatagtatgttgcacgcgtgactattttattttatacgcgtgtaaaatagactgtttgaacattgttttctatattgtaaattattccgattttttcaaaattttgtagaatatcttaaatagctataacgtacatgaatatgaaaaaaaattagactgaaaaattcttcgggatgccgaaacaagttaagggtgcatcaatacatctcttttaagggggtgcattgtagaatcaccgaaaattttttatttcattcaaaaatatattatttattttatttcttttctatatcattttgaatgagacttagcacccttgaataatactactagtaaacattctcggcttcgcggcggatatataaaatattttaaattacatataaaaaataaattgtatattttaattaattataattacttgataaaattatattaaaattttaattttagtattaaaacatttgtgacataaatattcaaaatattaaatttgttgtctaataaatatcgaaattcgaaaaatagtaacataaatcctcatttatagtttaatttttatgttgatgtgtgttaagttctgggtaccaattttattgtgtttgtttttaatgtttgagttttagtggtttactggggttcgtgatatttgagttttgtgtttatgtagattcaatttttatttattttaattatttacttatttatttttattagattttgtagaacttaaaatttgtaatgttgtttctattgattattgggattgaaatagtttgattttttatacgggaattaaagtttgccttttcgtttcattgactgaaaaatattagtagaaaatgtatggaatgagaattttgaatatatgaaaatagaattgaaaaatagcatttgaatcgagaattaaagtttattgttaatctccttacaaaaaaaaaacgtttagttaatctgtaaagataatatggctggaagaagatggaaaaagttaatttttaatttttctatttaatatgtatataatgttttttttgtaatattttaattatgttatattttaattattattgtttttaaaaattaattttttcctaaataattattagtttggttcaatgctatatttattatgttgtcacttta

SEQ ID NO: 179037 - DNA, 749 bp, Cannabis indica
ttcagcgaagtgaaatgagtactcaaccatttatctctgtttagccaagctcgaaggatatcatcgtttcacttctaaatacctatagaagttatagattccatatctatgttagcgctcccactcaattatactatcatgttcccaaaatgtacgtatcaccctgacccaaaagtaggcttaactaacaaatcaaagaacatgtataatactcttgagatcgaacctaatcatatcaggattaagatcatttgatctaggatcaactaggtgatattgaattgaatagatattacggtaaattttaacatatctaatcaaagttcaatatcggtcccttccgatgtatactccatacatccgatactggtaaactttgccaatgccctggaaaggacataacacttatccaaggtgtaagaatacctatcgctgattatcatgccagtctaaatccagtgaactgacaaatcagggaataaactttcgaacatataatcaagattatattccactgtgctgacaacactataatcattaacaaattcatatgttctggacttaaatagaatttatacattatatataatcatgaaataaatcatgtgaaccatgcaacataaaatgttatttctgatctttattaattagtaaatctgattatattgaaatgagtttttatttagggcacaaaacccaacaggttatccttggaaggaagccacggctgattaagaacatgtatgaaa

SEQ ID NO: 179038 - DNA, 958 bp, Cannabis indica
agtttaaaaaaatattagaaagttgtattttttttttttgttcttaaaattttgatttctaattataaaattgaaaagtaaaaacagttttatagaacatgtttttgaaaaatattttcacttttctacttttaaaaacaaaaaaactgattaaaaaagtgttaccaaacgccaccagaatatataataaaaaaaaactaaatttcaaaaatttatacctgaaaaaaaaaactctaaatttaaaaaatttatacatgacaaaaaaaacaaatatatatgtacaaaacttatcatacaaaggacccagcattaaattatataaaatatatctttaaaaataataatatatcaccttaagattggatggatgtaattactataatgtttgttttcaatttcaacattaaggtgatttaatataatatttttttcccaaacatgtctctatataataaattttgttctttcccttgttttttccccctatgacaaaattatgcatttttcttcttttttgtgttttcaaaagaaataagcaaacaaaaaacaggattctaatatcccaaaatttacaaaacattgccttaatatatatgtattttcaaaaatccttttcattacataaaaacaaaataaacttcaaagcaactacaaacttatatatgtacatagaattaatttacattaatgaagttagtaattaataatctggtattataaattattctatcatatgaaacaactaaaaataatgtttatcttaatattctatgtcattattattctcaaccaagcttctatgatcatgagctccattaataatgatctcaccaaaatgactttattttcctttccttctttcaatccggatagttgcataaatggtgacctaatttgcatgggatcagtgagcataggtaataataataataccaataatgggcattattatttgaac

SEQ ID NO: 179039 - DNA, 1183 bp, Cannabis indica
tgattattttgatacttatgctcatgttgctagaaaactaccacaacggagttatttgcattggcttcattacaacaaacttagtatgttcaccaaatagtatatagaaacggtattcctaaatggtgacctcgatgaggaggtctatatggaataacccgaggggtttgtcctaccaaataataaacataaagtgtgtaagttgaaaaaaaaattcttatatggattaaagaaagctacgaaacaatggcatgtcaagtttgacaatgctattcattcaaatggctttaggcataacaatggagacaagtgtttgtatttaaaaacttttaaaagttatgcgatgattgtttgcttatatgtggatgagatgttaatccttagtgataacatgaaaggaatagaagaaactaagagatttcttcttcaacctttaaaatgaaagaccttagagaagtagatactattttgggtatcaaatttacaaggtatagtgggagtttcgctttaaggcaagaacactatattgagaaagtgttgaataagtttagccatctaaaggctaaagagtctaacacactattcgatcatagtaaaccactatagttaaaaatagtggtagagcggttgctcagttggagtatgaaagtactatagggagctttatgtatgctacccaatatacaaggcccgatatatcatttacggtgagtaaacttaataggtttactagtaatccaagtatggatcattggaaggcaataggaagagttttgggttatctaaagaaaactaaaaacatatgccttcactactccaaatttccttcaattttaaaaggatataatgatgcaagtttgatagccaaccttggggataatttgtccacaacggcttcggtatttaccctagatggaggggcagtttcttgggggtctaagaacaaacttgcatttctcattcaacattggaagtggagtttatagctctagctgccactgggaaagaggtcaaatggttaagagatctcttgattgagattccaattatatattaaagaggatgtatctacaatatcgatacattgtgatagctaagcaacattggctagagcatatagtggagtatgcaatgggaagtctagcatatcagtctaagacatggatagtgtaaagtgagttga

SEQ ID NO: 179040 - DNA, 572 bp, Cannabis indica
cgaagaaaaacgtcgtcgtttcgaaggttgatgcgttggagagcagatgacttaagggtttgaggcaaagtgagaccaaagagagaggcggaggcggtagaatcggcaaggtcgaggagctgagctccggtaagggagggcggcaaggtgaggtcgaggggtcggaggtgggtcccgtcgaggaccgttaagggtccgtcggacattttgagatgcagagaagaatgagtatgggtgtgatggagtaagaagttgacttgagaattgatcgaccagcttacacttttttctcctcctgttttcttttttgaactctttgtaatgaaacgacaaacgagttttagatttctaatgtcaataaaagaaaaagaaaataacaattattatcttaattttaaaagaaaagagtgtttttcttttaaaaatattattatttttttttttgtaagaaagtgttgaaattttcaaccgtggaaatttcgaaagcatttaaacataacgcgtgaaattcttaatcaatttgaaagcaaaaaaaaaaaaaaaaaaaataacaaaaacaaaagaaaaagaac

SEQ ID NO: 179041 - DNA, 852 bp, Cannabis indica
aatgaaaattaatatatataattaggtgctatgcatgcaccatacaatacacaaatctttattttataaaagtacaaaaaacgacccgtaaacaactagctaggttgtgctgggtttttaagttagtatatatatatagtgactcatattaatatttatttaggtttatttagtagaaagtattcacataaatgggaaaataaaatcagggcagttgctcgtttttatggtaagaatatatattgacctttcatattaggtttttaagaagtcaacgtgaaagagacgtgtgcatgaagaatataataaagtatacatatggtaatttttataggttagatcgatatcatacattataggttttttcaattaattttttttattttttaaaaagagtttgtgttgtgcccatttgtcgccgtgctttttggatcccattacgttatttttaaataggttattgtatattagaatttacttttgtaatttaattagttttaagttttttctttttcctaagaaaagatttggattgtgataccaagccaagtaatttaatatttatatattttatagtaataaagtccaaggggttatgattttggcttacgagcaaagtctgagtgggtcctgtaatgattaaaatcgggtaggtttaagatggtggaattggccgggcagccctcaaacggtctatttatttaggtgaccgctgccgaagtgttctttatttttgtttggaatctcttgggagatgatgagagagagcattttgatgggtaaagtagcgtttaacaagattgagatatatatatatatataaggatgtgatgtgagtggggcgataatata

SEQ ID NO: 179042 - DNA, 542 bp, Cannabis indica
gagacaccatgtcccaccagaccagagcgtcttcttaaaactgaaaagtggcacacaccactctgtcgttaccggtgacacccatgaagttcagaatcttggtgatcaccgtcagccactgctcggctttcatcacgtccggacctcccaggaaaaccggaggtgcttgcttccggaaccgctcatacaaaggttccaatctatgggccgccaccactatctcggcctgggcagcaggggcaggtgccactggaactacgggcactggaactgcaggagcaccctgctgtctcaacctctgaatctcgaggtcttgctcttcgatccgggcttgcatttccgcaaaccgtaactcccaattctgggctccctgatcggctgggggagcctgggcagcctgtggcgggttctcatcaccccggccacgagccctgcctcggggaccgtctacctcggcccctacgcaggtgggggaaacgtgagctccctcgtccctcgattcgaccctaccggagttgccctcgactcctcggtagtccgcc

SEQ ID NO: 179043 - DNA, 843 bp, Cannabis indica
aaagctatgattcaacgacacgatgaggagattcagaggttgaaacaacaaaggtttcctgtactatctttacctcatatcgccaggcattctcaattcggaattaccagcagagcatagtatggctgataatcaaggtgggatcattgcagtgggtaaaatttggataaatgaacctacagtccttcagggagattcagatatgaagaatgctctctggactgggagaccctaaagaatgttattttaagacctcaagagattatgccacgaaatcgggataccgcttgccatatttctagttatggcagaggtggtaggggctccatggttgagcagaagagtaaacctacgacgtcagtggtgggtttaaaacggaacaagcggttccgaggaaatcaaggcaagggtgtacgcaaggattattcttaccctgagtgcccgcgatgcaagaaacatcatcccggagagtgcaaccgaaaagcatgcttcatgtgtggcatggttgggcactttaagagaaattgccctcaggcaaagaaagataagcagaagctggaagtaaagcctgtacttgctcagacaattgttatcactcaggctgatgttgcatccagtccatctatggtgaaaggttagcttcttatcaacaactcccatttaatgtattatttaactttgggaactatatactcgtatgtagtatcgagagtatttaatcttttggtatagactttatgattttctttgtaagagggtttggtaacccgtaactgcctactggggaagttggttagtctctaatagacgtattaagtctatgccggttaggagtcgaagata

SEQ ID NO: 179044 - DNA, 662 bp, Cannabis indica
agttactaaccagacttatccctaccgaggcatcaaaccgaggttgtggttggaggttcccgttcggtaccaagggtggaccaaattgagtagattgcccattgcctatcttcttacaaaggcctcaaatgatgagacttctagtatgcattatggccttccatagaagagagtctcagttgttaatctcaatgtccatgaagcagcgactctttaagtacttggcttccacaacttaactctatagactatcattatctgttagaacttttcatacccacttcattaaaaagccttgttgttgcatcgattgataagaatcccaatcctccacacacctttgggtgacatagctttcccaagcgaatgtatgcatggaccttctcccatctgaatcacgccaccaaaagtctctaagtgctttatccacctcattagcaatagttatgggaatgacatctaaggacgccacgtagttagagatggtcgagccagtagactttatgaggcacgttttccctgcgcttgagagaattctagctttccacccatggaccctttgcaggactttatgttggaaattattttaccaggatctagatttactaacaagtatgttggattaacaacctaatatgaattctaaaccaatgaaaataaac

SEQ ID NO: 179045 - DNA, 1181 bp, Cannabis indica
gtgttgtatttttgagactctgttttgccgcttaggtcggctaaaagaaaaggacttgtaataatattttataaatgtttttgggatcccaactactgtaacttttagtttgtaaagtttaaagtattacaagtttattttcatttttattgttattaaagtttaaattctgtgctaatttttattagtaatcccgtttaggggattggagtttcataagtattttaggtagcgtgcctaattatttagggcgttacagataagcacacaacaaaaggaagtcacatttttggactaacgcccactactctgacattcctccaacaatctgacgactcatgcaaggttgtcactgtcaatagtatgtccgcgtacgggcgaaggttaccaacacattggacctcacctaatcggcccaaaaatcattatttaaatgtaatttatcacatcagtgagatttttccagtttacacaccctaatgggccaagttagcccaacccattagttaaaacacctataaataatgttttatcccttcatgcaaagggttaccagttttaggcagtcatttttgtaatagaaaaaaaagtaaaaatactctatagccagagtttaatattattgactcgtggactaagattctttaacatctcaaccacataaaaaatctcatcttatttaattcttaaatataatttctttagctcaattttattttaatttaatttttaaaaatttcggtaaacattattataatacacgacttttaatatttataataataactgattttcaaaattaaataaaaaaatataaaataatcacgaacataaaatacattcataggtagtgataggcaaatcaaatacttattatacattatacaataaattgaaataatttcgtataaaatgtataattcatacaaaaataaattattaggtatttatattgatagtaaatatatagggacccgattttgtcccgtgatagtaaataagggaatacaatccgtgattgtatagtagccataggattgtgttgttgcatgatctgtaaggctgggattaaagtaggggtagttaggctttataaattggtaaccggttgatattgtatttaataattattattttttaaaaagttgatattgattgatgtactgacagatactattttt

SEQ ID NO: 179046 - DNA, 788 bp, Cannabis indica
cttttagcttaaaacataacaagtgaaagtgaaatccaaaaaaaaaatccaagaaaatgaaatccaactaattgaattaagactcaactacaacagaattattggacataaattgtatagtagtgagctgaaaaaccatataccaaatagtcaagtaataaatggaatcaaaatgggacattaagaaatattatggccatgtcttcaattaagtaatgaaagcaaaagggggaaaagcaataaaaacaaaaaaaaaaaaacaattttgtttttgaaaaaaaaccaaccatgaagttccattccatctagtctcaactttatggaccatcaacagtatcaacctattattcaatacattcaaaaatagataataaagaataatatgacatcattaaagacaattcacagaaaggggccagaagaagcacaataactagtgtgcaagcaaggattgaattgaagtgattcaatcctaaacccaaataagagcaattatccctttgttcattaattattaattttaattaaagaaacaattaactggttccccatttaaactcctgacctcttacatacaattacacacataaatgagtttcataattagggttaatcgagctggtagaacttaattccataccagaaaagaaaagaaagaaatcagttactaataccaaaatgaaggctcaaaatccagcatatatcatcaacaaaacaaaaaataaatatatatatataacgaaaataggttcgaaccttagtacgaaaaaatcaaaaccacaaaaaaa

SEQ ID NO: 179047 - DNA, 586 bp, Cannabis indica
atgtactgtatgtcgaactggcctaattccatggcccactgagagccttcctgaggccttggcttttgaaaacttgccaagcagtgatttgaatacctgatggagtgagcctaaaagtaaggcctgaactttcttggggcaattaagagataaaagctaatttttcgatcaagggatactgaatttcagctcctatcatgcgtttgctgacataatataccgagtgttgaagtttttcctcctcccggaccacagctgcactgaccgcgttctcaaatcggctaaatataaatataagtcttctccatgaattagttttgacagcactggtggcttagccatgtgttctttcaactttctaaatgcctcttcgcattcttcagtccatttaaattattgacacttcttctaaatgttgaagaacgggacgcacttgtcggttgagcaggagataaagcgactcaaggcgacaaccttcccggttaagctttgtaaatccttgtgtctcttcggggagggcatgctcaataaggcttgtattttttttcagagtttgcctctatcccgcgctgactcgctatgaatc

SEQ ID NO: 179048 - DNA, 742 bp, Cannabis indica
ttttttatttcaataattatattagtttactgaaatatcatttatcaaagctaagtgttttaaggataaaatacattaaggggtagaacgataaatttatccctactctatgtgaatcatctatagaggatctttgattattggattataataatggataattaataatttatctatatatgaaacatatagagcgttttatgtaattaggagtgtaatttttaaatctataatggagtccagaagaattaataagatagaaaatttactcggtaaattttagaacttcttattgggaacttgattaagtaggctcacggtcctcgcactagttgagataatattagcttgtagactcatttaattggttttaattaatcaattagaattcgaaattaaactatgtcttgtttataaattttcactaaacaataacttatttgagaagaaaaaaggtttttgagtttatttgttaattatgagattttgtaaaatctaattaataaataagttaaaagataattttatttgataattaactataattattaaatagatcaattttacatttataggattaaaattaaaattatagcatttgtgaaaaaaaggtaagtttgggaagaacaaaaggaaaatttagggatcccctatccaagctcttggaccatataattcaggcagtatgtaagatgtgatgtgacctgcacacaaatcctaaaaaagaaaaaaaaaaaaaaaa

SEQ ID NO: 179049 - DNA, 585 bp, Cannabis indica
aaattcctcaggcacaatgttaacaccctggcaatcaaaacaaacttcagaaattagaataccaacagaactttttttctcgttcattttctcagatgccaaacaaagagtaagtcatttaaagaacagaacaacaacctgaacaccaacagtgttttgagcagtgactgatgttataaccgtagagcaataaacaccacgtgcagcacaagccttaagatcagcttggattccggcaccggcccctgagtcagagccggccacagtcaacacatgaggaacctttatcccagcatgatcctttgccattgggtccctttctctctgtatctccgcacaaatgtgggcctgcttagcctggttggctcttgaattcatcacaaagtagcttaaccctttggattgtgggaatccttgaggcaaaacctgaaatgtgtcaaaaaaaaaaaataaataagtaggccaagaaaattttcaactagatttcttcctcatattcattctcacatttttctcaggtactacacaagcaaaaattcaacaaaacaaacttaaatatatataatttctatcagaaggaaaaag

SEQ ID NO: 179050 - DNA, 739 bp, Cannabis indica
aaacggttatttaaatatttaaaatacaattcaataaattaaaatgatatacaatagctcagatatctatttttctaaccttataatttaataaacaattaaatatttaacaaaataacaaatttttgaaatttgaaaatattatggctagaatattaataaaaatatctaggttaatttcaaatttattaattatttaatttatcatataagataattttaatataaaatttcaaatttaaaagataaggttatcagttaatttaaaatatgtcaaatattaaaatatctgatcttataattaaataatatataaatattaaagaaattaacaaatttttaaaatctaaacataatttaaaaatgaaataatcaatttttaaatttaaactccaaaatattaaaaattaaatattattaatttaaaattgatatttaagtttaaatattttaaaaataatattttcttttaattttagggtttgaaaattgtaaaaaattcgaaatttatggaaaaatcccacaaaaattgcattcgtgggtgtgctgccaacaaggctgcacgtccagcctccagaggctgcaaacagccatatccgcgcgcggaagcaggcatttgcagggtggtgagccgagaaaactcggcgcctgcagcctaggacaagggtgggatgcacggtcgcgggcgaggcatctcgtgtccgaaggaggcctgacggaggaattcagacaaaaggct

SEQ ID NO: 179051 - DNA, 678 bp, Cannabis indica
aggataggctggccagcttccaagtactatgtgtctagccagcatgcactcaggcaagtgcatggtcaaccagctttttttcctggcaggttctcatcggtgcgtagctttcatcagtggacagcaagtcaagcactaaattgttaacaaaaatagaggcaaaatatcagcaacttccctatttttgagggaccatttagccatttgaactttattaatttattatgtaaatactagatttacttacctattttaagggatattataaggatgtaagttctactatataaagagcattagtcaaaccctaactctctaggtcttacactctcaattctaactctcaagctctaagtttaatattcatctcttcactctctctctctctcacacacactcaaaggctggtctctcagtcacttgagagtttccaactccattctcatattgtaatcttaagagagctactacagattccacaaaacttgtgatctgagtagtattatctctggtgtcaatacaattaaaaggagtaggtcattacccactaactaagggggccaaacctctatgaaatctcatgtcttatttacttttctattcttattgtggaacacgtggcaagcattagtaataaatatgactccaccatcggttggacaactctgaggtcaatag

SEQ ID NO: 179052 - DNA, 827 bp, Cannabis indica
tcccatacgaaccaaaaatcaaacaaatatggaagtttctttcgcttcaaatggaagttctttttaagaacaaaatctcggaaccatcagaccagaacaaagtccaattctacattacaacatatttccactattaacgtttaaaaggaaatccgttaagaaagaacggggaaaaaaaatcaatccctgtaaaaagagctagaatgccaatgtagaatagagagaatggcttagaaaaattaaacaaccagataaagtttcaatcttttctttctatgtttcaacaagagaactcaatttggattcaaatcagtatattagcatatttcaaaaccactaacttatcttcttccttgtaaactatttttctgaacaaaacacaggctgatttaattgcattaacactcatcaaagaatatatatctgtaaagatagatgaaaggccgtacctttgagtgaagtaattgtttatcctcctctccgatcagtaagtgaacgaggttaggcgctgatgagttactgacagaagattaagcaataaaatggttggtgaaaagagtgagaaacccacccaaaacaatatcttaccgttggtacgatgttgtcgcatctcaccgtccgcacgcaccttcggattcggattcggattcggattcggattcggatttggatgggttgggtttctgggattcgatctggacggttctcgcggtatgaccctttggctctaccttcctcccttctcttggatagattaaaaggaattttttattggctattttatataaataaatgtatgtatagattattttaattaattacaaaaa

SEQ ID NO: 179053 - DNA, 561 bp, Cannabis indica
gaatggttattcttttaattttaaaatagaataatatacttttaaagtgcaaccaaacaaaaaaagaaaaaaaaatatatttcttgttccattgcaaacagaatctctagttaaatctataacaatctattctctctctaaacaaaaaaaaaaaaaaaaaaaaaaaactactcatacaagccaacatattaaccaattttctgcaagaaaagtacaaaaaaaaaattgagaaaggaattttctcaatctcaccaaacatttttctcacttgtatatttacattctattaaacatttttacttctaataaggaaacatcaatgaatgacctagaagttttttaattacttgagccttctatacattatgtttaatacttgatcagtgcttgtgttataaatctacaacaacaacagactcaactaatgccctgcatttattcaagaacagagcacaaagtggttagcataaacaaaatcatcttaaaatgaaaatcagtaaaagaaataacaccaatgtttatactagctcagccaattttgttaaattatcatatagatta

SEQ ID NO: 179054 - DNA, 702 bp, Cannabis indica
gaataaataaaatttgataccttgcacaactataactaaatttgataccatgtaacactataactaaattaacaagtagattctagctagataacaaaatgggaaatttttaaaatacactcttttatgttttatttatagttatatggcttgaaattttaattataaaatatattgtaaagtttaaaattataaaaatatacattattcagacaaaaaattaaaaaacaactaaaaaataacgagatttcaacttcacaataactataaataaactataaaataacctgaaaaacaatctcatgacaactataaataaactataaaataatcaaaaaaaaaatattttattatttttactgaaaatttgtttttataaataaaaaatttaaaaagtaaaaatgagaaatttttcatgttgacgtattttcataatttatttcaaatttgtagtcttaaatttttccaaccaccaggcccagcccagcccagctctgttcagcccagccatgtatatatcatggagaaaaaataaagggttgggttctatggtactcgaaattccttgtaaatgtaaaaatgcttagtaatcaatttgggctatttacaaaaatgtgggaaaataaaagtaagttttgatatatatggcataaaaacttaattacactaaatatggtattttttaaaaaaacttacaaatat

SEQ ID NO: 179055 - DNA, 648 bp, Cannabis indica
agatctgagtggaaggagacatttaattccgctgcaatcactgtaagttattcttaacttttatgtgtttagttcatcgttttagaagttcaatattaggttgttaaatcaacatacttgtgagtagatctaagatcctggataaatataattccaacaatcccctgcttcttctttgcgattgttgcagagacaagatgagattgctgcagactttggattctttcttgcggctaattaagaatgccaaagttcaatctcgaagggagatatgattactccacccattctcagacctgatacagtgaagaggagtttacactcttcttttgtctaattcaaagaaacagggcaaagttcagattactatggatgatattgcagatgaaatttcctactggagctcagctaccgtctgttacgtcctgggagccaatccacctctctcggtgctggagggatttgctaggcgcatttggaagggcaaggtggacaaagtaggtatgatttcatatggaattttcttaattcgatttacaagtattgctgaaagagatgagatattggctggggggatacatatttttttaaattaagaggcctgtcattatgaaggcttgggagtccaaatctcaatctaaagaagga

SEQ ID NO: 179056 - DNA, 613 bp, Cannabis indica
ctcgggcttttcgcccaaaaaaatctttattgtcctctgttgatggtgcagcggccgagaatgattatcgtcacttcagtatcaattcacgagaaggtatggtgtcaaagttatgcgtacgcgagcaaggaaaggtggtgagtctccataccgtgtttaaccgcctcttgagaagtttgagggtgccacgtgtatgcagaaatcccagtttaaatgttttcttctctcccgataacagttgtcaaataggtgaatatggtttattcaagatgggcatgggtgagttgggccgaattggtagggccccagtgaagctgggcctgcacaatactgggccttttaagcattttcctaataatgatggtgtatcgggctgggagtttattcctgggaatgggctggttaaacactttaatttgagggatttatggaattatcaaaggtgccattttaatattaccttggaccagaattttggtgtccaagatttttttaaaagggcaaagagtatggtgataagtgatcttaatgggcctagaagagaactgaatgtgtggccagaagatgaacccagaacaataataaaggagtttttcatggcagacttcgatcg

SEQ ID NO: 179057 - DNA, 840 bp, Cannabis indica
ggaggcattaccaacagtacctccatgtgccaaacgttgtcggagggcccaatccctcctggctatgtctcagttgtaggccttcccccaggctaggctcatatcattggagtgtcatttgggcctcagaaaggaccttcaactccctcaacaccagaaataggaggatatgaaccatacctctaaaagtttgcctcacaagccagtctgagtatgtccctcctctccacaaggagggatatgatgtgattagctctatccttcagctgaagatgaaaataaaacgagcatatgtaggcccctctaaaagcagtgactgacatatctaatatcccaggcaatgaaatagttatgggagtaccgtcttaccttcgacatggctgtttgtgttacctaacaattactaacccatctggctaaaatagaagatccaaactggccttgttttggaacagagttcacgttaaagaaatacccaatctcatagggtgagggctacggccagcccaactttgcataaaggaaaaagtatcgaaaggtactttattcctttcgaggtgatctaagtaggacacaacccaaagtagttggcaatgtccctaaaatacgaatgtaagagagtatagctcctggtaggcttatcacagcgaacttctctcacgagtcctccactccttatctcatcaaactttctagccgacaagacaatggaggggagtatccatctctactgctcctccgctcagaatttgaggcccagtgactcgtccaaagcatggtctatcctgccaactgacggatgaccagagcattcaaaggtcgcttgacctcactcaaaag

SEQ ID NO: 179058 - DNA, 507 bp, Cannabis indica
caacaatttttagagattgatttttaattttcttttttatcttacccccatttaagtaatgtttctttaagtattggaacatcaatttttagtttatttttggattaacttaagaacatatttaaatcattaagctttcttaaacactaatatattgcattcagtattcaataataatctcactttcaaataacataaaaaatacctagcataaaatttaatatacgtgcctcgcacgtaatttttactagtatatatatatatataaaggagaagtataagatgttgacatggcgctttaaaattactctaaatgtatttatttattttctccttaattctctccttttttaattttttatatatataaagctattatgatattattattacctatacaattcaattttttttttttaaatattattattattattataaattagttaaaaaatgttaaatcatgcatcaatcttctctcaatcttctcttaaccgtatatctcaa

SEQ ID NO: 179059 - DNA, 502 bp, Cannabis indica
taaaattataattctattttaaaatataatgataagaaatgacaaaaataataaggtggttctcaaaattgtttaagttaaaaaaaaaaagttccctttttctatagcaatcatatagtgtgtaacagtgtaagttgtgagatgagggtgttaaattgaagaaaatgcaatgaaattgggtgtttcttgggcaacaagtgaagaatagctaaaaaggttagaaaaggaaaataaaagtgtagattaggttcacaccataaatgtgaaagtgcctaagttgaccctgctcgattcatttgacttcactttcttcacccctatttcattttcatcaatgccaaactttatttatagcatgtattgtttggtgtatccatttcttgctctcctaatcccaatcccattttttatttataatttggaatgatgtgaaataataatttgataatacaaaaaagacaatttatcaggatttatccagttagaataaaatttatgttct

SEQ ID NO: 179060 - DNA, 862 bp, Cannabis indica
ttatataaatatatctaatttttttcagttttaaatacattagtgtcatgtcagcaaattatttaagaaaatgaatagaaataaataaagatagcatttgtaatgatagttatagtttaaaaaaaaatttcaaaaaaaaaaaagtttagaaaagcataaatcaagaaaaaaaaatatcctatttattattctaattggtacattttttttgtattttttttattataattattatgctcattgtactcaaaagaaaaagagtctatacttatattacgagtcacgattcataaataattattagtaaggtttttatagttggggacatatttataaaattaattgagtaaattattattattataatattgtgaattatgattaaatgttactaaaataattttatataaataactgaaaatatttataaaccgcacacgaaagtgcgatttgtttcctagtatatttatatgctgccgaagggcgcctcgttttctagttttatatataaatagatactattcttttaataaaacacacaattcattaaccattttcttctcccttaatatttctcaaaattacgtaatatactatttccttagtggactgtggaaacagtcacttgcacattacacatgtcaaataatgagttgaaaacttatcaatctacatttttttttcttctaaaataaaatttgacttggtaactttgttaagaataaaaaaaaatagagagtagaaattataaagtacaaagcgaattggcctttcgctctatatttgtagaggcatcataaccatcgtattaaagaaaaatactactgcaagtacaatggcattgaatatttttttaagtaaa

SEQ ID NO: 179061 - DNA, 595 bp, Cannabis indica
gctcctggctagccctaggctaggttatgggacatggccagtcctcgtagggcttgggaaccttggtcggccaaggccaaggttcaaagcgggcagccaagttttttatcctcgtgttgacctcggctaggtctcgtgacggccttggaggcatatacaatcgtaatctcatgcatggtcccctttgggaactttgtatgagactcgatagtgagtctattatagtcgagtgcacaacttagtaatcactatttgtctatgtaaatgtacttgatacggtacttcgctgatgcctagccttgtataatgtgatttatctggaaggtacccttgggtacagttgactagaactttgtttatagctttgtcaagtttctcacctccccttgtctcttctatgtaggtaatttcaagtgttgatttagggaggtgaagctgctgtgtcataggtcatgtcatccttgcttttgatagagatcatttagtttgtctccttgctctttttgtgtgattctaaactgatagtcatggctagaacaaaacaatcatggtgtaaagcactgccacatgatccttatgttgcaagggtggcaac

SEQ ID NO: 179062 - DNA, 507 bp, Cannabis indica
ttttttaaaaaataataataaaagttaaagattttactttactcatagattggtaataaattaacttttttttttatttattattattctccttttctttctttggttagtcttcttcttcttcttccattctcctcacttttaattgttaataaaaataaaaaataaaaaatagttttgtaagaacaaaagaatgataataaaaatagtttgaaactagtactttattgaaagtatacaaagatcaatattttaactaactcacaaagtttagatcatcaatcatcaaagactgaacttttaaaaagacaaaaagtactaaatattagtttgtcttcaaatgagagcaaccttcttcttctccttcttttcttatatattttcaattaaataagaaaaaaaatttaagaatatatattatcaaatatttatatttattagggtagctcatgccccttacactatataaacacttttttatttttttttatttttcttttatttact

SEQ ID NO: 179063 - DNA, 687 bp, Cannabis indica
ggaaggaaagaagaggagaagtagtattagtagttgtttttaagcggtgattgttgggatcaatgcccatgtttatgagctttctccttagatgagagttccaatagttctttatctcattgtccgtacgtccaggcaatctcccagcaattagagaccacctataataattaattattcaaaattcggaaataaaatatttagtggtattcatcaaaatatatatatatatatatatatatatatttagtggtacacttattttaaatatatatgtaataaattactgttaggcacgatgatcacttaatatttaaaagttagaaatatacgacttcaaaatttgtatcaataaaataaaatataccacgttcaaaacgaatattttatgtaataattttcagtgtgtattatttatttaattatttttttttctacgcaacagtgagtatattgttatgtatatatgattccaaaaacaaatgcatatatgcatgtactaattagtttgtcttgtatttattattatttatttattaattttatttaatttacctttagtattctatttttataattgatcatatgaagttactttgcgacttgaaattagtatatagctagccaccttttaattcattgttgtttttgccaactaaagatgtaggtactgtcgaaaattaatac

SEQ ID NO: 179064 - DNA, 691 bp, Cannabis indica
gtcttctttcataaaaataaggtagttaattacctgtcatctcgtcaaaatattagatttgagtattagcagatttttgcaatgcatttgttatcggtaatctttagaatttaacaaataattatttaatattattatttggaatgactagacctttcccttagtttgactatttgtgttcaatttatatacaattatactaagtagaaactaaatccaagcacttcaatgcacttgtcatgtataatagaatgaaaaacacatatttaaacttttttttattttgaattataatatttttgatgttgttttgtagatttacaatttaaagtttggcaaagactattattcatggttggtaaaattcaatcatgggttattttatatcgataccttaacgttggcctaactatgtacaaaattatcttaaaaattatgaaatataaaaattggaaaataacatttcgaatagcatgttaagaagatttttaaaaaaaaaaaattaccattgaaaataaaaggtaagattttaaatctagttttaaattccatattttattagaatagtttgtgacaaataacaccattgatcacagcaacggaggttgtttggtacttcgccccatgagatgaggcctactaaaaaactgacgtagattatataatttccccaaaactaataataatatgc

SEQ ID NO: 179065 - DNA, 686 bp, Cannabis indica
ataagtgagaggctcggactggtgaggccgaagaagttttcacggttggctatgctatctgatgaaaaacgagctaaagttatcgaagctgatattgagggaagaagacagaagttggaaaagttgaagaaaaacaatgatccttcaaaaatcaagaagcttgacaagggaaaatatgaacggaaatccatgctgttaaataataatgatgagattggactaagagggaaagctttgaagtaagtattccttccataattccattaaaatttagattttgttaatttgtgtaaataacttgtaaatatagtcaaaggactaggactataatgtaaattgatttcttacctcatacgttgcagaaatataacaaaaagtgtaatgtaaattgttttcttgtcttgccggtaacaattgaaaattttgagcatttttgccattaatatccctttagctatgtatgttctattttcttgttctcctcataaaaatcacattactcaaggacaaacatgtggtaattctaatagagataaacattacaatttacagacatgtagtaattctaatatagattgtggaaaagtagaagaatgatgcagacagaaaaacagaaggagaaatggtaaaaatggctctaaatgaaaaatcagagagcccagctcctatttatattgaattcaata

SEQ ID NO: 179066 - DNA, 722 bp, Cannabis indica
gaaagctacaggccaaaaaccttacgacccttcctttcttaaatagggggtggcccggacgcacctcatcttgtcatttcgttcgttgctcattcccgttaggccgaagtgtttggcccttccttctccgcgcccgctcacgcttcgctgacctatcgcgtgctaaagataagagagtacgaaagaatagtaaacggagcacaccgcagaaagattctaaatatgagaagttccccttggatgcgagaagaaggaactgaagaacgagaacgaaacgaaataaagcgtttctagtttcggatgagcttctcccaattatgtctggtaatagaatagggcgacttgctctgaccaagactccactttttgctccgtccatggagcggatgaatttcctggaatgtagacagacaaaaagagggaatgcagggataggaataggaattatagtaccattggaagaaggggcacctgtgggaacatctctactgacgaaccatttcaatagtacgggtgctgccgtgccacaaggcacggccatggaagtaatgaaaaaagaaacagttatatagttggaccatctgctctatccgttcgagtttcgcttctctagagaagatgagacgctaaacataaaagtgttcgcaacgcatccaaaagggtaccaatgaagccgaccattaatgactagttcgaacaccaggagcggtcggatcaaataa

SEQ ID NO: 179067 - DNA, 910 bp, Cannabis indica
aaacataacaggtttaggctcaaaaggttaactagggatacaccttattacggtaggcttgaaaggctcaaactatccaacaaatgcctaagtcatattccaattgaacactatcaaggatttcgtctcaaaagaataaacatgcaagttctaagctatcctgtcaatcttaccacaaaccatagtaaaacaattataacaattttcacagattgagtatttgcagataaacacaggtttctaagcatccaaactaatccaaagagttaacagaatcaagcacacagttattttacaatttcagatcacatcacactaatcagcagtatacaactatcgtcaagcttattgccattccttaactaaaacaaaaaaactaaaacagataattaaaatgcagaaattaaagtgcagaatttaaaaattttaagtctctccccccaaactaaatatgacattgtccccaatgtgctattatactcaaggtgagaaggacttacctgaacccccatcagaaggggtttggtggtcggacccttttcatccaaaacgaagccctccgtactaaaatagaaaaaaatttaacctacccaatacgtgttgatttctagagtttcgtaacaagagtaagctcaccttcagaactaccacacatcaatcttttcctaatgacgccgaactcgttcgaagttgtctctttaggctttgctttcttcttatcagctttaacaaaagaaacccttcaccatctcaatcttgcaacaggtaggaatgtcggttggggcgaaaaacattaaaattgacctcttcatcttgcactctcaactttaactctcccttttgaacatctattaatgctcggcctgtggctaagataaacttaccaaccttcaccagtacatcttcaatt

SEQ ID NO: 179068 - DNA, 752 bp, Cannabis indica
taaatgattacaaaaattatttttattacttgtgtatattgcttggttcatgcttatatgtttaatatataaattctgctcaatctcgaatatatgactattcatgattatagtattatcaatacaataaaaaataattgtgatcatatacttcagacacatttactcttgagatttatcagtgtactggatttacattgacgtcataatcgacgatgtcatttactcacacttggccaagtggaatgtcttttccaaggtattagtcaagtaatcttgtatcagatgtagtattcgcttatacattgaacttgaccgatattaacactggaaaaaatatcataaacttactgttatatcatttctaagtcaatatcatttcattgactatagtttaattgatcttaatcctaaaatggttaagctttagcctaattgtagtatttgaatgctttgatatattcattactagcttacctacctgtctagcctatacttacatcttgggaactcggtagtgcaattgaatgaaagtgttaatcatagatatggacatctataacttctatgtttgtttaggagtgaaatgattgtttcctttgagcttggctaaatgtgataaacgattgagcactcattttagtaattacattagtttaccaactatatcatttacaaggatctaagtattttgaagtataaaatatattgaagttttaaaaacattaacgttgacggtgagaactctctat

SEQ ID NO: 179069 - DNA, 996 bp, Cannabis indica
caattccgaccaagccgcacgtatgcccaaggtaacctggctggctggcgaaaaaaaaaacctcatgtagctataaatttaggaacgaaaaacctcataaaaatataattttaggttatttagagttcatactcatgacttttttattttacaaaaaaaaaaaaacaaaaaacttaaatctcaagtttcataggttataggaaaattcaacaccattgagcaaaagaacactcacaacaacttctctaaaatagagaagctttaaaaaaattaaaaaaccatactaaaaacacgctatatgagatgctctaaactccttcattttaaagtttatttaaaatttactattcatgctctacagttatagaatattattcattgctctaaatatattttattaattatttttggttttaataattatttttgtatgaggatatgtgtatatattaatattatatatttgaaataaataaaatataatatatttttttaaaaaaaagtgattttgataatgtattttaaagaagttgatgtataatgtaacgtaaaaatgtgattttaaatagagaaaataaaattttagtaatatattttaaaggatagaatagaaaagttttggtgatatatataataaaatttttttaaaaaataaagctttagtaatatattttaacagatactttttggtattataattttaatttttaatactatattgtaatttttttgaaaatttcaaaataatttataatacagaaaagtaagataaaacaatttattttacatactaataaaataaaaataacatgtgtgcaacaatttaaactttgttttcaatgttaaatataaattttgaattcaagatatcttaaactgattagatgcaaatttgaatccaaattcaatgttcaaatttcatgatatacaatatactatttacaagatcaaaggcaatctcaaaatcatttttacaaggatgaatcaaatgacctc

SEQ ID NO: 179070 - DNA, 542 bp, Cannabis indica
ttcttggatggaagaaatcccctctttttgtgtaacttttgtaacagttgttatcttaacttttatagattacaaaaaaaaaaaaaaaaaatccaaccattgaggaagacacttattaattttgatacttgttactttatttattaaaatataaatacgttacattatgtctttaattatgttcatataatacgttagggtgattctacaatgcacccccttaaaaggatgtattgatgcacccttaacttgtttcgacatccagaagaattttttagtctaatttttttcatattcatgtacgttatatctatttaagatatcctacaaaattttgagaaattcggaataatttacagtatagaaaacaatgttcaaacagtctaatttacacgcgtgtaaaataaaatagtcacgcgtacaacacactgtttgaacgtagtttttggcgtgttaaactttttcaaattttttaaaattttgctaggatttcttaaatactataacgtatatgaccatgaaaaaaaaattgaactaaaaat

SEQ ID NO: 179071 - DNA, 1612 bp, Cannabis indica
aatccaacataacaaagttcaagcattgcttgaacctgttaagaataggtaatggagagtagtccattaccaatgaagagtaagactctcaggaagatcgattatgcaatattttcatatgagaaaatttaaggtggaattgttagtttaaattccctcataagcaaatacaagaatcatattgttgactctaccacaacaaatcatcaaaaactcttagcagactcaactaaacacttatcctagctgacactatacaactatgagtcttaattaagacttgaaactaactaaccgaaataactagaagctacaaagatctatttatacctcatatttggatcatttcccgtagagaaaaaacttcagagccccaagactttagagagagttcttcatcgtaagaaagtgagagagaaagaaactgttagagagtttcatagagagagaaagagagaaatcaagagaaacaagtagtatcagaagattataaggaataccagtcaacgtgtgacttggaatttccttcattaatgtaccttgatcagacttttcatagtgcaagagagttttcttcttgaggcgagctcacggggatgtagcccaagatctttggggtgaacctcgataaattttagtgtttgtgtttttgatctcttctccctgttctttacatgtttttcttgttcttcctctaaattgtgtttcttttatcaagaattgttgccttgatttttgttctcgatcaaacaaaataacgcattataataatacaataattcaataaataacaatgtaaggtccttttatgataatttagttgtcaaaatattttttaattaatgtgcatttttattgagcatttaaattatttttattacattgattttgtgcctctagttactcttttcttctaaggaaaaatttcttctcagctggtctctttttggtttaggaaacttcttgtaagagaaggaattctcttatggaaagttgtctgactttgggaaacttaactttccctttttctaattgatgatttcggttttacttttattagaacaaatcaaataaactttatttggcaggtttgaaatccaaatttgtgatcttggttcaatttggaaagtttcctatctggtcctgatctactgctggaaaacccgattctgatattacaaattaggaatttttttaagaaagttttgtattgctgggaaattattgttgtgtctgtctctagggtttctatgttctataaataaggcctagagagcagccaaacaatttttatctcttctagtctcatattttcatatctttctttgtgagaagagtgtttcatttataaaaacctagagtgttcaactaggttttggttttcttattatgatctcatactattcatagaataggttgaagaggagctttgaacaagtgtgggtcttcgggagagacttttccaagtcgtcatttcgagagaaaagtgagcatatatcttcgggagaagatttgtttaagccttacttcgggaggagtaagcacacatcaatagctgaagggagttcactctggtatgttttcagtagatcagattagcaaggtggattac

SEQ ID NO: 179072 - DNA, 647 bp, Cannabis indica
atagcattaaacgctgacataacaattaatttaaacaactatatcactattctagtttgccagatacaatatagaacaaaaaaaaataattttattaaatagtttgaggacactaaaaaattcaaggggataaacaaaaatacctaaataacctatatataattgtgtgaatatttcatattatatcatgattagattttaatcgttttataattatttatattgtgcaatatttatatatatatatttatatgttaagataatcattcatatctaaatattcaacatggttttatccacataatagcataaattattaatcctacgtgacttttgcggtccataaaagatatataccaatccttaaccccaagataaagttttggtaaaatatatataagatactatatttttttttgtaggagtgttaattataatctattaatttaatacattttaaagtttgagggacatgatttaataaatatcaaaatttaaaaaacataatttagtaatcaccgaattagtaaaattaaatgacattagataaaagtcattaaatctaacaatcttaatagttcaaagaaataatttttaacggttaaaaaaatttaaaagacataatttagtacatatcaaaattcaag

SEQ ID NO: 179073 - DNA, 695 bp, Cannabis indica
gcaataagaaagaatgtgctggtgagaataaccagaaaagatcacagacaaatgacaagaaaggtgttaggtgttttcatctgcaaatggtccgtcacatgggggagggaatgtcctagtcgagagaagttgattgccctgatcgcacagatggaagaagtgcaacgagcaagaactacttctagaatgaatcccttacaacttctcaatgctatcactactgagaaatcaagtctgttcaaaggtttgatgtatgtgaaagtgtttgtcagtgggagagaagtgacggccatggtggattcgggggcaacgaataatatcatggctcagaaagaagcaaccagacttggcctcgaagtgatcgaaagttcaactcgattgaagacggtaaactcagaagcaaaaccaattcaaggatcttctacagtgatgttaaaggttggggtgtggaagtctcagtccaaactcatggtggtcctgttggatgattttgatatgattctcggagtagaatttctgagtgcagccaaggcaatggttgcaccccatttgagagcggtaatgatttgtgtggaggggtgcccctgctttgttgaagcaatctcctcaagttagaacaaggaaaaaggcgttgtgttggaatcaacgacccaatttggaaactctattaagaaaaggtaaccatgcgtatgtgg

SEQ ID NO: 179074 - DNA, 769 bp, Cannabis indica
gattatagtaaggaaatttacatggtatactaatttttgctatttttttataaaaatactgctatacggtatttttttacttttttactgtgttttttataaatttcataccgcagtatactatgttaagttttaactagtattctactggtgttttttagttgttctactgtttttttgagttgttctattttgtgttctactggtgttttataaaaacacagtatttttgaaaaattttccatgtgacagtatttttataaaaattaactcaaattctagtatttttgtaagtttcccttatagtatggttctgtttgggttggattcttgggcttaagggaatattgtagggctcctgattgcgttggagatgaaggatcagaagtttacataatacacttatttttttttttttgatgaatttttatatttttatgtttaaaggttttttatatatatatattttgatggtattctataaaaataatacaaaaacaacaaaaaaaaattacataaaagtaatatgaaaataatattaaaataataacaaaaaataacatacaaataacgaaaaataaacaacaaattaataagagcacaacataataatatatgaaaataccgtacttattgtaaataacattataaaaatcgtaaaaatgtttaaaattctgtataactgtattttgtaatttttgtgtatttgtgaaataatcccaagaatttaagagttcatgggctacatggtgggtgtattgaaagagaa

SEQ ID NO: 179075 - DNA, 525 bp, Cannabis indica
atatgttataaatagcttcaactttgtcctaatttgatatgatgtggtgcactaccaatatctttacatataatgtagttatatattaagattcatggttttgatgactatttttttaattttctttgtttcctttaacttaagatatcattatttaacagaatattgttattaattgattttacaatattattatatataattaaaaataaaaggctaattagtaatttttctcccgaactttgacatgtactaaatcatactctctgaacttttttggtcgttaaaaattcttcctgaactattgagattgttagatttaaggacttttgtctaattttagtaaaaaaattctaaaagttcaaggagcatgatttagtacatatcaaagtttgaggggcttgatttggtagatatcaaagtctggggaacatgatttagtacataaacaattactgaaacagtaaaattgaatgaaattagacaaaagtccttaaatttaacaatctcaataattcgggggaa

SEQ ID NO: 179076 - DNA, 745 bp, Cannabis indica
ttagagtttgaaatcttgtaaattatataaacatgcctaatagaaagaaagggaagtaaccaaaagttgaattaattatgataaaataaaaacatgtggaatttatttattgagagacaaaaaattaagaaaagataattgggacaggtgattttctttttcccacgaaaacctagctacctcataaaatttacttatcagatttttgactttcttattcccaaacttattattaattattactttttttaaaaaaaattagttataatttttttttaaaaaaattaatatcatcagaaaaattactgcaaagggttcctaagtgagtgattagtttcaatgtcttttccaactactctatattttgttgcatgccattattgttgcttatatagtgtttttactctttttattcaatcaaatatatacaaaatatatatatatatatataaatatatatatatatatatgacaaacttaacacctaatgttaagggtattgggttgttactgttagtgtttgttatttcagttgggttgttattcaacagtctgttagagtttgttaaaaccactgtaactaactctctttcctctcttctttctagtcactatataatcatgtacaatcctttaccactacgaatagattgttctttggttatcaatctctcttttctgttctttcaatcttctctctctttcgttctgttttactttgtctatgttcttcttgttcttctct

SEQ ID NO: 179077 - DNA, 499 bp, Cannabis indica
tgggagaaatcaatgtacatgtttttgtgggctctattgttgtaattaatacaatgatttttatttaaccaaaaaaaaaaaaaaaacgtaaagaacaaagaagataaatatcaaatatatattcaatatgataataagaaaggccatacttccactttattttcatatagcaaaaccatatcaagttgtagccacaaagatatttgaggcaagcacacacataattaattaaagcaaagcatataattatagatcacaatatataagaaagttcatgtgatcaattacaaaccttagagataattaattatctcgaatatgaaacacaaaaacaaaccaaactacatatgaagctgctgggcacatatgtatgtggaagtggaattaaagtagcaactgcaagtagctagacatttttcggaggatccttctgaaattattaaaaaataaataaaattaaaaataataccaaactacaaatagttagatcaccaaaact

SEQ ID NO: 179078 - DNA, 503 bp, Cannabis indica
caatacaatacaatacaatacaatacgacttagtacggcgttccaaacgagccaagtgcatactttatcaaaactatagggtagggtttcatcaagtttgcatcaaaatgtatcaaattctgcatattgaacataagtatagttatattatgattatgattgtcttttggagaaaatgttgcaaagaatcagaaaatacattacaaaaaatttatcttttgcagggagccacattgattacttaagcataaatttataatttggcttggagttttgggaagaatcagcaccagttttaggtatatattatattgttatacctaattagaacactataagcataaatggatagagaatggttatctgggagaaatcaatgtacatgtttttgtgggctctattgttgtaattaatacaatgatttttatttacccaaaaaataggtaaagaagaaagaagataaatattaaatattgttcaatgataataagaaaggccatact

SEQ ID NO: 179079 - DNA, 662 bp, Cannabis indica
tttttttattatatttatataatataattatacatacaaataaaataattatattaaagaaatatatttattaattaaaaaatattaaattttattgtattttttattaatttaaaatgaatatatctatatattttatcaatatattgtttattgttattcgttatgttatttatagacacggttctcatcaaatttatgtaatatatatatatatatatgttatcactaataacatatttgtatacactgttctacaaaaaatttatgtaatatatatatgttattattaataacataaaaataactcagttaaaaaaaatcgatttcacaaattaaatatatatcataatgttttatttatagtaaatcataatattaatattaatagtatttaaatttatttattaatttaaaaatattatttaaattaatataatagaaggaaacaatcaaagttaattagtttgagtcaatttttctaatcacagatttactgttttatgttcttaaaaacgaaagaaaaaaaaaaacaattttagacagttttgactctgattgttttgtaaaattgttaatttttttttttaagtatttatgaaataatccccctacaaaatggagaatttatataatatattgacttttaccatttttttact

SEQ ID NO: 179080 - DNA, 787 bp, Cannabis indica
atatttttaaaagttagagtgccaaaaatttatattgtataactaatgatttctcatcacaaaatctagttatatttttgtagtgattctcaatatagcttagctcaagtggttatattgttattggttgttagaattaaaaaaaataaaataatcttattatttaggggtccccaaaagtcgaatatatatatatatataggtttggactttggataaccttttttgtacgcaatatcataagtcatatgcatgcatgtatattctatcctatacgaaagaaagtgggtgttctccataacctcgttgacgtcggctaaaatatataactctaatgaaatctcatcaatttgtgaccatacattagatgagaaaaatcctcccttatccatgattgagtcttcccacgttgacgtatatcatatatgtatattgatcattattctcatattattatatcattcatattcatacaattcagtttcgacatgtgaaaatatccataactgaattgtataaatagttcatgtattatatatataaataagaacaaacttacaaaaaaaaaactattagaatttaggttaatttttacaaaaatactgtcacacgaattttttttccaaaattactctattttaatcaaatacaaagtagaacaattcaaaacaacagtaaacaccagtgaaaatttaacacagtatactgcagtatgaaaacttataaaaaaactaacagtaaaaaaaacgtgaaaaaataaccgtctggcagtatttttgtaaaaaaa

SEQ ID NO: 179081 - DNA, 633 bp, Cannabis indica
aactctcttatatcacggtattttgggtacaatacatataaaaagatgtatgtttcaattaaatataaaattagaggtaaatttgattaattgattaataaaagtggtatttttcaactaatccctttaataaaactaataaaaattaatataagcccaaataaaaatctaacataagtatgatataggagataatctctacatatgatgttatggttttgattaatatggatgtatacgatataatttttcaataaatataattatgataattgcagggtcagttctggtatgtatactgtgaggagctatggacgagcaaacggtctaaaacgttggtagagtcttagttttgtttatagttagtaaagtaatatgagttcagtgagatgttttaaatttattttaaaaattcactcaactacttattttgtttttaagtatgaatgatcattcgcttttgtatattcattgtaaaattcgctgtgtattttcaaatgttttgagtatttgcaagtaatgcgtcaaaaatagtatttttttttttatatatatatatatataattaggcaaaatatatttcggagcgttacagttggtatcaaaaatttgtagttttgttttttttttttt

SEQ ID NO: 179082 - DNA, 944 bp, Cannabis indica
tttccttttaggggagtaatgagtatagaaagtctggtctattgtagtccagtgcatgcaacctcttatgcatattgtctttcctacattgattattattgccttctttaaggttcaggcaggcagaggaattcaagtgtgtaactataataggcaagagagcattagattgattccatacatttgaatttgcaatggtccacttttattttttgtgaaaagacaatctgaaattgtaggcccatggtattttggattaatagtgaattgcaaggaagaattttttttttttttttttaattataatttgctagtagttgtatacttacttctttggtttccttctggaattcaccatgtaaataggtatgagagcctcaatctaaatgaagttcaagggctgcatgaaattgaggtggaatcttattcgtattttaatggtcaattgcatggaaatagaatttggactgggtaagttcagctccttatttggagattttcatttgtttggttagttcaaactacatttcaaacacagtataagtactctttatctatcttttacagtgttgtctgtggcattggagttactttaattgaaccacagtactactcatcctttttcagccgtgagagggtgtatgggtatccagatgactttgaacggttagtagttaaaagttactctcttaacacagtctgctagttcactaaaccatcatattaatatttttcctacttggcctttatcgtaggcactgctttccccctctctctgggactaaagacatttcttaatgtgaaaatgttggggctttcgataaatttctatgcaatcctagaatcagtaatacacctcgttctttcaggttttcctatttttctcgagcctctttggattacatagtaaaatcaggaaagcatcctgatgtgttacacatcca

SEQ ID NO: 179083 - DNA, 722 bp, Cannabis indica
accctaacactacatttttatatttaaaaattacgagtactaataaatttctaacaccccgtgccccctgtttggtgtctccctccctcattggttttctctctccgtgcatagctgtgtagtggccaaagccccatcgttcccatcgatagtatcacaaatggatgctgccattatcttcgccggtcatgaaaagccaaaatctccaccaagtccctcgatttgccatggtgaagtgcaagaagtgctttgtggtagcatattctttttgtaaaaaaaaaaaactatttacagtataaatttaataatttgtgacccaatatttatgtacgtcatccaaaaataattctaaaatactagcattaaatgtaccaaacaataaataaggaatgtgaatggaagattaaagaattaaaagagaattaaaaggaatcagagtaataaattttattaatttaatttttaattatttaaatgaattttaaatagaggttcatgagcaggtgagcctttcaaaagtttgaaaagtcaaaaaataaactaagcctagtcaacaattttcaactattagattatgatgatgggttaaaaatgaaaactctatcaatgggtatattttatgaggtctatcttaaccgaactcatatatatataagatataataactctatgtatacgaataataaatctaacacaaataattgtcaaaaataagctacttg

SEQ ID NO: 179084 - DNA, 683 bp, Cannabis indica
attttcttataaaactttcccaaaaatggaaatattattaaaaaaacttggaacaattatatgctatagcattgaataagtctatggtgaagatcactaaagaaagtgccacttcatttagaaaattgtggagattttctatcataccaatagaagaattgatatgacaaattaatctattttggccttgcacagcttatttttatatgcatatatttttcttaaatatttgaatatcattatgaaaaatctgttgtgagtaaattaagaattgtataaattgtattttattttaaaaatagattcttaaaagtcgaactacaaatcctagcaaatattttaattctaatagttaaaaaagattttataaatgctaagttagacatgatttttttttgctcttacattttctttaatgctagataatttttcattattttttagtgttatcacatttactaaaatattcagaatcaaaataaattgatgaaaataaaagataagtacaatgatatccacagccctagccaaaagtagcccatacataaggccatcctatacatataaacacatttgaatttctggtttttgatttcattggaataaatttagttaccatggattaatcaacataaccaagctttacattagtataacaaaagttagttaccaataatcagaac

SEQ ID NO: 179085 - DNA, 1088 bp, Cannabis indica
atagtgggtacaaggtaagggggaaatgcatatcatagaaaaataaaggccataatgatctctataaggtcatgaggttcgtgtgactataaaggcctcgaattcttaattatgttaaagcactcactcaccatttttttttaacttctcatatagaaaatcaatggtcaatatatcatttaacatcacaacatccgttatatattaatcgtatggctaataattatctccataagattgggccctagggttgcaaccacactgcataataataaaatgttgataagagagaatctttctgtattgtttttccttacaacactcctcctcacatctatcctttaacatatatcattcaaattttaattttttttctattttataacatattcttacattacactatacagtaatcttttttaaaatacatcacaaaattttatctttttaaaaatcttattatattttattcatttcaaatatataatattaaggctaattaggatttttgctcctaaactttaacatgtactaaattatgccccctaaacttttatgactattaaaaattctctctgaattattgagattattagatttaaggacttttgtccaaattcattcaattttactaatttaatgattgtttatgtactaaatcatgcttcccagattttgatatctaccaaatcatgtctctcgaactttaacatgtgtcaaatcatgttcactgaattttcatccatgttagatttttcttactaaaattggacaaaaatccgtaaatttaacaattccaatagttcatggaggatttttaacaatcagaaaaattcaaggggcataatttggtacatctcaaggttcgaggaataaaaatcctaattaccctaatattattatatacacatattcagatacagaaaaaattattaaaactgaaaacaattgataaaatatgtttagagcaattaataaatagtatgctataaatttagaacatgaatagtgtatttaagaaattttcaaaatgaaaaaagagtatagagcatctgctatagtatattcttagtactaggggtgttcga

SEQ ID NO: 179086 - DNA, 955 bp, Cannabis indica
aatatcttttaaataaacattttataattttaatttagtattttattttttttcatctttgaaggtgattttttttatatatttttaaattaatttttaagttgaattgtacacatgtcatatctcagtaacaaataatttggggattcagatcaaatatatatatatgggggaattttaaaccaaaaaaaatcaaaaaatatcaaatatgatataaaaatggtaacatttatgggagaaattctattttctttaggaaaacctgatattatatgttttccaatatgccatattttattcccaaaatcaactttaataattatcacaaaaagatgccttccaactaattttattaccatttttgcccctcacacaatttctcctctttattttcttcgttatcttaattttttatagataactaataaaaggttaaaacgaacaaaggtaaaaagtaaaagaattttctttaatctaaaaaaattaattgtcttttataagtgcatgcagagatacttaaaaaaaaaattggacaataaaattttaatatcatataaaaaaaaatccttctaactagtgtctttccatccaactgaacatctctaaaataaaataaaaagctaattagtatcaattattaaatatatatataaaaaaattttaataaatatcatcatacataattctatgatgtatacgctaaaatttatcaatacttatcttcattgttaaaaatgtcttcaatacatctaatattttctttacatcatactaaccttacaaaattgaaagtaaccatattgttcttacaaaactaaaaattgaagataaaaattggccaacctagccaaaatataaatacatataataacctaaaataaaataatttccatacaaaataaagcttgataccataaatagtctcatcaccattgtagaaccatatccatcacca

SEQ ID NO: 179087 - DNA, 872 bp, Cannabis indica
atcccaactaggttggcacccattcaaaccaccaatcatttgcaaaattatcactttgttcatttaacgtctataccacaagcatcgccccttagtctgaataaaaaaaaataataataagtattaatgtattgattttatcaagtaagaaagcattagtaatgaaattgtacaagttgaataaaatttgtacctctgttgtcttgggcaaatcttttacctcaagcacttgaattgtcttatgcttcttttgctctattttttggtaattgttgtggagtttcttttttgtagactctaatttcgcttcaagattaacattttgctcttgtttcatgcatattatatgcttcttttgctcaatttgtttcatttttgtggactctagttttgtctcatggtcaacactttcctgtttcatgcatattataatcatatagtaagaacatcaatggaacaacttataatttttaattctttggctaataaatataaatatatgtacctttttagatttatcttgcttaggcacataatcaggaagtttgagagtgttttgttttacttgcaaggaacttctgataatctttggtacctccatctttttggagtaatctttcacctcagaaagtaggatcgattggtgtttctttttttcaattttttgataactttcgtggagtttttgttttgtagactctagtttcgcttcaagattaatactttgttgctgtttcgtgcatattataattatcaagttagaacattaatgtaaaaaaaaaaatagaatgtaataaattataatttatgtgtttgtctaataagtgtaaatattatataccttttcatcgggtttgttcttagggagatga

SEQ ID NO: 179088 - DNA, 560 bp, Cannabis indica
aatttttctttacttacagcgtcactttatgcgtgtcaggaaaaagttttccactcacgcatagggtgacgctaattactttattaaaataaaaaatagtaaaaaaaaatttgtatttatagtgacacgcattaggtgccattaatattgaattttgagtgtctcactatgcgcgtcactaaatctcttttcaaatatttagtgacccacatgttttgtgcgtgtcactaaatagagtcactaaatgtccaatttgtagtagtgaacgagaagagaaggagggatagaaccttggaattgattggaacttaagtcaactattacatcatcaaacatatgtgggtatgctataatatcaaacacaaaacaacttctcaccacaacaacaacaaaacagacctaatcgacactaatttatataataaaatcataaatacataaattaaaaggagaaaagaaactcaagagacctaaacctaaagaaaattcaaaatagtatagagaactcaccaatggcagctaagagagagagggcggcgcagtggctctcgacggtggag

SEQ ID NO: 179089 - DNA, 823 bp, Cannabis indica
tttaatgaatttgctgctgtgattttatggttgaaaagcatgaaataggttgggatggtcttgagatgcatgttggtgttttcttgttgatttgagcatgtttgtacttggatcttttgaattgatgttgggttaggtttagacagaatttaaaaggaattttattgtgtttttattctgttattgaactttgaaattaattgttcaagttcaagttcttgagcttgaagttcttggtgattttgcttaagttggagctttgaagtttatgatgtttaatctgaatttttggggtttttaccattggatttttaatgcatgaattgtgttttaagcttttgatttaattactggaaaatctatttaatggatttaagttttggttgtgaattgagttgaaatggatgagttttggggctgaaattcattgttgaaggctgatttttagttgctggtttttggtgttgttggagagtgaattaggtgtaattcctctctaattacttggtttatgttaggtgaaagtttggtatgattgtgggttgatatagcatgaaaattggtgtttttggatgcattttcgtggctggaaactgggtttcctgggtttttaaacccagtagccgcggccatttttggcagcttattgtattttttttcgggtttttgttttggtcataacttttgactcgggactccgtttgggacgttctttatatcgttggaaagctcgttccgagctctatctgaatatctggaatttaaatgcccagtttttaatttgtggaaatggattttgggattaaccctatacttgtgtatc

SEQ ID NO: 179090 - DNA, 1171 bp, Cannabis indica
tgatgttttgttgtctccaatttctctcaaaatatgtggcaattcaagagtaagccatgtggtattatgatccacgagtgcaagacgcatcaccttgattactttagaagtagagtaatgacaaactagtcatctccgcgagtatccagctagaccacgagcatccctcatcgaatcttctctgtgagtaaggcatattcagaggatggtatggtaggggtagtgcaagttgatgtcactcaaggaccaagatactgttgggctctgtgccctaaataaaattctattttaatgtaatctttgtcattcaattatcaataaagaaacagatatattttcattacttatttagtatgtcatttggggcacttcccacaggacgaggaggagcaaagtacgctgtggtggttgtcgacttctttacaaaatggacggaggctgaaactctggtttccataacctgcaaaaaagttctcgactttgtagtgaaaaacataatttgtaggtttggaatacccatgaaaaagcatgaaaaaaaatgaaaaaaaaaatgcaaatggtatgcattgcataccatccgcgcgcgcatgcaggggcggctgactgaggattgccgcacaatcatgatggatgtagccttttcgcccgcggatctaggcttcagacaccgccgtgagcgtgtttcttcgaataagcattgtccgaacacgcgtgctaaccgagtgacactcggtgtccgtgcgcgcgtgtaggtgaccatttcctgattttttttcaatttttccaaaaaaatcataactaattcaaataaaatcaaagttaagttttgtaaaaaagtgaattgcttaattttttttccatactatccaacaaaaataattccaaaatgaaattctaattattttatgtaaaaattttacaaacatcaatcaatcatcaataaaaacatagatcaacatgaatcacatccaaaacacacatacatcattttaaatccatatttcttgaaagcaaatcattgccatggttttgaggctagttgttggaatatattttactaggacctacatttactaacaagtatatttttaacatcctaaatataaacttctaaaatgatattaaataaacacataaaagatatgagaaatcttacattggttgcagcgaa

SEQ ID NO: 179091 - DNA, 655 bp, Cannabis indica
tgttggatacgtggtgatatatgacgccgaacgattgttaatgctttgtatggaccacaaagaattaatcatatactcatttaacaaatatatagctagtaaatatatttaataaataatgattttatttaagagagagaagaaattaatctaaatttcccaacttggtcggctgtgtgaattttcaaacatgaaatatttatcttgtcctaacttgatagtatagctaaaccatcttctaagtgctttatttaatgttgctgtaacataaaaatggcatcaaagtcatacacttttatatatatatatatatataatagtattaagaagaatatgttataagacatttttatgtgtatatagcattaacatatattattatgaccaattactagaaaaaagacaaacagtaccaccaatatatgatcgtcaataaaattaaagcatatacattgactttaggtatgtagagttaaaagttatataaataatgttatagataggttactttggtgcaaaaatatgaagaaacgtggtttgattggtttccttttagtcaaaccaagtttaattaatgatgggacacacattagagaaactaagaatatatattaatattaccagttggtaaggagttactaaataattttaaatt

SEQ ID NO: 179092 - DNA, 552 bp, Cannabis indica
actgtagtataccttatagtctcgtattactgcatttagccgagtgatccacaaacgacgaaaatatctcttttgcttacctctatcctgatgagccgaaaccaaagctcttattttctgttgattaatagtacgagtaagtcttgaatgagcccctcgaaagcttgatgcaaataaacgaatttttgttctacgtcttcgagctatatatcctcgtttaattctagtcattgactaaatgaaactttgatgaataactaattgatttcttttctttcagttattgtccttcccttttctagtctattaataagaaaacggattcttccaatgtataaaataaaaattccaatggcttttgctactataaccttcccaaccacgattttttcctttttttttttttcttttagacctctcacctagaaataaagaaaagtataagtatactataaaactaactagtaacttaaaaactaaaactaagttaaacgttaaaaaaaacgttaaaaaaggttaaaagttaaaattaaattaaaaattaaaggttaa

SEQ ID NO: 179093 - DNA, 858 bp, Cannabis indica
aattataactgatttttgagttattgtgtattatttatttttatttgttttgttgtggaatcaaaactgtttaatatgatatgtcttagtatttttggaactactctccttttgtttgtatattgtattttttattaattttaaccggttcatattttatattatttttttttcggcgagcatatttgaaaattgactcaaactatgagttgctagaaagttacaaaaaattgtgttgtattttatttatgttgtatcatagttgatttttgatttagtcatttcaaaaaagagttcttacgttatttattttagaaactggtcttgatttaattaattcaataaattaggtttcaatttagttatttcagaagtcgagtttgattgagttaattcaagaaatcggtttttgattatttattttatgtaactggtttttgtttgttaatttttattttggttgctttacggaatctaatttttttatctcaaatttttaactagttgataaatataatcggtttctttatctcatattctaatgtccaaatccaatatctaactctggtgacgacgaaaattctggcggtatttttctacgaagatgacaattctgattaatttttctagcgacaatgataattccagtaacttcttcgatgatgaatgcttctacgacaacttttttagtgaagatgtctgcttcagtgattttttttcgataatatttatttataatttttttgtttagttttcttatatttttaaattttatttgtttttagttctcacaccctttttgtattattttttaatgttatataaaagtaaattttaatattttttcttatatttatg

SEQ ID NO: 179094 - DNA, 535 bp, Cannabis indica
tatatttgttttttaatcttttatttttctaatgcaatataatttaggtaaatagcgacataaatacttaaaattttaaatttataagtagcataaatctaatatttatttttaatgacataaatactcaatatttataaaattataatttttctttaatttcgtgagtacgaactctattattgtcttaaacatgacaggtataaaacctaaattctaaatcattagatctagatataaacatgtagtataaattacttttaaaatttcttttaaaaaattcaaaacaaattctgtattaaaaaaactaaaagaaaattacaattttacaaatattaaatatttatgtcgctaaaaataaatattaaatttttaacgcttacaaacttaaaactatgaatactacccatacaatttttacatttttttttgcattaaagaacagtgatggtacgaccaaaccctgctctcatcccatcctatcaataaataggtcaaaagaagtaacaataaagcaagaggccaacatgaaagc

SEQ ID NO: 179095 - DNA, 764 bp, Cannabis indica
ccatatgatcattgaaaatgtgacagaacagcaggaaggaagatatatcaaacacacaaaggataagtcaagtttcactgcccaaatatctgataaagagaagagacatttaccagcagccggtgtggcttgcgttcaacttggcccaatactttttcaagaatgctttctcgacatttttcagtggacttggaatggcatttccagctgcatccctatggaagagtggaaacaataatatcaaaagaataggaagaagacaaccgagcaattagacaggcacactgcacattacaaaggaattttaatttcaagttgcactaactaaatgaacttgtcaactagaatttttttcataaacagagggaaaaacacagattgcgggcccttatgtttgtcttgacattccccaacttactgaccccaacacctgataagtgaaactgttttatttatttatttattttattttaattaaccaagctagaaggttgttaaatgtcagtgaccaactcttataacattcaatgagttaaactgacttcagaatcagttatccacataaaattggattagatagaaaagaacaatatacaaataaaggtattggagaatattgtcctacatggattaaatgtgaaagtattgagccatatataagaaacatgggctactccactcattgccaattggtttttgccaattagttttgagttggaaccccatgattctcaacatagtatcagagccatatccctagcggg

SEQ ID NO: 179096 - DNA, 1032 bp, Cannabis indica
attgtaagtaattttcgtccaatagcatgttgtaatgtgatttataaagttgctactaagctcatatgttcctgtttgaagcaaattttacctgaaacagtatcatagcccacaacattatgatatgccaggacttagtgaaacactatggaaggaaatcatcaaagccaaattgcatgatcaagcccgaccttcaaaaagcctatgatactatgagtttgagtttggatatttgagtaaaaatataaaaaggaatatgttagacaaaaaataaaattatttttgaaaacaaaaaaaagacaatgtgatgttttctattttttagttttttgtataactcactatacagaaaactgtttttttttttaaaaaaaaaaattaggccaaacgtagtctttaaaaaattgtattctagttttaaaatttaaaaaacaaaaaattattttacgtaagtcaaacaatcttttattttatgtgaaaattttcatggttaaactttaatgcatgccaccatgatatgcacattattattattattattattattattattattattattagagtaatttgcggcataaatacctaagtttataccgagtagcagataaatattattattattattattattattattattattattattccttgagaaagttttggaaatgaaaaacaaaaaatagatgtggtattttttattgtggtcacaaatatgactgcctacctataaggttgtttgtctaaatcatatatggtcatcgattggcatcaaattcagtgccatggaaacattggagggtggggttcttttagttgtccaaagtacatacatgtggtaataattaagatatatttaattattaaattacccattttatttgtagtttttattttttaaatttttaattaattgtaagtttcatttggttggagatatatggcaatcggtgtttgatgatcttaattaatgatcaatatatatatctaaggtaattgttacgtgccaagccacgtagtgttagtttt

SEQ ID NO: 179097 - DNA, 556 bp, Cannabis indica
atgtcgttcatttttatagtaaggttgcacaacaggaagtcctaaaggagtagtccattggacaggttgattttgtgaagcaactacctgcaacaagtttacaaattaatcattcaaaatctagtttcaggaaagggtctccggatctactctctagtctgtgtttattgcccaaatcttgacaaaaaaaggcataccttagcacaatcaccaagccagcccattactgctcgggcagcttggaatatctctccaagggaagccaatgtcacctgtgcagacgttacagcatttagaaaaattactgtgatagaataacaggaaaaaaaaaagacacgtacaaattttcaaatgttagaaatgaactcccaaggacacaataatgcaatagtgtatactatggaactgaaaagagagaagggaaaaaaacgtaaacaaaacaagaagaaactatattaactttaggcaatcatgcatacccaacaccaagcttcacctggtaaatggtccagtatacatataataattcatatgcattgctatgaattgccaaatg

SEQ ID NO: 179098 - DNA, 518 bp, Cannabis indica
atttctatctaatacaatggatttcagagcctcatgaagatgatctatatccttcacatataatcttgtatattgatccactgtataagttgttttcactggtaggaagtacgctgacttagtgaaacaatccaatattacctagatcgaaccatacaaacctgtggttctaggtaacttaatcacaaaatctatgataatgtcctcccacttctactcgagaaaattaaaggttgtaataaactcgcaggggtctaatgttcaacttttatctatttgcatgtcaaacatctgaatatatagtttaccaaatccttttcaagattttatttataaagataataatggtataatattatttattataatcactaaattttatattatacaaaaaaatttattttttaaatttctattttgtatttttttacggaatatatatttatattgatttgataaataataatttaaaatactttattctatcacatgtaaaaaagaaaaatcaacactaaatt

SEQ ID NO: 179099 - DNA, 658 bp, Cannabis indica
atacccttttctcaaatagtacagccacgtcaggttgcttcacatcatgtctcgtaactgaatcgggagtactccaattcaacattcgagggaatctagtccctctgcactgcccatacttcttccccaaatcttgcatcacctcgaaggcccagtattgcagcgccggggcatatccatagacattgtacttcgcctccggttgagtaatttttttctccttcttccctttcttcttcatcttatctttagtagagaccttatcaatgtaattcttcctcaggtcactcatactcttagttgtggatgacaataacttctgataagaaaggaggccccacggatactcgaagaagttttctacgttttctaccaacttcagcatatccgtccagatataaacaccctcagcccttgataacagaacaccctcaacaaatacgtacaaccccaaccttgtacacatcgtccgccacatcgcacgactcaaaagactagccaaacgggttttaggtaaaagtagacccgttttcggtcgattattggaggtagtcccgccattattcgatcagactcacacagtgtactcaaatcttctgttgaggggccgaccgctcatctttagtccggtgatcaaaccaaactcagaccgcccaaa

SEQ ID NO: 179100 - DNA, 759 bp, Cannabis indica
accgtacttttgatgatttcatcatttcatgttatttttatgttgtactcttattattttattttttagtatttgtatatattatttgagaaattttatttacacccaagtttttttttttttttgaaagaaaactttattatcaaaacactagcaaactacaaagaataggagagatcagctttacaaatattagccaaccactcagaaaagaattgtaaaatgaatgggttaacttgttttcaagaattctcctagctaagctatgagcacattcattattagctctttttacattaaggaactttgtacaggaggagaaaaccgggtgtctctttatttggtttataaccgagttagcagcactaagatgattgcctttcgccaaaaaatcgtcccccaacaccttgcaatccgattgaatctcaaagggactctgcttagttaacgggcaagacttcaaagctgtaagaacagcccctgcttcagcaataaccaccgaacaacaaatagggaggaaatacataccagctgaaataatatttccagaccaatctctccaaatatatcccagacccacaccctccttaccaggatagatagtagcatcacaatgtacacaaaaacaccctcagggggggccagccaacgatcatgttgtttttttgtttattttcatattatttttatgaaatataccgtaaaaatgtaatatatatatatatatgaacgtaaaagtataatttctttttactaaat

SEQ ID NO: 179101 - DNA, 541 bp, Cannabis indica
gccaacacaagaatttcagcacaaaaaattatatttgacccctagacaagattatcatcttccaatcctaaaaatataaataatgaacaacacctcattagttattctaggagaatgattcatggtaatatcaaaaaaatcattggatggtaataatatttttctaacaatgatagcctaagtaagaactaagaagtattgtagcgttttatttttaagaatatgaataatattaagacaattggattccacaatcaagctcctattcttctaataaaaaaaacacattaatatacatgtaaatgatttttagttttacaataataaattattaataaactcataatttcataaaataataaagtagtaattttaattaatttttaaaaataatttataattttttttttctaaattattagttgtaattattatttccaattttataaaaaataaatataattttttttaaaaaaaaaaataaaatttttagaaactttacctataaaaaggttattagattattaccttattaattttt

SEQ ID NO: 179102 - DNA, 559 bp, Cannabis indica
tttagcataagatttccttgcttctaattctttgctgctgcaattccggattcaatggatctctatgcaatgcatcttgactactatccaagtgattcttggctttgattgctgaaatttaaataattattctaataaatcaattttaattcttatttttattaataattattaaaaaaacaacaaaaatgaaggttattttaattttgaaaaaataaaataataattattcattccttatatattagtgattttaaaaaattactattcaacaatttttctatatatcatattattcttaaaatataatacatgaaattcaattgtagaattctttctattatttcctttcttctacctttctttgattcaagttttgaatattatctttgtagattgtgaacaagtgcatatatagacttgactatatagctatattattcatgtatataatcacatgatacgaaaattcttctggtgtagtgtatagaattcaataattaattatagtgttttatgatatatcatatcaatctacatgatgagaaaacagtatcag

SEQ ID NO: 179103 - DNA, 594 bp, Cannabis indica
gaggcgaactggcgaagagagagtcacctatgtaagttttgggagccgaatgctctaagctctggtttttggagaacaacgtggaggatacgattaattgtgagtgagaaaaagtggacgagttttttggggttaaatttaacagaatattcttttatttgtaaagcatattctgttaaaccaagaattgccgttacataggcacttttaatatataaagatattatagtaattattgtagttacagtttttttttttaatttagaatggtaaattatattgtcaaaaaataaggaaaatttacaaaatacatttaaaattggacatttattcttcaattttttttatgatttatttatttatttttttcacatttttacggattttattttcttacaagttttttcacttattttttttttctagaaaaatattgttttcacgttgttttcccgtagcagcaacgtaaaaataatgttttttttttttgagtaaacttaaaaataatgttgatttaaaaaagaatggaaaaatatcatttcttatatttagtaaaaaaaaaaaattacgtaaaaaagtgtaaaaataaattat

SEQ ID NO: 179104 - DNA, 668 bp, Cannabis indica
agatttcatttgtatgatgttgatacaaaatatcaccatatacctgtaaaggtattttttgtttttcgttttttgcttttaagttctcagtactacggaatgctttagtgtcgcatttcaagttggttcaatgcagatttctctctctctctctcatcaaattttattaattatgtttttcaaattgtctttcattacatacggttcttcagtatgagtttctgattatcttcataatttcgtatcgtgaacatttttgtaaaagaatgttaagtcagatttagcaaatttataaatttgaattattgaatgcattgataaaaaaaaaaagaatgaacatgaatataaaattttaatagttcactcaaacccaactttaaatgaaattgtaatttagattactatttcatgtcatctcatgatactcctactttttaggtacttcctctagtgtactatcctcccactttagtatatttatattagcttcgcccttgcttgcagatgttgaatttgaaggatcaagattttcttggtagaatccagctgtgttctttcagaggtgacttgttttctagatcatattaatttcttataaatttgtaatttgattattacatgttttggtaaatatggtatacaatttgtttaaaacatatttgaagtgt

SEQ ID NO: 179105 - DNA, 566 bp, Cannabis indica
taggagtatcataacacactatgagcaagcaaaagaggtctgtggcctaacaagaggtctttagctcactcactaaaagagctggagagacttagcagcaatagtagctagtttttgttctattatgatatctcatctatggtagccgtcttatcactctccccttaaggcttctaaattttggctatcgtaaaagcttggaagccttatagggggagtggctagattggtgccatgacctctctaacccaaggacatcagagcatagtacataggcatgttttagccatcgtctgttatattgtttttattaaccatttttgcttattgttgtgcttaaaggtctcctttcttgtagcaaaagaactacttatttcatgaaaatttgagggataatttgtcaatagtgagatgtcagaacatcactctactaccacctccacctaagtatacaaatataaatatgatttttattattttattttactttctgaagagttttgtttctgattatttttttttttgtagcaaaaaaaaattcgaagacaacggaacccaagcatctt

SEQ ID NO: 179106 - DNA, 486 bp, Cannabis indica
aaaggtacctatccaacttcttcttatcgctcttttcggtttgagaatgcttggattcgtgaacctctttgtaagcatctaattgaggggtgttggttgggctcgggtctcatgaatattcaagataaaatagccaagtgtggggaggttcttgggaagtggggccgtgacattactggcaactttcgccaacggatcaagctttgtaaaaagcaaatccgagacactaaatgggggcgtgatccgtcttctatccaactccacaaggaaggaaaggataagctatctgagattttggctcaaagggagacgttttggaagcaaaggtcgaaacaatattggcttaactctggtgataaaaacagcaaatactttcactctgttgcaagtgcaagaaaacgaaacaatagtatcagccagctcaaggataacaatggtgtttgggttcggattgggaagtcgggagttacaaggtgttatcaaaga

SEQ ID NO: 179107 - DNA, 836 bp, Cannabis indica
gtcgattttgacagtgtacccttgattgtcaaacatgcctatggataacaagttcctcttaagatcaggaacatatctaactttctgaactgatctaataatcccatcatgcattttcatattaaccgtgccaactccaatgattttacaagctttgttgttgcccaagagaacagtacctgctgcattttcttcaaattcagtgaacaggttcttgtttggtgtcatgtggaaggaacaacctgaatcaagaatccattccacaccagaatcttcactagatgcaacaagaacatcagctgaatcgtatccagatgcaacatcagcttcacccctttccttgcttttgtcccttttgagcttgttctttaatagataacaatcatccctaaagtgaccttctttcttacaataatagcacttctttcccactgcatttctgttcttggaattggacttgtgtccattctttgatttcttgaaatctcttctttctggccttcctcgaacaaacagaccttccccaccagtttcggatctgtcatcaactttcttttgtatttcttttgagttaagggcagctttaacttcagacatggtgagagtatccttaccatagagtattgtgtccacaaaatgctcatagttcttaggcaatgagctgagtaatagaatggcttgatcttcctcatcaatcttgactccaatgttgttcaaatccaagattagtttgttgaagtcatcaagatgcctccttagttctttagtttcttccatcttcatggtgtaaagccttttctttaggtatagcttgttggccaaagactttttcattg

SEQ ID NO: 179108 - DNA, 808 bp, Cannabis indica
ggagaagagggcaatactggagggggggagatccctctctctccaatggataaactcttatgttggaatgtccgaggagccaacaatcaacaaaaaaagagactaattaagcaatttattagtcatcaaaaggttgattttgttgggctccttgagacaagagtcaaggctccaaaacttggtgccttctactcaaatgtttttgaggggtggtgtttctcatccaatattgcgtggcataagggagggaagattgtgatagcatggaatcctttacgattcattgttgatattattagatgcacaagtcaatttatgcacctaaaatttcaacagtggatggtatgtttgatagccttgttactgtggtatatgcctcaaatagtagaatggaaaggaaaaggctttggaatgatatatgtgaactgaatacttgtgaaagatggtgccttatgggagatttcaatgagattttagctaaggaagaaagagtaggccttcgggtgtcgagttggcctgatggagatttcttccagtgtgttacttgttgcaacttggaagacataaagagaagtggtaatttcttcacatggacaaacaaacaacatggaggagatcaaatcttttccaagattgacagggtgttagctaatcaagagtggttgaataagtatgaaaatgctgaagttgtttttcttaatgaggagttgttcgatcactctccggctataatctcctatatccggctgttgctagtggcctaaagcctttcaaaatctttcgaatgtgaagtcccattcaagtttga

SEQ ID NO: 179109 - DNA, 506 bp, Cannabis indica
tttagaaagaaaaaccaatcctgaagaagatgtttggtgacatcgttgatgttagttctgcacatttgatcacaaaccatacaaaatgtggtaccaaagacactctttattccaggtgtccaattccaaacactttcaccaaagagatctgattctgtgtatcggtgaagcaaagtgtttaagatgtgagccaatgtgagtggtactttgtatcctttaatatcaaccactttttgcctcagtacttctcatccaatttcaacccttctttaggtctataaaatacaagctcagcgaagaaattctggaaatcgtttgaagtaaaagaaggaaagtgattgatttgataaatcttttcaattgatgatcgaaactgattatcaaatagaagaaaattcgcttgtgtgcaagacttgtaaaattgatctacataaatcttgtcctgtgatgaagaccaaaaagtaaaaggattactcaacaatgccttgtcttgatgagttaaggtg

SEQ ID NO: 179110 - DNA, 583 bp, Cannabis indica
ataagccaaaaaaatgtgagttagcactctattatattttttctttttcatattttttatttgtttctcttctaagtgatatttgatatatttacccaaaaaaattatataaaataataaattataaataaggatggaatagaatttaattatataattaaattaataaatctataatttatttttttataataattaataataatataaacataaaaatgttatgttttaaattatatcactgattataagtacaacatataattataaaaatttgagaaaaccgcgcgaagaacgtcttagtttcctagtttataatgagaggagcgtttcatttctcgttttcttttcttagcaccagttttataattattttcttctaaaattaggtacacacaaagctacatgtcgttcagtttaggaaaaataaaacgacatgatcatatcttggttggcacaattaacgacataaagaaaatactgtgatggcgtggcgttgaatacaaaaacacacgtcgtagccttctgagcctatcaagttttgtcttttaagaaaatatttttcatttaacagtgaaaatac

SEQ ID NO: 179111 - DNA, 578 bp, Cannabis indica
taattctaattactaatacaataagagagatgttctaatgttattagtattaaggggtttttttattttacactttaaaattagttttttttttttgtatttttacggaattctacataaaaacccttattgcaactagcactgcaacctaaattgcaacaaaaaatcgtatagaaacccgtattgcaactagcgctgcaaccattttagaaactcaaactgtaaatttagaaaaaaaaaagtaaaaaaaatacataaagtaatttctcttattttaattaattgctattaataaaattatataataaataaatagtgtattaacaaaaatatcattacttctatttttttttttgaagtaatagaatggtataaaggtagttttatttgtacataaatgcatgtagactgattacataggtcaccattagagctgtaatctttatttatatggatggtgttaattattacattgtaggtgattctattacaccaaatgagactatagaattgtaatggtgattctattatggttatgattacaccaaaccaaatatgacattacctctatctagttc

SEQ ID NO: 179112 - DNA, 604 bp, Cannabis indica
ttctaacattttgatttttgttcctataaaaaaaattttggctacaggttttgaattagatttttatttttttgattgaattagttttgtgcttgagttaatataaaccaagcgagatatagcagagtataaactcttattggtgggtttatgatttgtgtgctcaatgtcatataggatactctacttcaatatagtatattatcaatgcattaagtgtttttcatatttgaacaaatttcaaaaaaagggttcagcaacttggatttaccaggtacgtacaagtgttagaaaaattaataataaacccaagatctatttgtatataacatagaacacaataataagatataataattaggtatgtgtacctgattgatccatagcaattatctctgtttgatccacagcagttactccactttgatagtgcaatactatcaactaagtcttcctccctagatctctaaatcagaagcagtttatttatctgattatcaaaaggtatacaattgtgatgagacaatatgtatttatagagttagggaggggacttagctacaaaaccctagttggctgggcctgctcatcaaaggcttcagtc

SEQ ID NO: 179113 - DNA, 780 bp, Cannabis indica
aaagaatgtttatctattggtaacctgctattacaggtcaaagaaaaatgtaaccatgatggatacaataaaaatgtaatcattgaataatcacccatatacatatataagatagaaacttattatactaaatataataattttaaaaaaaaaacttaaaaaataaaataaattattttatatataaaggaatgtcataaaataatttaaaattgtatttctttttcttttttttttttagtaaaaaataaaacactaaaataaaagaaaaaaaataatctcaacttaggtaacttttttttaacaaaaactgatgcaatactaaatttattttttcaagtaataaatcaataaactacttaattctatatatttaaaaatggaattatttaacaaaaacataaaaacaacaaaaaattacaaaagtacggttttacggaattttaaacatttttacgattttttaattttatttacagaaaatacggtcttttttatgttgtaatcttattaatttgttgttgattttttattatttgtatgttattttttgttgttattttcatgttacttttatgtagtttttttgttgatttttatattgttttcgtgttattttttagaaactgtaaaatgtaaaaaatattttttgaacgtaaaaatgtaattattttacaaaaatggtgccttatgtaattattcctttaaaaataagtttctttacaaaaatttttacaaatacaaaaactcatacataaattttacttgcttcgtagaagc

SEQ ID NO: 179114 - DNA, 767 bp, Cannabis indica
acaccgttactactaattccgttaaatcataattattgacacatgtaaggcttagatgcattccatttatttattttttattttaaaacttaatatttttaatattataaattaaatttgaaaaagttatcagtattgataacaaaagctaattaataaatttgaatattaataataaatttaaataatataaattatggaaagaaaaaattatgttctatattcatacccaacattttttctcttgaaaaacccaaaagaattttgaaggactattccacaaagacgaagcatcacccttcgggtgaaacctgctccagttgaagtccgacgaagcttccctccagctgctggccgacaatgtggatgaaacgtttccttcgagaagaacctccagaatatggtaaactttcttatttttatatatatgtatatatttgttctttgtgaatagataaagttgcaagcttttttttttgtttttttttgtatttatctcttttgactactgactttgaatgaccatttggtctatatatgtgtaatttattttatgattttccataaaaaaaaactagttagtactttgtagatagagggtgggtacgtggtagttattttagttattattttattttgttagttgttagtattagtgtattaagtaatgtgggtaggtagtgtttggtatagtagtgtagttttactatgtgcgctgtgtgtgtaattattttgtaaatctatttgtactgtgtttgtaaaggaat

SEQ ID NO: 179115 - DNA, 709 bp, Cannabis indica
ccagagagaggaaatgaagttaatagtgccctgaccaaagaccccaacaagccaattgataaattggaccgccctcctgggttcagaaagctcatcctcaggccacagtcataggagatccaaatgacaccatggtcactagacgaaaactgtagaacttgttagcatttgcatgctatctatcacaaattgagcccaaaagtgtcagagatgccctgttggatgagttttggttggctgcgatgcaggatgaaatgggaaactttaaaagacttggtgtctggataatggtccctcgaccagatggtgcgaatgtgataggaacaaaacggcactttaaaaacaagtcagatgaatttgggacagtgactcgaaataaagctaggcttgtagctcaaggatacagtcaggtagagggaatcgattttgatgaaacctttgcaccagtggcacgattagagtctatcagactgctactcatcattgcatgcttcatgaagattaaactcttccaaatggacgtcaagagtgcttttctcaatggggtaattcaagaggaagtctatatcaaacaaccacatggatttgaagatccacaccatccacaccatgtgtacaagctcaataaagccctatatggactgaaacaggctccgcgtgcttggtatgatcgacttacctcatttctcatctctcatggcttcatccg

SEQ ID NO: 179116 - DNA, 541 bp, Cannabis indica
cggagtaggtgaacgtacccgtcgaaggaaatagatctttactatggaaatagaaagaaatctggcgtaattaaatgaacaaaataattgccgaatcaaaagtaggctctagtctatggtcagatgaatgaaccaccaggggcgtcgtatgagagttggtttaactgctctaactatggcggagtatttccgagatgttaatgaacaagacgtacttctatttattgacaatatctttcgttttgttccaagcaggatccgaagtatccgccttattaggcagaatgccttccgctgtaggttatcaacccactcttagtactgaaatgggttcgtttacaagaaagaattacttctaccaaagaggggtccgataacttctattcaagcagtttatgtacccgcggacgatttgactgatccagctccggccacgacatttgcacatttagatgcgactaaccgtactaatcaagaggattggccgccaaaggcatctatccagcagtagatcctttagattcaacgtcaactatgctcc

SEQ ID NO: 179117 - DNA, 508 bp, Cannabis indica
tgtaatatatcaaattggtctatctatgttagtacaaatcatagtagtttttttttttttaaattagattcattattattggtaagtttaataaagggtgggtttataatttattttctagttttggaactgtatttgcagttatatatctacaggggcatttgtaagtggtttcttgctgtaaaattgggacaatttatttgacttcttttccaaatttatttatacttattcaaagcatgtatattgtactaacaaaatgaaactaacttgctttttcttttagatggctatgaatgaaattcttactttctcacaatatgtatataatagtgattaaagactaaagattttattctcctatgtataaaaaatatcttgatgaaatactcacgtaagttttgaattttattgtattgattttagttggcttaatttccaatttttaatgttaaaaaaatcattgttcaacaaaggggctgcaagaggaagattatttttactgcta

SEQ ID NO: 179118 - DNA, 1228 bp, Cannabis indica
atgataaataataataaaaaataagaaggagaagatataaagatgctatgatatgtcattcttttgtagctatttttttcatttcaatcgtaaacatcaattaaaaaatactaaacaatatatctatgtcattaagcatccttcatgtggagatgctcttttatgataactaatgattcactaaatttatttataacagaatgattcatttatgtataaaaatgaatacttatcgatcattgtttaatttattttatgtacacgataaacctactacaaaaaatattaatgatgatcacaaatgagatacactgatgattattaactttatatatagtagtgactacaagtaagctacgataatgactaattattttaatatacttttttgctttgcgtttttttttatactaggagaaaactacgtgcaaggcacgtatacatagttatagttttatgttaggtactatataatttaattggaaatgatatacaagaaataatcatatatatattttaatttattattatggtctaaatgaatcttttaatatagagtgattaatttattataaaacacatattactactcgatctataaatgagcactactattaaattagtttttcggtttataactccttaatacttaccatatcgtgtcgaaaatataatctattagaatcttatatacattcaccataaccttacaacataaaacacaaaggagatatggagcttagaattttcagaagcaataaatttaggctctaaacacatacaatcaaaaaccaaactactttatatctcatacaaaaacctaatcacataatcacacataaaacttattagtatatgatgaatgctaacaaataaataaaacaacttcctggaagaaaaaaaaatatacatgtgcaccatgtttcatttgatcaatatttcatggctcacaaagttaaaaggttatgtatacttcccaaccttcttaatagaaaaaaatcactgattcaaaagaatgagtaggaattaaagcataaatgaaaattaatgaaataacaattcatttattcaatcacgtttaattgtgttttcgagagtaaaaaaaggttagaagcaaaaccatttaacaagctcccgaaaaatcctatgttgcaggtacaaagtatggatgctaaagaagctctgccactccataaagaaaaaacttattacaaatacttaattatgt

SEQ ID NO: 179119 - DNA, 517 bp, Cannabis indica
aggtaacccgttccctgtgtctttgtttctattgcattctatctcatcgtatcacattctgttctgcgatatttgagaatcgccgtcaatccctcggcgtaggtccgggataatcctttgttccacagtctggggctatttacaactatccaattaagaattctcagatgtactagtactagcaagtgcatcaaagatgcagtcatcgattcgcccgagaggccacaattacggcgagcaaacatattaatgacgaggaacgcatttttgctatgctactaatacttgtacttgctccgctattctgcccccgcctggctgaggaagaattacggggcgtaaaacaaaaaaataatgctgattcgggtcggggcgatactctattttctattttctaacctttaaacgtattaaagtaaagaaaaagaaaagagtaaggccattccatttcgtacaaaagaacccaccgcccaaacttacctactagctttgggttccggccaatcccgactcatga

SEQ ID NO: 179120 - DNA, 683 bp, Cannabis indica
caatcattccaaaaagaaaaacaaaaacagcagaatttgatcaaaacccttaaaaagattcaaatcagggtttttggttaacccttaaaaattgaaactttctgagctatagtgatgacctaaaacgacacgacccacaaaagaaaatgaaacaaaggtaagtactttgagtttgaatcagtatttaggttacaaaatcaatcaatttaccctgaaaaatcttcaagcgatacataaatggaagcattgaagagaattgaagcttaataaatgaagcaatttgatgtaaaacgattcagatttcaaattaattagagcataaaattattatccaatatcctaacctatatatcacttagacggagacagtagcttcttctgggaccaccggcaacggcggagccgaaatggaagttgccatttttagaaggggaatttaatgtagcaaaaattaatgtaacaaaattctaaatgtgtgttttgtttttgttgttgttgttgttgttttgttttttttttttttgtttattttaatataaaatgttatgttttgtttgtttttcttagtttgtagtaagtttgtttttatttctattatttcctatttatattttttaattttattatttgtaaacaatctattttttgttaatttttttaagtttgtaattttttagtttaca

SEQ ID NO: 179121 - DNA, 750 bp, Cannabis indica
gtatagacaaactcgcgcaattttgttgctgtgatggttgcgagtgctttggcttcggctcactttgtgaagtaatcaactgcgactacagcatatctggctccgccttttcctttgggtaactcgctgattaaatcaattccccatattgcaaagggccatgaacttgtgatagaatggaggttactcggaggctggtgggtgtaagtggctattcgctgacatctgtcacacctctttgcaaacgcgagagcatcttgtcgcaatgttggccaccttgccgcataatttttaacgcgagggaatttcctccggtatgattgccacaaatcccctcgtgtacttcacgaagtatgtaaccacagtcctctccactgatacatttgagaagcggttgactaaaacttctgcgataaaacctttggtcatatattacataacggcctgctcgctgtcgcaatttcctcgcctctcttatcatcggtagagtccttctcagatatgcgaggataggagtcatccacggtaagtctcctcgaacgtcatctatctccactgattacttcttgtatttatggttgggtcgagccacgtacgtctaccggaacgttacatcgagcaattcggtcgtctctagttgaggccgaaacggccgaactgcgtcggcgtgggcgattttgtagcacgcggtacgtcgagatacaactacatttttgtaactctgcattattcgtcgataatggctaagta

SEQ ID NO: 179122 - DNA, 832 bp, Cannabis indica
agtgaattatgtgagtgttaagagtttagatacttatatagaatggaaattggaaagagaagagaagagaatatataaataaataaataaaaaagtatataggtaggtaataataatggtgatgagttaacttgtcactgatattatctgatatgagcagtgttagtgtagtgggtagtactagtagtagtagtagtactctgctctcatttctcacctgtcataatcttttaacttctcattcacgtaaatataccaaagaataagaagcacaggcaggggctcactccttttactcctatgattaagagattgttattcgatactagttgtgtccaacacttttttataactgacactctacgattggttatcaatattttttgctacttaattacactgataatagtataacataaaaaaaaaaaaaagttactaggcactaataatttattttaacaaatttttacaaataattattaattcattaatttctcttttctttttttttttcctttttcaaaagaaaagagacaaaaataatgaatactatttgatgaaaagagagaaagactcttcaaatatagactactacttacttcaaatagtagctaggtgggttggttcttcaactatgaaaaatatacatctctcaatatttttttattaacttattctcttatttatggggagtgtttattatgcttacaacataatttttataaatttttaaaaaaattgtgcatagcttttgtgctaagaatacatttaagttttttgaactcgcgtagtaaattaaaatatcataaactttattttttgtattataaac

SEQ ID NO: 179123 - DNA, 656 bp, Cannabis indica
gctgtggtgagttgggctatttgacgcgcactgaataattttgtctggcaacaaaagagttggactgcatcaaatatgttgcatcagcaaaaaacatgcttgatcagtataaatgtgctcaaggtagaaatggtatttctttgtctcctttaatgaagggagcgacattctgagcattggaatgcacctatgttacataaaaccaaagttaatattgatcgggctttgtttgatcaggagggtcagtttggtgtgaattgcgtagctcgggatcatcatggtaatatgctagaagctttcactaagggaaagattggctgtgttcaacttgaaattgcagaaataataggcatcaaagaagctttaagttggattgcatatcatccatgggaccacgttattttggcaacagatagcttggtctgtgtccaagctacccaaagtaatttttctatgatttctcaatttggtttacttgttcaacattggccgtgttcactaaggggaccacgtaatttctcaatctgctagaatctttcattattgcaatttcaccaataatatgtcaaaaccaagtgaaagaagccaccaagtggtgtgaaaactacttggccgaccactgccacacttttgggacaattggtggcaatggtcgg

SEQ ID NO: 179124 - DNA, 517 bp, Cannabis indica
ctcaggggcaacagtcagcacacaatcaaccaacaactgactcattcaatgaacactccaacgcgtatttccctgaaccgccttccaccacacaagaatcatactatggtcattcatatatataactagctatttttaaccgttgatgttttaaggtttatgactctagttattgcttcaaaaactctacatttatatacttcatgttatgtttgccgtgtttaaggtatttatctcaacaaatctcaaatttataattaatgaacaaataaattattttacccaagaaaattcaatcttataaggtcaaaaatttccatagtaattaattttttttatacacaataataaaaataaaaataatacaccaacgtaaaactcaatatataccaacacataatttcataatttataacaaattattcttaacaatgtactacgaaacaaatatgaatgtactctgtacgtgatattttgtactcggtacgtgatattttgtacactaattttactaaac

SEQ ID NO: 179125 - DNA, 851 bp, Cannabis indica
aagtgtaactgtgaagatgaagacagacaaaattatctggctgaatatgattaagaaaatgggaaaaactccatgggataaggatgaaaacaattcactgagaaaaaatagagaaaaaaaaaagaaaagaataagctgtaactaggacagcaaatactaaagttcagtagagaaattacccttgatcataaagactgcagtattgaaccttgcatgccaaaagaaaggcccaaacatctctgccaaagaaccaaagcaagaaaatcttcaatttgctaagtctacaatcatcatagaaacattatagcacctttaacattcaaatgtagaattgttggcagtgagttcatggtcaatacagggtgacaggaagctgggaaagggggctgtgtggggttagtattcagggctcattaagctgtctctggagataaccagcagttaaagattatgaaattttaagcacccttctaagaaattccagcatcatttctcaggaaaacgatacttatataaagtaaacatgataagctttcattttctatttagttttttttttttttaaattttactaaaaaaagttattatataaatatatacatacacctatttgtggttctctgtcataacagcagctaaaactaattataaatagcccaaacaaaggaatgacacaaccaaccagctacaattgcatcacaacacaaaagacataaaagaaaataatagagcatcaagaccccctacgactacttcaatgcatgatctaaaacaatgtcaaatttggtatagaacacaatatttgcaattgtgttccaatgcacatagcattttaagatacaaattaatat

SEQ ID NO: 179126 - DNA, 1344 bp, Cannabis indica
ggtcatccctgacctttcttagcaggatatcgacatagcatcgatatctatcgataaactgtcgataacatctggaaaacccagatttcgacagaaaactagatctgcaagatctctatcatttcagaccaaaaaataccagttccaataaatacgacacatataacgaaagcaaactacataaaatctaaacaaaatgcttaaaacataatttatccattataatggtgtaagattcttgagtgattggggtgtgctccggttttctaccaccgcccaccgagaaataaacattcgacagggaagagagagagggaagttttttcaattttttctagagagaaagaggggtgcacaagaggcaagagagagaggaagagagagggaagagagagaggaagagagagggaagtttttttagttttaccatttttttttattttttaataaaagggtaaagggtaaaatgggaagttgatgtaatcaatagaataaatttgtacaaattagtggagggtctaaattttgatattgggggttttattaagggcaaaaaataaaatttcccttttaattttcaattttataaacttttatttacataaatatttatttttttgattttttcaaattcatttttacgttgctatcaatgagcttctatcgcagcccgtctccgatcatgtacaacagaacatgctaaccctcaaaaatcaagctcctctccgattgcagctcggcgataaagagatcggcgaggtccagatcccaatcaaggagcttctggataattacaaagacgatagtggcgagaagcacatgagttaaagcgtctgcttaccaaacagaaaaaccaaggtaatctcaacttcgcctacaaatttggggaaaaattcacggctcaaggtccagctcaaccggcttttaaggccgcagttggtgaacctgtcatgggttactcaccgggtcatgctgccggacccagtcacgggtacccggctcctaggagatacccaccagctagagcttatccatactctcctcaagctgggtgcgcgcctcctcctcttcctcctcaatactctgtctaaatatgtatattttaaatatattctgaaaacatgctcttctatcaaaagctttatccaaaataagtaattgtgaaagtagaattactggccatgccaatgttttattccttcaggagctgaccaagcagattgaagggcgcacaatctgtgctttgtgtgatgctgctgcttggcctgtgcaaggtcttattaggtattttaggtcggagctcgagagaacagagagggaattgctggaggctgctgcttagat

SEQ ID NO: 179127 - DNA, 730 bp, Cannabis indica
catttcttagccattaaaatttttttaatcttagggtatttgatcaaccccgagtattttaaaatatcccagtaattttgtaataaacttatctcaataatttcatcaaagttactaacaaaaaccgttgtgatattttttgcatccgatcgggtctctatggtcgccgaacctgaaaatatttttatttcaccaataactcacattatatctagatattttatataaatctctgttattaataaattacgtttatttatttacttatgaaaaaatttataattcactacaaaaaaagactacctttagtgacaacataatttttgtagactaaaattacttgtaactaaaacatagtatttataaacaagatgtcattaattcagttttagtcacaacaagtattgtgactaaattaaaatacatttattagtcacaataaattgtaatttttgtgactaatacttttagtcacgggccttttagtcacaacgtaaaaataataatttatataattagtgtgacctttttacttttagtcacaagttttgttgtgactaaaagtaagaagttttgtagtgatttatgctgaattaggctagcaagatcataatcttactcattactctctaattaatcccataatatataataaactctaattattcacaattaagttttagaatattataagatatttggtgatttgagaaatatgatggaaaattag

SEQ ID NO: 179128 - DNA, 805 bp, Cannabis indica
catagaaaaatatttttcttgggcacaaattatctagtatattatttattttttaaaaaaaaaattacggtacttcggatgttgtttcggtaatttttataatttttatctgagttattatataaattttagttacaatttaaattacttcattagttgttatgtgggtttttatatagattttataaaaatataaaaagaaaaattaaaatataaaaaaaaaaaataagtatcaaaggttaataaaagtataatttttctcaatagtatcttaaatataacacatgctagcctcaaaatttaaatcattaggtcttaatgaaaattattatgggttagttttaaaaaaaaataaataaatttaaaacataatttgtattgataaaatttgaccaaaattatacaatttcatttatattaaatatttatgcttaaaagttcaaaattttaaatacttatgccacaattattcctatttttatataatactatacttaatttgaatttatatcaaaatattatatatttatacaaattgatactaaacatgatagtgttactatatatatatatataaaaaaataattatttaatacaattctaatataatacaatgtaagactgtgtacaaacttaagttttaatatgatataatacataacatgaatgatgagctccaaacctccactaacctataaattactacaagaccaacatacatctcataagtggagttgttggagttaaattactatctggcgacatatgtataatgtatatgctattataacgtgtgatacaaatt

SEQ ID NO: 179129 - DNA, 727 bp, Cannabis indica
aaggctagaataattgcaaagggttatacccaaagagaatgtatgaactatgagaaaacttttagtttggtagctatgctcaaatacatctacattctcctatccatagtagttgctctcactactataaaaataatttttcttgacatttttaaatagtcgtttaaagtattcccgtcggtttctataaccgtcgcctatacgacgatctcaaaacaagaaaaataggtgactgtttcaaaccgccgggaattaaaaaaaaaaaaagagaaaaaaatacatatttttttgccattaatctgtatttttccccatttttttcctacattagttttataattttacctaaaataaaataaaacaactaattaattttattacaataacaactaactttaaaacacattataatggagcaaccaacccccttcaacatctctcataacacgttctacgttgttgaaagctagatacaataacaaaataaataaaaagtaattaataaataaatatatttataccgagctcggagagagagaaagagagagagggagacgaacgggaggtgggggtggtgtgacgtatgagacgaagatgagagggacatcgacaggaggtggtggtgattcgacgtatgcgacggagaggagagggagaccgacgggaggaggggtgggtggagatcgatggatgagagagacgagaagaaataaagatcaagagaggg

SEQ ID NO: 179130 - DNA, 845 bp, Cannabis indica
ctgcctatgcagaaggaagaggctagtttaaagctaaaaactttcaagtcactattcttattagcattttcatatcatggagactcatattgttaatggtttcacaattttgtgatttttaagcaagtttccaaaacaagtcagggaagccacataaacacaagtctacaaacacacaataaagttattaacaaagacgttattatacaaaaagagttaaagacagcatttttaaggttttcatccacaaccacaaggaatagaaattgtaccaagtaagattcaacaacagagttatcgttcatcactacagcatgaaacccaaagtaaatgaagaaaacccaataatagaaaaaccacacaaacttaaagcttctcgtccaagaaaaccccaaacccatttacagctcttcatccaaaaaacaaaaaggactaaacaaaactcacccatttccatgagccctttcgacaagcttggaaggcgataaaaacccatcactagcatttagaaatgagaatgctaattcgaagaccagcttctccccacctctgccgagactcttctgaaccccaaaatcatcaacaacgcaagaagcagcagtgacaaagaagactgatcctgagaaacccactcgctcactgacttgaaagccagagtctgttcaacggttcatcttcttcttgctaccaccgcgcttcttcttcttcttcctcttctctttcgccttcttcgagctatccttactggcaccgacgctgttggaattgggaagcgcgtgcaaatcacccgtccatgggattaagagaaaacaatgaaccagataaaaaagagatatttttgattg

SEQ ID NO: 179131 - DNA, 683 bp, Cannabis indica
ttagtaccatgcgcggttccacccgcaaagacaccgtacaagatgggtccttctgaactagaagaactcaagaagcaattaaatgggatggtggaatctagatacatggtgccctctaaagctccatatggtgtcccagtattattttaaaggaaatcagatgggtcaatgcggatgtgcgtggattatcaagctttgaataaagtcacggtaaagaacaagtacctggtgccaagtgcagcatatttgttcgatagactgaccaaagcatcatatttcaccaagttggacctctgggcggcatactggcaagttcgaattgtggtgggagacgaagcgaagacaacctatgtgactatatatgggtctttcaagttctgagtgatgccttttcgattgactaatgcccatacggcattttgcaatctgatgaatgacgtgctatacgaattcttggatcggttcattgtagtatatctggatgacattgtgacttataacaactcattggaggaatacttgcagcacctaagaaaggtgttgacgaagttgagggaagaaaaactgtacataaaaaaggaaaattcgtgttatgtaagaaagaagtaaaattcattggtcattgggttggccgagggaatctggtaatggatgaaggaaaaatcaaggcaatcatggattgg

SEQ ID NO: 179132 - DNA, 598 bp, Cannabis indica
ccagcctgtcacatgtaagcaacaacatggccagtcagcttatacaatgccaaaaagatgaacaaagcttagagtataactcaccagagaaaggtcccgaagtccagtagagtacaacctatcagacacgccatgacctaacttctgcaatgcatcatccaagaaagggatagccctctctatgaaccgagtgattgactcactagccttcctaccagtagctggccttgctcctttaccgggcctcctggtaccttggctggcaggctgaactataggctgcccagcaggtgtaggacctagtggaggggaaggcagtgatggtccactagcatcttctgcatcagccacactagtagttgtcactctcacaaccccaagagtaggagggtacaagccatgcctctcgaagtcattggtcaaccgaatatatttctctgttcagtcgacaaagaaggatgtgattcgttcatcccatatctccaaaagtggatggaatgttgaagagcggtaacaactgaaactcgcggtacacaatttcgcaaaggtcttgttccacaaagtactttttggcgtacttgcctacttttgacatggc

SEQ ID NO: 179133 - DNA, 568 bp, Cannabis indica
gctcctaattacatggttattatcttgttgagttagtggaagcaatgagagtgaaagaagcgcgcgtccttgaaccgagtgaagggttctggttgtagaacaggtgatcattgaaattgattagtcactgttcaaactgtgcgttctaatatgccactacaaaaaacaactatcttaatttatgttgtgattaaatgttattatttttagtcacaataaaaagttacttgtgattaaagcataatatttatatacaaactgtcgttaatttagttttagtaacaacaaatattgtgactaaaaacacatttaatcacaagaaattgtaatttttgtgactcatacttttaactacagacattttaatcacaacataagaatgatgatttataattagttacaatttatttatttttaattaaaaaatttgttgtgactaaaagtaaaaaaaaaattgtagtgtgctcaattttcttgtaaaagattgtcaagtttttctttcttctatatgtaatgttcagttacattttattaaacaatctgcaaatctattttcaagaaaaaaaaa

SEQ ID NO: 179134 - DNA, 501 bp, Cannabis indica
cttaaaataagacaataaacacttctaataattttataacgcaatctattgctaaaaaaatgtaaaatgcaagatttattagtacaaagataaaaatactttaaagttatggtataataattattaaaatataacaaaataaaaaaattaaattcaaatcaaatgttttaacgttaccaaatgtcaagtagggatagagaatttagaaataattaacagtcttagaacatatgaatttaacaataattttaattttattttgtctcattaggtataaatgttaaaataggtattgtacttcacatactatgatgctaaataaattttaagtagttgcctataaatagtcatattaaggctatagcaagttttagtaattattcattttgtatgatttaaggaagattacttcatgatcctaaaattaacgcatatacatttcataaaaagttacctaatcaatattaatttacatcttacattttattacgtaaattagtt

SEQ ID NO: 179135 - DNA, 839 bp, Cannabis indica
atatatatgtgtataagaacctgtatattgtagttatatgagattttttaaaaaaaaaatcaaagaattctaaattccttattgtgtcgaaaataatatgtatatttttatatatatatttgagtgggaaatgtacatcttcaaatgttatttctagcatttaattaaaataaagggatgagctaattgagagtatcttcaatcatacttttaattttttttttagctaaaatagttagaaagttaaaataagagtcacttttattattattgctccaatcatgttctctattttagttagtattttaaattttaataatatttataatttgaatttattaaatataaatgaatttgttaaaataataaaaaagtaataataattttgattaaaatattataaaaaaaatttagcaaaaaactagcgcgaacttcgtatatttagagagctctctattcttttgttattatagagagagtattttttgtatagttgactcattttttcaagtctcacttcctattttaaataaaaaaaatatatatttaaaggtcgttggtgatgatgttttgaagcaacttctccaaatttattaaaagttctataacttcaatatactaatttatataaatgaaattatgtataggagctgcaaacaaaaatacacatataaataagtaaatttttaatgatggccacaatgaattataatagggaaatttacaaaaatactggaatttagggtcacttttacaaaatactgtcacacggaaaaatttacaaaaatactgtgtttttataaaacactagtaaacacaaaacagaacaactcaaaaca

SEQ ID NO: 179136 - DNA, 1034 bp, Cannabis indica
aacacgtataaagtactatacgaatacaaaacgaatgaaagaatgtaacaaactattttaaattcatatacataccaaatacatttatatcatagaaagaagaaaaaaattgcatctaccttaatccaaatatagataaaagaaattcttcttctcctccaactccattttatatttgaaatctagttttacaatgatactagtaaatattaacgaatatctactctttaaaataaaataaaagttcattgactactgtaggggaaggctacaaagttgaaaaacgaacctatatgaactgatatttggttagatataaacaaaagatgggaataataataacaggaaaatataaaggttaacagctttttgtttttatgtaaaatactacttttctttttcttttcaaaaaaaagtagagagtagaaagtagaaagctcacattcttttctctttggtattcaagaacgaggattcacagtagtctgccgcatggtgtagttgagaacgtaaatctctcaattccttcaaacatgttcatatataacagaccaaacatataaatatttaaaaaaaacataagtaaaaaaggataacaatcgttaatgtctaccttcagagacttgtcaaagtgttcagcgtcattaaactcgccgacgaaatctttctgcggtccacaacttggagttctgcatcctcttcttcttcttgttgttttttttggtaagaacagaaagaagtgataataataatagttttaggatgtaagtaacggcaacaacggttgagctggttttgccttatccttttgagtttttttaaataaaataatttgatatgaagataagtggggggagctaagctttttggattgtaatgagtttgagagtgatgagacagagaagtcggtgattcggaattggagctaggctcgtgataatcactcactatgtatagcatggaaaaaccaaaactcaaaaaagttgatatattctataaacgacaaatcaagtttcagccccgtgagtttgtgt

SEQ ID NO: 179137 - DNA, 650 bp, Cannabis indica
atatatatttatatatataatgaagaataagactgaatatgtttgcatatatatgtaaatgctaaatcaacttaccttagcgtgtttgagaattgtaaatatgctaacctatatagcataggaaaattcatataaatagtatatatttgtgtagttttgacaaacaacattatatatggagacatatatatatatactaggtgattgttacgtgccaagccacgtagtgttagttttatttaatattttagttttttatttgaattaataattaaaatagtataattatttgaacgatttgttttataaaaataaaatatgtgtcagtatatttagtaagtaaaatatagttgtgttataataatgtatgttattaatagtaaaatgtacattaatcttctaattgaaaaaagttctattatctcatttcatatctaataatagctacacaactatatatttatagactttcacattctttgcaaattactaataagcaccaataatattttcatattctaatatttttcaaccttctcctcttggtggtaaaattaaaaataagcacaaacatataaggtaaatactaattacagcccattttatcttttttttttattattattttaagttcccaagcccatttaaaa

SEQ ID NO: 179138 - DNA, 662 bp, Cannabis indica
ccatcatatgagtgttcctccatgtaagttgagtgtgagttgaatgtttcttcttgtaagtttcttctccatatgagttttgaattttctcaaagagagttgagtgaacttttaagagtgttgttatttagtaactttatttttaaaagcagtgaaaaataaaaagagttagtgcttgttaaattgagttcgaatcaacatggcaataccagactcaaaaacattgtcagattaattaccatatataattattttttttataattattattaattacataataggagctgagataatatgcagttttttttttttaatttgagacgaaatatcgactcaatcattgacccggtaacagcggaggagtaccagtcacgtgaaattaagctcaccagtcacgacttaaatgaatattaatgattaattatataaaaattattatttacttaaaccatccctaatagttcattaatttagtgtagaatttttttatttttagtgtaataattctaatgattcacactaaatatcacatcaaaaattctaccaaatatatatatattttataaaaaaatctcataatttatattattttataagattttttttttttttttacgttacgttaaacgtttaaaaagtttttttaccttttttccacg

SEQ ID NO: 179139 - DNA, 561 bp, Cannabis indica
ctcatggatctttgggaacggttagtcacgccattaatgagcttgggaacaccattttgaaagggacgactcatattatttctcagggtaaggatgcaatcctctccgatgatcttgaatccgattcgtctaattccaacaatacccaaaattataatttccaggcgagcttgaattcgaaacgttacaataggtttgatgcctaggttcgcacgttacaaggtgatgcaagcacttactgcgatgagcttgaggctttagatgattatagtaaatgaaagttaggttttattttggaagaaaaaagtgaagaaattgaagaaaatagggttgtggacaatatctacaagagggttgttctggatagtattgatcaccagactttttggtgtagatatttcttttaggtctataagcttaaacaagctgaggacttgagagctaatttagtgaaaaagagcattttcaagggaagaagaagaggaaagttgaagttgggagtgtttggatggtcgagtgaatgacgaacgagggcaagtgagagagagagaacgagaagag

SEQ ID NO: 179140 - DNA, 550 bp, Cannabis indica
gtacttaaataactataatgtacacgaccaataaaaaaaataaaataaaaaaagtccctcgaatatcggaacagataagggtgcatcagtgctccaattttttagaattttccctaatttaaaattgctaagaactatcaataaatttggctttggtcggacacaggactggctctgagtttgaaatgagtcataggcaaaaaaaaatttttaggccttttactataaagataaatggtattttttagaaattattaaaaaaatatgtatatttttttaaaatgtattttttttttattttaggctcctaaaataagtggggcctaacccgcctatacctagggccggtcttggtcggccactacaaaaataaataaaataaaaaaaaattcatcaattttttttttttaaaaaattcatcattaaacaaaaagaatatgaaataatcatctataatgctcaaataaaatttttatacaatcaattatttttaatttttaattggcccaattttcttccctataggttgaggtaaaaagtatatccctta

SEQ ID NO: 179141 - DNA, 618 bp, Cannabis indica
ttatttgagactaaaacataccatttagacacaagctgtcactaatttagttttagtcacaacaagtattgtgactaaaaacacatttagtcacaacaaattgtaattttgtgactaatacctttagccacgaattttttagtcacaacataagaataataatttataattagtcacaacttttctacttttagtcacaaattttgttataattaaaagtaagattttttatagtgtatatattattaaaacaataagagcattattaaatatttaaacttttataaattgtaatttgtgatcaatttttgttatttaataaaaaaattaagatattatatttcttcattttaagattttttttacaagaattatatatataatttatgatattattatcattattgattgcatgacattgaatttctaacagttaaatttaattgcttaacatatttttgtattaaaactattttataattaaatgaaaaatgtatttgatatagaatttttacacaagaataaattaatggcccccctaatattttctcctggctccgcccctgagtgatggggagtgggaaattcatcttttgggcaagcccaacttaagatctc

SEQ ID NO: 179142 - DNA, 673 bp, Cannabis indica
aaaaaaaaaaaactataaataatgtattgtcccacaattgattatataagcaataatattattagtgaaataaaaaccttggcattaatttgagcctcgatgaggatctctctaacgtcattatgttcaatatgaaaagaagagtgaataataattatatgaatatgatacttgtagctccatgggcacactctttaagtgtattaattaatataaagatgtaattttattttccctaaattaattatatttaatacctatttttattattattattatttcattacaattatcccgaggaacaaaggtgggtgcttggataataattgcctttatgtctggataattttttttacttaacgttcacaaagaaacaggaaagaaatagtgagaatgagataccctttcacttcacttttatttatctattgctttattataattatttttactatattatatattattgcttataaattataagaatatccactcttgattgtttattttttaattttcatatctcatcatcaatggataatatcattacatattgaataagccagatttccctaagagagggttttgctcaattggacaatactcaaacctcaatagtcgttttcagtatttataaaaggaaattaaaactaaaagaaaaaaactgaattaa

SEQ ID NO: 179143 - DNA, 856 bp, Cannabis indica
ctagtggaatgctataaatagatagtgaaggcttcaggaaaattacacttctgaatcagaaaacctgagcctttctctctctaccttggccgccacctctctctctctcttcttccttcatatttcgaaattaccttagtgattagagtagtgcccacacacagcaagcaatacctcaatcatagtgaggaagatcgtgaagaaagatcatcagcaaaggagtttcagcatcaaggattcagagaaagagatccaggttcagatcttgataatactctgctacagaaaggatacaagggttagagatctgaacggaaggagtcatttaattccgctgcacccaatgtaaggtttcttaaactttatacgtgtttatttcatcgttttagaaagttcatatttagggtgttaataaacatacttgtgagtagatctaagatcctggtaaaataatttccaacaactggcctcagagccatggtaattgatttacttgcaagaaatttggactttaaaacgattgtttgtttgtttttggatggtatcatgttgtattgagtgttatttgatgattgattggtgtttgtgaattttcgtgaaaaataattgaatatctgtttctggaattatttttattggatagtatggaaaaaattaagcaagttacttttttacagaactcaatttcgatttaatttgaattagttatgattttttgaagattcgaaaaaatcgggttgtgctgaaccacatgcgcgcgcggaaatcatgcacgacatgattccgccgagcaaactcggcccacgcacctgcatacgcgcgcggacgggtatgcactgcatcccgtccgtacagc

SEQ ID NO: 179144 - DNA, 621 bp, Cannabis indica
aataagaggttagcaacgtacgaacgttttccaagcacgccatgggagtctaggttttgcgagctagcccggaaaagaggcgagcccgtataaaggtttaggtccaatcattctccccatgtgctatcgggcataaccgcggggattaggacataactcccgttgtttaaggataataggttggtgaatgaggtggttaagaaaaaaaggttagccgggtttgggattggtaacggactcgtgcggaatgcctaatacctaatagcagcaaaatatctgtcaaaaaagtatatacatgaatcgaaagacagatagatatcgaagtgggccagcgaatgagtccaccagccgtctatttagtatataactcgtctctctagcttggatagaagatccaaccccctgaagcaaggtatgcacgaaccacttgggcgaggtggggttagattagagggaggggaactgcgaacgccgtcccactgaagcgccacgggaaccgactgcattcctcccgggccgtgggcgtctcgcgtgtccggggtccggactcagatcaaccagcgaccggtttaccggaacgaacggagtgttgcaagggccgaggagattgatagaagaacc

SEQ ID NO: 179145 - DNA, 836 bp, Cannabis indica
gcttatctttatgagtcaaaggaagtcttggaatgtcaagaatcccatctcccatctcttccccaaacatctacacaactacttccttgttccaagaattgtcagttgataaatctgctaatgttctagcagtataaccccggggtctgatgctctccatgagtcttccaaattcgtcaaaatccatccaaggaatccatggttgattccacatgtcgattgcatctccgctttctgccatcgctatagaccccttgagcaaaatatttcgagcatcaagaatgcttttccaaagatatgagtcacttcctttcttattgactctccaaaagctttcatgagagcagtatttgatccacggtttatcttggccctgttctatactccaagccaattttgcaattagtgctttgttcatatcttcaaatcttcttattccaagacctcccgaagcctttggttggcaaattttgtcacaagatttcagcgctagaaaccaatctttactcacatttcctagccaccagtacttgcgaataatagcatccaattccctacaggtggagataggaattttgtttgttgacatcatgtacaccggcataaaagctgctacagacttgatcagagttaatcttccggcataggagagtaacttcatcttccatccgtcaagtttcttcatcatacttcttttaactttagtaaggttccttttacaatctaaaaataaagtttaaacaaactgattaccacacatataaagagaaaaaaagtatagagtagcaacaaaaatatttaaattctcttttatagtcaatgtaattagtattttt

SEQ ID NO: 179146 - DNA, 1130 bp, Cannabis indica
attggctattagtttgtggactagtttgatggagtgaaaccattatgacattatttcaatactgaagttagtttgtatctctgcattgtgtgataaaatgagcatcctaattaattgttagagtttttggaattgaaaatctagtttagttaataggaaggaaatttcacatgagccaacagtaatataattatctgatagcttagttaatcgagtttttagtgttagtcttagtcttactcgagggcgagtaagaatctagtttgggggaatttgttaggctatttttagcctacgttttggatcactttttatagtttattccttctttaatattatacttggaatagaattacgcttgttttctttggtttcaggtttcacacttggaatgtataaattgatcaaatttcagaaaacaacaatctatagaatagagaaaattctgcaagaaaataaagctgaaacttcaagcttaaatttgactatgttctgataagattttggaaaaagtcaaaacataaaagttttagatttctttttcttctttccaacgcatcttgaatcaactcatttggagttcgtatgtgaaagttatgcacattttactgaaagatgctgaagctgtcaaatttgcttcagtagtcgcgaccaccactttccatggtcgcgaccatgatcgcggctaggagccaggcatcgagcttatttttcgtattttgcatatggtcgcgactaggctttagctagtcgcaactaggggcgaaagacgagattattgggcagtttttgactttttcagaggtggcaaccctaatttctatttaagggactcgttttttagaacaaagggaggcaaaaatgttgggttttatgccctaaataaaactcatttcaatataatcagatttacttattaatatagatcagaaataacatttaatcttgcatggttcacatgatttatttcatgattatatgtacataatgtataaattcatctgaaacccttttcacatactcgatcttgtttattgtgctgtcaacacattggaaagtaaacatgactatgtgaataaagtttcctagatttatcagacatagggttttactgatatgataatctacac

SEQ ID NO: 179147 - DNA, 537 bp, Cannabis indica
gtactttttcccaatacaaaatgatgagaaactataaaaaagtatacatttccgccttttgcaaagaacagaaagcagaccaaaaaacaggattaattacttttggagtagctgaaatataaatagtaccacagaagcaaagataggaaaatatatatattgaaagatcattaatatttaagccaaaaaaatagattcaaaatcaaatttcttacaaaagcatatatgtaaaacttgcattgcataatgtcctttgatggtcattccaaattcatcagtttcagctgattttatgtttaataaatataaatacatatatatatgtaagagttacattaattaggttcagaaccagttatatatatatttatggcacacacaacaaagcacataggttgttatgcttcattatgcattttcatgatcagatgagatcatcatcttgtaaagtgatgaggagtcaactaaagcatccacccacgggataaacccattgacttgttgtaccatgagtatgttgctcatctgctctgtact

SEQ ID NO: 179148 - DNA, 569 bp, Cannabis indica
tttcagcctggcgggtcaggcctgacccgagataaacgggttgagcttgactcggcccctttttttttttgaatggtagaatttttaactttagatatctctataaatatcattttttataatacatcttcagagatatttctgttaaatcgatattgtcttttgatgttgttcatatatttttttagaaaatattaaaagctatatctctctcctgtaccaggaaaaaaaataattgtctaacaatgactgatacaactgttatcgggccgggccagatcgggtcaatgatccgaataaagtccaattgtcacgggccaaagactcggcccgcgaaaatagcccaaattgccattcctatatatatacttgtcacaacaattaattgcaaaattaatttgttaataattttttcaaaaatcaataatttaaacaacaataaaacctctttaacataatagtatatcttaagaatgttagttaaaatcactcaaacaacaaatattgattaaaattttaaattccaaaagtttgcatattatctagtttataatccaaactatggcata

SEQ ID NO: 179149 - DNA, 806 bp, Cannabis indica
ggagaatcttctttctcaccttcttactatttttgaatttggactcctcaaccatgttaggatccatatctccaattgctaagcattctcctattgcatccggagcacgcataggatgaaagaccttgaatgtggcttgctcatcttgagctctcatggtaagctctcccttttcaacatctatcaaagttcttcccgtggcaagaaatggcctccctaaaatgattggaacttccctatcttcctcatagtcaagaataatgaaatcggccggaaaaatgaacttatccacttgtaccaacacatcttcaattttcccttccggatgagccatggaacgatccgctaattgcaaagtgacggtggttggccttgcttctccaattcccaacttcctaaaaatagacataggcatgagattaatactagctcccaagtcacaaagagctcttccaacatctcgaccccctatagaaataggaattgtaaagctgcccggatctttcaatttgggtggaattttacttttcaacatagcactacatccctccgtcaaagcgaccgtttcaaactcgccaagcctccttttctttgtcaaaatatccttcaaaaacttcacataagttggcatttgctccaaagcttccactaaaggtatattgatgtggagctgctttagaacatcaagaaatctccggaattgaccatcgtcttgttgcttcttgaatccgttgaggaaatggtggcggtgggcgttgctaagtaacttttacttgctgcatttgtatgaggaattagctgcagca

SEQ ID NO: 179150 - DNA, 881 bp, Cannabis indica
actcacaaatcacaatataattgcactgttctctgatgtttagactagactttattttgtggcacacttcatatatgtgtaattgctgatttttacattctttcccttaaaatacattttaaaatgactgataaatcttattatgaccgttttgtattgatttttttgcagattccattgaactttttgtaccaatttctcttaacacattactaatgagtgaatgtacttgtggaaatgagattgaaagttctagtaattctgaaagtttaagtaatttatgcaggtatgaatttagatgaattaaagctagaaagataaatcaatgaacactacgtttacaagttttctctgcattggaaatacattctaactgagtagtgtttgggtcctcaagaaccgagtaaagtaacatccactataaaattatttcaattacatttaccagttctaatttacaaatcaaacaacataatatgaaatgattttacacaagatttacttaactcttgaatacaattaagaacacggatctaaactcacttagatccaagaagacaagctccacttgcttccactaagctcaaatcccttcagcagatcagtctgaactctcttcacacattgtagatccacactctttcgacctttgaagatttaatgaattacgatctgcaagacacaatcaaagaaacacagaaaaatattttgtcttaatagaacaagaatcactaaatgattttatcaaaaatagagagttagaaaaaagcaaatatcagcttaatatgtagtatattttggtaaatcgactcagctattaactcacagctcaaactaactagcacttacagcataatacaaaacatgacacttacaaagtt

SEQ ID NO: 179151 - DNA, 799 bp, Cannabis indica
cgaggtatggatattgatcatggctgtcaacggtgtaatactcagattcgggaatcggttttccatgcgatatggggttgtcgggctaataagggggtttggaaattaagtggatttaacaatcagcttcgtcgtgatggaaaggaggatgttatgacatttctcatgcggctggccaaggtttggtccaaggaggactgtgaattgtttctgattttatgttggcagcagtggttcacaaggaatataacgaagcatggtggtaaggtgtcgcgaccagctgatgtagtcgagtggcgtgcgaagtttctgtgtgattttcaggggcaaggtcgggctgaagggagtcaaaggcagcgggcagaggcgcattggtgtcctcctgggggtggtgcattgaagattaatgtggatggtggagtgaagaaaggaaggaggggtacgggtatggggagggttgttcgagatggtgatgggcgtgtgctgtttgctgctgctacttttctgcagcaggaagtctcgcccttgcacgctgaattgctggctattgaggtcggtcttcgactgggaatacagtgttagacatttatatatataaactgaaatgtatatgtttaagtattaagtgcggaattaatcaaacatatatacactatgaataaggatcgaaatacctccagccattgaatcttgagcttcaaacccacataagctttgatctgcaaaggaaattgactaccatgggtaaatcgggcttcctcgctctctcaactctctttagatggaatttgctgttatg

SEQ ID NO: 179152 - DNA, 674 bp, Cannabis indica
ttcattattattattactaggtcaagtacttgttcttgttctcttttttctttttctagaataactcctgtgttgatagtttcaaactcttctttttcttttttcagtttccaatttgaaacagagatggaaggcacaaagcttcgtcgaaatgttttggaagaagggaatgtgagttcaggaggtaccccaaccagtattgtttccatgttgtccggcgaagaagagatgtttgcttttcgtcgagcagtaagtggcattagaatcagaaatcttagaatttttatttatactatccgtacagttaagacaataatgctgcttttaagatactttgtaaagaattgtaattatcaaccatcccaccttaatattttacattatgtctaaaaattatttagtgagaaatatagaatagaaaatctatatctactgtgctagtaatatgttttctgacgagtggctgtctatgcaggtgtctcgtttgattgaaatgcagacccctttatatttggagggagttggtagtctccatccttattttcgccaacaatctgaaactaagtctgcaaattacttgcaatctcagctgtcacactgagcaccatatgaaacgagtaccaattctaatctgaaatataactttcagtgtcgtgttataatggataaattgt

SEQ ID NO: 179153 - DNA, 643 bp, Cannabis indica
aaatatttgggccaacacgcaggaacttagagcatactccaaggagctcatcaaatatggtgtcacactatcaccaaatttgatgttaaaactatcttcactccaaccacaacaccaaaattacactaaaaaatattccttattattatattaattttttaataaaagaaactaaaagacacattgtaatttaataaatacaattaataatatagacatatacaaaaattagttatataaaaaaaaaaaaagtaatgccgtgtgaacagtgcacgacatatatgccgtgcactgtagcacacacagcaatttagtgtaaaatttgcagttacgttggagggctaattctactgcatcaccaaatttaatgcctccttggtgatgctcttagagcactactactgttatagatatattgaacagtttggcttcgaattttaatttcaatgcaagagataggcattaggcagttttactttgtttgtacgttatggtcagttatgagagttgagagtagagaaaataataagactagatgtaacaacaacaactttgtaataagttggaaatcgtaccgtaatatttattattcctcttccaaatatcgacaaatatgccaagtactgtggacccaaatttataa

SEQ ID NO: 179154 - DNA, 1051 bp, Cannabis indica
gcaaaatgataattttcactcttatatatggcagattgaaaggttgtagaagaaaagtataatgaaaatgaaattaaatctaaatacatatgtattatgatgatatttttagtgataatctttcaaagcaaaagaacattacccaataatttgttgcaaaatattttattggagaagaacttatcaattgtcattgccatctataaattcaatatcaagaattagaagaaatacattaataaaaacttaaaaatgaataattattgccaaataatatgaacatagaacatcaagaattagataacaaaaaaaatatcaagaattagaagaaatataataaaaacttaaaaatgaataattattgtcaaataatatgaacatagaacatcaagaattagataacaaaaaagaaaaaaaagagcataacataaacttaaaacctataagtggacacaaaatttcaacttaactttggagacactacatatataaatataataagctatacaaaaactacaaatagttaatttttgagtggaagaatacaaacaattttgataattaatattagaatttaatataaacataaataaaaaagagttacataaagaatataaatacttttttaatataaacataaataatgatgaaagttataaaagaatatgaataattttttgttacaatttttttatatataaagaataataagaaaatgaaaaaaatgaaaacatggaagaaaactcaatgtgtgatgccacatcatcctcttcaaagttttttttatatatatatatatatatatatactagcaaaaatctacgtgcgaggcacgtatactaaatttatgctagttttttctatgttatttgaaagtgatacaataaaaattggaagaagtttcaatggttactatttttttaaccctattggattactattaaatggttgtgattaatttggaaattaaataaaaataaattaataataactataacctgaaagtaacctaatcatttatttccttataaactttaattaagattaatat

SEQ ID NO: 179155 - DNA, 682 bp, Cannabis indica
ttgagaaattcgttgccttaaaaatattaattactctctttaatttctagctaatttctatataaatatatgtattataattattattattgttgttgaaggtcattatgttcctcaacttgctgacctcatttataagagaaacaaaggagctggcaaagaaaattccttcataaatctcaaaggtttcatggtaatatgattaattattattatgattaattgtgattatatctgttttttcatgcattaatttgtaggtacatatatagctgttttttcatgcatattattatgtgtaataatatcatatatgtatatatgtctcacactgtcactatccatatttgatttcacacatatataagattcttttttggcctatctattattaattaatagcataagttattaaacatgcttatatatatatatatatattatttttggtgtagattgggaatgcagtgataaacgatgaaacagattcgaatgggatatttgactacgcatggagccatgcaatcatatcagaccaactccaccaaagcataatcaaagactgtaataataataataataataataagcaagacaaccaaaccgtactcaaatgtgcaacccatgttcgaaactttctacaagcttattctgatatcgatatttatagtatctacacacc

SEQ ID NO: 179156 - DNA, 1153 bp, Cannabis indica
aaggcttcagtaaaatgctgtggtggaaagaaagcaccaacacatattgaatgtagcaagagcacttgcatttcaatctaaccttccattgacatattggagtttcatggtcaaaactgcagtatacttattgaatcgaaccccttcaatcctcttacatgacaaaacatcttatgagttactgcataataagccaccccaatactatcatctcagaatttatggttgcctagcatatgcatcacacattcaacaccaaaacaagtttgctcctagggctcgagcatgtgttttcataggctatccaaaacatatgaaagcctacaccttacttgacatagaaactaatcagatctttcactctagagatgtcatcttctatgagaacatctatcctctccaaaccgaaactcctaataaagatatcaacaatttcttccctaaaatgcaacatatagaccaggatcatatggttccaactaccaaggctcagcctctaatttttgcgccaatcaaacgagtagaagcacaagttgcccccaacatccttgtgacacaaaaatccaacaatagacacaaattctgcttctactccactaccaacagccccaactttaactaaatttggcaggcatcttcaaaaacctgcatatttgtaggactatagctgcaccatgaatattcatccttcaaccacttatcacccccgtgcaaattacctatcctacaacaagctctctgcttcttttagagtagccatccttgctacaacacatttcatcaaatcgactacatttgcacaagcttgcaaacataaagtatggaacaatgcaatggacaatgaagtagaagctttagaagctaatgacacttggattgttgtcccattacttccaagacaacataccattggtaataaatgggtctacaaaattaaatataacttagatgagtttgtggagaggttcaaagctcatttagtaacaaagggtaataatcagaaacaaggtattggctatttcgacacctacgctcctgtagcaaagtttaacaccctcaagttactttttgcacttgctgcaatcaaacaatggcatctccaccatatggacataaataataccttcttacatgatgatttgaatgaggatat

SEQ ID NO: 179157 - DNA, 527 bp, Cannabis indica
gtatatgttaaaatttagaagatataattttgtagatatcataatttaaagagtagaatttggtacatagataatttacgtattaataaaattaaataaaaatctttatatcaaataatcttcataattcaaaaaaaaaattaacaaccttagacttaatttaagacaagttagaactatgcctaaagcccattcaatccatagcttcaaaaatatattttacttttaaaatatattttatcatatacatcatattaagtgcgagtattaatattagtttagtattattgttggatatcagtaatactcaatactttttataagtgacacttataattagttaacgatattttttaaaaattattttcttaagttataagagttctcattacatcaacagaagtatgacagtaataaaaaatattagccaccaataatacctttaacaattctcgtattaattattaaattaaaattttgaaattccatattaaactacactgcagtagcattaatattcacagttg

SEQ ID NO: 179158 - DNA, 780 bp, Cannabis indica
ttcacgcaggtttgtgtatgtcacgtatattttgttagtctatgattttatgagttggactgggcctccatgtgtttgtctgtgtgtggtttctgagctaggagcgcttggaatttcagtcctactcatatactttcaaatggtagctcttcttctcttatgagagataggcgctctctctacggccaattctctttaacaataaaggcattccctgatcgtagaccacccttttttaacattagcaagcttcaatttcctgccgatctttttttagcaaaactaatcattggctcaagaactgcaagaaaactaatccgataatccttgattaacttcttaaggtggcggacgcttggttttaatattccttatattccatacaatggaatgtttcatagggcattttggaacgaagaagaaccatccatggtccttttcttggacctagtaagacctccagggggcaagtcactattctttttttgagttttagtgactttaggtctaacagattcaatagccttctcattctcagaagattcagagtcacttacctttttcaatggctgatgttcgataagagtttgtgccgactcattttcagtagcagctagtattgtttataatcttctcaaatctggtctggcctgtagttcattattgaatcttttcggcttttcaaccgcttcctcccgagagttcacatcatctacacgtttgaggggtgcagtcgatatcaactggaacgtatccatcacagttttagagttaatacgc

SEQ ID NO: 179159 - DNA, 1301 bp, Cannabis indica
ataataaaaatattgaaaatataataaatatttattatatttttattagattttttttgtatgttgaattcgtaacacttgattgtttagtgtatttattttcatgatgttttgttctattttattacttagaaatgctattattttaattatttaaaacttttagctacaatacacttgtaaaatagtatatttataaagtattaaacttaaataaaaagtgatagttagtttttacgtaattttctttatatttttaagttaatattgaaatttaggtgtgtaattggatatccaattaaaaacaatccaatccaattagtaattggattagattagattttgaggtctaattggattggatcggatgatgtttgtctaaatctaattactaattggattgaatcggatcggatgaggaaaaaaatgttagattggatcggatgcccacccctagttcctagtactctcttagatgttataatgttattggtgtaattaaatattactttcagataataatttttaaaaaaatattgttaactaaagtattaaacacaactagtaactaatgctaataattgaaatgtaaaatcccatattaaaatgataacagtatttcacctttgtaatgttcaccaatagcagcagtacttctcttattacaagggaattttgattttatatacttaaaaaattaaaaaaatttattattaaaccaaaaacctaaaccctaaaaaactatgccttttttttcaaaaccccaaaaatacccccctcacatttcaaatcctaatctcagcctctctcttcctctctctcggtgagcctcctcaacccacaaaaacccgaagttgtgctcatggtgacggcgcacggcgcaggcaacttcgacccagcccatcgacgacgagcccacccatggtgacccagccaatcgacgatgagcccacccacgccgaaccgaaaccatgttcttcatttttttttgttttgttaaaaaggttagatttattgtgtttgtgattttgttttggattgtttgtgaaacctattatttgttagatctaagaaattttgggtggaatgggtggattcggatctgcaaatttttttggggaagaagacagtccgatggggtcggtccgatggtcccgatgggtccggtccgatggtcccgatgggtctggtccgatggtccgatgggtccagtccgatggtcttggctggtattttttttttttttaatttttggctctgggtccgatgggcccgcgatgggtccgatggtcttggctgga

SEQ ID NO: 179160 - DNA, 555 bp, Cannabis indica
gaaaaaaaaaattaagtcattacattgtatctgttttaacgagaataatcatcataaattagtaaagctttactccacgtatttgtgccaaaaaagaaaaactattcatatggatgagggtggcaattcagatcatgacgcgattacacgacacgaacttagtacgtattattgggggttgggttgaatttgaataacatgattattatttggattggattaagttaaataatttatttatattcaatatattattgaaattattaatttgggacagattttataacataattttttatactcaagttttacacattaaaaggatccaatggtcaagatttgaacaaattagtatttatataaacttaaaaaaaaaagataaaaaagaataaaaaataagtaaaaatagtattaatcaagtatgtatgccccaacgacgtactgttccaacttttagttgttgctcctggagcattctctcagtatcctgcctcaacaacagcttcggctactagttctccaaccaaacaaatacatctgaagtaagagatcaag

SEQ ID NO: 179161 - DNA, 937 bp, Cannabis indica
tagtactgctcgatctataaagcttggcttggtactgtgatgaaggcctcatattcggatctggaatcaaaatccctcaatctagaaagaacatttctagtatattaaatattaaaattattagactccatactaaaaataaaaattaaacttttattagtggcagtaaatgttatttttattattattatttttttttgactactaaaagtaactaaaacattagtctattgtgataaaaagattttatttactaaatggcaagactattattgctagtataatgattatgcctttcattacaaataataattaagtaattatcaccgcactattattaagtctataacgttacgtattttcttttcttttctttatagttttcttaaaaaaaaaaaaagtgaaaaggaattgtaacataattaattatatggctcttgtatataaatttggttgaattgcaatattaattaatgttcttaattaaagctggtgtgataaattagcatgtctacctataaaatgtggtagctagctagtaagtaaatatctctacgcatcacataaatcatatgatcaaaagtataaattttatattaattttgcttaaaattttccatcacccattacatttttcaataaagaaaatcccatcaaaatgtaatcttaattagtttcggatcataaaattaacaattaagtaatcccgattttcaaggaaatattttttttttaaattttgtccatataattgtaaaaccacacatgtgcttgatgaagataaaagtaactaaaacaaagggaaacatatcatctagctatagctatagctagtacgtatcaataccttataccttataattcatttatttattatatatttaaaagaagtttacctgcccttacctaaataaaataatcaaggaaattaatgggt

SEQ ID NO: 179162 - DNA, 650 bp, Cannabis indica
acaagctaaagattcaacagcagcatcattcaggattactgtaaattcagtacaaaaaacacatactaatgtcagtactaacatggcacattatatagaattcaacaatcaatgaactcaatctagagctccatgaaacagtaactaacagcaatgtaccattgaaattcaggaggttccattcatcagttcttgcaaagtggatgatttgaatatccgaagaagctaaagctttttcttctttcccaacttgtgtgcaccgtagcgcctaatggcaccgagcttgagtgcttctctgccttcttccacaaccttttttctcacatccattagtaaacctatcccttcacaaccactgtccttctcctcttcatttccacctttctcttcccttgttgatactgaaccagtggattgaactttggcgagttctcgagatccagctccatctttggagttagagatggcttcatatccatcaggaaaactagttcctccccaccatttatatgacacagttgataagccctgagatggaaacccatgtttgaattcatccaaggtattatgaatattattaacccctttagtcaaatttgtggttagcacattttgggatctcacaatctgaacattcttgcctccttcat

SEQ ID NO: 179163 - DNA, 754 bp, Cannabis indica
tagtaataaatgagacttaaaccaaaatcacaataataaatacaatttatggcactgaactaaaaatcccaaagtgcactgcatttaatgaaaaattccatgttccaagggaggtccaaacatatagacattaatacattccataagagatatatcatagtgaaaaaagaagtaaatgtaaaaacttactaaacattctcaaatgttagatgagaattcaagactagttcagcctcaaatctaaatgacactttcctctcttaatgatcatggtggacaattattgtgatttgtctttaagtgagttgtctgttactcactataggctcgagaaacaaaaaaaaaatgtgtacgaataacgagatatccaacaacaagaagaaggcaaatgattgaatagaggaactcccgaactcgaacatttggctatctcagatgtgtcgatatcaatggtgactcattatttcgatgaatcatttctttagacagatgaagattatgtaaacacttactcgaaatctcacttatcagatttcattgtggaagacaattttttttgaagaattcgccatgatatatctaatctatgcataatatcatgaaaaatggatacaaattttgggctgctactttcagttgacatttagcctcgagttcaacagccaaaggctattattatagccaactcatactgctgctttagtgtttgccgagagagagagagagagagagagagagagagagagagagagta

SEQ ID NO: 179164 - DNA, 611 bp, Cannabis indica
aatcttcaatattattgtgttttttaatattaattttcaagtaccttacgtttgttattgatataaattatgtgtttttgttatgattattcgatttttattacaattgtaattagctttataagtgtgatatggttttaagtgttttaatcttatatgtaatttagttattattttgttttgttttcgattagttcttctttattctacgataattcgttatcaaatcgctatgttttttttacataactattaaatagctattaataattgagactaacaaattttgttagtgagttacgttgaataataatggagtaattttgtcatgatttaattattcagtaggtccatagctagctactaattattataattaaattgtatgttaatatgtgatatttgaagatatggaagattctatatataccaacttgtaaataaattaaatattaatgttattaattaggctccaagttgacaaaattatacgtactgatcataataatattatgtacaaatgtatataacatactcttttttccttaacatgccccccatctatgtagagtctgtaatgtaagtactactagaattgtctaaaagattca

SEQ ID NO: 179165 - DNA, 572 bp, Cannabis indica
aaaatcatactaccaaatagtgtcctattaactttcatccacatcagacgttgattagtaaaattagaaggtaatttttgaattaactatctcaactgcatgaaaagtttagaaacacaacaaatctaattaaatcactaattggtcttaaaatatataagtaggtatgagagttgatataattgcaaaagtaaaggtacaaattataatcctcagtgttgtccttgtcaatataaatatatacataaggtaatatataaataattatatatatttataataaagttaaaagaaagagttttaatttgtgggtaaggttttttattttttattttttataaattgtctcccactaaattgtgttgggtcggccgttctagggacaaggttttgtggggtttgtcacttctgaatttagggtttttctctgcaattaatgtctcacataaatgtatacacaaatatatcacatattattgtaggaagtacatatatacatattatgtaaattaaatattaagttaaattatttaatttgtaattttattatgttaaattatttaatttataat

SEQ ID NO: 179166 - DNA, 745 bp, Cannabis indica
gaattttgacaattttattacttcaataatcttgctgatgatgactattataacaactaattataattgtaggaaaaaaaatacttctatcaaaattcaaacctatatcaatgttattaatatgtgtgttttgtgatcatgaaaaccacacggtcatattcacatataaatatatataatatataattaatatggatgtattgttaaaaaaaaaaaaacttagtatgaatgtaatgataggacatttttcgtttactttaatattatatatgttcaacattttctgtgttatagtaaaaatgcaatggaaacatctacttaatctgagattctttgtcctagtagttgttgatttcattgtcttcaatttagatctataatataaattaaaaagtctaacttttaatgtttttgacttgttaaattgttgaaataattttccttttattaaattgatcatacttcatattaaattataagacaccattaatacattataattaaagagtattatagtattggtagtataattaattaaatatttaatgtcacatattttatttaaataattattataaaaaaacttagttaaatggcatgatattactgagcattgttattaaatactagtagtgactagcatcttctaatcgtgtcactttgtaattggctaacaatatgagaccatatacttaattaaacctaattgaataacaatgctaaaaaaacaaaatttagagaaaag

SEQ ID NO: 179167 - DNA, 639 bp, Cannabis indica
gactcatttatatattaatacttcataacttttgaatctgagactcaataaatatataggacaaaaataacacaattaatttatatataaatatattcaaaaaaaaaataataaaaatatataataatagagctcaaaattcataattaagtttttttttttttttttttctgagagtggaaagaaagaatcaaaaacagaaaattttcaattgagttggagatcaaaaccttatataggtttcagcctatatatatacatatatataattataattataccaaccaacttttcaaagggattgaaaataatgtatgatgttttccagtcatacaaggaagaaccaaaccagttcttttattatatatatgatatatatataattaagttattatattaaattaattaccttccgggcgagactgtcgttgaaattaatcttgtgtccttataaagcaaacccttggaaactaacttcaactctctgaaaaatatgatgaaaaaaaaaaacccttagttatataaagctagaaatcttcatcaaattcaacaatttaagctatatatttatattattatatatgagaataaaatagatctcaatcattatatatagaagaaaataataaagtaattaaa

SEQ ID NO: 179168 - DNA, 707 bp, Cannabis indica
ttattagtataaataagtatcaggccttatataacctaataaaatagttttttttaaaagaataccactaattaattataggacataacttataaaaagcattgggcactggtgtacccaataacaaagctcataacaagaaaaagaattgttgtgggtaaggagtaacatcctatgtcctattaggtgtcatgcaagttacaagttttcacaacttttctttttgttattattttgttacaaataaataaataatatgaaccatacataatgtctagtaaagtatggattaatatattaggatatttttaccgtgcactttcttaaaaatgattcactaatgtatctacaatagatgatttatacaaaagggcagagaagtacatccatgtagaggagactaacaaagtcttgggaacatatacaagtgagtattttctacgaagttcgttagacccttacaaagtctgctaagtaggtatggcaaaaagatctatttattcgagttgggtcggtgatctgatctgacggatcattactgatctgaaatattcggatactcattgaatcttagatcaaaattcgctctgcccgcgttttttttttttttttagcagatcggatctgacccaaacccgtttttcgaaagtatatatattttttttagtaaaaactcgtttttcgtaaacatatttttaaaaaactaa

SEQ ID NO: 179169 - DNA, 853 bp, Cannabis indica
tgatagcattggataagtaagttaatctgaaaattatttgtttaagttgtttctcttttttctgtatttataacacatgacttttgggattttttttttcaataaaattgtgaaacctatattactcttagttgcttctatctggcacaactaatttattacttttcaattgttttctttttattgatatatatatatttattaaaaaaaatttatattaagtgttttataatttaattgagaatagttcaataaataattatataatttaaaatggttcaaaaactaattttaattattttgtgaagttattttgaaataatccacggtaaagccaaatttgaaatttgcataaagaaaaagaagatgagaatgagtccttagagaatttaatcttcatctctttctttagacatagattaaaaatttatttaattacaataacagaatgaaatattttaagtggttgagattaaatctcactcaaaataattgtaattttttaagttgttaatctttgtattgagaacactattttattatatagagatcactattttttttcactttactttgtgtaaaattaacctacataatatttatgtggataactgaggattcatgcttttttttttttgagataaaaaagcctttatattaaaacaaaagtcaacatacaaagggcattagaggcagaggcatttcctccaaccatgtacaattagtatccaccgaaagagcatacttcgccaataaatgtgcagcagtattagcagatctataaacatgtgagatcatgcttaattagttataattttataaatgaatgcaacatatatttttgtattttttt

SEQ ID NO: 179170 - DNA, 559 bp, Cannabis indica
ggccaatcatcagtccatgaagttgctagagtgacgtacttatatataagagtcatcacttcgtgggtataagggcccaatgaggcttgaaaaatggatgttacaaatggtatcaaagccatgacccatcccaaaagtgttcgacgaggacgtcagacccgtaacggggtgattgtgataatcagtagtcccgtgatccgtagtgagaaataccaggtaagctgtcaatcccacatcgcatgtggaaggttgagtgtgatgattttgagactgtgtaggtatgggactacacagttgaagagggcttaaatagattgactggtaatacctatatcaataatgtgcatcttgtctttcgatagtccatcacaaaagaactccatggttaagtgtgcttgacctagggtaatttcaggatgctgacctcttggaaagttttcccaagaagtgtgcgagtgaggacaaagtacgctagaaacactcgtgttggtttgtagggctagtcattagtccatgaagcagctagggtgacatactcgtgtatgaaagccatcatttc

SEQ ID NO: 179171 - DNA, 591 bp, Cannabis indica
tctcgctagaattaagcgcatttgtgcgaggggtgttttgaagaagttagcccccctttgtggctactttctagacttgattggttttgttacaataacaccttctaacttatcaaaaaaaaaaagggaaatttgcggcaaaagtccccaaaaagttcacgttgatactagattagttcccaaccttcaaaaatagcggcaatagtcctcaaggtcacactttttatttgtccgtcgatacccagtttgacagaccccgttaagtactggcaaaaatgccacgtgttgaagtattattggtccaaattttaattttaattaaaaataaaaataattaaaaataaataaataaaaactttaatattatttttattttcttatttaaaattatttaaaattaatttctttttacttttttttctttttcctttttctccttttttttctttttcttttcttttcttcttcatcttcttcatcttcttctccagtgcactacacaaagcttcacggggatctcaaaggctgcaaatctgtagcatggagatctcgtagatctgggcaagaccttgaagatttgggctagggaag

SEQ ID NO: 179172 - DNA, 690 bp, Cannabis indica
aggaagcctcctcccatgaggaaggaaatgagtaagagggtcacctcgaaactctacctattttaaaatgattttggccatgataccagtgagtgaaagaacttaaagatggaaattgagttcttgatcagaaagaacaatctctatctacgccgttatgtgtgatatgaccaaacacatgcacaaggttaccaaatcagagacgtaataccaccgccaaggcaggtcacctagaggtaaaatcaatcaaatctatggagcactacgctcgaactctctatcacaagcaaaaaagtgaaatcctagctttagaggaaatagatcccaaatagcttaagcttggagagcgtaccatctcattcatagaaggagatgctacccaggtaaggttccctcataatgaccccttggtcataccagaacaaatagggaacatgacagttgtcaggtgcatggttgaaaatggagcctcttcaaacatacttttgatgtaacctatgaaaatatggtgctccaatcaacatatctagtaccttgtacacaactgatgtacgggttatttggctatggtcttgcacccttggatacattcgctaacctttgacagttggagaaaacgtcccacaaaacggactactaaatggctcagttcatagtgatcgatgcgcatcagtgttcaatacaatgata

SEQ ID NO: 179173 - DNA, 833 bp, Cannabis indica
gtccttgtttttgttcggggcaggttctgggtctgggtctgggtccgacttcggattacctgggtccaggtcaggtcctggtttgggtttgggtctacatttgggttctagtccaggtcctgtgtttcgatcccagtctgggtctgggtcggtattctattctaggtctaagtttgtgtctatgtctaggtcaaaattccagtctcgatcaagggcttggtctaggtccgagatcaagtcccgagttcaagtttgggttcgggttcgagtctcagtcctagtcaaggttcggtaccaggtccgggattgggtctaagctcgagttttggggcttggtaatggtttagtttgggtacgagtcctgaattccgatgtaggtctcggttccaaggcctcggtctaagtcccccatccaagttcgggtcctaggtcccggtctgggtccatgtttgggtttgggtcttagtcccagttttgattttgatttagtgtctcggttcgggtttgggtccgggtttgggtcggggtctaagtcctagtccgactctgggattaggtttgggtccaggttcagatcccagtctgggtctggggtcatttcaagtccgagtttgggtcccgggtgcgggcccaggtctgggtctggggtcatttcaggtccgagtgtgggtctcggtttggggtcaagtcatggatctcgatccaagttctgaggccacagttctagtcctagttcttgggcccaattcccaggtctgggtccccaatctatgtttaagtcctaggtcctggtccgggtccatgttcttgttccggtctcaggttcgggtcgt

SEQ ID NO: 179174 - DNA, 626 bp, Cannabis indica
tccggcgccggtgaagattattccggcgatgattttagattcggaagtggttttctgaggatttttttggtactgatttggtttttcttttgcgtgctgtagatgctgaggctgcgctgtatgaggaactttggcacgcttgtgctgggcctcttgttacagttccccggaaaggtgagcgcgtcttctattttcctcaaggacacatcgagcaggtaatttctcatattcaagttgccatatttggctacagctttagcgcttacaaagctgtttttgttatactttattttctcctctagttgattaattgagtctcctttttcaggctttgtatcttttgggtttgacggccaattgttattctattttttatttatttattttgttttaaattagacatttgtaagggtttctcttgctgttattgtgtttttgcttctaattgttgatttcttttctgggtttttcataggtggaagcatcgactaatcaggtggctgaccaacagatgccagtgtataatcttcctcccaggatcctttgtcgggtgatgaatgtggagttgaaggtaacaactattagtagatcgatgtatgtgaattagtaatatcaagtatctgcag

SEQ ID NO: 179175 - DNA, 529 bp, Cannabis indica
ggaaaagtaaaaatcaaaacagaacggtagttttgaagattttaccattaaaaaattaatttgtaaaattaaatatcacaaatcatataactcgagtagttttgttgtccttaatattttaaggttactattaggaaaggaaaaagaaaaaaaggcacaagtgtcatacattcacatgttaagtagtgtcacgtactaattaattatagttaaattagttttgtaacgtaaaatagtatataattgtgcaactaataataaaaaaatataaaaatattgaacttgtaacgtacaattattattgtataaattcattcttcacaattaaaatatcaaacttaagtttaacattacaaataatattgaaagtcttatcacaatataccattattattttttattcaggtatatgatttcacctttaatttctcatcacaatctgctattttttgttgatttttcttttcacatttatttaaattttactgtttttgtaatttttttttcttaatatgttcttatttaaaat

SEQ ID NO: 179176 - DNA, 890 bp, Cannabis indica
agctcaattaatagctgtgatgcggatattaccttgtctgtttatcattatctgtagtgtcagcacctcgttcacttccagcaaggtcaatgaaggagagcttgccaacaagacggggaggctttgattcactgccgtcagctgatctctttatagcaagctgaagtatggcatgtgaacgggaggattcttcattcgcaccagttgtaccagtacttctggtggcacttcctctttcaatgagctcctttatggtctctacatcagacaccctgtattcttgcaagcccacaatgcaaacttgctgctttccatcctccctcatacaaagtttcctgattgaaatagggttctacctttagggccaaatctttgaatctcaattagaatgtaaaaagatcaatgacaaaaagacttactttcgttcattgaggagatcaaaaagctttcccccgtatatttcaaaaaagctcacaaacaactgaaatccatggttgcggtatgtgtgatgcatcaacctcaagatgtctcgtgatgccttaagaggcaatggtttcattgtgtatgtctttccactcctaaaatggatccaaagaagaacgagaatataatgtaagcacacttgaatttactgcagaactcaaagatggtatagaaaagctaaatccaactaatacagaggcgaaacatctaaactttcagtagaaaaataaataaatatatacaaacacatcttcaaagtaaaaaagttgtcacatttgtgaatcaaaactgatttgtagttacctgtttgtccataagcaaaacaagttgcctttgtgcgttgaaaaattattggaacaataggctccacagtctcacggtatacctgaaagtaaacaaagagcata

SEQ ID NO: 179177 - DNA, 531 bp, Cannabis indica
aagtatttgacaaaaataatatttaatagcgttatgttttttttctttttaaaaaatgatcaatataattttataattggatgaatataataagaaaaatttgtggttggagaatgaatttgtcgatatatatatatcaagaaatttttaaaattatattacttgactagatatcatgcaagttttaaaatttaaaatttatatattataaattattctttaaaaaaattagagttaatatatttttattacttttgtttcctatttcaaactcatattttaaatttaattaataatattatttttcaaatcaaaaactaatccccctattatatatctatttaaatatataatatattaaaatatcttaaaataattcaaattataataacttaaaaaaaataacttaaataattaattaaatctctataaataacttcttctttctttatgttcttattcaatgtgaacagaacaaaccgttcactccattccactctaaaaaaaaaaaaattaacaaataccaaacta

SEQ ID NO: 179178 - DNA, 830 bp, Cannabis indica
tctacgttaaaatctgcaagcacctggcccttaatcgatatgtgtggaatgtattgtatgtcaaattggcttaacttcatggcccacttaaggagtctccctgaggcttcaggtttttgtaagatttgttgaagtggatggtttgtaaatactttgatggggtgcgcttgaaaatatggcctcagctttctcgatgcaatcaagagacagaaagctagtttttcaattagagggtaccaaatttctacccctatcatgcatttgctgacgtaatacactgggtgctggacctttccttcttcttggaccaaagctgaactaaccgcattcttgaagatggctacatataaatataagtcttctccgtgaatgggttttgacaacactggtggttgggccatgtgctctttcagcttcttaaatgcctcctcacagtcttcagtccacttaaacttctaacattttttcaaaatgtctaagaatgggatgcacttattggttgagcgggagatcagggccggccctgaaacaagtgggccatgggaaattttttttttttggcccttatgttagaaaaaatgtgatattttcaaaatcggtaaaaaaatgtataattttaaaagaggaaaaaaaatttgggccctgggctgggtgggccctaggcacaggcctagcccgcctatgcccagggccgggcctgcaggagatgaagcgactcagggcgaaaaccttcctagttaagcttttcacatcctgtgtctcctcggggagggatacttaacaaggcatatatcttttctaggttcacctctattctgcactggcttact

SEQ ID NO: 179179 - DNA, 572 bp, Cannabis indica
atgtttagacaaaaggaaagagaaagaaataaaatggttttgtacctaagttaaaggatataataaataaagcgtcatcattatctgttgatatatttacatgaccaatggcattgacaaatttgtcactatctagtacagcttttatggtttctttcccttttttttttttatttataattttaataaaaactttaaagctggcatggcagggatatttgagagattttaggagttcatctagaagatctaaaattgttaagtttagttctttgttctaacgtgtgaaaaagggtattgtctgctgtccatggaatctgtacaaatcttcttttgtggggaaaagatgccactatgtcgtggtagactttggggtacaaaacttattattttatctcctctaaaaaaacaatataaataaaaaaacaagtttttttttcttttcctcaaaatcccaaaataaataaataaaaaaggttatttcttgagtattttcatggtggacttatgaattttatatggtccactttgcatataggatacagtaagttctactagatatgtagtacatc

SEQ ID NO: 179180 - DNA, 507 bp, Cannabis indica
tttcccgaaaggggacaacgttgaatatttgtcgatatatctagaattggctgagtccgaaacatttcttcctggatggagtaaaagtgtccagttttattatagcttatcagttatcaatgaaaatcctcaactaactgttaaaaaaggtattattaattgtgcaaaagtttcattcttgttagtattacaaattataatcttcctatggctaaacttgtgttgcgttatgtatttactgttattaatttgcagaagcaaagaatgtgttctatgctaataacaaggtttggggtttccctacattcattcctttaaccaaactaaattacccttgcaatggttttcttgtgagcgacgtttgcacggttgaagcagaggtttttgttttattgattattgaaaatttctcttaccacttcacatagaactttactttagcattattattaaccttaattgcaggtaaggttttatattgaagaactagatgacaaaaagaaatct

SEQ ID NO: 179181 - DNA, 862 bp, Cannabis indica
ttatggcttccattttggtccaccatccccaaaggtggctcaacgacgttgagtcgagagcaacaagaaagagagatgaggattaaaggagggagctcacgagtggaaagggaattcgagattaggtttttagtgcatgtggattttcttagggtattgggggggtcgtcgatctctacgatggtggctggggttggagccgcgtgcgattgacagagaaggagagggagagctgagagagagattagagttttcagaagatgaagaagaagaaaaaaaataaaagtaaaaattgatttttaaaataattttttatttctaaattttaaatattataattattttcttattttctaaatttttaaatacttaaaattgtagacgctaaaatctacaatgatcggaatgagcattagtgggcatcgacaacctgcggaacaaagacaaaaggatgaccgtgaaaccttgggacaccggggtggttccgaccgaaggcactccgacggtcaagtcagtaaatttatagtgcgaagtagaaaagaaaataagaaatgtaaataaatgcttcctttgtctatggttatatgatgatcgacagtcaaaccttgctcaccggaatgagaaaaagtatgtcagatcgtagagaaatgataagtttagtcgtaaaactatagagaaagagagagagagagtgaatattcgtatatctttcgatgccctcacccagtcctagtgtgggcctatttattatcttaagaaatggttacctcttgaaacctggtccgtccctagagaaacggtctttcccacttctacagggatgagcgtcatctttaggttcgttcctggatgagcgcctccc

SEQ ID NO: 179182 - DNA, 697 bp, Cannabis indica
atgtccaaggacgatagagacaacctgagacttccacaccaagaagttcgattattttactaaatacacttgttgatttttttttttaacttttcctttttcaagtagttatacttgttgaattaaaaagctgaatagaacatttacgtagataaattattttaataatggtctattttctactttattctctatttttggaaaacaaacaaaaatagttacttattataaacaaataaaaaaaaaactaaaaacaatacacttcaactttttatgtttgaaagaattaaaaacaaattttctaccaaatgcaattaagaaatgaaatataaatatatatttcctatttcaaaaactgttttttttttttcttccttcaccacctctctctccatcactttctctataatcatatcttacatcatttttctcatacttttttttccctattattttctagctcatcacaaattcacaatctcatcatcactttttctatcatcattttctcaaaccttccacaaatcacataaatatatatttcataataaattaacaatacacgatcagatgctatctttgtggaggtagagcctaatttaatcaattgatccaactaaaattagtaaacacaattgtatatattaaatgaacaccagaaaaaaaaaataagaaagttaaagtactactttaagcc

SEQ ID NO: 179183 - DNA, 639 bp, Cannabis indica
taatcgagttaattatttaatttgtaattagtggtatttgagagtaattaaagaaaaagcttcttttctatcgctcttacaatacatttaaatacactacacaaagtgtgttacacttatacaaaattacctatcttataattatatgtaatggacatgtttcacatgtgtaatcacatgatatacctacataatatacacaagtacgttactttagtaaattacttcttaaaataacgattgatcctgcaaatcaatacaagtatttttaacttgttttgttttcactcgcacgcaccttgaaaaaactttataagagatcactcatcttaagattgttataggtcatcaaatatgcttaactttagagttcttaagagaagatgaatcttattgatatatgtagtacccatcaatccatttaaactctcttcagctgtgtagtcttatacatacatagttttagaatcatcaaacatgatacctttttcaagtcatgatgtgggttagcacaacttacacggtttttctcttgcgaatcataggactctgattgtcacaatcacctcatatggggacagacatccttgtcaatcacacttttgactgggtgaaagctctgatacatttgtaataccc

SEQ ID NO: 179184 - DNA, 876 bp, Cannabis indica
  modified_base (774)..(774): a, c, t, g, unknown or other
ttttcttttttttttttaataacaatttatactaatatttttatttttttttaatcattaaagtaaaaaataagcgaaatctatttaatttgcattcatttatcaattatcatctatggtgtcactcgtttcacaataaaattgaatagaatatatgatgaaaagactacattactgtaaaagttttatttcaaagagtatattaattaattgtatacaataagagacacaacttggtaatgtaaaaaattaaagaagcaaaaataattactattcttcttctaattaaagaaattaaaaaatctctctaaattaatagagcattaattactatataggtaatattaggattgggcattcgatccaatctaattttttctcctcttctgatccaatccaatagtagttggatttgaaaaatcatgattcaatccgatcaaattagacttcaaaatctaatcaaattcaatctaattactgattggactggattagttttttaattgaatatccaattacacatttaatttttaatattaatttaaaaagtgaagaaaaatacataaagactaaatatctctatttctttaagtttaatactctataaaaaatatcattattacaggtataatacaactaaaaatttgaaatgagtaaaacaacaacattcaaaaaaataaatagaacaaaacatcatgaaaacaaaaatacaaaaacaacaaaactgtataaaatttaactaaaagaaactactaaaatataattcgaaaatanattttttattattaatcaataagaaatataaacaatttttttaatattataaatctaattagattgatcgatttttattaagtattttgtagaatgacatac

SEQ ID NO: 179185 - DNA, 836 bp, Cannabis indica
tttggtggaacaaagacttggaaaatttaaacaaaatacaattaggaaacaataatgaaacataaaaaaaatgcaaaactggtttcagtaaaaatttaaaacatacattaagtttctggggagatttctttgttgctgctttaatggaaatttcttcttcaagagtagcacccttaaaacaaaacaaggaaaaatcagtttcatccaaaaaaattcataaaggaaaaaatgaataaacaacaaaaaccagattcaataaaaacatagaacatactttagatttacggggagatttcctcgtttgaactttaacagtgttttcttcttcaacagaagcatcctaataaaaaaaattaaaaccagttttcatgagaatcaataaaaagaaatcaaaataaaacttaagattaaaaaccaattttattaaaaacataaaacatactttagcttgccgtgaagattttcttggtcgacctttagccttgatagaagtacaaaggaaactttggattctgatttactttccatttgataaagaatcaaagtacaaaaaaaatattagacacaaagaacttatcaatcatgataataaacataaaaaccagtttcacaaaaaaccgaaacaaatcaaaccaacaaaatcgaaaataacacatgatttgggcaaaaaacaaaatgataaaataacaaacattaaaaccaaatttgaaaaacaacctaaaaaataaaaaatacaataaataatgggctaaagagggagtactaataataaagtctaacaaatgaaacttgaatgaaaaattaaaataaaaataaacaacataatgaaaaataag

SEQ ID NO: 179186 - DNA, 782 bp, Cannabis indica
tcttttgagctctcatgagttgacccttgctaactcagcttgttcactccagttcttagcaaatttgaacgcagcagggctttgcccttcgtatcttgttgccaaggcatgaggaagtttggggctggaaccccatgatcagctcaaatggactcttgctagtagactcacttgtttgaaggttgtaagaaaactgggcaatgtctagcagttttgcccaatctttctggtttgcactcacatagtgcctcaggtataactctaccaatgcattcaccctttcagtctgtccatcgctttgaggatcgaatgaggttgacaaaattcagatcagtgccgaggagtttaaacaactctctccagaacctgccagtaaaccgcgggtctcgatcactgattatgcttgagggcagcccccaaaacttcaccacattctttagaaacaactatgcagtcacttctgccgtgcactccgtcggggaagcaattaaggtggcatacttgctgaaccgatcaacaaccaccataatactcacacagccatttgatagtaatgaagtccatggagacactctcccatggtcgactcgggataggcaaaggaacaagcaaaccagcaggtgcttgttgaagagggttgtcttgttgacaaacaaggcaggtgcgaacataagcttccacatcttctctgagttgtggccagtaatacattgccttaataagcgccaaggtgcgtttcattccaggatgcctggcccacagcgagtcatgacagtccttaa

SEQ ID NO: 179187 - DNA, 764 bp, Cannabis indica
agtgtaattaaaaagaggtatagtttttgatattttctttaattaagtagctaaattataaatatataaatttaaatttctcttttgctattcatcatcggatcaaaatttaatggtttaatatttttaaaattaatatttataattaaatttgtttggtactttccataatggataatatccattaaaaattgttctatatatatataaaaataagtattgctattgttattaggtattattaacaataggatgactcataaaaatgttaggcatcataaatgccttaacctttctctatatatacactaaataaaatcaatagtcttcctatttaattaattttctttgaattattattattatatacttttttaatttttatataaaatttgaaataaaaattaatatcatatataataaaaagttaatttaaataaaattaaaataatttactaaaatctaatttataaacctttcataaatatgtagtatattatacaaatgagaaaaaaaaataacttcattgatataaatcaataagaaattatagaacaacattaatccaaaaccagtttattatttaccttaggtgcagatacaattaatttataactcacaaccagtcttatatattgttcgagttgaacaataatattcgatgaaatcatataactaaattaaaaataacatatggtatgatttatttatttaaaaacataagtaggagtatgtattaattattaaatattgataataaagat

SEQ ID NO: 179188 - DNA, 554 bp, Cannabis indica
ttatcatgtttccttatttatattatgtaagttaattcctataaaactttctaggttcaatgcatatgtttgaacggactgattgtatgtttaaatagattctgactttcctttttggtaaacatttttcatttattatttgattattttcttattggtaaagcatgaccaatggtgtattaattgaaaatatattattactcaggttgtgattttatatggaaaaataaactattttattatgcaataaatactatatctatatatgatatttctttgtaactgatttattttattcattttctcatatgatcttattaatcactcaagctaggttgtgtaatgtccaaggaaatttcatgggatgaacttggctttgatggagtctagattcagaccttttgagcttggttttgggtgtcatttatcactataaatttggcctaaaccaccagcagaggttgaactctctcttctaatttttttatatttttaaaagagagtgttctttttgtaaatgatagttgttctgctattcatttggtgagttttgt

SEQ ID NO: 179189 - DNA, 940 bp, Cannabis indica
agtaatagctcttaccatttctggttttttcagctgttgatatatgggcctataataatcaacccttagtcgactttagtattattttgttattttaattcatttattcttacaaggatttcatatgaattaatgaataaaaaattacatttttatttttcatattactatattaatatcatattttttgtatattattaataaatacattttataacatttttcttaaaaaataatgtttgtgtaattttttattttatttttttataaaatttattataggttatttttggtaagtagatatttaatattaataatagacaaacatattttattattagtcatgcatgaccccaaataaaattaaagtagaacgattacataattttatattatgtcgagactttaaaattttaataaaagttatagaattgatataataaaatgtatttgattatcttaaagtgatttttgtcgaattatattttatatttttaccttacacatagttactaggtagttcgaatgccaacaataatattttaattctttttttgttaaacataaaaaaaaaggcgtagagtgttaaacttataacctccctaacttttaaatttttttttaccaactacaccaaacaatcttacttagtattatttgaccataaaagtttttgttgtaaaggcccaacaaaaattatttagaccttagctcaaaatagcttaagaccggtcagagacggagggaaggggggtatgtggggtcatttgcctcctcttaattttttattcatataaattttgtatataattttttgagtattttatattttgaccctataaaaatatttttttttttattctttgtccttacatatttttgtatttatccccataaaatttatatattttacttttattctcacatatatttattttta

SEQ ID NO: 179190 - DNA, 915 bp, Cannabis indica
cttagttggtccttcctaatcctcaacttactcatctttcattttccattgagaacctcagcaatcaggtaccaatctgctgttagttttttaattttgcaaatttcagttttccatggattatgttgtctgtaattagattcggttcttggagcaaggaaacgggtttatttgaatgatcatctttcgttctttattcttgaaatttgtaatatacttctctgtgatattagttttataatgcaaatatgatcaaaatgggtgaccatacccattgtttcaattctgttattacaggaaggatattggattaggaaaacgtatttgcaggaatacggttcaaggaagatactcactgtccgatgacaatggtcaagaattttcccttcttttattcaagcttttaatgcctttttttgttaatcttaccttaacctttactatgatgtagatgttttgtattttttagtcatttatttgcataagagtgcttgtgtgtattttcgttggaagatgatttagtttctgtatggacaagaagaagactttgcagaacactctcagtaattgcacaaaatttcaattaatgcattgagcaaaatgtctatttcatgctgcaggcacattggctgctttaaagtgtatggttaagcttattaggttacacttattagttgctaatttgttcatgcaaagagcttagaaataccgatttttaatgcatatactcatttatgcgatgaaaaatgtggaagattgaagatataaatgttttttttttaatgctacagctagtatctgaatggttcttcctgctttctagtttatcatgctgtttaacttctttcttcttttttttttggtctagattcacttttaagatactcgcactgaagtgggttgctataatgctac

SEQ ID NO: 179191 - DNA, 608 bp, Cannabis indica
gtataaaaaacatacataattacaatatatatctcgttcgatatatatgatatattccaaattaagccattttcaaagctgaaatgcatattatataatatatatatacatatctcattttgcatcgtccttacttttataaatgattggattaatgaagattgatgagagttgttaatcacttaaagcataaatgtgttagtacaatacaagcttagattccatctataaaaatgtcatgcaataccactacatactagagtatatgaagtgtcataaaattactaatttgcccattgtattacattgtaactttttcaggatcattgttgttgggccttaaaaagcccactagagatcaattatgacaaccctttatgttctaattcaaaaggcacaattagttgagtctagcattcctgtgcaattcccttcctttaattcaatatgctcttcccgcttaggttagctgtactctcgtgtagtagttaacgcttggtggatagggcgaatccattaactcaaatagttcatgggagaaaatcaagttatttgggccctgaagtgggcgaactactagttttcggatacgagatatccatcctagt

SEQ ID NO: 179192 - DNA, 673 bp, Cannabis indica
aagttttgacaccatttcatatcagcacagcaacacaaacctaaacaattactcaaaattgctaaaaacaaagaacacacagatatataatatatagaaagaagagagaagaaatggggaggaagaaagggtcacctgagatggatttctacaatccagcgccagagatggagacggaggagagagagatcagcgaactttgccgttcaacaatggagtggagaagaagaacgaagaagacgagtctgaaaagaggcttaggaatatatacttgggcttgggcttgggcttgaacttggtttgggcttacgttggagttggcttaagttagagcctgaattttggggttttagaaactttttgaaaaaaaataactaaggaatgttacatataattttttttactaaaagaacgaattattatggatattgtcacaaaaatacaatttttatttgtctaatcaatgtttacagatttataaaaatcatgcagtatatttataatataattaatctttatactgttaattacaaaaaaaaaaaaattaaaaagggtagtaaaacttttatatgataatgttgcatattaacattgttagtagcaaaggcaacaaatgcatgtgttcttattgttgtcgataataattgaattcggctatttcctgttgatattg

SEQ ID NO: 179193 - DNA, 692 bp, Cannabis indica
tacatatcatttgaatgtcagcttttatctgagagagctgactcgtcagagcagtggatctcatttaaaggtgtctggagctaattagtgaaggtaccatgagtatacctttccatagcgagatggatgcctcgctattcgttgtccagattcatccaactattatacttagttggtataatgtatattatacgctaagtgttctaacatcaacatgcttcgcgacacctctttatatgcaacgagattgatgcctcgctatgcattattgatgtcatccttatgattgtgtcttctgatgtggaatggtttctcatcaacgcatgagtcaatagtttgtacatccttatctcgcttaagactttacagtcagcgagttataaatgtattgtatcaactcgcatttaattagttatttcattttaatatatttgccattatatttgttgattcgtattctccaaggttgacacgtgtcctcctctgaagtgccagctgaatttcgagtataacagtatcctagcgagtcatatcaaataataaacgaagatcatctagcaagacaatttttttaagaaaaattaactactacaaataggaattagaataaaaagtattcccattgatctgtttacattattttagaatgagagtaaattattttaacctaaaatactctttgttaaagtttt

SEQ ID NO: 179194 - DNA, 429 bp, Cannabis indica
gtataataaaataccaaatgctctgatttttcctctgttttctctctatcctttctcatacaattgaagctaataaagatctgtacatattacaacgaaaatgttcaggggtagattaaggtgctaaataccacaaaatgtagcatatctttattggtgtatttcaatatcaattttcatatcacatttatatgatattgagtgtcttcaagtactactctcacataataataatagtacaaaaaattatttactaaaaaaaaatagtacaaaagttattcataaaaaaaccagaacaaaaaaaatatttccaaccaattattaagtatgatatctatgacatttaatattttaaggtgtcaataataaatacaaaaaatcatttatcaaaaataaaaatatataaaacataaaagataaaaacaaaaa

SEQ ID NO: 179195 - DNA, 1036 bp, Cannabis indica
agacccatcgacagaacctgcacccatgtgcgttttgtcgcaccgtcttttggcgttattttagtactaattggttttttcacttttcatttggttgaaagttttttttatagtgaaaaggggatcacgtggagatgtagtattatttccttaactttttcagtcattttgatatgagcatcattattaagcatcattagtgtctagcacctttaaaatgtgttgtcagctagcgatactccttaaaaactattatattaaactatatagaacctgatactaaattagacaaattgttatattgacacgtaagagggtgtttggcaccactagtgtcttttaacatttctcttttgataattaagaccatgtgtcagttataagagttttatatttcaacgaattttatttggtgaaagttttagctataaataggtaattgccatctcagctcatattttttaaaatttgtaattatatagttagtatcgtgtccactcataataaagagatacaaatcatattatatcgtgtcaatatttaaaaggatgactccaacacgacctataaacttacatattagaatcatgtttggactcgtaccgtattttactcaagtcgtttcgtttttcatttagtcggcccatattatgtctatttttcttttattaagatgtatgacattatagttatttccaatcaatttatttatactataggtgttcaaaactgaacaaaatgtacattttgaccattttttaaaaaattaataataatattttacgattctgatagttctttaagggtaaataaataacataggagtggcattagataagtaaataggagcagtccatatccataacacaagaaactaaattgggtggtagggtgtgagttagttgtgtgagtagtgacatgacaagattatattgaagagagtgagagggcaataaattgttgtcaaattaatcttttttggagaggagaataaaggaccacacaaaaataacaattattaattctacaaaactca

SEQ ID NO: 179196 - DNA, 757 bp, Cannabis indica
aagtatattattattaatattattattataaacaaacatttcacatatatttttttttcaaattttgtttattatatatgtaccaaagagtccatgtccatcaacgactttcctgtgcatccaaataaaatctcagcaggttctccaattatgaatgtattgatacaacccgatgaatcttctaagttaacaaaagctcggactgtacaaaaatgataaggattagttaataaagctcaaatatatacataaaactttatataatgcaacttattttataataaagtggataataaagtaatatatattaaatataaaatttaaataaactattatatataccaagtaaaagttaaaagcacaccttagaactgcaattgcttttcattattgcaatggatgcattcataaatttcattgtagttaatatctacaaccttgttgcaagcatttgcgactttattgcatttgtcacatgacatgtaccaaagtggttgattagttaacttagtagtgacttttgccttcacccaaaaactttgttgctgcattaagaaaaaaaaaccataagacaaatacaataaaattgatgagaagttaaatgcattattaaataaatttgattatagctatatcttgaataacatatctttaattttgttgagctgcactaatttttctgcagcaggagctaccacagtaattgcacaaaaagttttgttgttgacaatgtcattgagcttgtcaatgttgttgt

SEQ ID NO: 179197 - DNA, 634 bp, Cannabis indica
atatatacatgaagctttatataatgcaacttattttgtaataaagtgaataataaagtaatatatattaaataataaaatttaaataaactattatatatactaaataaaagttaaaagcacaccttggaactgcaattgcttttttattcttgcaatggatgcattcataaatttcattgtggttaatatctgcgaccttgttgcaagcatttgcaattttattgcatttgtcacatgacatgtaccaaagtggttgattagttaacttagcagtgactttgccttcacccaataactttgttgctgcattaagaaaaaaaaaataataagacaaatacaataaaattagatgagaagttaaaatagcattattaaataaatttgattatagctataccttgaataacatatcttcaattttgttgagctgcactaatttttctatagtaggagctaccacagtaattgcacaaaaagtcttgttgttgacaatgtcattgagcttgtcaatgttgttgtccacccttactttttatttaaataaataacataaataattagataccactttgagttttaagtaagatgatataataactggaatgaagaacaatagtaacattaagttcac

SEQ ID NO: 179198 - DNA, 676 bp, Cannabis indica
tttttttgttgtatgtgtgtgtgtgagtgagtgagtgtagctgaatgtataggttaaataatgcagttaggggaaatataggtagaataatgcagtatctcatgtggcagttaggggaaaaaatagttcatttattccaacaatcagacttcattcaaaataataatcggtatataatatatatatatataactattcctactaacaagaaataatttaagattcataatttagtttatacattatatatattccaaaaacatatagaaccaaatcttaaagatttcaaacaaaaacttcaacaataaattaaaatggttatcccgttatcataaaaataacagataatcaagaaaccatgttctcctcaattttcagaaagaaacttcacaagcaaacaggggcgaagctatgtgtctggattttggctaaattgtttacatttatatacataatactttccaaaacgagaagagcaaaataatacgtggtattggaagcaaacaaataaattgagattcgataagaaatttaagaatggcgaccatgatttcattttctacgaatctgctcagtacttacatttttaaaatttactaatcggaacacatatagaaatgaaaaataaacagtaactaaactaagatacctaactagctatgaagagcagataaac

SEQ ID NO: 179199 - DNA, 825 bp, Cannabis indica
aatcttgtctaaggttcaagtataattttttgtgctgaaattcttgtgttgacaattgccattattcaataatatttatgacactttttttctttgttcatttttttttaaagttttcttttcattggttttattcttataggttttggtaagctcaactatttaaaaaaaaataataacatataaatgattgttgattattatgaaattaaagattctaagtttagaaaaaaatcttatacattctatatgtattacaacttaaagcttaatttctttttttttgttctcagtaatgcaatttagaattttagtttgaacaaattttataaaaagataaatatacatttttttctttttaatctttaaaatgatttttattaaaaaaaaatagtttgttagtttttttagtgtgttttacttcttaaataacaattccatatataaattttttatttctattaatagttttatctattttaagaatatagagaataacaaaatcaacgaaagaagtggcaaaataggaaatattaatttttaatatttaattaatgattataaatatcaatcattagatttgatctaatagtcaagaagaaaatacatatacatgagtaatacccattaagagcatatccatatatttatatacatagatatatgaattaaataattttttatttttattatttaatttcttacttaaaagtatatatttttatattgtgtgtgttctccaatactattttattatttttgtctgtgttgtgttgtgtatgttcatgtattgtttgcatttttattattaagtttatgtttgtg

SEQ ID NO: 179200 - DNA, 881 bp, Cannabis indica
aagtgatagagtagtgcccacacacatcaagtaatacctcaatcatagtgaggaaggctgtgtagaattcagaaacaacaaagaaggactatcgggctcagatcttgattatactctgcgacagaaaggaatcaagggttagagatctgagtgggaggagacatatattccgctgcacccaatgtaagatttctgatacttttatgtgtttaattttccatcgttttagaagttcatatttaggttgttaaatcaacatacttgtgagtagatctaagttcctggtaaaataacttccaacagtatcgtcaccgcatcttcttctcctccgggttcctggctgtggaacacccgcagcttctcacggagtgggttaggatccctccttatgagcggactgcacctactcagctcttcctccaacgggccaagacctttgccacatacgacaagaaggaccttgacgtcagggggttggtcacaacggataatcgccggaaggccaagctgatcttggggcatcagtcggtggaggattctaacctttccaaagttatctgcccgaatgaaagggtttcggccgcagagaagacattccgggaggagatcatttccacggcagaagataagtaccgagagtacctcttccggaaggcccaggagaaggcttacactaaggcccaggcggctgctgggaggccccttcgtattgggagcccggttgagaggaggggccccccaggaccgaggcctactggtccacggtgccggaatacggggggctccccggatgcccagcacttctggttctggtaaatcctctttaacaatacattacatccctcctgtttgtgagtcgctagccttaggcctatagggtt

SEQ ID NO: 179201 - DNA, 1216 bp, Cannabis indica
aaaattgctaattagccttaatataaaagatacacagttcagaatacaatttcatccttttagaataacaaacatcacatgtaaattctagttcttacattgcaggttgccataaaaggtgctcccttgacagaagtagttctcgaaatcctaaaaggaaaatgggatcatgagagaacaaagctatcattgccaccattattgaatcttgtaagcatgcgttttatactttccgcttgttgctatttgtggtgaatttaatttattaatagcaattttcagtttttcaatgacaatgtactactttttaacccagtcttaatgtagttggaactttactcgtgtttatctaattgatttctgtaaatagattttagttgcattttggatcctgtgattttggtttacagcattgatgtgcaccttttatagctttttgtaaaaatagatgcagctcttgtgagttttgtcccctaagtgattggtgctttcacagttacttggagaaccaggaactggaggatcttccacaccatcaatggtaggtgctgttaaaaaatggcagaagtctgaccccgaaaaatcacaggatacatggacaaagttgtcagaggctaattttgcacttgaaacacagttaaatgcattatgtaaattggcagaagaacactgggatgaatataaggaactaattaacagctgcagctcacttaaaccagagaaggtatgaatcaagctgctcttttttttttcctgatgtcgtactgaaactaatgttagaaatcaattttatagctgaacttcccactagctaaaacttttctcagaaattttatttgagcaaaaggttttctttttcatcttggttggcttcaacctgagtgaataattacaaaagccaacactttgttttcaacggtaaccaagtgtagcttttatgaaatatatagtgcttctcgtttattaacatttggaaccaaatctgtcctgagatgcttggatgcaatttttaacaattgaaaggccattaaaagctaaccatatatgagtcagaatgtcctaattctgaaattcaaatctacgagttttaaaaattgcaaaacctccaccaattttcttttggtttaatttattgcagttatttctgacttaatcagttgcagtctatctccactatcatgatctttggttctaaggctggaaaaatgtttttgtt

SEQ ID NO: 179202 - DNA, 1116 bp, Cannabis indica
attgagctctcatgtctgattctaactcccaggtggcttcctccaccttgctatttctccagagtactttgaccagagctatggtctggttccgaagaaccttatcctttctgtcaagaatctgaactggttgttcttaataagacatatctggttgcagctcaagattctcatagctaagtacatgagcagggtctgaaacgtattttctcaacatagagacatgaaatacgttatgaactgttgaaagagctggaggcaaagctaatcggtatgccacttgcccaaccttctcaagaatctcgaaaggtcctcttttcccgaaacgtttgattcctttcattggagatactcgtaagaagacgtgatcccctacttggtactcaacatctctgcatttcggatctacataactcttttgtctactctgagaggtaagcattctaattttaatcttctcaattgcctcattggtccaatgtactgattcatagattattttattttttatttttttttaaaaaaaacttaaaattggatattattcctttgattttattattataatttttgtatttttattttaaaaataataaatgatagacacaattttttttaattatttttttaaaaaaaactttaaacagaagataaatatatttaatttttattagataaagtggatgaagtggtgcctgtataccagttttttttagagaaactacatggtctgtgtacaagctttacttttttttggataattgtgtacaagctttacttgctgttatgtaaaatggatattaattttagtagtatctaaaaataaattaaacaataaaaactttaaaataggaatagtaacggggaagaagtaaaaataggatatataggggtggaaattaaaataatttacagtttaattattcaaaaatgaatataatggcggtatataataacgcatagatatacctttgtatctccctctttccaaaccgtctctttctctctcagtagaagctgtagttactctctctctctggttcggagtttgggtccagatctgatcccatcagccaggtatgtattcatactcttaacctaaccctagatcttact

SEQ ID NO: 179203 - DNA, 638 bp, Cannabis indica
aatcctcttataataccatctcttaattcttcatcatcatggaattattctaacttgcttaataaccctaatattaataatctctcttcatcaatgaactctttcattctcaaggcattacaacttaggaataatattaataacaataataataataatattgtttataataataataataataataataataataataataataatgttatagatttaagtactactacttcttctcaactacaggagcaaccattcagcttggactcttttgatcaactctaaaaaaaaacctaactcttattattaattttttttaattgtaatatttatctgtgaaaaaaggaagacccatgacaattaatggggcctttttttttaagttgtattttattttcattgattttcttttgtattaatcaattgttgtagttgatgttcattagatatgtatttcaaataaattaagggagaatccctattttatgtttttgatccatgttgtatgtgcatgtttattaattcacattatatatagatatttatatctactattcaaaaaatctttttaatttagaaaatttatatttatggttatatactaaatcgattatcattcttatgttattccatgtgac

SEQ ID NO: 179204 - DNA, 846 bp, Cannabis indica
gtggtcaacttgagtattgggaattgtgccagtaccttagttaacattaaggggcacccaggtaggcaccaagatctagcgaagttgtttttgggtgctatccttcgacgagttcaagcaagtaggttacaatgaccctaaaatgatgaaccatgaggctgaggatgtcacgtggacatcccatggctcaacctagttctagtagcaatactagatgcctaggttgatatcatgtgcgccgtcttgcatcagtttcggtttgcaaaaacttcttatgcgcaatctacttagccattgcactaggatacatgagagacatgccccaaacaagtttcaaacattggagataagtctataagaaactacacccaacactctggaaccccaatggatgcccaagttgacatatcgtcgacatgggcgacacggcgactagggtttaggtttttgggaactttttggaccctaattcctcaaatccaacgaggaacaatgccaggacatgaattttcttcagtgacaccccaaaggaggccaaatcaaactatgggcgcctaggttgacattacaacctagcactaatttcacttcactgagtaatgccagtgctagtttgacaaaactaaaatccatggagtaatttttaccaaaaagaagattgaacatcaacgagatgtattttggagcttttgaactctgtctagtcacccagtgatagccccctagttcacattaggtgccaggtcaacataaggtggcgggtgggcacttttgggtacactttttcccgagggaagtctcccaaaagttttcccttattttgttcaatgatgaagatataagtgc

SEQ ID NO: 179205 - DNA, 530 bp, Cannabis indica
  modified_base (481)..(481): a, c, t, g, unknown or other
atatatattatgttaagatccttaagtttatagttcaaaattattttatcaaatattactatattagttacaataataagtaattcgtatgcaagcaaatatattacactataataacacgtaatcaaatatatggcactgcaaaatatggttcgtaatcgtattagtaggcactatatgattcaacttcatcagacttcattcttgagaagtactgcattacctctttctacacaatttgttatcacaaagtccctcacatttgcagccattccaacctgaacagtgagttaactttcattacgcaaaattccaaaattaaaatcaaagttgaaagcattagtttctcaacaaactaactccaaccacataaatgattctgttaactaagttctatatattttaagaacttcataaaaaatcaaaaaccaaagttgaatgccaattatctactagaaacaacatagtcaaaactaagacncctagcagtttgtaagcatcgcacaagcacatccaaaaacgaagcgtac

SEQ ID NO: 179206 - DNA, 771 bp, Cannabis indica
ctgcacttacactactgccaaaatgtctgtagcaaaagaaaatcagccaccaagtaccaccttcaagaggcaaaatgattctctatccatgaggaaaatgttaaaaaagatgtcgtaatgtccaaagatcgtcatcttctccgttgtcaagagaggatgatattgagacgttagtttctgactttgaggattctagcttttccaatgacacaagtgtggcggtttctaggcaaccccggccacaattcatcatgaaaatcttaagctataatgcacggggtttggggaacccgagtgcattcagacacctttgatttcttgttcaacaataatcgccccaaactttgtttcttatggaaaccaaactacctcttaactgaattacttgtctatgtcaatctatactctttataaatggattagaatcacctcgtataagccttagtggtggcctaatgctcctttgaaaggatgatatggacatctctctcttaaactttggctctaatttttttgattgctatatgaagatggaagacagccaaacttttcattttacatgtttctatggtgctcctgaaacttgcaaccgatcagcctcatggaccctttttcaatgttttgctatgttgctcctctcctaccttggttagttattggagacttcaatgaaatactatccaattctcacaaatctggtggtgcactccgaaatgaaacacaaatggaggcattttagaagatctttagatggatgtaatctccatgaaa

SEQ ID NO: 179207 - DNA, 1219 bp, Cannabis indica
attttattttattgattggatagctagctagtcttccttcctcacctctacccatcctaatatggtatgatattataattaatgattaattagtactactaacacagcatatatatgcaataagaaatgagagagaaagctttctagattctttttcagttattatttttaagtaaaataagttggaccataatttggtataaaggaatcttattattaggcaatgcagaatgcagaaaagtactatatgcttccaaaaattagggcaaagacatgatagtgacataggaagggccataatatgtataaagacatatgttattgtgaccatacatacagtttctctgtttaactttttcccaaagattggttaaaaatattcccataaaaagaaaaagagaaaaagcccgcacgtgctttttatgaaataattgtatatatgtactcgtgtttatagaaagagagaggaaaattttaacttgtggttcacgtggatttatattatgagaattactcatttagttattagttatatatgacaactaattagagtttagggatggagtgagagtgtaatatttatgcacataagtttttaattttaaaaaatagcaataatagttattaagttcaagattttcttaagttcgttggtccttatttttaacaaattagttgctctcaaaaatattacatgctgatattaaattgtgatacaagtctccaaaaaaagaaatttgatacaaataagtctctaatctcgaaaaagtgcaaataatagtatatccaatctcgctcaagattcactttaggtgatcatatatcatttgagttttattttgatctatgtatgtataaatatacttttattattgataactctatgaaaatagagttattaatatttttttaggcattaaattagctttgttcttaagtatttttagtttattttagtaatttttatttagttttgcataaatattaattttagtatttttagattaatttttaataaattttgtaatattttatcaattttatttagtttcccattttataagtgttaatctcaatgttgtgtatttttgtaaaatgttgaaatggacatttggacttattatgtggtgaatatcttgtagtttatggactcaaaaaaggcccaaaaaatctcatttgtccaaaatgtcaattcaatttgctatgaccatcattctat

SEQ ID NO: 179208 - DNA, 697 bp, Cannabis indica
tttatcttcactttcatttcactcatcatcatcctcgatcacctcgatcatcatgtattaaaaccttttacatataatatttataggaaaattctttggaaccgacctcattcttattacactaattattataaaatattttatttttagttacaacaatatttgtgactaaaagtaaataattaagactaattataagatttttcttatattgtaattaaaaggtctgtgactaaaagtattagtcacaaaaatcataatttgttatgactaaatatgtttttagtcacaatacttgttgtgactaaatatttgtcatgactaaaattaaattaatgacaatttatatctaaatactctgttttagtcataataacttttttttgtcactaaaaattatatttaatcacaaaaaatttatgttgtcactaaaaatagttattttttctagtaaattaatttcacatgcattaatattgggggaatggaaataaacaactaaattagagtaatatcgattgtgatataaaaaaatgataaaatacaccttgtacatataattaaatatcgagtctcgcataatttaatttaatataactatcataacatatcactaactaattacaatgagtaacttttagttggtgttagaacatctctaatggtgacattttttaagagtgtcaaaaatctctac

SEQ ID NO: 179209 - DNA, 682 bp, Cannabis indica
gagagatgactagaccatcactctcaactctctactcttctttactttctttcaaatttctgtttaccagctagtacgccatctaccataccagtaaggtgcgtaatttccatttaactaaacaaacaataaagactgaatgaccttaattttcatttaattaaaatttaattagaaactatatagaatagtaaagtaattgaatataaacaagaaatcgacaaatcaacttaaaaccggataaagaattcgtttttttttttacaaaaacaaaatttgcaagaatcaaagccatacttgatgcttttctctgacaaattaaaggtaagggggaaatgtacaaataaaccaaatcctaatacatcaattgtaaaaggtgcaggtaatttcttagctagcaaaggaacttaaataaaccctaagaaatgcattagggtttttcaatcaaaattgagtaatttatgagaagaggcatactattcagtgacgtcttcaagaaccatgttgacataaacatcaaagccgcgaagagtaccaacaagctccttgtcacccttcattatgacccaaattttagaccctatgcaacggtcgattaactctgcgaatttccacaacgaaaaccaccaaaaaaaatgagtttgattttcccgggaaagttacagaaagaaggaatcaaaga

SEQ ID NO: 179210 - DNA, 572 bp, Cannabis indica
attttaatgccatacaattctaacctaaacctagagggttttctataaatagaaagtgttggcttcaggaaacacacacacaacttgacacattgtttccttcagaaaaggccacacgccaccttctctcttttcttctctgtattttcgaaattccttgagtgatgagtagtgcccacacacatcaagtggtatctcaatcatagtatgtaagactatggaaattctgcatcaaagaaggagaaaagaagatccagattcagatcttgattatgctctgctacagaaaggaatcaagggctagagatctgaatggaaggagtcatattattccgctgcacccactgtaaggttttctaaactttatatgtgtttattttcattgttttagaattcatattaggttgttaatcaaacatacttgttagtaaatctagatcctggtaaaataatttccaacaacctgtccttcaaaactcaacaccattagaattactcttttcagtcaaactagattacaaccggctaaaggtgtttggttgtatatgttatcctaacctaagaccttacaa

SEQ ID NO: 179211 - DNA, 628 bp, Cannabis indica
acctgaactcgaacccgaacacggaccccgccccaaacccaaaccaggaccacgaccagaaaccagacccaaaccagaacaaaacacagacccgaacctaaacctgacatcatacccaaaccacagacccgaactcggacccagacacaaaaccgtacctgaacccaaacccagacccgaacccaaactgggatgaaaccccgagactcagacccacacctagatcgagattggaacttgggactcgaacctagacccagacccagacctagacctagaaccgaactggggactcaaaccaagacctggaccagaacccggacccaaacggagatccaaacccagcatcggaccgtgatagagatccggcctgaacccgaactcgcaccaggactcgaacccttacacgaactcgaacccaatcctagactcaaaatcacaattggaattggaatctaaccaggacatggactatgaccaggacccaaacccaaaacaaaacccagaccagaaaccacaccgcaacccaaacccaaacctagattgggacccaaacccagaatagaatcgggaccaaaagccagaaacagacaacgtcctaggcgacgaaactgggataaggacccaa

SEQ ID NO: 179212 - DNA, 537 bp, Cannabis indica
aagccaactcaatgtcttccttactcatatgacgaaactgatcattatcaccagtattattacatcatcctcatcatcatgactactaatttcattcaaaactagtactaactacgttttcttgttaataatattttctgttcatttgtacagaaatattgtcatcctcatcatcattccaagaagcagtagggctcgagggccaaacctcatcgcaaaacaaattgatgtgatccatattataatatatatttgtatttgtcagtgtacgtacgtaacaatcattttctggtctttggtatttgacttttgtataagaaagccagaaaagaatggaaatcaatcaaagtgaaggtgaaagggcatattaatatatgaatgaataagggagttagggagttgatatttataatatatagagaaagagttggtatgaaagtgaaagtgggggatataataataagaagacgtccctcatgaaatgtttaaatgcataaagcatatatatgtgtagttttgactgcagtaaccaattac

SEQ ID NO: 179213 - DNA, 801 bp, Cannabis indica
taagaagtacaaaccaaggttcctcagcaactacatcaggatggctgaaaatctttgcagcagcacttctcttgtttgtaggaatggcttctcctgccggagtataggcatcacagatgacctatgatcattacatcaaaaacaaagagaattagaaaaactgaaacccaggtatgtatgattcatgaagatgcaaaactctccttacttaccaatatgttgttgcctctcctaaatgggtccttgaaaattgcttgagggctacatcaaaaaatgacaataacaaaaaaaaggttaataggataatagtgaggggggaaatgaataacagcggagaaaataaactaaaatgattcttactataaaatcacttcactgtcttctccgggagcttgacctgtgcttgaaccatcgtaattccacttgggtaactttgaaggatcatcaactggtccttcaagagtctttacagacagcgaaaaattgacatggtcatttgaaggaattaaataagtaagaatttttatatcaatctgaatgtttataaagaatttcttactcttgctttgcttcttagggtccataccgggatccaccaatcctgttcaaagaaatgattaaacactaaagattaaccaaagaaaaatgaaaaataaataaacaaatgtaccaaattgtagggaaaaaaatccaatttaattacatttcaaacgatctagttttgcaaacggtagaaatataaaatagagcagaacaattattattattatgatgatattattaaaattatcattatttctg

SEQ ID NO: 179214 - DNA, 825 bp, Cannabis indica
aaatgattcttgaaattgtttcagtcagatgagtatatatataaatatatatttagtgtatcgtgactttgaaacaattcaagaactttaacaaaatacttacattggatcttaggcagagactcatgcttgaagcttgggcagagactcatgcttgaagcttgggcagagactcgtgctgataacgtgttataaaataatataaagtagatgagaagaaagaagaagaagatgaagagagaaagagaaagtgaatgagaatttctgagttgtttattccaatggggtgaacccctatttatacaaatacaagagtgagatattaagaaactaagaaaaagggaaactaaggaaaagaggaatgttgattacaattcatggtaataaataaaagatttggacatccacataattattaatatttataacaagtattactttctcaaactaaaaatgctagacaacaaatattttttaaattgaatagatcaaattcatttgcaaaagaaaaaaaaattagaataagtcaaataaaatataaacaaaaagtaaatatataactcaaccgagatatctataatattattataaaatattttttgttctattaaatatcccaaaaataaaattaacaaaaactaaatatttttataagactgtatgcacagtagttattaggtttcatttttttaggtacatagtagtacaatctgcacctaatatcttctaataacatccccaaagtcgttgctaataatgtgcatgttgctcctaatagttcgatgaaaaaactctatgccccctcaaactccgtcaatattaatg

SEQ ID NO: 179215 - DNA, 710 bp, Cannabis indica
aaattatgagaaaaatatgtgtcattcagagacttgagactgatactaattgcttgggaatatttactccactaaatgagctaggttacagataacgtgatatgggctatctgtaaattatataaaagtattcaggctatgcactgttttttagagggctaattttcattgtcataggctgctctgaatgctgcgaaacaaacaaaggatggtagaaatgatgaaattgcagcacttcgttcagatattgaggtaaagttatcatttgtttgcaatattttgttcatggtattgtacatctgtataactggttgagtattttttttccatataacatatttatgtttatttcgcctttttctttttggttaatcagaatttaaaagaagaagcttcaacaactgtggaacaacttcgagaagcagaatctgaggcaaagtcacttcgcacaatgacacagagaatgattttgactcaagaagagatggtttgtcctttgacagtgaactgagtttcatggctgatttgtggtaataatatatatttctcttaaatgtatacttttgcttttctcttctaggaggaggttgttctgaagagatgttggcttgctcgctactggggcttagctgtacacatggtaccaatttttttccaaattctatcttgctttatgtttttctatgtatgaaatcagtggttatttgttg

SEQ ID NO: 179216 - DNA, 885 bp, Cannabis indica
gaggccattgcggccatttttgttgaggaggccttaaaggctatgaaagctgacaaacagtggttggctgaatggaggagcaagtttccaaaagagatgagcgaggttgaagagctcactatttagttttaagatgtagtcagaaacaaggatactctgggagcgagtacctccgaaagtggtgagacacccttttgtgtaattagagctccatccttagcaaatttaagtaatactgatctgggtgggttcgaccaatacttcttaaatttataccaggataagtaccttagcacatattacatagataaagtaaactacatagtgagaagtccaaactacttcgttcctccagtacaccaccatgttaaagtgtgtgtgcttagtaaaatttatttttgagggtcttccaatatgagactaacttaggtcagaagacattgtctattttcttagaggaaagaccaattatgctaagataaaacggtttagattctcctgatatgttgtttgataatttttattgtgattgtattttatataatttgacatgtcatcacttcatttgttttcacaaaacaacctaccacttggccttctcactacaggatcaggttggttttgtgcagcgttttcttgagtcgccctagctgcggttgcctctctttccaactctgtgtttcgttggtttgctttggccagacgttatcggagttggcattttccaattcaaccacgatacatacctagtgggattataggcacccttagtcataggtacagaaccaccatcattagtattggttttcctctatttctaatttttggagtttttgatcatgccatgttggcttctcttgacgtgttgagcgtgtaactatgttg

SEQ ID NO: 179217 - DNA, 639 bp, Cannabis indica
ctaagctagagatccttggctggcgtcccatgccgctggttgctgagatctgtttattctttgccatttagacccttttgaggaaaggtctgtcctccctctggcaagggaagatttgtcccagctcctgaggaatcgggttagtcagcttgtcgatagaccctccctaatctattaatgagtcttccatgaagtggatctttgatgagatcttgtcctctcccgtcggttctctggttgaaccgtcttattagatcattggcctctcagttgcgacgatccaattctgcttggtgagatcgaaggatgtactctttgtcatctatcgatcttaggaatttgcgtctctgttgagaaaatacatcacaattagcagtgcgtgaatcttcagttaggcttgcttggcctatggcttctttaagtctggccaactactcgagatcctctcctaagtccacatggggctcgccaactcctggtcctgtttctccagcataatattggagacgagatccagttgttcccgagggctattgcccacgagtccttccttcaatggaaggtgccaatggtggattttcccttggaggtaggagcctgctagtcggaaccaccaggatgctcgtatcagtttggcca

SEQ ID NO: 179218 - DNA, 509 bp, Cannabis indica
aaacaaataatttctatctatgattagatggaataattaaagtgatgtatatattattaattaatcacttctattttgtgctcgagtcaaactatattaattaaataaaagtaatatatatatcaattacgtaataccaatatatattcttcttagctagactgaatggtaattgatacatatatatacgcttgcagcacactccacttatatgtataaataataattatatgtataggcattcattttatattgttggggaagtagttacttacctcaagatatataatcatgtcagctatagaacaagttctctccaaattcaatggttgcaatcgattttgggtaaaaagagaaatgatctgagccactcatctatatatgatatatgatgatagtgacattattctagctctctatataaccagcaatgcaagttgttgtaggtaaaaagagtgagctgtggtattaaaaagagtatcaatacaaaactatatatatatataggg

SEQ ID NO: 179219 - DNA, 633 bp, Cannabis indica
atttttaccttcttttttaaaatctatcatttttacctctttttttaaacattgtaccaatttcgcccctgtcactttaagatactctccatgtgattctcttatgtaaggttattttgggtacaatacatataaaaagaggtatgtttcaaataaatataaaattagaggtaaatttgattaattaatgaataaaagaggcatttttcaacttacccctaatctatattaattaataaaagataaatgttaaggaacatgatctggtgtcaagcattacaataggtggtataattattagtgcaaattacaaaatattattgattctcacatattttaatttaataaataatataaaaaaaaatactgattatttataatgcgcaatttaagtgtaatattaggtactacaaaatatcaaaataacaatactctttaaaaaaaaaaaaaagttagaataaacatagtcatacggtatagtttttacatgtcttctcatataaaataaaagtctcaagtttgaatctttcttctctaaatgtcaaaaagaaaaaaaaaaaataattattaatctcgaattagtttgattgatatatctttccgagttttatgtggcttgtacatgtatgtaac

SEQ ID NO: 179220 - DNA, 698 bp, Cannabis indica
ggtgtcgtttggtaacacttttgttttttaattttttaatcacaaaatgaaagtaaaatttttgtttttgaaaaacaaaaatgcgttctgtaaccacttttgtttttcaattttaaaaacagaaaacaaaagtgtgttctgtaaagtttatttttatttttattttttgattttatttaagtcgggtctaggtccggggtcggattcgggttcaagtcaaaagtcgggtttagcgccagggccgtagggaggggatttgggtccgggtctggtcgtaatctaaaagattgattaagaaaaaaaaactgtttaaaaaaatattgaaagtgattctttttgtttttaaaattttgatttctaattataaaattgaaaagtaaaaacagttttatagaacatgtttttgaaaaatattttcacttttctacttttaaaaacagaaaactgattaaaaaagtgttaccaaacgccacctaagtttttctcaaagatttgttctctctctcatattactaactagttaacaacttccactacgcggatattttttctaaaagtatatatgtgatataaattatgtattttaaattataaatttgggttactttttgttaacaaaatattaaaaaaaaaaaacttaatgacttttgatgatagtagtaccttttttttaactcaatgatagtaatattactagt

SEQ ID NO: 179221 - DNA, 508 bp, Cannabis indica
gggtaatctaaatcgtgataatcatgcgtaggagtgtataactatagttttaacttatgttaatgaatatgttttttttttttgactattttttctcaatatttagggtgcaaaagccagaagcttctgatcaatttcagttattagtgaagcatcggcaacctgttacagctgtggttctatcagaggatgattcgaagggcttttccgcggctaaagacggtactattttgcattgggatgtagaaagtgggaggggtgaaaaatatagatggcctagtgatgcagtactaaagtcccatggtgccaaggatccacaaggccgggctagtaagcacagtaaacttgttttctcgttggctgttagctcagatggacggtatttggcaagtggaggttctgaccgtcatgttcatttgtgggatactcgtacaagagaacatattcaggtaaatattttttcgtttttcagctactaagattgtcattgaatataattaacaacatg

SEQ ID NO: 179222 - DNA, 931 bp, Cannabis indica
acgaagccagcagtaaccagctacgtcgttttcagtgtttagtaaattatttatctttatttttcttggctgccataagatttgatttggtttcaagttttttaatttttatccttccagtttttttttttctcacttgatttttggagttttgtgaaaactatgtggactatattataattagacgtgtggcattttaagaaaatattccacaccattgatttaatttaacataggagaattcgaagattaacaaggtgacagataaacaaaatagtatagtaagtacataatgtaaaacaaatgaaagctttcgtaaaagggtgtaatggttgaagttgattttggtctcctttttctggtcaaacgtcaatattgggtgttttcttttaattttgcatgatgaaaaagatcttgtgctgttttcttcgaataaaatattttgttctttttctttcctttctcgtttcttaggtgaagatgttgtttaaaacttatatttgtaatataatccaaggatcttgactctagcttattattaattgtaagaatacttggatttgccatctacatatactctttttattttctttttttacaaagaatagtgttagaatcaaatacctctcctgtggttgcaaacctaaaaaagacaaaagtcaaatataacactcagcgggtttgaatttttgtgaaatttatgtgcagtattaattaactatattgcctagccaatttaaagatgggttattttacaaaagtagaaattttacactaagtaactctttttactaatattaaacatttatacttgcttttctctttttttttttattatttttactattttagtatttttctttaatactcttataaagtttaaaaacttacaattatacggttcactatttttcttcttccttctattcac

SEQ ID NO: 179223 - DNA, 819 bp, Cannabis indica
ggaaatccattcctaaaataatatcaaattcgactaagctcatctctatcagatcagcgcttaactctctaccatctatcctgatcggcatagacctaatccacctattggagataaccaattctccgccaggtaacagggttccaaaccctgattcatatctatcaaagggtctacccaacttactaaagactctggccgccacataagaatgtgtagccccagaatcaaacagcactgaataaagcgagttgttaataaaaagctgacctgtaacaactgatgggctggcatctgcatcagcctgcgtgatagcgaacaccctggctggagtgggtatcgctggagctaattttccacaatgatattttatgcgatcttttatcttgtttttcatctttttctgttgatatttttctagttttcttctattttaaatcttcaaaaataaaatataacaagcgtagaattggtccaaacacaagtaaaattgaattaaaaatatactaaacttaatctaaaattaatactaaaaataaccaaacagatacttatggtaatgttccaagtgggagctttaacctcaccacctttgtattgctattttacacagatttaacatcttgttttccatctcacaaacatgaatagtttagaagatctcatatgcagtccatttggcccgccaagtgtgttaataaagaaaaactcctgtgaagtcacttctgagtcaaaacaaaagtttcaaagaaaaccaagaagactgccaataggaagtctgcctaggtcggcatatccattggacctgagaaagtcgca

SEQ ID NO: 179224 - DNA, 781 bp, Cannabis indica
agagagagagagagagtaaggagaggggcgagtgagaagggttaggttaaattcgttttatattattaaggttaggtttttttaaaatgagccgaagcccataattgattcttcttttttttttcaattgtttgttgtgtcggtgcacaaccgacattaaaagtgtggatatatattttttaaaatttcatcttttgctttggttttcattttagcatcagatatacaactgacgctaattaattaataattatttgcgtcggtggccaactgaagtaaaaaattatgggtttacttttgcctcagttaacaagtttgaccaaacgcgttgaccgacaaaaaaaattcatttttgtagtagtgatttgtatttaatattctttatcaaaacttggcaataaaaagctataataactattggtaattacactactgaacactaagtaactactttaaatagagcttctgtaggcctcacacacttgttggccgattgtttcaggctagatattatgtgggaaaggactttttgaatgcagaattgggaactaatcccaggtttgttcggcgtagtatctttgaaacaaagctggtaaggatgggggcacgtaggcggttctaaaaattaatatagtttcagatccttggctcccttgtggtgagaatctgagaattagttcgaatcatcatgccttgttaaatcaaaatgttgttgctcttatgatcactgattgtttggcctggttgttgacttggtgcgtgatttgtttaatcaatggac

SEQ ID NO: 179225 - DNA, 510 bp, Cannabis indica
aaaaataaaattttaaaaattagaaacaaatattaaacaccacactccccaagttttctagattgtagatcacatactttattttttggatagtttattttcatatcaaaaatcatgattgtgttttgtttcatattcttgtgtcagtaatttgtgagatttatattatatttatacttactagttttaatttatagtaaaattttagtaattaaataaatatgattgtataattaaatctatatataaaaaaccatgattgaaaaaaggaatgaaattaataaacaaacaaaactaagcatgttgaaagtgatttttaatgaaagatatatccatatattcctatatattatttttaaataaagacatattttaaaaatttgttcaatattagcatttaaatttataatgtggaatatggtgttcttgtgctctcacataatcttcctcctttacaatttcaatttttttttctttctaatatttataatagaagtttttttttattat

SEQ ID NO: 179226 - DNA, 619 bp, Cannabis indica
agaaatttcactgctcataaacggcgccaccgtagcatgcatgacactgtaataataggtaactattgaagaataacagttatttctgggcaagaattattaatttaaacactggacatattgctgaaaaaataattcactgtacttattaactataatatctctcgctataaatatatttgttacttaaaaaaataagatatgtaataaactgtatttgtttgtatctgtataaccaccaacattaaagcaccatatatatgcagaggataattaacagtaattcttgttatgttttattttctgaatttttattttatacacatatattgaggtgatgtatgtcaacagatttaagaacatcgtaaaccaacaaaatctacacaagcaaatattgatcaaagtaatccaatttgtaaaatagaggatttacaataaggaacacacattactaagtcaaaattcgcgatgatttcaaaaatgaattttttagaggaccgtcactaataatattaagtgactgttttaaatcgttgggaaaaattggattttttttttactagtttagaacactcaagaggaaacattacaaaaagcagctacttttagtgataatttt

SEQ ID NO: 179227 - DNA, 692 bp, Cannabis indica
cttcgtcttcttcaaaatcgcccacttgagccttcgtcttcgtctctctgtcatcttgttatttccactgctgctgacggttttaggtaggcggtagcttcgccaatcggaactgagtcgccgctggcaatctgaactgagtcatcaattcgtaatgggagacccgagtgatagtagcagtggtgaggaagatggagatgtcgcatggagagcagcaattgattcagtggccaccacaacctctacttacgtctcttccattattaatggctcttctgacatggctgccaagcaacgtcttacttcggccgatgatggcaatgactgccgaaaccaaaaactcaaacactaccaaatcaaggtcctttctaatctcttcctttttctgtttttcgctatgtgagttctataggaaatgattttatgaatatgtatatattgaattagggctggcttttatattcctttttatgcttaatgatagtcattgaagaaatttcaatggaatataatgagtgaataattaagcatttgaaaaagcgtttgggctttaagcatcgaaaattcataatctaaggattttatatttgttttgattatcttattcagtcgatctgcaatttttaaactgtgagtgtcagtgccatgaagctgtccgcagttgtagcaattgctccatgtgaatgtttttg

SEQ ID NO: 179228 - DNA, 729 bp, Cannabis indica
atcatacgggcaaatataaacagaataaatatagacaggatgaacataagaaaagcaagatgctaaataaatacaaagatgcacaagttgttcaagatacaagaaaatcccaaaaaaaaaaaaaagaaaaaggcctgggggcgggccataagatgtctccccttaaaaagaaaatagaattgttttgtaagaaagtggaagggtaaaattaagaaacaagcaaatcatttagtgaacctggggaggaagatgggggcccctgcgttcttccagaatgacctcaagtttcttgttcttctcctggaaatgggccaatacttcctcaggattagggtagaaaaggagccgaggttcgaaatagttagctttctagcacatgaacacactgtcatcaaaacgctttagacagtgttgacaagtgactggagccaccatggcatccctctttgctttagctgcttctttgcgagcctgctccccgaatacacggagctcctttacttcaacaatcaggctagctgttgtttccaaatcagtctggtgcagctcctccaaagattttagcttgcatttagttcttgaacttcctccctggaatctcgaagatctctcctcactacagcaacaacctcatccctggcctttaatgcctcccggtggttctgctccataagagactcccttttctaggcttcgtcacagatgccttcttctgctcctctaactccc

SEQ ID NO: 179229 - DNA, 904 bp, Cannabis indica
cccatacacctaatcacgatttgataactgggtcaagaattttctcgacaaaagtatgactactcacaaaacaaacctatactcagtattctagtcgtactgatgtagtagcaattagttcatactatcaagaagcctagaatatatctgttgatatttcagtgctactctatatgtacacttcaccaatatcttgatatgcaactctgatggctattgatttacctcacatatatctgttggcatcacggtgtagctctatgtacacctcacggataccctaatatgtaattttgatggaaattaacatgtatgttaaacatgtatacatatatgcaaatattatactaatcttaccttaaatctaaatgcaagcgtggtaactatgagtgaaaactgctacacgacgattttaggcaataagtcacaatttatgtaatacgggtaagtgatccgctaaatcacttcgaggacttaaacttgaaactaaaagtttttctatcgataaatagcgtgactaaactataataaatatcgatatataaaacactaaaaatgagattttggaaaaagtaccccaaaaaatggcaggtaattttgtaaaaaagacaagctatttttttgaattttctgtttgaaaaaatggtagatcgtttcctaaaaacggtgtaccattttcatagtaaatttttgcccaaacttcaaaactaacacaaatcaaaaccaattcaacccaaaacttccaaaatacttattttgagtctaacaaacatatttcattcataaattatatcatcaagtttgtaaaataaaaaaaaaaaaaaaaaaaccaataaaaggggtcaatcttgaacttacaagctcaacttaactctgaacccacaaaacccaaacaaaagactat

SEQ ID NO: 179230 - DNA, 691 bp, Cannabis indica
gtttatgcttccattatttccaaaacaagcactgcatgtaagtccgaactgtgctaattagaactctaaatttattaattttcaaatataaaagaaataaaataaaaaataaaattgaaattataccattaatttaaatttaattttcatttttttaattaaagaagtatttaatttcataccttagaaactgtttttattttttaaaaataaaattgatttaaaaatttatttaaagagtgtttagctaaaatttttaaaaactaagttaaaaaaaataaaaatatcataatgttttttatctaaaaataattttatttttggtcgtattttcctttttatatttctctcacatactctggtctgggactggagttgggtcgattgattcagtcttttagggtgcaagtttgggtttgggtttgggtccagactttggggtgtaagcttgggctcgggtcagcggtctgggacccgatttcggagtttgcgtcttagtctagggtctggggctgaggctgggtttgggtccaaagtctgaggtcgcatctagggttaggtctgggttcaggttcgggtcttagtttggagttttggggccaaggccaacacctagttcggggtctggggccgaggctaggttcaagtcgagatgggttcgagtttgtgtcgaagtgtggagttgaagtaa

SEQ ID NO: 179231 - DNA, 999 bp, Cannabis indica
ctatttattataaaatatctcactaaatccagcctatttgtttctttaaattaaatctaggtactttttatgtcaactaaacaatcataaacatttgattattatatttgataattgacttatttttaatttttattttattttagtggacatgatattttttatggagacttgaactctacatcatgcatcacatgcactacatattaaaaattattctcctaaattgtgtaatcttattttcaaccattatcaatataagtatagtgtttatacatttttgggtcactctattttttttaatatgagtttggacttttagtttaaataattacaaatagaacactctattttgtaaattgataaaaataaaatatagcacttcttgcccaattattattattcatattttataccaatttataattatttaaaaataaaaagagtattaaaaaaaaacccaaaataatttaaacttaataataataaaaaaaaaacctaagatttattggaatcttacatgactacgacccatataaaatggatacatatgaatctctcaccaataaaatgctaaaatagattttgtatttattaccacaaaaatatctaaactaaaaacaatgaaaaatgttttaaaaaaaaaaatacaagaaagtgggattatttgtaatttcaagaaatataaaggaccacattgcaaaatataaagcttcttctttcttggtgcaaggtctcttcactatttataagctttctctctctttctgtaaattttcattcttcaaaaaaacactttctctctctaaaaattcaacgcttccaggctccaaaaggtaacaaatggtaatcaatcaatacgttgatttcatttcgtaaaaacttacaattctatgtataattgttcaattttatgtgaattaaacctactttcatttcaatcaattgtttcggttgtatcgagaactgtgtctgtgtttgtgtatgtatgtatgtata

SEQ ID NO: 179232 - DNA, 827 bp, Cannabis indica
agaagatttcaaagtgcctagtatgcttaaggaataaattctccttacctgtaaatattaattccaattttagaaagattaagatatcaatgtttacacaattaccaaaacaacaaaacaaaaccttaaagttgataccattatcaaatattgggcatttcaatagctgacttgagaataaaacccattttcgttatttattttataattagtttctaatttttatattatttattaaattaaaatatttaaaatttgatattaaaaatgtaataataataatcatattacaaattttataatgcctgatacagggtgtccttgagcattttccatttttttttctctgaaactgtaccattttccatttcaaatatatacacgtaaaataaaataaaatctaagttaaattcctaaccccatgattggacacattctctgattctcatctcttccgttgatcacaaaccttcaaatttttacccttcacttttttatttacagcagacaattttcctcttctttattattatttctttttaaagtaatttaaatatttgtttccattttttttttggaaaaattaaaataataatgacacgtgagatttcctgcattataaaattaggggatatgattttgttctattattgtacgtacgaattgtaatctgcaaccgttagatgagagagttattttgatttgacggttgagattgatctaaggataattaaagttaaaaacgtataactcatttaatgtacagtgaccgatacatttgtgaagtgacaaaatgatatcctataaattagatatctcactgcact

SEQ ID NO: 179233 - DNA, 785 bp, Cannabis indica
gccgcggccaaggtctatctcgctgcggccactgggcgagtcccaggaaaatttaatttttttttttgaggaatgctaattaaaaccgaaaaagaaaaataacagcaaaaactaaaaaaaaagttcaactaaatcataaagaaatttgggttgcctcccaattagcgctaactttatcgtcgcttagctagacgttgatcgagatcttcatagtggcgccagaatcatggcggacttggtttgatcaaattgacctcccaagtagagctttaatcgctgtccattcactttgaaagtattaggactttcaccttttagttccactgctccgtagggaaacactttgatcaccgtaaatggccctgaccaccttgactttaatttaccaggaaacaactttagtcttgagttgaagagtagaacttgttgaccaggttgaaactcctttctgactagatttcggtcatgccatctcttagttctttccttgtaaatcttggcgttctcataagcttcgtttcgaaattcttccaactcatccaactgtagtagtcttttctgcccagcagcttttaagtccatgtttagagttctcattgcccaataagctttgtgttctaactccaccggtaaatgacacgcctttccaaacaccaaccgatatggtgacatcccgattggcgttttgaacgctgttctgtaggcccacatgcgtcatccaaactttcttgccaaatcttcctttcgatctctgcaccgttttctccagaatcgtcttatttccc

SEQ ID NO: 179234 - DNA, 1317 bp, Cannabis indica
atgagctctttctctaaagtttcaatatgcttcttgtcctctgtacggcctgtcgataatgatgtcacatgattttctagtcgctgcataaaaaattgaaactcagaaactcaaacagtaaaggacaggaaatgcataagaatcaataattgtaaaccattacactaaactcgttaatgcggcatcatgaacttaccctgattaattcaaagctttgtgattgcgactctttcaacatgtctttctcctttcttagctgcaaacaaaccaatggatgataaatattattccataacgtgaaaaagtattcatggattggacatataaactaggggatatttttcctacacaataactcaagtttgaggcaacatggtaatgagttagcagtattatcaaatactagcattccaaatagcacgggaattacatggacaacatctcaaaggaacatgacaaaccaataactgtaaacttacaagacccccaccaatcatcatattcagaagaaaatgtgtatctcaaagtcttctgctcatcaccatttccttttaacatatataaagatttcatatgcagaatgagaatcaatacagtcacacacgcacacacacaaatgtttaaactcttaagtgtttaagcctgagaaacatattgtaaccgaaagagcattttactaaaaataatatctgagagcaatcatctgaatagttaaacaagaaacatatgctacctctctacatcttgttccaatctctaatagttcttcaacatcgaaagcgctttcactttgacttctgctgtggctagacatttgtgtgagataaaaaaaacaaaatcttaaccaaatgtgcccattcaatggatacctgcgtttaaaaacaaactcaagaatcccatcaataaaaactactataaattgaagagatcaacagtagcatttgtagaacaagacaccaaacataactatcgcaacatacagtactcatgatcataaatgtcgtctcccctaattggctatgatttagcaatatataagagtcttgtggggtagttaaatttgcaacagagataaaacatgaaagtggaatttgaaaactgaaaactacatcacaattaaaatataattacttaattggagctctaatcctgggtcctaaactaactctaaattaagggcaggagaaacaggattgcatcacacactgcacatcaacattaataacaatggaaaacagggatgggtttggtttgattcggtgctaaaaaggaaaccctaaaacagaaacttcatataacagaatgtagtatacagac

SEQ ID NO: 179235 - DNA, 802 bp, Cannabis indica
agcaaatagagattctttctagccctaggggggcctatttgccattattcaataacacgcaacatagaacctggtgctttcattcttcctaggtgagtatagattggtaggaataaggtcaattcaagaagtagaggggtttgggtactatttcccagtagaataacttgaactatcacattcatgaggactcgatttctcttatgagatgacttggcctattcacatggaatttccttttgaaatggttggaaacacttgttctaccaaaagaattgactggaaatatggatgttcgatgctggaaagatgacaggatgtccggcgataggtaggagattgagacaaagtgaagcaaagaccctcctcctccatattgtcaaatccatgtgaaccacttaataaaaaggattgagtttccaaagtcgagatgttggcgcatccagcctacgcggaaagtcagccttccctgcgtctaaccgcgcggaaatggaaaatctcgaaatagggctgtttccacgcatgttcttgaaaaggatcacttcacgagtgcttgttcctcttctctcctgcgggagacgaatcgaagaaataggttaagaatcaaagcctttaaggagttggaaaaggtgaaaagggcggaaaaaaccagaaagagaacccaagccgccccacacaaaaacggattactcacaaatccacaaaggtcttataaaaaaaaaaagaaaatagaagaggcgagtgtctaagagcaatgccgtagaatcagactgccccagtgtccatacagatgccgggggtc

SEQ ID NO: 179236 - DNA, 787 bp, Cannabis indica
atggtaattgtggtggctgtagattagattgtctcgtcaggatttgaaattaacattgttgaatctgattgtttagcaattgtatttacttttaataatagtcatgtttacttaaatgacgtgggttctttgttagagaatattacaagtttgttttctagatttttaagaggatccctaattcatgtacaacgaatgatcaatacagctgcacatagattagcagtgcatgctcttcgaatgaatgaacaacttgtttgactagaggacttttcttcttttgtgacgtttgtatagtcttttagcctgtacgatattactttattttttaaggatattattatttgcaaaaaaaaaaaaaaaatcattagcctaatcccaaatcccaaatctcaaattaaacagaaactaatatacaagcccatttttctatactgtaataaatctaacaaaaactacaagacaaatcaaaaccaaaaactaagaaaaatacacatgcttagacataaaaatacataaacccataaacacaaacccaaccaatatgaaggacatatatgcatttgagttgataggttcatctattccagtgtttgagtcaatctatttgtctaccctgttgagtagatagatgatgaaggagaatgaaaaaaacttaaaaacaatgggaaaagaaaaaagaacaaaaagaaaggtagatggaggtttagtgcttgacatcataattgaaaaattattattatttttttaaaatagaaaattgttttttgaaaataattagatttgt

SEQ ID NO: 179237 - DNA, 836 bp, Cannabis indica
  modified_base (776)..(776): a, c, t, g, unknown or other
cttttgggttgatgcaaaaataattctggcatataattgatttcggcgatgttgtttcatttgacactacctacaagaaaaataaagaaggtcgaccttttgctatattttttagggtgaatcatcataagcaaactactatttttggagctgcactactttatgatgaaactgctgaatcattcatgtggttgtttgatacatttgctaatacaatgtccgaaaaaaaaaaccaaaactatccttacagatcaagatgtgacaatagcaaaagcattagctgttaaatggccagaaacgtatcatcaaaatgttgcaaaacatttgagtagcatttttgaaattttttgagaattctttaaagattttagtagatgcatatatgattatgaagatgaagaagcatttttacaagcttggaatgagatgctccagaagtataatcttgaagataatagttggttgaggcggtatgtttgctgtaaaagaaaaatgggctttggtatacggtagaaagacttttgtgcagagatggcaactactcaaaggtctaaaaagtaaataatgttataaaaaaattatgttagctataagcatgatctactacgattttttcaatattgtgataggcttataaatgatcgtctttatgaagagctacaagctgatttcaggacatctcacataggagtgtgcataaatcgatctattccaatgataaaaccgacacaatccaattacaatcgaccggccaaactattagatatctaatttgnggtcggatcaaattggatgttatttttgaatatcaattggattggatcgaatgtagtagt

SEQ ID NO: 179238 - DNA, 589 bp, Cannabis indica
taatttaattaatgtattacaagaggctaacactagaaattaaaatttttttttttcaacatgattttagtaagaaaaatacatgttttaaaatagtaagtgggagagagttgtcatctgttatgaaacccatggtctccattattagtccaacaccgagagtatgaggagggcctcaagacgactttattttcgtcctcctaaggaaggtgttgaaccatgcaatttcaaggttggcttcttctataggataggacaaagtgatgtattttagtgtgataccgaccctaaggtgacattactaagttaagttatggaatccaaaataatagattacactcgcaaagtaatctcattgtctttgacgctaggggcataacttgaccaaacaagcgatactttattttgtaaaagaaaataagaattattctagttacaatcaataaagacaagaacaagtcttatagattattcaatgttaatttgaccgactcaaatatgaaattttgatctttggattatcttatcgtagaattttttaaattattttgtgtttttaaaatgtgttcatgcatcatgtttagattct

SEQ ID NO: 179239 - DNA, 897 bp, Cannabis indica
ggctaattagtaatttttctccttgaactttgacatgtactaaagcatgccccttgaatttttttggccgttaaaaattctccctaaactataaagattgttaaatttaaggacttttatctaattttagtaaaaaaattctaacatggataaaagttcaagggacatgatttagtatatatcaaagtttgtggaaatgatttggtagatatcaaagtgtggagattatggtttagtacataaacaatcactgaaacagtaaaattgaatgaaatttgacaaaagtctatatgtcaaagttcggagaaaaaaaattgctaattagcctatatatatatatatatataaagaattaaagatttgaagaggcaacagtggcgacaagtcagggtggacacgtaaaaatggggatgccaatcatgtgacgctgcttttaagggcccttttcttttctctctctctttaataatcttttgtcttttccttgttggcattttatatattttactatttcataagaacatttattttctttacatttttttgatgaacaatttatgtatttaattaaaagtattatttttgtttattgttttgttcctcgggattttaaccatcatccgggttttatatgaggattctccactaattatgattaaatattaacctaatccctaaaagtctcattttattaaattttgtttttaattgtccttttaacgtcacataattctctcctagggtacctaaacttctttgtttgaaggtcacaaaattataattttctcttccatgatccgatctttttaagtatacgtgcctcaaaaattaattatttatggcattattaaaatactgatcttttattggtcttccacccaaaaaaaaccaaaataa

SEQ ID NO: 179240 - DNA, 736 bp, Cannabis indica
tagctagaaaaaattatatagacagttctaaacctccctttcatagcgaatcatttctcagacaggtccatcccaaaattaaaaaaaaaaattcacacaacctacttcactgttcaacatgcaaacaggtctaaccctagcttgaacaaaaaatttctatcctaaacaaaaaataataaaaagttcaactaggaattagagtacttatgtgttgagtgaagaggagacggggtgttgttgcagaatcttgcttgaagtcttcaaacccagtcgattaaacggtcacaactggtctggaagtcaaaacctccatccggcagggggtttagtaggttgatttgaaggggtttgatatccagaaatagcctcaaatgaagatttaacaactattggattaaatgtttgaagtcttcttccatccatcggcgaaggaaaagcgaggaaggagaagtttgcagagggaatttggagtttggtagatgtgtggaaaagtaaaaaaaaaaaagcgttgaggttaatttatacttcaagaggaaatcaagtctttttaaaattgatggtccagatgtccttcattaagtatcattagatccaacgtctatggagttgaaatggttgaaagcattttcaaattacccttcaatcagcttcactttctctgttagacgcaccccacgcacgtgcgtgtgaactaacaagggcatttaatatgttgcatgaccgccatgctagcagg

SEQ ID NO: 179241 - DNA, 806 bp, Cannabis indica
ggagaagttttcagaagttacaaattaagggaagttgagagtacttggaagttggaacagtttttagaagttgtgaaagaggggaagttgagagaacttggaagttagaacggtgaaagaggttttaagttcaattaccgttgttttaggatttttaccgtgtgctgttgggtcgggttgggttttcaattcagttcaagttggtgttatcgtgtctaaagcctaaaattaaatagtcgaccggtttgggttgatcagcccataaattgtacaacccaatttatatacactttatattgtgggcaattttattttgtaaaaattatttagaaaattataagagttaattttttatggcataaataaataatgatttattttaaaaggaaataaataaataatgctttgagttatgaatttttttaatttcttttactttagtgtggactttttttagaaatctcatattttaagtttttcttttgaaaaaattacattgtatacccactttttatttcttattttgtttttacttttcttttattatttattaattcatactcaattttataggtaatatcccaattatgtgtgtttagcgataggaatgcacatttctcccgcggggtaatgggatggggcgtccgtggggacccggcttctaatgggacggagatttctcgctccatcctcgtccccatcctagggatgggcaattatacccgcgggttcgggtacccgacgtgtaactagcccctaatagggcggtacgggggttggactttcggggtgggggtcggggggtc

SEQ ID NO: 179242 - DNA, 538 bp, Cannabis indica
ggtatattgtttgtttatttaaatgttttgataaatggatacttgtttttttttttttgatactgtgtagactatatacagataatttttatttttttttttttgaaaaaaaaatttgcaatcttataattagttaacacacattattccaataaaaatgacctaatttttctcaagtgaaagattgaataactatactaaatatgcatctttcaatatggaatcaaaaactaaatatcttcgaaaactaaacagcatgtaaccaatataagaccacaagaaaaactagactaacatttttcttataatttaatttcaggacaaacacttaattaaatatatttataatcaaacacatataaacattttttatggcattgtcacagtaataaaaaacagatttgcattaatgcagtcatatatatgtaatatcaaaaataactaaaagagagggatatggtctataaataatattataaattttaacatattctcaccttgtttagggaaaagcctacttttggtgattactatcaag

SEQ ID NO: 179243 - DNA, 701 bp, Cannabis indica
ttcatattatatagagatataatataatgaggctttatacaaatcaatcctttttttttttttataacgttatagttttattcaggaacttaatataaaagaaatttaggagaatattactgctttagattgtgatctttttttttgatatagtcctattttcttttttctcttttcaatttagttgtacaaccataaacaacaaatccaagaatgacaaagcaagctaagcaaaatcgttagaaaaaaatgaggttatcaatcacctcttcccacctttatataatatttaccaataatccccacaagaacaagttccattcttgaaatgatggaatctccttacatcccttaaaatgatttccctgttaactatcttagagatgaccttacttgcagcatggcagtcattacaaactctaaggttcttggtaactctaatggtagttccaggaggagtattcagaatcccgaaagctatcgctagtttctcactgtgcccacaaagcaaagtttcttttgcttcttcttcaatatcatgaagcacacaagaagtatcaggcacatatccttccttttttcatcctaacagagagggtctcaagaaattcatggagttgctcacttttgtggatggggatccatctccagccaaaaaacttatgcactttgtcaccgaattcgatccagctacagccagg

SEQ ID NO: 179244 - DNA, 654 bp, Cannabis indica
aaagatcatcagcaaaggagtttcagcatcaaagattcagagaaagagatccaggttcagatattgataatgctctgctacagaaaggaatcaagggctagatatctgaacggaaggagtcatattattccgctgcacccaatgtaaggtttcttaaactttatatgtgtttaatttatcgttttagaaagttcttatttaggatgttaataaacatacttgtgagtagatctaagatcctggtaaaataaattccaacactagcgaccagacctgtgtattttatccaactcctcaaggtgggcataatcctttgggcttagcatgatgtgacttgagctcctagaagagcttcccggacatgatcactaagtcctaacggttatcccaaggggttttgccataattattcccagtatttataatttcatgccacatggcttactcttggtttgccacgtgcattgggagaaattaggggcaacatttacccccaagtctcgttttgcacctttgtaaaatgagacttgccatctatttcaagaaaggacgtcatcagaagtcatccaacatgcgcatggattatttatagtttcataatcattttcctcgtttttggtaaaaacaatttgattcttgcctctttgatggaaa

SEQ ID NO: 179245 - DNA, 753 bp, Cannabis indica
ttgaaatacttatctgtttaaagtgaaaaagtcgttgaaagtagaagtcatgaagcacaaaaagaaatcattcctcttgcaaattgagcataccacaaaattaccctaaacaaatagggacaaagctacaaaagccataaaaaatggtacaaaagccataaaaggcacgtaagaaaaaagtaatgtaaattcatatgaattaaagtaaaaaatattaactaaaatttgttaattgatttataaataaattaaaaaattaattcatataaaaatatacgtaaataaatcaattacaaatataattaattgtgtacatgttctaaataaataccaagaaatcataaaaaaaattcacctttcaaaactataaacttgtaaaaaccaaatttagaaaatattatatacataaattattgttaatataattaaaaatgctagttgactgtcaataatataaagaattttcaaaagaaataattaataaaatataaaaagtaagattgacttaaaattatttaagattttaaaagggaaatttgacattttatgcttaaaaatgtgtaatggtgttaaattataccatcatcctaagaatttggtaactatgccaatcttttaatggtaaccccaaaatgccctctcctcaaacccaaaaaaatacagcccctcctttctctctctttccctctcgtttgatctctctctctttcttctctcactctctctcttctcgcactctctctctttcacttt

SEQ ID NO: 179246 - DNA, 604 bp, Cannabis indica
ttcattgatacatttctttctttctttctttctttctggtcccctatgtataacatatttttatgaacgttgggacctgagcctacttttcatctccccaaaattggacaaatacaacacagccaaacaatacacaacataccaaagtttcatatacctaaacatagatggacgaaattgcccttttcattctttattattgttattattttttcatagagaattgggggctcgaatcacaaggtgaacaaaaagatacccttcttttttggctttgtcagtaagccactgtcactatgcatatcattacagaagaaaaaaactagggtccgttatgttgtcgtaaaccgaggagggccctcatgtctttttatctttttaattggggaaattttattttacacccaaaaagtttttaaaggaactcataatttttttttatataaaatttatatttttaattatactaattttttaactttttcctttcaattcatattcttaaaaatatacctatcaacaaaataaagtgtattttaaatattatgacaaaaaaattaaaataaaaaattaatagtgaatttttttagtaaaaaaaaataac

SEQ ID NO: 179247 - DNA, 611 bp, Cannabis indica
ggcctctactagcccacattggttgcggggggtatctgtgagttggccgggcaggtttgactgacctcccatgtccataagggagcctcccaaggaagctccttggaatgaaaaatgagttgcaggcaacgctttccggatcgggccctttgaagctgaaagccagatcagcttagaacagcagcaagggagtacttagttttcttttgaattggaatcaggaattaatctttttcagaggcaggcagaaagaaaaggttgttaactaagaaaagacataaagaaagaagtatagagctatctagctcgaaagctaagcaaagcaattgcgcaaggcagggtttcgctggctacaagggaaaggttcgctgcaagccttggtgtcctatggggaagatggtctagctaaccaaaagagactctttctcctttctcctcctctccaccttttccttccccacccccaccctacctacgtacgtccctcctcgtaggtgtactctactttcctttcgttccgtacctaagtacggacggtaacgtttacgttagtaattaacgtaacgtagtagtaacttacgtaacgttaaccttcctacccctttttcccc

SEQ ID NO: 179248 - DNA, 858 bp, Cannabis indica
aaagttaccattttttttatttattcataatttttaattttttataccacctcaaaaatgcaataatattattttttaaaaattttaaataaaagttttattcaaataatttaaatatttatttaacttaccaacaaactttactaaatttactaaacttagttttcaacaatttttaaattttttcattattctaaatttactaaacttagttttcaaatttttatttaacttaccaacaaactttttaatttaaataaaatttaatataaaataaacaaatacacattattaaaaacatacatttttcttaatctgaaaataaatagtataccatatatatatcactgttacaatatatataaattatataaacattaatatatattatatattttatatacatatataaaaaaaatatcaatcttatatatatatttagaacttctactaattaataataaacatatatatataaataaaacatatatatatgtacagattaatatatacaatatatatactacaaaatatattatatacattatatatataagatacaatacaatacaatatatatataataattatatacacagaaaattatatatatatacagataacaaaaatggaaaaaaatcaaaaactcaatataccaaattatatatacacaaaatatataaaacagaatttctatttttatgttagaaaaatatatatatatatacacagattatcaaaatataatacacagataaaaaaataaaaaaaatacaaaaactcaatataaccaaatattgtatatacacaaatatagacagatttttatatatatacctatttttattatacaaaaaa

SEQ ID NO: 179249 - DNA, 730 bp, Cannabis indica
tgcaaaacacatagttcaaaataatatttacccttattattatatatgttttttttacatttattagtaattcacatgaaacttttacttttttgagttaacaaaaaatgaaattgtgtgtgactaaaattttatatatattctttgtttcttctagtttgagaaggccaaagtggttttacattttttttaaatatgtggaaattaaagtatttaaaataaaattattttttgatggaagaaatttgtatttttttgttagaatgtgtgtatagaaattttgaaaataaacatataggaaagatttaatttatttttatttatttgtaaggtaggaaagatttattagaaagtggtgttgtgagaaaaaacataataattaaaatgattattaattagtacttaaaaaattattaggtgaaatggaatggagatgcaggagggctcaacattaatggaactaactatacattgatggattgtcattggcatacaccatctgaacacacaatcaatggacgaaggtactttataattatatatttctattttagggttttttttcttacattttaaagtattttttttattacgaaatatatattataatttacgaaataacttaaatcacaacttaatttatattgcaactcatgaagcaacttagattgcaaccaatagagtaacccaaatcgtaaaaattaaaacgaaaagttaaaaaaaagtatat

SEQ ID NO: 179250 - DNA, 817 bp, Cannabis indica
ggaggagtattttaacttgtcctctgagctcactttatgagttcaagctgcgcaaccccagagctaatctgtcatacatcgatagtgaggctttcgtggagtgtacattggcatgaggaagagtgctttttgagagtcgattgaaagcgaactagcccactgcctatcgagagggttcttcatcaggaaaccatgatagagggttggttggcacaactgcagagggggtggccaactaggaaattgaccaccaggccggccaacatgttgatgttgaggccagtccagactctcgctatctcgattttgttacttcagactaccactccatctagccttgaacacacacagataatatttttcataagtattatttagcattatttttgtataacatagacaatactttcatgttttgtatggtcctgcggcctttttagtaacactacttattttctagcccaagggccttcatgttcgtatctttggtcctataggccctttcttgaacattaatattgtttgaccttgttgcttttttattcatgtgtcatcccaaattttttaaccttgacgtggcatgtccacgtaagccagacactgagtataagtggaatacaacattgccagtagcaagacagggtctccatgcaaggtatggcaaaattttcaagtagcaacccaaacggagtgaagcgagccctcaaagagttgtaccaacatctcttgccaaccaagtgaagcctataagccaactagagtgagcctataagccgaccacgatctgggcacaagctggacgaccaaaaagtgactt

SEQ ID NO: 179251 - DNA, 635 bp, Cannabis indica
acaaatagagtcggtgaggataacagacctaacaactaacagagtgttaacagaatgtataactaactttacaatagaattaagacaaagctaaacatctaatagtgtgggaatgtcaatgggtttcgtagtttgaaaagggggaggatgagattgtgagaaaaaaacctcttcaaatgcttcagatttttgatagaataattagcatttttgtcccttaaactttcgacactactatctaaaatatacgccttgttaaaaatttcttctaaaatataacaattatataattatgcacttcctgttaggttctgtttcttttaccgttaaaaagtagcattttttacccctgaagtatgaccaatacaaaattttgctcccttttttttaaaaaaaaaagtaattttaaaaattataatattcaattaattctgaaaaaaaaataatataaaatatgagtttttcatttttacattcaaaaaagttttttttttttttgtcatttttatggaattcacatagcaacccacacagtaaccatcggagcaacctaaatcgtaactcaaatatatatagcaactcacatacaaactaccggagcaacccagaccgtaaaagtaaaaaaaagttaaaaa

SEQ ID NO: 179252 - DNA, 1209 bp, Cannabis indica
gtgtcaactcaaaaacacatgacgacatattttagcttatttaatacgtgatccaataatatgtcgtcacgtgtttctaaattgataatttacagccaaaaaaaagtacgactgtaataaaatcgtaaaataagctatttttgccactattttttttttataagagtcatatgtataacaattataaatattaagagaatttcgacacaatttttttttattattatatacctcatcgccattggtaacttcaattaatgatttctaagctcctcacattattaaatataaaccaagtggactatatttatattagagattcatactgttaatgagtgaaaataaaatataattggttacttcttttattgttaatttgtattaagatggaactcatgcatcttaactattctaaattctaattttttttttttatttattatataaagtaaatagtgtaaggatatgatgtatgcttatcacccatcgtttatttattttttgtatataatattattcttcatttacatattgtttgatgatcaaatttttatttacttttattataaacagtattatgaagtttatatatagatcaatacagtttgttatattttagttcatttgaacaaatgttctgcaagactgcaactgtattttatttattaatattattattatttgtaagaatgctttgtcaccaattagttgttcgtatatttatcaattttgcagttaattaatgttgttgactgatttaaatattaatggtaaatatatttatttattattttttatgtatttattttcattgattaattatctgcaccattaatatttttggatttggtgaacttgtatcattaatgtaaatataaaataaaattcatactctgttcaaaaaataaaataaaactcatacctgtcccaatctatcttaccaacaataaattgactcaaaattaatgttatgtaataattaatattaaaagatccactcaaatctgtcttaattaggcctgattttatatcgaacacagtgccagcttagcttacccaatattaataaaaaaaattaatatataaattacaatatgtgtaaggatgagtcacctggcaaaatattaggtctaagtgttaaaaaatgtcaaaatttgagatataaagacaaacaatgacgatgcctctcaaagatgatgcaaaaattgt

SEQ ID NO: 179253 - DNA, 669 bp, Cannabis indica
atcatcatcagcagaatcatcatcatcatcaccatcatcatcagcagcatcatcatcttcctcagattctgatgatgaggaggatgaaatatcaattgtctcaggcacagtattacctggttgagggctgcactctcgagaatctacctcttcatcaatccattgtgctgctaaatcaccccatcgcacaaacttgttgtagaatgcatcattaggatcatgatggcctctcggatttacaactacatctggtactaactcactgtcagatggcaactcctccagaatgcatttgtccaattttgcagcctcaggttgggggacatgccttactgcctcctcatccagtctccattcaactgcaaaaactggatctggcaataccaaatatatgttggcctccctgtaatttctacccctcaaatcatccaacatcaacataacttcactttcaccaacaaccctaaaccccatattcaagctcttcccttttggcctaaacagaaaaccaaaagggaatatgtatcccaatacctgagccatttcttcaagttggagcctgctgaatccattgaaattacagaaatcaaaataggcaattctgccattctcatactgtcgattgccacctcgggtgaaccaatacccaccatggaaaaatttcacagt

SEQ ID NO: 179254 - DNA, 522 bp, Cannabis indica
actccaagtgtaagtatacatcatcgctgattatcacattagtgtaaatccaataacactgatgaaacagggaccaaaacttttgattcatatgatcacaatcacattccactgtgttgacgatactgtaattgtgaataaacatatgatctggatttaactgattttgtgtgtatgaatgtaataaacatattaaacatattaaaccattagcatgtaaaattcatgcaaacattaatcacttcaaatttcttatattgataactaatcagattgtaaagagttttatttagggcataaaacccaacaaactcctcctcctcgacaacaggtcgggcctattctgccttggccaaggtggctagtcgagaaatatgagggttgacggatgaaggcttctgacagtctgcttggttgtgccatcatttacgaatgggcacaattttatgagagatgggccttgcaacaatcacataaactcaacaatagagttccttcagtagtcaggattggatagcctca

SEQ ID NO: 179255 - DNA, 1372 bp, Cannabis indica
ttgtttgtttaccgagaaaattgagtcgaacaaaaaaggaagtggaagtagtttaattaacgagagagtaactgagtggaattgaaggataataagtttatagtcatcttccagccttggatgactaaacaacacctttggataaaatttgtttcagtaatggagttgaactgttgaaattctatacaactttatcaagcttttcatttaaatgagaagttactaaacctgagatggatattgttgcaacatttgcgtgattgatcttttctagttggggattttgtacttttatttgtttacactgtctttttatttttattcagtggatgcttaagaattgttccagttggtctctataattatcgtttcatgtttattgcatatcatatatgagaaagtagagttttcggtcactattctttttaatttgtcatccttcgctgcattctttctttcttgatgcagaaaagcctacggtggcacaattactttaccattcgattttctcgtttgctttcttgttcacttgaagtatcacaatgaatccctcttcgagtggtgaggagcttgctattctgcagttgcataaatgggactcatcttatcctaaactaaacttgtcagagtttcgtgaagcttttatttctccacaaggcagcagttatgttgttttcaaggcagaatgaagctttgctactgcctctctttacaggttaattaggtttatttatcccctgtaacttttattgacactgccaatgttctttttataggattgtgtattaaagttttaccttttttactttgcttgccggtgcctttgaccaccccaccatctaacatattaacttgtttataaaatacccatttgtgtttgcagaagattgtggtgtgactaatgaagtgaagaatagttgtagtgaaaatgtttactatccaggttcagctttagatccaagaagagatgatatgccatgtccttctggatctgtagtggattttgatagcggttactcttttgaatgtgaatcattatctggaaggtctgcttatttaggtgatgtgtactctgttgcctggggtgtttgtggggatacatataatcagcacaaggatgctttatttagagagcttttgtttgtatctggtagccatggtgtgacagttcatgctttttgtgaaaacaatacaaacactacaatatccagaagttctgaaactgcatcacagggcaagtttgaacaaggtgagtgggtggaatggggggccttctgttacgccaacttcaaatgaaaaggtagatgaaccttttagttcatttcatgagaccaataggaacgttgaggatgtaaatacaaccaatggaaat

SEQ ID NO: 179256 - DNA, 561 bp, Cannabis indica
gagagagagagagagatagaaaacgggtgaaagagagagagttttccaaacttttctaaatttttcaaaaaattaattcatgaaagaaaagattttgttttaattactttcagccaaagaataacaaataaattcagatttttaactttaattaaaaaccacaaaagacaaaacaaaaatgggcaaaaagaccattttgcccttctacactaaaaggctaaaaagacactaaggggtattttgggaaattctaaaatcccgactaatcccgacattcccaatgtctaaaatattattccgctatataaaaatactaagatgtgattctaatatttaaatatttaaaacattatttataaatttctgattagtaaaatgatataatattttcataaatatcatttatctaacttataattcataaggaattaaatattttacaaaataaccaatttatgaatttaaaaatattatggttaagatattgttgcccctgattttgcccaatatacgtggaccaaccagacaaggacacgtggatcaagcaacttataatccaaa

SEQ ID NO: 179257 - DNA, 963 bp, Cannabis indica
aaataattatggttgtaagctgattaatatgattgtcaaaattttattttgttttgtgaagaatagtactacataaatcatatcaatggtacaatataatttttactaattgattaagcatttgaaattcattaagcaaattaaggaaacttttgttcccttaaatttgtcctgtttaaataatgattggaattagaactgaagtgcagcaaattacaggaccacttattattatgtaatttttgccaacatggctgcgataatatgaagaatcatcaccaactctctaattttttttagagattaattagataaatctatcattttaggccaagccattacaataaaagtaattagagatggttgagctttatggaagcttcaaaaatattttagtaacacaattagctagaattgtctaaaatgtcaaagttggtttcttttgagtagtataaataaggacctttggtcctcaagttgtgcatccaacaagagtgttttcaaaagagtgagggtgtgttctaaagtctcccaacataaaaataaagtatttcaaaagtaagtgtatagtggtaaaattaaagtaattagtggctagtgtattgtggtttagttaaaaatattcaagtttggtgtaattactttaatatattctgttaggaaaatgagcacagcagggcagcctgtaatgggatgatttctcacatcttactattatgcatatccccctgaccctatacctttttaccaaaatacacacaccacacacaaatcatcacttttattgcagctaagaaagatatgttacactttcacttgaatacataagaactctgaataaaccaaaagaaaagaaaaacgaagaaaatcaaaagatatataaattgcattattgtttacacaacactacaactagtctaaaataaaataagctgcaacatgaatgtatcatactcactgatg

SEQ ID NO: 179258 - DNA, 816 bp, Cannabis indica
cacagatctctttcggttctctgtcttaatcgctctagggcctcgttgcagagtggctatgggaacttccatacaagagatcgaagagagagaggtccttttgggttttttcttttgttttttgtttacattacattttctcgtctttcccttttcataattctgtcgttcctcttcgtccctgtcattgttcccggagattctactataggaccagagcctgagcctttcgatgagatcttcaacggtgtagattgtttggggtccaggatacttaatatgtgcctgatcacatttgaccaaaactctaaaacgtataataatttggaattctaaattattatgagctgctgctatcctgtcttggatctttccaaaaacatatctatactctcataatttcactttatattacaaaccaagtttttccttttgttggggattagttaagagttggtaatataacttaacaacacacgttaacaaagttttaaattacttccttgcaaaaaaaaatacaattttattttcgcaataacttcttaatatacatcttaattccattaaaaaaaaacatcttaaattagtgaatttaggtttttcttaaaatttaaccaaaacataactaaacaataaatcaaaatgaagttatttgattaaaatttaatttaaattaaattcagatgtatgtttaaatacttgaaagttacttatatatcctcttggaagaaaaaattgaaaggaaaaatacttgtatattaattgttttttttttttgaaatagtacttgtatattaatttactatatcatttttc

SEQ ID NO: 179259 - DNA, 646 bp, Cannabis indica
gtaatattttttgttgttataagctaccatgatagtatctccagttgataaacatgtaaaatttctcagtgtggtctctaaactgtagttcatagagcaaaaatttgtatacaattaataacacaaggtttccaattaacatatagtattcataataaggatggattggagactcacattgcttttgggtttgaaatgtccaaaaagtcagtgctgtgtggttgtaattttatgtactttgctcttcgaagagaaacattctttaaacacactaaatctccctcttttaatttcatattttccatcatctaatttcaaaaaaaattctaaattagtatgtaacaaaagtcgttaaatgtaacacgaaaaaaataaccatccatacccaacaaggcatacaaataatgccttcttctgatgtaaactctaatactccgcaatgagagactctctcagaagagtcatttcgaagctcgaacaacattggatagtctatatgtagaaatactgcaaaaaaaaaaaaaattaaaatagttaacatcttgaatctaattcaaatttaaacttagaagagaaaaaaaatgaaaaatctaaaaatactaaccaagctatgaaggccgactgaggcattataactgaacattgc

SEQ ID NO: 179260 - DNA, 709 bp, Cannabis indica
gttgggaatattacctttaagaatctggggaggaggagggatagttccaaggatgtatccttctaggttgtatgctctggtagctgcaagaaccagggacctccagaaggtgtagttggattggtccaatcgcaaggttaaggggaagaagattgttatttagaagagcgacttgttgaacttcttgcgctcgatggatcgattgtgcagcgttcagaggagctccattgccgtcgatttgtccaccattgttggatgagttagctccaatcaacgccattaatgctctgataccatgtgggaaatgtataagaatgatgcagagagaaaatagagaagaaatggtaaaatgactcttaatctcctattcatattgaattcaatattaagatgagtagttacaaaggctggccacagcttagcacaagaaagcaagattgttataacagaaaacagaaaagctaactaacataacaaactatagtaactaacttatcctaatatagataaacattatgcacctttattagctcaattttttagccatgttaaccaaggaattaaaatcaacattttcaattaatatttatttgatggtttttaagtttttaggataatgatcctcttaagctaacatgtctttttttcgtaaaaaatcgatgatatattcccaaatataccatagaatatcaaatattcatgcaaaaaa

SEQ ID NO: 179261 - DNA, 731 bp, Cannabis indica
ccccaaagccattgcatatgaaatttcttccatctcttctttctcttctactgccatagggctttcttcattggttaatacaaattgtcgtccaagaggtactgaagtgctctaagaggtattgctcttagaactttgttaggatcttctcaatgtagttacttttgctttagatgtatgactccatcactcttggatctatgaacttctaaatcaagtatcttctttacttgtctcaattctttcatgtcaaattctaccttgagtttatctttaattcctttgattactgccttgtctttgcccattattaatatatcatctacatagaatagaaaatacacaactcttgacccttctaagtgcttaaaatacaaacagtgatcaaacttggaccttctgaaaccaatctcttgaacatagctgttgaatcttttgttcaattgtcatggtgattgcttaaggcctgtagaaaatagtgaattgaattgtatatgtatttcatagaataatacatatttatatacaaagctagtagacattgtgggggttatgaccgaggtaggtgaaggaataagagactcgtcagaacatgtagcaggtgcagaggatgtgacagaatataccaacaattcatcattgggcagcattagagcaaattttatgttacttgaaagggggaccgggatgaggtataatttacaaggatcatggacatacccagattgagt

SEQ ID NO: 179262 - DNA, 613 bp, Cannabis indica
atacttagactactcacaagaaaagtcatcttcaattcattcttcattttttattggtctttcatagaatctcttgcttaaatcctcatgagttgatcaactcttgtaaagtcgtgtgaattcttccgttctgtgagaattttttaaggtgaattttggggtgtattaaaataataccctttcagctaaataatgtgggggtgttgttataaaaataaacatttaatggggtgaagttataatttttagggactttttcatttttacattttaaatcaattttttttttttgtatttctacgaaattccacatagaaacccttatagcaactaacggagcaacttaaatcgcaatcaaaattcgtatagcaacctacatagaaactaccggaaaaaccacttaagaaacccaaactgtaaatttgaaaaagaaaaagttaaaaatagtatatgggtaatttctctcatttttaggggtgtaaatataatctcccttatgaaattaataaaagagaaattttatttacacttcaaaaatttctaaaaatactctattttaataatttttatataaaatttatatctttaattgtactaagttttttttaacttt

SEQ ID NO: 179263 - DNA, 925 bp, Cannabis indica
tattaaaataaaaactaaaaggaaaaaaaaagaaagagatatgtatatatatgaatggtttcatatttgaaaaaaaaaaaaaatcaattcaaacgttatctcaatcaatttcttttcttattttgttttttctaatattagtgggctttatgttgtgattcggtaaaaacacctcggtacaatataattatttgactaacgctatttccataaatattttataatttttgtatataactgaaaaaaccccattaacatatgtttgtttttccttcttttgtaaaatatcaaatagtaagtaacaaatgtagattcttaatagggagttttgcaattctaacctaaacacctaaactaatttagtctctaatagttagcttttataactaatgtttagtgaaagatatttttaatcataagacaatgtttaattggaaccaaaagaatcaacgactaatttttagtcattgtttgttatttttagtgactaaatttgtatttagtcattaacacttgctgccaaaataataaggtttttttacacaaaatgacaaatttgacaaattatttacatttttaatgcaacatgttattttttacttttatacaatttaactttttcatttatgcctttttaagttttttaaaattacaattatacgaaacctctttttcctctatcttttacttcatccctatcttcaattgcaaaaaactcatctccaagtcccctgctatcaataagatcgacctcctcctcctcctcctccctcaatggtcgcgcaaagtccatctctctccccatatcgttcatctccattctcatttgcttctattaatttgtaagttatttttttttggtttaatttttagaaatatattattaattttaaatgtcattttagtttttttttttttacattat

SEQ ID NO: 179264 - DNA, 758 bp, Cannabis indica
gtatggatgatctttgtactatttactattatttttggtaaataattattaattagttagtaatttttatatggatatttttgtactatttactatccttttttatctttcatgtattttgtcttatttttttaaaatgattttttgtaattgttattggtactcttcatgtacttaatgctacatcggtgtggtatccaataattgattagtaatttttttttgtctttttttttttattttactttttatgaataatctttgtactatttttttaataaatgaatttttgtactattattgtattattgttaagtgacacattaaagtgtttaatactatatcgatctggtaccgaataattagttgtcactaatattaatatgtacttatttttcgtaatttggattagaattttaaatttttttacatttaatctgataatttaattaaatatattatctgtctttatttaaatacaattgataaaaataaaaattatgattaatccattaacttgaacagaagttaggtgcttttggttatgtttttgtaccacctagtatatttatattgattttagtacgccaaatttactcactacgtatatcagtagccgttaaacaacttgcctaggaaaatggagatgcttttggctctccaacttaggtaagtggacattaatgtcatgtaaaagtaatgaagtgtggatttagatctaaaccaaactagagaaaacgaattaaaaaacgttaacg

SEQ ID NO: 179265 - DNA, 793 bp, Cannabis indica
actgcaacttattaaaatcatttagtttaaaatcgaaatcgaaatgcatatcttgcatttcaactttatgcactaggactgtctttttttttaattaataaataaaatattaataagaaatgtctaatatttcttattaatttgttttttattttacttatttctttatataatgtacgtgtttattatgcatgcatgtttgcgtaatgaaattatctaagtacgatcgacgatcaaaggattaatttgtttgtttttataattatttctagatatgagatttgaaaaagtattgggcatgcatactaaagatgtttgcataatggtgaaagtggttgatcaattgaaaaaagaaaaaaaaattgaagctaatgtcaatgttgggacccaagtgccaaatgacaggtacaaagtggctgatggatttaataaagctattcgacctattgcaagtaaagttgaatgggattcaattgtttggaacagataaaacacacccaagcatagttttattttttgactatctatgcttaatagaatcaaaacaaaagacatattacagtataaggaacttgagaattctaaatattttctcagcaacattgaagatgagactgtggcacatcatttttttgagtgctctttctccttggaattcttggtaaaagattaattcatggctgaatttgagaatggctgccacttccttagaaagaattgtaaggtaagaaaaggcgaaaaataaagcaaaggtgaagaggataatttttgtctgctgtcattgcagcccttg

SEQ ID NO: 179266 - DNA, 740 bp, Cannabis indica
aagtttgtggtgtactgcgatgcatcgaaacaagggctgggatgcgtgttgatgcaaaatgacaaagtagtagcgtatgcctcaagacaacttaaggagtatgaacaaaggtacccaacacacgatctggagttggcagcagtagtttttgcgctaaaaatatggaggcactatctctacggggagaaatgtgaaatttataccgaccacaagagcctgaagtacttctttacgcaaaaggaactcaacatgaggcagaggcgatggctagagcttgttaaggactatgattgtgaaatccactaccatccggggaaggccaacgtagtagcagacgcgctaagtagacgcagttatgccagcttggcaatactggcacaaatggagaagcccctacaacaggaactccaaagaagtggtatagagatcattacacaaaaactagctaacctaaccattgtctcaacgctgctacaagaacttaaagatgcacagattgttgatgagttcttacagaagaaaagagcaggcttgccagagaaggaggcagaagatttctctgaaggtacagacagcatgctgaggtataagggaagagtgtgtgtagccaacgacatagagcttagaagaaagatcatgatggaagcacacactacaccctactcaatgcatccagggttcaaccaaaatgtacaatgacttaaaaaacccttgtaattggtggccggggtgtgaagaag

SEQ ID NO: 179267 - DNA, 1311 bp, Cannabis indica
tgaacatctttttaaaaaaatgtctaaatactgtaataattaattcaaaagcaaaattctaatagaaacgtgtttgatttttataattgaatatttgaagtatatatgtagaccataaattattttaacaaatttaaaattaatatttagacgtaaatttgtcacacatctgaatgtcaacaagaagtttgtctataatttatctgtaaatatattattattcaaaaaaatattatattattatattttaacacactttttaaaaaaaaaatgaaaactattacaaatttacaatagtgttttaaaaacctatgttaaatttggttcaaaaatattaaccacttataataaattctactttttttcacattaattattttggttaattgactattataaaattttacattcattattaactttaattttgattttcatgacaaaaaataataatttttttgttgtatattcttaataatatattgaatatgactaatcaataataattacaaaattagggtccaattataaatagtgaactaaatataacacaattatttttttattgatataaatagcacaaaattttcatcttggcaacaagagtttttttaaaaaaaaaatcaaatcttggcaagagtcttaaatatcttataaatttaatttactatgcgcgcgattcaaaagcattgacagcacacatggagcttatgacattataacttattatgtttatatatataggactatgtgaggaactagaaaccacttgaggctagctacaagtggacatagggggtgcgtgtgtattggaggtcctgagttcgagtcccaagttatgctgtattttatatataaacgacttaaataataaaaaaaaaaaaaaaactagaaataaaagtttttattggtgctgtattaaaatatattgggatctacattatcaagtgaactaaaatgagggtacaaattttggctagtagattagaatcggttgagagttgacttagaaatccgtgtggcgtttaataatgtttataatagagctttttttggctggaataatgtttgtatagtttctcataaaaaaaaaatgattgctagaggttacttctgttgaagtggtatgcttcaaggtttttaattttttgtcctcaagaggaaacccacaatttgatcaatatttaaaaaaaaaaaatcaaattgattactctaattacctcaacactaagaaatcccacactacaaactccactgaagcacaacgaaagccacaacaccaactccacctacactctccctacaaaactg

SEQ ID NO: 179268 - DNA, 523 bp, Cannabis indica
cagatgcaatcttcgaccaaccaccgagcaacctttgtctgatgcaacctttgaccaaccaccctgcaactattgtctgattatttaagtgatagtgtaagtggtatttttgtaattaaaagtacataaaaggtataaatattgtccacacctcataaaagtatttttgtaaataaaatgtcaatttatatttttcatgtaataattttaataaaaattaatgtttttgtttgatttctttttacacctttctatagaaaaaataaaaataaaaattacctttgcattgaagcactattataaaatgtggattaaatataatattgattcatttttttagttttaattttagctcaaattgtaaactatctcatctaaaagtactcctattaccttctttactatatcatttaaaatactttattaaagttcaactttctttaatttacatcaaatatttacattacattgtacattagtttttctatatcatttaaaagttatatttttttaatatatttta

SEQ ID NO: 179269 - DNA, 875 bp, Cannabis indica
atgttatgagtatgatattggagttatgatctctgtatatgtgtacggtgtgaacaaatagtatagacttgtatgataaaggtttccatatgtacagttatttggttatagttataaaagagcatgtatgatattgctaaaacttaataaatacattaatggtatgtgtgatattatatggtattgtttgataagcatttccttactgagcttttagctcaccccccttactttccccctacaggtattagacagggaagtatgtatagtgagcagggtcagttctggtacgtatactgtgagcggctacgggcggacaaacgatctagaacgccggtggtgccttagttttattttaagcagttgataaatctaacacagtggaaatgcattatttaaaattatttacttactgtatcttgttttacaaatgaaggatccttctctgttgcattttgattttttttaaaatccactgttgtatttaaattattttttttatcttttcaaattatgcatgaaaatagtatttttgtaaaataaggcaaaatatcggggcgttacagttggtatcagagccgatcgtccgttagcccgaaggatactcacggtatacatacagaagactgaaaaagatccctctcactattatgtaagtgttagttttaattttcttggtattgccattaatagtcttatatgtgatacatagatttttgttaaaatatgtttcctagaattagtgcctcatctgtagtgggtgcttagagaaattaagagtatattacctgttatgattgattacactttttatgaagaatatgaataggtttatttttctttattgtcttgaattgaaactaggaaggacagtg

SEQ ID NO: 179270 - DNA, 607 bp, Cannabis indica
tgtaggaaggtgtgatatatgaccctgagaggaggaaaatgagaccaaaacagagatagataaatgatatacttgaacctagagtacacgcgagactaaagacctggggactttgaagcaactgaccgattaaagagggactgtattgacctggagattttaatcaaatagataaactttaacaataatgcaacaccagaacagagagctaaagggatcggtgggggagacacttgggactaaatgctaaaacaagattcaagagtatgtgagggataagaggctttgagctgctacagtgaaaatatgtatatctaagtaaatacggctactattaaagactcttatgcagagaataattcttaggaggaataaaactgtaagtgcaagaccaaacgaatggtctgacccttataatagaaaaatcctagtgaaaaggttgtgtaaccgatttggtaactatcactttcaggagctatttactttcgaacagagttgcttgcacaataggattacaaaacgtactaggcagatcacacttaacagattagtataaatgctaacagttgaaaattttgggcaaaaggaattatgacattttgaaaat

SEQ ID NO: 179271 - DNA, 1120 bp, Cannabis indica
ctcttacctaataattaggagagtactaactgattttagtattaattttcttttttatatgacattttagtattagggagccacatgttttcgaagaaaattctaaaattgttaagatacctattaactacaattattaatatacaaaattagattgtaataattatattcgggtatcaaatccaccagatatatactccggtgctcctgatcatgagagagattaattatatattccagatcacacatatatgacatatatatttatatatacacgtacacaatcaacaatcaaaatatatgaactaggttatttaggtgaacttaaaatacatatatattgataaaattattaattcagccatgcatatagcctcatctgtttttcttcttcgatcaatattcgaaatttactaatgtaattatatatatactcagaaagaaagtacattttatatataacaaataatgtcgatctaggttacataatcgtttttcgatcattcactaattaaatatatgtacttgctatagtcacaaatgatattaattagaattatatccaaataattgacagagcacaagctataaatataaattaccaaccatgtatattacaattagataatataacagtaaaatgtttatcatcatgtctctaaagtatatatatttggatacttcatctcaaaaaaagtttattgatgatgcaatttcagagaaacttttagtataattttttttatattcgtttaggttatagttattcaaaatatccagtaaaattttaagaagttcagagaaatttgacactaaaaatatagggttcaaacaatcagttgcactcgaaaaatcttttatttttacatgcttgtaaaaaagactgtttgaactctattttcggtatgttaaatttttcttaaatttctcaaaattttacatgttataaaaaaattttaactaaataattctctaaaataccaaatcggataagttgtagaatttttctatttatattatatataaactatcgtgacaaatagttcacagcatgtatacttttttgtatcacaactagctagccaagcatatatatttatatatatatatatatatatgt

SEQ ID NO: 179272 - DNA, 1195 bp, Cannabis indica
gagttcaatctaagactacaagtagagccacgtattcagtggaagaaaaaaaacgacagacaatcgtaaaaacaaacaaataaattagaacaacattagactcactaaaaacatttaaactaaaataataaaataaaagaagaagaaggcaaaatcattttatatagttttcataggtttcaaattatcttatctcaatattattcgataataacccttttatatatttttggatatagtttgtgaggagaagtaaaatgaccaaaagaaattgattcttgggataagattgtattatggaaagaaaagaccaattatgacacggcattgtgaatgtgaagctaatttaggggtgaaaaaaattgacaaatgctacataatattatggaaaaagaagtcaaataaggaaacttgaactatacatatatttaagagtaaatattattttaaattatgtgttttgtaaaaattaaaagtcaaataatattgtattatttaaaatagtataaatgctgaattgatttttatcaaaataaaatttaataataatctgacttagaggtaagtatccgatccaatctaatccaaaagtaaaagataaatctaaacaaaattatgtatatgtattatgtaatgtaaatatttatatacatatcttacctaatatataaaatgtctatctaacagattttgttgtgtacttaacagattgttatatatttaacagaatatactaaaaagttaactttaacagagacaaccattcacaaacacctattcgcacaaatcacaaatgattcaataactttctatgtatatatataagcattaagtggaatgggtatctgctaaaaattaaacaaacaagtaaacaaaattaaaagctttgtcaactatatctattccctcgcctaatcggatttttgtatttaaaactcttcagttaacgtcgtcgaccaccaattcagttatttaaaataaatgaaatctaatagataaagtaccggccaccaattaagatatttaaaataaataaaatctaatagacaaagtactggtgcagaatgaaactaatgcaaatgagatgagggagaaagatgcatttatgggggtaattttttttttttatttgggtctcatagattctattaatctgatggtcgtaaaactaatatcataaaatatgtttattgaa

SEQ ID NO: 179273 - DNA, 520 bp, Cannabis indica
atcacaatcacattccactgtgttgacaatactgtaattgtgaataaatatatgttctggacttaacagattttgtgcatatatattaaacatattaaaccataagcatggaaaattcatgcaaacacaaatcacttctaatttcttagattgataactaatcagattgtaatggattttatttagggcacaaaaaccaacatatacttgtaaaatttaaaactacaaaaatatatttttctagtaaaattaagaaaacaactaaaaaataatgaaaaattaatttcacgataactttatataactataaataaactataaaaatatattttttttaagtcaaaaattaagaaaataattaaaaaataatgagaaattaatcttataaactataaaataataaaaaataattaaaaaaaataaattttaacgacaattataaataaattataaaataaacaagttcaaagtataaaaataatttttagtctgtattgatgtattttcatatatatatata

SEQ ID NO: 179274 - DNA, 613 bp, Cannabis indica
acccatcaagtttctctagaattattagccataaactagagtatttattttttttgaaaagaagcctaattatatctaaataaaagttaaaaatcatttattgtaaaaagaacaaatttgtttttttttttgtttaagtttgatgagatttcaaacaaagtgatgatgaattggtcaatgaatgtactacatgaatatatatgttgggaatatttattataagggtctttggaatattatcacacaaatattatcctataataggttataataacaagattggaccaagtcagacctgtttcaattctaacatagacaagactcagtcaattttaacactaaaagaaagaaaaaaagtcacctaattcagcagatattcaacttgaaacccttttctaattcttaaaccagatcataagacatagattcaatctgtcagaatccactcctctcatgacttttccaaattcccccttttattcgttattatttattgtagacaacatttttccaacgtagtatagagaattaatgtatcatctatcaacaacttcatacgtaaagaaaaaaaaaaacaaaaaacgaaattttcaacttatacctctacattttt

SEQ ID NO: 179275 - DNA, 826 bp, Cannabis indica
ccccagtgcctggttacccatatgttaaacttctatgttatttatgtatttattttagataaacgttatttttttggtttttacttttttttatgtgaggttttttttatgtcaaaaactgttattttttaaaattttaattaaattaaaatttcaaacttgtatgaaaatcaaataaaaaaaataatttaaaacaaaataaataactgaaaagctggcatcagcaattcgtttacccaagggccaagataaccgattctcaaaatttcctctaattggaggtttttatatattttgttcttttatttttttattttgtaaaattcaaattatttttaaaaagataaagaaaaatattaattaaacaaaaaaataaaaatcaaagtagtttctgagaactatggtgtgagttgggttgaagggagaggttgttctgatgaagtttgtcgaagttagggttagaatcgaagccaagctacgtctctatgcaatttcacaaaaattctcttcttcctcaattttcaaacgatgagtgctgtcagcattacaaacgtcactgttcttgacaatccttcctcctttttgaaacctttccagttcgagatctcttacgagtgtttgactcctcttaaagacggtatcaatcaactcttcttcttttttgttttttgagaatttgaattcggttaaggtttgcttactttcttaaatcaaaatatgaagaactcaattgcattgcatttcagttcgttcatattatttctgattcagtactgttttgggtattaaatttttcgttggttctatttcttgactggtgaaaata

SEQ ID NO: 179276 - DNA, 700 bp, Cannabis indica
aatgtctggtcatactatagacaaatgctttcgaatcattagatactcatcagttccttatgcgtgatcctttccctagtgttaataaagcctatgctactgttgttgaagaagaaagacaaagaggcttaactaatggtagtagttccagtgctgaaccagaaaagagtatttcgaacagtgagggtcagtttgctggaaatgtccaaccattttgacctaagtattcctgcactaactgtggaatgtctggtcatactatagacatatgctttcgaatcattggatacctacccggtcacaaattacatggaaaatttccaaatagaaatgccaaaggacctctaatgaagtctgcatctactaatatcataggggggaggaatagagatctgagaatacgaatggtgaaaaagacttggtggcaggattgtcaagttcacagtgtcaaaaactaatggccatacttgctcaaaaggttgctaacaatgctgctgcaccagaaacttcacaagatcagcctgtcgtatcacatttttttggcatggaatctgtaatccctaattccaattggattatatatactggagctacacatcttgtatgttctaatctttctttattttagaatattcatactaatcccgaatcttaaaatctgtccttttacctactggtatgcatgccgaagtgatttgca

SEQ ID NO: 179277 - DNA, 552 bp, Cannabis indica
atttcagaaaaacctgagcctctctctctacctttggccgcccactctctctctctctcttcttccttaatatttcgaaacacttagtgattagagtagtgcccacacacagcaagtgatacctcaatcatagtgaggaagatcgtgaagaaagactttcagcaagaaggagtttcagcaccaaagaatcagagaaagagatccaggttcagatcttgataatactctgcgacagaaaggatacaagggttagagatctgaacggaaggagtcatttaattccgctgcacccaatgtaaggtttcctaaactttatatgtgtttatttcatcgttttagaaagttcatatttagggtgttaatcaacatacttgtgagtagatctaagatcctggtaaaataatttccaacacacactgcctcaaccatgttcacttagaaatgtaggcaagaaatctcctctagatactgttatgaaggaggcagactccctcgccccccagtctccaactaggtcgtgtaagagaagagggtacttccaatgttaagaat

SEQ ID NO: 179278 - DNA, 505 bp, Cannabis indica
agcaatttgtatgtattggatccaacctgccctggtttcaatatattaaaaaaaaaatcaaaatactccctaaacggctaatccgctaacctcccctaatcgttgaagacttgaatccctatatctcgcatctctacctcactccggtgtcactttctcctttggtggcaattgcctcattcgtcgtaataccaattcgaagaatcgagtgggtggctccgcttgaatcaaactcggtattcctcgtctatgataaggtaattcttagctttaatgactgttatcccaacaaaattcatattttatgtatgaattcaaagtataacctatgaaatcagtaacacccatttgcctgtttttgatgtttttgtctaattttttttaaatgatttttttttttttttattttaggtttaatgtatttgggtgtcactggatttgtgtaaattctttatttttttcttatttcgtatttggttactaaagtttaatgaaatctctctct

SEQ ID NO: 179279 - DNA, 1766 bp, Cannabis indica
gatcaagagattcattttctctctctttagtttcttaactggtatcagattttcaggctctctttcttcgtttcttgatatcaagatcctgaaatgacgacaaattccgctgctcccttctctgttcttcctcaaatggatccaccggagaatccccaaggtcgtgttcctctagctccaccgccgccacttccacctcctggttttgttttcccagcaaacatggcgccacttaatcttcgactaactcgcacgaactatccctattggcgctcccaagttctaccgacagttcgtgcttacgatcttgaaggatttctcactggcgagcgtctccaacctccaccgtctgtagcagatccggccgatccctcccgtcagatgcctaattcggagttcagtcgctggttacgcatggatcaatttcttatgagctagctctttaattcaatttctgagaatatgctcggtcatgtggcaagatgtgcatcctccgctgaaatttggtatgaactcgctcaactcttttccaatcattctagagctcgaatccttcaactccgaagtcatcttcaaatgaccaagaaaggcgctacacctgtggatgaatatatcctcaaaatgcgatgcattggtgatgccttaatggctgcaggacaagtaattagtgatgatgaattgattctttacatcctaggaggattaggccctgaatatgaatcggtggtggtaaatcttacagcaagggattctgtcagctttcctgaacttcagttcactcttcaaagtcacgagatgcgacttgaacaacacaatgttgctacaactgtggatcttcaaaatccaacagcaaactacacctcaaccactaaaaagaatggaaaccactccctccagccttccaatcaagctaatcgtggtcgaggattcaacaatcgaggacgcggtggttgatccaatggaggtcgaggaaacaacactggaaatcgtcctatatgccaggtttgtggcaaacctggacatattgcacttaagtgctatcaccgattcgatctaacctgtcaaggtgacacgccaaacacagctcaagaatcaccatctgaaacagcaccacaagctcttcttgcaacccccacaactattaatgatcccaactggtacttcgacagtggcgcatctcatcatgtctctgctgccaccaccaacctcacatcatcaactaactacaaaggcaaagaaaagttggttgtaggtaatggcactaaacttgctattcataatattggtgattcacacatacatgctactcgctccatgcatctcaaaaatgttcttcatgttccagatattcaaaaaaatcttatcagtatatccaaatttataattgacaatgatgtcttaatagaatttcaaccatctcttgttttgtcaaggacatgaatacgagacaggttctacttcaaggccaacttaaggatggactctaccaattgttgctacctaccatttcctcttcccaaaatggcaatcctcctgctgcctatctcagtgacactcaatcttcatctattaataataggaataaaacctcatgtaatttttccaatatttcatcttgtaccaagtcccctcgcattgttgctctatggcacaatcgacttggacacccttccaatgtaatcctatccaaagttttaaataaaatggatgtttcttgttctacttctgagattggcttttgtgattcttgtcaatatggcaaaaac

SEQ ID NO: 179280 - DNA, 641 bp, Cannabis indica
agagatctgagcggagagtcatttatccgctgcaaccactgtaaggtttctcataccttttatgtgttttattttcatcgttttagaaattcatattagaatgttaaaaaatatacttgttagtaaatctagatcctggtaaaatatattccaacaagataaaaccccattaaggccttaaatataaacgagatgtatgagtgtaacacgtaggcctatgttatatagacaataagtgtgatgacattattacatataaataatgtgatatatagtgcgaaagcacggtattatacacagaggcgttacatatgatatatgattggtataactgttcatattgtattattttattgtcttgcagagtcttggctcacgggtgctcttgtgtgtaggaaaggaaaaagcagtatggggcaagccatgagtttgagggttttcaagatgacttgtacatgtttcggccaagctagaatacgagggttgggtccaacagggaattgtatagaagttccactcttgccgcttaggtcggcctgtactaaataacttgtaatattttaaaatattttttacaaaatctcggttacgtaactttaaatgtttttggtttatattaaagtatgtttattgcaagttat

SEQ ID NO: 179281 - DNA, 937 bp, Cannabis indica
ctaaaaaaaaaaaaaaaaaaagattataagttgttgaagaaccccgacagtggtgtgaagcacttgaaatagggatcttttctttttataaaaaaatttgtcccagtgtcacaaatctaactcataaattacatatggtaaaggcagattatgtttgatttggagaccctatttgaatcatcgtattttcttgtatttactattttgagacccataaattacatagggcgactatattaattttatttcattaattttagttttggacaagctctatactttagttaatttgaatttgaggaaactcatgattcagtgagtacaaagtgcgacaactagactaaagtgacattattcaaatttggcttaaatttaacttgacttaattgaaattatatttggaagataatgtggttccacggatgaaaaagagtctttgatattgttgtctgcattaagaattttttagtggagcttaataatttatattggtctctgtatgcggtctgttcttaaattagatgctactattttgagggtagttttttttctttttttcacaaacgctagtatttttttttactcatgggatttcttttttgcttatatattctggacatatttttttttttctttttgcaggatcatagagaaaatgaatgatatgtgagaggtttgtgtgagctttagtgatgggcaagtttaacacatctataaattagggatatattatatatatatatatttttttttttaaaaaaaaataaattagggctattagttttaacctaatatacgtgtaaatgagcttgataatctaatatagatgtagattgttgatataaggataaatcggtaattttaaccaaaatgatttagtttctaaaaggggagtctactatttgcaccccttaaacttactaaatacaccccatta

SEQ ID NO: 179282 - DNA, 524 bp, Cannabis indica
tataataatcttctaatattcaaatattaacaactaaaaaaatacaaatacacgtagggtctctatatttatcattaaagtattgtctatactaattatttttcacttaaattttagtattatagtaaattattagtcctacatgatcagtcttaattacctcaaaaaattacttgcaaaaatgaacaaaaaaatagtaacaaatcggaaaaattacattttttttagttgttatcataaatgtttttcttgtagtggtactagctattaatataggaataacaaaaaagcatgtagttatttatgtacatacttaacatacatataaaggatcaatatatatatatataaaggaaagcatcaacaagtttatgtggcattctatatgagttttctctcctattcttaattttgtcaaattttgtcatttgtttaatttttttaattattttttaagctaaaaatctatatataatacatccacattaacaacacatctattatctattattattactaattac

SEQ ID NO: 179283 - DNA, 867 bp, Cannabis indica
aatataccttataataacaattctttttgaaacaaaactattggctatatatgtacacccatatacaacttacaaggccggtgtgaaacccccaacaatagctacctagtacgtacgtgctacctatagccctagctagcccttcataaatgtttcagttgtaaacaagaaacacatgataagctacgtatgtatacccatgcatatatattggtcatatatgatatgtattgtatgcattccactgtttttataattattgttatttgttaataataataacatcataagttttgtatatgatgaaaatgagatagagagaggtatgtatgggtatggtgaatatataatatcataaatattttatagttctgacaagttgagtccatgtgttgctcacatgcatttggtatactcagccgtatgtgtctttatcaacattttatttccctcttctactaacctccttacactgtcttctagtgtgtttattatgatcataattaaaaataatataatttaatttacatgcattttcatatcgtcatcagcatattcttcatccatatttgtgaatttttttaaccatatcattttcctcaataattaatacttatctttttccatctgaaaaagaaaaataaaagatttattttatacttatctgtatacgttatcatatatatgtaataaaagcactgaaagaagagatttttgcttccaaagccattactgatgctctttctggtcataaaaaaagatattttggttttttggtgacattattaaacaaatcaagaatgctttatctattttcccagctgctcggctctccctctattaatcgggatgctaacatcctggctg

SEQ ID NO: 179284 - DNA, 772 bp, Cannabis indica
aattatttttattaaaattattattaagtccaataatagttcaacatatgacaattataaataacataacaaatctgtcaaatttagaattgatggacctaaaaaaaaagtcaccttaagaattttaactgcaaattttttaattttctaatatatattttatgtatataataaattgataatttaaaatgtgtggctaaatatgttcatgaatggatgccagccaaaatcttaaccatttgatttatagaaattggtaacattatcaagacatatatatctccttgacccctctatactaccatatctcatgggatgtttaattatttttgtaattaatttatccccaaaaaaaagtttttatttttcagcatgactatggaatacgtgcatatatttaatttttattgataattatacgtttacttcatccaaggtgtgtgtatagcacaaaattttgcaataagtcaacagagattgaatttgtaaattaagagtagcttaggctattttatataatagtgtagaataaggactgttttgttgatatatgtcgctaaatgacatataaaaccatgtgatgccacgttttgaaaataaataacatgaaatgtttagacttttatcctaataagtacgatagctaataataaggatatattacaaaaaacaaaaggtcttaaaagttaaaacccaatgtgtaactgtaaaccattaaacttaaaaacttttaactaaaaaacgaatgtgctgagccaattagagataattt

SEQ ID NO: 179285 - DNA, 554 bp, Cannabis indica
ggatcacttatgctagggacaatggccgtcctagggatgttcacactggcgaagccactagatcctggttcgtaaaattgatggtgctgaacgaatggctcgacgatgctgtaagttatttcttaacagaattaatttattgtgtttttcattgtttgtgcgacttacatgcgatttatatgcgatttatatgctatattttgcacttaatgtttaatctagttatgcgacttttatgcgatttatatgcgatgtgtgtgcgattattcactgatttatgtatttgttgcgacttatgtgcattactgtgcaatgtttgtgcaacattcgaaacaattttggtaattgctttgtgcgatttcatgcgatatttgtgcgacttttatgcgattttctgtcttacagtttccttttggtaacacagcaaattgatgccatggcgcacttattaagaagaagacggatcctgtacccagaagtctacacttcgaaaaggtgagttttagacacatatgctccacagttctttttcatgtattggaatatgtatgagg

SEQ ID NO: 179286 - DNA, 715 bp, Cannabis indica
acaagtagccaccaaaccttagctagaggagcaagacagttagtagtacagcttgcattggaaacaatgtccatgtttggcttgtatgtctgctcatttactccaaccacgaacataggtgcatcagctgatggagctgatataactactttcttggctccaccctacaaagacagaaaagttcaatgttacaacaaatttcatgcaaatgaatatggatttgtatgtgcaacgcatctgaatgactgaagacagagaataaaataaactaataaaacaaacctttttatgtgctgaagccttgtcaattgttgtgaaaacaccggaagattcaacgacatactcagctccataatcaccccaaggaatctcagcagggtccctgattaaatgtttagattgtacttgtcagctcaaagtacaataagttgttagaaaaaaggaacacatgcacactttcatgctaagatctgatgaaaattaccttttgctcagaacctttatctgcttcccattgatttctaaggttgaatcatctacaaccctaatgcttcctttgaataatccatgagtagaatcatatttgaacatgtaggcctgcataaagaaaagaagatatcataatcagtttcgcataatgggatgaccatagaagacaattaagagaaattgttagtctgttactaagttgtaaaactaatgcaaacgacagcaa

SEQ ID NO: 179287 - DNA, 741 bp, Cannabis indica
  modified_base (156)..(156): a, c, t, g, unknown or other
gtgttgttgttcttgacttggtaccacttcgagtggcctacattttctatatcaattaatagtagtgttataatgaggtttttcaattacaaaagaccataatttctctcaattcaacatcataaaaaaaattagggttttttttttttttttttnttcttatttttactattttaaaacttagttttttttttttttttttcgttttattttacggaattctatatagaaacccctattgcaacaagcgttgcaacctaaattgcaacaaaaaatcgtacagaaacccctattgcaactagcgttgcaaccactttagaaactcaaatcgtaaatttttttaaaaaaaagtttaaaaaaataatatataaagtaattttcaaaaaaaattgtgttttatcccagaagtgaataatttatagaatttatattacacatagctactaaactttattaattaaataaatgctattgtgtgattgaaatttataaaataataatcaataacaataaattataccatcatatagagcatgaaaatatgaataacatgtttaagaaatgaaaaaagtttggggaactctagcaactgagaaaaataagcaccaactgaaaaagcactcagatattgatgcttgagtgtgaggtcattatttaaaagtaggtcaagtttggagggtctcgaactattttttcaactcaactataaaatttatattatatataatgaagctaatatag

SEQ ID NO: 179288 - DNA, 752 bp, Cannabis indica
tgtgtacttcaaagactaaaaaaagaatttaatatgtaaatttgggtatgaaaaattattatttatttaaaaaataaaataaaattaaaaattatataagagaaagaaaaataaaatgtgaaaattaaaaattaaattaaattaaattaaataaatgtgtgtgatttaagtgaaatgtgttactaatcaatgttatattattttataatataataagtgtagattaaaatgtagtaatatatattattatgtgaataatatgtattaggtgtttggtaaataaattgtgtaacatataatttatttaacctaaaattgtaacctacactttataacatggagaagagttacaaagttaattgcttttgtaacttcttttggttgatcataatattgtgtaataaaagagatgttacacaatttgatgataggattcaaatggtttgaaatatagttgttacaaactatattaatgctcattatatgagagaaatgagatggtgagtttgaattctaagtgtgatcacctaaacactatataaaggagtctaatgtgctcatttgtaagagatgaagttttctatcaagaaagcactttgctagaaaaccctaaaggcttgataattcccaaagctatttcctagagagttcccttagtgcttagagatagggggaaataagcttttggacaaaggtgtaataccttgttcaagtcatggtgatccccactaatctacactcaaggttgtgag

SEQ ID NO: 179289 - DNA, 529 bp, Cannabis indica
tatcatgagtttaaattagtcgacaaattttaacaatatattaaattaagtaactaatttttttctcaaaaaaaagtaactaaatttgaattgaaaatccataaaataaagggcaatttagtcatgttgataaaaatttgagttcatattattaaatatatgtataattttaaattacaaaatactaaacctgtattctgataaaaacacaaacaaacattcatccaaaatacaaaatgtattaaatggtgcattttctttattactaaatactcaattggaaacttttcacatgaacaaaaagtaagaaactcaaaatctaactttttaaaaagtagattttgttcaacaccaacaacaataataataatggtagaattatgaaaagaaaagagaaaagaaatagaaattaagatgaggatactatttaaagctattgtttaaagtaaaaataaccaaaaccaaccatataattaaataagtattggattattaattatgatagttgttaattaagtagagagattag

SEQ ID NO: 179290 - DNA, 730 bp, Cannabis indica
gttcccattcagaaacatggaatttgtatggttttacttttttatataaagaaacaattagtaaattacccacttttaaattagacaaacacacccaacaccttgagctagactcgagtggcacagctaggaatttccaattattatacgtatctaaaccttgaggaatcagatccaaggtccatgtgatagcaaggcacagggccaagtggctaacaaatcaactaattcctgacaacattatgttactaactttatattttctacaacagcatatcaacaaatctatctataactctcattaaaaaaaattattgtctacaaggagtacacaataatctagaaaataaacacatccaaaaagatccacagttaatcaagtttttattatttgtattagcactcccatcagctactctactatatgctacaaaatagctcaccataaccccacttcctttattttaccttcaaactattacatttacgctataaactgcattctctatttttcccttatatcatttaaatattatatgttttttaattattattttctttaaaatttagaggtaatagcaaatataggtcatctgatgtgcggatgtttgttccattttttctacattgatctctattttaaagtaaaataagcactatagctcatctaaagtaaagtgcctcagtatataaaaacaataaacaaaaataagaataagtacctacggac

SEQ ID NO: 179291 - DNA, 1024 bp, Cannabis indica
gagataagttgaaaaataccacttttattaatcaattaattaaatttacctctaattttatatttaattgaaacatacctctttttatatgtattgtacccaaaagaccctgattataagagagtatggagagtatcttgaagtgacatgggtaaaattggtacaatgtttaaaaaaaaagaggtaaaaatgatagactttaaaaaagaaaataaaaataaaaaaggacgatataaaaaaggtataaagtataatttccttcaattttttcatatgtcaagagaaaaaatgactatttattggaattctttcataaatactaaaaacaaacaaaaaaaaattacagaaattcagatatacagatttttaaatattttttatggtttttaaaattttatttacagaaattatggtctttgttattagtttttttgttatttgtatattattttaatattgttttggattttatttttttattttattgttgtttttataaaataccgtaaaaatataaaaaaaaataatatatatttaaatgtaaaagtataaattttttatcaaaactaatattttgtgtaaattttttttgtttataaatttagtatttttaatttttccgtagtaaatcgctaattttatcttgcatgaaaataaaccagaaattctacaaaaaaaaaaaatataaataaataaaccagaagttatattataacaggatacattaaattttagttggataaagaaaaagagtaaagaaaatgtaaaataaaaaaagtgtaaaaacttaaaagaaaaaataattttttatgtttgaaatggataattttgttaaatgaaattttttttagtacgacttttctttgtatacgcacccataatgtttcaaattaaattaactaagtaatttgcgccataaattacttaattttaatttcggttggagataaatattaaatttaattttttatgataataatacataagttatattttttaaactttcctaaatacttgatagtat

SEQ ID NO: 179292 - DNA, 611 bp, Cannabis indica
ttcaaaaggatcccaatcacactgattacgagaagtaattctcttcttttgagcatccagatactagagaagaaagttttgtacaccaggcaaacatttcttttggtatcgagaattaaaccgattaaagtaaaagcattattccttttgaatccaaattagtccctaagaaacacaacacaagatctgcagaacctttatccaaacttgaaaaaacgttagtaataaaatgcataatatccaagtgtttattatgcaagtaaaaatgagcaaagtctggctttcctggctctaggacactctagcaaagcatgcataacagtttcagggtaattcttacacaagggacataagtgagaaggaataatatgtctttggaaaagcaatacagccgcaggtacagaattagtaacaattctccacacaaaatgtttaactttaggaggaacatttgcatgccaaattttaagcccagaaaggtttcatatcttgaaaagaagaagttgaagggatgtcttgagtttcaagagctaaatgatatgcagattttacagtaaaaagcccagaattatccctccccaaaatttgctcatccttaccatcaagtccag

SEQ ID NO: 179293 - DNA, 776 bp, Cannabis indica
tcttcctcgcgtccggggtctaggagtgggtttggattcggggtctaggttaggtcccaggtttgagtctaggtttgggtctgagttcgggatctgagtacggatttgggtccgagatttgagtcgaggtcgcgaggttcgagtcccgagtcccgagtctgggtccagctctaggttcaggtctgaatcgtgaagttaggtccaggactagagtctgggtacgattctaggtcccaagattcaattaggatcagagtccaaaatattaattaagaaataaaaaaaaattgaaagtgacattttttttgtttcaaaattttaattctcaattaaaaattaaaaaataaaaataattttatagaacatgtttttagaaaatattttactttatttctaattaataaacaaaaattacttataaaaaatgttacgaaacacgctcttaatttattttaagtgactatacaaagagatcgatcatattgctatttttttccaatttaagagttataaatttgactatcattaatttataataagtttgaaaacttgttttaatttattttatttatttttttttaggtgttagtatttgatttggtggtagaagggagaagtgttattacagctagggtttatccaaaattggcaattaacaagaagatcatttatatgctatattcaacaatgaaacaaatagtgttaagatttcaaatattaatgcttggactatatgacaatgctcaaattgtactgtccatatgagaaaaaataag

SEQ ID NO: 179294 - DNA, 838 bp, Cannabis indica
ctttgctaatgccctagaaaggcattcctcatatcattgtgtaagtaaactttatcactgattatcacgtcagtatgaatccagtgcactgataaatcatgggactaaatacttttgaagcatataatcacaattattttctattgtgtcgacaacactataatcatgaataactatatattcatgatttaataaaatttatatattaaacatataatcataaaagaatgtagcataacttttattaattagtaaatctgattatattgaaatgagttttatttagggcataaaatcccaacaccaactctgctctatggctaagggcatcagctacctggtttacacgtcatgccttgtgctcaaagtagaagccgaatttcgctaagaattcctgacatcgggcttgcttgggggttagttttgactgcatgaggaaatgactaacaacagtattatccgtcttcactacaaacttcaaccccaacaagtaatgcttccacgtccgtgaacaatgaataaatgctaggaactctttctcatgtgtcatataccgcctttctggttcagaaagcttacgactctcaaatgccacagggtggccctcctatatgagcacccctcccaaagcataatctgacatgtctgtttgtacttcaaaaggcttgcatacctctagtaaggctaatacaggatctttaatcatgccttctttcaaactttgaaacgcttctttgcacttatcagaccacgcccacagaacacttttcttcaacaactctgtcaagagtgtcgctcttctcgaagagttgtgatagacacgtgacaatcttttatt

SEQ ID NO: 179295 - DNA, 840 bp, Cannabis indica
atagccctatatatcttgctgtatcttttggccgcaaagtttaaatatttatatatatatacttattttcctttatttattttaacttgatatcaattatttgtatatgtaacacttcatatgatcaaacttgctattctatgtcccctagtatattatatatatgttatatttacatgaagaaagtaacaaagttagtggctggctagctaagatctgggtcctagcttaattaattctttcgatgaacttattgggttactctaatcatagcctgccaactgagaaagcttaagcaaactaattaaaggcaagcttatattaatttgtccagttttaatcaattaattaattacacaaaaactaataataataaagagtatatatttttatgtacgtctcagccgggatatagatatgataatgaagctatacactaattattgtgtatataggaaaaaagattgtgctttgtatacaattattagtggctagctacatataggccacaggattatgtttcgagatatattcatgaccacgtgcaataagtgttaaaaggtgtatgaaaaagtgaaagaatataaatatgtataatcatttctattgacaatataagtttgctttaatatttttcattatcaagttaatttatatataaatatataaatataaatatataaataagcggtttttatttattttctagaccaataaagaaataagaaaaaaaaataaataaagtgggttaaataaacaatgagcgaagatgcaaagtcaaaaaaaatgaatagtggctgctacttttgtgtctccttgttgccgtgaggctgcataaaa

SEQ ID NO: 179296 - DNA, 1322 bp, Cannabis indica
atcgaatatttttacaatatatactcataaaaaaatgcatcgttgcatcttttattatttcgacatcgaaaaaatttagtccaatctttttttatagtcgtgtacaacataattatttgagtcatcctgtaaaatttaaaaaaatttgaaataatttataatatagattacaatattcaaatagttaattttatacatgcgtacaaaataaaagaatcatgcgtgcaacagattatttggtttgttttaacgtgttaaattcttttaaatttcccaaaattttgtattttatgttttaaataactaaaacgtacacaatcataaaagaaattaaaattgatcaaaaaattctcctgaatgtctaaacatatatgtatcggtgtactcctttcacggatgtgcaccttagaattttcctatattattcaacattttttaatgtgtttatttttttttatcgtttgctaattaggtcatcttttgtccttattaattgtattttgctctttaatttatataattaattttaaattatttttatttcaataatccaattgtaatgataatatcttaatttatttattagttttctttatttttaatctcaatgagttatttactctaacccacgacttgaataaaaaaaattaaatattataatttaagtattataaattttaatattaatctaaaatatataaaatttaaaattaaagaagttgttacgttattataaaaattgattaaagatttttataatagataagcataatttcaatttttttttaacaattaatattataaacaaacaaagaattatggtgaaaaaaaataaaaaaaataactaagaaaaaacaaaaaaataatattatacaaatgcacatatatcgaaactcaaatttgtgcgggtaaactcccaaaactcgtattctgttagcaatttaccctttccgtccaaatttagctgataagtgccaggttggcttgtccatgtggacacaatatacacgtggcacaattttattggtccacgctctacaacattcaacagcattagcggcggaccactccgctgctaatactgtcctttctggccgctaaagggtattagcggcagacttcggccgctattggtccgccgctaatacttggccgctattaatagtattagcggccaaaaaaagggtccgccgctaatactattaatagcggtggagcattagcggcgggaccccaccgctactacccagcagataaaaaaaatatttaataaatatttataaataattatttatataataatcctatatataaatagataa

SEQ ID NO: 179297 - DNA, 706 bp, Cannabis indica
ataaatgtaagaaagtgaaataatgatgatggctcgtattatcgttggtgatgtctttttatagtgaaataatgagacctttcatattataagcattttcataataattaagaaaaaattatattatgggaatgaaatatattaaagcccttttggttttaactatacatatatttggggaatcgcatattggtggtgtggtaatggccgcaccggatccacattggttttctttgatcaataagtttcttcttttaaattgtcataatgaattctttttaaattgttcgatgtagattttttaccctgagtaattgaattatttattatgtttccaataaaaggtgtgcaggcatgggaatggaaaagatcaatttgtaataattgtgagtttttgaaaaatggagattactattacaattaaatagtatgaaaaattaattctcattatttggaaagatttgaagagttgccttttatttctttctcatcggacacacactttcaatgcacaaccaatataaatacaaacttagtattatacaaactaaaatacctccgaaaacacacacaaaaaaattattgattctgttattgtcatattcatcatttataattttaatttcactattgaaaaaccgtgttttgtcaaatgtcagttgtatatacgaaataataaaaactgtaaagcgtttgtcagcagcag

SEQ ID NO: 179298 - DNA, 693 bp, Cannabis indica
atttatattttggcaaagtgattaatgattgtaagaccttagtatgtgctttacgtaatgttttttttttcactttgtaaagcgatcaataaatatagcagctcattctttcgctagagcttctatatcgcaccctgatcgccttttcaatctggacaatgtccttgttgagttgttaccaagtttggtaactgagctaatcgtttaataaaatgatgactttcattttgaagaaaaaaacacttaagatgtatttttttaaggtacacttaagctggatttggtccgctgtttgtgtaagatcacaatcttgatatgccatttcatttgtattgaatttgattattaatgaattccctttctaaaaaaaaaaaactaaataataataagtataaaaattagcatgatcaaaataatttcctcagtttttattcgatcgtattcattcattcatattatactttccttccattaaatttctaagagtttcaatttaaaaattagtttcttattaaaaaagtgtccccatcaatttaaatggaaattatttacaaggccaatctaagaaatttaattccttaattttaataaaattataggctatcacaagacattggcaaagttaagacacaacacaatacataaattagtcactataaataataataaataaaaaagcaatatatatccaac

SEQ ID NO: 179299 - DNA, 591 bp, Cannabis indica
tggaaggtaaaggtaaggtccatcacaataaatgatttaacatgttatttttttttttttttttttaatttttttgagagggatttaagatgtacttgattgtttataaatgtctcatctcacctcattgtaataactaataaggtccaccacaataaaaaatgatcaagattagttagctgtaactgttatattttacatttctttttttttacttaaaaaaaaaaaatcataaaataaagtcacgtcgtaatataatttttttaattaatatatttgaaaaaattgacaaaaaaaaattatgaaaattgattatgtgatttttttttattattttcaaaattaatatttttattcttatattgaaaagtctttcaaaatcaaattattgcttattttattaataaatatgcaatttccttaattagaatttctttaagaaataaagtataggttgtcggtttaatgtgtatctggttttttttttaattaaatcatgcaacatcaatcaataaaaatagtagtttgcaattcaatcgatacatctctctcatgttagagacacaactaggattaaggttagaataagta

SEQ ID NO: 179300 - DNA, 699 bp, Cannabis indica
ggattcttttctcgtgccagcagaattgattggatatatattaatgttatgaaagttgttggggagtggtggggctgtacttagtttacatacctagtcaagttttgagattcttacattgaaaaagattaattaattcatctgagtttcgaattaaagacctcacattacacatgctataatttgaatcttggatgtctatgttcgatttgacagtatcacaccatgactataatcactaggggtgtacatcaaaccgctcaaaccgctcaaaccgcccgcaccgcaccgcaccgcaaaaaaaatgcggtttgaaattcttcgcggtgcggttgcggtttgaatttttcccaaaccgcgcggtgcggtgcggtttgcggttttgaattattaaaccgcgattcaaaccgcaccgcaccgcatcttttaaaatttcaatttttatatttattttattaagcccatacatatgagcccaacccaagcctataaatcttagggcaaaatccataactcttcacaaaccctctcttcttagcaacaaacccaagtccatacatgtgtattaaaatttggagttggaagtttgtgtttgttttatttttaatctattgatgtaagtatgttagttgtacatttatattgttgttagaacttaattagtttcaagtttgttattttgatttaagtgtgttgttg

SEQ ID NO: 179301 - DNA, 658 bp, Cannabis indica
aaaaaattaacataccaaaaacaattaatactcctaataattataataaggtatatatatataaaaaaagctaagagaaatttcaagattctaaaatgcttgtgtacaatttatttacgatccttaaacttcattgaaatttaaatattatcttaattaaatgagataagtaaatgtcaaaggaattgtgctatagctagttttcaatagcttgcatgataagtaaagtaagattatacaaaacccatttaatttcttcttcttttctttttttttggtttgtttcgaaagtgaaatatattaaaactagaataaagataaataaatatgtattcataaattatatcataatttaagaggtaattagatggtatatatatttaaaaaaacttattaataattaatttattgtaaagtaatttagttatacatatatactcaatatttttatataactttaattatatgcatataattttcttcattaattataaattgctaaaataaaaatgaaaaattttaaaatcagggtttcataataaatgcatcttataaaactctctattcttcaaaaaaaaaaaaaaaaactaaataaaacagagagaagacaacattgaaagaacattttgagtcatattttttttattaaaaaaagtaa

SEQ ID NO: 179302 - DNA, 638 bp, Cannabis indica
gtttagatcggtaaaatctatacacacccgccatgtcccatttggtttaggcaccagtaccggattggccagccattctgggtaatatacatcccggatcatgccactagctagtagcttatccacctctttctccagagcttccacctttactggatcaagggggcgctgcttctgctgaactggtggcatatctggattaacgttaaggacatgggtttttgcatgaggacttatgccggtcatgtctccttggaaccacgcaaaaacatctttggttgcccttagtgctttaattttttttcttttcctccggttctaggctctttcccagtcggaggattttggtgagatcgaggtcgcatactgacactttctcgacgtcctccataggttctacaatttttttggatcccacatggggatccaactcatcttcttctaccaattctggctcgatcccttcacggaccatcaatactggcaactgggccgcgacattataacattgcctggcctcaccttgattgcccctcacgttcctactccagcctcctgggtggggaatttcaggcacaagtgtcgaatggatgtaactgcaccaaagtatactagggccggtcagccaaggattgcgt

SEQ ID NO: 179303 - DNA, 787 bp, Cannabis indica
ttttacacaaaatttgagcttggaggaaggttaagtacaagtgagatgatagttgacagagtttataccgacaaaaaactctataaaatatatacctttatctattttaatatttgaaattaattttttaatcaaattttttctatggtcatgtacgatgtagttatttaagatatcttaataaaattttaaaaaattcaaaagaattttacatgcagttaataagattcaaacaatgtgttgcacgcgtgactattttattttatagcgtgtgaaatagactatttaaacactgctttctatattataaattattctaaatttatcaaaaattttgtagaatatcttaaataactataacgtaaacgaatatgaaaaaaaattagactaaaattttttctggatactgaaatagatagagggtgtattaatgcttcttttttaaggaggtacattatagaagcacacaatattatatattagatgtctaaattatctaatttaactatatatatgagtaaaccctttatcggtattacacataaaaattctcaatatttcaaacaaataaaaatatatcagtacagttttttttttttggaggatactataaaattttccaatatattagatgtgtaaattacctaaattaagttatatattatatatataaataatgtttcccatatttttagtgaatttttgaaataaataaactactcacctcttagtttcccattttctcctaacattcattggaatgtgtagtggtaagtcctaactcact

SEQ ID NO: 179304 - DNA, 612 bp, Cannabis indica
aatgatgagatatcatgtacacataatagcaaccagattggtatgctaatatagtacacacatggatcatgttacttcttgtattgctagtttcagtcataaataaatcttagattccattgtctaggggcttgcttgagcccatataaggacttctttaggaggcatgcttgatttggcttatcactcttgtagccatctggttcagtcatatagatttcttcctcaagctttccatgcaaaaaagttgtttttgcatccatttctagatcaaattttgatactttggccatcatgattctgatagaggtctgttttatcactggagagaatatgttattaaaatctatgccttaatgaaaccttttactactaatcttgctttgtacctgaattcttcacctgacaatccttccttttccttggaaatttgcaaccaattagtttatatgttgttagccttgtaacagtcttacatgttctatttttcttgagtgatgtcatttcttcatcaatagcagcaagccatttatccttattattgcaattgataactttatagtaggtgcttagaacagagcactctacttcctctgcagatgcaagagcaaa

SEQ ID NO: 179305 - DNA, 774 bp, Cannabis indica
atttcaagcatattccaatatatacacctcattatgagtaattattaattttaaattttatattaatattatgagtaactagctaactcaagatttttattgtagtggtgtttaattgtcataaaaaaaatatttagatttattttgaataattttgtggaggctattttaatgttttgtattattgtgaacattgtactacatcgaatatatggtagagtgttgagacatatataagaacataagctacttcatttaacaccaattaattttaaaatggaatcctataattttaaacatgtagtataattattagattaaaagaaaaatatattttttctttctgtgcttttcttaatctagagttatttcttagaaactatagaccataagtgagattgagattgaaaacccagataaaattggacttatggtataattccttcaaataaaaaggtatgttaaagttattcttggaaagttgttgactcgcggaagtaagtcctggaaggctttcttgtccatctttcaagaagggtactcaagaaagctaaccttccccaaaaaggagttccggatgactagctgctcctcctaaaaaaggagtttcgaatagttgactccaactagctctttcctatccaagaagctcttcctgggagtgctttagtctgtgattccagaagttctcatacttgctcccagaaacacctatacttaagctgacgtggagatctcgctcataaatagagtttgttaagccctgactaactt

SEQ ID NO: 179306 - DNA, 693 bp, Cannabis indica
agtataagatccctcatttggtttgttttctagagttcgattcctcatggtgccactgatatcattcctgagccattaagttggcgcttctttagaaggttatacaagtgtgtgcggactctttggataaccatcttaaggacttaagccccaatttctttattgggggtcatctccgaaatcactattaagtcgaatgagctgggaattattgtgcttgttgctatatttttaaacactacgcaagtatacgcaatcaagtagtaaatctcacacaggtgaggtcgatcccacagggaattggattaagtaccactaaattatacttatgattctattcggtaaatcaaaagcaattatgatttaaaaacagtaaaatatgaaagaaattcagaaaacttaataacacaatttaaagttgagcaagatgagacaatagggaggagaatcctgttgttgtttacccaaatcgttaatgattaattactatcctattcttggagtgaatgacagattatgaaataacctagctcctttcagatcttctagattctaaatcacatgttatctaattaattccttaattaaactaacatgaaatcagcattaagtaataatctactcgtcacataagtcatgtaaatactttcgtttcacatagaacatcgattatcttaattttagcattctcaa

SEQ ID NO: 179307 - DNA, 690 bp, Cannabis indica
gcatcggttacaaataatggccataatgagaccgttacaaaataataacaataatatgcttattaatcaaattaattacaacggttataaatatatgtaacgtttgtcatgaatgctccttaaatgtttgactgttgacttccgttaattggtgtatgtatttgcacctttccctattagtactgcgagttcaccaaatatgcgaggtgtgcctttcttactatagcgaggtctctttaagttaatattgcgagatcctttctttcggtactgcgagtactataatattgcgagccaccttcaatacagcgagttctctatagacaagtctttctcgcggggagggtagatttatgcctataacactaacaatttcaatgaaaaatttgagagagaaaaagatgaaaagccttagcactaatgctagaaaatcatagaattttaggttaaatatttatgtagaaaaggctcatacaaaaaagtatattttgttaacacagttagttacaagaaacacaaaattaaataatagagattgaccctaataccaactacttctaactaactgtttagtaagttatcatcccccttaaatgaaaatggcgttaacaatttgtaattagtcttaagataatgaaatcggtccttatgttgagacttggtgagaacatctgcaacctgatcaacaga

SEQ ID NO: 179308 - DNA, 562 bp, Cannabis indica
agaatgcaactaaaaatgctgtgtatcattgttgaaaaaaaaattcagttcataccttttttttggatttgagggggagctccagatctgttcaatacagatttacattgcttcaatctgaattttcgacgatcgtttgagtgatattgcactataaaaaccgaaatcaaatgttgaaattcagtttctccacggttgtcctgctcttttttttaaaaaaatttctgtttagatcgttggatttgttcgtttcctattgaaattcgacgggatttacagttgttttacgttcgatctggtttcattctggttgcgtggccgactgcatcgatggagcttcattcatcctctccgtttgtgacgtgcggctgaaggtaagggcaagtggtatttttgtaatattttcattttgggctgtacaaatgttcattgggccggcccacagtattgttgtaatatttttccatttttagaatattcctgtttttttccctataaaatttgaccttgaaaactttctgtagcatttctagccaggacaactcaggtcaagaaaaatata

SEQ ID NO: 179309 - DNA, 1151 bp, Cannabis indica
agctttaattatatatataaatatattaagaaggcacatacatatgcttagctgttaaacaaaatatcactaattaattaattatagggtttcacttttcttgattatatccgtactaaacacggattagcatccggttcaaaataattaattaattaattaattataagaaaatctgatgaaatgatactgtgactaatattaatacaaatgattttggctcttcatggcaactaaggttggtggtttggttgtagtcccccaaatcacaattcagattgtatttggtgacacttgtgcaaaaagacactaatattggtaaaccaagacttaaaagtggtctatttttgttgttgtttatacatatgcaaaacatcatagtaagctattgattgtattgggagggtacaattttgattattaaattcactattaagtacttgggttattctttactttgtaacaaaggatggtaggttagagttggactaaggtcaaaatttgtatattcgtgtatagtataggtatatatcccctatagagttagtgatagtctctcaaaatagtagtaatgttgttcctgtcccccttaatctatatatattgagtacctatttcaattgtaattagggttgtttttaggtattttacattagtaatgagccccaatgcctaacccaacaatggtttggatttcataatagaattgtatttttttttcctaataaatggaagaaaaaaaaattacgcttcacttagttttatccctaggttttattaggaattagacgatcgacaaactcttatgttcatttcattacaaaataatacagctaaagtaatagaaattagacctaagataattctaaataaaaaacttagaatcatttcaatttcttttgtaaagaaaaaaaggaagaagtaatatatattgaacaggactaatccatggactgtcagaaatagggtaaatgatccctacatctaacatcttaattagatcatctcttactacctctttcatgtttggatttaatcttctttggctttctcgggagggtttagcattttcttctaaatgaattctatgcatgcacacagctgggctaattcccttaatgtctcccatggtccaacctatggccttttta

SEQ ID NO: 179310 - DNA, 936 bp, Cannabis indica
acttttatagggtttatcatctgatattttcattattttaatgccaaataattcaaacctaaccctagtggaatgctataaatagatagtgaaggcttcagttacacttaactttctactttttccttcagagaaaaacctgagccttctctctctatacctagccgccaccttcttctctttcttcttccttgaaatttcgaaccacttagtgattagagtagtgcccacacacagcaagtgatacctcaatcatagtgaggaagatcgtgaagaaagacattcaacaagaaggagtttcagcactaaagaaggagagaaagagatccaggttcagatcttgataatactctgcgacagaaaggatacaagggttagagatctgaacggaaggagtcatattattccgctgcacccaatgtaaggtttctcatactttatatgtgtttatttcataatcgttttagaagttcatatttagggtgttaatcaacatacttgtgagtagatctaagatcctggtaaaataatttccaacattctatttatatgaggaaatctcatatatttctaatgcgactaggaagccattgaaaaatcatcttctttttgatttttttttttttgaaaacttcccagaccatagaaaatctcaacgagaaggaaaaaatgaaggtctcgtgtgaaaaagtgatgccaaaatggtggttttgcatgaaacgagttttgtttgtgttggaaagtcagcatgacacttgtgttttactaacggttggggggggggtaatgttactcgtaaatttggcccggttacataaaaaccacttttcacacgtgcacgaaggaacacctggggccttacctcctaagctaggatggtcaacttggctaaatgaaactgtgtcggtgccctggttgacatcgagggggttccta

SEQ ID NO: 179311 - DNA, 670 bp, Cannabis indica
taaaataaaaaggaaacaattttcattttatttttttgtttagttgtattttatctaatggaatgacttttttacaattttagtgaaatgactattctattttaaaataaaaggaaagattcgaattttgaatcgcgatattagactccaaaaaagtttgccaccagctttcagataaactagagctgctaggtacaatgtggtctagggcatctgcaataagtttataaccagacttaacagtataacatccagttgaggtgtaatgccatacaagaacatcattaggtggaaaaagcttaagtgggattgaatgaaagtattcagtcaatatcaggatgacaaaaatatgtttgaagtgcactcaaatttcattgtcttgactcatctatgagattagcaacccccaaatttggatgatttccattaaagcccagatgcttaaagaagtatgacttgggatccaagtatcgttcttgcacatgacattcaaacttgatcctaatcttcatcgctaaaacccttttataatatttcccccaaacaatagaactccaagtcaaagatggagaatttctaataccagcatcaagaaaattcccattcaaataatatttgtttctaagccttttgcttagtatgaaattaggactttcaaggagccttcatg

SEQ ID NO: 179312 - DNA, 735 bp, Cannabis indica
cttaagcgagataaggatatatataaactattatcccatgcgttgacgagaaaccatttcgcgtcagaagaaacaattataaggatgatatctgtggtacaaagtgaggcatcaactaggggtgttcataaaatagccgatccaatccaatctgcatgatccaatccaatcaaatccgcaaagtgcggatatccacacttgtgcggattggaaaattcaaaatccgcacttgtgcggattggatgttcattgacatgtaaaagtaaccgatccaatccaatccacacatattaataacaaaattaaaaaattatatatacaaattgttgggttttatgccctaaataaaactctttacaatctgattagttatcaatataagaaatttgaagtgattgatgtttgcatgaattctacatgctaatggtttaatatgtttaatatgtttattacattcatacacacaaaatcagttaaatccagatcatatgtttattcacaattacagtatcgtcaacacagtggaatgtgattgtgatcacatgtatcaaaagactgttggaaattattttaccaggatcttagatctactcacaagtatgtttattaacaccctaaatatgaactttctaaaacgatgaaataaacacatataaagtttaggaaaccttacattgggtgcagcggaataatatgactctccgttcagatatctagcccttgattcctttctgt

SEQ ID NO: 179313 - DNA, 753 bp, Cannabis indica
tgttccattacttgagaaattattagtttttcagtctcaaggtcatctaatcggtaagaaacaattgagacccctagatgaagaagagaagaaaataacttagtggtatcttctaaataattgcgctgagattgcactatatattcagtaagtattttaaatattaacatccaatttaattcaaaccattcaaatagttaatttttttaaaaaaataattaattactatattatttttgatgtagagaaaatatgaacattcttctttctagagtggttgaacacttagaacaagtataatggaatgaatttccttcttggttttataataagctttatgatctttgaagattaggatctccagaggcatcaaaagagttattctctttagcatcgtggtcctccaatattgtcacctcgtacccttagtgtgttgtaaatggagttagatttttgtgtcttaatagggacgagaatatgaaaactcaaaatagtggtgtttctgtagttggagttgaagataaaacttattatggccaattagaagaagttatcgtgatgtcatatcttagtggatgttctgttatattatttaaatgtaaatggtttacactagttgacatttagagagattgatgtctgaacaaaacataattagtatcaacactagttttgaaggattcaaaaatgataaattcattttggcgtctcaagctaaccaaattttttacattgatgatctcaaaaataaat

SEQ ID NO: 179314 - DNA, 641 bp, Cannabis indica
gaacaaagtatgtatgtatgaagtcaaaatagggcttcctctatgtttattttcctagtcatacgaaaaggatttggacaaatcatacaaagacaatgcatgttctttttggggtttattttaactaaaactttcatttaatatatttattattatttggaagactgacttgtacaagtattgtactaagtcatagtaaggccccaccacagttaattaatattacaaccttctatagttctgtctgtatatgctgaagtaatatatttttattttaatttttatggtggtgtttagtgtagttaaaataattttttattaaagcttaattcaaaaaatataaatagtttatatatagtgctgtaaataattttaactttttttaacagaaatagtataaactagaatatcataaaatctgtggtaactacaataaatattaccatataaaaaataaaaataatccaataatatatatttttgaagtcaaagatgatgaaaagataaaagataattgaatgttgaacatagcacaccttttagaactgtttttgccttataattataaatataatcaagccaagaaatcaatgaataaacggacaaaactatgtgatgtgcatgtatatatatgtattgct

SEQ ID NO: 179315 - DNA, 703 bp, Cannabis indica
gaatacaaacaaacaatgagacgacaaagtatgtatgatgaagtcaaaatagggcttcctctatgtttattttcctagtcatacgaaaaggattggacaaatcatacaaagacaatgcatgttctttttgggtttattttaactaaaactttcatttaatatatttattattatttggaagactgacttgtacaagtattgtactaagtcatagtaaggccccaccacagttaattaatattacaaccttttatagttctgtctgtatatatgctgaagtattatatttttattttaatttttatggtcgtgtttagtgtagttaaaataattttttattaaagcttaatttaaaaaatataaatagtttatacatagtgctgtaaataattttaatttttttaacagaaatagtaaactagaatattataaaatctgtatgtggtaactacaataaatattaccttataaaaaataaaaataatccaatatatatttttgaagtcaaagatgttgaacatagcacaccttttacgtaactgtttttgtccttataattataaatataatcaagccaagaaaatcaaatgaaataaaacggacaaaaactaatgtgatgtgcatgtatatgtattgctgattaattatgaattagatacacgaaaaattaaaatacataaaaaaaaaaagaaataacacaaac

SEQ ID NO: 179316 - DNA, 602 bp, Cannabis indica
taattcaaataaaatcaaaattaggatctatagaaaagtgaattgcttaattgtttccaaactatccaacaaaaataattctagaacgaaaatcaaattattttttgtaaaaaattcgcaaacatcaaacaatcatcaaaaacacatagatcaacatgaatcacatccaaatcacacatatatcgttttaagtccaaatttcttgaaagtaaatcaattaccatggctctgaggccagttgttggaattattttaccaggatctagatttactaacaagtatgtttttaacatcctaaacatgaacttctaaaacgatatgaaataaacacatataaagtttcaggaaccttacagtggttgcagcggaatataatgtctccttccactcagatctctaacccttgtatcctttctgtagcagagtatcaccaagatctgagtctgaatctccttctcttgaaactggattcttcacagccttacacactatgattgagtaccacttgatgtgtgtgggcactcactcttttcactatatggcttcggttttgaagagaggaagagagagagaaggtttcgaatagggagagtgaaggtggc

SEQ ID NO: 179317 - DNA, 539 bp, Cannabis indica
acatttgtattgagatctacagtttcttgtttgttctatttgctggttgatatgttttgctctgtttatatttattcttaaaattatgtcagttgatctacgagacaaacctaccatacctcctgaaccatattttgtttccccatctgttgtcatttaggggtggttttatttccactctggagatagatggtttgcaaacttctggaagggaaaggctaatggtgaaggccgcttctattccaagtccggtgaagtcctttttggtcatttccaggatggatggcgacatggcgagttcatttgtattgatgtggatggaagaaggttcgtaacactaacccttctatttgtttctccaaggtatagattgctgctcctgccttgtttgataaggataggttctattgttctgtgaatatatgttccacctccagactctatagcatcatctcaaggcaattaaaatcctacacacacgtttgatttgattattggctcgaaaccagtaaacatttgtggtttgctcccacaaagtt

SEQ ID NO: 179318 - DNA, 1219 bp, Cannabis indica
ttcttgttgttttgatacttttgtacgggttattattgactagtttgggtagttatgaacgttaaacatattaaccttctttttgcttggtcattttgtcaaacgtatgtatggatattggaactattttcagtacctttaatatgatattaatgcaggttgcttttggagttaagtttgaagtttttttttttactagatgtgtaatataatgtaagattattatggaattttatcagtttggttttttgttaatggtagtatgtatttttttgtttgttgtattcttttttttgagtttggtctgattaagttggtatttttcttttttcaggttttgtaaaccgttgcatatatcttctgttttttatttatattttttggaaaagaggtacacactttcaaatcatagaggtatttttgtttattttttcaatttattatgtttttaatgtaccacagaataatttataattttagtgtattttctaatactgtgtactaattttttttttaaaaaaattattttgtttttttttttaataaatcaggaaatttattaatgaataaactcatgcaaaataataaaacaaatttcagatgaacaatcctccaactgaagcacacaacctgtagagaaacaagagtctcttatcaaataatgagccaacttatttgcagatcgtttaaaaaaattattttgttaattttattgttatcgtcttttaagaggaattattgttcaataaaaatgtataaaacttattgaggtgatagataatgtcacgtttgtgacattttttttttaataattgaaaatgatgattaaagctgatgtttctctctcttatatgttttgcattatatatgtgttatattagttgtttttccttattttttcattctaaattttttattcttatattttgtgtttaaaaactcatacatgtttttagtatttgtttttgtttttttttcttaccatataaaccttaaaccctaaaatcctaaattctaaactttaaaccaaatacctaatgttaaagtaaaaatataattttatataattagggagtagccacacatccttaattgtataaaattatatattaatcaccttaatgaacataacttgtaattaattatatatatgtaataactttatcccataggaattttattatatttgtattaggataatatgttaaattaaattctc

SEQ ID NO: 179319 - DNA, 1094 bp, Cannabis indica
atccatttcttttttgtaaaccctaaacacgacaccaggttgattatctcaccctctcaaccgtccggctgcaatagccatctctgaccggatgagagaaactagaccgaccacagaaccccaaaaaccctatgagaacaccaaaaccttcgagaaccacaaaactctaacaatccagagaacaattctctctcaagcggtcctcttctctcgcacgattcactctctttgcctacaaaatgacccgagactgtcgttggtctcatcgactctctctcagatttgctttctcggtctcaatctctctcttgcgtggtgggtactggtggtggttggaaagaagataaagaaggtgaagaaataaaggtggtttggaaattaggtttgttttttttttttttttatttttttatgtttttggtacgatttggtgaatagataatgaagtggtgatttcggtgggggatggtggcatataaacggccacacgtctaaggtgaaatataaaggcccatgttaatttatttaattatttattattaaataattcaaattaaattaattaattatcttttaattattaaattaaataaattattggatgatctattaactaaaaggataataataaaataaaagatttaactaatttttgttaatgatatttatatttgaatttttaatttgaattaaattaaatattatctttattttacaaaattacataaaaggtttgtttataattttatatatatgatatatatcagtatagatagagcgatacttttaagagagagaatataattgaaagataatattgtttttcactctctctctctcctctactcacacgccacacacactgtagtgtggtgtgagctttgttcattattatctcttcacagtatctcatgagctgagcatagtgtgatttcataattatactcatccaataccaatagaatttaatagccctttattcctgagtgttgaggttggcctgggattgtggtgtgaactcttcaacaagttcttagattggatgtttgataaaatacaaaaagatagtaaaaatttctcgataggctacaaga

SEQ ID NO: 179320 - DNA, 552 bp, Cannabis indica
gtttctaatttaccatatagtgcgtacaaaagatttggccaaacccaaaataccgaacagataaacaatatacttgtaaaagagaagtgaccaagagtcatacgtcagctcggtcacttggggggcacctatacctatacaaagcatttggtaaaaataaaacaatcacaattgcacgatgattataaacaaagagtgaaattcattaaggataatgaaagcatgtagtaccaggattaaaagctgcccggtaagcctgttgtttgaaaaatgaaaaataattccaagtttaaagaccgcttggccagtcatgatgtcttagaaaagtccctgaggccgaataagatatataaaaataaaaagataaaagaaggagtgtttaatcagctggagtcccaggctcttggttcgggtcgttttgggtccggtcgagagctggaggagtctgttgtttgtaacgggaggtagtatcagcagtcttgcctgaggtagaagcggtcgccttagtttcaccacaggcagcttgggaggcgcagaactcgagatacatgt

SEQ ID NO: 179321 - DNA, 766 bp, Cannabis indica
gttatgccatgtatatgtaaatttaatttttagataaattgctcaccaaagatctttatcaagaaattggtttttttatcaataaattgatttcttcatccagaaaataattttcattaaaaaattagttcttcaccagaaaactagttttaattatatagaagtaaaattaatacacgagtttttaattttttttacccatccggtgacgatcggtcagagcaactcaccaaagatctttcatcaagaaattagtttatttattcaaaaaactagtttatttttcaagaaactaaaaattggttttgattatatagaagtaaaatttacgtacaaaatttaaatttttttatagtacttctttttatttaggatgatttattttatatttttaagtttttttaaaaacgccatatttagtgcaattaagattgtatgccatatcaaaattttactttttttttccatattttttttaaatagcccaatatgaaaacaataaccaactcggatctgaaactgaaagtgcttgtattatagctcatagggtagaaatgggctctagatgggctttttattcatgatctaattagaagcccaaatgtttgaagtttgattacaagcccgatataacaaaaaggatattatacttaatatgggatttaaaagttttatgataaatatggcacatttaaaatttgaccaatttatatagtattttttgttttaggtatttttatggtattttgatatgatatatatatat

SEQ ID NO: 179322 - DNA, 1240 bp, Cannabis indica
attgaatttgagctattatacggatttgattggatccaaaaaataaaatccgcacttagtgcagatcaaatgcactatgagaaaaataatgcggattggattggatgaatactcctagttgcaggtactcgttgctgaagaagatgatcagcatgaattgacgaagccaccagagctggggaagacgatcgacgatggtgaattttgttagaggttgtcggcaatcaattatggagaaatcacgagaaaagaagataatttttttggttttaagatcgaatcgcaaagggaaattgttattagaaagtgatactgggagagagattcggagagagaacctgaatttgttggtttgaggaaattatggaatttttttaagataatttcatttatatatattttattttttcatattttaatcatttcttttgttctcatatttttttcaattattaatttgtgccataagaaaataaactccaataattttttccgaaaattcacctagcataaactactaattttagaccttaatttggcataataaatctctataccattcgatgattattgcacgtggtttgataagcagaatcaattagcacataggcatcgtatgtggcgactagtttaaatgatttgaccgaataaatgaaagctttttccattttgataaaaaaatattatgatagttgttaaggcatatcagtggtgccaacacttgatgtgttatttatgttacatttttttttaaaatggattttatgtttcaatttaatattgtagcatattttagtttaattattgtaagatatcttttgttgttgttgtttgatttaagagatcacttttatagttggtttggctactattgatacttaatagcataatcatgtgatttttgttcataataaagaagtgctacatgcagggtcgttttagtcattaacttagaagacattgcgctaataatccattaagcataagttagtggttaaaacttgaaatagtttcggcttaattataattgaaatggaccaaattgccatttaacacaaaaagggtagcaaagagtgtgtgcagtcctgacccaagcacaagctataaagacccaaaagagcttagatactgaaaccacgtgacctcgaacagcttttgtcttcaatctatgatagagaagagaaccatgccagaagaagacaaattacattcgggtcagaacatgatgctgggtcggttg

SEQ ID NO: 179323 - DNA, 658 bp, Cannabis indica
tcctccaatgtatataaatgctcatgcctctaacctttgcctatttacccactacaacactaataatcacaacactactactactactactgctcatcaagttcgggtcaaatggagcaccaaagtttgagaatttcgtctattatggtgggagttatccatgtgaagaagatgaaaaaagcttcttgaattggcagagaagtataagatataatggctttggtggagttgggtcatctcaaaatggatctcaagtgatgaatcatagtatcattagtcataataacaataatattgtcaattgtgataagggtaaagatccaaaacttgatctttctcttcatttatagattaatggttggatatagtattattagtatggttagaaagttgagaattttgccttacttgaatggagagatgatgagtatgaaataataagcattctttttcttttttctttttttagttttgggacattttattgttttgtttttgtgatcaatcttcttgttttgttgcaaagattaatgattgttttgtttatttcatgttatctattatcacacactaacttcaacaaagcttaaaaatctcctcttcaattttttgatgggtcatctcatcatctcttcattctactataaacttctcataa

SEQ ID NO: 179324 - DNA, 759 bp, Cannabis indica
ctataactgctaaaaaagcactagactttgttatcaaaaacatagtgtgtcgatatggcttgcctcacaaaatagtctctgacaatggaaagcaatttgattgcgaagagttcactgacttctgcaaccaacacggagtcgtaaaaagcttctccgcggtggcaaggccgcaaacaaacggacaagcagaagcagtcaacaaaattctaaaggtcaccctaaagaaaaagctgctggcctgcaaaaacaactggcccgaagagttgccaagagtgttatgggcctaccggacgacccccagaaccacgaccggccactcgcctttctcaatggcgtacggttgtgaagcgatggtcccggtagaaacgttattcccgtcccacaggagaacgacttacgatccagctacaaaccaagctttattacaagaagcgctggatcaagttgaagaactccgggacgagtcacaaatacgaatggcagcttatcaaaagaaggtgaccaaatattttaactccaaagttaaaaacagaaaattcactattggggatatggtcttaagaagagtcttcccagccacccaagaacccggagtgggggtacttgggccaaattgggaagggccatatgaaatcgaggacgaaatcggttcaggaacttataagctaaaaaggatggatggaaccattgtgccaagggcctggaacgccgatcacctccgaaaactattaccaactaagtccaaaataatataactta

SEQ ID NO: 179325 - DNA, 628 bp, Cannabis indica
tcatgtgtataataaccaaatttcataccacaaatatcaaataaaaataatttctatacaaatagtacataataaataataaaattctttgcaacttttgtttatggttacaatgaagagcaaggcaggcaacaattatggaagggaatacaagatttttcttagtactgatccttggctagtactaggagacttcaatgacatacttaacaaagatgagcgtataggtgaaaggttaagacatagcagttcgactgcatttgctaattgtgtttcttagtcaactagaagatattaaatactcgggaagcttctttacctggagcaataaacagtgtgctgaagatagaatttattccaagatcgacagagttctagctaatgaagcttggatagagctttttccaaccgcagaagcaattttccttacagaaggcttgctcgatcatacaccagagtgatatccattcatcctactttgccaagtggaagaaagccctttaagtactttaggatgtggtcctcccatcctagcttttagcagataatgtcaacattttggaatcaaaaaattcagggcactaaaatgtatcagattattgctaagttgaaagctctaaacctgctc

SEQ ID NO: 179326 - DNA, 565 bp, Cannabis indica
tttgtttatggttacaatgaagagcaaggcaggcaacaattatggaagggaatacaagatttttcagtactgatcctggctagactaggagacttcaatgacatacttaacaaagatgagcgtataggtgaaaggttaagacatagcagttcggctgcatttgctaattgtgtttcttagtcaactagaagatattaaatactcgggaagcttctttacctggagcaataaacagtgtgctgaagatagaatttattccaagatcgacagagttctagctaatgaagcttggatagagctttttccaaccgcagaagcaattttccttacagaaggcttgctcgatcatacaccagagtgatatccattcatcctactttgccaagtggaagaaagccctttaagtactttaggatgtggtcctcccatcctagcttttagcagataatgtcaacattttggaatcaaaaaattcagggcactaaaatgtatcagattattgctaagttgaaagctcttaaacctgctcttaagtagcttaacagatgccattttttagatatac

SEQ ID NO: 179327 - DNA, 511 bp, Cannabis indica
tgtgacgtaaatatttaaaatattaaatttgttactaataaatatcggaattcaaaaaatagtagcataaatcttcattcatggtttaatttttattctgatgttatgttaatttgaagttgtgatgatattttttaaatatgatttgaaaaataataataaaatagtaagaaaataaaataatatgtccatgatatttttaaatattactttttttaaaaaaaatagaaccaacataccaacatcatcgtgtatgatcttttttaaatattgttaatagttaacaacattttatacaattaagagtgaatactttcaagaaaaataataaaatagtaaaaaaataataaaatagtaaaaaaaaaatatagaacaatagtaaaaatagtaaaagatgaatattttatatgtgcatgatatttttaaatatcacttttttttttttaaaaaaaaaataataaaaaatagaaccaggacactacgcttagtgtggtaagtttaatatatatat

SEQ ID NO: 179328 - DNA, 505 bp, Cannabis indica
agcctccatcttccacactcacagacataaccatcacaacaacacgagaacacccagaaaatacctattaattcaaataaataaatcatgaaaaacaacagtaaaacaatactaaaacaatactaaaacaaaaaaaacaataaaaaaaatgatcaaaaattaactatgttgtgcacatcctcaatactaaatgcactatatttgcaagaaaagttctagaaaattagaacaaaaaaaaaccacactaaatcttatattttaaaaaaaaaaacataactaagaacttcaaaaaattaaaaaaaaaaaaaaaagaaagaagaaagaaaagaaagatgaagaagaagaactaagaactatcaccttcatggtcttccttcccctcatcatctcagccataaaaacatagcttttattttgggttaatattatagatttgggaaaaaaaaaaaaaaaaaaaaagaagaagaagaagaaggtagaatagtagagagaaagactcaaatag

SEQ ID NO: 179329 - DNA, 930 bp, Cannabis indica
cagatacaaaaaatgtaaacagttttgtaatagcacttttagatcggattataattaaactttatttgaacaaaaatcaattcagggtcctatttgtactattttagaaaatacagggtccattttgtcatttaacaaaacacagggtccaattggtaacttttgtaaaacaaagggtccaaaatagtatttacctgtaaaacaaacatattattgggttcatggtgttgggttggagttggcctaagatgggtctgaagttccagcaaaaaaagacgggtctgaagaatactgtcatttgaaagcttcattttgattattcttaattaaatatgcattttaccccaaaaaaaaataatatattgttatgttgaaaaaaataagtgaaaatctattaatccaatatagaaaataaatataaacaaaaatctattactgtaaaatgtttaggatagtaagcttaattgattaatctaaaataaatcaaacatgggtcgttaattcacaaacattaacatattgctattttttaaaaaatatttacaaaaataatattataattataatataaaattttgctttaaatttaacacattaaaaattccgtattaaatttaacacaactcaaattcataccataattttacctttttgcaaatagttaatgttgtttacattaatttactttttaattttttatataataatttcttcatattttcaataaacaatatatacttttttcaactttttaagttaatttacagtattggaatacaatttgtaaaaattagatcaaataaaacattggttttggttgatttttaaggtgcaatttttactcgtccaagttagaatattatgaattctgattcaaaaaatcataataggaattcctgttcatatcctccttaccttcgtaatgtccat

SEQ ID NO: 179330 - DNA, 814 bp, Cannabis indica
gtgacatgaccccaactaatttttttttttataaaacgttttaaatattttaatgtttgctcccataaaactaattattttatttttattatcatgtatttttatttttatgaaatttatattttttttattctaacatatttttatatttatttccatataataaaaatttatatttttcatttttattcctacatatttttattttatctttataagaattttttcctacaatacaaataatattcttcatgaatatacttattatttttcattaaaaaaaataaatcaaattttgccccctattatttttggctgacctcgccatatatgtttagaaatagaggaatatgcagcaaaactagtccctttatattttaatttttatatacttaatttattttttatggtaaaactcttttaagtttatatttttgcaaattcaaattttttgcaaatttaaagtttcagttagatattacaattaaatactactgtatcgattaaagttaaactgttacatatacataagtatatatacagtgatcatccagttgatatttaacgttaatatttaactggcatgtcaaatttgcaaagaaaaatcaaataaaaaaaaaataacttaaggaagttttgccaaaaagaattaaatgtatagaaattaaaacaaaagagaatttcgtcacaaaattgatcttgcaaaatataccatgcactataaaattataatataagatgactagctagcaataatacatgtgttttcttttttttgtattgacatatatggatctaccacacacgtacttac

SEQ ID NO: 179331 - DNA, 510 bp, Cannabis indica
ggatattttttttggatatagagtacaattctctctataaatgtagataaaagtttctctcttaatttttccgtccccttttcctaagattctggccctatttataagtgtataggatgataattatttttattgggatctattcatgtacaactgttcatgaaaagtggacattccccatgttttatttttatgcacatgggatagtacttaataactacccaaccgttctttgtctttatccttaactggttatgctgactaagaaggttatttctcgttgaatgtgagttgtccttctttaccgtctttataagaaaaaatgctaattatggataggcttctcgtcgcagtattcttcatatcgtaaagatatatgcgaggtggctattatgttgctaaagggtgagatggatgaatgtagttattcctccatgcacaaatacgtgggtcaatggattgcaagattttacttcaaagtatgtgggttaatgagttgtaagctccttg

SEQ ID NO: 179332 - DNA, 667 bp, Cannabis indica
gattaaaaaactgttaccaaacgccacctatattaattctcaactacttgttaatacaaagtcaccaacaaccattcaaagaaaaagaaatataatttattggagagtcaaattataattaactcaagtgtgagaacagaaactccatcacaaatagtaccaaaaacaatatgatcacttgctagagctgaaaacttcagtgtacatttcgttcaaataacaaatgtgtacttggattaataattacaatccaaaactttagatgcacaataacaaataaaaataaaggtgtctactgccaccaataaaatggtccaaatcaagcagagagtatagcctaacattataattcaaaacaataaaataaaagggttaattgtcaataaaggttcacattaaagcataacttctctgctataccacaatcactggaggagaacaagttcagttgagatttaacatcaaatttccaatgagacaacaaacaactttttaaccacaattgtattggaaaaaactcctagtttgttgtaggcatctctgttctagcaaactcatcaacccaaacaatcaaaacactaaaaggaatgataccttttttttaccatgccaatatctcctagtgagatggttggtgccaaatattttttttcacattggaattaca

SEQ ID NO: 179333 - DNA, 697 bp, Cannabis indica
  modified_base (661)..(661): a, c, t, g, unknown or other
gtgtgtacttggaagaatgtttgagtttttattattggatggttataggggggccaaggaatctgtggccctctggcccagaagagacaattaattaatcaatatatgtgtgttttttttctttaattggaaagttgggaccgagttaggcattaatgataagttgtatgctaattaaatatcacttcgatggatggatcttattgatttaatatatatcttaaccttattatatgggggcgccgacaccccacttcatgatgatattccctctacaatcaatgagtaagtgcatgcattcgtgagtagacattaggcggggtgtgcgtgcgcgcgcgcgcacaagcaatatgcatgcatctcttattataaactttaacaagtatagtacgactactaggaccttcaatatcattatggtatagctagcccaaaacacaagtattaattattgtttttagctttgataatattaaattaaaatataccacattcgatataaaaattcctacatattatataaactttaatgttgaaattgctatacacgtgatgtagacattagtgccccatatagcctatcttcatatatacttgttgaaaagtataattctaatatatatcatcatgtttttgattgatataattttgatgatttaanctataatatagattgatgtatgatcagaaaatgcag

SEQ ID NO: 179334 - DNA, 700 bp, Cannabis indica
gttgcaactgaacaacacgtgtgaagccgcttcaggtgcaagattacacataggacaggttagatcaacatgtacatgtctattagaaagctgaactttggtggggagacaacctgcaacaacacgccatagcaggtgttgaaccttggctgggacgttcaattgccaaagcttctttcagacgctgtccacgccagtaacctgccagtcgccattggaacattgcaacagtttgtacgcgctacgaactgagtagataccggttgtttctttagaccaagaccaacaatcctccatccttgagtcacacaattgaatggataaaattaaggctttatcatgaggattaaaaatatcattgatcacctccatatcccaaacttttcgatccatctgcattaggctatcaaccgttcttccttcaaggctcggatgataagtggtgacaaatttattgtccgaatcgggtagccaagggtctaccataatagaagtggatttcccatcacctatagaccttaaaacacccatctgaagcaaagatttggcctccaggacactacgccaaatgaaactcgggtttggacccaattcagcagataagaaattgcccctaggaaaatatctagctttataaacctttgccaccaaagaattatcattagttagcaaccgcaacccttgcttccccaaaaaacga

SEQ ID NO: 179335 - DNA, 665 bp, Cannabis indica
gagtcatgatcttcttctttcttaaaatttttctttcacttaaagttaaacgaactattatcctacaataacaataattaagtaaaaattggagaacatcatttcttaaaatccaactataaacaaaaataagcattttgcttgaaaatgactccaaactattacataaaacattaaatacgagaatttatatttttcctgaagcaatagtgcaatactaggactttcttaatgaaatacttcatcattgaattctcaccctctttccaataaataacaagtggataattatttctttatctaaactctatacaaataatacttttttttttaatctgaacagagccagccaaatcatggtaaattttgttcactatactcaactcaactactttttagttcatgtcaattctaaaagccagccaccctaatgatacaatacaataatagagataagatcatatatataagagtgatgtgtcaaaagatatgatctaatatatatgtttcatcagactaagctattaccacattgttatgctatatctctctctaaaggagcagcaagccaattttaggacttgtttcttcttcttttgtttttatctcattttatatttctatcagaaaaaaatttattatgagataaagctcttgaaaactat

SEQ ID NO: 179336 - DNA, 689 bp, Cannabis indica
catttttaatgtaaccattaaatgagatcgtgatagaagaaaaaaaattgaaaaatcacttttgtatctataccctaattaaagagtattttataatttctggtatacatgaaaaaattataactttggttttttatatggaaatgtatattctaactatatctattctatataaaatgtggctatataacagaattcttggtttatgaaaaattattgggtgactttttttaaaataaaaaaataacaaattattagatgttgccacgtaaagggtcagcatccatgtagttagttaaacctaaatataattaatccacctaaagtgttgcaattaataataaatttgttcatattgtttatttttttattaaaaattattttcaaattttgatatttagaattagttaaattttaaatattattttaaattaaatttgaatattttgatagtttaaccagatgagcattttcattaattccgaagataaatttaggacgaataataattttttttaattactattacaaagtataatagtaatttttgtttttatttaaatcactattatgctttcaaatttcaatgattatcactacattgaatattattaattttaaaattatgatattaaaaaaaactaaaataaaattaacatacgtgacttgacacgtaacatctatctagt

SEQ ID NO: 179337 - DNA, 745 bp, Cannabis indica
tctcttattcatataaaatttactacattcttgacaacttaaaaaattgtccacataatcaatcccactcccacatgcaacattataaaaacaaaaattaagttggtgataaaatattttttttttcttaaaaagtaaataatatcacatgatcgtgacttattttagacaatattattgataaaattaatttaaaaaattgaccatactgtacatgtggtaaaaaacactccataagcaatcttattgaagatgcttttagaaccatatatttggtttggcataattatatatagtttatagtggtaataataaatttactttacaacaattttattgtttggtttcgttctgaagacgacgttggcgttgcaatattttgtataatgtgtaatcacaataatatggttttgtttgatttcctaattacttttggattttaatgaaacgtggatttgggattgtcacgtagctttttgacattatattttttaatttattgatatttaatattagaaattttgaatatattggttgtcatatttttcttaatttattttagttagaataaatggggtgtctttacttaattttattgagaaatttttaaatgattgttattaattaataagtgtgattagtcacatattcatttagaatagaaatttaattttaatttcttcacatgtttgattttgatgcttcataatgcaacttatgagtgatcactaattaattgaaaaat

SEQ ID NO: 179338 - DNA, 694 bp, Cannabis indica
aaataattttagggtaatttttaaaataatttgtggcataatatatctgtgagactgcaagtacttgattactgagtgttaagtaaattgtcatatgacaatttttgattagtttgtacttcatcaaatttttatttttatttaaaaattaatttaaatatactaataagaaaataacacgtaaataatgacttgatatttaatggttaggtacttacggaagttttaaaaatataacctaagtattattaccgctaaaaattaaatttaagtatttatctccaaccgaaaattaaaattaggtatttacaccataaattactctagtttttatagtatatttcttagaatattcgtttttgtacatttttttttttatctgttttgttatctatgagagattttttagttttcaattttaatatatattttttctaattgtaattatttataaaattttaataaattctaaataatttacaatactaaaaataaaattaaaaatattttattacatgcatatataactataaataagtttgtaaaattttacttatacaatcttaacatgttctctctaaattaattactattattttttgttgaaaatagctctaatttctgttattaatttatatacttaaggtattcaaagagtgtcacactaaggatgaatcaggaaattgctatgaac

SEQ ID NO: 179339 - DNA, 767 bp, Cannabis indica
  modified_base (61)..(61): a, c, t, g, unknown or other
tctaacaagactgttagcaattatgttagcaggtttcgacaatttcttataataaccctanaaaagaaaaaaaaaaaatataaagtaataaatttcaaatagcttagactgctacaaaacaatctctccagctcttacttttcgctgtagttgagttttaatccaggtttaacgctttttttatactaactacttcaaccaaatacagaacacttataccaacaaattacccgacttagccatcactaattcatcataaaaccgttttatatgattaaagcaatttcaatataaatctaaattaaattaaggattccattctctatatatatgtagctataaatctccaaagaattgtttattttttttgaaagagtattattttacttatcgatcatgattcatatcccaagtgtgtgatgatgcggcgtgctatgatttacattttatacatcatgcaagattacgttgtgattcaatcttattatgtgttcccttatgcaaaatttggtgacatttttctaaaagatttttgatctcataacccatatgagaatggagcccatggatcccaatccacattgggctgtcttctgggcctatgaatagaacgaatcaatggtcctgcaccctacacgttagttgggcatcacatgtgaatgaatcaggggtaagttgaaaaatgcctcttttattcatcaattaatcaaatttacctctaattttatatttatttgaaacatacctctttttatatgtattgtacc

SEQ ID NO: 179340 - DNA, 581 bp, Cannabis indica
aagaaagaacacaaccagattacaaggttcaatcacaagtgaattaacacttggatctaatccttgggaggaactgccttgaggctttgcctttcttattatgaatgtagctcagtaatcagtaacaacatacagcaaacacactaaatggagtcttgctcctacaccagaaactttgacactcgagagacatgaattgaaataatcatgctctgttacaactcaatgtgaatctctctgctcaccacaagaactctctctctgtttgttacacctcaattacaaaacacaagcctttatatataggctgagagtacaaacaaacaaaacaaagtaacagaaataactgtcaagttttacaacagaaactaactgacttaaactaatacttgcaactgtacataaaccccacaattccattatactatgctacaaaattaattttaattaatttataagtttcacaacaaatgaatataaaatatctaattattttgagtaagacttggtaaaaatattttccaatatgatattacataactcaataatgtgctataaatatattattattattattatta

SEQ ID NO: 179341 - DNA, 1067 bp, Cannabis indica
gagaatagggactcaaactcatcaccaaggctcgggtctgtagtctgatatagattttttgaaatttgagaggaagtaatctccaatctgttgtcgctgttttagccataaacctggagaagcttcgatacaactgatacgatttcgtcttcgtctgatcaacgttgaagcatgaaagaatttcgtgttgttatctccaaatttcagccagcactcccttgatttttgcctccatattcgttcaattttctcctccaagtttagaatttctaattggatagtggcttctttttcaaggttttcctgtgataccgtagcttcttggataactccaagatcgcgtttaagatgttgcagccgtttttcacagtggccaaatctcatggcatttcacttttttaattctttctttgtgtatttcagcttgctgcatacggatagtgcccctcatttcctgacgctactgatttgccaagcggttttgagataatattgccacactctgatgacgtagtccatacttctaagaaacgaaatggatacagagttttttcatattctccccaagcttttagtaatattggggcatggtctgatccataaatcggcagatgtactaccgaggctctgggaaaggagacacaccattggtcatccgcgataactctgtccaggcgtttacggatatgatgagagaaggatcttgcattttgccaagtgcacggggcaccttcaaacccagatcgacacctcctgagttgaacataaagttctttagaatattcccttcccgtaacaggtacttacgtcccccaattttcttattttcatccatgataacattcaggtctcccattatagcccaagcatctttgcactgctgaacaatttggatcaaccaatcccagaaatttttcttcaaaacagcatatggaggaccataaatacaaaacaacacccattgagggtagtcaagagaagcttctattttcaccttaaaacccatatcatacacctccaggatgtccactttcaccccaactcaccaagctacaaaaaaaccacct

SEQ ID NO: 179342 - DNA, 914 bp, Cannabis indica
ttcttcaatctatcagtgagaatgcgggagataatcttgtacccaaaatttcacagacttatcggacagaatcggtcgaaggagtttgcgttatcgtgcttaggaatcaagcaaatgaaagtgcagtttagagtcggagggagtatgccactagagaagaattcttgaaccattttacagacttggtcaccaaccgtgtgccagtatttttgaaagaaaattcctgggaaaccatcgggtccagggaactttagtggatgcattctgaacaccacattcttgatctcttcttcgcttgggatgctgcaaattgcttcattttcctccatagtaatctggtctgagaatagggactcaaactcatcaccaaggctcgggtctgtagtctgatatagatttttgaaatttgagaggaagtaatctccaatctgttgtcgctgttttagccataaacctggagaagcttcgatacaactgatacgatttcgtcttcgtctgatcaacgttgaagcatgaaagaatttcgtgttgttatctccaaatttcagccagcactcccttgatttttgcctccatattcgttcaattttctcctccaagtttagaatttcaaattggatagtggcttctttttcaaggttttcctgtgataccgtagcttcttggataactccaagatcgcgtttaagatgttgcagccgttttttcacagtggcccaaatctcatggcattttcactttttttaattctttcttttgtgtattttcagctttgctgcataggaaagtgccctcattttcctgacgctacgaatgccaaaccgtttgaagataatattgccacactctgatgacgtagtccctatacttctaagaaacgaaatggatcaagagtttttcatatctccccaagc

SEQ ID NO: 179343 - DNA, 557 bp, Cannabis indica
ttttttgtgacaagaatgcagccattcacatcttagagaatcccgtctaccgcgagcatactaaacacgtagaaattgagtatcactttatccaagaaaagatcaacaatggcaccatcaaaatgaatcacattgcatccaagtccaacatagtcgacatcctaacgaagcctctcttcccactcatttccacgacattgtctccaagatgaacatcaaaaacctttacatttcatcttgagggggcctattagagttaagaggctaaattagttacgttagttataggttgttattgttagttatgttcggttagttggttatgagcttaatcgactttcctccctatataaacatctatatttgtaattgtaattcatttgaataactcttcaaatcaatgaaatcatttttcactctctaaaactaatacttaccacttttaatttcattcttatttaaaaaaaaaaaaaagcaataacattgtcaacacctcctctatcttgcttcggataaatacagtatattatatatttatgtatgtaaataaaccatac
